United States Patent Application Publication US 2007/0067865 A1 - sequence listing, part 14

SEQ ID NO: 85184 - DNA, 498 bp, Glycine max
aaacatcaaaattgcattatgctctttgttaaacaacgaggcacggtaacatttacaacaagtaatgaacttcaaattacatgataaaccagcaaacgttctagtgtcaattctgttggttgttttagcccagtcccatttggtgtagatcccaactagttttgaaggctacaagctcaaccagctggaaaagaatgttggaaggcaagtacaattcaattctatatcaggttgccataaggtgtctcccaagtgccaactgtatttaagagatagagcagatgttagttggatatctaatattccatcatcttaatgagaaatgtggcctctaatgctgattccttggactgcaaataacggttttcctccactaaatctgtggtcaagttcagcaatattggccgctttgggtcgtaaactgagagatcacgaactcgtgcaacccattttgctgcttcccataccccaaatcgtgtattgaaagatgaggttact

SEQ ID NO: 85185 - DNA, 327 bp, Glycine max
aatagaaaattaactagaagtctccctaattgggaccccccttaaaaacaaaccggggggcaacccgcaaagggaaacaaacacgaagcgctacaaaggggggccccaaaacaaagggggccccccacccaagtggcccccccaaaaaaaaacaacacctaaaaagggggggcccttaaaaaccggggggggcccgcaaaaaagtgccctcccccctgcaaatccccgtaaaaaaaaaacacccccgtgtgccccccctcggggggggccgccccggcgccccacaaaaccaaaccaggccccaagagaaggcccaagaagaaacca

SEQ ID NO: 85186 - DNA, 359 bp, Glycine max
acaatctccaaaagtaaaaaatgcattgattaacaaaaaatggcgcccaacataacttgtacaattaaattaacacagctgggcgcaatatgaacctaaacgcatacttgttacaatagcccggaaacactccctgcggtgcaaaaatgctgcattttgaaaccttgctcaagttgatcattacatcaagtaacgccatagcatcttctggctgggaaaggtacgacagcagctccctcatcaaaaccaatttgggcctgtcaagttacatacgaatcttagcataccgaccccatgtcataactcggctactgatatcgcggagcaaacccgcccatgtgagacgtaggtaccttctt

SEQ ID NO: 85187 - DNA, 388 bp, Glycine max
aataaatgggattaattgttttataaaaaaaaaaattgaaaatttttttaaaaaaaaatttaaaaaatttcccgttttcaattaattttttttgaattgaaatgtgaagccctatttaggcaaatttgattgcaagggtaaagggatggggagttaatttggaaggcttgaaaggggggaaaggttttttataaaatgagtgaaggggcaaatgttgttccattgggggggagggccgtttttcccattcgccccagttggggccctttgtttctaataggccccgttttttcccctaaaataaaacgagggagggccttttcaagcccattattggttatgtggcccaccaaaatttttttaccttttttaaacacccacagggccc

SEQ ID NO: 85188 - DNA, 238 bp, Glycine max
  unsure (1)..(238): unsure at all n locations
ataatatactataaaaaataaaaaaatcccctttttaatttttataaacccaataaaaataacaaaaaaaaaaattaaattttccatttaacaaaatttaaatatattttttaaaaataaatnnnctttttaaaatcccctttccctcctttaaaaatttaaaaaaataatcaccttcccaaacctttttacttaaaaaaaatcatcaaactcacaaatttttaaagaaaaaaatatt

SEQ ID NO: 85189 - DNA, 268 bp, Glycine max
aagagttaacgtttttttaattaagcatgatggagattgtacagtgcccataaacagccaaagtgttattttgcgatagcattgattctccaaagttaactttgaatacgatacaacgcatgtttacaaatttcaggccttggaggggggcggctgggtaacatggtgggctcgctctgggaccaaaataaccccctgggggcccaagtatccttttgcgggggccctgaggcactccttgggcttttgaacaagtagcctggccctg

SEQ ID NO: 85190 - DNA, 208 bp, Glycine max
ggaccccttggtttacccggggaatgcggggcgggacccggaagggtaccaactttccctaatagggggcccatttaaacctgggggaaacactaggaaaacttggtcccgtgagaaaattgtatgcggtttgaattacaaaccaaattccgacccgaagcacaaaaggtaaaagccggggggcctaaaggggaagcctaccgaacat

SEQ ID NO: 85191 - DNA, 523 bp, Glycine max
agttaaatatatttatatttctttaaaatgaataacaagtaataattttcctactttttatatataagaaaaaaacacttgacagctgaattccagcatattgccccagcctggtgtaatggtttgcttgttgcaatagcattaccggtcccaggttcgagacatgatagacccattgctccaaccaacaacaaccacatcatcatcatcatcattcatactcacaaatgaggtattctgaagtacctctcttttttaaagaaattatttctctaccccaaagcctccagatacattacaatcagcttttgtttttggttatgaaaaaggccataaaacttgcttctcgatgaatatgaacccggtgaacgttgggagtttttttactcatttgtgaattgtgaatgtattcaaagcaaaaagctgtcccatattattttcttatatgcttgggatatgcccataacctagaaactgttcctccttccgaatcactatcactgtctgaggaagatgttactga

SEQ ID NO: 85192 - DNA, 451 bp, Glycine max
tttatttatcatctgataatttattttcaattcaatatttcttttttctttttcatttatattggggggaagcaaaattggaaggaaatattttcaggaaaatgtgttcaggaaacaactctactacactcctatagagcctatattaaccaacactgaagagaatttttcctaaaagaagaagaaagaaggtatgagaattacatttttgaaattcaagaaaattatttgccaacgatttatgatcataccacagcggctatgccactgtatcttggtcttgttctgccagtctcaggtgaaaggccctgttccatggacttcctgtggctattgttgctggcttgccgccccgattgttgctggtgaacaacacccgggtgggcatgtgaatgtgactctgactctggctgaagaagatctcgggattttggcgcttgttgctgctcat

SEQ ID NO: 85193 - DNA, 137 bp, Glycine max
ttgagttctttcaatctgggaaaattggctttgtccattttatgatcctgaaaatgattggtgcattattgccattattcttggatttttttggggttattggaaaggggaagttggattggaattttgggattcct

SEQ ID NO: 85194 - DNA, 206 bp, Glycine max
gatatttattcacgccactgtcatgttttgttaatgcatttgccatgcacctagggaggtgtatgctatggaaactggctaccacatctaaaaactccttcaagaacatatggactataatgcctgataaaatctacctataactaatgaacacaattcatattgccaccacacctatgctaattaagttgaatcattagctgaaa

SEQ ID NO: 85195 - DNA, 111 bp, Glycine max
cccacgcgtccggtcaaattgagttgatggacttttaaaattttccaatctaaaaactgagcatagtttgagttaccccttcctgaagagcaaaccgtttttttttccctt

SEQ ID NO: 85196 - DNA, 415 bp, Glycine max
cttcgcttggtttggacttttatggcatggggccaatgcttaattcttttagttaatggaagaagtaggtggttggtcctaggaccatcggcaaccacttaaaattaggcttaaccttaaccggctttccatatttaagtgggatgacctttctggttgaattggaaagtaccccacccatcctaaataaggtaattaataatttttcctgaattaacccaaaaaaggtttcaacagatcccagatagaaggtgtaaaacacaggataagggcccctaacagagagtaacttctctcaatacacaatacacaggcttctcaatcacacccaaaatacaatactgaatgcagaaactgacacaccatatgcattagagagagacatgcataactgtagaaaaagtactaaacacag

SEQ ID NO: 85197 - DNA, 262 bp, Glycine max
gtgcaagtatcatgaccctgtttcctttataacccttacgagtctaactctattcaggggattcattggaacaggaacatattcactttctgtttatcactagatgcgcttgacatgcacacctcatgacaaagttaacatctccttcgacagatagcaacagatatttagagatggacactgatcgtacaagaaccacacgtggctagaatgcaaccacaacagcagcaacgtcgatgaatgcgaaggatggtgcttgtcc

SEQ ID NO: 85198 - DNA, 273 bp, Glycine max
cccacgcgtccgcccacgcttccgctttttttactttctcgggaaaatcacagcggggcgggggaaaaactctaaaaccccaaccatctactcaccacaatggcaactatcaaggccgtcaaagctcgccagatcttcgacagccgtggaaatccaaccgtcaaagatgacattattctcatacgatggacaaccccacagtactcttcgccttagcgctgcttgaatatttgtttcagaggctggactaataagggctggactctgaaacta

SEQ ID NO: 85199 - DNA, 374 bp, Glycine max
  unsure (1)..(374): unsure at all n locations
caccttcgggctttttttaaggccgtcttattggtggttccggttaataccacccctggtgaacttgtggtgtgaaatttttaattaccccgaaattttaaccaggattttcgcccttcaggtatttttctttgcaggaaccttgattggttggaaaattaaaaccttccttccaaccggaattttgttgggactggaccattactaaacagagggaagaaaaagaactgctgcttgatgatgtggtgctagtccttcgctgaaatctgataactnctgtagttcttaatggtggagcaaggaagagagtgacagacggacaagactctctgagaatctgttcaaaggtgcgtctctgaaggtgacgaaacaaa

SEQ ID NO: 85200 - DNA, 227 bp, Glycine max
attatcacccatattataatcaatcaccatttaatttcttctcttacttaaaaaaaaatctattttaactatacaacacataccctattattcatccttttttaatttctactacttcttttccttcttatcctcatcaatctttattttctttcaatcacaaatcttcctttcacctaaaacctctctttctcattaactcttttcatatctcataatttcccttt

SEQ ID NO: 85201 - DNA, 399 bp, Glycine max
aagaaataaaccgtttttcctttctgggttttgtttaatttggtggattttcaatccttggagttttttggcggtggttaagaaccaggggtttgtttaactattaaccttgaacctttttattttttggaaagaagaatgggattttttttttttttttttgggaaaaggtttttaggggtggaattttggtccataaggtatttgatccgaggagggggtaatcacttaataaaccttgggtagtgcgtgatcacggggatcttgtaaatgatggagaggggtttttgtgctttgtgattctgagatgtgaattaatggttggtgaagtaaagaatcaaggcagagtttgcatgataaatttgacttttggatcgaggtgggtccatttttgtacac

SEQ ID NO: 85202 - DNA, 360 bp, Glycine max
ccgaagtcttgttgtgcaagtacaagtcgcgaacacaaaagcaagcagctttaaggaaggaaaggaaaaggagacttggtccaaaagttgaaagcccgaaaaatggggtgggtttgaaaggatgacaccagcgacgatgttcgacccgataactcttcgaacgatgccccacaccaaggcgtaaatctagtgcagacagagaggtcgaaactgaagtcgcagaagtgcagaaaccgaaaattctagaatgcatgaagccgcaagtgttcatcaacaagagttctgaaagatatacaataatacttaagaagtctgtcattactcattacgtccagggtgtgttgacttctggctcaaata

SEQ ID NO: 85203 - DNA, 175 bp, Glycine max
cttccgaaaaaaaaaaaaaaaaaattttaaaaaaaaaaaaaaaaaaaaaaaaaaagaagaaaaaaaaaaaaaaaataaaaaaaataaaataaaaaaaatgggccgccccttttaaagaaccaaacttaacttccccttcattccaacttttaattttttttttttgtcccctaaa

SEQ ID NO: 85204 - DNA, 142 bp, Glycine max
aaaaaaaaaaaaaaaaaaaaaaaaaaaaggctgacaaaattaaaaggagcgcagctagggtgggggtccctgcctggccttccctttcttttaaggtcacttaatttcaatagattgaccttaatttaaaaccctggccctt

SEQ ID NO: 85205 - DNA, 56 bp, Glycine max
aaaaaaaaaaaaaaaaaaaaaaaaaaaaaaaaaaaaaaaaaaaaaaaaaggggcgg

SEQ ID NO: 85206 - DNA, 203 bp, Glycine max
aatatttatgcacgctaaggtcatgtgtcgttgatgcatttgccatgcagctagggaggactatgatatggagagctgagaccacttcctgaataccctttgagaaatatggaccataatggctggaaaattctacctttaactgaggaaaaagtagcatattgcgactacacctatgcgaagtaagttgaatcattagctga

SEQ ID NO: 85207 - DNA, 262 bp, Glycine max
gcgcgagtagcatgaccctgtctcctttataacccttacaagtctatcactagttagagtattcattggaactgaaacagattcactctctgtttatctagagatgcgattgacaagcacacctaatgacaaagctaacaactccatcgacagagggcgagagagagtgagagagggacgcagatcgtagaagaaccaaacgtggctggagtgcaaccacaacagcagcaacgtcgaggaatgcggaggatggtgcatgtcc

SEQ ID NO: 85208 - DNA, 164 bp, Glycine max
cccacgcgttcgaccacgcgtacgtttttttcactttcttgggaaaatcacagcgacgcttaggaaaaacactaaactgtgaaaaaaccactgctatcaatggcaactttcaaggtcttttaagctttccagatcttagacagctgttgaaatccaaccgttta

SEQ ID NO: 85209 - DNA, 290 bp, Glycine max
cccacgcgtacgaatgtgagggtaccaaatcgcgggccgaggaacagaagaacttccttaacaggaggggctgcactctctcactcacataaggctggagccataggtctgctctagtgctatgcacatcctggatctatttcgccggcatgggcagagtatttgctcttacaaccgcacaggaaccctgtctacgttggcctggtttacacggagacgcttaatgtaacatctacgaatatatattttaatagattaaagcacatcgttaataaacaagcgtgacgagt

SEQ ID NO: 85210 - DNA, 241 bp, Glycine max
gacacacgcaaggcaaagcgaaaggcgcggaaacggcgacacccaaggggaaagacgagagggacaacgaccgaaaaagaaccacaccaagccacgaaaggagagagaaacaagagaaggcgcgaaagaaggcgagggacgaaaacgaggaccagagcgacaggggcgggagaagagaaaaaaaaaggaaaagagcgaaaccagaggggaagaaacaggcaagagaaaaaacacacgagaa

SEQ ID NO: 85211 - DNA, 340 bp, Glycine max
cccacgcgtgcgggcgataacgtcgtcttgattccaaggaactagcaaatgcttagaaaaagagaagaaagcgacattatactgttgagcaagagctcgaacgtatatgggaaaagatgagacgtcatgagatagctaaaggggacagagcataactagtgactgaagctttgcaaacgatgaaggggacgattccagagattgcgggctctcacatctcatctcggatccttgagacatgtgccatgcattgatcacaagctgagagagatgccgtatatgaagagcttcagctgcatataataactctatgatatagggcatatgctgttcacttact

SEQ ID NO: 85212 - DNA, 329 bp, Glycine max
caacaccaaatttggatggtggaccttttttttcttcatccttttttttattttggggtttttttttttttttttttttttccatttttttgtttctttttttttttatttattttttttttttattttttttttttttttttttatttttttttttttttttttttttttttttttttttttttttttcttttttttcttttttttattatttttcttttttttttttttccttttttcttcttattttttttttatcttttttttttttttttttctttttctttttttgtttgtttttcctttttattttataagccttttttttt

SEQ ID NO: 85213 - DNA, 297 bp, Glycine max
gccaggcgacacactattcgcgattatatgagatcgagggatcctgttattatggggatgatgataagaacagacctttggttctgaaaaacaggcgtacaagatggcgtgtacaggaacaatgtcggagccttaattatgctggacgaataacaggtgcgtgagatcaaaacttgcacttgattgctgccgcccaaccagctgctggggcacctacactcatcttaaccagctccaccggagcacgataagatcattgtgttagtctgcaaatgtttgaaggacatgtttaccatg

SEQ ID NO: 85214 - DNA, 154 bp, Glycine max
gaggaattcaacggactcaacgttggattcgcgctcgactaggttgctgtttatttctgtggggtttttttttttgtttgtcttcttttttgtcttttattttttttttttttttttttttttttttttttttttttttttctttttttttttt

SEQ ID NO: 85215 - DNA, 289 bp, Glycine max
caccggcttcggaactaccggttcggcaccaccggccactccttttacgacgacaacgccttcgccgacgggaagatctacaccggcggcctcgaattctacggtggggacgggcccggcgggaacacccgagagggcacgcgtttttttgcccacacccgggtgaagctcaaacttcaaaagattgcgttccggacccaaaggacccacggggaccgggaccggaaaccacactctcggggagggaaccagccaggctttattaaaaaatatatttatatttaaggcc

SEQ ID NO: 85216 - DNA, 266 bp, Glycine max
aaaaaaaaaaaaaaaaaaaaaaaaaaaggggcgacctttttaaagggtgcgccgcttgggtcggcgggactgcctgacgtacgctttcatgtagggtcattgaatttcaataaggggcccttaatttaatagcgtggggactggaaaaccccggcgttacccaaaataatctgcttttaccaaatttactttttttgcagctgatttaattttgagaaggccggatacaatcgccttggccacaaccggcccaccttaaaagcaaa

SEQ ID NO: 85217 - DNA, 520 bp, Glycine max
  unsure (1)..(520): unsure at all n locations
taaaaacaactcttcgcctaataattaattaaatttagctaaattaaattacaaaatgcgtatactccgctcttgcaagatgaagtatcaaatttttccaagtgatgatgatatgaggcatttaaccattcattcatagagtgtttttgcagattgtactctactttttttgctttcattcttcgacagtttctcaattgacttctcattagcggataaagcctttgctattgctttcatctttcggacattttttgatctcttcataggccttcctttctgcttcatcttcctgttttacaaaatgtcaagttaaaaggtagcagtttagaacaagtagatattaaaggagcagacacttctatataagaaagcaaatagaatgcagtcctaatggttagagagaattaatcttgcatgtaaataaattcactctcgaggtataaaactgttttatcgagttaagatctctaccatacttgaggacatangtaacaatttacacatgacccacatcaaa

SEQ ID NO: 85218 - DNA, 353 bp, Glycine max
  unsure (1)..(353): unsure at all n locations
ttttttttttttttttttttttttttttttttttttttttgtttttttttttttttttttttttttttttttttttttttttttttttttttttttttttttttttttttttttntttnnaaaaaaaaaaaaaaaaaaaattttttatttaaaaaaaaaaatttaaaaaaaaaatttttttttaaaaaaaaaaaaaaaaaaaattcccccaccacaactttaaaaaaaaaaaaaaacccccttttgntaaattttccccaaaaaccccccccaaaaaaaaaaaaaaanttttnnggaaaaaaaaaattttcaccaaaaaaatatctcccccaaaaaaaaaaattttttttctc

SEQ ID NO: 85219 - DNA, 439 bp, Glycine max
gacgaatgaaatcaattattgattcagggcaacaaatctatgggtggcattgatacaaacatccaacactaccaaagagtgcttccacgaatacctaattacagctaccaattaatgatcacaacacacgctcattactaatcatgcgtctgtatgctatccaacataagtttgccactatgacctgtgcatcaaattcatcatgtaatgataaggcctgtcctatataactggaagcacgagccttagatgtagaggaactcggtgacgcataaatatctctggggggctgtaagagcgactcaataaagataggcataggaggactcatatgctcaagtgcattgctactgagtagcagtactacttgagacatagttgggctgatcaccagcgacgcttgagtacacaacagcgctagatctatgatatgcttcac

SEQ ID NO: 85220 - DNA, 349 bp, Glycine max
ccttgggggggattaaaaataaataaaaatgctttagggaattaatggtcctttttttcccgggcccgtaaacttaataaccggggggggaattttccctttttcccaaccaatttcttttcttttaatggggggaattaacattacttgaacatttttttcaattaaaaaattaaattgaaaaaaccggcctttctttccaggtttggggttttcctttccaacaacctttttattactaaaattatttttttttttagttagctcctcatcactggggttttttttttgggccgcttcttttttttcaggtttagcattcttttaacaatactttttaacccttttt

SEQ ID NO: 85221 - DNA, 176 bp, Glycine max
gagatcaacatctcttaatacacgggatacaactcccgacaaccctacaaatacgcgcaattgatgcctaaaaacaaaatgtttctaatattggcgcttgtttgtccgtctagcgagactacttgcctagcactatcactaactaaatgtcctacataaaccgaaccgggtgcaac

SEQ ID NO: 85222 - DNA, 434 bp, Glycine max
ccccccgattgcggggaaaaaaaaggaggggggtttttttttatccatttccccagacaaatccaacatttttttttgcaatcaaaaaatttttttttgactaatccattgggggggatatcccttttttttttcccaaacacatttttttgggccgaaccaaccaggggccaacttggggtaatggcaatttaaactagcacccagatggcccattgtttttgtcgaaataactggcctaggttttttttgaaaggggttattacatgcactgttgcataatgaacacaagtttgagcaatgccaggaaaacctcgaatttttgcattagtctcaagctcattttgtttaaccacttttttttgtggaatcatttttagaccggcattatctggatccggtattacctgtttttcttccacgttgtcagtttt

SEQ ID NO: 85223 - DNA, 275 bp, Glycine max
cgggacaccaaattttttttttagaaattttggggggtttaaaatgattattttttggggggcggaggcaaaaaatggagaacaagggcccccgatagcttattataaatgacgggaattggatttttttttaacaaaaaaaaaaccctatttgaagctaaattgtccattgaatctctccacaaaagaaacggtcccttggacacacgaaaaagggttttttttaagtggggagagcagggtttattgctcaacaacccgaacggggcatgttc

SEQ ID NO: 85224 - DNA, 376 bp, Glycine max
tttttttttttttttttttttttttttttatttttttttttttttttttttttataaaaaaaaaatataataattaaataaaaaaaaaaaaaaaaaaaaaaattttttaaacattaaaactcaaatataatttaaacacaaaaaaaccacatataaaaaaaaaaaaaaaatttttttaaattcatcatttttattagtaaatccaatttgcacagcacaaatattgtgaaaaaaaaatgaaaagggaaccaatcatgttaaaatccattaatttcctggagattaaatatctaaaaacaaaatactgaataaaaaatttatagccaaaaaataggttttcaaaaaaaaaaaattttttaaaaaaagcccttcttcc

SEQ ID NO: 85225 - DNA, 205 bp, Glycine max
gtttaaccttttttttttttgtctttttgtttttttttttgttttttttttttgggggcgaatacaaaactgatggcgctggatttttccgctttagcccagtagcaagattccaacccaaagtccttttttacatatggcaaaaatttgtgttgaaagggaaacaattggttgtcttttacccaaatgaattttcaaccgcgcc

SEQ ID NO: 85226 - DNA, 395 bp, Glycine max
aaacgagaacagagtttattcatttgaggatcaaaattttttttgggctacaaaagttaaattttagattggcattttaccttttttcagggatttttaaaactacattggggaagggcaacatacaacagcttgaaggttaaagacttgtttttaaacaaaagggtcattgtcgcctgttttaacatattagctaactttaggggagatttgtagcttggtcctgatccccatttccaaagttgttgccctggttgggaaaaaaattataccttgcagtggtcatgagaggggggcaatgattattaattggagcagggtacatataagggggtcggtcatacacaaactgtggatacctgtcagcaactttagcataggaagctttgtcggaa

SEQ ID NO: 85227 - DNA, 368 bp, Glycine max
catccaaaacgaatataagctatacaaaccaataacctcgttaaatccacattaatcaaaattctaaaattttatgtctaattaacttttctcttttctaattggaccgtaacaatggtaaataattcttagttgtttccactgctgctcccggtagcatcaccaccatttgacattcttggatcttcatctttaattgtttcttccaatttgatggtttgaagattagttgtaaggttattgtatcttgatccaatgggagatgttgaacctcgctgagtagaggacaaccatcttttccactcgttaagtctccttagcttgtcaccttgcactttcacgatagcagaagtcctgatcgaatcgag

SEQ ID NO: 85228 - DNA, 463 bp, Glycine max
gacaaaaataaatagaatatactaagaataatgaaagaatgagaaaatagttgtctttataagtccaaaaaagtaaatacaagagaaatgggattgaattgtattttgtaaataattttcacaaatctttctttcaatcgtgttatgggcaagacattcagtttgccactttgcccagcttcaatcaagtcacttcatgcccaagcaccgttccaactttcgatcaaacatcaaaaatcacaaacttgttaacatctaaaccatcaatgagtacaaagtcagtatctgtccgttgaacgcctccttgcagtaaaatattgtacgatccaatgtcaaaatatgtctaccatcatgttcctctctgctttattctctcaatcttttgctatctcttcccttgccatgtattgatgcaatttcttccctttttccagaagaagtatagagttcattgcatttggag

SEQ ID NO: 85229 - DNA, 89 bp, Glycine max
  unsure (1)..(89): unsure at all n locations
gtcaaantttttttccacacaaaattaatcagataaaggggggtgtttttgttgtntttaactgctccatcccacagatatatctgagc

SEQ ID NO: 85230 - DNA, 303 bp, Glycine max
gactcttggttttttttttttattttgtatttgtacccgggggcgtacctgcgaaccccagagggggacccggaaaccttggacctttcactttcataggtgccgtctgtgcgaaaaggtgataaggtcaaaacttgacacaagatacgaactggattctttcattggaaaaaccgtagtccctaacgaggggacaaagccccaattcttgcgttcctaaaaaaaaacccttttcaacttaaaaaccggggggggcccccccaaattaaaattaaaaaaccggcccgtgggaggggccaaaaa

SEQ ID NO: 85231 - DNA, 523 bp, Glycine max
aaattaaacccactcacatcaatatttttcctttttgaatgtgtatataacaacgaagtatgaggttcataatcaccccttaatccttttctttctctcccaaaaggccataataccaaatagagcaaggaagcctaaaggatttatgctattagtaaatatgtagatatgttaattaacattttataggacgtgtcccgattcaagcttggtcatcccatttccatcttcgccctacctcttcaagaacagctgcccgagcttggcttctccttgcctcgtcctctacccaagacctaagaatctgaagagcttctttttcagcttccagcgtggatttggtgttgagcaattcttcatgctttaattctaaatctccaagcaacttttgaacaacatgcctttcatctacatatgtgactctctccaatgcaactttttccgatatctcatcaacttctttctttaagttaagcagaagctgcttctgacaatccattgctgccttttcttttaaatactc

SEQ ID NO: 85232 - DNA, 298 bp, Glycine max
  unsure (1)..(298): unsure at all n locations
ttatgatttttttttttnnaanaactcattacattaatgggggttttttttatgttttacacaaaaataaaccttttttttaatttctctatagtaactcgatttataacagttttttaaaatttttttggtgccaaaccccttttaaagggaaaaaaacccccccgaaaaaccggcccttaatgacccaatcccaacccaaactcccaaagaaacccaacccccccctttctcccggaaaccaatttaaacatcccccctcccacccaaagtggttggattgtacccccagggccca

SEQ ID NO: 85233 - DNA, 387 bp, Glycine max
gggaaaaaaatgaaactgggtttaatcaattttcaaaacccttggaattgggagacctttccatcggcccgggggtaggggggggcattttccgggcttttaaaacttcctaaggcaaataagggggcgggggaaccccccccaaacccgaataaggggtttttttttttgaaggaaaaaacagggcttttggggatcaattttccgggggaaaaaaatttcattagggggggaatttttggccgaaaagcatagcgccccattccgggggggaaatctcattggggttttgggggttggaataacccggggcggggttgggcccccacaaaaccttgtgcggagacccccctttgtttttttcccccggctttggggcccttttgc

SEQ ID NO: 85234 - DNA, 398 bp, Glycine max
ggggaccccaaaattaattgattttaacgttttttttttgaaataaaaagcaaaatggtttatatatacatttaaagtaacattgtttgccaaaagagaaaaaaaacaaacctaataaaattgtttatttgatagggaatcgccaaaatattttaagattttggaaggggggaaaacttttacgctggaaaagttttaaaaaggaaggtcacgctttaaatgggtttttgggggcttcaaaacatgattaaattcctttttttgttcccgcttggatcgccactgtgcattcattatttgaaaggttccaaaaaaaagggtatcaaatggcttttttttctttttaaggaatttgagaaaattaatttccgaccaaaaagatggaacccctttttaaa

SEQ ID NO: 85235 - DNA, 382 bp, Glycine max
gggcccgtggtccgtcgcttttttttttttttttataacaaaaccctggggggaaccctgggattaacccaaaaattacggcccgaaacccgggggcaaacaaattttctaaatagggggggggaaaaaaagtgggggaaatcaaggtaaaactgtttaccgggggaaaaatttaatcctataaaattgcccaaaaaaaaacgagccgaaattaaaaaagtggacgccggggtgccctaatgggggacccaacccaaatttttggggggggctaaaatgccccttttcaaaaggaaaaacctgtggggccaatattataaaaaaacaggccaacccccgggaaaaggggtttaaggttttcacccccatggtgttttttttt

SEQ ID NO: 85236 - DNA, 512 bp, Glycine max
tttttgtttagataaaaaaaaaaatcaattttatatctttaatcgatgcacttaacaactgacttttgaaactttttctaaataccagtggctatctgttctttacacaggtgattgatgtacccaagacgtaaggaacttagtaacagactcaaaaaaaaaaaaaaggaataaacagagaacacttttcccctaccaatcacttactgagccacaaaggagcacatataagtaactagcaataaacagacatgcatggtcaacgaaaggccaagaaattaaggaacaagatcatgaagctaagtcattgacaaggccatgtatctttatgtccaatacttcggaacaaatctgccccatggtgtgataaaaagacaagagatcagacaactgttccaccgtcattttccccatcagatttctagccattttttctctttcctcatttagcttcagtctctctatgtaggaccctgcattcctaaccgttgcacccatttgttttaatctat

SEQ ID NO: 85237 - DNA, 443 bp, Glycine max
aaaaaaaaaactttttttttttaaggggcaagggtttttcccaattagggaagggttaaaccgaaaaaaaaaaccctttttcccctttacaaggttcttcttctggctaacttttaagctttgggtttaaacccccctttggtgggtaaattccccaccaaatccctttggtgaaggggaccccaagggggggaaaaatttcttttttttttttcaaaaccaaaaacaaattttttttcttttttttctttgggccccaactcccccataggtgccttgatttgaacctgccccaattccaaccgttttgaatacccttccaaccccaaaatgggggggttcccccatttttaaacccccatttcccccccgccaaaacttaattttataaaagggtttgggttaaagttaaaaaaaaacctttttttttaaaacggtttttt

SEQ ID NO: 85238 - DNA, 346 bp, Glycine max
attagggggcaaaaaaaaaaaaaaaaaattaaaagaaaaaaaaaaaaaaaaaaatttttttttttgaaaaaaaaggaagggaaaaaaaaaaaaaatctttttaacaaaaaaaaatggtgacaaaaaaaaaacccctccccaaaaaaaaaaaagggggggacccccgagggtggtaaaaaaaaaaaaaaataaccaaggggcgggggggggttacaaaaaaaaaaggggtttttaaaaaaggggttaaaaaaaaaaccccaagaggggggaactttgcgcggcgtttttttattagacgggaaaaaaaaaaaaatgggggggggtcttttcccccaagggggaaaaa

SEQ ID NO: 85239 - DNA, 369 bp, Glycine max
  unsure (1)..(369): unsure at all n locations
tttagtaccaaaaatacttaaaaaaaactatatcatagtttcacccttgaaaaaagaaataagtataacaagtcttttttttttatgctaagaataaaaaaaaaaaaaaaaaaaaaaaaaaaaaaaaaaaaaaaaaaaaaaaaaaaaaaaaaaaaaaaaaaaaaaaannnnaaaaaaaaaaaaanncccaaaaannnnaaccannnnnncccnnanaaaaaccccccaaaaacccggcaaaaaaaaaaccacaacttancccgggaaaaaaaaaagncccccccaaaanccccccccccaccccaaccaaaaaaaaaaagggaaaagcccggggggcccaaagggggggcaaacccacggaaaaggggg

SEQ ID NO: 85240 - DNA, 534 bp, Glycine max
gttgtaaattcgtagtacacctatcatttctcaacaaataaattacactagttaaacgtgcacttcacaaaatcgtacgacaacattgatataaatccttaatccatcatatgatcgaatatattaaaagatttgccgcgtagcttttagattgcctcttgttcctgtagtttcaagctatagtctgcccacataaaatgaaagcttgaattaggctttgagcagcgtgagtttgatctggtgctccagacacaatcaccagaccctcggtagctccaggttttggatcatgaaccaccacgtttgcaccagacgtctgtcgaatctgagttaggttgctattgttctccccatacacgtgagttaaatacatatgaggaatggtgatctcaatagtcaagttatttggattctgcaatgggtttccattctctccaaggttctcatttcttgaggccaaactagaagtatcagctgttcctccggaatttcctctgttaactgccaggggattccatgatcttggagaatttg

SEQ ID NO: 85241 - DNA, 166 bp, Glycine max
aaaaggagaattttattggttacaatggggttttccaaaaggacaaaccccgatcatttaaaatggccgggcctgacatgacctttacagaaataaacccttaaaaaaacgggtttccctaaagaaacttaagacccggggaaccctttttatgccaggggccgac

SEQ ID NO: 85242 - DNA, 499 bp, Glycine max
ttaattactaccttcgtttttatctgttggaatgagattgtttcgcagaaactatgaaatgcaataaattttcttaaatttaataaaatagttgtgaaatttcttattttatcttttcactcttcactccacactaaatgtgtttaaattaattaaagataaaaaataaataagaatataattagtaagagtgtaattaatatgatcttgaactttgcaaacaataaataaattctccaaaaattcaacaattaaaatgtaacggagggagtattactaaaactataattttttaggttttcgtgagaattccagttggtaattgtcagtggagttgggcttctgttttttttttgttttttttattttaacgttcgagcagaattattgtcggtgacaacaacatattaaggtaatgagtgcggtggaccatgattaggagcagtattattattgcgtaagagaatagatgtgatcaatttttgatcattattcttta

SEQ ID NO: 85243 - DNA, 370 bp, Glycine max
attcaaaaaataaattaatgacaattatttaaaacacatggtttaaggcaaaacaaaatgggggggcaaaacataattgatggagtaaaactcgatgtaccttctttcaagggcaggagtgatccaaatgcctaccttgactgggaaatgaaaattgagcattttttttcctgcaatgattattctgaaaagtaaaaggtgaagttagccccaacttaattttcaaactattcccttgtttggtggaataaaaatcaaaaagagatttttagagaggattggtgggagataggtacatggactgaaatgagaagggttattccaaataagttttttccaacttgcttcaacagaaccatgcgataaaaac

SEQ ID NO: 85244 - DNA, 230 bp, Glycine max
  unsure (1)..(230): unsure at all n locations
aggggtttttttttaaaanaaaaaaanggacctttcctggacgnanacatttttaacggagagaagggggaacccagggcggggccctggggtcttcccggttttttgggggaggttcctttggggtaacaagtttttatttagtaggggtgtgataaatggggggtgaaacctggggcacattattcccgggggaaaaaactttaactgtaaaaatttcaccccccaag

SEQ ID NO: 85245 - DNA, 250 bp, Glycine max
  unsure (1)..(250): unsure at all n locations
attagaatggttttttttttttttttttttttttttttttttttaaaattaaanaaaaaatttttttttaattaattaatttttttttttacaaaatttaattgatttggtttaaaaaagggaggaggcacataaaaaataaattatttgnncctgagggattttttttaatttctacagggggaagcccaaaaaaaaaatgggctattgagacaaaaaaaaaaagtatttagggggggaaaaaaaatag

SEQ ID NO: 85246 - DNA, 384 bp, Glycine max
aaaaaaaagaatcctgccccccattttttggtttagatggggaaaaaaaactttcaagggttaattggtaacctaacccaaatggggggttccattaaaagttgccaaaagcgggggaaagcgtgaaaaagtgaaaccctttaggggagttaaagttcccccctttgttgttgttttgtttgcccttgggggtttttatttcccggggggttttgaggctttccataactacatcctttttataaaaacaaaaattgtttatttttgggggggcatcggggccgaaaaaaacgttttccatacctttggctaacccaaagggggaaatatgaacccttttgctatggggacctaaatcactaaaacaactttcttttttttttt

SEQ ID NO: 85247 - DNA, 79 bp, Glycine max
ttttttttttttttttttttttttttttttttttttttttttttttttttttttttttttttttttttttttttttttt

SEQ ID NO: 85248 - DNA, 131 bp, Glycine max
caggataggaatttccagctagacccacgcctacttctagatctttaacttatccttttatattatccagagcttaggctctcatgcatagcgacctcttacctcttctatctagtcacctatattcaatt

SEQ ID NO: 85249 - DNA, 251 bp, Glycine max
cccacgcgtccgaaaaaaaaaaaataaaaatataaaaaaaaacagggaaaggtaaataataagaaacaaaaaaaaaaaaataaaagaagggtgcctttcttcctagtgtccagcttttacacactggctggcgctgaaactcctttcttttcgggaccctttatttgttggcacaggccttttttatcagcttcctgacttgcttagccatgccgattctaaaatctttcccttggtgaaaaatccccttt

SEQ ID NO: 85250 - DNA, 296 bp, Glycine max
cctgagtatgcacttcatggtaaattattaaaaaaggctgatacatacagatgtggaattgtagagctcgaaatcataagtggacaaaagagtactgatgtgagagttgatgaaagagtgaggaagagtagattcttcgacatgcatggagagggcatgagagaggcatgcacttggagatggtggtctacaccctgaatgataactatgatgcatattatgtgaagaatatcatagaaaatgcttggttgtgtactcaaacgttggatgcaatcagaccacctgtgtctgaagta

SEQ ID NO: 85251 - DNA, 310 bp, Glycine max
cccacgcgtccgatcaggcgttcgggcggtatttatgggcaaggcgaataaaccgatttgcaggagggaggtcatcgctgataaaatgctctgagaggatatttataacatgaactccaacacagttatcacaggtgatgattattctgtagacaagctatgtgacttgtataacagctagtatacacgattgaatactatacaggagtgctaacaagagaaacaaatttgatctgtttgaatgcaagtatatgacctgggagaagactatagagactgaagatgtacatgggaaggctatgacttactt

SEQ ID NO: 85252 - DNA, 313 bp, Glycine max
cccacgcgtccgcgttccgcgactgaacccagactgctttgctgtggtgcgaatgcaaccggcagatacgcttattgggcagctacatactcggaagagaacgcactctttctggatatactacacgaagctcctgttttctattatataaaagccgcgagggacataaggagcgaacactactgtatactactggttatactactatggccattggagctcactggatatttaaaccagttcaaggactcatgtataccgtgctatgtagttatgatattctgcttttgctgtatacaagaatctatcaaca

SEQ ID NO: 85253 - DNA, 279 bp, Glycine max
gcaaggtgattcaactatacccaattaacttaccatggaaatggtttccctagttgccttactttctctaatcatccctggtttttcttctaacattcaagctattattttcccaaagaagaaaccacaaaacccttccaccagtgccacctccttttccatatattggaaacctaaaacctttgaaaaccccctctaacggttctttaaccccgccttaaaaacacaacgggacacattttctctctgtgtttggtctcgcctctccgccgtcgtctc

SEQ ID NO: 85254 - DNA, 299 bp, Glycine max
aaaaatacctggacgcgtataatatatcatatggtgtatgagtggctctatatctcatattcttttatatctacaaaatacacacatatctctcataaacacaccccaaatctcctctctaaatttttgggagggggaacgtcttctttacatcaagtctgtgacaacagggaattttttttctgcttactccggaggaagaatcctagttgcaaattgcacagatgcttctggttgggaaacatttatattgtggaggataaacgaggatactttcagattgagggtgtttaacaaac

SEQ ID NO: 85255 - DNA, 191 bp, Glycine max
gtcgagctccatctgctccatctgctccccatgatgggtgtgctgtcgaaccaatcgaccaacaagagagatataaaggaccctgagcatccatattccttggaagagcttaaggtgattactgaggaagcagttgaagttgatgatcagcgtaactatgtgagggttacatttactccaacagtggaaca

SEQ ID NO: 85256 - DNA, 291 bp, Glycine max
aaaaaaaaaaaaaaaaaaaaaaaaaaaaagaaaaaaaaggggaagaggaaaaaaattaaaagggcgtacgttcataaattttggcggcttcttttttgtgtgtctcgggctttattacttgttctttggtgtgcattgtttttttttggttgaccgtggttttactttgttggctcgggttgtagcatttttgttttttggctagctggtgtttttgcgaattggcttttatcgatctgctttgctattttttgggctggctgaatggcgaatgggacgctccttgtcgcc

SEQ ID NO: 85257 - DNA, 303 bp, Glycine max
tcatgctttgggaattgtggcgggaatgggtgcaggtgtgattttacgattcatgaggccaatgtggagcgctgtgtagaccccacacgataaaaacgacgctcaaaagttcgacgtttctggtgggagcaagtcaacgctctccgaggctgacaccgaggacaacaacgttgatgacacccaaactgataaatatgcagatgtagaaaagcctaaacatgttgtcataccggtttgtgtggattctaccgaagaagaaacgttgtcagtctcaaagtcattgaaaataatagaagatgatgt

SEQ ID NO: 85258 - DNA, 52 bp, Glycine max
aaaaaaaaaaaaaaaaaaaaaaaaaaaaaaaaaaaaaaaaaaaaaaaaaaaa

SEQ ID NO: 85259 - DNA, 224 bp, Glycine max
cccacgcgttcgaaaaaataaaaaaaaaaaaaaaaaaaaaaaaaagaaaggggaaaaaaaaataaaaaaaaaaaaaaaaaaaaaaaaaaaaataaaaaaaaaaaaaaaaaaaaataaaaaaggggcgcccttatttaaaggatccaagttttcttacccttgtttactaactaaaacttttttttttgctccttaaaattctaattaactgtccgtttttttaa

SEQ ID NO: 85260 - DNA, 306 bp, Glycine max
cccacgcgtccgggagcaccagcagtagcatggcagtcctgattcagaagaatgccttgatggaaacaccctagggccgaaggatatattatctcaaattgaaagtgaatttttgagggaatttgagcatgctgaagaacttgccaagaccattgagcccggtatggcttcctttattttaatttatgagctgaatggctaattaagttgcttcttttttttttaaaatatcttctgcactgatgctcgtaagatagagttttatatgtctaaactttttaggttttatgacctgatgtggtatca

SEQ ID NO: 85261 - DNA, 283 bp, Glycine max
cccacgcgtccgcccacgcgtccgactctgaagtaaggttttttctttttcttttttcttatttttcatattacgttgggaactcctcaacagaagcctggttctttggggagtgaaagcagctttgcgctagtgacaggaaacacaactatggattcagcagagaagaggctcaatgagcttggttacaagcaagaactgagaagagaaatgacgactggttctctgtacttttgggctgcccatttagctggtccaaaatggggaccattttcttcatggt

SEQ ID NO: 85262 - DNA, 268 bp, Glycine max
cccacgcgttcgaaaaaatatataataaaaaaaaaaaaaaaaaaggataaagaaaaaaaaaaaaaaaaaaaaaaaaacaaaggacaaaaaatatataaataataaaattgaaaataaattgggtgggccgttttgagggttctatatttacttcctcgttttttcaaccttgttctttttttttttcttctcattttttaaatccattggttttcgtttttcatctctttgtttggaaaaacctttttgttacctatttttattgttt

SEQ ID NO: 85263 - DNA, 307 bp, Glycine max
gtgttactttaaataaactcatgtgcatgggatgcactgaaactctatcaggaaaagtttaacaatttgttttatgatttatgactttatcacgagtgtataacatagtgaagcagtggatgatcagtttctaccgactattggaatactatttgtttatgatacttggaagagtgtaattttgatccttgttcagtatgacacataaaacatcaatgcactatgtctttgtgcataaatactaatcaaactctgtatgctgtgtgagctatcatgacaaaaaaaggttaatctaatagttaaccaa

SEQ ID NO: 85264 - DNA, 308 bp, Glycine max
cacacaccttcaatcagatctgtagtggtaccctttatcgtgccgtttgtgaagacctatgaaatgagctccctattgaccgcccggctgtccacatggcctttcacatatactatgatcattatcacgggcataagcacgatgtgaacacccttgaaaacactcgttttcatgattgttttaaggattgtaaagaggatagaaaaattgatatctgtcatcataactgtcaccataaatgggtgcagagattggcgcaactggcctttccacctgactgtgcaactgatgggtttaatgacccatat

SEQ ID NO: 85265 - DNA, 306 bp, Glycine max
cttacttattctttttttttttttttttttttttttttttttttttttttattggttttgtgtgttttttttttttttgacgttaaaataaggaaaaaaataatcttattgaatgaaaaaagggtggaaaaaagagcagaattgtaatccaggggttcagaaaaaaaaaaaaaaaaaggagacggaaagacaagaatagtaggaaagcgggggaaacggggcaaggaaggggagaacctggtgataggggaaaaaaaagaagagctagggcggaacaatgacaaaggcgggggggaaaaacagcaa

SEQ ID NO: 85266 - DNA, 125 bp, Glycine max
aaaaaaaaaaaaaaaaaaaaaaaaaaaagaaaaaaaaaagggaaaagtggcaaggctgatctctcggttcctaacgtttccgtggctttcctataggggcacctaaattcaatacagtgaccgaa

SEQ ID NO: 85267 - DNA, 315 bp, Glycine max
gcgacatcatattcgtactgtttagtggatcgccactcagcaagagcggggacgctcgagttcaactcacctcaacccggtgactcagtcgttgcaccgttgttgaagaatcataatgcgaacactttatactacctggagctcaccggagttagcgtcagcggagaaatctggaccgtcccgtcggagacttttgacgttgattaatcctgcgcaccatgtgtgattgcggattctggaaccttgatgacttgatagcggactcacgcctacaactcaccgcgcgacgctcttaagaggaagacttagatcctg

SEQ ID NO: 85268 - DNA, 214 bp, Glycine max
cccacgcgtccgtccacgcgtccgttcaaaaaaaaaaaagagaaaagaaaattaaaaaaaaaaaaaaataaaaaaaaaaaaaattaaataaaaaaaaagttttaaggtttttctattttaatagattaaattttattgggtgcccttttttaggttttaaattttgtttaactgggaatacaaccgttttacttttttttagtttccctaaatt

SEQ ID NO: 85269 - DNA, 251 bp, Glycine max
cccacgcgtccgttttaatgtttagtggatcagagggtagggtaaatagtaataagctagaattaaactaactttaaagcaggagactatgtaattgcatccgctgttgaataataagatggtgaacactttatacttcgtggagctcaccggtgttagcgttggcggggaaatcgtgaccgttccggcggagacttttgacgttgatcaatcgggcgccggtggtgtcattgtggattctggaaccgcga

SEQ ID NO: 85270 - DNA, 359 bp, Glycine max
gggggacccgggggttaaaccgggaattcggaaccggaaccggaaggggttccaatttttctaatagggagtaaatttaaagctgggcaaaaaaaaggtctttcctggttcctggggaaaatggtttacccttccaaattccaaaaaaaatacaagccggaaaaataaagggggaggcggggggggcctaaaggggggccaaactcccgttaatgggggggggcccactgccccttttcaaaaccggaaaccgggggggcaaaaatgaataaagaaccgcccaacgcggggggggaggcggtttgcggtttgggccccattttttttttttttttaacagggaaacggggaaaagtttt

SEQ ID NO: 85271 - DNA, 467 bp, Glycine max
tttttaacacttcttttttttttttttttccttttttttttatcgggggttctattcaaggtattttattttttcttcacacaaccacacatgaaatttacaattacattccacttctttaaaaaattactctaccttggatttttggaaggaatctttccactccctcactttggaactttcaacaatctttccaaactgaactttttcagcaaaaaaaaaatcaccctcaatgattggaacaacgtcgcatccctacaagtcaaacattgaattactgaatacgggaaagaaatctctatcttctacaagggcacaaaaactaaccccgagctttgcattcctttaaataacatgcaccggttggcaaaatttaaaaaaaacaatccccttatttacatcgcttaaaaacaagcaaaaaaccgatttaattttacaccccttttctttacaacccaatatcttct

SEQ ID NO: 85272 - DNA, 493 bp, Glycine max
attgggggttttttttttaaaaaattttttttattttattaaaaattttaatattataattttttttttaacttaatggtttttaaattaaacttcaatttttattttaaaattaaaattaaaaaaaacattgcttatttctacttaataaaaaaaaacatttaaaagtaaaaaattttaaaataaaaaattatcttaaattcgaacttgtgaattttaaaaaaaaatttctttaaatagtttgtaaacaataaaaataaaaaattttattattttattttaaaaaaaaagttcaagtaaaaaattttattctttttattaaaaaaattaagatggttataactttttttaccatttaatgtgagaaaaaatttaacaatttttttttaatataaattttaataagctaaaaatttattttatattttaggaaaaaatattaatttttgaaaaaatttttttcttttaatatttttttgaaaaaattttaaaa

SEQ ID NO: 85273 - DNA, 508 bp, Glycine max
  unsure (1)..(508): unsure at all n locations
aaaaaaaggccgcctttccttaattttcccctcccccccccccttaaatcccaaaaaaacccaaccccccccccttttccccccttttcccccccacaccacccccctaattcccccccccccacctaaaaacccccccccctataacccccccccccccctattttttttctcaaaccccccccccccccatccccccttattcccccccccccaaaaacctcttcttcaaaaaaaaaatcacaaaaaaagttttttcccccccccccaacccccaccccttttttttaaaccccaatatttaaaattctccccccccacccccccccccccttttttccccccccaaatctttaaaaacaccttttaaaaaaaaatcctccccccccccccccccccccatattctcccgttcccaaaatttttttcttctcccccccccccccccccccntgacaaccattcttttttcccctcaacacccccccccccataataatttctcccc

SEQ ID NO: 85274 - DNA, 487 bp, Glycine max
tttgataaatacttgcacaatgtattcaataataataataattatggcatgatacaggtaaccacttaacagaatggctttcacttacttgactcgatcatttaacaaaggaaataatcaatctgtaaataataactttttatcatccaggtggggttggacacaattacattattattggtacaatagaaaaatcacttgcttaccgttttcatgcaccttctcctcagatgctactgctgaagcttttcttcttagaaggtcatctaccccttgctaggcctggaataaatatcctaattgcgtatttcgggtgatccatcctcttctttttcattttccttttccttctttccaaggcttactaacccaaaatagttgcatctgtgtgcaattttttgtttgtgtaatgtcaaaaaatattttgctcaaaaggggaacaattttacactaatccagggcagctttgcttctgcggccggatatt

SEQ ID NO: 85275 - DNA, 390 bp, Glycine max
aaaaatatgggtttttttttttttttttttttttaattttttttattttaaaaaatatatatcatattttatttataaaaattttaaaatgtaatccattttaaaaaaagtacaaaaactcaagtttatattaataaacatcttataatctttcattataatccaaaatatgtggtcacattttttaaaaagtatattaaccctttaaaattatttaaccacacatgtgcaaaaaattttataaaaaataatctataaaaaaaaaatttcaattttaaatttttgggttaaagaaacgttaattttttttgcccaaaaaaatattaaaaatttttaaaaatttgctaaaaaaatttttaaaaaacattttttttttaaactttttaaaaa

SEQ ID NO: 85276 - DNA, 292 bp, Glycine max
attgcctatccaaaagaaagaaaaaaaacaaaaaaatgcaagggtgtgtaacaccccccataataaaaaaaacccccccccaaactaattttgaaccacacgaaatattgaataattccaataacaaatttttcctttaaaggaaaacaaaaaataattttttttttccaccaaacaaacaaaatataataacaagtaccatctctttctacaacaaccccccacctttgtcttacgcgtgcgtctgcccttaaatttcccccccgttcctgcaggccgcccagctttccct

SEQ ID NO: 85277 - DNA, 292 bp, Glycine max
ctaaggcttacaaaatttccctatattaaatcttatcaaaactatggcaataaatggtcatagtgtgaaactgtgaaaaattgacattcgctcacaataccccacaccaaaccatccggagtcaaaaatggtaaacctaagggggcctataaaaaaaattaattgacattaattgactggcccttactcaccctttaaaaatggggaaacctgttgttcaatttattttaaaaaacccgccaacacccggatagagaattgttccccattgagcgccatgtttttttttttt

SEQ ID NO: 85278 - DNA, 429 bp, Glycine max
ggttggaaaattttttctttattttgttgttggggcctttgtcttcctaaaaaaaaagatactattaaataaaattctatgcagaagggccaacataaagctgtatatatcttgaaatataaaattaattgtaccggaaaaaaattgtgacatttaatgcgtgggattacctgctaaaaactttaaaccctaacaaaagattaatttcactggaagacaataatcataggcacagctgatgaatcaaatgtgttaacagatctgggtcaaaagggagttgatcgtctaagcaaactactaaaagatccaaaggtgagaaaaactcgctatttatgttccttaacaacatgcgtgcccccaaagaacatactaactggtgtaaatataatccaaccgggctaatagcttctcagaaaaacccctcacttt

SEQ ID NO: 85279 - DNA, 447 bp, Glycine max
cccccccaaccccccccggttttaaaaaaaaaaaaagggcccttttttaaaaaaaacttttttttcaaggggaaaaaattttttgggaaaaaaaaaaaaaatttggcccttttaaaaaattttttttttttttttgggtttaaaaaaattttggtggggggtgggggtttttgtttcccactttaacccccacggggttttgcccttttttaaaaaaattgggccaatttctccccccttttttttttaaaaaaaaattgttttttttttttttgggggccccttccccaatggggcccaccccttgaaaaaaatttccaaccgggcccaaaattcccaaaccccccctttttttttggaaaaaaaaaaccccaaccttccggaattgaaaaaaacaaaaatttgggaaaggcctttatctggccaaaatttgggggcaaatttttt

SEQ ID NO: 85280 - DNA, 368 bp, Glycine max
aaccacaacaacaaaaacaaaccccgccgtttttaaaaaaaatgggcccccctaccatatataactccactacaacaacagggtgatatatccagccagttgtccacagtaaaacataaaaatgtttctgctccaccatcaatctgcttgtatctttcaatttcctccagtttcttttaattttctatttattacctaaatgcaatttttcacaagttgctgttaaaatgaaaatatcaaaattagcctttttgatgaacaccaacctggagaatgtccatgtccttcaacatcacagaacccccacaaaaattacagggggcattcctaaaaccgcaaattcttttatgttcaaacaatccttttaa

SEQ ID NO: 85281 - DNA, 143 bp, Glycine max
atcaaatataatataggcgcggcctttttttaattttttctcacccctcttacttatttaaacccttcctatcaacccaacaaaaacaccaacaaataaaaaaaaaaaaaaaaattcaacaataacaaaaaaacaacattaaa

SEQ ID NO: 85282 - DNA, 398 bp, Glycine max
aaaaataaaaaaataacgggccaaaaaaaaaaattttttttttttattaaatataaaaaaaatatttttaaaaaaaaatttttttttaattgtttatttatcctctttaaattatattttcaaattcttacccaaaaaaaaaaatttttttttataaaaaaaaaaaaaaatttttaaaaaaaaaaaaaatttctataaaaaaatttttctcccgactctttttataaaaaaaaaaaaaaaccgttaaaatccttttttttgttttcttttttgtgagtgatatataaaaaagaaaaataaaattttttttattccaaaagtgtataaaaattttaaaaaaaaaaaaaaaaatatttttaaaaaataatttggtttgaataatgaaaaaaaattttttt

SEQ ID NO: 85283 - DNA, 299 bp, Glycine max
  unsure (1)..(299): unsure at all n locations
ccgcccaaaattttttttanaacgattttttaaacccttgttctctgcacaaaaaancaccaaaatccccgccctttttaaaaaaccttatggcaattataaaatctctcaagaatttcaacttctcaaagtttatatcgcaatcccttataccacaaatctcacatgcattgaaataaaacacccacccatactactccctttacctgtcacccccgcataacttcactccacacctgcacttaaacccggtcagccccacgcgctttcgacacctatcacacccttttccatttccc

SEQ ID NO: 85284 - DNA, 529 bp, Glycine max
ttttttcatacctttttttttttttttttttttttttttttttttgggggtttttttaaaaattttgggttttttttatttttttttttttttttcaaaccccccccccgacccccccgtggcccccccaaaaaaaaacccccccccccccgcaaaccaactttttttttttataagggatttaaaaaaaccccgaaaaaaaaaaaaaaatattttcctttttaaaaaaaaatttttttaaaaaaaaaaaaaaaaaaaaaacccggaaaaaaaaaaaaaaaaaacccccccccccaaaaaaggcccaacccacaataatttaaagggccccacccccccccttttaaaaaaaaaaaaaacctcccccccccccttaaaaaaaaaacccacccccccccgaaaaaaggttttttattttttcccccccgggtttttttttttttctcaccaaacccccaccaccttttttctttccccccccccccccccaaaaaaaagaaaaaaaacgccctcctccttttttcccccc

SEQ ID NO: 85285 - DNA, 336 bp, Glycine max
ggttgtactctttttttttttttttagggggggactggtaccttctgggtaaccatttttttttatatggagttttttaaacggccccagaggcacgcccataaatgcttccccaatacaagcaaaaccccccacatttccaaaaaagatacaagctgaaaacatcaagaataaaaccaaaagtgcctatctgagggaaaaaactaaattaataaaaatggaaaacaaaaaaaaaaatccagggaaaaaaactgaacgccgtccccctaaaaaatcggccaccaaccttaaaaaggtggcttgcaaaacccccgccagagggggaaaacttttcac

SEQ ID NO: 85286 - DNA, 460 bp, Glycine max
ccccgggcaagtttaatttttttatggggccttaaaaaatcccttctcaaaatccatccccaaaaaaaaaaagggttttttttaaccgcaaaaaaaaaaacaatttccacaaaatgggttttacagttaacttttcccccttaaattccccccattaccaaaaaaaacaacttgtttttttatttgccaatttactagggttgccaaaaaaaaaaaagggggctggttttatttttttacaagggtccatcccgccggctgacttaaataggtagagcttatccttaaatttttttattaaaaggcctttttttccaaaattctttcccgccaattttttaacaaaagtgccctttgtttttaaaaaacccaaataaacttttttttttcctttgccccactttgaaaggaaaaacacccccataattataagtcaactcccttattggggggatttttt

SEQ ID NO: 85287 - DNA, 223 bp, Glycine max
ataaaaaaaaatatatatttaaataaattagagatataaacaatatcatatattgtctttaagtttctaaataataaccaaaaatagtaaaatctaaacaaagatcttccattgataaaaaatgttaatacaagttaaaaaaaaaatttggataagctccaacaatagatattatataatgatttttacaaacaaaggtatttaactcttggaaagtctttct

SEQ ID NO: 85288 - DNA, 408 bp, Glycine max
gggggaaagtgtggaataagtttaaattgaaaaaaatttttttggggttaaaaatttttttttatagggagataaaaaaaaaaggggaaataaagggaaaaatggttggtgtttaaaaaaaaataattgggataaaaaaaaaaaaaaaatttaaggaaaaaaaatttttaaaaaagtgtattggttaaaaaaaaaagaaaaataaaattttttttttttataaaaaagggatttttaaataaaaaaaattttttttcactatataaaaaaaaaaaactaaacggggggaaaagagttatttttaatagcgaaaaatgtttttttttttttataaaaaaaaaaggtaaaaaggtttattttctttttgattttcgataaaaaaaaaaaaaaacgggtcctttttttttt

SEQ ID NO: 85289 - DNA, 513 bp, Glycine max
acctatacatatgattttttttttctcaagtgcggggatgaacataataattcctccacacaagaagcaataaaaaataatgcatcccttttgcctgctacttgttatttttaatggtaaaaattagttccaatacatgtgtttttctcttttccctaaattgagggcatcaattgtacactctcgttttcctcttttccctaatagagcttgattaaaaccaaattagtacattttacacacacacaaattccaaattaagaaaatgcaagctgaattaagcaatatggccggccaaagtaagaatcttgacatggttgttctgcctgagttcatgaggcactggcccaaaaactctagtcccaatgggttggccttgcttgtcatcaaacttgacctcactttcatcacaccctccccctttgcatgtgcctccttcactgatgctattattgtgtcaccttcttccctttcaatgcttgaatgcacgttacttttttctcccccgagtta

SEQ ID NO: 85290 - DNA, 492 bp, Glycine max
ttaagaactaaaacagtaattaagtttatatttataatttatattgggattattactcagacatcaactagtgacaaattagaactttgtggtcactgtaactctccatcggtccatctactcaacttctgaatgggccatgatgatggacggaaacagttgaagcttggcccactaagagtccatcttttatttatagtagacctcacactataaagggaaactttcggcagcaagtggtgtccaatgctgttgcctgcctgttcagaaagggaatctccatatgaaatgaagagggttccccacaaaaaggaaactcacaaccaccattgttggggtttggatttttcagcatgctctattttgcttcgccattgtcatggctgttacttcctgcacctccaagttgctttctacatactttctggagtgtttttatttttccttctggattgatcattccagaagtcaaaaaaggagtgcattctggat

SEQ ID NO: 85291 - DNA, 90 bp, Glycine max
ttttggacgcgtgggtttttttgggaatttttgacctgttcctgcggggggaccatcttttcctatggggagtcctattattaactggcc

SEQ ID NO: 85292 - DNA, 166 bp, Glycine max
ttttaatacacatttttttaacaaagcaaagcccaaattctggccgcctttttctaaaatgtataggcccctaacaattaacttatcttctctaacacctaatattatttaaaaccattgttactcttccataacatctacttcaatcacttccaccttcttcttc

SEQ ID NO: 85293 - DNA, 357 bp, Glycine max
ttttttttttttttttttttttttttttttttttttttttttggggggttttttaaatttttttggggaacccaggggcgaacccgggggcggacccgggggacaacccggaaaatccggaccgggccctggaggcaaaccaatttacctaaaaaaaaaacctataaaaacccgacctaaccaaaaaaaaagctgtttccgggggaaaaaggaaatccgcaaaaaattccacaaaaaaaaaaagccggaagcaaaaaaagtaaaccccgggggccccaaggaaggaaaaaactcaaattattggggggccaaaaaaagccccaataaaaaaaaaaaaaactggcggcccagctccat

SEQ ID NO: 85294 - DNA, 391 bp, Glycine max
  unsure (1)..(391): unsure at all n locations
gggaccacaattcaatactcatctacttaactttagaaacattgctcgcgaagcatgtgagttgcgacataacacgcgccatcccgctctgaagatgtacaaacacatttatgcacaaaatgcctaagtatatatgaacaaagtcatctgtggcagacgaatttaaatataacttatgccttgtccaataacacaatctattaaattaaaccatgaaaatcttgaagcttggttgtttataaaccgaataaacttataaaacggttgggaaagaaaaaactgaacgttgtcacggagctgaagaaccctaatnttgaagcctgatttgcttgcgctatgaaccaactgcgagaacgtcacatatgctgccctaatgctgcacttaaaaatg

SEQ ID NO: 85295 - DNA, 104 bp, Glycine max
tttatttttttatgattttttttactttttttaatttaatatttttgcgcgctttttttatattttttctttttttttttttttttaccgaacccttgggttcc

SEQ ID NO: 85296 - DNA, 553 bp, Glycine max
tttttatttttttttttttttttttttttttttttttatttttgggggttttttttttatttttttaaaatttttttttttttttttttttttttttttttttttattatttttaaaattttttttttttttttttaaaaaaaaaaaaattttaaaataaaaaaaaaatttttttttaaaaaaaaaaaaaaaaattttttataatttttccaaaaaaaaaaaaaaaaaaaatttttttttttttaaaaaaaaaaatttttttaaaaaaaaaaaaaaaaaaaaaaaagaaaaaatctctttttaaaaaaattttttggggggggttttttttttcccaaaaaaaaaaaatttttttttttttttcaaaaaaaacacccccaaaacttgtttttaaaaaacaattttttaaataaaaaaaacatattttttaattttttctcccaaaaaatttaaaccattctttttttaaataattccttaaaaaaaaaaaaaaaaaaactcctaataaaaaaaaaaaaaaccatcttcaccccaaaaaaaaaaattatttttt

SEQ ID NO: 85297 - DNA, 409 bp, Glycine max
  unsure (1)..(409): unsure at all n locations
acaatgtaaacaatatataaaatatagatagataatgcatttattacactcaaatcaaatttacaaatatatgtatagataaagtggtgatgattatccaaattcataagaccggcctctagtagcttgtaacccaactccatgccatgctccattctggaaataacaagatttcagatttttcctcttccgcttttgttccctttgacctgtagctgaaatacacttcccatgcagatgcagntatcttttgttttgtatatatgcgtatgcgtcttctagtattttctcttttacgtttttatacaacagcttctgcaatcaaaacttcgcctcaagaagaatggaggagtatggagctatattgtacgtgtttcctacgctagggacaccatcaaggacaaagtca

SEQ ID NO: 85298 - DNA, 493 bp, Glycine max
ttttttttttttttttttttttttttttttttttttttttttgggtggtttttttttttttttttttttttgaaaaaacccaaaacccgtttttttttaattgaaaagcgttcctgtcctttgataaaaacagtaaatcctttttttgatgaaaaaagttccccccctacaatccccattccagggatgaccccccgggccaattaaaatacattgcccctaatgcataccttttacaggctccactaattattatttaccctccccccccccaaaaggaaagttttttgtttgggtggaaaaactggcccttccaaattttggcaccttgaaaggggctccccaaattttctccttattagcaggaaccgcgagaattttatttttaggatttttataacataaatcccccaacaggtggagagaaaaaaccttctttggggaaaaaaacaagtgacttgccccaacccccattaaacaattttgttttatt

SEQ ID NO: 85299 - DNA, 232 bp, Glycine max
tttttttttttattttttcttattgaatttgattaatataaaaggggggttttatcaaaaagaaccccctgtcacaaaaccaattattttccataataacctccctcaaaaattcaattcataaatttcttaactaacaaaataaaaataacacaattctttttacaaaaaaaagcgcatcatactttttaatttcacccaccttcattattccccttttaatataatccat

SEQ ID NO: 85300 - DNA, 360 bp, Glycine max
caaacaatattttattttgattcttcttactatttttctggggggacatcattgttttgtatttttttattcttaaaaacacaaaacaaaatgttccctaagtaatatataaagggtctcaacatgtaaagcaccgcatggtctctaaattaaaattacataaagcacagcttgtccttgtataaaaccctactcctccatgtcatgggctatatgatctactggctaacgaaaccaatccgaggaaaatttacgattttatataatatcaaccagtgtaatatggcacatcacttgtgcgagacaagaacacccttcttaaacgtagcacatcaccatcactgtaaaaagcttaacttg

SEQ ID NO: 85301 - DNA, 272 bp, Glycine max
atcaataaaaaataaaaaaaatttttttttttaataattaaaaattaaaaaaattatctcatcatacataccgcaacgggccccccaaaaacaccataaagaaactctaaaaactctgcaaattttttttttaaaatcaaaacttattattcaacattgcaaaaccaaatatataaacatctccaacatcacatgaaaaaaaaaaaacgcaaaaatgcccacaaccctcccttctttgtatactaaaaactttgtaaaaatccccttgatac

SEQ ID NO: 85302 - DNA, 438 bp, Glycine max
aaaaaaaaaaaaaacccccccttttttacaaaaaaaaaaaagggttgggaacccccccccccccccaggaaaatttggaccccttttgaaaaaagtctgtcaaacccaaggttaaccccctttttatttgcccccttttgaaccccccccccctaaaaaaaaaaaaattttttttggattttttctcgaaaaaaatttttttaaaaacccttttatttttaaaaaaaaaaaaaaggttaaaaaaaaaacccccccccccccccccccccccaaaaaaaaaaactttgttggaaaaaaaacccccaaaaaaaattttcccccccctcccgggggggccccccctttttttaaaaaaaagcccccacaaaaaccccaaaaaggggaactcccccccggggagggaaaaaaaaaaaatttttttaaaaaaccaaaattttt

SEQ ID NO: 85303 - DNA, 494 bp, Glycine max
ttttttttttttttttttttttttttttttatttttttttatggggggttttttttttttttttgaaccccctaccccacccttttttccacccttcaataccaaaccccaacctcaaccccccccaattatccataaacatagtttttttaaaaattaaattaattatcacaaaaacttacaacatacaaaaaaggtaaacccataaaaattccacacaacaaaaaagacagaaccaaaaaacaaaaaacctgtggccccaaataactaatttaaatcaaaaaaattggtctgccctccctgccaaattaaaaaaaaaaaaacctgacaaacccggttcattaattaattccccaaaccccccgtataaccacttaacaaataaacaccaagggaggttattttttttcaccgtgcaaaccaaaaaaaaataaatcccctaaaccctttttccctaaaaaaaaaaaaaaaaactcaaaacccttttaaccccc

SEQ ID NO: 85304 - DNA, 276 bp, Glycine max
gatgatattaatgttttgtttcggaaaagtttaggcgatttaggtctcgaaacttatgagggtctcagaacaggtttcacgtctcaaagaacgtttgatgatgttgttaaattgttaagtaaggatgttggtgctgaactgctgattgtgcacgttaaaaattgtacaagcagattaaggagctgaagggtgctattggacccttatctggacgcagtttgatgtattgcactgattcatgttttaagagatatttggaagctcgaaactggaacg

SEQ ID NO: 85305 - DNA, 170 bp, Glycine max
gggggacaacaaaccccacccgaatttgccttcggttttttggaaaaactacccaccctgaccccccaaaaagaaaccccgggatgtggacccacaaacggggggctattaatgggaggggataccccccccccccccctctgcccccttgatcccccccattttgaatt

SEQ ID NO: 85306 - DNA, 378 bp, Glycine max
gacttggtgagatgacattctttccttaattcaggagtgatttttccacttttcttttgttcattgtaatgtgatcgttgccgtcattgctttattatatgcacgggtgaatgctcatattcaatcatatcagaagcccaagttgtacttgactaatattgatcttaatgattgcaactacatgcatcatgggttttcgggaccagatgtcatgtgaaatcttcttgcagctactggtcccttcaaatttcatccaattaagcaaaattaaagaactttataaagaattattatgccatgtctactttttcattactatgggttgtgattgtttaattggcatttggaggctgaagtattcttttaaagaacacaaat

SEQ ID NO: 85307 - DNA, 379 bp, Glycine max
  unsure (1)..(379): unsure at all n locations
cgcataccttgggcttctcgtacattccccttttttttgtttgttgacaaattgatacttttttaccacgttcgtaatgatgcgcatactgtaactcttgccgtgcattgaattcaattgccttcttggcggagctattgtgatacatggaaaatcacactcgctgaaaagaaaaagaaaatgcttccattggtttgtaccgagcctgaaactcgttatcttgtgaactaagattaaagcgctgtaaaacttaatgaagctgatgctcntctgaacgagaaaggtgaaataaaattgaggcttcgtgtcgatccatgagcttagtgcgttgaactgtgaacgacagatcgaataacgagattggtatacatcaacatgg

SEQ ID NO: 85308 - DNA, 392 bp, Glycine max
ggaaaaaacggggcgacccacgcgttcgtgcaaacattattttgttaaaaaaaaaattttttattaaacaaaaaaaatcaattaacgggggggatatttaaaaaggaataaggacaaaaaaaaaaaaaaaaaaaaaaaaaaaaaaaagggggggccgttttaaaggatccaaatttactatcgctggattgcaacaaaatactttttttttagggtcaccaaaattaaattaacgggccggggtttaaaaacgtggtgattggaaaaaccttgggtttaccaaattaaatggcttggaaaaaaattccctttttgccagttggtgaaatagcaaaaagcccccacccaatcctccttctaaaaattttgcaaatctaaatgtcaaatggaac

SEQ ID NO: 85309 - DNA, 108 bp, Glycine max
  unsure (1)..(108): unsure at all n locations
gaaaaacccgacgacccagcgaacgaccacgcggccgggggatggaggcgaaaaggatgaaagcaaagggaagaaaaaccccgcggggcaatnggacggcccacggga

SEQ ID NO: 85310 - DNA, 216 bp, Glycine max
atgaagaaaaaaaaaaaaaaaagggggggggaaaaaaaaaggggaggggggagaaaaaagtaagagaaaaaaaaagaggataagggggggggggttgtataaagattggaagaaaaaaaaggggggatgggaagaaaaatggaatgataaaagaaaaaaataaggaaatggggggggagaatgaaaagaaaggatgggggaaaaaaaaagggggga

SEQ ID NO: 85311 - DNA, 405 bp, Glycine max
  unsure (1)..(405): unsure at all n locations
cccacgcgtccgnaaaaaaaaaaaaaaaaaaaaaaaaaaaaaaaaaaaaaaaaaaaaaaaaaaaaaaaaaaaaaaaaaaaaaaaaaaaaaaaaaaaaaaaaaaaaaaaaaaaaaaaaaaangggggggcggctttaaaaaaaaaaacaaacttaccccggggtgcaaaggaaaaaattttttttttgggggaccaaaaaaaaaaaaatgggggggggtttaaaaaaaacggaaggggaaaaaaaaggggggaacaaaaaaaaaaaattggggggaaaaaaatcctttttcaagaggggggaaaaaaaaaaaagagggaaaaattgacttttttaaaaaaaagtgaacctgaatggagaaagagagggaccctccttggggcgaataattaggggggggggggggg

SEQ ID NO: 85312 - DNA, 302 bp, Glycine max
  unsure (1)..(302): unsure at all n locations
aaaaaaaaaaaaaaaaaaaaaaaaaaaaaaaaaaaagggaggaaaaaaaaaaagaaaaaaggggggaaaaaaaaaagggagcaaagaaaaaaaaagggggaaagggaaaaaaaggggggggggaccggggggacgaaaaacaacgaaagggggggggaaagaaaaaggnacccaaggaaacgccaagaaaaacacacggggggggcgggaaaaacaaagagcgaggaaaaccaaagcgaacgcgaaaaaaaacaggtgggcagaaaaaacggcaaatggaacgcgccctgaaaggaaaaagg

SEQ ID NO: 85313 - DNA, 108 bp, Glycine max
gcatttgtagacgtgttcgagcataatatttcttgactgcattaatgtcagctacgggagagatctatacagcgcgatatgttctaaaaatgtcttaataactactat

SEQ ID NO: 85314 - DNA, 85 bp, Glycine max
aaaaaaaaaaaaaaaaaaaaaaaaaaaaatattaaaaaaaaaaaaaaaaaaaaaaaaaagaggataaaaaaaaaggacaaagaag

SEQ ID NO: 85315 - DNA, 254 bp, Glycine max
  unsure (1)..(254): unsure at all n locations
aacgccaaaggcagaanagncggncgggaaaaaagggngaggggagcagcgcccnccagcagcacccgnaganaaagacccnnnncccccccacngggaccaccggaagccngacgcgcgcgcacgcacaaacgcacacngaagncaaaaacaaccaaagagagaggcanggccgagcaaaccancaacaagancaagccaagaggcgnacaaagaggccncaaaggcgagaaaaanagcaagaaggagaggaa

SEQ ID NO: 85316 - DNA, 185 bp, Glycine max
ctcatctgagattcgagagatgggtttggaaaaagctttcagaaactggatataagtgatggtgctgttgtgacagttcatggtagtttggtgtttggaaagagcctaatgattatgtgtttgaaaccactaatgaagtgaacaagaagatgtccaactgtatgaacacttattggtgatataat

SEQ ID NO: 85317 - DNA, 106 bp, Glycine max
aaaaaaaaaaaaaaaaaagggcggacgatactaaaagaaaccaagcttacatacacggtgcatgcgacgacataaactattctatagtgccacctaaaattcaatt

SEQ ID NO: 85318 - DNA, 471 bp, Glycine max
gcctttagccatgcccgaatcacgtgactgtcgcgtaaccataattgaccttgccacctacttatcccgcttgtggcccatttatctacaatgacgctccaactctttgtacccccccccccccaaagaaccggcagcctaaatagcggaagagcttgagcttgtcccgactgccaaaacataccacaatctactgtgtgacatggtaaaggatgtgttctgttacgctacgtgcttacaacgtggtaccctaggatacaattcttctactcttttcttcatcacagatagcttgactttaacattttacttgtgaagtaatattatccaaacatgctgtaccaacattatttctgctcaacatgtattcaatttcaaacagtgatcttcacctttttctctgcctcatctacctttaattcaggtgctatgtgatagaccccctggtcatgattgggaaactacatatgc

SEQ ID NO: 85319 - DNA, 88 bp, Glycine max
aaaaaaaaaaaaaaaaaaaaaaaaaaaaaaaaaaaaaaaaaaaaaaaaaaaaaaaaaaaaaaagaaaaaaaaaaaaaaaaaaaaaaaa

SEQ ID NO: 85320 - DNA, 386 bp, Glycine max
aaaatgcgggagaaaatattggaacatatatagaaaccttcttaaacaaaccaattagcaaacacatgggtaaccacaagggtatcgctaaatcatatgcagtaccatatccagtgaaggcccatgtgaaatcgcttatggaactgaccgaggatgtatgcaaaaatagatgtataaacacatagctgaaccccaaaagaacacacaacggtggtgctgaacctgacgctgttctagacaaacgtatcgaatgagggacactgtcagatagactggcacatggatatgatcctggtgaccatgaaaaagaccatgtgaatattcaaaggaacatgcaaagcttgatgccatagctgattgcaaagatcatagattatgatgctgct

SEQ ID NO: 85321 - DNA, 359 bp, Glycine max
ctgtatataacctaattgcacacatgaataccaatatcgttttcttcttgagctgcctctgtgcactggttctgatatctgatgagggaactgaccaattgaatgatgagacacaggaggaacctaagacacaatctgttgcctggggaaaaggtggaaacggggggcatgatggtagctgtggacacgtgcgacaatgagagcatggacgtggaggacacctgcgatgacatgtgggacgaggacatgatgttggacatggtgaaagatgcacacgactgtggcgtaaagtgtgtaaatgtgattgaagataaaactactaatatatgtactgtacacactcatatacttgacaacac

SEQ ID NO: 85322 - DNA, 372 bp, Glycine max
caaatatgaggaaaagtcctgataccatggttttgttgcatacaaatagatgaactctgcatccgtaagaatgccgcaaggccaaaataaagtgaaacattggttcaaaaaagaatgaactgaataaaaaaaaacaaatagaacaaacagtgcgcaaccgcaagaggacataagaaagcaaaaccaagctcgcttatacccgccacaacaagtctaactgtgagaacaaatcctaagatgttgaggcataagtagtctccttgtctaatgaagcgactacttatctgataaatatgacacatacatatagaaattgcatcctcctcaatgaagcatagtacgaaatggtggcttacgaaactttgcgcaacc

SEQ ID NO: 85323 - DNA, 203 bp, Glycine max
cggacgcgtgggaaaaaaaaaaatgtgtataatatatacccaaaaaaagacttacaattgattataattttagcaatttgtgcaattcaagctttccaaaagctgacaagattttttaaatccttgtgagtgaaagcaatttttgatacaaattgtagcagagatttgaacctattcggattttgtgtggagggcatcatatg

SEQ ID NO: 85324 - DNA, 254 bp, Glycine max
cccacgcgtccgaaaaaaaaaaaaaaaaaaaaaaaaaaaaaaaaaaaaaaaaaaaaaagggcggtctaaaaaaaaaaaaacaaacatacgggggcgcccttctcaaggctccttttttacgtcgcgtgattttaatttcattggtctcctttagagttccctgaatctgatttactcccccccggttcccatcttattgattgtgtacccccttttttttctctggttgggggcctttatgaatatcccccttt

SEQ ID NO: 85325 - DNA, 352 bp, Glycine max
gatttaaaatatataatttgttgaatttattataatattgtttaaagggggttattttatgtaaattgatgagtggaaatatattaatttttttttaaatgaaaaaatgttttaaaaaaaaattacattttttaattggggtggtgtatgataagaagaaaaaccagcaaggctggattatttttttatttatataacatcatgggggggatatacagtgaacttataccattatttaaggggggggaaaaatgataaataaagaaattttttttgatggtaaaaataaaaggaaatgttgaattatattccgggttggtagatgggtccatcataattttatcctatgatg

SEQ ID NO: 85326 - DNA, 112 bp, Glycine max
  unsure (1)..(112): unsure at all n locations
tnnaaacaacggggccatgcagggcatttcattgttccttaacaaaatcaagcaagatgtttacattaacattgttcttttctaaaaaaaagttccaccatggtgttttgga

SEQ ID NO: 85327 - DNA, 128 bp, Glycine max
  unsure (1)..(128): unsure at all n locations
tttttaacatttctttttttttttttttgccaancnattnaaaacaaggggtaattataggaaactcaatgactcccaacataatcaactataaggtaaacgaaaacgttccactctttaaaagaatt

SEQ ID NO: 85328 - DNA, 387 bp, Glycine max
  unsure (1)..(387): unsure at all n locations
ttttatttattttttttttttttttttttttttattttttttttttggggtattttttaaatttttttttttttttttttttaattttttaattttttttttttaaaagtattaaaaactaaaggtggggttaaaaaaaaaaaaaagcactgtttattttaaaaaaaaaaaaaaaagcgggttggaaaaaaaataaaaatatttggggaaataaatctaaaaaaacatatnacccttttggaaaaaattaaaaatctttttttggttgtggtaaaaaaaactatatataaaattaaaaagaggggggggggaaaaaagagccgatggaaggaatggaaatgggtttattattaaaaaaatggaaaaaaataaatttgtcttagctac

SEQ ID NO: 85329 - DNA, 361 bp, Glycine max
aaaaaaaaaaagggattttttattttactggatacgcgcttttcggatgaattcaaacctgatagaggacacataagtttgacttggcatttacatttttggtgaaaataaaaataaaccgcccctttgaatattggggctaactttctaacatataaattgataaaaattacccattttggtgaaaacgaaaaggaacttttttttttcaaatacgggggggaaaaaaattactacttttttttgcctgaaaagggggggtttttcaattgttaaaaaaaacttccattgaaaaaaccttggatggtttttttttgcagcaatccacttttatttttaacgagttggtaaaaaatttttt

SEQ ID NO: 85330 - DNA, 278 bp, Glycine max
  unsure (1)..(278): unsure at all n locations
gagttaaaatataccagtcgctgaaatcagcataggactgctgacacgggagccataatatgtaaattgctcagggggaatatactaatatctaggacaaaggaaaaaatgtcttctttgatacttcctaaaaaagaattgaaattttgtatgatgcgctgcctaaattagcaatgctacactactcctttatttatcttctattatttctttcctatccagngaacttacacctagttctctgctgttatacaaagggatcattacagccgttttta

SEQ ID NO: 85331 - DNA, 361 bp, Glycine max
tctttttacttaaacttttttttttacatttaattaaatcacaacgcgggggtttttttttcttttcaccctttcatacatttttttctttttttcttctaacaccaatcttgttgttttaaacctggctggagcctcttggctaaactaactggtgaaaaaaaaccccctaaattttgtcctttttcctccccccccttaacctttttttttttcccttaaaaaaaaaaacaaatttttgttgatctaagtcttccctcaccaaaaggggaccaggggattatgtccccttgccgaaacaaaaaaaggttgagccccctttttctttttttggatatctacccctctactcaaacaattg

SEQ ID NO: 85332 - DNA, 296 bp, Glycine max
  unsure (1)..(296): unsure at all n locations
aaatnnaaaagagggagaaaaaataatttgttggttgcccctggaccccgaaaccaagaaccaaaaacaagataaggggtaagccttaagcctaaaaatcaaaatttctattttatgacccgaacgccaaaatattaaatacaatgtcaaaggttactaagacccaattccttattcttggtttttggcgctcaagattcattttaaccaatatagaaaatgtggaaggtgcaaaaaccctttatgttttaagcttgagattttagaccaaacccaacccaaacctcaaaatggac

SEQ ID NO: 85333 - DNA, 275 bp, Glycine max
  unsure (1)..(275): unsure at all n locations
attacatatttttanaacacaaaagaagacaacacaatcggggcttctttgaaaaaaatacatccattacaaacccaccaccgatatagaaaacatgcttttattttttaattttacaccccaacacaaacactacagggcaccaccacgcaatggccatttactaacaatggtgttattttattataagacaaatacctctcttccattcacaacatattaaagactccttctttaccacacagcgaaaccaccacacaccccaaattaacaac

SEQ ID NO: 85334 - DNA, 171 bp, Glycine max
  unsure (1)..(171): unsure at all n locations
ttcttataatcactatttttttaaancnngcaaaaaacaaaaaaataggtggatttaacaacacataacagcccccccnccacccccaaccccccccccccaactatttaaacataaaacaaaaaattatcccccttccttccttttaaaaaaacgctaccccaaaaacct

SEQ ID NO: 85335 - DNA, 271 bp, Glycine max
  unsure (1)..(271): unsure at all n locations
nnnnaaaaaaaataaaaaaaaaaaggttttttttttttttttttttataaaagagggggattttaacttttttttttgcgatggcccccccaaaaaaagaaagtaaaacaacctcttggccaacccgggcccccccaaaattttaaatttaaaacatttccaaaacccccccaaggaggggacattaaactggaaaccagcatttggaccccctcttgggggaaaaaactctatcccgggggaggaactttctgccccaccccagggggga

SEQ ID NO: 85336 - DNA, 55 bp, Glycine max
aaagggggggatttaaatttttttttgggacccaagggcggacccgggggaaaaa

SEQ ID NO: 85337 - DNA, 445 bp, Glycine max
tttttcaaaaaaaattttttttttttttaaattattttttgttgggggaaatttttttttttaaattttttttattttttttaaaatttaattttttttttagaacccaagggggaaaacccgggttcaacccggaaatttgggaccaaacacgccggggataaaaattttttttattgtgggaagttttaaaaggtgggaaaataaaggaaattgacataacggtgggaaaaaaaattttcctttaacaaaaaaaaaaaaatttagccgggaaaaataaaaggaaaagccgggggggccaaaggagggggccaaaccaccttaaatgggtgcgtcaaatgaccccttttcaaaaagaaaaaaattggggcaaatgttttaaaaaaaaaagaaaacttccggggaaaagaatttttttttttatgggcccacgggtgtttttttt

SEQ ID NO: 85338 - DNA, 172 bp, Glycine max
tatttagaatcactcattattaaaacactgtgcactacttcacaaggggggcatcaaatatcactatccgagctaacccctatctcaaacctcttttcagaaacctttacaaattagatccaaaaccttcttcaacaactctacttttcattaaaacgcaaccattaaaata

SEQ ID NO: 85339 - DNA, 415 bp, Glycine max
gacaaattaacaggattttttgaaattatgcaagattctgacatctaaatggagacaacaacacattgatgacaccctgaatttggaaaggcatctcagttaagtatttatccaagaaagaatataataaatatcaatttctaaaagagagaaatatcccaacaaaaaaaacagaagccactacccatttggccatccatgtacatcactgagaaaatgtaaggaggactgaaaactaaaaaaaaaaaaaaaaaaaacgaacattgaatctcacggccaaattacccaaccttctcagttttctcaccatcatgtacaacaacaacaaaaaagttcctcgttccatttccattcattaaaaagatagagagaccggagagagaaagtattttttattatttaatgagtatttttt

SEQ ID NO: 85340 - DNA, 87 bp, Glycine max
  unsure (1)..(87): unsure at all n locations
gtaagctggaatcctctagaccgcccgcctcttttttttttttttttttttttattantgggggcaaattttttttaaatttttttt

SEQ ID NO: 85341 - DNA, 414 bp, Glycine max
  unsure (1)..(414): unsure at all n locations
atttttcttttttttnttcttttttgggccaagttggttcctgtaaagggtgacttttttcatggaatataaaatcccttttttagttgcacgggtactttcagtcaaagatgacaacactgtccgaatcagtaaagaagctcaatggtgaatcaactatacaagcacgacttgcatgtgaatcaactggttcacgaggccaattgcatttccctcttcaataaagaaactcaatgttgtgtttccagcaaattgaagacacaattagttccatgggagatgacaacattaacaataaatcttgggcgttgttcctacatggagcttcttcttgcgtctgcattctccacaccagccgaatactgcatgacaacatgaaggtaaaattgatgtatgttgcttcagtaacgcaag

SEQ ID NO: 85342 - DNA, 134 bp, Glycine max
  unsure (1)..(134): unsure at all n locations
gccgccctggntttttttttttttttttttatattnttatttaaccccacaaanttttcataaccaaccgctgctattaacactcattactactctataaacacttttatccatatttaaagacccccctaata

SEQ ID NO: 85343 - DNA, 497 bp, Glycine max
ttagcaattccaaacatgattagatagataaattcatctagaagaataattgagtaagttcaattttgaagtaaaaaaaaatgtgaaagagcattaatcacaattccttactatatgaagaataacattgaaaaaaatcacctttgaatcataaaacgtttcaagtcttaaatttgtacacagggtctatgccaaaagtgcccattacttgagttgtaatatgactttttcaagcaccagtagcttaggaatcccaaaagcagatatatttgcattgagtcgtaatcaattattattactcgatgcaagtaagccattgattgcccattgcctaatgctagtaagccaccctaacgctgaatgttgagcatgtccttggcctcagtctgctccttcacgagcccctcactcgcgtacctactcaacagatccttcttcttattctccagcaccctcctctcaatctccttctcatccggaagcggcacgtgcaccac

SEQ ID NO: 85344 - DNA, 507 bp, Glycine max
gcatttaataatctcaataataatcacattataaaaataataaaaattaaaatttttgaaattacccctaacaactatttgtgcactcctaaaaccataaattgcaccatataacattactatgatttttaacaagagaaaaaaataagaataggctaaaagaaaagaataaaaatttactagttaaactataataagaattgatcttcaaaagataacaaaatactatgccttaacaatacaaactcacaaaaaaagtatctttcatccatccaggaactttatctctgaaagaagctgatatactgctccaatgcaaccactaaactcatgttccccacctttagactcatgttgaatgttaaatcttcacccttaaacaaaacatgagttatgaattttaaaaatgcaaagttaacgagtgcaaagaaaataccggtgtaatcttatccggctgtttcttttccgtcaatcctcaactttgtttttatacttgcttgagtctac

SEQ ID NO: 85345 - DNA, 73 bp, Glycine max
aaccagatgggaatatatcgccaggggggattttctttaaaacaaaaaaaacaggcggcagatgattgccctt

SEQ ID NO: 85346 - DNA, 215 bp, Glycine max
aatattaattttttttttttttttgggcgtgttatttttttttttgtgtgaaaaaaaaatgagggggaaaaagggagggggaaaaaaaaaattttataaaaaaaaaagcttttcttgaatgggcaagaaaaaaaaaacattggggacaatacaagggaaaaagattgggaaaaacaaatgaaaaatgtttttaatgaaaaaaaattttctcaaaa

SEQ ID NO: 85347 - DNA, 306 bp, Glycine max
aaaataaaactcccgaagaaaatgaaatttctaacggattggcacttacgatcataagcctccaattcaacctccaaagtaggaaggtatcctattcaaccctggtactgtgtattgcaacagtgtaaaaacaaacttgtactaatgctttcgactgctaaccacccacacagtcactttacaaagtatactttgtccaaccaagatacttatcaattgtaacccatacttttttatttgatacatgccttgctgccttgaacacaaaggtgaagctcttttgtgaaataaacaattggtctatac

SEQ ID NO: 85348 - DNA, 180 bp, Glycine max
gtacaaaaacaaaatcagaggtgttttgctgactcaaatcccaatcactcccccaaaggcggggactgtaacaacaaaacccgtttctaccatatctttgggggtgcccaaaacactgtggaacatggggggatttaccttttttttacggagtattttgtgcccaggcaccccgaaaaa

SEQ ID NO: 85349 - DNA, 73 bp, Glycine max
atgttctatggcctctggtttcagcctgtctctgcatcttacatcatttcaagtatgacactgttcattgtaa

SEQ ID NO: 85350 - DNA, 376 bp, Glycine max
  unsure (1)..(376): unsure at all n locations
tnnaaaattaaaaattttttgggggattttttttttttttttggggtttccttgggcccccccattaatttggcaaaaagtttcttcttaacctgaaacattaaaacttaaaaaacttttttttgtccaacaaaaattttttcaaataacttttgtaaccccccccccttcacaaaattcaagaatatttttgccgggaaaaacttccccctcacattctttttctttcataaggccctggattttattttacaaattttgaagaagagacccttatctttttaaaagagcgctttccccacttaaaatgccacaaggtgtggggggggaatgttttcttttttcaaatgaaaaaagttcccaaccttctggggac

SEQ ID NO: 85351 - DNA, 132 bp, Glycine max
  unsure (1)..(132): unsure at all n locations
caataaacctctattttttaaaaaaancattgggaaaaaaaaccagctgttcataaaaatgtcttatttttttaccaaaccccctcttaaaaaaacaattgcatttacacccacgtcttctcttttttatta

SEQ ID NO: 85352 - DNA, 533 bp, Glycine max
aaaagtaactaatggaattggattaatttaaaaaagatgaaatatacaagaggaacaacctgtaacaaacacaactaatattccatatcaacatgcttgaaaatttcacatcatgaatttcgtagcttagcatcattaaaattacagcatcactcttaccaagaaaaggggaacatcacttttaagtttaagccacgtgcattattgaccttgtcatatgatagatcaaatttaagaaatctatatttcataatagataacaccatagccaagaatccaagatcaacttaacaaataaagagaaacacttccatcttcaagaatactgcatggtcacaactatacacactccctatattttcaagatttcagccagttaacgaatctactaatattctttgaagatccaccaccttcttcaatgttgttcatgcccgtttctttcaattctagacaccttgctcttatttgttcattactaagtagttggtccaatttcttcttaatctcccaccttgacacaagtccatttt

SEQ ID NO: 85353 - DNA, 304 bp, Glycine max
aaaaaaaaaaaaaaaaaaaaaaaaaaaaaaaaaaaaaaaaaaaaaagaggggaaaaaaaaaaaaaaaaaaaaaaaagaaaaagaaaaaaaagaaaaaaaaaaagaaaaaaaaaaaaaaaagaaaaaaaaaaaaggaaaaaaaaaaaaaaaaagaaaaaaaaaaaaaaaaaagaaaaagaaaaaaaaaaaaagaaaaaaaaagaaaaaaaaaaaaaaaagaaaagaaaaaaaaaaaaaaaaaaaaaagaaaaaaaaaaaagaaaaaaaaaaaaaaaaaaaaaaaaaaaaaagggaaaaaaaaaaa

SEQ ID NO: 85354 - DNA, 319 bp, Glycine max
gttaaaccaattattttggggctttttttttattttttaccagctttttctattttttgtattaaaattttttttttttttatgaacacaccggggcccccccaaaaatttcctcccgttacccttggacaccaatattttccctaaagaggcgattgttaaagggggggggaaaaaaggggcaaaaaatttactttggtaaaataggtatgggttaaaaatttcaaaaaaaaaaaaagcccgtgccaattgggttaaagagtggggcaccccacggggagatgcactctcaatattggggggccccctttggcccctt

SEQ ID NO: 85355 - DNA, 198 bp, Glycine max
gacaataattagggtgcgtaaaataaacaattaaaaatatggtctggcgcaactgtaaatacgtagggttacaatcgtcggcgcgtcgcaatctttccactctacaaattcgggcctgagacgtttttcaatttttcgaatgtcagtcatattgcatgcaaaacccccgtttgttccacctccaacgatgtggaatcc

SEQ ID NO: 85356 - DNA, 187 bp, Glycine max
cccacacgttcggcttggtgcacaactgaccaagttccatacggtggcgccatataactaggtggtgaacacgctctaagagaacccatactgccactactgcacaagggtatattcacttgcaatacatgaccctatttcgccatcctggggattacacaaaccctggttcttcatatatgaatcg

SEQ ID NO: 85357 - DNA, 284 bp, Glycine max
cgcgcacgtgttatgtctacacagcaagaacggattcacaatgacattgcatctactgaggttcatatgccgagcggccttctgctgctttgccccatatgtttgacctggtgctactaccaggactgatgctgtggacggaaccctaccgggccatggtacacgataccttgtgctaaactatgccgtgaacgcttatgtagcccgtgctcaaactttagttatgctcgcttatcagtggaatcataccactccgtatgggccgccaaaagtgcctgcagcta

SEQ ID NO: 85358 - DNA, 350 bp, Glycine max
  unsure (1)..(350): unsure at all n locations
cccacgcgtncgnnaaaaaaaaaaaaaaaaaaaaaataaaataaaaaggggaagggaaaaaaaaaaaaaaaaaaaaaaataaaaaaaaaaaaaaaaaaaaaataaaaaaaaaaaaaaaaaaaaaaagggggcggccgttttaaaggatccaagtttacttccccgtgcttgcaaagaaatagcttttttttggggccccctaatttaatttccttggccgcctttttacaacgtggggacgggaaaaacccgggggttcccaaatttattggcttggaaaaaattcccctttttcccagttgggttattaaaaaaaaggccccccccattcccctttccaaaaatttgcc

SEQ ID NO: 85359 - DNA, 337 bp, Glycine max
cgcataccttgggcttctcgtccattccccttttttttgttagttgacaaatagatacctttttcccccgttcgtaatgatgcgcatcctgtaactcttgccgtccattgaattcaattgccttcttggcggtgctattttgatacaaggaaaataacactcgctgaaaagaaaaagaaaatgcttccattgttttgtaccgtgcctgaaatcgttcatcttgtgaactaagattagattgctgtaaaacttaatgaagttgatgcaaaaaaaaaaaaaaattaaaataaataaaaaaaggcgaacgaacgtaaattttataaaaaaaacaacaaaa

SEQ ID NO: 85360 - DNA, 201 bp, Glycine max
caattttcttactctaacatcttttctctttcttggcgatgaaaatcttgtacgcaatgagggcgaagtcagaattggggaagcttggtgagctggtccaacaaagaatggaggtcgtctgtgacggagacgacgacaggattcggaggcattatcgacgatggtgttggcattgacttttttgaagtggcccaataaaaa

SEQ ID NO: 85361 - DNA, 292 bp, Glycine max
aagaggcttaggtatggccactctatgaagagaacctcatctgctgtggacctgaggatactcgtgctacagacgcatgaacagcatgtatacgctgtagcgcaaactgctacctacatgttgaacataactaaagattgttccctgcggcacgcattagacgtacacacctgaaactatactagataaagggtattatataacacgggtgcgtagaaagggctgattgttatcaatgatcctcgcaggcacattgtgcatatatttgactctaatgctaatggttgaatag

SEQ ID NO: 85362 - DNA, 369 bp, Glycine max
  unsure (1)..(369): unsure at all n locations
ttatattaaaaaaannnnaaaacnngtntttaaaaaaaaaaaacaaaaaataaaacggggggaaaaaataaaaactaaaatacaccaacctcccgggggcggcctctttttatgatccaagctttcttccccttgtctgccaaattataactttcttttaagtgcaacaaaaattaattaactcgcctctgttttacaacatcgtgactggaaaaacacctccgttacccaaataaataggctttcaaaaaaacccccttttaacaaatggggtaaaaaaaaaaaagcccccaccgatcgtcttttcaaaaaattacccaaccttaatgtgtaattgaaccccccctttaacgtacaattaaaagcgga

SEQ ID NO: 85363 - DNA, 377 bp, Glycine max
cccacgcgttcggaaagtaaaagaagagtgcaagtctctttacaaaaagtccacgccagaaagtgtaatccaacaagatatatcatttaaacatgaaacgtgacaacccaccttccgtctaatgatggcacacgatcatctatcgtatacattagggggcggctgagagtatatggagatactgaactgagatgatacatataaagtgtgggttcacttttcaggacaaaccttttgtcatggagctagacaaccgtgaacgtggtttcttacaccccgctcatgactgaactgctttcctgctatgatggacacctgttttaagatccatcccctaagaatgagagatatattgtggaaagaagccaatgcatatg

SEQ ID NO: 85364 - DNA, 428 bp, Glycine max
aaaagaacaaaaaagttgtcaagcctgatgacaaaatgtatgtgccaaaaaatgtaatcaaacaagatataacatgaaaacaagacacgtgagtagtcccttcctcataatcaaggcacacaatcaactataatatttattaggtccgagtagattgcaaatagaaatatttagttgagatgatacatataatgtttggttacatttttcggcacaaaccttttgtcatcgagcttgacaactcttttgttcctttcttccattttgctcaagaatgaactcagtacctgctttgatgaacaaacttcttttagatcaaataccctaggaatgagagataaatagtagaaagaaaccaatgcataggaaaaaagggtgaatgtttatttgaaactatgacaaagctttgcaactgataaatatagata

SEQ ID NO: 85365 - DNA, 363 bp, Glycine max
tcgaaacgaggtattatatcattcttcatcattgagcgtggctgatttacccaggggggtgaaattgagtgtgtgccccattcacattagcactcatagagatcgttccgacggataaccaatcttttttttcccttacacatacaccacattggaaatgcatacaatgggtacactctgttcttttctcttgtgacaaacagagctgaatcattttctaactccaaaagggtcagtcatacaaaattcaacatttgcattcttgccctacaaccttcatgttttctagaatctagaatccctgtgtatgcctgaaatacctggtaaaaatagtacttgctacaccgccaaatttgatgacaa

SEQ ID NO: 85366 - DNA, 339 bp, Glycine max
  unsure (1)..(339): unsure at all n locations
gcgngaaaatgaccacttgctagactggaacacttatagaggcatattttacccacatacatacccgtgaaaaaaagactatgaatcggttaaaaaatattaacatatcatcatttacatctttgatgcgaaaagactcatacttgatgccactggaatatcttcttatgagagcgtggctcatgatactgcgaatgttaaaggttaaaagcatttaaatatgcctgttaaccacaatggaaaaatctctgtttatgctgaataaaactataaacacagaatatagtcacgtgtgatgatgcacaatatcacatgtgggaccacacacgtgttggtatt

SEQ ID NO: 85367 - DNA, 462 bp, Glycine max
cttatttttttttttttttattatctttttttttttaatgaatggattcttcagggggggggatcataacgggacataaccacaacatatggccgcacttgtgctgcaaaacatactacctctatgacctcaagtcaaaggttgtagttttaggcagtttccttgcttctaatcgagattatttggtgatggtctaagatgtccatatgcatcacttttctatcctaatcctcaatcacaggctggatgtgtcaatccttcggtgcatcctctactactatagtcatctcgtgcattaaatcgcatgggttggttttattaaatctatatttgaggcataaaaggatagagttagggttcagtcttaagtcacgaattttagacagatatatcactttgtgtttcttttccttataacaagggcaagggatgggaaagggttatacacaaaatttgaaaata

SEQ ID NO: 85368 - DNA, 378 bp, Glycine max
aaaaaaaaaaaaaaaaacaaaaaaataaaaagcttcaaagattaaatttaataaaaactttaaaaaaacttcatacttcagaatcacaatttcatacaataaattaaattaaataaatttaccgggcccccccttcttatgaatcaaagttaaccctcccgtccccccacctactaagctctctttctttgtccccttatttcaattaacggaccatcgtttaacaccgcgccgattggcaaacccttcagtttccccaccttaatcgcttatgagaccttccctttttctcctctttaattaatacaaaaaatacccccacaaaaagcctttccaataaatttcccaccctaattggacaatttaactccccttttt

SEQ ID NO: 85369 - DNA, 178 bp, Glycine max
  unsure (1)..(178): unsure at all n locations
gccctcctttttttttttttttttttccaataatctcatttatccattaatccttccttactaagagaccgtctattcaatttatttttcatcccaacaaacacantcagtatatatcttaaatcccaaaccaaaaacatatcctatccctcagaaaataaaatccccccacccccct

SEQ ID NO: 85370 - DNA, 155 bp, Glycine max
gacaaaaaaaccaattttattttattttcccatccaattacatgggaattttaaaatctggcaaaggggaatcctattaatttacacaacctatataactatacacttatgtgaaatcaagctcaaatgactattcaacctaacaataataattt

SEQ ID NO: 85371 - DNA, 142 bp, Glycine max
actgctaaccagaacttttttttttttttacttgttctactattgggggggggttgtaccgaaaaccaacaccaaacaatgatgttttccccaacaattacaatttttcttggccataaaaaaaaaatcaaattttttcaac

SEQ ID NO: 85372 - DNA, 136 bp, Glycine max
  unsure (1)..(136): unsure at all n locations
tttttttttttttttttttttttnnccaacccaaaagaaacatctttggctgttctaatcagggaaatagtcaaatgtgattgaagcaaaagctccagctttcacttgcagttttccacggtctgcttatttaggg

SEQ ID NO: 85373 - DNA, 137 bp, Glycine max
  unsure (1)..(137): unsure at all n locations
ttttttttttttttttttttttttttttttttttttttttttgggtgttttttttttntttnttttttgggaaagaaaccccaacattccataaaaaaaggggggaaaaaaaattattgaaaaaaccgggggggggc

SEQ ID NO: 85374 - DNA, 151 bp, Glycine max
actgtaacctgagaatatcgtcattatgataattttaaacaagtcactgatgattatactgaagacaattacaatacaatgatatataagtcaacaattagaatttttgttggctagaaaatgaagatcagatatgttaatcattgtgatt

SEQ ID NO: 85375 - DNA, 89 bp, Glycine max
cgaaagaaaaaacccccagccagaactaattgttccctgttccgccccaaagtttttttaaacctcccttgcccaattttgttgttggg

SEQ ID NO: 85376 - DNA, 73 bp, Glycine max
ccccccccccccaattttttatttttgggatttttccccccccgttaattaaatttggggggaattttttggg

SEQ ID NO: 85377 - DNA, 119 bp, Glycine max
taaaaattgtttagggggctcaacattttaagttataagcgatggaacataaattaaaacaaggatcaacacttgccccaaaacattttattttataaatcttgcataagataaaataa

SEQ ID NO: 85378 - DNA, 114 bp, Glycine max
  unsure (1)..(114): unsure at all n locations
agggnngggggggttttcttcttgaacaattaccccttacagagcatataggttgattctttaatgaaattttgtgggggggttttttggatttactttccggaacgacataaa

SEQ ID NO: 85379 - DNA, 109 bp, Glycine max
gtggtaaaaacccttggggaaaaagggacaattgcaaaccttgctttttttttttcctccccgatttaataaacccccccatttgttttttttgggcaaagccaaaatt

SEQ ID NO: 85380 - DNA, 154 bp, Glycine max
ttacacagctaacaggagatttacataataaaaccattcttaaaaattcatttaattttacaacaaccggccaatcaaatattacacaagctattttttaacgttggcttgattacacccggttaaactttaacctattcattttattttttct

SEQ ID NO: 85381 - DNA, 157 bp, Glycine max
atcatatgtactctttattttttggtgggatcaacgtcaacacccataggggggtaatgctatttaatgcgggttccatattccctacaattaggtgataaagttgcaggataccaacctgtatgtatcatatgaatataaatataattaacatatt

SEQ ID NO: 85382 - DNA, 154 bp, Glycine max
aatcgtgcaataattgatacatatgtatgtgaaaaatagcaaaacaatctttatctttatatacacacactaactccgcgttgttcctcctcctagtaagtgcaacatggccatctcgctccaagaaaaatgtatataatttcgaccgtaacat

SEQ ID NO: 85383 - DNA, 115 bp, Glycine max
aaaccaaagaaagtgcccgttttttattttttgcaatcacaaattacaatctaaacactcattttttgtcagacaaaacaaaaaacacaacccccgaaagaaagaacattgagtc

SEQ ID NO: 85384 - DNA, 111 bp, Glycine max
taaggggatttttggggggaaaacattattttttttaaaaaaaaaccatttttttttttttttttcccattgctttataaaaaagaaccccgccccccttatgtatgggag

SEQ ID NO: 85385 - DNA, 110 bp, Glycine max
gcggggggttttttttttgatgtttgttttttttttttttttttttttttttttttttgaaacccggggggcccccccgaaaatcccccccggcccccaaggggaaacaa

SEQ ID NO: 85386 - DNA, 141 bp, Glycine max
  unsure (1)..(141): unsure at all n locations
ctnnnnnnnnnnnnnnnnnnnnnnnnnnnnnnnnntttttttttggtttattaatatatattggggggattttgattaaaattttttgtgatccaaaaacaaactttaatttaacagggaagccaaccacaacttttaagg

SEQ ID NO: 85387 - DNA, 149 bp, Glycine max
  unsure (1)..(149): unsure at all n locations
gaaaaccagccaaacaaacagaagcnggaaannaaaagaaggncaagaaaacnnaaaagaaaacaaaaanaagagacgcgcgngancngaaancgcncgnggcggnggngangganganncannggcggcgcgngagggaaccgggcaa

SEQ ID NO: 85388 - DNA, 153 bp, Glycine max
ggaactaacaaggagcgtaattttattccttacatgtcatacactcacttttacactcactaaattacataaagttgaagaaaatgacttcctatagaagcaaaaacgcttctgtctctttcctattctattctcagtcgctaagctagaaaa

SEQ ID NO: 85389 - DNA, 156 bp, Glycine max
tttataaaaaaaataaaaataaaatagaactctctccatcaaaacttacaaaaatatgagcccaaacggattttcaagtacttaaaatgaatcaacaaggaaattacattctacttcccacttttaattgtaatgaagagaagaatcaagaaacca

SEQ ID NO: 85390 - DNA, 141 bp, Glycine max
  unsure (1)..(141): unsure at all n locations
cgntttttgctttgttttttcccgttnnccnccncgcgccccacggttggaaacccctaaatttgtttccgtaataattaattccttttttaattccatttccaccgtttaaaatcgttgcttaatacccctccttttatt

SEQ ID NO: 85391 - DNA, 153 bp, Glycine max
ttagcataactttggtcattatataaaaatggtgtttctagccaaccaacattcagtcaggatatgtacacaaatccattggatctttctctttcccaaaagaagtgtttgttatgtagtataactgtaattaattagtaccaccctttagtc

SEQ ID NO: 85392 - DNA, 87 bp, Glycine max
  unsure (1)..(87): unsure at all n locations
cgtacgttagctggaatcctatagagggcggcctttnntttttttttttttttgcctatccccgtttttattcaataaaggaaacta

SEQ ID NO: 85393 - DNA, 155 bp, Glycine max
gggataacaaaggtgtatttataaatttcatttaaacgtaacttgcaggttccaagcttttgacaaactccagtgatatttttcccttttttttttccgcgccataagcttcatacaaataacaaagatgcttccacatggtttattacaaggga

SEQ ID NO: 85394 - DNA, 102 bp, Glycine max
acccataagttttggttttttttcctttggaaaaaaaaattcccatttcaatcttataatatgaaccacaaaaattggttgaataaatacttgggttacaac

SEQ ID NO: 85395 - DNA, 151 bp, Glycine max
gtgctctttctcttcttgttctttcttcaacctctcccttaaatgtgctgcaatgtctttctcatccacattgcatatgattttgtccttgtcactttcacgtatatacaccagcatataagcatttgagtatttggtgaacttaaatggg

SEQ ID NO: 85396 - DNA, 141 bp, Glycine max
taaatgaaaacagaaggcaaatgaataataaataatcaagagtcgagtgtagacaccatgaagaactttgcttccatttattcatcgttatttctaatttcactatttagttaatactaaaggaattcgaaccatatattt

SEQ ID NO: 85397 - DNA, 77 bp, Glycine max
aaaaaaaaaaacggccccgggggcccccccggaattccgggcccggccccggaggggcacccatttttcctttaggg

SEQ ID NO: 85398 - DNA, 86 bp, Glycine max
cccggacccgtgggatgaccctttattttctaaccggtgccttggggcatcccagattttcatataaagggtcgtgttagaatttg

SEQ ID NO: 85399 - DNA, 172 bp, Glycine max
  unsure (1)..(172): unsure at all n locations
ctnnnnnnnnnnnnnnnnnnnnnnnnnnnnnnnnnnnnnnnnngggaagggataaccaaaattgggccttttaacccattacatcaggatgatacatttattgtctactccatggcgttgaacatcaaagaaaataaaataaaatctcaggaaggcatgacatcaatatagt

SEQ ID NO: 85400 - DNA, 139 bp, Glycine max
ccgttggtaagtagtaacccattttatacggggaaagggacttatttgactatgagcatctaccatggaaataattaagccggggagaaagacaaaatgagtagaaaattaatcaagacttaataattacatggacttg

SEQ ID NO: 85401 - DNA, 154 bp, Glycine max
tttttatctactaagatatatatataatcatatgacaaatataaaaaggtttttttcttcttcttcaaattagcataggtgaagagggcaagttgaagccctatatatatgtcacatcaggacgcgtgattggtggatcaatattaatcttgaa

SEQ ID NO: 85402 - DNA, 133 bp, Glycine max
aaacaacaaccaaatacaatcaaaatgataagaaatctaacagggaacaagaatttaaatgaatttccaagttcattacacgggtcataacaaaagacaacaaacatcaaaaattgaaattgaaaaaagaaaa

SEQ ID NO: 85403 - DNA, 131 bp, Glycine max
  unsure (1)..(131): unsure at all n locations
ttttttttttnnttttttttttttttttttttttttnnnnnnttgggggtttttttttttnnnaaaaaaccttccctccaaattttttttccgccctttaaaaagaaacatttgtgaatttacaattgggg

SEQ ID NO: 85404 - DNA, 99 bp, Glycine max
ttttagtcaatctaactggaaaacttatcgctgtttcaaagtttacaagcaaatcggtttaaaatctcttttcatatgggcacagagctactaatatgc

SEQ ID NO: 85405 - DNA, 148 bp, Glycine max
ttggtaaggaaggatttttttttggggaccctagatcctaaaaataatggaggacccgcaggaacaacaaaaccgaggtccaaatggtaaattacaaaatgtgattctttctatctatatgggtgcagatcaaggatctatatacatc

SEQ ID NO: 85406 - DNA, 154 bp, Glycine max
tatcaactacattcttaagcatggatcaatacgaataatgaatgctgaagtgtaaataaacacactattcaatcaaactaactaagattcatggtgttataagattattcatcccaaaatctacttcggttctttgtaacatgaccaactggcc

SEQ ID NO: 85407 - DNA, 126 bp, Glycine max
aaaaaaccaagaattctaaacctgattattcagtccaaagtttatagtagcattagcagaacataagattgaaatattaaatgctataatccccagcaaacagaaggatttcgtcaatcccaatag

SEQ ID NO: 85408 - DNA, 298 bp, Glycine max
gacattcctagggctggtctttaaagattaattaaaatggtaacttgtgaactgtgtattgtgtaatggaaacattgaacttagacatcagtaccataaagattgtagagtctcgaactatatatcacattggtagaggagttttctgctgtgaatactgactttgtaaagattcagaaaaacgtggaatgatctatataagatgcggttgcacctacagacatgtgtacagaaaacaaacactacacgctgagatgaacccaattttaaaactgaataaccaatttattgatgactt

SEQ ID NO: 85409 - DNA, 551 bp, Glycine max
  unsure (1)..(551): unsure at all n locations
atcaaacatgtggcggtgtaattaagattctataaaatgcataaaattcattcacaacaaggccagcaattaggaagacagacagacaccgcaaacaagatagaatcagtctcagcttgagtagaatagatagaatgctgagggttcgactctcatgtcctcatattagaccctagttgtgaatgaattttatgcattttatagaatcttaatgagaatgatcaaacatgtggcggtataatttcaaattaccttgcataatttaacttgtataggttggagtgtgttaagttggaaaattacaatttttagaattaacggtttgcagttgagggtgctaaacacatgacataatatccttttgtaataatccatgcatcagtgcagtaatgggcatcaaacatcctagatctattaaggtttcaatgcacaaagccacctatgccatttcagcgaaaaatttatctatgaactctacttacgtgaataataatctacataattgagtgtatntattgatattgatataattattataaagggagaaaaac

SEQ ID NO: 85410 - DNA, 446 bp, Glycine max
atcgcatttttatttctgtaatcattctcgctaatgtcaactgcccccgcgccgtcttcggcgccggcgaataacggcaccgcgcctccgacgacaactacggacactccgttcgcaccgacttccgccacaccttccgcgccgacaccctcaacttccgagtgttcttcggcggaaactccgtagtattctccggcggggacacctttcttgccaccttcggaaaactctttcttttccccttcagggacttcctctttttcttcacccggcaattcttttggttttccttcaccgggcacttcaaccacgccatcgacttcttcggcggcggcggcgtcgacatcgacaacggcggcacccaatggcgtgaggactccgaggtcaccgaattggagcttgccctcttctccgggcggatcgagccccaccactccggaggcttc

SEQ ID NO: 85411 - DNA, 196 bp, Glycine max
  unsure (1)..(196): unsure at all n locations
caactnttgaaatacttgcagatccttgctgaacaaagttagcttaacatctaggggttgaaggaagatgttgcgctcacataaacattgatgttaaatccataatttgctagttgtttagcgcatcagctaaagcgttcgatctttttaacatatctcaaaccctggatggacttatccttgctaaaacgatcgc

SEQ ID NO: 85412 - DNA, 435 bp, Glycine max
  unsure (1)..(435): unsure at all n locations
cccacgcgtccgattttttcatgattaaatattaaatattttaatagtgactaaagtaagacaaacattaattatggattaaaaattagaatttaatatttttaggaactaaattaaaagtaaaaattttatataaattataattgaaaggtaaaaaatttatatggactaatatttaaatttaaatgttttcaagaattaaaaatgaaaaaaaaacattaaaatggataatttttttttacaataattgatattatcttatccggtatttaatctaaaattcttgttaaaatgtatatgactttttttttttaatgtatatgactctacgacgaattggntatgatattttaattttttaaccccggataaataccaatcttgatgtattcattctaattttttgtaacccttgttctttctttcctaccccaa

SEQ ID NO: 85413 - DNA, 67 bp, Glycine max
ctcacaaatacgcataactctcgcttactcattatatctgatgttgcccaaaacttggggggcagtc

SEQ ID NO: 85414 - DNA, 276 bp, Glycine max
cttgctaaagcttctttacgggtttacgttttcgcaataaataaaacttcatgagaagtgtagttgtgataaaagtggaagtctctcttctcttgtgatataaacgaataatagttttatttcacaaaaaaaaaaaaaaaaaacaaaaaaaatacaaaaactcttaaataaacaaaaataatatttacaaaaaatacagaccgctccgttttaaaagccccattgcttctccaagatcattgcgatttcttgctgcattcatgaacatctactact

SEQ ID NO: 85415 - DNA, 302 bp, Glycine max
cttacgcgtactaccatgcaatcgtacaggcttgctttataaacttcaaatttgtggtgaaaatctgaagtgaagaacatactccctttattgaagacttctgaaaatgaaagtcttgaaagagataacaaatattatcctgaacacgttcatttgctggatgctcataaacgagtcctatttgttgatttaactcctgtgattgaagcaaagctaaaaacaatagaatatgactttatgccggatactatggatcaaactaaagaccattatgaggataccttaccactcaatgttcaacc

SEQ ID NO: 85416 - DNA, 289 bp, Glycine max
ctcacacgtaggctgacactttctcgcctcttgaatgtggaagagtaatcgagagacagacggttgctgtcagtatcctgaactctatatcaggagataaattgtattgatgatcctctctaaattcctcattgttttcaaggacaaagatatatacattttggacggcatcaacactgcgagacaattctccgatgccgtgctccaatctcaatgcctgtttcatagggaatcaaaggttgtaaatggcctcattatatacggcttggccgattaagctgttgatttg

SEQ ID NO: 85417 - DNA, 507 bp, Glycine max
caaaaattactatttgttgactcgaacacttaagttgtcatctttacacaattaatacagtggaaaaaaacatagaagattggttcaaaaatatgaatatatcatgatttaaatattacattatatgtgactcatacttgatttagttagaatgtctttgtttgtgtgtgtatgcagagttcctgtgtattttacatgtataattgcattaaagcgtatgaatggtatccgatgttcaagtcaaaaatcatgctgaatagatctataggccctcctaagatctcggccttttcttggagattattacaagacagacttcacacgtgtttgcaactacacagaagaaggggctactttataaacctttgcaacaatcttgcggattatgaaaatataacgcggagacccacattttttttatcatggtcttctccttccatatattggaatgcagttatcaactggctgattttaaactattgttatttccaaaagacatcaattttg

SEQ ID NO: 85418 - DNA, 200 bp, Glycine max
aaattagaattttttattcttcaatgggccaaacagggggcgtgacattcgagcgcagagaccactttttcacaattcctacgcgaaccatttgtggaaaaaatctgagttacttgctgtaaatggtgattaatgggaggtcaaatgggacaaattttttttattaatcgatcaccacccaacagaatacgtgtaataaa

SEQ ID NO: 85419 - DNA, 465 bp, Glycine max
ctgaatcacacgtacgtgcaaacatgaataccaagcccggttttttcttgtgcttcctatgtgcactggttctgatatctgttgagggcactgacccattgaaagatgagacacaagaggaaccaaagacacagtctgatgcctggggaagaggtggaagaggggggcatgatggaagctggggacacggaggacactgggggcatggacgaggacgacaccgtggatgacatgtgggacgaggacacagtggaggacatggtggaagatgcacatgactgtggcgaaagggctgtaaatgtgagctgaagtaaaaactacaaatatatgaactgaacacactcatatacttgacgagactccatgtaataactcagttatatgtaagaaaatagacatactagcatggactatatactggcttgagctcacataaggtgaatgttattcgtctaccatgcatgt

SEQ ID NO: 85420 - DNA, 207 bp, Glycine max
gcgaccacgcgttcggaaaaacgttcgaggctgttttggttttttggacccatttatgtcggggtaggggctgttcttcccgtggactgcataggaacaggtgaattcgaatggagcctgccacctatgccgtgtgagatttattaaaagaaaactgagtaaccgtggtctctttttccgaaatgtaataataagagctgttttttt

SEQ ID NO: 85421 - DNA, 523 bp, Glycine max
cccacgcgttcgtccacgcgttcgttttatatatgtctgttgtaagtcttacatcaggacctgctgtaagtacttacacatcaccacccttcgtgatcaccttatggacccgacttggggtcaccactgagagccatatctgtatcttctggcgaggcactattcgcactttttttcggatcaccgttatcactgttcgacttcttattgttatctggtgaaaaaatatgatgattaatgggagaaaagctcattggttcacttgaataggtgtacagtgctcaaggggtaagattgaaacctaaactgcttgtttcattatgaagtcaaatacataaatgtctgagaataaaacgatgatgatggatgaagatatgggtttttgtggcgatgtagatatgtacattgctacccttggagaatgggacattaccatccgtgaaaatgagcctaaggtgatagaagatgatgattataatcatgaaaaaaatgatgtgaacgacctaatgaggatgatgtggat

SEQ ID NO: 85422 - DNA, 406 bp, Glycine max
  unsure (1)..(406): unsure at all n locations
cccacgcgtncggcttccttaagctccttagtgctgctccttgcagctctaattctatcccctcaagttcttgcaaactatgagaatcccccagtgtacaagcctcccactgagaaaccaccagtttataagcccccagttgagaagcctcctgtttacaaacctccagttgaaaaccccccaatttataagcctccagtagagaagccaccagtgtacaagcccccagttgagaaacccccagtttataagcccccagttgagaaaccaccagtgtacaagcccccagttgaaaaaccaccagtgtacaagcccccagttgaaaaacccccagtgtacaagcccccagttgaaaaaccaccagtgtacaagcccccagttgagaagcccccagtttacaagcccc

SEQ ID NO: 85423 - DNA, 470 bp, Glycine max
ttaaacaataattataatgggactgagtcagtattttaatatcttcatctaaacaggatttattctaaaaaaatatattaaaaaatgtaattatttataataaatcaatatttataaatatattataataaataaaataaataaatgtattaaattatattataaatgatggaataaatatctttataaattttattataaaataagtatctttaaatatgttggataattaataaattattatttttcctcttacggatcaagatggtccgtgagaggaaaaataagcaagggcaattttgccattggtttagaatgctgggtgcacctagcaacactctgcaaacaaagcagtaatgactacaagtgtcagcggagatcgcgagattgggttgaatttgatctaatctatgattcaaccgaatcaaatgtaaatagattgagttgggtggagtttctaaaagaaaaat

SEQ ID NO: 85424 - DNA, 463 bp, Glycine max
agaggtgagtttgactcatcagagggcgcgcacgacgtgactacgcgtgcatggtggacagcgagacgacgtcgacgcatagaaactggataacccctcatctcttctgatcagtcaggacgagcggggctattcgcatgagagccactcagcaacgatgcagttcgcacacacacgtactcatggcattacaaccattctttttcattcacgtctcaagtccaccgattgaatagtggctttaaatgacatcggactagttatctactgcatcgcactgtcgatttttaaagaagcatgaatcattagagatagtaatctatagggggttcatctgatgagaagtactttgtcactagtgtgtgatggaatcgtgggcgcgtttgtcaacgcatggataaaagaaaggtgatccccacaacaaataataaggtcgtgaaaatgaaacgactatgcgcctgat

SEQ ID NO: 85425 - DNA, 89 bp, Glycine max
aaaaaaaaaaaaaaaaaaaaaaaaaaaaaaaaaaaaaaaaaaaaaaaaagaaaaaaaaaaaaaaaaaaaaaaaaaaaaaacaaaaaaaa

SEQ ID NO: 85426 - DNA, 260 bp, Glycine max
ctaagtgtaatgatgagactggagcaaagggacctaataattttaccgagatggggggtcttactagtatcctcattttctcgcattttattgttatcctactaggtttctatccacacaatctatacttgtttacatcaatactattgctcccaaatgtcctcaaaatcccgggaaagaactggctatcaatgaatctttttccattacctcaaaatgggggaacaaccaagttgtatgaaaataggtgaaacgactaa

SEQ ID NO: 85427 - DNA, 308 bp, Glycine max
aaaaaaaaaaaaaaaaaaaaaaaaaaaaaaaaaaaaaaaaaaaaaaaaaaaaaaaaaaaaaaagagggggggccgcttttaaggttccaagcttgggtgcccgtgcttgcgaagtcaaacttcttttctagtggggcctaaattcaattcacttgacgttgtttgacaaaatcaaaactgtgaaaaccctttaaaacccaatttaatggacatcccgggcattcccttttttaaagtttttgtaaaaaaaaacaggtccgcacccttctttacttgccaaaaagggcccaaccttaatggctaatggg

SEQ ID NO: 85428 - DNA, 66 bp, Glycine max
aaaaaaaaaaaaaaaaaaaaaaaaaaaaaaaaaaaaaaaaaaaaaacaaacaaagaaaaaaaaaaa

SEQ ID NO: 85429 - DNA, 123 bp, Glycine max
cccacgcgttcgaggacgcgtgggctgacgcttgtgacaacttctacccaagcgggagctaatgtggcggaaaaaaaagttgccgattttgttatttttggcaagaatattttcaccgggcgg

SEQ ID NO: 85430 - DNA, 228 bp, Glycine max
cccacgcgttcgtccacgcgtccgatataaaaaataaaaaaaaaaatattttaaggaaaaaataaaaaaagaagataataaattatatagatatgtaaaggggcggagggtttataagaataaagcatacttaattcgagcatgctagaaaatcatttttatatagggtgccgtaaattgagttaattggtctgccttttacaacagcttaaatggtaaagctctgag

SEQ ID NO: 85431 - DNA, 525 bp, Glycine max
aaaaaaataaaaaaaaaaaaaaaaatattaaaaaaaaaaaaaaataaaaagaggggaaaaaaaaaaaaattttttaaaaaaaagaaaaataaataaaaaatactttttatatttaaatgcaaaaaccctttgttaaaaaaaaaaaaagggggggcccgttttttgggagtcaattttttttttcccgggttttacacctttatttttttttttgggcccgcatattccatattttggggggggtttttaaaattggggttttgggaaaaccccgggttttccccaaaaaaaggttttttggaattccccctttttttctgggggggtttttggaggaggggccctcccgggggctttttctaaagtttgcccccctttttaaaaaataggggcccccttttatggggttttttttccaggggggtggttggggaaaaccgatgtttatttttctatttgggatgggctttaagccccctattttttttttttttccctcttttttgaccaccccactctcttttt

SEQ ID NO: 85432 - DNA, 398 bp, Glycine max
cccacgcgtccgcccacgcgtccgaatttgtctaggttcgtgttttgtccttgttttgttatttgcgtttttgtttacatcttgtttcgttcttgtttgcgtcttgtgttctgttatttgcgttcttgttcttgtttcttgtgtctttcacactttgtgtaaaaaaaaaaaaggttgcagaaattttgaaaaaaaaaaaaaaaaaaaaaaaaaaaaaaaaaaaaaaaaaaaaaaaaaaaaaaaaaaagggcgggcggtctaatttatacaatctaacctacccttcccttccacgcaataactttttttttttgtaacctaaattaaattcaatggactgggctttacaacacaacgactggaaaaacaaaacccttacccaacttaatttaattgca

SEQ ID NO: 85433 - DNA, 182 bp, Glycine max
cgcacagttacaagaatacttcctactacaaccaaactctcgtgtctaacaaggtgcgtgctaatagcgagatgctcatggggaacttcaacgttttggacttgatttggtacccgtagccttgggatgctgggggggttcaacagggaagtgcaaagacacctccgacaggtgcgacgctt

SEQ ID NO: 85434 - DNA, 371 bp, Glycine max
gttttattgtgccaatttctagagatgatataattatattatgatcgcgcgtgctggtaatgcctgggttaaaaaaaaaaaaaaaaaaaaaaaaaaaaaaaaaaaaaaaaaaaaaaaaaaaaaaaaaaaaaaaaaaaaaaaaaaaaaaaggggcgggaaaaaataaaaaaacaaagataaaccattcgatcgaacgaattaataaaaattttaaaaaggaagttaaatcaaaattaaagaaaagaaatttacaaagtcgtgactacaaaaaccatgtgattacaaaaaataatggaaaagtaaaaaacacttttattgaaaaataaattattaagaaaaaagcgtaaaaaatatataaatcaaaaaattta

SEQ ID NO: 85435 - DNA, 418 bp, Glycine max
gtggaattgaagttgtttatatatggaaaggttggggataccataaatggaaagcttgatgagtctctcattcttgaagttgttgcggatgggggaaaggtccatgtccttcttgcagatggcgacttgacagtgaagatgaaattgcattctttaaaaattaaggatgaacttcagggtcgtctatctgtagctccgcgttatcttgctgtttctgtcttgcagagtgaaacttcatcctctgacatgtatgattcccatgggaaggaagtgtctcatgatgatgatgacagctttacggatgcattatctgaattcatttctcaaactgatggaggatattgtttacataatatggatttggatcatcagggattggtggggattgcttctgatttcgagtctctagaaaacaaag

SEQ ID NO: 85436 - DNA, 403 bp, Glycine max
  unsure (1)..(403): unsure at all n locations
gtggggttatgacaagtagtggtgttgtttctagtggaagcatgtatccctggctgcgtggtaaggtttctgcttcttgacgaagtgtagagaaaattagttgcctcaaattgctatattatgtgactgctaaacatcaaaagtagtctttgtcttgactacgataagagagagggagcttcaacctgtaaagttgacttgttgactggagaaccattggggaatatgtgggtagttaggattgatgcttttatatgccaaagcatggttaagttatctaaataatccgtgaaataggactcgttgtttccttgctctgaatgggaatcgctatagtttcctgtgccaaannnaaaaannaaaaaaaaaaatttttttttttttacccaaaattaaattaaat

SEQ ID NO: 85437 - DNA, 327 bp, Glycine max
cggacgcgttcgcccacgcgttcgcccacgcgtccgataaaaaaaaaaaatggaaggctacaaaaagcaaaaaggtgctactcttgataaaggcccataaaatttggagccttaactaattaattcatctgattgtgggcccgggatacatcccttcgtgtgggctagggagcgcacacgtggcgcttctggcagtgcctgttactttaccactgaagaccaagtggataacattgtggtcgacaaaaacactcgtacaactcctcgagaccttcgcaactatggtcccacaaatctcgctctctacactgctggtcagtttcccta

SEQ ID NO: 85438 - DNA, 267 bp, Glycine max
gccacgcgtaccggtgcgcctacattcccagctgcgattttgaattctgtcctacgaggagatccacggggaccttgactttggcggcctcaccttattgctcctagaccaaagcacacaagctttggatgtgttgatgagcgcacttgatcagctgcatggcccgtctggaaaagactatggagagctaaatctatttgagtcgcacttgtttttgactaaaacagagccccagaaggatcacccggcaaatgcatatggacaacc

SEQ ID NO: 85439 - DNA, 212 bp, Glycine max
gccatacattagggtgagtcttcgtgcctttctgcaactctaaatccggtcgtgggggttttcaaaggtctcgttgctactttccagcggacctcatctgtcattcgccaaagcaccccagctttagttgagtgagccagcgcccattatcagttacaggccttctttagacaagactctggctagcaataccatgatgcgtcgcacaactt

SEQ ID NO: 85440 - DNA, 161 bp, Glycine max
gggccctatagtttgaagaccttattaatgtatacatataatgaccggcataatagtcatgctttcatgttgataaaggaaccaacggatctctctttgatggggcctgctagtataattataagtacaaatgtgtctaacagtgccggcgacaggagtat

SEQ ID NO: 85441 - DNA, 315 bp, Glycine max
tgatacgaagttgcctccgtgaatagcaattcaaagaccttagaggtgagtgagtatttgcctacgtacttaatctattgtgtgaacaaagtcgatattattaaattagataattgatcaccatgtcgaagaagctgctataagcttccctatacatttcggtgtggcatttcatggcaacattataccttgggcaaaccaactaccgctacgtttttgacacacatggtgaccctcttgagactgacaatgaatattacattaggcctgacataacatacatcggagggcagttgacattgatcaacataaaca

SEQ ID NO: 85442 - DNA, 237 bp, Glycine max
tttgtgaagccacaatttaaaatccggtatgataccccgtttaagaggcttggtttggagggccattcttccagggccaagaaaaagaagaataaagcccttgttccttatattatacaagctatttacttcggggtccttttcattctccataaggtcaatggattgctattacttggcttcaattgtgacaaccttgctttttttgatttaacccaaacaaccatatattgttat

SEQ ID NO: 85443 - DNA, 460 bp, Glycine max
gcgcccggccggaattccgggctgatatacacctaactgcaaagatgaataccaagcccgtttttttcttgagctgactctggggactgggagtgatgtctgttgggggcactgagccatgcaaagatgagacacaagaagaacctaagacacagtcagattcctggggaagaggtggaaatggggggcatgattgaagctgtggacacggtggagactgggggcatggaggaggaagacaccgtggatgacatgtcggacgaagacaccgtggaggacatggtagaagatgcacatgcttgtgtcgaaagggctgtaaatgttgctgaaataaaaatcacacatatgtgaactggacacactcctatacatgactgtactccatgtcataactagaatatctggaagaacatagacatgctcgcatggactctattcgggcttgagcatgcataaggtg

SEQ ID NO: 85444 - DNA, 195 bp, Glycine max
aaaacccaatgatttactaattaatcgacaacgttgggaaaaaaggttgatatttacatggccctacttctcccacagagaatattaaataagaaccgtcaaaaggggcctttttcccggtcccaccgggggttgaacattaaaggaaattcctcttttgggcataaatttgaggaagaaaaggtccttttccct

SEQ ID NO: 85445 - DNA, 171 bp, Glycine max
gagtccttaaaggctgggattactttattagcggagaaaggacaaaaaaaaggttggcgtattaccatactaaagacgagggaggcatgtaataaggaacaaatatattttttataaggtttgagcaaatcaaggttggtgtgaacgttagaatggaagttttttaggggg

SEQ ID NO: 85446 - DNA, 342 bp, Glycine max
aaaaataccgggggtattttaaaaatttaaaaagttttaaaaaaatttttttatttgattgttccaaggacaacaccccccaataataatgaccccacaaactttttttcccccctaacaaacccccgattgtaaaaacacaaaaggggagggattttcccgcataattctccaccaaaaaaaaaccccttacccttttaaaaacacaaagggcccccccagaaaaaattgtggacccctatttttttcataaaaaaaggcttcaaataaacccccttttggcccaacccgcgcgtgaacccagaaattcctcccccccccctccaaaaaaaacaactttcc

SEQ ID NO: 85447 - DNA, 316 bp, Glycine max
agcacaaaaagcaaaaagcggtgcactatagattaatatcatctatgccgcggatactcaggacgtgtgatacactaccatgacgtgtcaagaccaaacaggcgagaccaatttaagtacagtttggctcccatcacgcaaaatacaagaggctgtttaaattaccattaaaccagcccaattcttcaagctaaaactgtcaaccaggattacttcaaaccctactcaatccgtggacagcatattatattcctcactttgaaaacgcaccaaatgttattgcgctgtaccctggtccataaccaataaatgcctg

SEQ ID NO: 85448 - DNA, 403 bp, Glycine max
aaacggaatttcccaaattctttgcccactaaaaaaaagaagggggccccccccggtaaaaaaaaaaacaagggggaaaacctttaaattcctagaaaaaaaaattggtttaaacccccccaggaaaaggaacaatttttaatcggtttttttgcccgggcccaaaaaacccccaacggaaatgcgggggggcctttttgggttggttttaaaaacacttcactgggaaggggcaaaaaaggcgggtggaacctactaagattccccgggccgaaaaaaatttgttaaaaaaacattggcttttcccttccaaccccggggcaaattcccccgggtttttcttccccccaccacccttcataggtcccccccttttttttaaaaggccccggggggccccccg

SEQ ID NO: 85449 - DNA, 395 bp, Glycine max
gggggcgctatgaaacggcccccaagtttttaaaaaggaaaaaaatttattcccccctttttttcatttaaaaagggggaggcgccatagggggcactgggccaaaaaaaggggaaagaaaataaaaattcttttttaaaagggggggggaagggtgcaaaaaaaaaaaaattttgggggaaggtttaaccacagcccttggggggggcggggcttttcctttccccttccccgttttttccaaggggggggtttaaccccccccaaaaaaactttttttgtaagaaggggaggccttaccaaaaccagggtggcccccctggggggccccttttttttggagacccgtccctggttgcactgtaaccacaaaacaaaagggggggggtttttga

SEQ ID NO: 85450 - DNA, 413 bp, Glycine max
gaggaccggggggggccacccgaaaatttgggaccggacccggggggggaaaaatttttccttaaaagggggtaaaaaaaagctgggaaaaaaaaaggaaaaaacctcttccggggaaaaaatgttttccccaaaaaattccaaaaaaaaaaaaagcgggaaaaaaaaaggaaaaacccgggggggccaaaggggggaccaaacccaaattaatggggggggcctaactgccccttttcaaaaaaaaaaacctggggggccctttttattaaaaaaacgcccaaccccgggaaaaaagggtttttttttttggccccaaggggtttttttttttttccaaggaaagaaggcaaaagttgttttcccttaaccccctgcccaaaaaaaaatcaaaaaagggccccccctttttt

SEQ ID NO: 85451 - DNA, 309 bp, Glycine max
cggggaaaaaccaaaaatttttcttttgagtccccccggccaaaaacatttttttttttttgggaatgaaataaaagggcccccttggggggttttttggggcggggaaaaatttttttgacacacaaggaaactggaaaatatttggtaaagggggggggggggggggttgaaattggaccccttttcacaacattgaaagggggccaaatttttttttaaccttttttccaaaggcaaaaaaaacatccttaaaaaactggttttaccctttttttaaaaggcccccaaaaaaaaggttgtttaaaa

SEQ ID NO: 85452 - DNA, 377 bp, Glycine max
ccaagcgttgggggactcttggggaggacggggaatttcgggccggaacctggaggcgaaccaaattttcctaaagggagacggttaaaacctggggttatcaacagcaaaagggattgcagagcgaaaataccatccgctaacaatgacacacaacctaagaggcgacagcataaaacgtgaaaccatgagagcgtaaagagtgagcttagtcaacaaaatagggccgagacaacagacagcattacagtacagaaacatgaggtgcctgctgaattaaagaaacggacaacccgcagaaataagcggaatcccattgtgggtgccgggggcggtattttttttcaccaacgagaaaggcaacaggggattgtctt

SEQ ID NO: 85453 - DNA, 351 bp, Glycine max
  unsure (1)..(351): unsure at all n locations
tttttanaatgacttattttcataactctatgcaaaacaacacgggggactaatcaaaaaacactatacatnctttcccatatcacatctctcatatagaaaaccctacaattttaatcccaaaaagtaattcaaaaacactacatatactttacacgcaatcaccatctgctatctacaatattatcaagttaggagacaaataccccacatccactccaaacgtgtgaaaaactcattatttaccacagtttaacccacctcagacggtaagaacaatcattagaatcaccgcaatattattcccaaaacgattatctttattcttatgttttcaaaccacatctttct

SEQ ID NO: 85454 - DNA, 339 bp, Glycine max
tttttattatcaatcaggtaaaaaattaaaggttcttattcaatggagataaggggaacttctttagaaacaaggttcccagcccatgtaccaccatggctgatcctttattacatgctattaattctctataaggatgatatatgggagcaatttggttaaaccaatggcctttgattggtacaactcatggggggtcgggggcttattaccctaatgtggcatttccttaggttgaaactgatccgatgttgaaaccctattattctgttcttgagaccacatcaaagcccccattatttttgttggagtggactccgtcatcaggaaacgaaccca

SEQ ID NO: 85455 - DNA, 152 bp, Glycine max
atacaagggcctctttttttgggttttttcttttatcttttgccttttctaaaagtttttttttgtttaaatacaatttgtctgggaagctttttttcattcttttgcattgggttgggcggatgtttttcttgtgtgggaccttttttttc

SEQ ID NO: 85456 - DNA, 363 bp, Glycine max
cccccccccccccccctatttttttttttttttcccccaacaacccccccaaaaaaaatttttccaacaaaaaggggcccccctcattttttcccccccccccccaaaaaaatttttttttccccccctctctttcataaaaaacaaaaaaaaaccccttcccccaaacaattttcaaaggggaacccccccccccgtttccccccaaaaaaaaaaaaaaccttttaaaaaaaaaaaaaaatttcttgaaaaaccccccccccttttgtccccccccccccccccccaaaaaaaaagggcccatttttcccccccaaaaaaaaacttttttaaccccccccccattttcttacgggccccccc

SEQ ID NO: 85457 - DNA, 570 bp, Glycine max
  unsure (1)..(570): unsure at all n locations
aaaaaaaaaaaaaaaagggggatttaaaaaattttttttttttttttataaatttttttaaatttttaatttttttttttttatattttttttnnnnggggccccccccttaaaaaaaaaaaaaaaacttccctttaaaaaaacccacaaaaaaaaaccttcttttttctttccccctcttaacccccccaaaaaaaaaaacccccccaccgttgtaaaaaaaaaaaaaaaacctccttttaaaatattttaaaaaaccccccctttttataaaaaatatccccccccaaatcctggggaaaaaaaaaaacccccccccctcccttttttataacaacaaaattatttttttattaataaaaaaaaaaaaaacactcttcgcaaaaaaaaaaaaaaatatctttcttcttcccatttttccacacagcccccttttttttttctcatattaaaaaaaaaaaaaaaacacccccccaataatccccccttcccccaaaaaaaaaaaaaaaattttttttctccccccttaaaaaaaaaaattttcttctcccccccccttttttttttttt

SEQ ID NO: 85458 - DNA, 224 bp, Glycine max
agtttcaaattctcgccccccgaaaacagtctttttttagcctaagcagcaggaatgttttccatagcttatataaactgttgttcaatatcaagaaagatcactgtttccattactggtttgaccccctttaaccatattgttgtatatacaaccacttgcttaaggacctgcagaatgttcactacttagacccaccctttgataacattttttttctgtaa

SEQ ID NO: 85459 - DNA, 287 bp, Glycine max
gaaacaaaaaggaaacctttctaaaacaataaaagttataattttacaagaggaaattattgcaaattgaggggattgaatgacaccagcaaatttacattccaagaatgccaattctcaagagagagcaatgtaataaagaccatcatatcatcgtctctctaagcaaactaaccacagcatcaccacttagcagttacactttccactcccttcttcgcttacaaaatgcctaccagcacaactctatcaaaattacaagatacctattcttccactccctcttt

SEQ ID NO: 85460 - DNA, 330 bp, Glycine max
gttgaaaacatttgggatcttttttttccctttaaaaacggggttttttttcgggagatttttttttttccccgggtgtaagtttgtaggtggggggaatttatccaaatttttttggaaaccttcccccggggtttgaaatgaatttttgtaagaaaaacttatgaaccctttgaagatcaccatttccctttgggtgggggggggttccccgggataaaaccctttaaaaagaaatttgaggggtcccttcccttactttttttacccccctttgggccttgggttttttcactggaaacttgtttttaacccaatccaaataacccc

SEQ ID NO: 85461 - DNA, 431 bp, Glycine max
ggagagaaacgagttatacctatttttatccgaccaagacggggaataatcaaaacaaaaatttgtttctgagtgaaattggtttccaatcacaaggccaaacaaaatcagaagcaaaaatataaagccgcaaggcacgaaaacataatgagtgaacaaaataatattaatgcaaccctggcaaaataacaagttgcagaagctaaacttgtctgggcaaatagaaaataaaataaaccaactaaaaaacataggcggcttgcgtatacaacgaatgggcccttttccttataaacagggagaacagataaaaaccaatggcctcctccccctgtaaaagtaaaaccttcaaaaaaacattctatttgatttgcccacaaaataaaaatgcatgaaattggccgtataaacccaaaaaaaaaaaaaaataa

SEQ ID NO: 85462 - DNA, 346 bp, Glycine max
aaaattaatttattttttttttaacaaagtatttttaatattttagggggttttatatatatattgtgggtatacaaattaagatttttttttttaccttggggggccacaggggagccgggggagaggaacaacgggagggcacagggaggagcccaaaaagaggagaccgggacacaaaaccaaaaaatagggcgggaaaaaaaggggaaaaaaaaagaaaaaaagagacgactgtgggaaagggaggaaaaaaaaaaaatcgccaaactcccaaaaaaaaagccctgaaaaaaaaaagcgaaaaccccgaagggagaaaaaaaaaaaaaaaaatcgggggggg

SEQ ID NO: 85463 - DNA, 194 bp, Glycine max
aaaaatatatatgctggggagtaaaaagatgtgtcaactacatgcatggctggcggaaaaaattaacctatgcccgcccaaaaacgggtggagaccatgcttttatttgtgagtacaaacatatatccttgttattacaaggagtacactaaaggatatgattgtgttcaattcatataatagagatttttact

SEQ ID NO: 85464 - DNA, 396 bp, Glycine max
aaattattgcatagccatttactaagggcgaacaatgtcctttgagaacaggaaatctctactttccatccctaattattcaaactagttttcagtcaaaaccagaaattgatctatacgttgcatttaataccaatgactccatggcgtatatgggtctacccataaaacgcatggggggaaacagaaacagaaacttgattatattcatcattctcccagactatgaatcgaataaacccactttaaagagcttccttatttgtgcctatttgttaaacttctcactaaataaatttaaagctaaccacgttcaaagccaagctgggttctttaaggatgtaacaactggcttcacttgcaagtaaaaatagagactgaattcttttttttgtc

SEQ ID NO: 85465 - DNA, 204 bp, Glycine max
gattaatgaaaacatccttggcggaggcttagagagacattctatgttgatcaaaactttatggaaaaggtgattatgaaagacgaatgacataaactgaaactgggaataattacttggattccttcggccaacacgataagaaaagactgctgtggtgggagccaatgataatgtatacacacacttggctcgctgtggaaa

SEQ ID NO: 85466 - DNA, 355 bp, Glycine max
  unsure (1)..(355): unsure at all n locations
gatgctctagagcgggcggccgngnnttttttttttgttcctttaaccaaaatttcttatttattagacntgaggggnccataggaggcatattatgaatataggtcccaccatatacaggaaaaagccactgagaacaatattgacctatatatcaagaacaaattttctgcttaagcgttgaagcaatctcaatcgggcaaatgaaactttgtggcttgaatgagaacttattattaaattaccttgtacataaaaaatcatattatctaaacccaccctctgctaattattcaaaaagaatttcactctaactaactatgggacacacacaacgtatgatacaagtctaatc

SEQ ID NO: 85467 - DNA, 252 bp, Glycine max
ggctagaaggattttggtcggggggtaattggaattccccacccttatcggaaaagtttagtgtaaatttcccaatgcattaaaattgcgggggggggggacgaaatataaaaagttaacttcccctgcctggaaaaaaaattaaaaattcccaaaaaaaaggggggataaacttactcttggggttgggggggggggacattgaacccacttgaactttaatcctcgggagcagacccgtgggcgaaccct

SEQ ID NO: 85468 - DNA, 288 bp, Glycine max
agaggagaattttttaatattttttattttttttatttttttatatttaaaatttgatccttttaatatttttatgacaaaactatttagtgctttttgtgttaggctaattcattaaaaactgttgtttttatgtgagaaagcgaaagacatgataaaaaaatttattaaaaagtaatccatgatcaaaataccaactctaataactaatgaaaaaaaatttaatttgacatttataaggtaataaagggccttgaactaaactgcatgagaaccaaatcctccaat

SEQ ID NO: 85469 - DNA, 311 bp, Glycine max
cgtgatctatatcgctatatcaagcgacatgcgagtctgacatttatggatccatggctgggttacatcgattacgtgacccacctacactagttctgagagcattgctacatagctatgttcttatattaaagtgtgaaaagcatagatgtacatgaacacttacttatgttcccttgttttgtaagcaagaaatgtgtcaagacggtgaggaaattttggtgtgaaatttacaccaaggcgtacgtctggaagactcgatggatacttaaacgaaacctctctattgataagagcagaaaggatagcta

SEQ ID NO: 85470 - DNA, 204 bp, Glycine max
atatcattgtcatttactttaaaggagcaatctcctaagacaacaggtcattaaaaacgccatagacaaccatacaaattcgagtccagtcccaacaaaaaacccacctttccgtaaaattaaaccccttaaacttgaacgaattcataggcctacccgtatcctccaggaaaagttttttcccctaaaaatttaacaattttt

SEQ ID NO: 85471 - DNA, 395 bp, Glycine max
tttatttcaataatcctttacaatttactattttataaacctatcacaggggaatttcccaacgattcacatacacaaaaactctgaaacacactacataaaatttcactttttcttacaaaataacctacacttttatttaaaaaaacacaccttatctccttccttttttttagaaacaacaccagtaaaaccatcaagaaaatttgtttataaatttatcccaacttttgtcccctaaaaacaccctgcatacccaaacgacaaaactttttttattaatgcacatacaatattaataccctttttaactcttttcttgcaccataactatatatttcaacaaattttctttttccaaaacaaaacatttttatttttaaaccatctatttc

SEQ ID NO: 85472 - DNA, 355 bp, Glycine max
atttcattaatactcttctattcactattttataaacttctctcaggaggattacccaaccatttactataaccatcatttctttaacacaatacgggtctctgacttcacttacaaatgaacctaacatgaaattttaaaaaaacaaacatcacttttgcattcaaatttaatattctcccctaaaaaacatctaataattctttgaataaacaaaactccacggcttgtgtccaaataaaacctggaaaacaacatatctaaattggtcctgtgaatattcatacatcattgcatcactattccactgcttgtcaacacccccactagatgagtgattaaaccctttggtgcc

SEQ ID NO: 85473 - DNA, 375 bp, Glycine max
tttttatctactaatttttatacactaccatattacatatttaaaagaggatttctcttctttttaaaatataccataagaaatgatacccagtattatgccccttatatatctcacatactaacccagcatgaaatttatcaaatctatcatgacttttgcataaaatttctaaattttacccttaatattctctttcaagtctgggaatactcaaaccttaacatctctttaccaaatggagcctgaaaaacagcatttctaaaacgctcgtatgaatgcgcctacatcattcgcccactaagtcactgtttgttaacaccctcactacatacatgatttactcctgttgtgccaaaacgaccccttattggg

SEQ ID NO: 85474 - DNA, 197 bp, Glycine max
aaatgattatttttttttttttttggtgtataacacgaccctttggtccaccctttaatacccaaccttaatttttaaacaaaccaccttttcctaaccagaaattaataaaccgtcccctaaacaaaaccaaatttccttttaaaaagaaaatttaaacccttcacaaaaaaacaaaaaatacaccatcctaaaaa

SEQ ID NO: 85475 - DNA, 169 bp, Glycine max
ccacaaaaaatatttttatttagaagaatttaaataattttgcaaattcatttttgggttttttcttaatttttttaaaccctttcccctttaaatttaaaattttttttttaaataaggtaaattagccctagcttttactttttatttataataaaaccttcctttt

SEQ ID NO: 85476 - DNA, 353 bp, Glycine max
aaaaaagaaggtttttaccatccattataccccatatcaaattatggtccttacaaaacaaaatcccgaacaatttcccctaaaaatgacattttgcataatttaaaactttcagtgcattaccaattttttttcagtaaccaaaaacacccttgctttcaccttaccaccccctttttaaaaaacaaaaactcccccttttttaccctctcgggaaaaaattttccctttccaaaaacttaaatacacattttccagtgtttttaccccttttctctcttaaaaaactgaaattttctttgataatttgaataaaaccaacccccccctttttaaaggaaaacccccctttt

SEQ ID NO: 85477 - DNA, 143 bp, Glycine max
ccttaaacaaatatttttttaagaaaacaatgaaataaaaaacagacgccgcccaataatataaacttttttttttatccaaacacccccctataaaaaacacaacaattgcccccccaccctagctttttttttttaacaaa

SEQ ID NO: 85478 - DNA, 158 bp, Glycine max
ttcaactacctttttcttttttcctttacaaccgttgactacatgaagggaagggctttcatagtggtcgcgcttgcatacaaaacatataatatttggcattacaacacattattgatccttgaatcacacttattgtttttgaagatcatgacaaa

SEQ ID NO: 85479 - DNA, 258 bp, Glycine max
  unsure (1)..(258): unsure at all n locations
gttaaattaaaaatatttaaaaataataaaaaggttttaaattaaaaaaatgaatttatttttttatatttttggaaaaataaataactnttgtcaagaaaagggtaatttaataataaaattaaaaaatgtaaaaatattagattaaatttttataaaaaaaaaaggagaagtttttattttttaatataaaaaaatataaaaaaaaattgtgtatagntaaaaaaaataaaagaaagattttttttttttataaaa

SEQ ID NO: 85480 - DNA, 192 bp, Glycine max
  unsure (1)..(192): unsure at all n locations
aattatttttactgttttctaaaaaagcttaataattnangcagggagggagaaacacacaaaaatggtttttctttaaaacatttggaatttgatttgcccccgccagcattttatagttgtttttttccacaataggtttttttgctacaaaaaaaaaaaatgccccccacagtttctttttttttattt

SEQ ID NO: 85481 - DNA, 260 bp, Glycine max
ttacctaaactagccacccctttaaatatactattctattattacaaccgcacccgcttaatatttcaggtgccgggcggagtacatgtatcactgttcaataagaaataatatggtcgaaataaatactttccacatctggcttgaaactacccaacttgatgtcggaatgctgtgtgaaataggattacttattttagttgtggacatctgcacaaggttctcaatgacatccctgcttaaatggtgtctttcttttg

SEQ ID NO: 85482 - DNA, 249 bp, Glycine max
ccacagggaaaaaacacgatgcactgattcttctcctttcatttggtacaaaaaatttgttccacaataaaaatacaatggactacaaaaatacatgattcagggggactcgtcatttaaatttaaacataataaatttaaacataattgactacctctgggctctcccaaaacatatatctatctgaaggaaaactgaatttcttccaatggtcttcccttgggctcaagaacccacattggttttaa

SEQ ID NO: 85483 - DNA, 397 bp, Glycine max
acaaagactaaactaaattaagtaatggggcctttacaacacagggtgaagcaaaagttttcaacaattggaattgttcaatgaaaactaatgattcctaaaaaaattttttttcccaagcaaaaaaccccgggacccaaatttttgttgccttcgtaggcaaaatcatgaattgcttaacaaattttagcaaaaacgttttaaaaaacacttggaaacaaaataaaattttttttaattcccaaacatggggccccacccaaccttgggagaatgtcaataaccccttttcttgaaaatcacacttccttgggcataattggttaaacccaagttaaaacccattataaaccattttttacatttttaacaccaaaaagccattgggcaaaataaa

SEQ ID NO: 85484 - DNA, 150 bp, Glycine max
  unsure (1)..(150): unsure at all n locations
aaaagtntctcaaagatttttattattattaaagggggatgttttaaagaacaccagggttaaccacaaaatttcgtaccggatcttgacggggtacaaattttcaataaagaaatttctataagagcttggaaaaataaggcgaaattt

SEQ ID NO: 85485 - DNA, 300 bp, Glycine max
cgatcttgggcaccaatgtgcaatccatacaataacactggtcctgcagcaatgcaatggtgttccacaccaatggttgcaattcctggcatgtgcccaccaagcattcctttgcaatttgtaccaccatcatactggagtggcacacaactttggaatgctggaaccgagacagtgtcaataggatccaatgcttgccttttaacaaaagaaaaataatgaactattaacaattagattatgagcttcaaacaaacccaaaaggtgttgtactattttgcggcagccccgaacaatatc

SEQ ID NO: 85486 - DNA, 310 bp, Glycine max
ctcacacgttcgttcaatctttaattatctcatcgattagcaacacgaacaggaacaaaaactggattcagaattggtttcgtaaatcttgtcctatcgttcgttccattgggcggtgcgatgggcaaaggcaaattcactagcatgccccctgtttgccccccggtatacatccctgcagatatgcttgaccgaacctctaaccgtcctcaggcttttttacaggttctattctgcattctatttcgctcttcattttgcacgtctatctctaagcaaacccatcatgaagatgaagatgccgaggaag

SEQ ID NO: 85487 - DNA, 287 bp, Glycine max
ttacatgagccaactctagttggtttattacattaatcttttgacatttctgaaactttattctgaataaaatcacataaaactggcaacaattatttgatccctgagctctttggagcgcaaggcaccatttctggtgctacaattgaaaaaaagaaccctttggtggatgatttcattgtgcccaaaggaaacatagtcatcactgattttcattgtgatagggtttcggttgggttccatatagagagcttcgtcattgttgatacccccattggataaaaact

SEQ ID NO: 85488 - DNA, 370 bp, Glycine max
cccacgcatgcgtagaaaacgataatccccgtgcatatatatatatatatatatatatatatataagttctactaggtggggggaaacgcggatacccctgaggatacataggctgcacggaacaactgggcagaaggaatcgtattatgccgaaaatagcacatcggttgtgtatccgtactcaatattagtgcatcagattacaatttctacatctgacatgttatataagagttccgaactaattgttctgggcgacagaaatacgaacaagattcttttatttactcttcctcacctgtacttgaagcagctcttcgctttggatgacaggattcaggctgtgatgcagatgattatggctcccac

SEQ ID NO: 85489 - DNA, 307 bp, Glycine max
  unsure (1)..(307): unsure at all n locations
cggaatttcccgnnggtcgacccaacagcgtccgctccaacgcgtctcagtgaaattatttataacattgttgattagccatgagatgggggacacggttttgaattgggagttgcagctttcgctacactggnntagtttaggtgaggaggtgggatagggcattacggcagattcttttatcacacgaccttcagcttagaacttgttacccaatggtttagtgtgggcctcagtgaaatctttgttattgtgccgatatctgnngcgccgaaatagatgaatggaacgttatttgttgtgttta

SEQ ID NO: 85490 - DNA, 278 bp, Glycine max
cccacgcgtgcgagaacaaagatccttatggtgttcggatctacatctatatatttccatatattggatccggaaaggaaagactgactggacccctcatggtgcctcttgaaaggcacgattcaattgatagaaagcactgtgcttttaatatgaaacaaacacaatccgctactgaggttgcaatatgtgtcctggacacaaaaaccatctgagaagcaggcattaaatttaccgtggaatgtaaatactcagatcgccacaaatacggttaaggt

SEQ ID NO: 85491 - DNA, 71 bp, Glycine max
aaaaaaaaaaaaaaaaaaaaaataaaaaataaaaaacaaaagggcagtcgatataaaaaagaacaaggtta

SEQ ID NO: 85492 - DNA, 264 bp, Glycine max
tcgcccacgcgttcgtccacgcgttcgcccacgcgtccgaaaaaaaaaaaaaaaaaaaaaaaaaaaaaaaaaaaaaaaaaaaaaaaaaaaaaaaaaaaaaaaaaaaaaaaaaaaaaaaaaaaaaaaaaaaaaaaaaaaaaaaaaagggaggatggtggggggttttaaaagattaacaggtgggtcccccttaaaaaaaactattttttttttcaataagataaaaaaaaattaaatttttttttgtacggctttaaatatttt

SEQ ID NO: 85493 - DNA, 267 bp, Glycine max
gccctcgttgctgcgtacgcatcagtcatatgtatgtcctgtcaacgatagatgctccggcagtgaccgtccatgaaacaccaaatgagctgatccgttgtggttccacaaattgtacgtttcgctgctaccaagaacaacatgaataataaggttcacttgcgcaaactcctgatcaacctgtggagaaattgggacataagacaacaaacccgtgaccattcgaggtggtcgagactgcaattactgtttagaaacataagaaaa

SEQ ID NO: 85494 - DNA, 336 bp, Glycine max
cacaactccactctgtctgtctctctgtgattcaacttcagcgaaatcgacccctaaccgaagaccgtgcttgtacgtctgacaagccacgtttatacttgcggctctgctaatacaatcagacttgagccgaatacagaaaaattctgtgaacaagggagatgatgtcgcggtgccacgccatacattctgctaatagcacctggagcccttaaggatactactacactgttgctggcttaagtcaacacttattacgaagacttggtcattgcgataaaaagggccacaaatgatgtggaacgtacagctatcgaaatacatataacacctata

SEQ ID NO: 85495 - DNA, 246 bp, Glycine max
cccacgcgtccgctccgaagagattcaagttcagatggattcaatgtgccccccccaaaaacacaagagtatgttaatgatacacttttttttagtattttttaattcttttgcgaggaagcgtaagttagctttttatattccgtcatccacaggagaaattttgatgtattagtatatttatactatacttttacgataagcgtggtaaattccaattaaccagcgaacataatatttctagcc

SEQ ID NO: 85496 - DNA, 429 bp, Glycine max
gaaaagagatcattctttcttactgtctgtgactcaccaaatagcttgctgacattggacgaagaatggcttctttcattggactctctttgttgctgctctttatcaattaccccttgctttccctctccaccaaccctggaaggaacgctctggatgcttcgagaagcaggatttctgatcccaacattagtgccgtagtaggtgcgacccaacactggttcatccctgtactgcggctcacatgttacttgcgactgcaacaataatctgattcaggctacacttggtcgaatgtaacatttctggaactctacgcccggaacttggccagctacatcatatgcaaaacttggagctctacatgaaagaggtaacacggaagattcctatagaactagagtacttgaaaccacttattagcatgga

SEQ ID NO: 85497 - DNA, 229 bp, Glycine max
atgtaccacatcaatcaaacgaacattctctttgcacactggatccacttcttggatggtaagaggggtacttcctatacatccatattctgctggcgcattgatagatcgaaccttcggtacgcaaagagcaaatccatcacccgcaattggttccacctgtaggaacattacgggccgtcattgtacatcatccggacatagacaaaccccataatcacccaactaa

SEQ ID NO: 85498 - DNA, 327 bp, Glycine max
  unsure (1)..(327): unsure at all n locations
cccacgcgtncggatatagcttgtgcccttcttaatgggcagaaccatatcatgcttgtatgagagaaatatagcttgatgaccttgctctgataacacaaaccttaatggagtagccgctggtgacagaaaataacccacatcactaggtgcgtacgacgctcttattggtacagcaccactggactcgaatcaacgaagtgttgtggacccacctgagactggtaaagggcttgtgcggctctattcgtcacacaaatgcaaccgaaaacattcatcgcgaatatgaccggagtgacactggtgtatacgatactgtgcgtaagg

SEQ ID NO: 85499 - DNA, 268 bp, Glycine max
gttgatttgaataaagctcctaattgttataatttcgcaaaaataccattcttctaggatgcttagaaagaaaaaatactccttccttctctcttatttcttattgtcctcccccctattattatcaattgccgtccccacccttgcaacgtgataaagaaaaaataactcccctattatcatttctatgaccatcgtttttcatattataatcatgataatcattgtcgttaccattctttatataatataaacacatccccttttc

SEQ ID NO: 85500 - DNA, 194 bp, Glycine max
gccacgcttacataacaaaaatttcttttaacacctttgccaagctacagttctctgcgagcgtctgcactcaaaaataaacatatatacatatatatatatatatatattctggcactacttcatagtcacacatcgttaaatttattaattactaggtaggaagaatagaatacggtttatgacaccttatt

SEQ ID NO: 85501 - DNA, 371 bp, Glycine max
  unsure (1)..(371): unsure at all n locations
tggttactcctctagagccccacccctttttttttttttttttttttttttttttttttcttataaatcttttttttttccagagagttttttaaaaaaaagattccaccccccctcttccnnccaattcttctttattttccccctaatatccccccaaaaaactttcctttcccctattcaacaaaatctatttaccccccccccccttttttttttttaaacccccccaccccctttaaaacataaccttttttttcttttctttttccccccttttttcaacaaaaaaaaaaacatttttttttttacaacccccccctttttttatttttttttaaaacccccttttttttctaaaaaattttttt

SEQ ID NO: 85502 - DNA, 436 bp, Glycine max
tattataataatttttctcattttataagcaaccaatctctggggccagttatttaaacattaaccttcccaaaatcaaactcctggtttttgaactttaacttacctctgaccccctcataatattaaaaatttactttcaattattttccctcttttaaaccaaaacaatcttcattatccccaaatatatttaaaaccacaatagtacccccttctcgacaaaaaaaaacatattcgtcccagcctacatctccttaaaccttcattacataatttccctttcccaaacattaaaaaaccttttcaacaaatcaatcccttcacatttacttacaacccggcgtatgagacaatccaaccaaaccaacaccttttcccccctggatttcaccctcagaattatttacatgaaccactccaacattttcccttt

SEQ ID NO: 85503 - DNA, 274 bp, Glycine max
gtgggggaccgttaaaaataagggctttaaataaaaaaatttcgcaggtttcaccgttcccacctgggaattttaaaatggttttttggcaaaaaaaacaaattttccaccattaagctttttcgtcaaactttttcttttctttaattaaaaaaaaaaaaaccttttttttaaacaaacaaaaccccccggtttgttttaaaaccccaaaaaaaattttttccccccttttttttaattaaaaaaaatttttctccctcccccattttttttt

SEQ ID NO: 85504 - DNA, 332 bp, Glycine max
aaaacagacttgaaaaccgccctttttggggactatggctggttttttcgctaaaaataaccccaaaaaacttttggttttccattggggggaaaaattaatttccccccccccccttttttttttttacaacccccaccccgggttaaacaggacctttgtttttttttgggggttaccaccctttgtgaaaaaagaaaaacggttttttttttaaccccccacggggggggggtttttttggggcacccttttttttttaaggtgttttttctgggccccccaattcaaaaagggttctttacggcgcctttttttgggaaccactcttt

SEQ ID NO: 85505 - DNA, 127 bp, Glycine max
aaaaaaaatgaacaaagtttttttattttaaggaaaaaaaaaaaaaagttttatttctttatataaccaaatcaaaaaaaaatttttttttttttttttaccccccttcaaaaaaaattttatttat

SEQ ID NO: 85506 - DNA, 360 bp, Glycine max
cttaaccggtttattcaccataatcttacaaggagggatcatgattagaaccaaaacatatgatttataaccctgtccatatccgtagtaaacacaccattgacttggatccatttgaaaaccccagccaccgcgtacatcctgtatagctgtaaaggtactgccccaagattgaccaacacattatcacccaattgcacaaaggcttgattaagctcctcctgcgtcacattaatatccaaattaccaatacaaacaagggaattattcacataattctccggcgcaacaatactcactggaccaccttatgcaggaaattgatacattgtttttggtggagcttattggtggtgaaaa

SEQ ID NO: 85507 - DNA, 227 bp, Glycine max
tcctctagagcggacaacatttattgaattattttttatttttttttttttccccaaaacgtctttcttttaacagaggggggttaattctatgagaaggcattccatgacccaccatccccaccaaatttttatccacacaaaatgactacacaagctttttacactttccctataaatcagtttattgctacactattttttatttaaattaccccctcgaccat

SEQ ID NO: 85508 - DNA, 63 bp, Glycine max
acttgttgtcttaccacctttccctatacccagtcctataagacccggccttaccagggacaa

SEQ ID NO: 85509 - DNA, 60 bp, Glycine max
ttctgccatggtttttttcgggaaaacattaaaggttcttattggggcaagataagggga

SEQ ID NO: 85510 - DNA, 390 bp, Glycine max
ccaaaagtccccattattcgggggcacttacgcaactgtgaaacaaaccaacacaaactgaaaaatttaaatcttttaattttacaattacacacgggcccaaccggcaatccgggaactgtccccggaggcctaccagctttccatatttccatatatattagagcttgacagcttgatggaaatagcggtttcctgggtgaatgtgttaaacggttacacgttcacacttcctaacaacctaaaacctaaaaggttaaacctgaaagccctaatgacttaactaactaacattctttgatttgttgtcactggcccattgccagtttgtaaacctgtaaacccagctgccttaatgaattaatcaaccccccaacacacggggatagg

SEQ ID NO: 85511 - DNA, 384 bp, Glycine max
aagaggaaaaataattcttgttttttattcaggaataaaagatttacatttataggcaaggctgccaatttcattataataaatgccgaaaggaaagtaaataaaaagggatcagatcaaattagagagatttgtttctgacccaaaataataatctaatcagatcaaatcggaataatctggtcttgatcctaattattcaatcttctagaaaattaattccaaaaataaacatccatctggctaattaattcttaatatagacatatagctgtcaacaccccccctcaagttggtgcatagatgtccaacatgtccaacttgcttacaagaaactcaaagttgggcctaaacaatccttttgtaagaatgtcaacaacttgc

SEQ ID NO: 85512 - DNA, 107 bp, Glycine max
atcctctagagcacccccccttttttttttttttttttttttttttttttttttttttttcttttttttttttcaaaaaagtttttttaaaatcaaaaaaaacccaa

SEQ ID NO: 85513 - DNA, 200 bp, Glycine max
cagaatattattatttagtcacataatgctatggtggatctacttggactgaaagaattgcccccctctcatatcatacgctgaggcccgattcaatacacctgcatcaagcgaaatctttgacgacctatttatatgcacattagcgttgtagcgcaccttcttcatatgtattgaaatgttcttctttgcagatgctt

SEQ ID NO: 85514 - DNA, 188 bp, Glycine max
attctttatatattgtaatctttcttttttctaaatcagaaaaaaaaaattttggcgaccgttctcttttaaactattcaacacgtgaattaattccatacctatatctcccatttttcaaattttatatattgttcaccacattatatattgttttcacaaagggctttactgacacctttcataaa

SEQ ID NO: 85515 - DNA, 392 bp, Glycine max
aaaagaaaaagagagttttttttttattcaaaaataaaaaatccccttttttaagcaaggctgccaatttcatattattaaaagcaaaaaggaaagcaaataaaaaaggctcagatcaaattatagaaatttgattttgacccaaaattataatcctaatacatcaaagcgaaataatctggtcttgatcctaattattcaatctcctaaaaaataaattccaaaaataaacatccctctgtttaaataattcttaatataaacatataactgtcaacacccccccttaaattgttgcataaaattccaacaatttcaactttcttacaaaaaactcaaaattgggcctaaacaaaccttttttaaaaatttcaccaactttctttttaaaa

SEQ ID NO: 85516 - DNA, 304 bp, Glycine max
tttttaccacaattttttaactcctttaatttaattttttaagagacctttttaccacaaaaagcacatctaactcctttggcctcactctcaaaatattccttacaccccaaaactttatattacctgcaaaattgaatattttattccttttaaaaaagcggctaactcaaaaaaaaaatctgtctaatgcccaaaaacacagtcatttctcctacaaggtctttctcaaataactccttacttgaatttttaagcttctttccctgccccttcaaaaagaacaaaaccttttcttttaaaa

SEQ ID NO: 85517 - DNA, 310 bp, Glycine max
ttttttttttttttttttttttttttttttttttttttttttttggggttttggggccccgggggtttacccgggaaacccggggggggaccggggagggtcccacctttccctatagggaaaccaattataccttgggggagcatggtaatagctggggcctgggtgaaaaggaaatctccccccatttaaaaacaaaatacgacccggaagcaaaaaatgaaaagcgggggggccaaagggaaaaactttgtcacattaatgggggggcgcaaacaaaccgcttgggaggggaaaaaaccgcggtgcc

SEQ ID NO: 85518 - DNA, 447 bp, Glycine max
aaatcacattttaccttctttttttttaattatttagagggtttttaaaataacaaaaaataaaacccccctcattaattcaatattgattattccatcctaacatataaatcaaccccccccaaattaactgctccccccccatataaaaaaaattatttttttttttccacaaacactccaacttcgccaaaaaaatttttttcaacaataattttaaactcttatctttttatactaccccccccccacacttttttttccttgcaccccattatccacctcaaaaaaacaaacaaccacctttttgctcccctcctttagaaaaaaaatttttcactaaatacccccccaaaaatttttcctacttttcccctccctttagatgcttaaattcccccaacaattctttttttctttttaatccttcctccacccttttttttt

SEQ ID NO: 85519 - DNA, 526 bp, Glycine max
gtttttggaaaccatactttcttttttggccaacattcttttggggccgaatttcaattaaagattggaaatcacgaattcgagtccatcacccacctttaaaatcggtcacaatgaccaggcctggatgaatcgcgaaaacaaacaattttgaggaaagaaaatccattgaagagataccttgccccatgacacatgaaacctactgatctttaaatatgggacttcaacacccttagatccgaatttaaaaatattagatgtccataagagaaccaccttggcttacagcatcatatgcaccttgaccagcaacagctactccctgagctgaggaaacatcctgatcggatgctggctgaactttctcttcggacggagcggatcatttctcccttccaaggtcaaaagtctcaatcaactgttgcacatgttgtggatcccaaatgcggcaaggctcccccactccacccaccactattgcgcacaccaaactcctgaaattttcaccttgccaggacttcct

SEQ ID NO: 85520 - DNA, 229 bp, Glycine max
aagaattacttgtactatttcatggtcctgaggggagacagaaaaacatcggatgatatgcaaaactttatggaaaaggttcatatcctcatccaaataacataaatcaaaagtacgtctatgctcctgaggttctttggccaacactagcaacagaccccgccttgattggagcagctgaactttcttatccacacttctcacactgatgaaagaagaggcaaaaatg

SEQ ID NO: 85521 - DNA, 248 bp, Glycine max
gccccgcccaacaaataaaaaggccctccttttaatcaaatccgcggattataaaactcccccccttctaacaaatttttctttcccccccaaaacccggcctatcttattctgtttctcaaccccctccacaaaaagaattccctacctccttacctgtaactcccccacacccaaaaatctcttttttttatttaagagggttttcctccctcttttccaaacaaaaacttcttttatcacctttt

SEQ ID NO: 85522 - DNA, 329 bp, Glycine max
ggggccaaaaaaaaaaaaaaagggcgtgggggcccccccttttttttagggggaaccccccccccccaaccaaatttatttttaggggccaaaaaaggggggggcccccccctttaaatttggggtttaaaacccccccccggaaacccccttttttgaacccattttttatttagggcgggggggggggggggcctttttccttttaggggggttttccggggggggggcgggaacgattttttttgggcccaacaaaaaggggggggccccctttcccggttttttaaaaacaggggggttttttttggggacaagggtgttttttt

SEQ ID NO: 85523 - DNA, 362 bp, Glycine max
ttttaattcactcaatttgaaaggccccccttttttattatgggagccaccctttaaaagacgcccccccaccctcttaccaccttttccacaaaaatattttattttattccccctcctagagaagaaaaattttttttaccaaattccacctaatataaaaatccccccccccgcctccaaaaaaaaaaaagaagcggtttcttctttatattataatcatcgacaaaaaagcccccttcttacaacctttttccaaaaataataaaacactgatcctccggaagaacccccttattatacataatcttctcctccacattaatcatctcataaaaactctccacctccataataatatt

SEQ ID NO: 85524 - DNA, 381 bp, Glycine max
aaattacacactcttggggccttttttctacttttaaaagatgttttttatttttaatttttctgaaaaaaaaaaccaccccggccacgcctttttcccttttttgaatggggcgggcaaactttcaaaagaaaacaccttttcccaaaaaggggggcgccccgctctttttttattgtctggcccccccccccgcccaaaaaaaaccccccttcccggtcccacccgggattcccgtttttaaaaatacaggcgtaccaccttttcatataaaaaaccccccccccggttgcccccctaattttcctagccggtccctgtgggaaaccccttttcccttacaatggcacacaacaaaccagcccgaaacataaagtgtaa

SEQ ID NO: 85525 - DNA, 252 bp, Glycine max
tcatttcttctttaataccaaaccgctttaatcttcttttttggagatgcttttaataaacaaaccccccaaaaacaaaccatacccacccccaaaaaaacccaaacttgttacaaatccccccatcttaacaaacaaatacaacccatccactctacatctaaatatttttaaaacccatcctactctccccccctctgatatcttttctatcccaccagtccaaccaaaatctactatcttttcccaaac

SEQ ID NO: 85526 - DNA, 142 bp, Glycine max
attgggggtttttaaaattttttgtgttccttttataaccaacgccagggtccaccacggaaattcgggccggtcccagccagagatccatctttacttaaaatgagacaccttaaacttcagcgaatatatgggtctaccc

SEQ ID NO: 85527 - DNA, 211 bp, Glycine max
atataatatttttttccccctcctttctcttcacccttctttttcctttttaatttttcttcctccaccccctcttttccgctcccctttttcaccccccccttcaacccccccccaattatacccctccttcccctctcttttattctcctacttttattgtcccccctttccctcatattattactcttctttcgaattcctaccctcc

SEQ ID NO: 85528 - DNA, 339 bp, Glycine max
gttggggaaaagtgaaaccgggctttttttttatctaaaggggggaaaggggccaaacccaccttaaattaacctttttttcccaaattttaaatccccctttcccatccttttttttcaaccctttaaatttccctataggggggggttgaaaaaccgaaaaattccgggttccaataaaaaaacccctgggttcgttttaaaaaaccccccctaaaaccccggggggtgaaaaaccccaaattttttgagagaatttttacccctcctaaacccccgtgaaaacaacctcctcaaaagtccttcctttttggggggggggcaaaaatttggaaccca

SEQ ID NO: 85529 - DNA, 69 bp, Glycine max
aaaaaaagaatttttttttatttgcaaatataattttttagaggagggtttgtaaaataaggggggcac

SEQ ID NO: 85530 - DNA, 337 bp, Glycine max
  unsure (1)..(337): unsure at all n locations
ctttttttttttttttattaaaaaatactttttttttttttttttntaaaatnntggaagangttttaaaaaacaatttgtttttaaccacctatttttttgcgttccaaaaaaaaaaaaatttttccccctcccaaaaaaaaaaaaattttgccccccccacccacctaaaaaataaccagcaccccccatgaacctccccttattttttctaacaaaccccccaactccgccttttatataattaaaacatgtgggggggattaaacaaccacacaagccggaggcaccctttcccacaaattttttttttttccaaaaagcccaggccccccat

SEQ ID NO: 85531 - DNA, 177 bp, Glycine max
tattatcatttttcggcccaccagaagtattctacataccactaaaaggtccacagaagcaccttcataacatgcctgaacaagccccccaccaaaaacctcaaaaactcaacccaaatttctacataaaaacttgccccaatgcccaaaaaatcgtggccgatgcacttgcagaca

SEQ ID NO: 85532 - DNA, 198 bp, Glycine max
cttccactaactattcaaaggcgatgttactacttgcgtcgagaagccaccaaccagaatcgttggattccctatcctaatatgtacatggaatcatgaacgaaagactaaaaaatattcgacgatgcacttgcatacgatatgaatgataaaaattgggctctctttaacctgctaccactgcaattacatgactga

SEQ ID NO: 85533 - DNA, 285 bp, Glycine max
aaaaaaaatctccttcaccaaagaagattttatacaaaaaaaatcccccttaaaacaaacacttttaaaccaaactaactgatcttataatatgtaaaaaaatttactattacacttatatacataaccaatgctcataacacctttcctattggactactttaatttaaaaaaaatttcacacattcaacaaaaaccattatggaaaatgcaattaaaaattattacttaatccacccgttttttaagctttttacaaaacccaaaatcaatccctattacctt

SEQ ID NO: 85534 - DNA, 420 bp, Glycine max
  unsure (1)..(420): unsure at all n locations
gccccccaggagccgccccccctnnttttttttttttttttttttttttttttcnaaaaaaaaaatccccttcctttagaagaagtttttttcaaaaaaatacacctttaaacaaacactaatataccaaaccaacttgttttttaatattttaaaaattttacttttacacttatatacatgaccaacgctccttacacgtatgcttttgggctactctaacccaaaaaaaaatttacacatccatctaaaaccacccttgaaaatgcattagtgaacttttacattatcaacccggtttttaaactctgttcataacccaaaattaaacactaattcctttttttgatagatgtaataaaccataattattgtcttctcaagctgacacacaaacactctttcatataggccttaaaa

SEQ ID NO: 85535 - DNA, 293 bp, Glycine max
aaagtacgtttctggaaatggattctacataattttctctcacacggatagtccttatctcaaaggcaagtttatcaccaaggctgttaatacttgaatttttgtagttggtgtccaaacctatttaggaaccctgacggcacacgttgtttgatcgaaacttgactgtgacgctgagggtcattgtgcaacaatagaatgctccttctttttcatactcacataaaatcgttcaaattgcttaacctataacacgaataccgactttggcaattcacttgcacaagactgtt

SEQ ID NO: 85536 - DNA, 368 bp, Glycine max
  unsure (1)..(368): unsure at all n locations
cccactcgtncanagacgcgtaagcagacaacataatattaccacactatcangcttccttgggtggattaaaaaaaaccgtgctaacaaatctaacaatcaacataccttatattgagaggatatgaattcctgttttacaccaacaacttatactttccaacaccattgtctctgtttacctacacacagcactttttgttggttcctctggtgaggcacaagagactcaaaaagatatggctgcactctgaagaatcctagcatactgtctctatgctgccaatccctaccatttatatacggaggcttgaattcaaataattaaccaagcctttactagcaagccatttaaaaaaaccaagggt

SEQ ID NO: 85537 - DNA, 154 bp, Glycine max
gacgcacgcgtgcgtgttaaatgaatataactgaaaatttcaaaatttattttttttgttcaccgttacttaattggggagtggttaacatattggtgggcactttctaaaaaatttaaataaaaactttataaaaatatatttccaaatagat

SEQ ID NO: 85538 - DNA, 430 bp, Glycine max
  unsure (1)..(430): unsure at all n locations
gacgcgccaggcgacccgacaattgatgcaataccttanttagaatgacttatgatcttaattaacggctgaggcggggggatctaacagaggcagtcaataacatttatgttatttcaatgagagaaaaaaaattatgcaataacagtataaaattttttatataatcgctcaattatataataagtttattaactgttaacataactatcttaaagtaattcaagtgatggagttggatgagtcggataagaaggaaaaatacatggccttaaccgtagaggagttcaatttaagattgaaattgaagaggaattttggaaagtagcttgaaaattggaatctcttttaagataaaagacaggaaccaagctatgagggagggtgatagtaatagaaagtactttcacttgacttttaaaaaaactag

SEQ ID NO: 85539 - DNA, 240 bp, Glycine max
cacccccttcttttctctgggtgtgggaaaacaacacgcagaaaattttcccccttttcatttttttcgtcaaaaaaatttttccacaatggaacccacactttctccgtttgcctttaattttttactaaaaactttacccttccaactctatttgttttccatccctaaaacaccctctagtctctccttctttcccacaaatttacaattgttccatgacaaccccaattggtcttt

SEQ ID NO: 85540 - DNA, 241 bp, Glycine max
cccacgcgtccgcccacgcttatgaggaaatattttatgtgcaaagataaacaatatactgatgtgggatcactaggtgaagacttaattcacccgcttactgctgctcaagaggttgagccagtcacatatagcatgatggctgagctaattaaaaatatcacattttatgataaataggatgggtacccagctgaaacagatgaaaactggggtgaagaagtttgtatgcacgagcaac

SEQ ID NO: 85541 - DNA, 463 bp, Glycine max
gtgattgtaatagatgagatgaacactgtaatatacaccgtgtctgatcattatcctaaacggggggctaagcaatggggttagtgttcactaccttttctaaggatgatagtactaaagatcgtagcaacatttttaagtggctttaacaatgttctagaaaatattgctacttatgtatacaactcttaagctatttataagaagccttctggatctactaaccaaccacccaagcccatgatagctcactaactagactctcatgattacttggattatttgaaaagaggaataggttctgatgaaaacaacaataacttgcttgataagctacaagatgcaattggaaagagtcaaaaccctatgaaattctttcttcaatctataagaacctgagatttaacagtatcatattctgatattggaatattacgatctggtgccaaatacaactatgata

SEQ ID NO: 85542 - DNA, 520 bp, Glycine max
gcacgcgttgctgcgtctgaatctgtagagggtagtggtctgtggattagaggtcctcccgcaagcatggctgatgacacacctaatgagatgaaggacgaagtaccatgaaataggatcttttgatcctaccaagaagaagacgatgaagaacattacaatctgttgatactgctgatgaacctgtggtgaaatatggctagcaagacatagaacctcttagtttccaaggagggtgagactgcatttactggtttgaaaaataagaagaagaaccctgttgacatgggtaacttgaatgatgagagtgtagatgcaatcgatgattaggatgatcaccctggagatgatcaaagagaaatggctgttccccaagctcgttattcttgagaagggagtgatcattattattaatatgaagagctacgcttacatctctacacattggtttaatacggtgatattatgggctgcttggcagggtgtttaacattctacgtgaaaataatccttaacttgc

SEQ ID NO: 85543 - DNA, 381 bp, Glycine max
cgggcgacccacgcgtgcgctactcgtgttccaacgcgtagtgtcagattttataataaggacgcatactatgcattaccgggacgggtgaggcaattgagagtgttctgtctaaacaagctcaacctaagcaaaatagagaatgaccctttacatgaattttctatgactctgcggaaaacagcacacttgttttcatggtcgcaacattatctgaaccgtcattgtctttcaagtattatgagagaactgctgaacagcaatcatcattgggataccttgttggttccactcacattgaaggaactcatgatcaatcaccacaaaggggagaaatgactgctgatcaatttatgagagaacctcatggttcaatagggg

SEQ ID NO: 85544 - DNA, 447 bp, Glycine max
  unsure (1)..(447): unsure at all n locations
ccagttgttcccgagagtaagattgtagccaatggggttgtttctaatggtgtctaagctctactgtgtttgaaggaggcggtccaatacacctcagtggcatatattggtgttcttagaagtatatttatcagcaatttggtaccgcccggatttgatctgtcttgccttctcttgcagtctgaagatagtgtgattggttgcctagtgaagataaagatctgtatattgagattggctgggcggagttagttcatagaatgctagcaccaatcccttctcattgggttttgtttacagtggttagctcctaacagggtttactcctctagggttttggggttttttagggttttctgcctaagatgcttatatcttttggtttttgttcgggtttatccttcaaaangcaaacaaataagggcctccctattttttgtaaagaac

SEQ ID NO: 85545 - DNA, 278 bp, Glycine max
  unsure (1)..(278): unsure at all n locations
gaccacgcgtgcgccacgcgtncggaaatagcttttcaacttcttaagtttataactcaaatcagcactctatgaggctggggaggtttgttgagttttctcaaaaaacaaaaacctttatggagtcgctggtggtgccgtacaaaaacccatatcaattggagagaacgtccttcataaacattctgcattctttgacttgaataaagatagtgttatctacccaccggagactatgaaaagggcatagcttcatatatactttatacaatcggaat

SEQ ID NO: 85546 - DNA, 291 bp, Glycine max
  unsure (1)..(291): unsure at all n locations
tgttccactttgcaaattatgggtcccaggaatctttgggggaggaagtgtgttagggtagagttgtgtcntgtccacagacactgggagaaagaaagtgtgtgtgagttgttgtaaactgaattttcatttttctttancattacccacttgncgcaacacacccttcctttaatcaatatacgtatcagcttttaggtttctagctattacttttattgttcagtccttttcttcttacctctattagtttttacttctggcaatctttttttacaaccttccactttt

SEQ ID NO: 85547 - DNA, 309 bp, Glycine max
  unsure (1)..(309): unsure at all n locations
aacagactatatncctaattactatctttttatatcctctcaccaaactctattgctcctggggctaaataaaactgggtcgccctccacaccagttcttctctctcccatttgattgcgaacgcctcaccttaaagtctcattcatgtcttaccacactactatccatgttatagcatcccagcttcttgcaaagtatctacctttaaacctaaaaaatcccacccccttatcccacttactgagctaactacatctccagacatatcagaaagctattaaaatcccatcttgcggacctgcacctta

SEQ ID NO: 85548 - DNA, 321 bp, Glycine max
aacctctttctattgatcacagttatcgttttatgcatggctaaagaaacctcgggtacgtcaaattgacaagagtgtgtcgcccaaataccccagtcattctcctctgacatttctctcgaatgcaaactgatacttagctccaaaagcattaaaacgtgtttaaatttctacaccctatcaaaaagatgcaatcaataacctttcaacaccttgaaggtatagattcctaccatttctccacatacttctccacactatcagcaaatgaaaatgaattataacacatggcgactctttgcaacaatgtttgtgtctata

SEQ ID NO: 85549 - DNA, 316 bp, Glycine max
  unsure (1)..(316): unsure at all n locations
atcattacaagaatctcaactacagccgcagctaccatgaaactagatgacagcttcaacaaccctcaatttcnccgccactaccttctattccctttctcccacccgctcaatcaatacattccacaccagctcttcaaatataaactccctacttactcacaagaaaccactgttaaccctctctactacaccctagtttctcaacttgcgtaggacatcaatcttgccctttaatactctatccactctaaaactaactacgatgctctcacgcgtaacatacaaacttcttatacctggtcatacatattta

SEQ ID NO: 85550 - DNA, 207 bp, Glycine max
aggcgcacgaggggggaccaaggaagaccaaaccgaacccggcggagaaaaaacatagcccaaaagtggggggaaaaaaaactgggcggaatattggtaaaagcgacttcccggagagaaaaagatgtccagaaaaaatagcacacacagtaaaagaccgaaaataaaaaggtaaagcccggggggcctatatagaggggggaaaca

SEQ ID NO: 85551 - DNA, 211 bp, Glycine max
ttcagtgtttttttaatttttaaatagttatttgaacaccgggacttctacataccttatttcaaaaaaaatgaaagggcacaaaaaccaacaaatcctgtagtattgacataacaaaaaaaagacatgcaatactgctggagcacttggctagtggcgtgtaaaagatacattagaacaagatggttactcatcaaatatatacctactt

SEQ ID NO: 85552 - DNA, 279 bp, Glycine max
gggaaaggggaaaaaaccccctttttttttgaaaaaaaatttgttaaaaaaaaaattttttttcctaaaaaaaatttttaaggcattttttttttttttaaaaaattgcccttaaaataacggggttttagtaacaaaaaaaataacccgttttaaaaatttgttaaaacagtttggaaaaaaaaaattaatggggatttgttgttccccccttttaacaactaactaaaatttggggtttttaaaaaattccttttttttaaatggatggcgggggtt

SEQ ID NO: 85553 - DNA, 161 bp, Glycine max
aaaaaaaaggcagaaaccattttttgagaagcttgaactgggttttaaattttttcaactgggggttttttaaccaacaaaaaggtttttctttttttttgggacattaaaaattcccccattttgttttaaaaaaattttccccccccttccctttgttt

SEQ ID NO: 85554 - DNA, 255 bp, Glycine max
aaaaaatactgattcagattcacgaaatatattaaaattttccttaccttttaacaactcctattgcaaaagaatgatctatagaaagttatttgtctagataaatcacgaatcactttcttgaacgctactatgtgaacaacttacatgtctttattcataggagaaattaccgttgctggggtcgttgagcgtaatggccccccactgcaaaaaacctaacctaatggaccactgtgaacattatatcaggtt

SEQ ID NO: 85555 - DNA, 133 bp, Glycine max
tcgtttcatttttctttttcttctttaaaaaagcagaaccgaatgttacacgtcccaaaaatggcatcaaagcagacaaaaccttgaggcgctgtgtttaacagtccacttatcagttttcgactttggaccc

SEQ ID NO: 85556 - DNA, 349 bp, Glycine max
gggggccacaagaaaatggccccaatttttttccaccaatgtcaagagtggccaccaaccgaggctgggaattatcaatacgattgggtatgaccaaattatggggaaaagcacatcagaatttgtcttgtcttttattagccccctaatgggggaaatttgaaatccaacaaatttttcccaatattacttccaaactgaccttgatcacgcaaggaggggttattcttcaaacaccgataaaaacattctcacctgagctcaccgaagtgttttctttagaaaatgcttaaagataaaccccaccttaattagcaccctttattgtaattttacttgttgcaggttg

SEQ ID NO: 85557 - DNA, 166 bp, Glycine max
  unsure (1)..(166): unsure at all n locations
gcccccttttttttttttttaacacattttttaaaaaaagcagcaangattaaataggggattttgtttttaacacgcgcaactcacaactattggttttcagctaaaaaaaccaaaatattaactaagcctccccccctgatgaagtccaaaaaaaaccccaacc

SEQ ID NO: 85558 - DNA, 265 bp, Glycine max
ccacccaaaatgggcaaatttttattaaggggcaaaccgaaagtttttcttaaaaagggaacaattaaaccgaagaacatttttaaagctccttttaaattgaaaaaaaaactttgggagccaacgccaaactttaaattttggttacatgccaaacaaaacgtcctttccttttattttatccgccccctgggttacccccgaaatttccaaccggtccctggagggctaccagttttccataaaaggggtggtattaaagcgg

SEQ ID NO: 85559 - DNA, 251 bp, Glycine max
  unsure (1)..(251): unsure at all n locations
ttaaaaaaaaagcangcagcatttgggggtttttaatggcttaaaatttacacaacaataagaccaccacttggaatggtggccccttttattaatgaacaaaaaaattacgacatgactgagggggggggactaccttctttaataaacaaccctgcaaaatttttttttggcttttggcagcaacctgcttttttattaggataagcacttataatttttttgaaaacagaaggatctttatacttttt

SEQ ID NO: 85560 - DNA, 487 bp, Glycine max
ttgttgaagagtaaatatatttcacttaagcaaagtaacgaaaacaaacaagcttgccccactataagtaatccgggaatcctcatttttatctgtctccagagttaaaacttcctatggtgctcctctaataaatcattttgatttttgaacttcgaaaaaagagtagtgtatgaaatacagattttatggtccaaaaagtgtagcatctctgtcaaaatggaactaaatatttctactgaaatgctactggcatgccatggcaagagctgcagcttcaagcagcctccgagcatcttcctgttcaggcaaatccgcaggggccttcccgtataagtttgcctttgtgggagatgcgccattagacagcaacaacctaattacatcaatatgctcacctcttgcagcgtgatggagaggagtatcaccctcagaatcaactgattctagcattctccttatatgttctgcatcatttgctctgtta

SEQ ID NO: 85561 - DNA, 344 bp, Glycine max
  unsure (1)..(344): unsure at all n locations
tttttttttttttttttttttttttttttttttttttttttttnnnaanaggggttttttnannnnngggtttttttaaaaaaaaaaaaaaaaaattttttttttttttttttttattaaaaaacaaaaaattttttttaactttttnnaaaataggtgggagggggtaaaaagtttggggggggagaattctgggggggggggaaagggataaattattttttttttctaaacctaaacctttatttatgccccccccacattcttgtttttttgggccccgttttttttgggtgttcggggcggcaattgggggggaaaatttgcctagaaaaatttgtnnc

SEQ ID NO: 85562 - DNA, 245 bp, Glycine max
cttaccatctttccttatatcaggccaaccagagcggggcccaaaaatagcaaagcggaacccggggggaaaccgttatcccctaaaaatggcacacaacaaacaagccggaaaaataaagaaaaagcctggggggccaaaaaagggagcgaacaaaaattaatagcgaagcgctaactgcccgctaaaaagaaaaaaaaccgggcccgccaggagaataaaagaaccagccaacgggcggggag

SEQ ID NO: 85563 - DNA, 378 bp, Glycine max
aaaaaaaaatcccatgcaaggaaaaaaaaaatcaccaaaaaaaaaaaaacaagatcttaaaaaaacattgtccttttaaaaaaagtacccccaccatggggtttgggaagacattcttccactcgaacacatttgaaccttaaacaatctttcgaaagggaactttttcagcaaaaaaaaatatccccccccaggagggggaacaacgttgaaagaaaacagggaaatcatttaaatttgcttaacgggaaaaatttcttaaaaaacaaaaagggcatatgatctatccccgatctttcttttttttttaaacccccgcaggggtggggagaattaaaaaaaataaaacacttttttgtgcccaaaaaaaccagttaa

SEQ ID NO: 85564 - DNA, 398 bp, Glycine max
aaaccagaaaattctgatactactacaagtctacaacagtaattgcgtgagtaaattagggtttgttatcaccaagaaaaacaaaaaattgtgtcaatctactaagatgacatacagtgcataaaagggctagaaatcatgctttgatatagtccagatttatattcattaaaaattaacaggaaggacttggttattttcagttatggtaactacaaacataaaagtggccaatgaacaataaacaaaaacatgacaggacctttccatggtctgtacaaggaacagaaggatcaaattggtctcatgacttattaccttgccttcagaaggatctaattcatcatcttttcctttaacatgttttatatttctcccgccaaaaagagaaagttgat

SEQ ID NO: 85565 - DNA, 638 bp, Glycine max
cgcggacggaaggaaggatccagagcggccggcggcctttttttttttttttattggaattttttatttccttaaaaaatgaaaggggcggggggaatataagatgctaagagctttttttttttttttggggatttttatatatgttggtttatcctacatgaaaattaaagagggataactttataaaaaaaaaatttgttttaaaaaaattattttataaaggttttttttataaaaacagaaattttttttatggggtttttaaatttgtaaaaaaatggggttttttttgtaggaaaggaagttatcgtaccaaaaagagggggtaaaggaatttattatgattcatatttttggagttttggtgaaagtttttcaattggggggatataatgtaaacacctgggttttttttttttggaaaatatgtggaatcctaaaatattttttttggaagagcttggaatttttattttataaaaacaaaaattttcttttgttttaaaaaaaaaaattatttggctttaataaataaattttaaaaaaaatttaaaagagccccctttgttgtttattaaaaaaatttttttaaagctcttttttttatttatacctggaaaaaaaaatattttttt

SEQ ID NO: 85566 - DNA, 124 bp, Glycine max
cccacgcgtccgcaaagcatccttcgcttcaatctctctctctctctttgcgctttctgcaaaccgaacatttcatctccaaagggatcaacaggccgagggaaaaagggtcctgtcacacacg

SEQ ID NO: 85567 - DNA, 288 bp, Glycine max
aaaaaacagtgaaaaatttttttaaaaaatagggggtgtttaaaaaaaaaaaaaaaaaaaattttctggtttaaagccgggcctaaaaaaaaggggttaaaaggggggttttttttttaaaaaaaaaaaaaggccgttcaaaacttttggggaaaaatttttttttgaaaaaaaataaaaaaaaaattttttttccaaaaaatttttcaagtttttttgtaaaaaaaaaaacactttttcaaaaaaatttagggatggggtgggaaaaaaccccttttttttttattt

SEQ ID NO: 85568 - DNA, 354 bp, Glycine max
gtaacccagggtttttctttaaaaaaaacccgggggcccccccggaaaaccagacccggccccgggggggcaacaaactttccaaaaaaggggggcaaaaaaaccggggggaaaaaagaggaaaacccccccacggggaaaaaaaggacccccccaaaaaatcaaaaaaaaaaaccggggggaaaaaaaaaagaaaaaaccggggggacaaaaagggggaccaaaccaaaataaaaggggggggaaaaccggcccgttttcaaaaaaaaaaaacgggccaacccacggaaaaaaaaaaacccccaacccccgggaaaagggattttttttaaccgcccccaggggggttttttt

SEQ ID NO: 85569 - DNA, 312 bp, Glycine max
ccccccccggaaagcggttttcttttttaatctaaacctttccaaggaaaacctcccttggtaattgaccccgttaaaattttgccaaagtaaaacccaaatagggcctcccaacaattttacctcccaacctgtaaaattaaaggcccccccccccttccttttttagcctccccgggatgaccaaaaaacccttctccatcctgttttctaataggggggtttatcatccccggcacataaataaaaaaaactactttaatggccctcaaaacctattttccgattttaacccccccccccaattttttc

SEQ ID NO: 85570 - DNA, 430 bp, Glycine max
caaagcagaaaaaagtaattttattctgcttctgcaccattttgctctacgttacaaaccataggtttgttcctttacctgttcctgtagtatccaactttaactctatctaagatgatatacctacaccatctattcttttaggtagggggggttatggatcaaaataggggcaaaccacaagcatagaaacttgacataaatcatcctcaccattttaaagtaaagcccccgaaacccccccttaaaagggaaaaaaagtgcttatatacagagatatatattatgatcatagaacttgcctagttagctgtgcatgtttctttttcccttgtcgtacacatcacctatacctaccatcattttgtcatctcatgttgcaacagagtgattttccttgatgttgcaatttttcccacatgcatgtcat

SEQ ID NO: 85571 - DNA, 169 bp, Glycine max
tctcataaacttttttttaaccccgaagaataaccggcgtggtgcgaattatctcatacaacaacttcatcattttagaagctccaacttttttcttctgttgttttcgccgacaacttttatttaacaacaacacttctaactcctttttttttaaaaaggggttttt

SEQ ID NO: 85572 - DNA, 414 bp, Glycine max
aagaaatatacggacgctagctaaaagatacatttcgctcagcgagaaccaaagccaactgtttcggctatgccgacgacaaatcaattggtgctctcactaactcatttcaccattcattcaaaaatgtccaactatgtaaaaaccgaccaccattagaatatcatgatctaacctccaaagtccgtgattgcgaatgctctaatttcccaacgattaacgcttgttattgcttacctttgcgctggatattgatggtgaagctaccattatctgaacaggaccatgatggagatcaccgagattagagatccatcctcagccagccacctattagccgatacacacttaacatacccaggtctatggcacagaacatccaaaggcaatgtgctagttgaatatgcctcctgc

SEQ ID NO: 85573 - DNA, 271 bp, Glycine max
gtgttgattgctcttttttattatgaatgcttattggtgaagtgaggtcctgctttttatattgatcgcaactacctggcaggcggaaagaagaaaggaaagtctccttttattctacggcccctaaggatgtgaccggtgcgataggccaggtctacaatcattccaccgttgctcaaaaaaagaagagttttatttcccattgagatgtgctacattgttagcgtcaatccacttgtagtgagttttggcctaaacttttcttattttg

SEQ ID NO: 85574 - DNA, 299 bp, Glycine max
gaacccggggggggtctctgggttttactttttaaattttttatttgaaaaacggggggggcaacccgggggaaaaccgggaaaattggggcggggcccgggggggcaaaaacttttcccaaaggggaggggaaaaaaaggggggaaaaaaaagggaaaaaaggggggagggaaaaaaaaaaaaacccggggaaaatacagaaaaaaaaaacccccgaaaaaaaaaggggcaaaccgggggggcccaaaggggggaaaccccccaaacaaagggggggaacaaaacgccccccttccaa

SEQ ID NO: 85575 - DNA, 423 bp, Glycine max
tgaacaatttatcttcatttaaaattgtctatgcatattttctctgaatatacataaacctatcaccacggcaggtactagaatataccataaacctattaatcccaaatataccataaacctattcttaaactataaaatcccaaatataccataaaccttccatacaaatgtattagaatataaaatgctgtctttgtcttcttataagctaccatatcttgcatgttttttttaccagataacaaaatttatatatcttcagccacctcagcagtttcattggggtccccttgtcgcagtctcggtctacggtctttgacacttagctcttgttgtattatttaccatccagcatgagtaggagtaggaggcaccttcttaggcacataaacaaaatttgctattctttcttctctttta

SEQ ID NO: 85576 - DNA, 380 bp, Glycine max
tttttttttttttttttttttttttttttttttttttttttttttttttttttttttttttttttttttttttttttattttattttaatttattttattttggggggttaaaatttgggttttttttttcccctcccttttttttcctttttctttttttggggccttttttttggcccacccccaaaggggccttttgtttttaacccaaaaaatggccctaaaaagggggaaaaaaaaccgggccccccggggggggaaaacaaacagttaaaatgccggaaaaaccaaacccccatttgcccccacttaaaaaccccttttttttgggttttgccccccccccccttgggtgcccctgaaatttgcccccgggcat

SEQ ID NO: 85577 - DNA, 363 bp, Glycine max
aaaaaaaaaaaaaaaacaattttaaaactttttttttttttttaaaaaaaaaaaaaggggccccccttttttttaaaacccccccttttaaaaaattttttttttgggaaaaaaccaaaccccgaaaaaaatttttgggggtttttttttttaggggggggggggccctttgggggaaaaaaaactttccaagaaaaaacggcaacaaaaggggggggggccccccaaacccccctaaaaaaagggcccccccccccccccccaaaaaaaggggcccccccaccccgttaaaaagggacccccccaaccccgggaaccctttttttttaaaaaaacccctttgggggcacgtccccctttttt

SEQ ID NO: 85578 - DNA, 383 bp, Glycine max
ataaaatattttttttttaatatttaaaaaaaatttttttacaatttaaatttaatttttgggggaaggggagggcaaaaaaaaaaaaaagggggggaaaaaaaaaaatcctttaataaaaaaaacccccaaaagaaggaaagggggggaaaaaaaaaaaaaactatgtatggaacaaaacgcaaaaaaaaaacccaatttataaaaaaaatttttttaaaggcccacaaaaccgatctaaaaaaagaaaaaaaaaaattccctgcgttttcaacaaacaaaaaaaaaaaaggccccccccccacataaaaaaagagacggggggggacaaaatatataaaaataaccttcaataagagggggagaatggggggccccccccc

SEQ ID NO: 85579 - DNA, 442 bp, Glycine max
aatacatgaattatgaataataccctctttatcctttgtaatttatgagtgccagcaattcaagtcactaaaaaatcttcttgatgtagtatgcatgtataaaacataaatcctatcctcagtcaattcaaacacccacaaaaattgactaccttgtttccatatctgacaacagtcccgggacatattcaccctctatttctacttgtgtgcgcgtgctttttacgaactccaaatcctgtgggtagaaataaattttgtacgactttctgcagaaatgagctgaaccaaaagttcaaagaaagagaattgtttgcgtaacctgtgccaggtatccaagactgcaaattgatcaaacctgggagcaaccagagtgatgaaaaatccccttgtcaatcttttcactggctcgtaaaaaagagtaatgaagacaatggacata

SEQ ID NO: 85580 - DNA, 77 bp, Glycine max
aaccaggcgttcacccaaccggccacccaaccgtccccccaacggggccgccaagggttaccccaaaatttcggacc

SEQ ID NO: 85581 - DNA, 144 bp, Glycine max
attacaacaattaatattaaaacccccctgcacctccgtagggggcgagtttccacactttaagccaccaataaacactcttgatggagtatgattgtataaaacaaaaatactattctcctccaatacagacacccaccaaaa

SEQ ID NO: 85582 - DNA, 182 bp, Glycine max
aaaaagccccaaagggcgggggttgttttttaaacttttaaagttcaattttttaattttataagggttttggggggttttaaattttcttttgtttactcaaccaataccttaagatttttgttagcttaccaattttttggggttttaaacaacaaaatgggccttttgggggcttgttt

SEQ ID NO: 85583 - DNA, 354 bp, Glycine max
ccaaaaaaaaaaaatcccaaaggggcccccccccccctaaaaaaaacctttgtttttgccaaaaaaaaaaaaaaaaccggggccccccccccccctaaatttaaaaaaaacccccggggggaggggggcccttttttttgtaaaaaagtttaaaaaacttggccgggcaaaaacaatgttttgttgccccattaccccttggaaagttttttttttccaactttccgcaaaaattaaaagaataggtttaaaaaaaaaaaaaaaaccgccccccaaaaaaaaagggcccctttttaagggcctccacccccccctttttaaaaaaaaccttcaaattagggggggttttgtttt

SEQ ID NO: 85584 - DNA, 348 bp, Glycine max
aaaaaccgagggacaaaacaaattaaaaaacccccccaaaaaggtgaaaccaaccgaccccacaaactaaggggcccccaaaggggacccggacacaaaaaaaactaaaaaaagggaagggaggggaggaaaagggggcccccaagggggggggaaaaaaaattgacacacgcccggggccgggtgggcggggttttcatttgcccccatccccggtccaaaaaaagggcgaatagacaacgcttgaactcctggaaaacgaggccccccctccaaaaggggcccccgacaaagctttacccccaaatcttttccacgcctactttcctttccaaaaagggctttaaa

SEQ ID NO: 85585 - DNA, 516 bp, Glycine max
tttttcttgtatctaaacaaattcattgcgaatgctatgctaatgctttagaggattagttatactagtacattcaaaagagaattttttttctagtagttttaacatccccttcccccctttcaggctttcgccaccaccataaaaaaggtttatataaatatcactataaaatattaaataaaagtagtatacatgcaagcatctggcttgaagcctaaggttagaaatttggtctacaaaaatgaacagaaccgaaggcattgacactacctcatctcacgtctcttagtaaccctattgttgatacaatgatcaagattctggtctcccttggatccatccatagtcatcattcgtcaccatcattttgtttttatcaaaactttatatcaaatccactttcatggtctgcattctgtcacactggcaacttttctcttttttgtaaacccgtttttcttctcaaatctctttctcttcttattttgcttttggaatgactgcccaactaag

SEQ ID NO: 85586 - DNA, 436 bp, Glycine max
aaaaaaaaaaaaaaaataaaaaaaaatttttttatatatatataaaaaaaaaaaaatcggaggggtattttcaaaaatgggttctcccttcctaatatctatatttctctatactcccttccctcccaattttatctcctattttttaaccaaaatacccattacttctcccaatttataacaacattcaactttaacaaccctcactattcccacatttattactttttaccatttttccttttttctacttatcctgaacacaaatagactcctatcgatcaccctcttcaacccattttactctcttattggcttaatttgatactaccctttttattgactatttataattttacacacttttttttctctataccccttttttttatctttttaattttttattatttccctatatattcctccttatttt

SEQ ID NO: 85587 - DNA, 181 bp, Glycine max
gtcacactttctcagagacattgtgccaaaaacataggtgggcatgcgcaagcttgaggtgaagtgcgcctggccgtttgtcctactagtcataactgccgtcgacacgtgagccgtttccaaatctctctctatcatggtcgtgaacctgacaggtgcctccctaacaatatcataatac

SEQ ID NO: 85588 - DNA, 271 bp, Glycine max
atcatactatacaagctcctctctctggtctctctttttctaaaaccattcaagtcaagggctatgtacactacacttaaatctttctctcaatgacaaaacaagaacatggttacggctttcaaactcccatagattctctcgctctgcatcatcttcagaagcctgtttcttacaacctctagcacgagcacaccccgattacactccagtgacaccaaagtctttacttctctccagcaagctcaccaaatactcttcatgagcccac

SEQ ID NO: 85589 - DNA, 252 bp, Glycine max
  unsure (1)..(252): unsure at all n locations
ggaaaaacctttccgaccgangcgttcgattttatattatataataaataaactaatttttatttatcaaccattaaataaaaaaaaaggggtggaaaatttaatatataaatactatctttataaaaaaaaataataataatataattataataaatttaaaaaaaaaaattatcataaattaaacaataattttttttaaaaaattttaattttaatttaaaaaataattttaaaaataatttttttaaa

SEQ ID NO: 85590 - DNA, 309 bp, Glycine max
aaaaaaaaaaaaaaaaaaaaaaaaaaaaataaaaaaaaaaaaaaaaaagggagggggaggagaaggaaaaaaagaataaaaaaaacatgcatgaaaaaaaaaaaaaaaaaaaataggggggcgctaaatttaatggactgaccttcgtttcccggccttgtgactgaaaaaacctttgttggggccaaactaaatcaattcgcggtacatcgctttacaaccagctggcttaaaaaccaaggggttcacaccgattaagcttaaaaacagtggcccaccctgaatggggagtgggaaaacccataaggc

SEQ ID NO: 85591 - DNA, 73 bp, Glycine max
tctagaggatccaggtttacgttcccgtgcatgcgactgcgtagggtttctttagtgttacctaaatccaatt

SEQ ID NO: 85592 - DNA, 319 bp, Glycine max
aaaaaaaaaaaaaaaaaaaaaaaaaaaaaattaaaaaaaaaaaaaaaaaaaaaaaaaaaaagggaaaaaaaaaaaaaaaaaaaaaaaaaaaaaataaaaaagaaagaaaataaaaataaaaaggggttggcctttttaaagattcaaattttttttccccttttttgcaaacttaatttttttttttttggcccctttttttaattttattggcgggggttttaaaactttttcttttgaaaaacctttggtttaccaaatttttttgctttgtggaaaatccccttttcgcccgttgttttaataaaaaaaaggccct

SEQ ID NO: 85593 - DNA, 125 bp, Glycine max
gttatcgatcacaagaccgctaaggctcatatttgggacactgtcgtccattaacgatggggatcagcgccaagtgcatatcacacgggtgctgagttggcaatgtaggtagattacatcagtat

SEQ ID NO: 85594 - DNA, 197 bp, Glycine max
tttttacaactaatacaaccactatttaagcttattaaaagaaaacttcttcaaaatggcattattacctctttcgtataaaaaatttttaactacttttttttatatacaaaggatactctttcatccctgcttattcataataagatatactaatgattccctttcttcatggcctttattatccaactacacca

SEQ ID NO: 85595 - DNA, 237 bp, Glycine max
tcgctcaagcgtacgctcatagactataattatatctctctaatctgaaaccgacaatggcgggttcaatcgcacatgctatgatcgactatgggctgctagctatccttaagctgggcttgtaagctgcctccgatgactggatcattgacgctaacaaaaagggctccctcaacagagtcaagctcgactccggaagggactgctggaccatccatatctacgaccaatgaatct

SEQ ID NO: 85596 - DNA, 99 bp, Glycine max
ccggttcgaccacacccttccgcccacccttcctaaaaaaaaaaaaaaaaatttttataaaaaaaaaaaaaaaaaaataaagggaggtgtttttaatat

SEQ ID NO: 85597 - DNA, 139 bp, Glycine max
ctcctaaaaaacccaaattttatttacccataaaagcgggggcccccctttttaatattcccaacttaatttccctttacttcccacgtattacctctttttttgggtgcccaaacatatttttttctgcccttttttt

SEQ ID NO: 85598 - DNA, 390 bp, Glycine max
  unsure (1)..(390): unsure at all n locations
gaaagtgtcatttccccaccaatttgtttcctctgtttccattctttcttcttcattggggtgtcttattcaattccactttttccttttgtttttggttgagttttagagctgctgagggcttccattttcattctattttttgcgattttggtttgggttctttttctttaaatggtctgattttttgcggatttatttttggaacaggttacagtaacaacgacggctttggcaaagaatttgtgggtgaagttaagaaaaagatagaggttcttatattttgattntattaaaactgtgtatatgctttttttggctgattttttcgggcttatttggatgcctcgctgctattttttccttgaaaagctgttgcagattattttg

SEQ ID NO: 85599 - DNA, 353 bp, Glycine max
tccggtcgcccagctccgcccacctccgaggcattgttgatctaaaaataccaacatgactgaaaagtgagtgaagattatcataaactcactgccaaattgatgtttctggaaccgaaaggctgggtatccatgtcccctcagactaagaaggattcggagattcatgtaggcttggagagaacttgaaaaaagttatgaaaagatgaatcttgattgccaccagaggatagtaggccaccaaaaaagttctgctgttcaggcccccgaccagaacactactgtgtacatgagcaatgctggagatattgtattgctgctgagatgttggaagcgtgttagtaaaaattgat

SEQ ID NO: 85600 - DNA, 370 bp, Glycine max
ttttgagctctctaaatttgtcattagataatttaacaacggtcctacaaaattgaattagtaccattccttaaaagggaaaaaaaaactcaaattttcattgtctttataaatagaaattatttgttgtttcactcatgcagatttcaacttggcagatgtaaaagcgagatgagaaagaattctgtgccccacaaacatcagtatagctcccaaaagaccaaatgctttgagtgtagtgaacaggtccagcttcaaccagaaaagtacataaagtaacaaaaccgccgcaataccaacatggaaaaggatcccaaatgtggcaggtactgttgaaccaaggaaattctttaggttcacccccaagcgc

SEQ ID NO: 85601 - DNA, 346 bp, Glycine max
  unsure (1)..(346): unsure at all n locations
tttttttttttttttttttttttttttttttttttttttttttttttttttttttttttttttttttttttttttttttnaaaaaacgggaaatccggtaaaatttggggaataaacataaaaaattattttttgacagggccattttttaatccctgggggggggtcgcaaaaaacgggtccttaacccccaaataaaacctttttgttgtccccttccccgtttgattttgggggaactttttccccccgggggggcaaaaacaaaaaaaaccccccctttttggttcggggttatttaacaaaactttttccctttttactgggaaacattttctttgtttac

SEQ ID NO: 85602 - DNA, 409 bp, Glycine max
gcgcgcgtccgtaaaccgggcgcccttagagcggtcgtctttttttttttttttttaagctggcggtttccacattcaacatggaaatacaagttcatgttttaaattgataacataatgttcttaaatggagggatccaacaatggtgcgcaccctatgttgcttgggaaccaatcctaagatcttcctcacttgtctgctgatcccatccataatcacaaaagggtttttaaaaaggatccaaaagctaacccagcaagagtttgaattgctttgaagctgatagagaaagcgaagatcacgacaaaaaaaagtgcaatccaaccgtcaaatgaattgtccaatacatgacgtaaaaatgctcctgtaggtggccagaagatattcagcattgttagggcagacagt

SEQ ID NO: 85603 - DNA, 394 bp, Glycine max
tttttttttttttacttttttttttgttttttttttttggttttgtttttaaatgttaacataatgtttatagatggggggatacaaaattgattcgtttcctatgttacttgggaacaaaaaaaaaaaattgggtgacttacctaataaccccatcctttgtgttttttgggattttaaaaacaaaccgctggttaaaaaaaccccagcccgaaaaaaaaaaaaacttttttaaaaaaaaggggggggtcaaaaaaaagggcaccccatgggaaaaaccttttttccaacacatgacccctaaatgtcttttggggtggccacaaaaaattgggggccggttgtattttctgtgtgcccccccataaaatcttgggggaaaaacccttggggg

SEQ ID NO: 85604 - DNA, 259 bp, Glycine max
ggaacaactacaatccccaattaaaaatcaaagaaacaacataaagaaaacacggttcaccaacaacatgatgaagattatttttaagataacaaaacctaaaccctagataatcagtcctaaccatgtcccacacatgaaaccgattaagctagtgcttattctaaaccagaattgaaaaacacaaactaaaaatttaagtgggacatcaacaatgatagatctcatatgaagaaatcaaaagaacccaaaaatagat

SEQ ID NO: 85605 - DNA, 134 bp, Glycine max
ggaccctgtagagcgggcgcccttttatcggtcttccttttttttttttttttgtttaatcacaaaaataacgtatttttattcaatattggatgcacaatttcgatggtaattagatccaatatttccaaaag

SEQ ID NO: 85606 - DNA, 279 bp, Glycine max
ttttttttttttttttttttttttttttttttttttttgtttattttttatttttaattttaaattatatattttttttataattttttttttaaaaaaaacattttcaaaaaaaaaaaaaaaaaaaattcaaaacgtaggaaaaaaaaacgaaaaaaaaaaaaaaagggggggaaaaatggtacaaaaaaacactgtgaagggcgaaacacggaaaagatgaacaaaattcccaaaaggagaaaaccccggacgtgttcacaacggggggaagtgttg

SEQ ID NO: 85607 - DNA, 357 bp, Glycine max
tagctaaattgattttgcactattaaaagtaggcagtgctgaatttcaattctggaaggtttggtttgatggaagaatataagagaattaattctgatgatacaggtattcacaatactgacgagacctacagaaaatctaggcttcctaaaaaaaattaccgactcaaccccacaaaatttaatagacaccatagatcgtatcacgtttaggaacaaggcatgaaccaaatacaactatatcccagtattgtgattgttcccagctagaattagagaaatttctaaccctccgctaaaagcctggttaaacattatgcgagtttggaatgttgatacaaatgggaaccacgaaaag

SEQ ID NO: 85608 - DNA, 208 bp, Glycine max
aggggaaaaccccccaaaagggggggaccccccccaaaaaaaaattggggggccccccaaaatttcccggggggggggggagaaatttcccaccaaaaaaaaaagggggggattttttttcgggttttgggccacaccaccaaccatttggtgcaaaaaagggcgccaacccctttgccaaaaagccccataagagggttttttgggg

SEQ ID NO: 85609 - DNA, 412 bp, Glycine max
ttttacaatgtaataagggtctatagctgctatcacaatgtaataatactgtacattcagtaacctgcaaagatggcaattcttcataggcaaagaaatgaaagaacaaatcatttgttggtataacatatatagtattcttttgttcttatctttatggatggatatagaagtattcacccaaaaagtgaatgagaacaagccaagtaagtagctcatatatactttgcatttccattttacttttgtgaagggccaccagattgtttggttgcatgactctcatgttttggtgtccttgtaaatgaatttgaggaattaagtgcttccaatgctgctagaacttccaccataggtggtctaaattttgggtctatgttgaggcactgcaatgcaagtgcagctgcagctt

SEQ ID NO: 85610 - DNA, 353 bp, Glycine max
ggggggggggggttattacatgtggacaactgttatgcagcataacagccttttggttccaaccattcctttttcataatacaatcagccaactagacaggaaccttgttaccggggggaaggtgatttgtgtttattccaaggacgtgaattgccaattattttatttaacccacgggggccaccccgaaaattccgggccgttactggtaggaagccacatttatcctttggtgggaaggtttaaatgggggcgtgtccacatacttaatctccttcggggccaaaattttttttaatgggaacatcacagatcttagatgccggcaaaataaaaagattagggtggggag

SEQ ID NO: 85611 - DNA, 229 bp, Glycine max
gctaagacaacgaatgctttttttatttttgggcaaagtaaccaaacactttttttttttgcacaattcacaaattgcattctgaaaacccctgaaaaacttttgaagggagcccatttataggttggcggggtccgtagacctatttttatgaatcccgggtcaaactaaaagcgatcacacacttccgttacaaaacccgtcaaaaagacacaaacaaggggggaaa

SEQ ID NO: 85612 - DNA, 248 bp, Glycine max
gctagccgaccgaatgctgtgattaatgccatgtcgtgtagtttgaaaatttcccagggactaagaaaaaaaaaattctttaactactaaacgctacacatgtaagaaagacaaccccacttatgggttggagggggagggggaggggcccgtgggttatgtgttcaaatttgaaggcaaacgccattggtcgcattgattttttcgcggacagtcatattttctattgtttgcagattgataacgaa

SEQ ID NO: 85613 - DNA, 340 bp, Glycine max
aaaggtggaggggtatgagaccccaagtgctgatattatcataggccttgaagcctatactaaattatatccaatgtggtatataaaactatgtgtgtagaccgacggatagtaacgccagagacactatgagcgacgtggagatgagctgacggagagatatagatacgtgaggggagctcatttgaggattacaactacgatattgcagctggggacagggatcccaagtatgggaatgtatgtatgttgctgtgcatgttggttgctaagaaaattatgtttcagactaaagagaggggatatatgtattaccgatgaacggaacatgagaatgaaa

SEQ ID NO: 85614 - DNA, 273 bp, Glycine max
gggtcccaggtcccaaaggcaggggttaattaaaatcggggtggaggggcccttaaaccaaaaaagggggggggcccttaaaaaaccaaaagtgtttattttaacaaaaaaaactcaacctgaaactttttcaaacccatggccaaaattaacaccccttcggccttaaataaatccaaattttaacccttaaaaaacagggttgtttttaaaaaataataaacccagtttttccccattccccccagccttttgttgaccaaatttttttag

SEQ ID NO: 85615 - DNA, 236 bp, Glycine max
agagtaaagataacccgtggatatcgttaggatttactgctagtattttacaattgaatcttgaaatttcatttatagaaaatgaaataataaattaccacctctggcaacttcctctaaaatcccaaaacgaattgctaaattcttcagtcagatattctcatttctacaccaagaatgtccttgaccattttgtatgtcacgaaagccatttcttttgaagggacaacccgaaa

SEQ ID NO: 85616 - DNA, 364 bp, Glycine max
ttgtttttttttttttttttttttttttttttattttttttttttttttttttttttttttttttttttttaataatttttttttttttttttttttttaaaaaaaaattaaaaaaagaggtttaaaattttttttaaaggggaacaaaaaaaaaaaaaagggggggataaaaaataatttttttttttaaaaaaaaaagaaaagttttttttcaacccttggggggaaaaaaaaaaaatggggtttaaaaattcttcccgaaaaaaaaattctaaaaaaaaacccaaaaaaaaagggggggaaaatatggacccaaaaggcggggggggccaataaaaaaaattttaaaaatttggggggggg

SEQ ID NO: 85617 - DNA, 275 bp, Glycine max
aaaaaataggggtcttttttttccatttaaaaacggggattaatttcagggaaatttttcttttccccggtagtaagttagtaaggggggggaattattccaaatttttttggaaacctacccccggggattgaaataaaattttgtaaggaaaactaatgaaccctttgaaggaggccatatcccttggggggggggggggttccccgggaggaaaccctttaaaaagaaaattgaagggtcccatccattacttattatagcccccctttggc

SEQ ID NO: 85618 - DNA, 280 bp, Glycine max
ggccccggtttcttgatgccggggccggggccaaaccaaatgaataaatgttttctttatcggacttgttcaactaaattagcttttaacttattctgattatgggccccacttgggcttggttaactaaataacattcaactgtttatagcatttttttattttattggggaaggggccgaggaaaatgaacatttattggcttgaacaatttaacttttgaagaaatattatggtaaaggttatccaacttcttttttttgcaaataggattcttttt

SEQ ID NO: 85619 - DNA, 343 bp, Glycine max
ttttaagactttaagatctaatttataaacaataaaaggccaactgaaaaatgggcttgtcatatgtgaaaagctgcctcaaatcttatgattaaagttgtcagcaagagagctcctaaagagtgactttttgaaacctagtaaagaatacgccaacaatttgttctcttttttattaaattacattttttctttttcttgaacaccatctaactgtttggagcgacttttttttttttttgtagaacatgtaaacttttttcatttcctcatttgtcagattcttggaatgacttgtcgaaatatttacattttttttggggagagtttttttctttttaaa

SEQ ID NO: 85620 - DNA, 167 bp, Glycine max
  unsure (1)..(167): unsure at all n locations
tnttnggggtgtttttttgggttttttgggtnaaaccccccaaaagagcccccatttcattcccaaaaaaaagggcatttttttttaccctttttggggggaaattaatggggggttttaattaaaggcccccccgggggatccctggggtttggttcccttcaccc

SEQ ID NO: 85621 - DNA, 232 bp, Glycine max
aaagggaacaatctatagctacaaataatttttctgaatcaacagctacatgaagttggcaataaaggatcacttaagagcttaatcatttgaacaacaacatcatattcatcttccattcttataaattctaactgcattgaaatgccttcagtctagacggcgcaaggggttctcaccctgacccttcttggtgaggggtatcaccaattttttgcccactctaaacccc

SEQ ID NO: 85622 - DNA, 370 bp, Glycine max
gcatatgcaatatcgaagccaatacttattgaataaagtatctggcattgtggtacgagcccaaataccattcaagaagatcaccaacaagaaaaaaatatatataaaatatttatcctgcgtttaaattgccatataaaatggtatagtttactacattcatctatgattctaagactaaactcgtgacaaaaaaaaagactcaaatgtctatttttttttccttttcgaaatgtgcacttgggatatcatcatgatgaggtggaagatgagtcccaatttggaatgttagcactagcctcgttcaccatctttacaagggttaccacactttcaggaacccctggtgggggcaagggcaagttttttg

SEQ ID NO: 85623 - DNA, 270 bp, Glycine max
taagcaggaatagtataatttgaaatcaagcaggacaatgcacacatcgacccgaatctactctcatacaagaagaacctgcatacagggccacctagaacgcgctttacagaaaaaatggatcatgtaaaactgggagacacgccagtctattgatctaactttaaaggcactcccaacactggaaagctgaaaccggtgaagaaaaggcgtgcacgggagattaaccatgtacctttacacacatgcggttcgagctgactttaatag

SEQ ID NO: 85624 - DNA, 216 bp, Glycine max
aaaaacaaaatggggttggcaattaacatttttatttggggtaaacagaaaacatttttgggccttggggggattaaaaattgggttcatggaattttttgggttccctttttccttgaaaagatggctccaatgaaagggatgggcgactttttgtttttttttctgagagaagggggcctttccaactttttaaccccgtgttgggggtttggg

SEQ ID NO: 85625 - DNA, 205 bp, Glycine max
gttttgattgtttttttttttttttttttttttttgtgggggggagtttctggggttttttttttttgggattacctgggttgcggaaagacccaaggaaagaccggtttaaggtaaggaaacaaaaaatgttatcccttcgacaagccgggtcggcaaacttgactccggtggctagaaaaaaaagagggttttccccgcgggg

SEQ ID NO: 85626 - DNA, 213 bp, Glycine max
ctccaccagcttatttctttccacaacaaatctgtgttggtctgttcttaatccaattttctctcccaacagttacatgattgtgttattttaatctttcttttggtgaattttgtgatatcttaatctggttaattatgaatggtattaattcaacacgaagaaccttctttaatatttaggctttattcgttttaccttacaaaccttttt

SEQ ID NO: 85627 - DNA, 184 bp, Glycine max
tttggaaatttggataagaattgactcaaggggacttaggaggattaatgcaagaaaaagatttggtacaacaattataattaaatagggtataatattcctcgaactaatagcttttattagcgactgaaaccagggggagaaatttgattcctgatatcacttctatctaacaaataatatt

SEQ ID NO: 85628 - DNA, 534 bp, Glycine max
ggggaaaaaaaaaaattttttttgcccctttccaagggggggggttcccccccccccaaaaacaaaattttttttttttttttttttttttttttattttttttttttttttttttttttttttttttttttttttttttttttttctcccccccccccccccccatattaaaaaaaacatgccgaggagaatggtgttttgttttttatcccctcaacataatgagtcatattactccaaaatcaaggggggggggcgtttttttggatataataccaattatcaaactttttttgggggggaggggataaactcctgggggggggcggaaccccccaatggttcttctttttttttaattttgttttttgcccccccaccccttctttttaaatatttgtttcccccccccccccctttatattatatgattttttttctccccacccacaaaaaaatatttttttttttttgcccccctatttatattttttttttcccccccccccccataaatttgtttgtgtgggggg

SEQ ID NO: 85629 - DNA, 326 bp, Glycine max
gggacccctaaaagaatctgttttttttgaaaacatagggcaacaaattcaatttgaacaatttccatgaataaaccccttttttgttagtccccccctggtcaattcatttccgagggggcctaaacaaccataaaacgggcgtttcagtgttctgaaacaaaatgtgataaacaacattcattaactgtgccagcaaaagcctttaaacaaacccaccttttcaatttgaccttttgggtttggaaaataatgaggttttggattttgcaaaatcaacaaaatccttgaaaagggcattttctggctttttgtgtttggttggg

SEQ ID NO: 85630 - DNA, 339 bp, Glycine max
tttttttttttttttttttttttttttttttttttttttttttttttattaatattttttttttttttttttattttttttttttttttttattaatttttttttttttttgaaaaaaaaaaaaaaatttttaaaaaaaaaaattttttttttttttaagggggggtataaagaaaggaaaaaggattcttaaaatggggttttccctgggggggggggggaaaaaaatttttaacaaaaaaagggggggggggtaattttggggaaaaagaagaaaaaattttgggggtccccccaaaaaaaaaaaaaaaaaattttttttttttgtaaaccacgtgg

SEQ ID NO: 85631 - DNA, 192 bp, Glycine max
tttttgggtttttaacagaacaaaattgtattatttaataaaactgtggaaacacatgtcaagcgacaagaaagattggagataaacaagaatatttgtaaatggttgagaagatccaaaaagggctcagattataatgacttaactcattacctttttttaagaattggccaaattaaaaaaaaaggcggg

SEQ ID NO: 85632 - DNA, 53 bp, Glycine max
ggggggttatttctaaaaaagtcaattacctgggaatggtttggggcccccta

SEQ ID NO: 85633 - DNA, 338 bp, Glycine max
ttcataatgtttacgcaaactttttctaagcgagatcaggctttttcaatgttgacaccttctaaaataaatgacatcacgctcgagtgttgctgcattccactaatatatggagttgttcaccgctttgtctaaaaataacaattgcttgaccacaacaacgctggaggcggtaaggggcaatggtctttcaaataaacctgtacaaaatgatttccaaacatgtgaccgacacatatcatgcggtgcctaaaagaatgaggtggtggttaacttctaagaggaaaaaatgccatgctttgttctcgggacaacgatacaaggattacgttatactg

SEQ ID NO: 85634 - DNA, 470 bp, Glycine max
cgcataatgaatacaattacataaacaatgcatgtttagtcttcatttaggttgacatagtgtcttttaaatgacatcaagcttgtgtattgctgcattccactaatatatggagttgtccaccgctttgtctgagaataacaattgcttgaccacaacaacgctggaggcggtaaggggcaatggtctttcaaataaacctgtacaaaatgatttccaaacatgtgaccgacacatatcatgcggtgcctagaagaatgaggtggtggttaacttctaagaggaaaaaatgccatgctttgttctcgggacaacgatacaaggattacgttatactgtgatgcaatcacatatctcatctccgttatatccatccacttgtccacactaacctgaatcaagcaaacatacacatgtaagtaatttaaagttttttattaaaaaaaaaacctaaaaacatacctttaaaa

SEQ ID NO: 85635 - DNA, 398 bp, Glycine max
aattggttaacttgggctttcatacgggaacaaaaaacttgaaatgtaaattagcagtaaacatgaaatatgcggggcaagtatacaaaaaacattttagatatcaaaataaaactcagaccagcagcaactattatatttaatttctccactttcctcctctcccatgaccaccacgcccaccttcttctttttcaccccttccccctctgccaccctttcctcctccataatgttttcctccaccaccaccacctaatgccttgtttgcatcggattataaatgcatctcttgcggcaagggcagaatgtgatccacacacttgctgaagctaatatcatcagcagagtcatcctctctgatgaggaaaaagcacctgcttttgaaggtaggatgc

SEQ ID NO: 85636 - DNA, 248 bp, Glycine max
tttttgggcttttcccccggggtccctcggggaaccctggtacgacttttccttcctctaaatgataagggtcatttttttttttttcactttttgggggaaaaaacacttaaatttcccctattttttttttggggacaaaacctcttttttttccccccctttttcctatttaaatattttttttttcccctcaccccggggtgggtcccccccctttttaaaattatacctttaaaaccccccct

SEQ ID NO: 85637 - DNA, 233 bp, Glycine max
ataaacccggtaaaattggggttggttttttccctgcgggcccggggaaaaacgctggtaagggccaaaatggcttgggggggttttgttaaaaagatggtttttcccaaactttttcccctaaagccccctttggcacttaacaagttggtgtggggggcggaaaccccccccacccacttttgctttttggtcacaaaaaaaccgcgcatttaatttttttttttcccaaa

SEQ ID NO: 85638 - DNA, 498 bp, Glycine max
aaaaaaaaaaaaaaaaaaattttttttttaaaaaaggggaaaaaaaaaaaaatttttttccccccttttttaaaaaaaaaaaatttttttttttcccataccgggggaaagaaaaaaaaaaattttaaaaaaaaaaaataaaatcaaacccaggaaaaaatttaaaaaataaaaataaatttgggaaacctttttttttttatattattaaaaaccctttataaaaattataaaaagggggtataaaaaatggagggtatttgggagttgggagttttaaaaaagggggggataaaaacaagagattttttaaaaagggggtttataaaaaaaaatatttttctaactaaggtaaaaaataaaaaagatagttttttttaatgtagggtaataaaaaaaaatttttttttttggtgagtttcacacttaaaataaaaaagggggttttaatggatataaattaagggggttaaaaaaggggttttaatgaggtataat

SEQ ID NO: 85639 - DNA, 76 bp, Glycine max
cttttgggaatattgtatctgattaccatcgatattgtgcatccaatattgaataaaaatacgttatttctgtgat

SEQ ID NO: 85640 - DNA, 325 bp, Glycine max
caaggaaacatgttaagtttggagaacataaaaagcatgcatcttccaagggttccgatggtcatatggaggtagtagaggactccggtagcaagaagcagcgttcgacaacaggacagggacaagctagtgatttgagtaaacaattgccacaaggtagaagacgtcaggcgtttcctgcttctgggaatcgtagttcaacattccgctgagacaatgaaaatagattttatgtacaaattgacaaagccatattttcaatttagcagtgttaaatccaacatgatcaagatatataattttgtgatttagcataggttgtgtc

SEQ ID NO: 85641 - DNA, 392 bp, Glycine max
gacaaaggatgggtttcctctcaatctcttcttcctcccacacccgacaatactatgtgtcctctcctcggattccccgtcaaactcagccgccccaccatggaactccaccatgataacctcatacttgtcgctgaagtcgacttcttctctcatactccgccacccaacatcgtcaagaaggaacttgatcaaacacctcttcacattaatactggtttacaactccttactgctaacaccaggagtgaccaatctaccgtggatgacgggctttcatcggatgcagaagataagcgagccaaaactctggaggctagacacatgcaagttgggcaaagcagcattgaaattcttttgaacaactatctgattcaataacttcataatta

SEQ ID NO: 85642 - DNA, 310 bp, Glycine max
aacaaacggacgcatacattgtgttgcctggtggaagggcatcgtatagggagcgagagcccagcactggtaatatcaaccaaagtcaatgcggcagcgagttatctatatatatattgcacacaaatgaccctttaacatgcagtcagagcttttacacaggctgtgctaccaccagttaatgctgctccaaagacagtctcatgtgaaaaatctgaagtgagcatctccaaagtatcctaacagacgccactcatggtcataacatctgcaccatcttatctaacattgttacgctgatatgcaataa

SEQ ID NO: 85643 - DNA, 185 bp, Glycine max
aaaactttatatttactattaacgtctttgttttaaagacaaatcacatgcacccgtgtagcattgtcatctctgcattggttgattgtttttacaaaagagaatggttaataagatcgtggattcgaacttcgcaagtttcaaatacgtgatgttgattgtttgcattctgtttggaaattggg

SEQ ID NO: 85644 - DNA, 265 bp, Glycine max
cccacgcgtacgcttgtgttcttttattactgccaacaaatattgggtatcattaatgctctagcgtgcccctctaccattggcggtgtcagccaacttttcaactcccacatgctcccaccactcaattttgaatgtctaacaatccactcctacactaatggaagagtaacaacccgcctctggattaacatctgttcggggacacactgtggatacacatgaagcacccccatatcacactatacactactcttatgcttga

SEQ ID NO: 85645 - DNA, 232 bp, Glycine max
accactttttaattacccgtgcgtcgacccactccttcccacccttcaaacaactaccaattcctttagaaatttcactcactggtcacactacgggagtacttctttcctggagatggcctcaactgtcttttaaatacttctacttcccccactagtgatcgtcttcctttgctttttccctttctcacagactcttaactttttacctttatccattattttttatttt

SEQ ID NO: 85646 - DNA, 330 bp, Glycine max
ctcacgcgtatgatatttactactgacagaaggggcatattaaatctgaagcgtagagtcaattaatcagcgttgaccaaccaggagtaatactacgacgtatcacaaccaaacgccgtactattcttctactggacaaactcacacgcacgcactcttattactgtatccattgtcgacattaccacgagtcatggatattatacaaccctgatcttttcatgtacaaaccatgtgaatgctggaacccacttcagagatgccgatcacacaacatagctctatcccaaaatgatacaaacgctattatggaagagtgtcagatccagc

SEQ ID NO: 85647 - DNA, 159 bp, Glycine max
ataaaaaaaaaaaaaaaaaaaaaaaaatttttaaaaaaaaaaaaaaaaaaataaaaagggagaaaataataaatggggcggccgcttcttaggttccaagcttacttccccttgctttccaaatatttgctcttcttttgccttccctaaatccaattt

SEQ ID NO: 85648 - DNA, 393 bp, Glycine max
gagaatcagatccctcctctatatatatgtatattaatggatcacgagatttttatacaaagactaatttgctaccaagcttaagatcttttatgcctagtgcccctatcttaaacttcattttttttttcttttccttttgggggtgggggtaagtggtattttgctccatttcctgtaatgctatcaattttctgattgtattgtttatccagcctcaacagaagaatgacgacaagccatcaaacgaggaggagaagaagtaatctttgagaaccactttgccctgtatggttttattttcttggtagcattcttcgcggctgttactaatcgggggaactatttacgcatgtttcaatgtgtctctctgcactttaattggaaccaatg

SEQ ID NO: 85649 - DNA, 376 bp, Glycine max
cttttatcaatctattgtttgattgatagttttcatggagtagatgaagtctataattcaattcagaaactcattgaggagagggggagaggtctctttgtatatttcttacgccttgtgtcaatgaatcttgtcccaaacatgccttccatgtgcatgtgtgcacacaccagtgtaatcattacctgatcgcggagaatcacgaaaagctgaaaatccgctatagaatatagcggatacgtcgcggtcaaatagtggaagccgcatagcggttgaaatagaatatatataacaattaaatatgtataaaaaagaatcctatatgcaaaaaaaagaagctggataaacattaacataatattatctcaaaagttaa

SEQ ID NO: 85650 - DNA, 91 bp, Glycine max
gtttttagttcgaagacttttactactctcttcactgttgttgtgttgtgcttcttctgggaaggttctggggttcaacggattccccccc

SEQ ID NO: 85651 - DNA, 296 bp, Glycine max
gtttgaattccgggtcgaccaagccttccggacccttggcctttttccaagacttttttaggatgagaatattccaaccgggggacacactcttgtgtagcgtaacataaaattcgcagcagtgcttcatggaaagatcatgcactttaaactttgtctgatacttcagcgcgctacatcactcaagagggtttttgggtcaatcctatcaccctttatcaagagctcgagagagaatgtaataaccctgatatgaaggtgtgaaacatacgcacaattgatgtaccataccgcac

SEQ ID NO: 85652 - DNA, 355 bp, Glycine max
ccaacgcgtacttcaaattcgacatcaatatcattggccatcttagattcattcatcaaataaagaaaatcacattttccatggccacttttaagaccctctgaagcactcattttactaactcagactccgactacgattacgatgaaaagacagagctctacgcaaactcgtaaaccacgcactccaactagctaaaagacgtgtacacgaaactcaaagccataaaactcaaatgccagacgccgtgtgcctcaatcaaaccgtttgcgcaatacgccgtttagctctatatacacataagcggctacccttgcaacgccaaatggatcctatccgacaaacacaccttcta

SEQ ID NO: 85653 - DNA, 412 bp, Glycine max
cccgggtgcgtacccatcgcgttccgaaaaataatacaaaatgaattatgggaagaagggtattatagaacccaggtattttaaaggagataaaagaccatcgaggtgaaactctttgtgttgtgcgagcattgttgtaagcgcttgggtcacatgcgaaacgaataaccttccagccgaaatatattgaataattatctagacaactcaatcttgcaatctgctgacatgggaaaaactcatctggaaacatctagctttgtggatccctcgtaatctcttcccagcataaagcttccctacaaacattatagtgtctaagagcgcatcaaatgttgctcctgttgacaattcaacaaatattgcattgaacttcaaatgcagcttcacagagaaatcttctgattaacct

SEQ ID NO: 85654 - DNA, 177 bp, Glycine max
cctcccacacgtccgcttatttctaaagttttttcacctataatcttttttctactaggagagttatttaatttatatttacccctcatccatctttattattgtaattttatacaatacttatttttataatactaaacaatcaaaataatatctataataatacaaaaattaata

SEQ ID NO: 85655 - DNA, 368 bp, Glycine max
cccacgcgtccgaaacatggcttccttaagctccttagtgctgctccttgcaggtctaattctatcccctcaagttcttgcaaactatgagaatcccccagtgtacaagcctcccactgagaaaccaccagtttataagcccccagttgagaagcctcctgtttacaaacctccagttgaaaaccccccaatttataagcctccagtagagaagccaccagtgtacaagcccccagttgagaaacccccagtgtacaagcccccagttgaaaaaccaccagtgttcatgcccccatttgagaaaccaccagtgtacaagccccccattgaaaaacccccattttacaagcccccagttgaaaaacccc

SEQ ID NO: 85656 - DNA, 403 bp, Glycine max
  unsure (1)..(403): unsure at all n locations
atcntcaaactaatctctgttgagctggggaaaagtcttccttagagataaaagacgttaaactacataaatccaccactttatgctagatgatgcttactcaaaccacactcagaaaaactgaggctactgcattttgctatgctctgatggtggtttcacaataaggatcgctgttaacgcatgatgtgcgcaatagtcgcttacactcccaagaaaagtccttttgagcgtgccaaggcctcggctgcccaagactaggatgattaagaccccgtgaaatatcccccccccttnnnatttcccttgcgtctccatgaagaataatactctctcctttcaccagcttatcatggcacattttcaatgcccgggagaaaatagctgctgatcgttcttgttg

SEQ ID NO: 85657 - DNA, 384 bp, Glycine max
ggggggggggtttttttttaaaaaaaccaacccggcaaaaaaattttttttcttttttggttttttttcccaaggaaaaaggggaaaaggggggccctatttttataaaaaaccccccagtttttttttggaaaaaaccctttttaaaaaattcttttaaaaaaggattttttttttttttccggccataaccgggggtttttttttcacccaaaaaaaattttccccccccgaaaaacaaaaaggggcccctttttttggggttttttcttggccaataaaaaaaaccaaaaaaaatttttttatgggggggggggggaggggctcctttatttaaaaaaaaaaaaaaagggtgaaaaaaaaaaaatggggggcttctttttg

SEQ ID NO: 85658 - DNA, 451 bp, Glycine max
ttttgagaagaaatatttttttttttttttttttttttttttttttttttttttttttttttttttttttttttttttaaaaccccctgggttttaagggggcaaatagtttaacaaaaaaaattccaattaaaaaaaatggtttaaattcaaaaaaatttttctataaaaggcaaagggaagggttggaaaaaaaataaaaaaaaacttttttttcccaaaaaaaatgaaaagggtttctggggggaaaaatggttttttccttgggaaatcccccaaaaaaaaaagggaaaccttttaaattttggggggggtgtttgtaaaaaaaaccggaccccgagtttttggggctggggggatttattttattttaagggggggggttttcggcccctcctccattttctttaggggaccggagaaagaatttttttttttttttttggggggg

SEQ ID NO: 85659 - DNA, 273 bp, Glycine max
ggaggcccccagcaattgcaacttaaatttggccatttttggagaacaaaaaacttttagttcttactgctgaacggggggccggccaaatttctcaaaaattttggagagggtcctggaaggttttagtggttttcaagcctaatgggagcccctttttttttttttttaccgggttaccgataatcattttctaaaaatatggaacagtttttttttggaagcataaacgagaatttttttactttttttgggggccaacaatctaataat

SEQ ID NO: 85660 - DNA, 223 bp, Glycine max
accaaatgcaaggcataaaaaaaattggtgtttaacagcccttaaacccaaaaaagggcggtggcccataacaaaccaaaagggtctaatctaacgaaacaaacttaacctgaaactgtatcaaaaccgtggccgtatataaccccccatccccgctaaataaacccaaaaaataaaccttaacaaacacggttgtccttaaaagatattgaagcccgtcgcc

SEQ ID NO: 85661 - DNA, 345 bp, Glycine max
gaaaaaaaaaaaaaaatttttttttcaaaaatagggggaaaaaaaaaaaattttccccccccctttttgccctccaagaaatttttttttttccctgaaccactcaaagataaaaaaaattttttaaaaaaaaaataaaaacccccccctggaaaaaattgatacaataaaacacccttggggccccctattatttgaaaattcctccacccccttttggcacattttaaaaaaggggttacttaaggggggggcactttttgtaatgggggtctccaaaccgggggggtgaaaaacaagctttttaacaagaggtttgtaaaaaaagggggttctttctttggg

SEQ ID NO: 85662 - DNA, 476 bp, Glycine max
  unsure (1)..(476): unsure at all n locations
attagcggcttttttttaaaagaaaacaaagttacattgggttttatgacagccaggtttgaccaaatacacttgaacccacctatttacagaaacggggcgaaaatattctaagaaaaaaactccacacgattgttctgggaagagtccaactaggggggtacttaacaacnnggcattaagttggggtacccataataccgagggcaaatggcactaggctcttaaaacaacacaaactacgatcgggaagagnctgtagttagaagcgtgggggctctgtggggcaccaacaccaatatgtgagttgcccccacacgttcccatagtcgcctataaattagcctcggctcttaccaaaaagaacttcctaagccttctgaacaaggctgttttttttttgcccaccccagaaggttttttttttcaagtgcccacccaaaaaaaaaagaagcccaccaccgccttccccccaa

SEQ ID NO: 85663 - DNA, 418 bp, Glycine max
tttttttttttttttttttttttttttttttttttttttgggtttttttttaaatgtttttttttttttaaaaaggatccctatccccatggatgagatttagacgctttattcacaaaaggggtgcgttaacaagcacaagggggcgatgggggatttaaaaaaaaaaaaaggggaaaaaatttggggaccgggggctcaaacaaaaggacaagaacggggtcaaaaaatttggggggggggcccaaaaaaaaagaaaaagggccctaaaaatgggaaaccgggggggaaaaaagcttcctaatcgggggtgaggccaaaaaaaaaaaggggggaaacaaaaacccccctttctaccctttttgttgggaaacccgagggggggccacaaacacaagaaacaatttttttctccccc

SEQ ID NO: 85664 - DNA, 536 bp, Glycine max
  unsure (1)..(536): unsure at all n locations
caaatgaaagcctattacattcacacaggtacactccatccttcaataccatgccagaaaagaagtcgatagccccaaaaaaaattaaataaatattacacaatttacactctcaactagctattataattaaggggggaaaaatgggttacagatattgaaggatgccatttcaaagcagcatcacctctgggagtatcaacagcagttgaggacacaaatcgattcagtacccgttgcttacacttccttcccagaaaaaaattgtcattctatgaaaatttaaccttttctgatgccatggtagctgcaagcctcttccagtagcaaaatcacaatatgcatcatgccaacctaatactgcacctattggaatacagctgagcatccttgaatcacaaggactcacatgaaattcaacttgaacccacaatcccttgcttactactgtgattcaacgacccaccattttcttcgcaattgagaaaattaagctntggtggctgagttgaactgaatccattggccttgacaga

SEQ ID NO: 85665 - DNA, 382 bp, Glycine max
gcattcacctgcagagtttgtcttcatcaggcgcatacaccacaataaccagtgatcccttagccgcatatccgctttcccgcgacgcacctttaacgccagaagaacagtccgtaacagacttaccttccacagggccaatggcctctggaccctcataatatacaatctgacatcataggtgtccagacaccccacttcaacatatccggcacaatctagcgcccactgcaaactctcttcttctccgaccgaggtactcagggactcctgctcactaccatgggatcaaacactgcatatcgctccgtaatctcagcactcgctttctcaccgaccgagtcaacatcatctccatcttccacataaagcgcatgcgcac

SEQ ID NO: 85666 - DNA, 416 bp, Glycine max
aaaaccaaaaatagcaaaggggttttttaaggggaatcaaacattaccccaccaaaaacggaaatccacaattcagcccctgtaattaagggtggtgattttttacaaaagggtggtactgaataaaacctaaagatccttaaccccaatgaaagatttttaaggtttgaaaacaataatacattggccaaatgattcccggtttaaaacacaatataagggccttacattttgttggcaattttaaaagggggacctttttcctgattttgggcatgctttaaaaacacaaaagatttaacatcttaaccttttttacacttaacagaaatttaactttcctttgcctgttaaaaaaacaaaaattccttaagaaatggaaagccttttttgtcgaaatgataaaccaaatgatt

SEQ ID NO: 85667 - DNA, 577 bp, Glycine max
  unsure (1)..(577): unsure at all n locations
ggatcctctagaacgggcggccctttttttttttttttttttttttttttttttttttggcgataaaaccgcttgattattgatggggtttaaccaacacatgtatttctctatgatgcggcggtttattgttcaaaccaattgctcaaaataaacacctgcctgagttgcctcaaaaatccttggcttgcttttacaattcagaacatgtggcgaaaccccaataaaataaacaataagataaaatctggtatagattaaagcaagcttaaaaaaatgattttgcaatttcagtattgccaaaaccggaacattactactcctaaaataagattatggttcttacagcacgggattctgatgtggacaaaggtcatctacaatctgcaccaactgcatcaacaatggatttgaaacccatctctttccaggcatgaagctaattcaccctttatctgaggaataagtgcagggtccccataagcgaatgcngtatagagctgaactagagttgctccagctcgtatttcttatatgcatcttccccactgctaatgccccccagccaatcaaagga

SEQ ID NO: 85668 - DNA, 323 bp, Glycine max
caaacatgaattgggaaaagatttaccacactcgagcgaatgcgattaaaagaaagcataatgtgctatacacctctcttttaatgttacacaactggaacccatcatgaaaccccagctaacaacctacacgctgaaccaaactgaactttacccgcttttgcacggccaacaaataagaaactaactaccttaaaccactaacaaaaatgatcatatatcacacctggaaggaatggcacaataaccacacattccctataatataactcggttttctagcctaagatatcaacctcatatagagctcgaacggaaaagaa

SEQ ID NO: 85669 - DNA, 169 bp, Glycine max
tttttttttttttttttttttttttttttttttttttgggggtttttttttttttttttttttttttttttttattttttgcgggcccgggggtaaacccgggaaaacccgcccgggccccgcgggcttcccagctttccctttagtgggtcctattaaaactcggcgt

SEQ ID NO: 85670 - DNA, 214 bp, Glycine max
gggaaggctaacccccaaaccatacgtaaaggaacaatacaatttggttaaaagtgaattcatttaaccttacccttcgattcaagccaaacaaaaaatttaatttagcccaaaccagacctaaccaaaccggaacaaatggaaggggctttatttcacaacacaaaagcaagaggccgacccaacctgattagattattttttccttccaaag

SEQ ID NO: 85671 - DNA, 494 bp, Glycine max
cagttccaattttttaatccaccggaggtgtgttcttggccaggtgttttgtgggcaaagctttgccatggccgtttgggtcaccttggccgcttcatcggagatcataacttactagcaataacttccttagaaatcactccactctttccagcattgaaaatgtcctttctttcagcaataaacttagcaaaccgagaacccttctctttacttttattgtctgtaaccgactgaggtggatcatgcataggatggggattaggatatgatggccgcatcaatgcccatacagatgaaaggtattcgttcggttcgtctagaatccgccgaagtgataaatcctccatggcttttgagaagttgacgatgggtgccaaagcagcagattgtatgctaaaattaagtcgaggtatcattgctcctccactatgccttgcattgcttgtaaccaggccaatcatgtgaccatctgaattgataatagcaccacc

SEQ ID NO: 85672 - DNA, 431 bp, Glycine max
  unsure (1)..(431): unsure at all n locations
ttttttttttttttttttttttttattttnatttttttttttttttttttttgcgcgttttttttttttttttttttttttttttggaattggccattttggagccaattctttttgaaaaaaggattgggcttgggggccccggcccaaatcccttttaggagatccccccccagaaaaaaattcttttaaaaaatttccccccccgaaaattgcccttaaaaaaggtttgttccccccctaaatcgctgattatgaaactaaaccccccccaaaaaaaaagaccccaatgtgtttttttttttcctaaaaaaaaagcccccccgggattttaatatcaggggggggaagggggccccccatttgcaaaggttagccctgtgccctttccccccttttttaagggggccccccgcccctttttcctttgt

SEQ ID NO: 85673 - DNA, 277 bp, Glycine max
aaaaaaataggggggaacattaaattctatattaattatctggctatcactctatctatacagcccatgatatgatatgatatgcagggggagagaggagtgatgaaaagagatataacatttaatttataaatttaagagaagttaagggcatatattgctagatatatagctagcttgggagtaatgagcctattcttggcgagggcgtgccaaccacaatgaactgagggctcgaagacgatgaaagtactcagctatggccaaaaaacacctt

SEQ ID NO: 85674 - DNA, 98 bp, Glycine max
gccgccttttttttttttttttttggttttttttttttttttttttttttttttttttttttggttttttttttttttttttttttcggacccgtggg

SEQ ID NO: 85675 - DNA, 438 bp, Glycine max
aaaaaaccccacccccccggcccattttttttttaccccctgggggggggggttttaaaacccccccttccctgggtttttggcctttaaattccaaggcaaaacccctttttccccctttgtttcccattttaaccaaaaagttccttcaagggttttttttcccttggtccaacaacttccccaaattttttccccccccccaaatcccttttaaaaaaatgtgggtttttttaaaacccaattttttttccaaaaataaaaaatttttggaaccttttttgttgcctaaaaaaaacccaatttttttaaaaataaggggcctccccccttgggggacaagggtaaattttcttgtctttcccccgaaaaacaacaaaaaccggaaaatttttttccgggtttccttttaaaaaaagcaaacccccttcaagtttt

SEQ ID NO: 85676 - DNA, 396 bp, Glycine max
gcgaacaaaatcttaacaaatgaaaacaagtggcttctcgccacattgatttggcaaatgttacaaaaaaaaaaaaatccgtaatttttgatttgtgaaaaacaggtaactttttttaataaattttttttttgattttgggatttattgtttattaaaggggtgttttaaaacctttttggccccaaacaaaaaattacccttcaacaggaaaaaggtttttcgccacgggggtgtcaaccccaagccataaaaaaaaaaaaaagatggtttccctgcagggagcaggcttgtaaaacaaaaaataacatttttgtttttaattttaggcgccctaatattgggaaaaaaaaagttttttgggatcacaagtgaaagtttttcaagcgatgattt

SEQ ID NO: 85677 - DNA, 432 bp, Glycine max
aaaaaaaaaaaaaaaaaaaaaaaaaagaaccggcccaaaaaacaaaaaaaaaccccccgggcgggccccccggccattccccccctggccaaggggggttaccatttaccctaaaaaggggcttacctaaaccctggccaaaacagaaacctacccccctcccaaagcaaaacgccccccgcccccaaaacaccaaaacccccgggcggggagccaaagggctaaacccccggggcccaaaagggccaccctcccccccttaaatccgggcccccaaccccccccttcaaaaagagaaaaccccccccccccccgggattaaaatacccccccccccccggggcggggttttttttttatctgccccccggggagttttttttttcccctggcccaccgccacctgctgtaatcctcccacccccccccccc

SEQ ID NO: 85678 - DNA, 352 bp, Glycine max
caaaggtttaacccctcattgtaaaacttgttttttcgggaatgtttttttgtttaaaacttgggattccaaagcttgaattttattgcccccggaataagttttagtttcccttttttttaaagggtaagggtggctttccccaatttaaacttttggcaaaaaaggggtttgccccaattttttttttcttgaaatccatccaacttttgttccaagccttccatgataactttaaattcttccaaggggccccgccaagtttaataaccttttcacctccatttttttttttgggaattttttccatgtgggcatttctttttttttcccctaaatcaccatacttttt

SEQ ID NO: 85679 - DNA, 574 bp, Glycine max
gcccccctttttttttttttttaaacgggtgtgtataccccagggtttctccttcctgggctttcctttccggatccggccatttttgaaaggggggttgggttttagtgtccaacaaagttggctactttcttcttcctgttgaccttgacattaagcttttaataatgtaaatatgttaaccgtcctcccaacttctttctatgaaaatccctaattttggcgagacaattaaagtgactaaattagtgggagtgcaagtaggatcatagttcaaaccacaccagttctactacagaaataaaatatagcataggatgctttcatggcataggcaggcttggttctctacctgcttctttctttgtttctcaatgaagacctccacaagttcaactttctttgaattttcagtatttaaaagtgaaagtttttcaagcgatgatttgagcaaggacatctgatcatctcctgcataacttttcttccctggtgttttttgctgttggtgattagctttcgaagcttgcaagtgccttctcagccttgcacttaccgcatcaacagaagaatg

SEQ ID NO: 85680 - DNA, 351 bp, Glycine max
tttcaaactttaaaaagattgagagaaaaatgaacatttctcttctataattctatcaccatctaaacacattttcttcttccccccacttcttttttctggttcactagaggtacaaagaaatcaattatacaaaatctcaaataatatctagccatgtttctagacaaatctcatcgataatatacattggttctaaaaagaatatatctaatccaatcactctacattttaggtggttaacgatttatccctccactaggtgtctcgtccatgccccttattgtgccaatcacttccttacatctacgaaatcttctttgcatcatatttgaagcatgcaaatctgac

SEQ ID NO: 85681 - DNA, 535 bp, Glycine max
cagggatttggttctgagagaattggtttggaagttgaactggaggtggcaaaccctgttgtggaggaggttgaggaggtgcattagggggaggaacaacaggaattgattgtggaagattagcaggggtaggaagctgtggttgagattgcacaggagcagatgcagcttgctgaacaggattggtaatcgcactagtttgcatttctgattgctgatctgtcttggacacttgtagctttgctagttgcagctgagcttgcacaatatcttgcttgtccttgatagtctgcacccctgattgcacctctcgaagaatattctccagctgtctcaattttccatcagtgctaccatgattatttccaaccgataccttcaaatcatccacagaattttcaagatggtgggttctggtttctagttgtgttaaccgtgcactaacaccttccagaacatgaagcatattttccatatgtttcttcatggtacgatcaatctcagacagcattgtagcatcaaaagcacttcggtc

SEQ ID NO: 85682 - DNA, 448 bp, Glycine max
  unsure (1)..(448): unsure at all n locations
ctatatctagcagggatttttttttgagagaattggttcggaagaagggggggaggtggcaaaccctgttgtggaggatgttgaggaggtgcattatggggaggaacaacaaaacttgatagaaaaaaacaattatctttaagaagctacacatgttattgcgcaggagcggatgcagattgcttaacaagattggtattcgcactagtttgcatttttgattgctgatctgtcttggacacttgtttagtgagcaggattatggaattttgattacaaatttccaacatgatcacacatcttcatggatgcaagatcttcaagaacaataatctccaactttctgaattttcatcagtgctcctttcttttttttcagaagttcaagcatgatccttttgttttgatnttgcagtaaccactttaatttgcacaattattcatacca

SEQ ID NO: 85683 - DNA, 449 bp, Glycine max
gggggagggcccccaaaaaaaattttttttgaaaggttttttgaccgggccttcttcaaaccaaaaaaaaaccccggctttttatttgggctttcccggggaccaaaaaaaacttcaaaaggggaaaaaatgccccccatcgcccgcttcaaaagggtgaattttacctttcccaccccttttgtcaaccgggagggggaaaaaaaattttttgggtctgaacccgtttttgcgcaggggttttaactctcccaaaaaaaaaaggggaaaaaaaacaaaaaggggccccccggaacccaaggggagacccaggggttttaaaaaaaaacaggggggttcgggccgggaaactttccaactttaaagggccaactatgcccttggccctaaataaaccccgacccaattgggtttgagccccaaaaaaaggggcacgaaaataaaccccc

SEQ ID NO: 85684 - DNA, 545 bp, Glycine max
acagtcaccaaaatttgccaatagattacaaaacactatagcatatcagctttcttgcaactttgcaaagcacaaagaatttatttactcatgttgctaaaggtataaaacacttgttcccaagtaaaaatattggggagaactgcctatgacaaaaaggagaagcatagaaaaaagcagcagctctaggcagtcttcgggattctcaagaatgctccagcaaccagcagtattaatggaccatcaaaaaaatgtaaacacatttgattcccatacctctttcttccttgcaatgtgcctctacattatgatatcgtactatgtgaatgcgcacagctgttgtagactcaacaagttacaaatattcttttctaatttctaggggtaacttgcaacattaatcaacaaatactgaatcttttgactagtaattttatgctacaagtaatacatgttacaagtcacacaaaatgatagacttaaataataaggcagatgcacattcttatttcatgtcactgaagctttactgttggtagggctgc

SEQ ID NO: 85685 - DNA, 340 bp, Glycine max
ggggggggaacaattttttcataaaggggggggtaaaaaaggtggggaaaaaaagggaaaaaattttttccggggaaaaaattttttcccttaaaaattcaaaaaaaaaaaagaccgggaaaaaaaaaaggaaaaaccgggggggcctaaagggggaccaaacccaaaaaaatgggggggccccaaccgccccttttaaaaagaaaaaaactggggggccaatttaataaaaaaaacgcccaaccccgggggaaaggggtttttctttttggcccccagggtttttttttttttaacaaaggaaacgggaaaaagttgtttgcccttcaccccctgcccc

SEQ ID NO: 85686 - DNA, 538 bp, Glycine max
  unsure (1)..(538): unsure at all n locations
ttttttttttttttttttttttttttttttttttttttttttttttttttttttttttttttttttaaaaaaaattttttttttttttttttttttttttaaataaaaaaatttttttttttttttttttttttttnaaaaaaaaaaaaaaaaaaaaaattaaaattttttttttttttttataaaaaaaaaaaaaaaatttttttttttttaaaaaaacccttttaaaaaaaatttttttttgggaaaaaaacaaacccccaaaaaaaattttccaattttttttttttaaaggggggggtttttatttggggaaaccaaattttcccaaaaaaaaaaaaaaaaaaaggggggggggcccccaaaaaaaaaaaataaaaaggggccccccccccccccccaaaataagggcccccccctcttttttttaaaaagaccccccaccacaccgaaccctttttttttaaataaaacaatttggggggggccccccatttttttttaaaaaaaattttttttttaggggggccccccctag

SEQ ID NO: 85687 - DNA, 315 bp, Glycine max
taataatcaacgtacaacagtataatcaacatatcctaactaacaggtacaccgagccgacatcgtttgatgtgtcatagcttattcccttctgtagaacctttgctctaatccttgctcagattcttggtgcattacgccgaatcttacacccttttatattgcgtatgccacgcttcaccttttgcaagcgcacagcgatgccactatgcgactacgccggcgaggtgcatgaaccgcttttgtttcatgaggcaccaatctcagtaatccattatgctcaaattcagtgacggggcgctccagcgcaccaat

SEQ ID NO: 85688 - DNA, 484 bp, Glycine max
aaaacaaatcaacatctctcctttcattttccactcctactgctcacatggccaaaatttttagtccttttcatactcaaccaacactacatgtgcacatttaggaatttctcccccttgtaaaattaaaaataaaataaaataagccgggtttgccactttcatagggagaaacaactttcctagaagttattttcatagtttcaagttaagatcaacactttctcccactttatgaccattctgaatcctggctggtgtttggccaatttgctcttcctttggttctggaaggaaaaacccctaaaaaggttgcttttgttgattgaacagcctgtacactggggggggggcagggatttgatcttctacatttccctggttgggaaatgctaggtaagttgaaaacaacttggacttcgaaggtggataccaagtaggagagggaggagccaacgtgagaaaatctccattgaaattctca

SEQ ID NO: 85689 - DNA, 361 bp, Glycine max
atatcattattctaaatcatctccatgtaacgctatctgcttgattgattaattgaaatagagaaatcaaactattaacacgaaatctatttattagttatattgtcacgtcatttttaaagaaatgaaatcaatttttgcggcaattttttataaaattagcagttgttttatgaatagtcaaaaagctgcctagatgatcagttcttaatgaatgtaatttttgcataaagtcagaaaattgagacagctgtatctggtttaaatcaagtgagtcaaatatataaaagatgaattgcctgtgtgaaactctttcttgcttacattgaaacgtacaaaactggtaaattagtctttttag

SEQ ID NO: 85690 - DNA, 299 bp, Glycine max
aaaaataaaaaacctaaacttttttaattgggtgggaatttataaatacaatccccgaaaacccgggttttttttttcatcctttttaacctttgggggggaaaaaatatttgggttttcccttttttaaaacggggggttttttaaccaattaagtcgatttttccactggggacccctttaagggcaaaatttgatggcttaatcagcccttttggaacaagtaaaaatttttttttttttattttaagcgtagaaataaactttggaacccgacccttgggccgaccctttgttcc

SEQ ID NO: 85691 - DNA, 363 bp, Glycine max
gggccggcaaaattccaagggatttttttttttccgaaaaactaatgtttttctttaacaacttgtgaaataaaaaacttatgctaaaaaaggttttttcggttttttttaaagtttaaacctttaaaaacaaagggaaccccccgccccctcattaaataggggatgttatgcaaatttacaactcgttcttgggattattaacattaccattttgaaccgcattagctttaggttttgaattaatttcagcctttacttgggggttattttccttctaaactgttgcttcaggactgatttccaagctggtcttaactgaatcataaatacgggaagcaaaatttttgggatttttaagca

SEQ ID NO: 85692 - DNA, 329 bp, Glycine max
cctcccaggtgggcccccggggggccccccggacacccccgcccggcccggggagcccacccccgtgcccaataaccgaacaaaacaaagccccccaaaaaaccggccaggagcaatccctgtaccaaaaggcgacccaccggaggtcccaaacaaaaaacaaacccgaccccaaagggggacacccacgaggtccgatcctgggggggaacccatattaaccggtgaaccaaaaacacccgcaacacccacaaaaaacccgaccaccacaccggtttacacatgtgccaaacccccggcccgggggcgattcccctttggcacccggc

SEQ ID NO: 85693 - DNA, 307 bp, Glycine max
cctattcatttttttatcaacaatgtttacaacgagctaaaaacatgttaagaagaggtaaagcacaacatagactgggcacttggcatacgcaataacgcactgagaggtttaaacactaaacgaggtactgaaagggaagatatttgttggcccgagccatgttagtccttgtgacgagattgcaaacttaataaacgcccgattcgttggggcgggcggttctcctagaacatccttctcttggggggggggtgaagggcaaaatcattccccacattttgaatggacatggcccgatttctca

SEQ ID NO: 85694 - DNA, 155 bp, Glycine max
  unsure (1)..(155): unsure at all n locations
aanncccacctttggcccccaagtttaaaaaaggcactggtntttaattacttgatttttaaaccaccgtttgaccctatcgggggggggtaaaagaaataaattattgtacctttcaataaagacattacaagggaggcgacgagcccgtttgt

SEQ ID NO: 85695 - DNA, 532 bp, Glycine max
actgataattctctgcttccccattcattactattcatggcttatataataagtgaaaatcactacattagtggaggtccacatagtggaaaagcataacagaattgtccagatggcaattcacaataacaaactaagaaatataaacaataaaagaaatactgaaagggaagatatttgttgtcccgagccatgttagtccttgtaacgaacaggcatggtaatcttcctcttgggccttccttcctctgttggcttgttggtcacgtctgaattgccctcttcatgagttatattgccctctctttcctgttgactgtccatacccagagtaatcataatgtgaattaggtatacttggaccaggtgtttgtggaactgctgctggagttgaagaggaatcagaacctttgagtgaggttaattgaaagtgcatcagctagtacagttttcaagctcttcttaagcctctcccgatcaagcaggagtgtgttgattacattgataaggaaaggatcaaatctaccactca

SEQ ID NO: 85696 - DNA, 431 bp, Glycine max
tcatacaaaagcatgcattatatcatccatgatcaaattgcagtgcgttaagcgtacagcatacacttgagataagcgttggcacactgagtgcagtactcggggatagatagcgttggaagttggaattcaggctatcttgacctctatagtcctgggcttcttgggctgaggaggaggcggcttattgacagaaacatgttgcacacgagtgtgggagtctttacggatagcattggaagcttctgcttcagagtgctgaaacttcctcatcaacttgccaagccttctctccatgcttaaacactctgcgcttggtcacgatttttgccactgacactatcttgactgtgttctataagccagtatttgcacccgccccgcacaggcgtgccatgctttacctgttgtgagttgtattaaaggctaga

SEQ ID NO: 85697 - DNA, 405 bp, Glycine max
ggaaaacccccctgggggggagggaaaaccttttatttttttttttaggcgggccccaatttttttttccccaaagctttttttttgttttacccccccttgtttttttaaaaaaaaaaacccgggttttttccccccccaggccgggggggaacaaaatttttgaaaccgaccccctatgggtttttttttaaaaaaaaaaaaacccctgtttccataattggggatttaaaacccaaaatccccccatttgttattttaaggtggggggggaaaaaaaaaaacttttttttttttgttttcccgggaaacttttttaatttaaaaccacccttttttttttttgggggccaaaagttaaaaaatttggaaacccttttttttcaaaaaagcccatttaggggg

SEQ ID NO: 85698 - DNA, 262 bp, Glycine max
  unsure (1)..(262): unsure at all n locations
aaaaaaaaaaganaaanaaaaaaaaaaaaaaaaagngaaagagagagagaaaaagagaaggagaaaaaaaaaaaggggggagggggggaaaaaaaagggaaaanaaaaaaaaaaaaaaaaaaaaaaaaaaaaagaaagaggagaggaaaggaaaaaaaaaggggggggagagaacaagagaaaaaaaaggggaaaaaaaaaaaagggggaaaaaaaaagaaaagaaaagggaaaaaaaaaaacgggaaaaagagggggggag

SEQ ID NO: 85699 - DNA, 342 bp, Glycine max
gaaacatggcttccttaagctccttagtgctgctccttgcagctctaattctatgccctcaagttcttgcaaactatgagaatcccccagtgtacaagcctcccactgagaaaccaccagtttataagcccccagttgagaagcctcctgtttacaaacctccagttgaaaaccccccaatttataagcctccagtagagaagccaccagtgtacaagcccccagttgagaaacccccagtttataagcccccagttgagaaaccaccagtgtacaagcccccagttgaaaaaccaccagtgtacaagcccccagttgaaaaacccccagtgtacaagcccc

SEQ ID NO: 85700 - DNA, 189 bp, Glycine max
gtcgcacttcggcaagtacctaaccggagccagtgggttctctgggactaaagatgggaggctacgcgccagataaacacgccttcaatatgttcgaggcggtgggaaacgcactgaggagcgtgtatggcaaaacaagagcaggcccgccttgacactgggagttgggaccggtatgtgggcattgtg

SEQ ID NO: 85701 - DNA, 88 bp, Glycine max
aaaaaaaaaaaaaaaaaaaaaaaaaaaaaaaaaaaaaaaaaaaaaaaaaaaaaaaaaaaaagaaaaaaaaaaaaaaaaaaaaaaaaaa

SEQ ID NO: 85702 - DNA, 68 bp, Glycine max
cccacgcgttcgcccacgcgtacgattctttcccttcggattaggccctcgaatctgtggggggcaaa

SEQ ID NO: 85703 - DNA, 81 bp, Glycine max
aaaaaaaaaaaaaaaaaaaaaaaaaaaaaaaaaaaaaaaaaaaaaaaaaaaaaaaaaaaggaggaaaaaaaaaaaaaaaaa

SEQ ID NO: 85704 - DNA, 420 bp, Glycine max
gtgggctgtattcggtctctcctaatgggatgcagactgtaattgtcttgattgttatctttgtatcttcagtacacctagtactgaatttcatatataatatattgatttttgctgtgcaaaaaaaaaaatgatagcactgcgaaggtgctattaataaatatggtttggctataatgaatattgtgacattccaactcagcttgttagctcaaattatactaaggagctaaattggtacaaatgagccaatgtgaaccaatttagctcctggacagtttattttgatcagcttcattaaattaattttgttcaaatacattcatccactaataacactgcacagcaatatcactatcactgtgatccaccattattttagctcaaatacttgaattattttgtggttaaaacttggtt

SEQ ID NO: 85705 - DNA, 423 bp, Glycine max
cccacgcgtccgctttttcctagttttgagttgaaataatgaaaactttgcgaatttgtccttacattgatacttttgttgctttcttggttgtggttacttgcctacttttaagttttatcacctcattcttaactttaagggattgtttagtgcttaggataagatgaagatggataaaataacaaattaggagaataataggaagggataagcacctactaagaaagcaagataagacttgagagtaggataagatactaacatgataagtgttgcactgcttcatcttttctccttttcttattgagcttgatagcttatgtaacctagtttaacatagtatttctatattaacattcatctccaaactccataactgacacaagctgttgattcagttcattgaagtgaatgctatat

SEQ ID NO: 85706 - DNA, 76 bp, Glycine max
  unsure (1)..(76): unsure at all n locations
cccacgcgtccganaaaaaaaaaaaaaaaaaaaaaaaaaaaaaaaaaaaaaaaaaaaaaaaaaaaaaaaaaccaaa

SEQ ID NO: 85707 - DNA, 210 bp, Glycine max
atactgctaatttattgatcagctatagcctgtaaaaaaagaaggaaaaaaaaaaaaaaaaaaaaaaaaaaaaaaaaaaaaaaaaggaaaaggggcggggggatacgaatttacgagcgggcgcccgcttccggggcacccaacttccttgctcttctttgccccatcttaatttctttgtagtgcccccttattttccattcactggcc

SEQ ID NO: 85708 - DNA, 425 bp, Glycine max
cttatatgctaagaactcgacacacacaattgctgttcgcacctaaccagaaagaaaccattgtgtttgaattcgttggttgctgcttcagtctcagtgtggtaattcatcgatgaatacgacgccgtttatggacaagcaaattatggatctcactcacggtcacggatcttcttcttcttccactacgcagtcgcagagcaaggacttcatcgacctcatgaaagaaccgccacaacaccatcaccatcatcatctcgaagatgaagacaacgatgaagaagaaaaagcgcgtggcaatgggatcagcaaagacgacatcgttcccagttacgatttccaaccgattcgccctctcgccgcttccaataatttcgattccgccgcattctctcgcccttggaactccgattccaactccaacg

SEQ ID NO: 85709 - DNA, 381 bp, Glycine max
aggagattgctaacgagctttttcctttattgctagcgtacacggacgtctttatggtgcgggttctaagctttgaaaacgctcgggctgccatcgacatccaaaactgaaccctaatccaaagacatagtcatctcttacaacccctacctctctggttgtattgcgcttgacagatacgaccacactaacaacaaactccacatgcttcctctacttccacggatgaccacttttgcgtcgaatcgcgcttgtacttatcactccaacgatatctcaacatgtcgtgctcagaagccaacataatagccatctacctacacttgagactgataccacacgaccctatacgtgatgactacaaagacggttggaccaccc

SEQ ID NO: 85710 - DNA, 141 bp, Glycine max
ctcaaccttgcaagctttgctttgccttattacagctatgaagcacaccatccatcctttatatataaggttatgctggtcaaaattaacctgccctagattcttggaggccttgcggcttaaaaaattcagcaaaaaggt

SEQ ID NO: 85711 - DNA, 291 bp, Glycine max
  unsure (1)..(291): unsure at all n locations
ggcgacggcatcacggttgagtctcttctttatgccntngnnnctttttttttgggggggttttttttttttttttttttttttnttttttttttttgttttttttttttttttttttttttttttttttttttatttttttttttttttttttttttttttttttttttttttttttttttttttatttttttattaattttttttttttttttttttttaatttttttttttttttttttttttttttttatatttattatttttttttttttttattttttttttttt

SEQ ID NO: 85712 - DNA, 160 bp, Glycine max
aaaaaaaaaaaaaaaaaaaaaaaaaaaaaaaaaaaaaaaaaaaaaaaaaaaaaaaggaagggaaaaaaaaaaacggaattaattagggaagatagggctggggtttgcttgtctttcgaggtttactctcccgtgtctttttacggctagttttcttttt

SEQ ID NO: 85713 - DNA, 303 bp, Glycine max
gcccaacatccgtacttgaactactcggagaaaaaatcttgaatgaatgacggagggaaaaccattgtcggctgaaagtcacttccacctggacctgcagatacaattttacaacggcctaggtgcgacaccccgcccaacttttacaacctgcgtctcgcttcctagacgagagatcgaaaccttgacggaccaggtgtcccactaactatcctgaagatgaacctacctgaggatggcgaaaccgtgcaagctctacccaaactacaagggcttggacaggcccactcactatacatttac

SEQ ID NO: 85714 - DNA, 125 bp, Glycine max
tcgctttgatgaagatggtgtcaatttggggttcttgatttctgaagatgactttttaattattcttcatattaggggataggataccatcctctgttgatagagatttacctctaagagatgaa

SEQ ID NO: 85715 - DNA, 374 bp, Glycine max
caaatcttttaccttttaagacaagaactaaaccaaactgcacaaacatgaaaggccacatcagagccactaaacattctctattctgtgcaatgagcattacaatttacatttaagagttaactctgaaaacggattggaaggcacctttgtgcgagaagatttgggttacttgtcttattcacgtcatatcttgattcattcatccatgtacaaatttccttcttcaatctagtgatctagatgaaagccaagggttaggtgctacataagtatagccctggaaatggtcacctgctgtaggtgtgggtgctggcgagtcatcagcaggcattgctgtccaacattggtcaaaattagatgtacaatctttc

SEQ ID NO: 85716 - DNA, 329 bp, Glycine max
ggggaaacaacttgagagaaatttcaagttttcaagctttagatgctaaaccaccgaaaaaaggtgtaatacttgtccaacacccaagaccattttttcgagatgtaaattcttaggaatcaaatccgtggccaaagcccagaaagaccagatttttttaggggtaaccatttcacaaaaaacaggggggtttttttttttccttttggaaatttggggggggggattataaaagttcttttttctaccaaagatcagagggcattttttggatcaaaatcatcatgggatttttcctcatcccactcattttccacgattcctaatgc

SEQ ID NO: 85717 - DNA, 292 bp, Glycine max
tttgttttttttttcttttttttttttttttttttggtgttaacgggaagggagtaattttattggcaagctgctcacaaaaaatcattcaaagaaatgtccggcttcccttttgcctgacatgatttttacaaatcattttttctcaaccttttataatataatggccgtggaaagaacatttattttgttttaactgctgcctacacactgaacttttttgcagtatgttaaattgactctcaccaatttgggactggtcattggttcttcttgatgaaagcacaaaggc

SEQ ID NO: 85718 - DNA, 254 bp, Glycine max
ggcagttattaaactatttaccatttatttattttaaaatgttaagtactactataatatccgggttcaaactaacaggatttctcgagatcatttactacacaaagattaaatctaataaaaaggttttttaatttaaaagcccccttttactatccacatttttttagcacccagtaaattggtccaactttttttttttttaaatcatcaatccgggaaagaaatccaggataccccccaggattttattt

SEQ ID NO: 85719 - DNA, 316 bp, Glycine max
gggggccaaaaagggggaatccccccaaaagggctaaccccaaaaaaaaaattgttttaaagggggccctcccttccaaaaaaaaaaggggggggaaagggaaaaaaaaaatcctttacctcccccccccgttttttttaaacaagggggggggggggggccaaaaaggggggaaaatgtttttcaaaaaaacccactatttttttaccagggggaattttatcaaaaaccttttttccaacccttctgggggtttaaaccagtttgccccaaagccgggggaaaaacaaacccccccctgttttgacacattttt

SEQ ID NO: 85720 - DNA, 463 bp, Glycine max
ttaaatttttttttttttttttttttttttttttggggggttttttttatggggggaaaaattcaaaaccatttgttttccaaaaaaaccccttaacctcccccccacccccccaaccgggaaccacctgcccccgcccaaccccacacaaaaaaaacccccacaaaacaaacacaaaaaacggccggcccccccaaatccccaccaacagggaccaaaaaaaaaacccaaaaaacccccactcatttaaaaacacaggccagcggggaatgggcaaccccccccccaaaaaaccccccccaaaaaaaaacccccccccccgggccacaaaagggccccccccccaaagaagccggttaaaaaaaaaaacaccatttccaaaaaaaaaacaccccggaacctttgttaaaaaaaaagagcctccccctcccagggggagagggggaaaacaaggaggcccccc

SEQ ID NO: 85721 - DNA, 274 bp, Glycine max
ttacattttttttttaatgttcaataatttaatttttggttttttttgaatacacaaggggcacctgggggaaataaacacacaccggagcgggcccaagggcccacccggagagggataaaatggaacaaaaaagcgcacgctttaacaaataaaaccgaagactcatgcttgaaaaaaccaatccaacaaaatggaagaaacctgacatgaatgctatcatccaaagaaagaactgggcccaagctaaagacacaaaatgccaaccctgggg

SEQ ID NO: 85722 - DNA, 341 bp, Glycine max
ggacaaaaaggcaaaaataatttccccccaaatttgaaaggtggaactacagatttgaatggttaactttacaaaaaaccagtttttttcccccagaaaacatttgtcacaggggcattttatattttaagggcaaaaaatttttggggccaacatttttgccaaggggggaggggaaagcattttggcccagggtaatttgtagttttgttccaccaaaaatgcctcaaaccacatttttattttgttttaactgccatttaagggggaccaaaaaggcctttaaacttttttaaatttttaaaaaccaaatctgatgttaagagcacctaaagtttttg

SEQ ID NO: 85723 - DNA, 300 bp, Glycine max
tttaagacccaaaaactatgtattaaatgctataaaatcagcgccccttagttattgggaatcaacaccgtacaaacttacacattcacacaataactgcctaaatactaataattcctaatttcactgctaggttgtctgactagcgtgaatgctgtctagcattagcgattgctttatatcggacaaaacccaacccttttgaaaccggctttgaattccttaaacagcaacaactcccttaactttagtaaactatcatcaggtgggaaccatgtgagtctggagcaagacgccatg

SEQ ID NO: 85724 - DNA, 102 bp, Glycine max
gtacgtaagctgggatcctctagagggccggcctttttttttttttttttttttttttttttttttttttttttttttttttttttttttgttttttttggg

SEQ ID NO: 85725 - DNA, 180 bp, Glycine max
atattgggtcctttttggtttttaaaaaaaatggaaaaaaaccgcggggaagctaacttatcagtaaaaacttatcaaaccgtcaagggattaatcctggtctgctgcccggcactaaattgcacgcaaaactatccactgaaaaacatggtggaaactattaaccgtttttttgccttc

SEQ ID NO: 85726 - DNA, 354 bp, Glycine max
aattgggggttttttttttggggaaaggaccgttttaaaaacaaaaattgggggcgtgagagattgaaaaccggggaaaccgtggaaataaaaggcctgaacccagtgaaatggccgacccagaaacatcatcataggaaagatatagacacccaaatacagtgggccatgtgagaacccaactttgggcaaccccattggtacaatgaacaaccataaaacagaagggccggggggggcgggggaaatttattagtggagcttggtcaagaacctcatgcgcccgccaagaaaaagtgcccacgcccatatttcacattaaaaattttcccgcttgacaaaggataaaatgta

SEQ ID NO: 85727 - DNA, 389 bp, Glycine max
ttttattttttttttattttttttttattattttttcggttttatttttttttgggttttttatgaaacccagggcggaccccggggggaaccccagaaatacccaacgggcccagcagggttccccacaaacccaaaggaggggcgcgagaacccccgaagaaaaaaggggaaaaatggggcaaaggaaaaaattttcacccggggaaaatataaaaaaacggcagacaccaaagccaaaaggcggatcccacgggaaacaatgggccgaaaaaaaacccaaaaatcacggggccccaaagaaaaataaaaaaaaggaacccgccacggaaaaacaaaaaaaaaaaattttgagaaacgcccgggagccggttaaaaaaaaagaaaaa

SEQ ID NO: 85728 - DNA, 545 bp, Glycine max
ttttttttttttttttttttttttttttttttttttttgtttttttttttttttttttttttttttttttttttttttttttttttttttttttttttttttttttttttccccaaaaaaaacttttttggacaaaaaaaaaaaaaaccccccttcccacccccaaaagggttggggttttttccgggggaaaagccccccccttttttaatttaaaccccccccaaaaaaaccgggcccgggtttttttttccacccccaaagggcttttacgggggtttttttaacccccctttttaaaaaaaacccccccccccaaaaaattgtttttaaaaaccccccccctttttttttttttaaaaaaaaaaaaaaaaaaaaccccccattaaaactttggtgggccgggaggtctcccaataaaaaaaaaggggcctccccaggggggggcaaaaaaagatctcccccccccaaaaattggggggggataaaaaaaactaaatattctcctctttggggggggaaaaaaaaaacacccccccccgggg

SEQ ID NO: 85729 - DNA, 267 bp, Glycine max
tataatacattttttgaaactaaaaatgggtgtatatagaaagactcaatggcgcattgtaaggggataataacctcaaacattcattacatggaagacgcatggatgaactgccgaaattcaccctgtcatgaaagaaaacccatggaagtgatattttgtttaatgacacatgacacctactcatcttttacaattgacgtataacacctttagcacttcatttttaattagttgatgaccataggagaaccaccttgggttaca

SEQ ID NO: 85730 - DNA, 219 bp, Glycine max
aataacaaaaaaaaattaaacaaaaaaacccaaaaaaaaaaaaaaaaaccccccccaacaacccgaaaagcccccagggccccccacaacaaaagaaccccccacgggaagacacctaaaaaaaaaaaagggcctcccaaaaaccccaccaaaatgcgggggggccgcaaaccaaaatggggaagaaacaccccgccctgaaaaagggccccccccaaa

SEQ ID NO: 85731 - DNA, 282 bp, Glycine max
  unsure (1)..(282): unsure at all n locations
ttcattttttattcanaaagaacaaaacaatcgggcggggttaaataaaaggccgccctaccaaactaaccaattcttttttacctcttaaacacaatcataaatcaataagcatacccccacctccctaaaacctacctataaccccccaaactataatacccccccccaaatgcttttatataaacaataacgctccccattaaaccccaaacaaatttgataaaccatcacattcaaactcactttcttcctccacaccctctacgaagccattttctt

SEQ ID NO: 85732 - DNA, 280 bp, Glycine max
ctaaaaacatgtgtgttaaaaaaaacaagtgtttttccaaggaccagagcgccctcttattaaaaaaaacacttttttccacaaaaaacactcttctcccccaccccaaagctatgagaaaaccccccccctttgtgattgaaccgaccaataactcttattacgcactaccccccccgtgggtgaccaccggaatcttgggccgacccccgaaatcccccccccttcctctatgcggagcagttttacagatagggagaaatattagaacatggcgtta

SEQ ID NO: 85733 - DNA, 269 bp, Glycine max
gggggggggcaagagggacccttatttattgaaaaagctggcaattttacttttttaaaaccttaattttgggatgggaccaaaggaaaaaaaaataaataaatgggggggggggggaaaaaatttttttgggctttttctccaccggcctcaaagaaatttttttttcttttataaactttggccggcccccaaatgggcaaaaaacccggggggaaaaagggggggattttccaaatcggttgggggggggggtggaacacccccct

SEQ ID NO: 85734 - DNA, 183 bp, Glycine max
ccgtcctttttttttttttttatctaatagtatacacacaccgaaaaacaaaccggcggatttttattaacgttcgctccccaaaaacaaccaatttctattccccaacaacaacccacccctaaattaataaacacattgccaatcctatttcaatcaaactcttaataacaaaatcattta

SEQ ID NO: 85735 - DNA, 492 bp, Glycine max
  unsure (1)..(492): unsure at all n locations
ttactttttttaaaaaaacacaaanaaaccactccgccgattttttttatagcggggacccaatcaaacctacatatatataattaataaattattctcttcaaataatataacttacaaatcaatcatttcccccccgattcaattaccaaccaattatatcaaccacttttattccccattgattgtatgcattcatatcacacccactattctttataataataaaaaaaactatctaattttcacacaccttatttttttcaaccctatctcttgcattatttttttacttaatatattttcattccttcctatcactcatttcatctacctagctcatgataccaaaaatattttaaaaaaatataataacccaacctttattccccttccctatccaaaaaattttccttcatccccccctctatttataaaatataatttctcttcccctcccctccccttccctttaaaaaaaaaaaccaatac

SEQ ID NO: 85736 - DNA, 284 bp, Glycine max
aaaaattaaaaacatatttgaaggttatttttaaccatggaggaacaacaacccaacacacttttttgtacagtattgggaacgcaatataggccattaatacttaaacaaggaccagaacgtcttacaaaagccgaaacattatccatacatggaacatttacagggcaggtaaaaaaaaaaggggaaaaaatatttaaaaaaaacacccaatgttaaaaaatttcttaaataggataggatctttgacacgcgccattgtcacatgacacatcaggcaaatg

SEQ ID NO: 85737 - DNA, 269 bp, Glycine max
aaaaaaaaaaaaaaaaatttttttttttttttaatttatttttttcgcgggggggggggggaaattaaaaaaaaaaaaccaaaaaaaaaaaagccaaaaaaaaaaaaaaaataaaaaattgggggggcgggcggagaaaaaaaaaagctttaaaatatgaattaaaaaaaaaaaaattttcctcaaaaaaaaaaaaatgacttttttattttttaaccccccttgttttcaaacatgcaaaaaaaaaaaaaaccaattttttttttttt

SEQ ID NO: 85738 - DNA, 389 bp, Glycine max
gggaccccgggccccaaaaaaaaaactttcatttattactaaaagggtcttggcatttttgaaattacaaaaaagtttttaaatagttttaaaaattacaaacaactttatgcgggggtaatgatccttacacatggccaatgccccttgcaaatgaaatgttattaatccccaagagccaaccttttaatccatttgaactttaaattaaaagggtttatgtggcccattcttgcttatggcccaataaaatgggcaaattttttgaaaccaaaaattgtgtcctttctgactttggggttgggggggtgtggatcatcccaacaagggaattggggaaggggccaataatcaacctttttgcctttttggttaaaagaccaaggggg

SEQ ID NO: 85739 - DNA, 316 bp, Glycine max
agaggcctaagaggcattagcgcttaaattaaacgtaactcccagggccatgttgggaaccaatctaactaaaaatataatgacttaagatcatgatgccaaatctactacattgggattcatatcatgacttaagatcatcaaacattgctgatggaatacagggcgttgcacgaatatcaagagtagctgcttttgcaatcttcatgcgaaacaccaggatctgatcataatctagatcacattttatatattcataacagcagctctgtaccataggggctttgctctttaagatttacactggttgaccatt

SEQ ID NO: 85740 - DNA, 165 bp, Glycine max
ttttaatttttccattcaaatcgcatattcccaaagaggaaacctccatgaaagaattaaagggggacaacaggaaaaaactcagttaaatttatctaaaggaaaattgcttgtcccttataatttcaccaatgccggaaactttatatgtttgacctttgttct

SEQ ID NO: 85741 - DNA, 213 bp, Glycine max
cttcctgggtaccccctttggggttttcccccaaaggggatttccccccaaaaaatctcaaacccggacccaaaaaaaactggccaaaaaaaaaccttccccacaaaaaacgatcccgaaaaaaaaagagtaagcctaaagggcctttttgaagaacccaacaacaaaaaacccgccccccaaatagccccaaaaaaaaaaaaaaaaccgggg

SEQ ID NO: 85742 - DNA, 428 bp, Glycine max
ggcgtaaccacaaaaagggaacaaaattgattagctgagtatagaaaaacaaccgaatatccattccgagtagttaattttctttcattataattagcctccccaaaagcttgtttagcaatttggaacaaccttagcacttccttataccacttgtggtgagttaaaacgccacaaacatagactcctgtgattcagaacatatcaaccaatgcatcttgtgaacccagaacttcccaaaacaaaataaaggaattttttcagttccttggaattctctcatagaaaagcaagctggcctcactggaaagaacaccttccactgaaacagcatgcacttgagaatctgaaatacaaaaccaacgcattggagtttgattgaggtaatcatcagagacgtcttctgaagactccactcttacagatct

SEQ ID NO: 85743 - DNA, 298 bp, Glycine max
ataaaaacaaaaattcatttaaggaaacagagggggggaaaaaaacgggaatcacgggccatacccttgttgtataaagaaaaaaaattgcataattggcttttggaaggggaaaaaaaaaagggggaaaaaaaaacccggagaacacaaaatctccaagggttataaattaggccccacaagggggagcaaaaacaaaatttacggggggtgtccattttattgggaactaaaaaaccctttgctaattatgcccggggcttcaatatatcgacctccccccctagagatgcaactg

SEQ ID NO: 85744 - DNA, 448 bp, Glycine max
gaagcaaaaaattaaactcaatttcatttaaataaagagaaatatgacacaaccaaaaataagacagggcaatcagaaaaatgaaattgattgattcgtacaatcctctttctcttttgccttgcagaacaacagtattgtcatgacaatccaaaaatcatgatatgcatcccagacaccctttctgaaatacaaagaattggaaaattaaaaaattactttccatttcattggattttgacaaatggtatgtgtattttggccttttacaaaatctggtgcagttttgtgttttgaagaaaaccatggtagctggcagaggtcaaaattgcagaatgagatggctccagatttatggtgctagaatccgatccatacttaggaggcatctgaattttttgaggtatgcttgcaattactaagaattttagtctttctaatgaatgat

SEQ ID NO: 85745 - DNA, 390 bp, Glycine max
gctcaaatatttaatcaatcttatagattgtaaagaaaattaataggaaaaagaacagcccttttttattatgtcagagaggccgtatcaaattaaatacaagcttttgaacaagagggatattacggaatgaattgcacttgcacaaaagttaaacccttgaccagtttctcattctaacctcctcctaccatcaacaaacagatttgtagtattcaacagccacagcggtagttcacgtctgactgcaaaatacaaaggttaatagccatcaccatttatacaagcaaattaatatttataggagaatatggtttgaaggttttaaactgataacaaattgtggatccaattgtaatcgcgatgcagtagctgacacttcatatgacc

SEQ ID NO: 85746 - DNA, 257 bp, Glycine max
tttatagaatttttttcgattacacgcccatataaaaggcggattaactgttccatcgtttccacatcttatatcaaaaaaaaaacccatcttcccaaattaaccaggaggggtggctgcgtctactttctttctcaaacgctttccatggctcgtaccaagcatgccgatcccacaaccaccgaaggaagggctcctaggatttcttctcgccaccaagggacccaaatttgggtaacactgttttttttttttca

SEQ ID NO: 85747 - DNA, 336 bp, Glycine max
aaggggggttatttgttttatttttttttttttttttttaattatttttttgtttttgcccaaccaatcccccccctttttgggggcgcttggggtctccccggaaattagggccgggacccggcgggccgcccgcttttcctttgaggggaaggcttaaaggacgcgccggaacacataaagagcaaagcctggggggcaaaaggagggccctaacaatctacaaaaagattcggggcgggaattaaaatttataacccaggggcccccagtggagggacaaacgaacctttaattgcgtgagcacacgaccccggataaaaaaaaaaaaacaag

SEQ ID NO: 85748 - DNA, 285 bp, Glycine max
  unsure (1)..(285): unsure at all n locations
tttttcttttttaatttttnnnggatatttaagaggggggtttcttaaattggaacttttttccacacatgctttatggatatctaacctaaaccgtttatttttacatcttttcagcgcccaaaaaaggggggccccaacaaaaaaaatagggggggggccccaaatacaaaaagcccccccctggattttacaaggcaaaaacacaggcgagttaccaaatccccccccaaaaaaaaaaaggcagcggcaccccacgcccaaaggagaaaaacaaaacccttt

SEQ ID NO: 85749 - DNA, 305 bp, Glycine max
gggggggggtttttattttggaatccgggcccggttcctttttccccacccccttgccccacccggaaaaacctggcccttgccggaagaaagaccatttctgtttaaagggggaaatgttaaacgttggcaaaaaaaaacaaaaagcgagccctaagggaaaaaggtgaagccctaaaaatctaaaaaaaaatacaacccacattattagggttaaacccccgggccacttagaaagggggaaaccccaaattcaatggggaaaaatcaaacccccctttccagggggaaaaccgtttgggccc

SEQ ID NO: 85750 - DNA, 274 bp, Glycine max
  unsure (1)..(274): unsure at all n locations
tttattatttttttttttttttttttttttnttttttttggtggtttttttttatgggggaggggtccgacccgggaatggcccacgggacccgggaggccacccaaattcccaaaacgttcccaaaatgcgggccaatgttaaccatggggataactattgccagagggaaaaccggcgtggaatagaaagccgcacgagtaaaaaaaaaaaaagccaaaggggaaaaaaaaagagagcccacggggaccacaagcaaaaatctttcgggctg

SEQ ID NO: 85751 - DNA, 231 bp, Glycine max
aaaaaaatcgggactggttcccaaagggataccgcctgccccttgggggggtactttttaaaatttattataagcggctaaacaaaaggcaccagaaagggtaataatcggttactgggggcaaacatgttacggaccgcaaccttaaaaatataaaacgggggcgcataatgggtgaaaaaaggcgcaactaatggggggggcaaaatacattaattgcggggggaaaac

SEQ ID NO: 85752 - DNA, 186 bp, Glycine max
aatgggaaggctttaaatattgaaaaatctaaaaaaagaaaacaaagttgaagttctactttgaaacgggaacaagccgggacccaaaaacaatcaaaaacccaaaagtttccacagttcttaaatgaacggggaactgctgaagctagcgcccctggacaaccatgcccattataaaaagaaggc

SEQ ID NO: 85753 - DNA, 284 bp, Glycine max
aaaatggacaattttttttttttttttttttattttttaaaaattttttttttctggagaacaaagaaaaaaaggggccaaatattccttttctgggaacgggccccaaaaagaagcccccccagaaaaatataacaaaaacccctttccggggaaaacaaactgaagggaaaacacatttatttggaaaaaaaaaatacctcaaaagtttgaggggggggttctttatttgcaaaaaaatctaaagagggagaaaggctgaaaaactttagaggggggggggg

SEQ ID NO: 85754 - DNA, 60 bp, Glycine max
gaatggggggccgacgcgtccgaaaaaaaccacgtttttgactttaaaggcgaaagggat

SEQ ID NO: 85755 - DNA, 300 bp, Glycine max
cccactcgttcggcaagtgttttttgcagacttttttgatcattttgggaccaactttgaacccggtgcctttatttgagtaatttgcccaccaagttgccatctttgcttccatactttgttgttcattttggtgtccccttcactttcacttttttgtttagttttaaggcgggctttaaagctgctgatggctttcatctttactatatttgttacgattttggtttggatcttttattcttcccaataacctattcaacaatctatcaacgcttttctgcgtactggtgggagttt

SEQ ID NO: 85756 - DNA, 258 bp, Glycine max
caacggtggtgtttgtcttgtgcatctttgtagtgttgaatgcgggggcctctgatgccactcgcttattgctgaacaaaactgcaacaggtaacgtgtccatagagaagattgagagatacttacctggaaattgacttgggcagacaacccccaatggataggatttgttgaaccaccttaggttgatattaaataaggttaattctagaaacagatgatgcacttgtgtcatatggccctgctgcttttggatac

SEQ ID NO: 85757 - DNA, 300 bp, Glycine max
gcaactcttgcctttatgtatcttcactgggaggagagagagagagagagagacagaagaggtgtcagactggcatatatgccgacgaccctttaggagctggatcttaaagaaagagagacccttgtgattgagctgccataagtttctctcgtcgcggtggcaactcccaagaaacaggtcgtatcacaaaagagtgcctcatttggaagttatggtgactatctacataaacacattgcttccaaatgtgtgtagtgatgaacttgaaggcagctgataaactggcttccggataat

SEQ ID NO: 85758 - DNA, 283 bp, Glycine max
aaaaaaaaaaaaaaaaaataaaaaaaaaaaaaaaaaaaaaaaaaaggaaaaaaaaaaaaaaaaaaaaaaaaaaaaaaaaaaaaaaaaaaaaaaaaaaaaaaaaaaataaaaaataggtattaaaatataaatatatattatttaattttattttattttgggttggttgatttttatttttaattatttttagtttgtttatatggtggttttttttttttttttgggggtgtaaaaaatttttatttttcaattttttcctttttttagagggaaacccttt

SEQ ID NO: 85759 - DNA, 330 bp, Glycine max
tctcctctcgtcctccctcgcgtccgaaaattttatataataaaaaaaaaaaaaaagggggattataaaaaaaaaaaaaaaaaaaaaaaaaaaaaaatataagatgtacgtacattttgtgggggtcttttttaggggtccgttcttttttagggttgctttgttttttattacctttttttttgtttttcaccttttttttttttgttgcccgttttttttaaactttttgtttgttttaacccttttgttcccttaattttttgcctttctaaacttactgtttttgccagtttgccttttttccaattgtccctcatgattggcctt

SEQ ID NO: 85760 - DNA, 51 bp, Glycine max
cccacgcgtccgaaaaaaaaaaaaaaaaaaaaaaaaaaaaaaaagggggaa

SEQ ID NO: 85761 - DNA, 255 bp, Glycine max
cacaatctcccaacactggttctttctcgctcgctgcttcaacctggacacttcatagtgcttaagggactccgttctaggtcttctattcaccacaggcggttgctcttgccaaggcgctgaatccacgtctaaggagggaatccattacgcagaaaatgcacagccaggctctgtgaagaatcaacgcgaacaccctggccgtgagctgatatatatccgcggacgagctatgctacttgtttatcgtatctc

SEQ ID NO: 85762 - DNA, 114 bp, Glycine max
ttggggggaccaaacactcctccaaacactccgaagtggtttattttcaaaaacctttttttttttgaggtggaacgagatctataagttattttaaaaaccaatgatccaaag

SEQ ID NO: 85763 - DNA, 273 bp, Glycine max
tcttccttccacgcgtccgaaaaatttaaaaaaaaaaaaaaaaaaaaaaaagaaaataaaaaaaaaaaaaaaaaaaaaaaaaaaaaaaaaaaaaaaaaaaaaaaaaatattatattataaaaaatttttaacacttatatatattttaattttattttttttgtgtcctctttaataaatttaaattttttccattttttcaacctttttaaatttttttttttttgctcttcttttttttttttctttgcactattttccttttttgccatt

SEQ ID NO: 85764 - DNA, 251 bp, Glycine max
acccttccgtttttttttacatgaaaggtcaactgacccctagggaatttttagatggatttggcatctttgatctcatgaatacaaagtgggacatacaatgcacttgcgctctccaaggagaaggtctttatgagggctgggaccggatgtccacaagcttgaacgatagactagctgatggatactcactaatacaactaggaacgtcatccttgtaactcaaagagatactgatgcaatggacgaat

SEQ ID NO: 85765 - DNA, 315 bp, Glycine max
cccacgcgtccgctcggattttcaagtggttcagtggggattttggggaagagaaagaaatattgttgtggataattaattacttggatccaaataaagccggtcttgtgacacatctcatgggagatagtggaccagttcacatctcttaccagaattatgattggtcaataaattcttgattagttttgattcagctactgattattacacttttaccagattgtggcatcttatcttattccatccaaaaggagagagaatttaagtgatttgataccgaaacagattattgtagatgtgatatcatttttg

SEQ ID NO: 85766 - DNA, 192 bp, Glycine max
gctgcttgcaccattgtttcatctctcagaggtcagcaaaaagtcgggtgttgaaatatactattcccatcctctactttttgcttacaccatcttattcataccatattcttgtccaaacacacgtgttgcttcccgccaattatgtacatgtactcaaatgctttccttctttctatgttctctatatta

SEQ ID NO: 85767 - DNA, 317 bp, Glycine max
accacgcgtggcgtattagctagacattgagttatgaacaacgggttgaaaagctgagatgggtcttggatcacacatgaattgagcactacgtccttcaggggtagccgactgcgaagatggcaagcaaaaactagacgaaaaggatggaacaccaggatcaacaagagaacatgaaaagagatattatcgtgtaccgtgggtatcgtgcgggatatataccagcgggataaatatagccacacagaataatgtgcacggagcgactactgtcaaacgagactacagcacatacttgatccatgtgaacataggga

SEQ ID NO: 85768 - DNA, 314 bp, Glycine max
tcttcctaatctatcataattctgtctctctcattatattaatataggggaggctttttcaaaatcaaatatcccttcttgatactttcaccattatcttttcattacactccaattttttatcttttttattttctattttttgtttagtatattaaaatttgattcatatttaaaccatttgttatttcattatacttcctttttcgcttaagttttgaaaatgatctatcttattgttatattattcaatttaattttacaataattttcttgtctatttattaaacatcttatactcttttttttatata

SEQ ID NO: 85769 - DNA, 324 bp, Glycine max
acccttccggttacttcctaggaatgattctgctacaatttctctgattctgaaggaacaataactcatagtgatacccccaaacaacaaaatgggagataacaaacgttagagaggacgcatagccataaccaccgccttcgaaaccctagaccaccccgcccccgttaccaccaccgttccaaattccacctacaccgccatggacgatgtcttctccgacggcaacgtagatctcatcgacaccacggtctgttcgcaccatcgacgcctacgggcccgtcccaacacactgcgagaagccccacactctgcccacggggc

SEQ ID NO: 85770 - DNA, 130 bp, Glycine max
tcccacctcaaaaaaaaaaaaaaaggggaaaaaaaaagggcggcgttaaggacagctactcctgctgcagatatttttggcactaaatatactggccggttaacgcgactggaaaaccctgctaccaata

SEQ ID NO: 85771 - DNA, 289 bp, Glycine max
cccacgcgtccgcacctttcttcttttaaatttcttttcttttttaagttttctccatttatgctatattttttttcttcgccgagattggggtatgggagacttcgagacccagatgttttaagggtatgatttgtgactttcgattcttttattcttctgttttttcttttcttgcttttggaagtttctattttttttagtctaggactgttggttttgtaaattttatatttgggtaacccctggttttctgctgtttttggtgtgtaattttgagaattttcat

SEQ ID NO: 85772 - DNA, 296 bp, Glycine max
cttactcgtgggcggacgcgttggaaaaaaaaaaaaaaaaaaaaggggaaaaataaaaaaaaaaaaaaaaaaaaaaaaaaaaaaaaaaaaaaaaaaaaaaaaaaaaaaaaaaaaaaaaaaaaaaaaaaaagggggcggccgttttaaaaaatcaaaatttacttccccttgcttgcaacgtaatagctttttttttgtgccacctaatttaaattaattggccgtcttttaaaaacgtcttaactgtaaaaaccctggctttaccaaatttaattgccttgaaaaaaatccccttt

SEQ ID NO: 85773 - DNA, 258 bp, Glycine max
ccgggaccggccggaattcggtcgacccgcgtcgacaaacctgcacgacacaacgactaacctgcgcgccgcgtgtgttgaccacccaatccctttttaccctccattgaccctcaattgactatatcgcgcccgcctatggaatccgcatcgcgtgcgctcgcgcgcaaaccatcctcactgaccccaactctttacggagcacttgtttcttcctcacgactattctaccttttccgatcctcctcgcgcgccaac

SEQ ID NO: 85774 - DNA, 245 bp, Glycine max
ctcgtaaacatggtttttgggtctattgctgtctcaggggtaaaccctccttagagattcgttggagctgaggacttcaaggaagaatgttgcaaactttggggaatggatttacaactgacagtgaggcttgggcaaaatggaaacttaatgagctatgtggatgttaagaccactgtatatacatgagatgttgattggctttactaaagcgtataccgtgaagagactgtttgcacaatcac

SEQ ID NO: 85775 - DNA, 303 bp, Glycine max
ccggaaaaaaaaaaaatataaaaaataaaaaaaaaataaataaataaaaagagggaaaaaaaaataaataaatagcagaacatgtcctgcaccttttcttgcgccaccgtcttttcatgacccatgcaagattattcttcactttaaattgatttccttggatatgtttacaaaggtctatcaatgcccaattcttggatttaccgattttatcatattctcatctagttcccacacataaccgttttgtaaattgttacaatagataaggggtcagaattataaaaattttcctacatttta

SEQ ID NO: 85776 - DNA, 262 bp, Glycine max
cttcctttaaaaaaaaaaaaaattttaaaaaaaaaaaaaaaaaaaaaaagggggaaaaaaatttaaaattccggctcccttctcttgctccagcttctcctcttctttccgctcataaatctttttttgtccctgttttcctcgctgccctttgtattcaacatctttcccgtataacccccttgctcccatttatttttcccgcttacatcatacttttgccggctgttttcattcccaattggaccaaacccctggcctt

SEQ ID NO: 85777 - DNA, 499 bp, Glycine max
aaatgacaatttattctttatttttttgaaagcatacccgttcatcgtacttgcatgcagactagtacaataatctaataaaagatcatacgaatagcataaaacaaaaaaattaaacgaattacatcagtacatgttagaacgtaggggtatgaaataattaagacatcccgatcacatacagctgcaaattaatagttttggtttcaataaccccacaggccacaggggcaatttatgcctagtaagagtttaaataaagtaaaaccgaggacaacaaaaaccaagtatggtcattccaaagatgatgtggggggaaatagcatcatacaatcattctgtaaagcagttgtgggacaagctccatcagcagaaagccatctttccccttcactcacagtcatcaactagtagctatcaaactcattcaacacccatgatcattgatctcacatataatgctcctaatccaggtgggaatatgaccccaaagatttta

SEQ ID NO: 85778 - DNA, 434 bp, Glycine max
gggcccaaagcgaggtaaacttttttattgtatatattcccggatttaccagaacagcatgtgatcactaatcaccacaagataaattacatgttcaaactgcaaagcatttatagcttactaagactcaccaaacttagaataaaagtcatttgatttccccatatataaactatgtatttttgctcactatagttttttctagctatgctcactcaccctagaagactgtcctactgcaagatccatctcataaaaccatttcccaataagggcgagctgtattatatctataaccgacttgagatggtggatgggtcttagaacaccaaacacagcaagatctgttaaaatttctttgacacaaaatacatagccggagccccactatactctgccactaacctttcaaaacaactgaaatttccttgggt

SEQ ID NO: 85779 - DNA, 521 bp, Glycine max
ttttagaagtaattcatatcatctaacattataattattcataaatatgatataccaaagtcaagcaatagaccagacaggcattgagcacaattctgaactcggtaacaattacatgattgggctatccggttctaattctagtaaaatgcaacattgctggtaagaaggggcaaaatgcctcaaaaatgatacaactagctgtctagagtctacattgtttcttacacaacaatgaaaactacaatgcataagatttcaagtaccattttcggcagaatcattgttctcatcatttctctgctctagttttgaaatctcacactgcagattctctaaaatctgcctcttctgcctttccaactctttatggaaatccttcctcatcttttccagttccaccatctgctgccttttactattttctatcttctcatatatcttactgaatttctgaatggaatcagcaagtaacctgaaagaagaagcttcgccactgccccttctcttctttcttttct

SEQ ID NO: 85780 - DNA, 311 bp, Glycine max
cccccttaaaaaaggaaatttgtaaaacaaattttttttttttccggggttttaaaaaaagaaaaaaaggggaatttttggggaaactgggcccctttttcacccaaaagggggggggtggcccctggtccccccccttttgggcgggggaaacttttgccccccccccgggggggggcccttttcccgccgctggaaataccccttttttttccttgaaaacctggggaaaaaaccccaggaaaccctccccggggttgaaaacaatgggattggggttggtccccccgaaaaaaaaaatgaaggggttt

SEQ ID NO: 85781 - DNA, 144 bp, Glycine max
aaaaaacaaacccaagccccccctcggtcaaaccaaaaattaaaatttgattccaaaaccaaggccacactccaatccaaaaaaaaataaaaactcaagcactttggtaaaaataaaatataaccccccccccctatttcaaac

SEQ ID NO: 85782 - DNA, 429 bp, Glycine max
gccccccccataaattattctcccatttttttttttcggttttaaaatttggggaaataaaatttaaaacttacaggggcgcaaattttttttttaaaaaaacttgggtttttttttttgggacatctgggttccaagaagatcaaccccaaaatttaaatttggaaaatgtaaaaaaagcttttaaaaccaaatctttgggcttgacacttttttttttttttttacataacttggggggccgggggaatgggcccgggggcctttacctggggtgggaaataacccgggggctcacctttggctttaaaaaattagggggctttttcacataccttggggctttgggccatccttcttcacaattttttcattttgacacccccaaaaacacccccctttttccttggctccccttattttaaattt

SEQ ID NO: 85783 - DNA, 202 bp, Glycine max
ttatttttaattcttttttttttatcttctttttttaattttttttggtgttttggcaaaattttggtcccccattaacaacttaaaaaaaaaagttcatcattcacatcttatgtaaataatcatataaaacttttgcctttgtcgacccatttaaataaccacaagtccatttgttctgaaatcttttgccttactttgt

SEQ ID NO: 85784 - DNA, 376 bp, Glycine max
ggtgaaaaaaaaaaatgaggccctcttataactttaaattgaaaaagttgtaaccctaacattttttaacttacaattcgttggattggatcaatcatggcaaaagaatcgagctttgccaaaaaacaatgggctcccactcttacctaaacaaaacttttatttggggtgcactcattattaacattttacaaatcattcccagggcctttcacttttttaactctttctccaatttaattccattacttccccattatcaaacaattctcaaagtgatgaaagtttttccttatgatgccatccttccaaatttttgattgccacccccccaaagctattcacattacaccttttactcacaacccttgttttt

SEQ ID NO: 85785 - DNA, 490 bp, Glycine max
  unsure (1)..(490): unsure at all n locations
tttttttttttttttttttttttttttttttttttttttttttttgggtttttttaaatttttttttttttttttttttttttttttttttttttttttttttttttttttttttttttttgaaacccccccccccaaaaaatttgtgaaaaaaaaaaaaaattttttttaaaaaaaaccctatcaccctttttgtggaaaaaaaacccctttttaaacccacaaaaaaaatttttgacccaaaaaaaaaaaaaaattttttttccaaaattataaaaaaaaattacctcttctcccgagcccccctttttttaaaaaaaacccgttatcccaaaaaaaaaaaactccccccttttaaaaccctttttttaaacctgaaaattggggggcaaaaaaatcccaaataattttttttccctttttaaaaaaaaaaaattttggcccctataattttttnaaaaaaaaccccacccaacaaaaatccttggtt

SEQ ID NO: 85786 - DNA, 101 bp, Glycine max
cccgggacccgggggcccaccccggaattccggcccggttcccgtagggggaccagttttcccttttgggggtctcattaaaacttggggtaaccagtgga

SEQ ID NO: 85787 - DNA, 166 bp, Glycine max
aaaacgcggggtccccccaaaaattaaaaaaaaatcttcttatagagacttttacatgagaacaacaaattctttcaccactcacatttacaaaaaaacattccttattttatccccacttttccacaccctatttttatttgaaaaaattttaaaatataatcct

SEQ ID NO: 85788 - DNA, 201 bp, Glycine max
  unsure (1)..(201): unsure at all n locations
ttaaacaaaaccatttttcaagcattccaatcaatatacatttcgaactttttatacaaatggtggttcaaaaaatanaaagaatcctacaaggatccttattattcatcatccaaattatcatattgccaagggttgaattctgttctactgtcaatcacctctattcactcataactattcaacatcatcgccatgttc

SEQ ID NO: 85789 - DNA, 348 bp, Glycine max
ttttttttttttttttttttttttattattattatcctttattcagggggtttttttaaattactttggtccttttcaaccatttaccgccgggattcattattaaaatgtgccgccctttttcttaagacccccctgttccgtaccatttaaaaaaaaaaaatgggaggccccgtgtgctcaacccccccatacgaaggtcaaaaaaacttaacccgctaaagggccgaacacccccactttatttaaagggggggggttaacaacaaaaacccttggggtcccaaaccccaatcaaaggcatatccctgagtttttgccgccccctaaaaagcttaacttcatctc

SEQ ID NO: 85790 - DNA, 303 bp, Glycine max
tttttactcttttttttaccctctaactccttaccttttcctggggtctttccaaaattccctattccataccacttttaccttttcttaatcatattcatacctgcctcctctattaaatacttatcctcttacaattccacacaacatactaccacataaccatcaaaatacaaatccttaatcatcctaatttaataaccctaactcacataaatatcaatccaactcactatcctcttttcaatcctaaaacctcacattaccatcttcataaaattaatctacccaacttcacttaat

SEQ ID NO: 85791 - DNA, 178 bp, Glycine max
ttttttttttttttttttttttttttttttcccactcccttttgagcgggtttttaaaaaaggggggcccccaaacttcccaccttttcccctacccagtgtttctcaccgggaacctataacaagcacaactgtgtccccagggaaaatcctttccgctctcaatttcacacaccat

SEQ ID NO: 85792 - DNA, 287 bp, Glycine max
aattctatatatgatacaccagataaggcttttctaactaaagattcaaattaaaatattaaattttcaacaatctttcttaaaacaaacattctctattcacatcagtaagaaaacctaactcaactacgagcataattatcaaaactaaaaaaaactacaacagagagccaaaagaaatctaaatttgataataaaaaaatcaaaaaaccaatccttttaaagtcatcgtagcaacatctcccttggatgaccaccttccttcttggaaggagaaaattttaatt

SEQ ID NO: 85793 - DNA, 58 bp, Glycine max
tctacgcgggccttttttaaaaccaggggtccctatatatagtctattaaagctttgg

SEQ ID NO: 85794 - DNA, 151 bp, Glycine max
aaaaaatattttccccataattttttccaaatttttttatttattttttttttttcattttcatattttacatctacccatttctttcccacccacaaacaccacatttaaatttttcccacaaaaaatacaaatccccataattcataaa

SEQ ID NO: 85795 - DNA, 388 bp, Glycine max
ggagagaacagtgaaatgacttctttctttcataggaaaacaaattgcggttcactaaacagttaaccatgattaacaagtaaagaaaatcatttgttctatgaggacaaaaaaattttgtgacttgagaaagtagcttgcaagcttattcttttagagcttattttttaacctacaacaaattgtttcacctaacactgctctcaaaagagctctttttgctcattctgtgaggcaatttctcacaaaaagaaggcacattttaattgcgaggagttgaggcttcaaatggactgcttgaggagtcacctgaggatggattcagtggtgaaccacttgcaagagaaccattttcactttcagtttcaaccaccactggtattttgac

SEQ ID NO: 85796 - DNA, 329 bp, Glycine max
gaaaccaaaacaaagaacttcaatttgaacttccattcttattcttatttatatacacaccagggcttggaaaacaaactcactttgtctcactttgaacttttttttttttatgtgcatgaactaaaaaaacccttttaatgaaagggaagggggtaaaattgccttaatgacccctaaaacaagggggattctcagcaaacacaaaaatgctccttcaccttaaaagggaatgcatgaaaaaccatcccgctttttctttagttgactgacaacaaaacttactttttttacaaacaaagcttgtgaaccaatgggactttacaact

SEQ ID NO: 85797 - DNA, 310 bp, Glycine max
ttttttttttttttttttttttttttttttttttttttttttttggttttttttttttttttttaaccccaaaatattattcttttctattaaataaaccctaaattatccatttaaaccctttttaccaaacactaaccttaccaaaaaaaaatatttccccccataaaatttcaacaaaacaaaaaataattaccaaatttcttcaaaacaaaatacaaaattgccttacccaataaaaaaaacaaaaaaacgacccttacatatttataccacccaaaaaaaacatcctcaatttatattcctcctc

SEQ ID NO: 85798 - DNA, 232 bp, Glycine max
tactttacctatatgggtattattggtttcactattaaacgaggattataccaattatcacttcactgtaccttaaggcaaattatgataatagcctttgacaagtaaatctgtctatatctaagctgaataactcggacactctctcaaaatctaagtattctagtgacatttttcggttttggtcatgcacaatatctatttctaaacctccagcactttcaacatactt

SEQ ID NO: 85799 - DNA, 491 bp, Glycine max
tactatgcaacttcttggttttttaaaatcctcatcactactatcatcaaggcgtttgataaatggtgctgcaccaaattttatcattgaagagttcaccatccatatgcatgcactctgtaagattgcattgcaacgtcgctcaaatttagcaacatttctggagacaaagggtactgttgtctttactgattgaatcgtaaaatacatagaaattagcttttccttgtctatatttaaatgcacagtggggagataagaataagcatctgttgatataaacatccatgtttgctgcatgctatgactaattgattacaatgagatttctctctactaaagtcctatgtttacgtccttgatttaatgtgggcatatttattctatttgctaccattttattatgatataatcttttttttccctttttttttcctggtgtatgctcacaagtggtggatgtacttatgcaagttttatggggaattttt

SEQ ID NO: 85800 - DNA, 339 bp, Glycine max
  unsure (1)..(339): unsure at all n locations
atacattaatatttttttcaactaccatctcaatntcattattaggggttttttaaaaaatatctaccaccatataatcctttttctataaaaatatttatcctaaaatcacaacttaatcatccaaattcttcaccataccaacaaaacctaaacttcttattttcaaaaccacctacattataattcttccaaatatatcaatcccttttatttctcataacaacatcattattttaatcaacactaacatctttataacttaaaatttattatcatctcaccatcataaaaatacttccataacattattcttatacattatctatactatacctt

SEQ ID NO: 85801 - DNA, 448 bp, Glycine max
tttttttttttttttttttttttttttttttttttttttttttgtttttttggaaaatttgggtttctctttttttttttttttttttttttttttttcccccccccaaaaaaattgccccttaaaaaaccccccccccccccaaaaattcccccccccctggaaaaaaaaaaaaaaaagggccccttttttgctttttccccccccagaaccctggggaaaaacccgggaaaatttttccctttggaaaccccccgggggccccccttgggggcctttggcccccacccctttattgtggggtaaactcttttttcgcccccccccccaaatttttaccctttctttaacccccccttttttggggaaccccccaaaaccaaaaaaaaaaaatccccccccaaaaaaaaaccctttaccccccccccccccttttttttgtgcccac

SEQ ID NO: 85802 - DNA, 318 bp, Glycine max
tatttttaataaatatttttttcttttacaatttttattttttgaggtggtttttaaaaatttttttcccctcatcttcatcatatggaaagcacctgatgcattacctagtccaaactgtttccgggcaaacaattaaattaaccaaaaaacccccaccaatcaacccatttttcacccccccccatggaggaccaaaaagatatgcttcctcctttattgtttccctgttttttattcatataacttttgccccatgccccaaaatgaccttttttacctattaataaccttgggatggccccttggcatacaaaa

SEQ ID NO: 85803 - DNA, 309 bp, Glycine max
cccccaaaaaattttttttttgaatggcctttttggcccaaaaaaggaaaccaaatttttttttttttggtccccggaaaaattttttttcgggatttggttttatgttatccctaaaaaccccttggaaaaaatcttgggccaacaaggaaggggggggtttttccaacccattcctggggggttccattttttgggtgattttcttgaaaaatcgcccccatttgtccccggtttgtttaaatataacactttggcctttaccaaaaaaaaacttggtgcaaccctttttttgttttaaaaatttta

SEQ ID NO: 85804 - DNA, 293 bp, Glycine max
gggcaaaaaaacttttttattttaatggaacccaaattcaatttttggttgggcccaacaaaaaccaattttttttccaattaaaaaacaaggatgggtggaccctccaccctttttttttgggggggggaaatgttttccccccattttaaaaatgagaccccaatgtcccttttttttttggggcgggtgtccaaattgcccgtcaactcggagccttttccatttaaaatgacttcattttacttataaaaaaaaattttttttttaaaattgaaaaaacctttttaaaa

SEQ ID NO: 85805 - DNA, 527 bp, Glycine max
cttatttctttatttcttactccttttctatttctgttattaagcttagaaagtttgaatcctaaatttactcatttgctcacttgtttccattcattctatttttctcaaccttattttcaatcattctaattcttgctaatttctttcctttctatgcagcacagtacttagtaagtatttctctttcacaaatgtttttctttttctgaaaacctacaataatctttctcgttagtgttcaaaaggataaaagagttcaatagatcgatacttacactagacaatctttgcaagattccatttgtctgcgcaaaatatgcctctagaagcatctccaattcctcaacgtcaagtttaggacaaaagaatttgtcatacttttctgaatttgattcatcactaaagacaaaaggaaccattgtgatttgtgagctcaagtcttatttgtcaaactatagctggttttaaatagacaaacattggtggtttttacttttttacctttgatcgttatcttcaaattc

SEQ ID NO: 85806 - DNA, 127 bp, Glycine max
tttttaacagcccacctttatttcattcatatcacaattatcatgggggggtttcaaaaataaagacgtacccccccatacccccatcatcataacatcatactacacaaactaaaaccataccaaa

SEQ ID NO: 85807 - DNA, 419 bp, Glycine max
cctaaaacccgttttattttggggggggggggcccaaaaatttaccattttaaagcccgaaatccctttgcaggccgctaaaaataaatttttttttttttccaaggcccccatttccattttttaaaatttttttttggccgtccctttaattcatctaaacggaaaccccttcaaaatcttcccagattttaattttcccccctttttttattggaaagggccctgccggattccaaattttagctttgaaacaggcaaacatttttttccaccaaaagcatccttctgacctttattatttcctgaaactttttttcgggaaaataccctttttggacacctttaagggaaattaaatctcttttccccaaaatataaaccctttttttaaaattccccctgtttttttttttggc

SEQ ID NO: 85808 - DNA, 523 bp, Glycine max
tagcataatattaatttctttttatattaaacaaaaaatagtggggagggtttataatatgtaacccaaaaaaacataatattatcattctaattaaatcataaaatgtacagtaaaagaatctcttgtatatccgttcataggcaaaactattctcgtgaatatttgttctcactttgatcgattgacaagacttatccttggttttctccgggactccagaattttctccttcaattttgtcagtgctgccaacaatggaacatgacagagacttaatgaaacatctaatgtaaatccaaaacagcataacgtaaaccaacatcaagaagcgttgagctcatccacaagtataatggaaccatgaaaccaagtctatgaaacattcaatgtaactgattggtaggtactatgaagcgcttcaatcaaactggatggaacagtatactcaagacaatcactagcctaagcctttttcatcaacttcttaaatccttcaacctcatcttttgacattaatgtt

SEQ ID NO: 85809 - DNA, 170 bp, Glycine max
gggggggattttcataaaaggttttttccctttacaaagttttccacttttatttcaactaaccttctcatgaagttttatttatttcgatatcttaaacccatttatatttttttaaaagtttccttcttatttttatgggtttatcatcaaccccaccctctttattt

SEQ ID NO: 85810 - DNA, 526 bp, Glycine max
ttttttttttttttttttttttttttttttttttttttttttttggggtttttttttttttttttttttttttttttttttttttttttttttttttccccgaaaaaaccccggggggttccccccccaaaaagtacctttttttggctcaaaaaaaaacctttttttttcccccccaaaggggaaatttgaatttttttgtttaaacccccttatattttttttgtttaggggaagaccccttcctttattttttaaaaaaaaagaacctttttaacctaaaaagctctttttttttgggatttttccccaaaaaacttttgtggccccccctccccccccccaaaagtcccccttggttaagggttaaaattttttaaccaccgttggggggggtttttttttggtgacaaactttttaagtttttttttggaaaaaaaacttgggccgagtttggggatttttccttttcttaaaaaaaaagttttttttttttaaaatttttggggaaaacccttttggggg

SEQ ID NO: 85811 - DNA, 65 bp, Glycine max
aattaggggggttttttaaaaaatagggagtcccaacaaacccggggggcgacccggaatttccg

SEQ ID NO: 85812 - DNA, 69 bp, Glycine max
aaaaaaaaaaaaaaaaaaaaaaaaaaaaaaaatttttaaaaaaaaaaaaaaaaaaaaaaaaaaaggggg

SEQ ID NO: 85813 - DNA, 59 bp, Glycine max
tacacaacatttgtagctttgaatgtaattagcatctatagctgtatttttagctttta

SEQ ID NO: 85814 - DNA, 282 bp, Glycine max
  unsure (1)..(282): unsure at all n locations
nccacgcgtacggtgacgcttatgttcatttttttatattagctaatgtgacatcgaatgcgggggcgctttacgaaggacgtatgcccccattattactgcgctatatctaattatgttcacaacagcctcattgactcactatgtgcaatagatatgctatcaaaatctaggtgtagggatgcacagattactactttgataaggttgtcatcattagtttaaatcttcttctgcttaatcatgaattaacacttgatgtagttgttttaaatacattaa

SEQ ID NO: 85815 - DNA, 224 bp, Glycine max
  unsure (1)..(224): unsure at all n locations
gaaaaaaaggnccgggcaagcgttcggaaatttttaagnggttgtttggaattttttttagagcttttatacagactgggctagcgcgcaagagattcttcgttggtgacaatctcattttcaacatcagcggagagcattcggtgggaattagaacagaggctacttattatgagaattgcaacaccagcttattaactggtttcacgttcataggcgtcaat

SEQ ID NO: 85816 - DNA, 147 bp, Glycine max
aaaaaaaaaaaaaaaaaggcgaacgacataaaggagcagccgacgtcgcaggctggggggcgatcgctcgatgtggaggcacctaaatcaattgactgaccgaagtgggacaacgtgtcactggtaaaaacttgaagacccgaaata

SEQ ID NO: 85817 - DNA, 379 bp, Glycine max
aaaaaaaaaaaaaaaaaaaaaaaaaaaaaaaaaaaaaaaaaaggggggggcgctataatagaagataagattatatgcgcgcgcgtgtgagggggtatcttttgggtggcgtgacctaaattcaaagtgctggccccggtttttcacagcgtggagtgggaaaaacctggcgttacacaaatttaattggccgtggtttatatgccttttgctgggggaacccatatcgaaaaggggcttaaacatctcgctttaaaaaactgttgcacaatctaaggggaaagggacacgccctgtatcgatgaattttacacgcggggggtgttgtggaaacgcaaatggaacgctccatttggcggggccttatagccggctcctt

SEQ ID NO: 85818 - DNA, 421 bp, Glycine max
cccctttctctctctctacactttctctctctctccaacaccaccttttatttttttttccccttgagacaaaaacaaaagtaaagaaagaggtttatttttatttgggtctttttttattagcgaaaaaaggaataaaagaaaaagataacggaaatgtcggaggccaaagacccggcgatcaaactgttggggaagacgatcccggtgccggagaatctatcgggatcgaactgacctgggggttaaaattacggagatggtcatgatgatgacagtgcttacgcttgttccaccaactcttaaagggagtctgataccaacacagatgcacaagagaaagattttgataaggacacattgggagaaaaaccaactgatgacaagaaggaagatggagcccccgcccaatcatcagaag

SEQ ID NO: 85819 - DNA, 193 bp, Glycine max
attaacttgggaagctacaacgggcctgttccaaagcgtggaagaaaaaactaagcttatgtgaaagacctcttatgctcgtggatggacttgtgactacactggcgaaccggggtctcgaccaaacacctcgactgtacgggctacacgctgactctgtagcttgggcctaagcggttctatttggtaccca

SEQ ID NO: 85820 - DNA, 538 bp, Glycine max
cttggaaattccggggttggatgaatcaatcgacacaacaaggattgacaatttttcacccatgaggccgagccattattagttgcttcaccttgtttttcttcaaaggcagtttctgttgtggtgtgcttgattgaagagagaggagagaaaaagaaaagaaaaaagggaagcaaaagtggctactttgatgagttttggggggtttcttgagaccaaacaaagtgatggaggtggtggtaggattgtagtttcagatattccttacaacagcaacaacggttcaaaccacagcaacgatataatgccctctggtgcaatctcgctgcctcgtttagccactcctactttggccaaatccatgttcaactctcctggcctttctcttgcacttcaaagtgatatagatggacaaggggatatgaacagattaatgcccgaaaattttgagcagaatggtttgagaaggaggccggaagaagagcatgaaagcagatctggcagtgacaacatggatggtggttctggtgatgatttt

SEQ ID NO: 85821 - DNA, 135 bp, Glycine max
cccacgcgtccgcccacgcgtccgcggacgcgtgggtgatcatgtttcccagcattatcatagggccagaaaatgttgttgtcgcaaccctgttatggctttgtatttaaattctggtgattttatgggcctata

SEQ ID NO: 85822 - DNA, 214 bp, Glycine max
  unsure (1)..(214): unsure at all n locations
aacaaactgaaattatagctcctctcngcgttctcgttctctcacaccacatcacatcgcagtggtgacccgcacaaacaacaaaaccctattttttctatttccacactcgctttgtctgactctcttcatcaacgccatttcgattttctccaaaattacacttccctaaccggtccactattttaagttataagatgtttttatggttcaa

SEQ ID NO: 85823 - DNA, 205 bp, Glycine max
tcttttttgtcggtatcggagtctttcggtggttgtttggttggtttaactctcaccccaaaaggggttgctggggtggtaactgtggttgccgaagcccctcctctgatctgtaaaagaggagaaaatgcaaccactgtaataattcacctctgcgctccagtttaccacctacaccatattcatgggagggttacttctgcag

SEQ ID NO: 85824 - DNA, 333 bp, Glycine max
  unsure (1)..(333): unsure at all n locations
aaaacatatatttatattgaatttgtctgatggataaacatgtatgaatcaatctgaccaccccgcgagacaaacatactacctacttattaacttgttctttcantatgatctgtaaaagaagaaaaaatgcaaaccacttctgtaaactatctttgttcttaagttataccactaacacatattcatagcatcattactttctgcttaaaaaaagaatcactacaactttttaattagattctatgacatcttccaactgcaatctctatcttacatcataaatacatccagatgtctatgaactacatatcatctttccttcatctatat

SEQ ID NO: 85825 - DNA, 237 bp, Glycine max
ttatggtgctgggagaacggatggccctaatatgagttgaccattttgtattgaaagaggaaagagactttccaagcttcattttgacaacaaaggagttatgaatgagactgatacccttattgagacttgcacaacaggaaagtgtaatgcaatatcatgaggacacaacagatgaagtagtacacaatttttattataagctgcacaatggaaaacataagacagtctacgaga

SEQ ID NO: 85826 - DNA, 174 bp, Glycine max
cccacgcgtccggaaagcctccccctcctccaacctttcctgttagatcgatttcaagattgaagcaatggctgatttaagagttaagaaaggaagcaacaagaagcatggatctgtgtctgtcaccaccatcaaatctttttccgaggagttgccagtggagaattttggcca

SEQ ID NO: 85827 - DNA, 248 bp, Glycine max
aaaaaaaaaaaaaaaaaaaaaaaaaaaaaaattataaaaaaaaaaaaaaaaaaaaaaaaaaaaagaaaaaattaaaaaaaaagggggcggccgatctaaaggatccaagcttactttcgcgtgcatacaacttaaaattttttttttagtgtaacctaaattcaattcattggccggcgttttgcaacaatccaaatggaaaaaccttggcgttacctttaatttgaaatcatttttttttacaaaaa

SEQ ID NO: 85828 - DNA, 413 bp, Glycine max
  unsure (1)..(413): unsure at all n locations
ttatacaattttatttattagagttttgnaaaaaagaattagtgtcatcgcacagatataagatattcataaaagagggggatttctttgcgagagaaaaaacttatacaactttttaccccccttcttaatttgcctacccttatacccccccccaaaaattcgccaatttttcccccccctgaaaaatttttgccacctttttttccaaaaaattttttttttaactttttacccacttttttccccaaccccctaaaatgggtttccaaacaaattcccccgccttttttcccaaaaagaaaaagggttgtgcacccctcccctcccccgggaaatttggtcccccttgggcaaatacccgcccacccccagatccaccccctttttaattggcccctttgggacacccc

SEQ ID NO: 85829 - DNA, 260 bp, Glycine max
aacttcatttcattcatttaagggcccggccgagaagtaaaatttcttggccaggaccacccactaccatataaatttcaacaatgacccaaaaaaatatttcctcatgttaatccccgcaaatacatcaatcttctttgcgtcccttttttaaaaaccccacatattgggtgtcccgcaaagagcccccccaccccttggcaatggggccccctgtaacctgacccggaaaaacaaatgcatcaacaagttcccttgca

SEQ ID NO: 85830 - DNA, 189 bp, Glycine max
aaaaaagataatgaacttcctgccttataaggaaagatagtttaccaaccgctccaaatatataaataaataaaagtcttcagttcattcccgagccgctagacaggatgctgtaaacccatacattttgaggttttaaacaggaaaggggtctgattaaaaatttgtcctatttaacactacgaatta

SEQ ID NO: 85831 - DNA, 305 bp, Glycine max
  unsure (1)..(305): unsure at all n locations
ggacgctgtgggaagacgcgtgtaaaaannttttctttgacaggggaacgggtttctataaaccggggaggccttcaaaatatgaatcaattctgggtgaaagatttacaagggatctgaacaatcatttttaagaacaaaaaggttcattactttacccccaacttttttttgtgtcctttttctcaggaaggggcggggaacaaattacaatctttacaaattttcaaccacatgaattcaggagtttaagctgttaggatatttggaattggcggggagagagcccccatattcttaccccc

SEQ ID NO: 85832 - DNA, 369 bp, Glycine max
  unsure (1)..(369): unsure at all n locations
ataatagaaaagatattccttttatgaccagagcgaagaaagtctccacatctattataactacccttccatgaagtttatgtatacgatactaaatctatataagcttacaagtttcttttagtggaggctacataatccagctatttgtcgtagggcaaagcaccaccaactcgagcacagccaacatagcaccgccgccatagcacacccacacatagcaacgcagctcatgcacaccaacacacacccaccaccatatgctagcaccacccatttgcttattaccattgactaccttccattgtttgtaaaatctggatgcatatggggcacctcnaggagacaaaagttagtggcatgaacata

SEQ ID NO: 85833 - DNA, 352 bp, Glycine max
  unsure (1)..(352): unsure at all n locations
ttgaaanatgaaatcagcatcactaatataaatagagagaaataattccaagccagcagtataacttgaaaaaagcaatatttctacacagcaaaacgtgtctgctaatatgtagggaacttagggtccacattgtgggcccaagactctaggccaccaacaatatccttggagaaatgaaaccatttggtgatctgacagccttgaaatattccctttgatactaatcaatggcctatcaaacacacactctttcttttaagttatctagcacacttatgtaaggatgtaaactgaaacactgaagaggcacaacaacggtcttaatctatgctctgggttgtatgagata

SEQ ID NO: 85834 - DNA, 195 bp, Glycine max
gaaagggaaattgaatatctcttagaaaaatgctcctttaacaaacagaaaagtgttgcaactggacaacagtagttgtcaacggaggattatttcccattgactttaacatatttgcagaagaaagtaaaacaaaaaagagactacgcttgttcggatgagattatttctgaggaaataatctgttaagattct

SEQ ID NO: 85835 - DNA, 418 bp, Glycine max
gctgaaagcatttttcattccaatttctaatcaaaatttcaatgtcacctactatcatatgtctaatgtccgtgattaatatagaacaatcacccaaaaataatgataacaagaaagtaatagatgaagaaaaaatgaaaaacctaggcaacaaacaaacaactaaaatgccggactagcaaattggcatcaacccaccaaaagaacatgctctttaaaataaatatttgcctgaaagtgaaactggtatggcatcttacctttttatttgtttactgtcgacctgatatggagggatgaacctcatatgttgctgcattgactatctctttttctattacattctgtttgacaatcaagccttgaaagctttacatttaaaatcattaatagcaactctgtcaaccaccttgtgatc

SEQ ID NO: 85836 - DNA, 469 bp, Glycine max
cacctcgtactggtccttaagcggcgccttttttttttttttttttaagataataataccatattggtcattatatcatattgatcagagatcacaaactggtacataaacattattatgacatcaaacaaacaagctgaaaaatgaacgtgattatgacttcaaactatcctgcaactctggcagataaacacaaccgacatttgactgcagatgcatcccatcccgtgaatgaaaggacgctatatgggcagagtctacatttagaggaagctgcacaatacaacgttcactgtgaagaggaaggtttttgaaagacaacatctctgagatcgacttagttcgataacattactattaactctaaacatgtgaattaggcttctttggatgatgttaacactacaagacattgatcttacaatgattaacattcacaactgatgcagcagatgcatataattacaac

SEQ ID NO: 85837 - DNA, 236 bp, Glycine max
caaaaaaaaaaacccggtgtttcccccaaaacccccctgggggccccccccccccaaatttttagggccccccaaccccccggccccttaaaaaaaaacaaaaattttcccctcccccccccccttttccttttggccacccccacaattttatttttttgtttccccccccaccccccctggggcaatttccacatcctttagcaaagggcctctccccccttcaaaagcccaaa

SEQ ID NO: 85838 - DNA, 143 bp, Glycine max
cgaacagggaaagccacagtcctcaaaccatgatcagctccatataacacaatggctgcaagacatacaacaccaagtgagtagtgacatgcaaaccaactcatgcacaactgacatgattacaactatgttgcacacaaaac

SEQ ID NO: 85839 - DNA, 459 bp, Glycine max
  unsure (1)..(459): unsure at all n locations
ccaaaaacaggagacgcngaagnnaggggaagacttcggaggaatcagacaagctcaaaaaagagtatactcagntcaccattgatttgggaaggcttctctatatttggcatcttcacatgacacatgctgcctatctgantaacccttgccgtgaacttaaaagttttgactatttattttaatgtatttttcgagatggagcagattgttttatttggagaattatttatagtgctccattttcaatgtgtgtttgagaaagcaagagatcctaaaagttatggttccaattagtacttgacgttacaatgtataattctttctttgcacttgttttacacatttttgtgttgtatgttctaatagttatcattatgtttaagttgtgtgctctatttcgatgtgctatgaattatttttgtatttttaggagtgtgtatgttttagtggatatga

SEQ ID NO: 85840 - DNA, 389 bp, Glycine max
  unsure (1)..(389): unsure at all n locations
atgtctcataccgcattgctggcatgctcctctaccttacataaaataccgatgttgatacaaatagcataaagaaaatgtaaaataaaatttgatgtgaacgtattaacaaaaatagattctcccatggatcatggcttgttgcgttccaatcacattaattnacatccccgaatctttttttgattattattaattcctacaacgaattacaccaaatagatggaatctattactttttaaagaatatgatgattaaagtatcgtataaattcttgaaacttatgctttatgatatcacgttttttagaatgagattcttttaattcatattttgctttgcgacactatatatatgagttattggcttgtacttttggtttcaattt

SEQ ID NO: 85841 - DNA, 212 bp, Glycine max
  unsure (1)..(212): unsure at all n locations
tatgaaactatangattatttgcatatagaaagctctatctgtcagaagcagatggctgagaaagcaatgtatataagaatacgagggaaatcttatatgacaagctaaatattatagaaagctaaaatctccttcactttctcttttcagaaattatttttaatttttattattcacttctttttacttatcattctgttggactatatac

SEQ ID NO: 85842 - DNA, 361 bp, Glycine max
  unsure (1)..(361): unsure at all n locations
gctggatcttaagggcgccttttnttgttttttgaaagccttttcaattaggagtttattcggatcaaactgtataaaacaaccgaagggttggagaaaaaatgtaatagaaaatagtaaattatgtctcgtgtacctattgcctgtaaacaaaactgctgttcttaatagcataaaggaaatatccagcctccgttaggtactatgcagtagcaaacagaaaccaaagaaggctgagcagggaatagctatctggcagctgatagcaccacctcataagctcatagctgctgatcaagaaaagattccttgggagttctggaggacataatcatctcagttacattttcagaaacattct

SEQ ID NO: 85843 - DNA, 134 bp, Glycine max
atttcacaaagcatcaaatccaatccatcatactcatcatgcatgagcagccatgttataacattcatacaggaagagaaaaaattctgtgatcgcataaaacatttatggaatgtttatgtggaaacatagca

SEQ ID NO: 85844 - DNA, 282 bp, Glycine max
  unsure (1)..(282): unsure at all n locations
aaacacaaccatcactaatatatataattngaagagaaattacattttggagcaaccaaccaaccaattatctactttacattgatttcactaattattatctcctaccaatcatccttgctatgatactatccctagtaataaaaacaaaattccgccagaacactgcaccaaaatctttgcttaagcgctttttatgcccgagctaaacacttccactactcatttatcaacaccattattaccaaaaagcattgataatgcacatccgacattgactta

SEQ ID NO: 85845 - DNA, 245 bp, Glycine max
catacaaatagcatttatttatagtaatagtaaaaagcatcaacttagctctgtatgtcccaaaagtacgaaacgattaccaacaagtaataacacacgggcagtactagttttgtagtttagacatcgacaaagtcatcagaatgtctaaccatacattattttatttttattgaataggaacatcacaatcacatattgacatataaatatatactacatttatattatactgatagactttt

SEQ ID NO: 85846 - DNA, 123 bp, Glycine max
gccaaacgagaagtatccatcgatgactacaaaccgtgcagctatccgtctttggtgtgcatgacttgactacccggatgtgggagccaaggttagtctcattaccaagcgctcatacacgga

SEQ ID NO: 85847 - DNA, 586 bp, Glycine max
aaaaaataatttcatttaataattaataaacataggacacaaataattaaaaactaaaaaattaataaagagtaacatgaaataagatgtgtgattcacaggttttttttttttattttaaaacaatcaactaataagaaagaatgtgtccaaggaaaatgtattcttaacatttgtctatttcaaaatatcatagtcaaaaacttgtcaaatttagaaagattaaataagaaaaaaaaaagtgagaggattcgatacataaaatattatataaactatttatttaaaaattaaaaattggggaaccaaattaaaataatgtaaatattttaggagtcaaaaacttaattataagcttatacatacatatatatatatatatatatatatatatatatatatatatatatataatattaaaaaatatatgaatattgatgtgtatttaaataatttttatatccatgtatttcttatatcatgcattttaatttatataaattctaactttaaaaaatattaatttatttctaaaatttccatattaaggtcttctacactgttaaaatacatgtattattttctc

SEQ ID NO: 85848 - DNA, 194 bp, Glycine max
  unsure (1)..(194): unsure at all n locations
taacatgcaaaattcatcattngaaaaaaaaaaaaaaaaaaaaaaaaaaaaaaaaaaaaaaaaaaaaaaaaaaaaaaaataataaaaaaaaaaataataaaaaaaaaaaggggcggccgttttaaaggatcaaaatttacttacccgtgcttgcaaagcaaaatcttttttatagggcaaccaaaattaaatta

SEQ ID NO: 85849 - DNA, 75 bp, Glycine max
ttttaaaaaatcaaagcttacttacgcgtgcatgcaacgtaataacttttttatagggcaaccaaaattaaatta

SEQ ID NO: 85850 - DNA, 162 bp, Glycine max
ccacgcgtacgcccactcgttcggtcatttactatgccttcacagggggtgatgaggttgcgtgctgagcttgagatcttggtccactacttgccctttatcttgttcacaatgccatacaacccgacttatatggggcggctgaaggtcgtggattgcaaa

SEQ ID NO: 85851 - DNA, 150 bp, Glycine max
acgatgggtggtgaaagctctatttgtgtcttttttgaatgaaggagttgctgaggaagcagttggtgccttagcctagattgagccgcagcctgctagctccatggcggtggtgaaggaggaaacattatttcccgaaattgataagaa

SEQ ID NO: 85852 - DNA, 207 bp, Glycine max
aaaagggatgctaaacatcgatccagaaccttctttaaacacaaggagaatgctctcgggggagacgatgatgggccatgcttgctagcccaattaagctatgaggatattgattatatttcacatattgaaagattccacaatcagatgtgctgtggtgatcaaacatgatgtcatataaagaaggaatattcttgcaacattaaa

SEQ ID NO: 85853 - DNA, 295 bp, Glycine max
acgatcactcgtgggttatagcaacgcttttattatcattagcatacattttgcaacactgtgctgtatcctatatcaaccgctctcaaacaaaccgaacactcttactatttctatctcatttcatttattaaacaaaaccatatttcaacaacatacttcgtacaccctctatagcactggagttgtacctctgatttctctaactctatcatagattgagaaacatgaacaatattcacgactacgattataagagactgggtcttttcaacttttaataatggccgtggaa

SEQ ID NO: 85854 - DNA, 396 bp, Glycine max
ctcactcgtaggttatagcaacgctttctttatcattaacatacattatgcaactcggtgtttatcctatatcaaccgctctcatacaaacctcacactcgtactttgactatatcatttcatttcttaaacaaaaccatttgtcaacaacacatttcgtactccctttatagcaatagacttgtacctatgatttatctaactctacctacgattgagaaacaagaacaatatctacgacaactattttaatatactattttatttcatcttttaataattgtcatgatgtatcacctatggaaaactcacattttattacgatcatgagataattctgcttcctgagttgattgcttgatatgatgaaaggctcactttaagactcatgttctt

SEQ ID NO: 85855 - DNA, 499 bp, Glycine max
aaaaaaaaaaaaaaaaaaaaaaaaaaatttataaaaaaaaaaaaaaaaaaaaaaaaaaaaaaaaaaataaaaaaaaaaaaaaataataaaaaaaaataaataaacataaggggcggccttttttgaggttccaaggttccgtccccttttttgcaccatattttcttttttttggggtcccctaatttaatttttttgtgccgcgttttaaaaccattttaactgggaaacccttgccgttccccaatttaatcaccttggggttctccccctttttccctgttggcttatttccaaatttgcccgccccgttgtcctttccaaaaacttgcccattttaattttcaaatgggaccccccctttatcggcccttaaaccccgccctttttgttggtttccccccccttggccttttctttttccaccccctttccccccccccttttcactttcttaccttctttttttgccagtttttcggttttctttttaaaactt

SEQ ID NO: 85856 - DNA, 351 bp, Glycine max
actttatttacaccacatagtcccacactctctctttacagaatgagatagacttcgggggggtttgatatggtagcgggggcctttgacgctaacttagaacgtgtgatgctattgaataacagcgagaatgagcatcactctccagatgactatgatgattcgcagatctgggaaatcgttcatggaaaagggggagagggagaagatgcataggtgttcgtacggatgatggtgatgataatttttattctgagaagatgaatattttcgaaagaagtttttatgatatacgacggccatgtccacatattatatcataaaaaaaaaatcatcttacaaggggattat

SEQ ID NO: 85857 - DNA, 291 bp, Glycine max
gatctgtgtccaacaattacattgagtcatacgtgattgattgaccctatgcgacgacttctatatttgctgcacagtattctccataacactacaagtaccttctttttgaccaaaccattttacaagaaagacccaagcagagaaccttctaaccctgcagctgcgatactgatgtgaaaccgaaatgtcagaacgaaaaagactaagtaacataaactaaccgttgggtggtgttgttggtgacgtggtatttgatgagatgtggctgtctacactagcgagaaacga

SEQ ID NO: 85858 - DNA, 247 bp, Glycine max
ccactcgttcgtccacgcgtccgttaaaaaaaaaaaaaaaaaaaaaaaaaaaaaaaaaaaaaaaaaaattaaaaaggagaagggtggtaattaataaaaagtgggcggcctctttaatggttcaatattttctttcgcttgcattcaacagtaatatatattctttggggtgcccttttatttaattaaattgcggttggtttaaaaccgtccgtctggaattttctttggggttacccaatttaat

SEQ ID NO: 85859 - DNA, 159 bp, Glycine max
gcgatcatatttacaccacataggacccaccctcaccctcttacagattggcaaggactccgggcgggtttgatagggttgaattcgcctttgactctcacgtaccgcatgggaagctctgcaatagcagcgagaatgagcagtactcgcctgatgact

SEQ ID NO: 85860 - DNA, 137 bp, Glycine max
  unsure (1)..(137): unsure at all n locations
gtccggaatccggtcgaccaagccttccgcgaacccttggccgaacccttggccggacccttggccggacccgtgggcggacgcgtgggaaaaaaaaaaaaaaaaaaaaaaaaaaaaaaaaaaaaagnnataaangg

SEQ ID NO: 85861 - DNA, 338 bp, Glycine max
gccccctcctttgccttaggaaaggtttgacaatttttttagatctacagggccggggtttttgaaactttatgtttttaaaaaaaatttttttttgggagcttaaatgccaaacaaagtgaattttcattttaattttggggaaaaaatggttggggaaatttaaatttgttggttaaaggtcgcaacaatttgggaaaatgggaaaaggcactaaataataatttttaaaagaggcttgtttttggtgacaatgttaaactttttaagggactttttagttgaggaaacttttcgggagctttttgcgaggaaactttctctaatactttgggggg

SEQ ID NO: 85862 - DNA, 338 bp, Glycine max
gcctatgctttagggccgggggggggcttttggggacccggccaaaaaagcccaaacctccgccacggggagggaccatcaaacaaacaccaaaaaaagaaaggaagggggaaaaagacccccacccccacctggggctggtcctaaacacggaaaaaaaacccggacgcggggggcggatcgggaggagcaggcgcaaaacccatccctggggcggtggaaggaaacgatgaaaaaagccgaggggacgtggacccaagggggggggggaaaagggccaggggccactgtaccaagagggaggggggcaaaagccatctaacccccaaccccaaggg

SEQ ID NO: 85863 - DNA, 223 bp, Glycine max
caccattccataaacaatcctttttttttgaaagattcgtttggactcccttttcccccaaaacaatatttacacccacccgcgaagggacccttaattggtataaaaacccaacctataaagttcctaaacattcccgaccttgggtgaaaggaaccttccctttttttgatgggcccaactttttttgttaaactattttacagatcacacgccttaattt

SEQ ID NO: 85864 - DNA, 315 bp, Glycine max
gagaccccccaatgggggttttgaaatcaacaaatttctggtttgaaaggcaaaaaaccccgcccccgggtgcccaaaaacccggaaaacaaacgggaaaaccccatcctctttggggaaaacaaaggtaaaaaagggtggtaaccccccttccttttcacaaaaacccacggccccaaaggggggccccccgggttcacccgggaaatcccgccccgcccccgggggcgaacccagattcccaataaggaaaatcccacgcgccccgcggaataaccccccctccctcttcctgggggaaaatgaaaaccgggc

SEQ ID NO: 85865 - DNA, 257 bp, Glycine max
aattataaaaaaaaaaatatttttaaatttttttttttttttttttttttataaatcacctaattaaaaaaattaatattttttaaaatttaatttttttttttttttaaaaaaaaaaaaattgattgtcttttataaaaaaaaaaaaaaaaaaccaaacttttttaaaaacacccccctcaaaaaaattttattttttgcgaaaaacccacccccacaaaagagaaatgaaaaagtttttttaaaaggtagggggg

SEQ ID NO: 85866 - DNA, 405 bp, Glycine max
gcaaaagcattcgtgtacacaagagtcatgatggtacaatacatgcaacacccaaaacaaaattgacaaagccacaagaaatcattagtctctgaccaattttttggtactcaatctttttcagcccaccaaatattgaaattggacaatcatattaaaaaaatcaacacaagtctacttagtaatggagtttcaaatcacacatctcatagaagttttcttaaccaaggatgaacagctgaaatacagcaagcattttattcactgccgttgcacaacaaccaaacccccacacctgacttgacttggcgagtgtttggatttccagtggagagggctccaacgtacgttcagagaaataacccattttttatttttgccctgaatgtacatttagaggggcta

SEQ ID NO: 85867 - DNA, 254 bp, Glycine max
gggggaaaaaaaacaaaaaaaaaaaaaagggggggttcccctttttatagaaaaaacaaaaaaaaaaaaaccgggaacgaaagggaaatttttaaaaaggggaaaaaagggaaaacccccggggggggggaaaaaaaaaaaaaaaaaagccccggcaaaaaaacctaacccccacggggggtttccaaaaaaaaaattttttaaaggggaaaaaaatttttaatcacgggggaaaaaaaaatttttcccccggg

SEQ ID NO: 85868 - DNA, 339 bp, Glycine max
ggtggcccacctttccctcctatgagaagtacttaaaactggccggaaaaacgaccatcattgctttttgtgggaaaaaattattctgggacaagggcacacaacaaactatccgggggaaaaaaatgtaaagccggcggggcctaataaggaagcggacaaaaaaaaataggggtgcgcccagggccccctttttagcaggcaaaaaaattgtggtggctgcattaataaagaatccaacacccggcgaaaagaggctggccccttgggggccacaaagggggctcttctcaccaaaaagaagggggacaacagatggccgttcttcacctgctcaac

SEQ ID NO: 85869 - DNA, 357 bp, Glycine max
ggggccccggggccggcccctgggttcaccccggaatttccggccgggtccctgagggggaccaagttttccttatggggggtggtttaaaagttgggggaaataagggcaaaagttgttccttggggaaaatggtattccgttaaaaattcaaaaaaaaatacaaccggaaagaaaaaagggaaaagccggggggcccaaaggggggacctaactaaattaattggggtgggcctaactgcccgttttcaagggggaaaacttgtgggcccagttgattaaataaatcgcccaccccccgggggggggggttttgcttttgggcccccagggggtttttttttttaacaaggaaaa

SEQ ID NO: 85870 - DNA, 364 bp, Glycine max
gagctaaaaaaatgctttatttttaataaaaaaattgggcaaagagaaagcccttaacagtccaaaccttttttgttcaagcgaaatgaatagtacaatcccaaactcaagcttttgggtaaatatttaaagggggggggtctttatcgggggaaaaaaaacacttttgggggtgaacacccttttgcttacaaaaacagacacacaaaggggtggttctggttgtataacaaaaaaggcgcttgcaacattccacgagctatttgggggtggatttactggcttgccattcaaaggtttaccaaccgatttttgaatgggaacccaatcccagtaaacagagtggtgcccaaaaccatgccaa

SEQ ID NO: 85871 - DNA, 226 bp, Glycine max
ttttattttgggacccacccaatcccttttttttaataaaaaaattgtttttagggaaaataataaataatgaaaacattttctggcccgggccaactaattgtacctccctcccttggaaaaaaataggtggcttttccaagggtttagcccttttttggggtgtataccaaccctttcgcggctttaaaacttttttgatttaaaaaaaaaaacccccttcccc

SEQ ID NO: 85872 - DNA, 332 bp, Glycine max
  unsure (1)..(332): unsure at all n locations
ccccccctttttttttttttttttttataatattaatttatacagtgctttttttacacattgtttcctcactttccttttcctcatcatcaacatttttcttaaccaaatctaaacaatcatcacaaaactactatcaataaccaactcatcccttctctctcacttctaaaaaaaatcattctcccctcaaaatcaacccanntaccaacattttttccaaacctttccctccctttaaactccttctattccaaaacacaatcccactccacaacatccacccccaaattctctttttcatactacaactaacactcttttaacataac

SEQ ID NO: 85873 - DNA, 346 bp, Glycine max
aatataaaaaaaaaacaaaagggggaacaaaaaaataacctcccaaaaaaaaaaaaaaaaaaaacccccccctcttttttttaaaaaaatgcccgcccgaaaaatgttagactaacaccggttcccaatgttgacggaaaaccccgggggaaagaaaaaggctctcaaagcccctcccaaagtgggcaaaaaaaaaacgcgccccaaccaaggaggaacccaaaggcgctcccaatggccaaaaaaacaaaaacacggggccccgaaagttactgggaatgggttttctgccaaaaacaaaaaaaaaaccgggaacaccaaatcgggtccccccccccctccccct

SEQ ID NO: 85874 - DNA, 396 bp, Glycine max
taaagaaacagtcataattcatcgggttggaaaaagaaattccaatacattataatccacccacattacggggaaaaatggaatactaatagattaaccaattgatgcttacgcttataaatactgctaaaaaacaggtgcctcaaccaaggattgaaagaatgctcccacaccccaggagccatttgacgcacgtttataaaaaaaaaatgcccaaccttcagggaaaagggaaaaaaatctcgtgcctgcaaaaataattgctgggttgaataaaccatatgaacgggacaaagctttatcataagcggacgcatattcgtctataataccaagaaacgaaggtttttcaaaagaaaattgtattttgaaggggaggaaaatatttttcccaaa

SEQ ID NO: 85875 - DNA, 372 bp, Glycine max
gccaacttaattgaattacaatctttacctcccacattacattatttgctgcaaattcaatacattaccaaaatcatacatacctgtaaaattactggtaaaaaacaaatactccaacaaaggattagaagtacactacccatcacaggatccatatttcgtacgtttctaaagaaaacgtgtcacacttacagggaaaacggaaaagatgcacatgtttgcaaacataatagcaacgttgattaatactaatcactgagacaaagtctttttattcgttgacgtatttttctcttttatttttagttgcaaagttttttcaaatgcaacttctatgttcaaggggagatagcaatagttcccaaaagagta

SEQ ID NO: 85876 - DNA, 258 bp, Glycine max
  unsure (1)..(258): unsure at all n locations
ttgtaatactagcaatttcttgggggatatactcagtaatgacacaatacaacgcannaaacaccctattttttggtacacaattaagcgtcttgctcacattattgtgcatcataacaatgattttactagtgcatacaacaacatgcatggtaattactaagcacaataccattttttggaagagatctccaacattttcaggattgcgtaaaggtttaacctaaaaaatttactgtccctttcttttttcaaaaa

SEQ ID NO: 85877 - DNA, 313 bp, Glycine max
gttgaattatttttttttttttttttttattttttttttttccgggcccggggaccacccccaaaaatccggcccggaaccggggggggaaaaacaattccctaaagggaggggtttaaaacactggccaaaaaaaggaaaaacattttttccggggaaaaaaaaaaaaccgggcaaaatcccggaaaaaataaaagccggaaacataaggggaaaacccgggggcggcccaaaaaaggacccaccccaaaaaaaagggtttacccccaccgccccttttccagggaaaaaaccgggggggagggtttgaaaa

SEQ ID NO: 85878 - DNA, 365 bp, Glycine max
attaaagataaaattacatcgcaaacaacccaaataaccaacgagaacatgcttttattacactcaaatcaaagatcaaaaacactgaatagaaaaggggcgaggattgtccaaataacagaggaccggccactagaggggggaagaccggccaatgccaacccccaccctggagacggccgggctcaaattgggccccacccgttttcgggtcctccgccgtgggcttgaaaaacccttgccatgcaaatgcccataactttggatgggaaaaaaaggcgaggtgggatccgcgtaaaaactttaagcacgtttttattcgggagcctctgcaaaaaaaaccccccctcaagaagaacaaaagg

SEQ ID NO: 85879 - DNA, 250 bp, Glycine max
aatgaataggggtttttttacctgaatatatttaaaaggtcggggcgggggaaccaaccaaaaccaagggaccagcaagcaaacacggaccaaacatcggaaagaagagggtctgtacagattaggactcacagcaaataacgaacatacaagaacaaaacggggacaaaataaaaaagcggaagaaaacgggaaataaagaactaaactttaaggaagcacgagaggaggggaaccttcttaaatagga

SEQ ID NO: 85880 - DNA, 302 bp, Glycine max
ccccccaaaaaaaaaaaattttaatcccccccgggggcctttttttttttttggcaaaaaaggggaattggcccttttttcctaaaaaaccccggttttttttttttaaaaagggggggggaggggttcttttaaattccccctccacggtccgggggggtaaaacccccctttcccttaaaagggtggttttaaaaaagccccgggttccccccaaatttgccccaaaaaaattttttttttacccccgcggggcccgaattgcctgaaaaaaaaaccccccttttgggggaaaagggggg

SEQ ID NO: 85881 - DNA, 400 bp, Glycine max
acgagcaaaagtaatgtctctattgaaaaattcaaaagtaagaaagaagtccactacttttgattgaagactttatgatcaataaataaccatttcttcaccaaaaaaatgacgtacaattgctatctacttttttgctgtatcacaacacagtacatagatgatgacactgaaactaattagctaacgttttttctttctacttcattttcatgatcaggactgtccaccttcgaccacctgctaatacgcttctgagcaatggtaacctgctcgtcccaattagttttgtaggtgattacaattagcactatagtttgaatcaacgttccaaacaacattccaatccagattccctacaaaagtgaaaaagtttgttcaatacaggaagcagcataaa

SEQ ID NO: 85882 - DNA, 336 bp, Glycine max
aaaaccctgggggggaaaaaaaaattttttttttttccatttcttttttatgggggtttttttttaaaaaaaaaaaacccatatccggtttttaaatttgtttttgggaaacaacctttttttttttttcccaaaaaaaaagggggggctcaaccgccccggggggggttaacctttttaaattgataaaggctggtttttttttttaaagccggttggcaaaattgggttggaaaaaaggctttttggtttttatttttcaaaaccaaatttggtgaaaatgaaatgccaaccccaatcgttaagtttgtgaattcaaatttttttttgaaaagc

SEQ ID NO: 85883 - DNA, 406 bp, Glycine max
tttgcaaattttttttttcagtgggggaggattttcacggaggtttctcaacttgcccacccagtgtacaaaaaatcaaacagaatgataaacaatttttttttacgagggattttaaaataacaaaacacccacctttctcggtacataaactttaccatcctaaacaaaatttacagttctcaacaaatcaatcagggcaggactttaaccaacggggggggcttaacaatcttaaaaaactccaagttattctcaaatggtgacagcgtcaaatccaaaaccgaaactaaattggggtcagcgtttttattgggtgaagaatcaaaactactaccggcactactactactcgtggtcgaagcataaaatgtcactttttttttcaaacaaatttgtaaaattt

SEQ ID NO: 85884 - DNA, 444 bp, Glycine max
acggcataatgttgctggccctactatcttttcttttatgaactctgcgcacaaactcttgggcggggaactaatcaattgtggtgatgcactcctctttcatacttcataagaccagacacaactcctaaacctctccctccgcaacctttgatggtgtatacaacagatacagtgttccatgcttcttccccatacatcaccaaccacctcttctgctttctttgcaaggacagaggccagtttgaagacgatataaataagagctttccaagcagcataagaagagtttttgcatatgatgatggaatgatggaaatggcatccacagataacggcaaggtgtttcaaatatgctctatcaccctattacaaaggaaatgactatggtggtcatctcactgaattcaaaggctgaaattgatctcttagaatatgaatgat

SEQ ID NO: 85885 - DNA, 380 bp, Glycine max
ccaacgcttccgcaaaaagctgttcatccttctgttggatctgccagtgaatagtgcgaacgaaattggttgccacttcactggacactctactgagctcgctcgataaccacgtcgataacggctgcggctgcgcgtggcagtacctatggctcgtgcgaaagctgaaagttcaacggtcggagaaaggtctgtatcatggtctctatatccttaacgacccctaacaccgatcctatgtatgctcctatgaatagaccttgtctgagcatgctgcagatgctgctatggattgccaatgtctcgactgtgccaaggactgtacaaaggttcttcacaagagattcccagatagtaaactagttgctatgctggatgca

SEQ ID NO: 85886 - DNA, 79 bp, Glycine max
atataaaaagaaacaaaaatacaaacaacggcaatgcggcgacataatttttatattctggcatctccttcacttactt

SEQ ID NO: 85887 - DNA, 509 bp, Glycine max
ctccacaaaaacaaacagaaccacaaatacaggttttgttgctcttctgctcttcttggcggagagagatagagagggttgaagacgatgttctgagaggaccgctttatctgaaaaaagatcttggttagctgtttgtcatctttcacagagagagagagtgagagactatttaggtgtaatagaaaaagagtgttgtctttagaagtttgtcactttacattgaatgccattatttatttctctctctctcttgcgttactcgcttcaggctatattactataaccgactccatcttttaccgcgggagacggaaatgaatttcacaagtggaagatgacacagaatgcactaggagcatatttactttcagacagatcatggttcttgatcagaaaacatctaaaacaaaaacttatatgttttttcttgctgtaaaaatataacatcttttttttattttcttgctgacaacaactacttcccaatttgaaccacttccaccacc

SEQ ID NO: 85888 - DNA, 332 bp, Glycine max
aaaaccgcggcgaggcacgcgtacaggtgttagctgtgccgacttttacgtgactttatttcctgatcgtcctgattaaaaacaggagaggagtttcttaagggggggtggtctttaattaaaacggaaattttcttttgggagtacttgctacttccagatccataggggatcactgcatgaaacctttttttatttcacaaccagaaaccaaagtgtacgcactaaaagagtcatatgactttgtggtaaaggctacatgacatgcttgagcatgtcgtgtctaacaagtatgtattatattttgtactatgtttactccattgcaaaat

SEQ ID NO: 85889 - DNA, 441 bp, Glycine max
cccacgcgtccgttagtgttttgttagttcacacactaagttctgaaaaatgagttccaaagttttgcttattctacttatgttcatggccactatacttttgatctcctctgaggctgcacccgatgatgcataccagaattttgacaaaacagatgggaagcgtagtgcaaatggtgtagatgaaagcaaatattggcgtggcggctatggcgactatggcggttggcgtggaggtggatggcgtggaggctattgaagctggcgttgcggctatagaggcggacgatgcggctattgaggctggcgtggacactattgcggaaggcgttgcgtctacagatgttgcagtggaggctttggtcctaacgaacataacgaggctgggatcgatgctactgctcacagctcagaacggaacttgctagagcatacatacga

SEQ ID NO: 85890 - DNA, 421 bp, Glycine max
cccatgcgtccactctacctgccaactctttcgtacatttttttataacccccaattctaaggcaacacagggggtgttttcaacacatacagacgacacatccttttgtatatttcgacttctataagtgtctaatcttcctcctcaaattgatcccaatatcacaatttacccaattctgatgttattcccatcttgctacatccactacaaggatttatttaacagaccccccttcaaaaaaatattttcctctttctcaacattattacaaatctccaggaatcaaaaaaatgtccctaactttaattgacccttccaaaaacattacttggccttaaaaactaggaattagacgccttcttaattgagtttttgcaaaaaaaggttcatttttttttaacacttccctattttttt

SEQ ID NO: 85891 - DNA, 596 bp, Glycine max
  unsure (1)..(596): unsure at all n locations
ctctacctctttctcttttcttcatttccgacgttgcctcaattctcagtaaacggaattggttggtaccacacatacaaacgacgcatccttctgtttctttcggcttcgatttctctctcctcttcctcctcaacttgatcccaattccactagggattcaattctgatgcgattccgagcttgttagatccacgacaaggtttcatttcccagatttttttgtaaaaaaaattcttcctctgtctcaactttcttacgcatttggaggaagcaaaaaagtgttggtagctgaaattgacgctcacaagaacaagactttgccttaaaataaagaatcaaacgcttcctggattgggttctcggaaaattaggatctgctgcttcagtgcttcactattttttttgtcttgaggagcacttggtgcaacttttcttgttctacacaagattgaaaacaagaggtcctctgcttctcatcaatgtcttttgagggctacgaatataaagaaagctcggngatcttatttttcggaggaggtaactaataaggctttgtgtcccattccttggtcttcccattttcgggatcttat

SEQ ID NO: 85892 - DNA, 350 bp, Glycine max
acgctctacctctatctcttttcttcatttcctattctccctcaattctcaatcaacggagggggttggtaccatacatacagacgacacattcttctgtttctttcgactattattactctatcctgttcctcctcaacttgatcccaattccactattgattcaattctgatgcgattcccagcttgttagatccacaacacggattgatttcccagattttattttgaaaaaaatttttcctctgtcataactttcttacactttaggaggaaacaaaaaaatgttgttagctgaaattgaccctcacaaaaacaagactttgccttaaaatcaacaatcaaacgct

SEQ ID NO: 85893 - DNA, 300 bp, Glycine max
ggaattccccggcgagccacgcatacaatatccattatgccataatcactgcattattattcacacctctcatcacacacactcgcaccaattttcatgatgtattctcactcccccacatatcaacaaaatgcctattactttttattgataaagcagacaccttcctttaccagtaactactcaatcctttaaaatacatattcaaaacttatcctataaaatataactatttaaactactactacatattcaagaacccaaaattttctacctcaaatttatctaacatcataaaaa

SEQ ID NO: 85894 - DNA, 96 bp, Glycine max
ggtatgacagtgttttcactacgtggaaacgttatatgtggtaaacttgtactcgtatcatttcgtgataataattaaataaaatagtggttgtgt

SEQ ID NO: 85895 - DNA, 508 bp, Glycine max
tttgcaataaaataaaaggctaaataatgacaaagcttgaccaaccggggcaaattctaagctaagattaggagcaagtgagtggaagagaacacaacagggaaattgttgattaaaaaaaatacttggaagttcaaacaggttaaaaaacaatcactcctaagtgagacactgacagatataaaattcatttccaaaaaaaaataagacataattttcagtggcctctacagctgcttcaccttaatacctaaagcctttgtaagatatcaaaactatatataattgatctagtagtagttaaatgattcaatatccaaagtgaagcattattcaaactgtttcatttctcctagcacgtgacatgcataaccataattgattcaaaaactatctatttttgttaagtaaaacagtcatagagtaaactacagaaatctagcgatgtaatagattctaatgtgggtgacataaattgtattttattacttattctctaagacactaa

SEQ ID NO: 85896 - DNA, 190 bp, Glycine max
cttttttttttttttttaaatagctaagccttgttatttattgttaacatccaacagggcaaaatattacctaccataattattctcaaaccaagacttattaactcaattctcattccaccctacttcttaaaaaaaaaagcctcttaaaccaacgccctaaaattttttttttttaccaacatttttt

SEQ ID NO: 85897 - DNA, 254 bp, Glycine max
aagcaaatgagctctttatcgaaattttagtttctgtcaatccgcggtctgtttttgatgcaagcacatccaacatgtggctctcttgaaccaattttccatgcaaccatcacctacaattcaccatatgttctattatgttcccactacctggattttcaaaataaatcgtacatcgtgcaatacctttgcaagcaaggtattatttcctctctccacgtccaccaaagagattacttacaaaataacctcct

SEQ ID NO: 85898 - DNA, 329 bp, Glycine max
aagagcaacaaacatgattgtaatactatctatccatgattgctgattattattcataacaactaccagctcatgttattagagtactggacaggattttacagccagaccatcattctttatgtatattttataaggcagcagcttacacatctgatatattattatctaaaactgctatcatgttatgaccactatatgtgggaatgaaatcagaatgacctggtatattgtctactcctaagataccacacgcacctcattgtgacctacacacaatacatcaccatgcccatcaagcatacgcttcccttacaagcgtgagggac

SEQ ID NO: 85899 - DNA, 391 bp, Glycine max
atcaaaaaactccaccagttcttattaattcggtgattttttataaaatataacttatacaaactcaaccaactaaatcggcctaacgataaaacatttggatgcttcatacaacattttaagtgcacaccttattctcgcccttaaaaaaaacaaaaaaatcctttcaaattctaaatacgaatgatgataacacattggtacttttctagctgggcctggtgcaacaaaacctaattacaccttgatttccagttttaacaccaaccctttccaacttaataacagcatcaacaaaaactttttgaaaaactccttcatttgatgcaaataagatgactgttgcacttttaccttgcatgtagaaacattacctgttcaaaaatgaaga

SEQ ID NO: 85900 - DNA, 435 bp, Glycine max
agcggacgcttttttttttttttttttttttttttttttctcacacccccacatcattatttaactaccgttgtttttaaaaaaatattgccccccacaacctcaactcaactccagtaattctcataccgaaaccttcaaacgtaccatccttcactatagggacacaccttatatcttcccgtaaaaaaaaccaaaaaattctcccaaattctaaatataaacgatcacaacaccacacaacttacctacctgaaccttaaacaatcaaacctaatttcccctataatttcacttacaacaccaaccctccccaacctaactacaccctttccaaacctaaaccaaagctccttcttaatacaaatagccaccgcccctttaccttcttccgttacacaccttatcagaattattataccctaccacctccac

SEQ ID NO: 85901 - DNA, 142 bp, Glycine max
taaatcaacaaacttttttattataatatcaatccaatacttcgtgtgattttttaaaacaactaccttctcctcttattataaaacttaacaaaaattttcaaccaacccttcatactatatgaacattttctataacaac

SEQ ID NO: 85902 - DNA, 403 bp, Glycine max
gttagaattctccaaatcatgcgccgcaccttctacatttccatcctgtgatgattccaaaactaaggggttcttctccatatgatgcttatactttcctggaacttcatttcttctatagcttcctgctgactctgcatccctccatacatcaaaattagggagctgcttgctgctttgctggctgaaccatgcagtgcctgaatttggcaatgtagcaataccatttgtaccagaatcttccccacaaacctgcatattacctgcagacttcacatgttccattccaacagatgaattagtatcagaatcaggttcccacatagcatgaatcctgcccatctcctcacacatagctttctcgtgatggggctgcgataagttttcacttttcatgggtttt

SEQ ID NO: 85903 - DNA, 239 bp, Glycine max
cccccctataaaatccaactactaccaacaaaaaccccgcggttttctaaaaaaatgtgttccctacaactacataacctattaaccttttttcatacccaatttccttataaacatttttttatcttacaccaaatcacataacttcatcaaccaactccacaaataaatcccattatattcctcccttataacatttaaccctattactctaccctacatcactccttatcccatat

SEQ ID NO: 85904 - DNA, 70 bp, Glycine max
ggccacgctagaacatcagtatttaaaaaggggggtgttttatgttggaaaccgccagacgcttatactt

SEQ ID NO: 85905 - DNA, 236 bp, Glycine max
gttgaataattaccccgggctttttttggttttgatagtggttacaaaaaaaatcaaaaaccggacacatagctccccacattaacggactcttgggttgacctggtaaaacgcaaacgcaacctgcaggcctgccagatcaccctatacggacttgtattagacccagaccaaaccagcgtcatcactcatgcttttaccaacattgaattgggtcactttaatatacaacagcc

SEQ ID NO: 85906 - DNA, 207 bp, Glycine max
ttcgctgaaacggcaaaaatacatcaaattaaaacatcacgaggggcgggccttatactaaaattgcactgcgcagaaaaatggaaaacagctactcaaacatttcagccttgttgaaacattaaatgctgggaatcctaattagcaaactccaacaaagatgttgacttgacgcttattgtcaccaccaatgtaaaagggcttgcg

SEQ ID NO: 85907 - DNA, 326 bp, Glycine max
ctgcccaaaaaatttttttttgggcattggcttccatacccaaattaaaattttaaaaaaaacatttcaaaatattacaaaaggcccatgttaacttttcaaaatttaaaggttgtccccatttgggtttgaagaaacaaatattaaaccttttactttcccccataaagataatttcaaattggcccaagaaaaaattttattttttttttcttaacaggaaaaaaatcattttggacaggcgatttttccacacatttcatgtaaaatctatggggccaccgcgtttagtcttttgcaaaacccccttctttataattctgaaa

SEQ ID NO: 85908 - DNA, 196 bp, Glycine max
gttggaaagccccaaaatcaaactgggttttaaattattagggcgtaattggggacatactttgtggaaaaatctcttgaaaacagggaacgctaaaaaaaattggcctttcaaccttaacaagatccggcccatttttttcctaccgcaacactttttagtccaaagcttttgcgcttccctctccccccgaaaa

SEQ ID NO: 85909 - DNA, 77 bp, Glycine max
cggacgcgtgggcggacgcgtgggttttttttttttttttttttttggggtttttttttattttttttgttttatat

SEQ ID NO: 85910 - DNA, 380 bp, Glycine max
  unsure (1)..(380): unsure at all n locations
gcggccgcttttttttttttnattttttttttttttttgggagggaccccgaccctatatccccggggaggtgtgggaaacagggggtgtccccaacctcgccctgcacggatgggtattcaaaaaattcatagaattaaactactcataagtgcattcgcccaaaaaaatcataagaaaatacttatgagttccgtttgggctggaacaaattccgctttatttaaaacgatacatgatatgaaactaaactttgaaaaggtccttttttatgtactccaaaaatcggacggtaccctctcttttaatgccgactcatatatgcgaaaggaaagattcactgtccagaatcattcatcctcgaattccacgaaaagatt

SEQ ID NO: 85911 - DNA, 334 bp, Glycine max
gtacaaaaaaccacatttattgtcaaccgggggggtttataaaactttttaaaacgaaccatccatggatagaagatgcgcaaacataatttatgtgctgggtcgactaccatgacggaacgtgtgctagaacttgaagaggaggaactcttcaatgggaggcaccgctctcatatcggcaagagccttcttgcttgggtttgtataaccacccatggccataataaccttgttcctacgcgaagaatttgccggacacataaagtttaaagccacgttatgtacacccagtgtggctccaacacggacaaacatgccgggctgaatcaccttc

SEQ ID NO: 85912 - DNA, 120 bp, Glycine max
tttcttattcacaaaaaaaataaaaagctaaactacttccatgggggtttttatcaaaacaccccccataatataccaataaaaccatcattatccttacatctaatccaaaatcacatc

SEQ ID NO: 85913 - DNA, 289 bp, Glycine max
ttttttttttttttttttttttttttttttattttttttgacccgggggggtttttttaatagaaaaaacccggacccaaaaatttaacccacatactttcattaaaaccccctcaaattgactaccaagaacacttttttaagaccttaattgttcatggaccaaaaatccaacccctttaaggcttgaccctccccatgtaatgggggtaaaaatttaaaagccattcttgaccccctaacaaaaatatggaccatctacctcccctcccaggaatcccccaggggg

SEQ ID NO: 85914 - DNA, 348 bp, Glycine max
gttggaaacacaatcttctttaaacaaccaggagggttgggaaaagccggggaaaccaacaaaggatcgggacaaacaatacctttaacgctatatattgttgagacatgtaccaatgacccaactaactactcacggtaacagaaccccctttaagattaggcggccctgcttgaacttaacttatagaaagtctatatgatcatgcctacctgagagaagggacatacgtgcacgctttgaacttctaattgacaatgttttattaatgatcatgactacaaaacctgaataacttactctggttcatcctaatgttgaacattgaagacccggactaatattgat

SEQ ID NO: 85915 - DNA, 288 bp, Glycine max
ttttttttttttttttttttttttttttttattttttttgaaccgggcgggttttttttatagaaaaaacccggacccaaaaatttaccccaaacacttacatgaaaaccgcttcaaattggaaccaagaacgcttttctaagatcctaatggttcactggccaataatccaacccggttaaggtttgacccttaccatggaatgggggtaaaaattcaagaggcgtccttgacgccctaaaaaaaatatggaccattttccttccctcgggggattcccccatgggg

SEQ ID NO: 85916 - DNA, 182 bp, Glycine max
caaaaaaatgacactcatcaatccttaatttcacctaccttttcacacatattgaattaattaccaaaaaaaaacatctgcaacaaagtacaatttttattcaaaaaaaacctttcccaaagcaaaaacataacttaaactgattaaaaaaaattaaccctaattattccatatccttctaa

SEQ ID NO: 85917 - DNA, 176 bp, Glycine max
agttaaaccaaaaacatttctccctcttgaagtattttctaaaaacactttttcccaaccaagtcacatatttaaacttcttataaattttcataccttatacatattgttcaaccaaatattttttaataatttccacacccataattaacaatttttaatacccaaaaccaaaa

SEQ ID NO: 85918 - DNA, 450 bp, Glycine max
ggcaaacaattcgagaaaatccatttcatttacattaaactccatccaaaatgttggccacaattttataaatgaaggccgccacattttcatcagcagtagtaataattggactagggggtccaatctttatcgaggctttgtaagggtcctgtttgtgaactatacacacagtttgtgatttagcatcactcacaccatgttggatatttccactgatgcccatttttgataatgcagccctaagtttttttgaatcaggcaaaccccaatgtgccaaagacctttttttactcaaggggtttttgttatcattatcaaatagcaagggatgcctaccattttccattaatagctctcccttcaattttgctatattgatttcttcctttttgaatgttttccaataaaagggggaagccaaatcagttgcaatttttaactctgaac

SEQ ID NO: 85919 - DNA, 353 bp, Glycine max
ggggaaaaaaaaaatttaaaccccctcaacgggggtccaaggggcaattttttcccctttgggggaaaaaaaaaaaaccccccccttggggtggcaccaaatagggtttgggattttacccccccggacccctttttttgggtttttgaaaccccccccccccttaatttgggggggggaaaacccccccccaaatgtttttggggccccccccctgaaaattaatggccctttttccccccccttttttttttgggggggcaacccaaaaaagggttggggccccccccctaaaaaaggttttttttttttgaaggggggccccacccctttgcccggttttaaaattgggg

SEQ ID NO: 85920 - DNA, 356 bp, Glycine max
aaatgcatactctttattaatgtcgagatccaaactttaaagacggggatactgaactttattatccctggtcaccacaagaagctccttagatcacagcatatagctaatggactcaacaactaacaacactggtcaaaagtttacacttcatgttcccaccctacaaggtatttacccctgaccattaaaaaaccccattccgaaaacatcttcaaaaccacttctttcaaagtgccctcattatatccctatacaaggcttggaaacccctgaacattcgtctctcacacaattttctgatgtggtggaacaacgacctatctaaacgaggcatccatatgcctgtggaacct

SEQ ID NO: 85921 - DNA, 340 bp, Glycine max
agcctccagaggggccgcccacctttttttttttatacttttttattcttttttttattttttttctaattattttatctcgcggctttttaaaaaaaatgctcccatttacattaaacttcatttataattttaaccacatttttttaaattaattcaccccactttttcttaaccaatatttattttttttctatatatctcaaactctatctattttttcaaacgcaaccattttttaactatacacactatttccaaattaattttactccccctcccttatttcttttcaccttctcccctacttttataaatcccccccttaatttttttttta

SEQ ID NO: 85922 - DNA, 336 bp, Glycine max
gcagcgattccaatgaatcttataaactgggggaacttttttaaattttccgatcttttttccaatcccgccattttcttaacattaaaaaaaagggggcggggctggcgtttacttcagccccccattttcgatctcaaaacacttgaacttgctgaaaggcaatacatgaccacttttttttaaggatgttggtttaacacagaacaccataccgcacctataccatcccatacattttcccaaaattcttagctacacattaatcgaatttttttttgcctgaaagagggctttctctttctgtaacttgcatttccatcacctaccttgcac

SEQ ID NO: 85923 - DNA, 269 bp, Glycine max
tattttttaattattttaaccaagcacactcaacttataacttaggggaattttatttattctgcccgccccacatattcccacttacctttacaagaaaatttatttcttcactcccccatttttatttaccctatcttaattctttcctaaataaacaaataaccagcacttgtattttttcattattcaactaactcctccctaaactctttaaacctactctccaccattggaatgcaattaaaaccaaacttactcctttttaa

SEQ ID NO: 85924 - DNA, 481 bp, Glycine max
  unsure (1)..(481): unsure at all n locations
gggggttattttttttaattaaaaaaccaataaaaaaaaaaaaaagaaaaaaaaaaaaaaaaaaaaaaaaaaattaaaaaaaaacaaaagttaaagattaaaaatgtaaaatttttggggggttaaaaaagaggaagggaaaaaaagagaagggtattaaacggggccttgcctgaaaggcgtccccgtaagaaattttttttttttaaaactctgttaaaaaaaaacaattttaaaaaaaaaaggggaaaaaaaaaaaaagggccactaagcaaatttcccaaaactgggggtgaaaaattttgggaaaaacttttaagaaaaacccctttttttagttctggaaagaaaagagtttgaaaataactaaataacccaaacaatnttaaccccaaaaatttttttttttctttttttccccggcgaaatttttggaaaaaaaaaatgaaaaaaaaatttaacgcctttttttttggcccct

SEQ ID NO: 85925 - DNA, 471 bp, Glycine max
  unsure (1)..(471): unsure at all n locations
tttaaaaaacggcagtggccaactggccatatctacattttgataacagcatgagcacacttattacagaaaaaagaaaaagtaaaaagacattctaattttatacatataaatattcaaaaggtagattctaacacattatacatgtaactttatcctatcattttctgcatagcgataattttagagttggctgatttacccgtcacaaaaattccgggagtggccaaaattaaagactgaaactgaaccgctntgtgcgcagatcaactaattagggcgcgttgttatccgttgacagagattggagcactgaaaacnacacacattaagcatacccagttttaccgggaactctcttaccggtgataaagttctcaaagagtggtaagagaagaccacctgttctcgcacgtgctaacagaagatacgtatggctgccacaatgggagaagggcatatacattggac

SEQ ID NO: 85926 - DNA, 412 bp, Glycine max
aaaaaaaaaaaaaatataaaaaaagaaagtttttaaaaaaaaataaaacttaaaaaaataaaatataaaaaatatataattaaaaataataaaaaatataaaaaaaaaaaaaaataaaataatatataataaaaaaaaaaaaaaaaaaaaaaaaaaaaaaaaaaaaacataataaaaaaaataaaaaaaaaataaaaaaataaaaataaaataaaataaataaataaataaaaaaaaaaaaaaataaaaaaaaataaaaaaatataaaaaaaaaataatataaaaaaaataaataaattaaataaaaaaaaaaaaaaatatataaaaaaaataaaaaatataaataaaataaataaaaaaaaaaaaaataatataaaaaaaaaataaataataataaaaaaataaaatataa

SEQ ID NO: 85927 - DNA, 268 bp, Glycine max
aaaaaaaaaacttttttttcacatgaagagttttttaaaaacacctcaccccaaaaacatccctattccatatccctaacattcaaactacaataatacatattcaaatccactaatctattataactacaattctacatcaatacaccaccccaccatatacattcatctcttatttacttcccaactaaactagtatccaaaaccaaccttacaacttttaactatctttatttaactaaatcttcaacatctcaaccctcaaaaa

SEQ ID NO: 85928 - DNA, 387 bp, Glycine max
cccaacccgggccccttttttttttaagggcccccccccccttttaaaaaaaaaaaatcccccccgggccctccccaaaaaaacccccttataaaaaagggccccttaaattttaaaaaccccccttgtttttcaaaaaaatccccacccctttcccccaaatttttggggccctatccccttaaaaggccacccccccatttttggaagttttcccaaaaaaacccctaaaaaaaaaacctctttcccctaaaaaaaggggcacccaaaggggtgggggagggattaaaccccccaaattatttttggcccccactttggggcccaaaaaaaccccctttttttttggggttttggccccccccaaaaaaattttccccctccccc

SEQ ID NO: 85929 - DNA, 390 bp, Glycine max
aaaaaactgttgtggccaactggccataggaacaaaactattgcggtttttggtcaaaaattccaaactatttactctgttgatggacggcctaatattcttcttttaagaaaacttgaggtcctttctaacaaattgtacacgccattctatcctattatcagctcactttctgtcatcttaaagtttgtttactaaccctaaacacataacatttgacgcttcacaaattacaccactggacctgggccaatgtggcgcgcatattcaactacataatggctcgttggaatatccaaaagagcaaagcttttgacgctgcttggataccaacccaccttgagcattgcccattattctacccgtgaactaacccttcatccggagaaa

SEQ ID NO: 85930 - DNA, 268 bp, Glycine max
tttttttttttttttttttttttttttttttttttaatttttggggggatttttagggggaatcttgggccaaaccccgggcggaccccgggataaaccaagaaattcctgaccgaaaccagatgcaaacaaattcatacaatatagagttgaaataaaacatgggtaaataatggacaagaaataatcctttgtcaaaatataattccaaacaaaatcacaaaaaaaaaaaaaactgtaaaaataaaggggaaaaaaaggggtgccc

SEQ ID NO: 85931 - DNA, 267 bp, Glycine max
accgacgagtcctcccacgcctccgactattaccagccttcaaactttgctatgagataacatccatactaacggggctctgtacaaaaaatggtgttacaacgctaatattactccgacttgttcatattaatgccataagacgaatctactttgatgttcagacacctcgtttgacccatgaatacagccacattgtaccttccataattactattctctgttgaaacaaataagcacctttatacgaacccttattcccaacat

SEQ ID NO: 85932 - DNA, 398 bp, Glycine max
tccggccataaccgttttcgaaacatttctatttctgaaccccggtattaacggggggcttaacataacagggggttctctttctctttttcaaccaacttgtaactcgaattattattattataaatcaatagaaagacaggaaccaaaactaattaaaaaccacattcacattattcctccgaagatgacagtgactagtggagaacaaaaaagcccctgtggacgagttcatatccaacacaggaccaaaattgtgcttccagattttctccagaacgtgaatcttatgtacgtgaaaatatgttaccactacttgttctccaaccttgtacattattcctagtccctcttatcctagaaaaactcattaaggttttttagaccaccaacattta

SEQ ID NO: 85933 - DNA, 434 bp, Glycine max
cccacgcgtccgggcatgcgagagcttattcatcctcatcaccaccgttgcatctcgggtgcaactaattaacatgaagaacaatatcatgattaattagaacagaaaaaactcgagtcaaatgacccacgcagggcattatggggacagaatacgcaattgctgcagagcgggcagacgacaaacacagcatgtatcttaagtctatagaagcatataatgctaatcatttatatgaatctaagcctacgaaaacaatatatgaccctgctgccacttgcgtacacagcaatgctctacatggtggctgcaggcgcaaaatcaatactgagagagtgtatacccaagccaatactgttaatgagggtgatgactcgacggaatatccatttggtcgacactaccaagcttaaagcaaacatggaagcatagca

SEQ ID NO: 85934 - DNA, 265 bp, Glycine max
taactctcttttctagaagaatcagaagctgttattgtataaaataccgtatctttgcggtatttagaacaaggctactacaatagttatgttgtatgacattcattattctgatctgattgttcccatttttggtcctatctaaggtgaccccagctctattcgacatatcagattagagattgctggattaaagagcctttctagagcttccaagttgccaagctaggataggcggtcttgtctttaatgttgtatgagatat

SEQ ID NO: 85935 - DNA, 260 bp, Glycine max
ctcatgtgagcgtccccatctcagcatccaagatactattgcttatgctttattatggcaaccctcaacataatgggaaaggaccaggagcagacttgcaatgacatctagcaagaggccgtgggggtcgccaacaagaacgacgactggcccaaccatgttgatacaaactcgactagtatgtgcggggatgcgctgagaagatcaaacagcgcctgtcgacacttcgaaagagactaaaccttggatgcacatctatt

SEQ ID NO: 85936 - DNA, 176 bp, Glycine max
cccacgcgtacgcccactcttgcggaaagctcgctcgtgggtagccccggtacgaaccagggtttgactcggagagcgaatcagatctcgattattcacggctctgctaacacgacggattgtggtcttatttacctgcaataatggctgctggctagtgcttaggttctctcgct

SEQ ID NO: 85937 - DNA, 154 bp, Glycine max
ctcacactcagctagattttaatgccaacaccttcaccgctaaatcctccatcgcactgggggcaatagcttatgtgatgcgccgcacccaccggaaccatccacagatacgacgcaagcctaaaaaccaaagactcggctagatgcccggaga

SEQ ID NO: 85938 - DNA, 154 bp, Glycine max
  unsure (1)..(154): unsure at all n locations
ggtcgacgcacgcgtncactcatattttctaccccatcattacatccacaatactattggttatcctttattctggcggggctcatccttttgggggaggaccacgagcagacttcgaattacaccttctaaaagcgcgatttgttggccacca

SEQ ID NO: 85939 - DNA, 202 bp, Glycine max
gcgaaacgcacgcgggctagacgctatcctgttacatcgattccccattctgcagggctgagagacgttttcctgagcccagtaaccgcccgtaccatctctcacgatgtggttatcgcgaacaagctaggtgtcgcgtcttgctggaagttgaggccgcctaggagattgctctgaggatgacatgcctatcatgggagca

SEQ ID NO: 85940 - DNA, 77 bp, Glycine max
taaaaaaaaaaaaaaaaaaaaaaaaaaaaaaaaaaaaaaaaaaaaaaaaaaccccacgcgtgcgcccacgcgtccgt

SEQ ID NO: 85941 - DNA, 254 bp, Glycine max
  unsure (1)..(254): unsure at all n locations
ggacgacccaggcgtncgaaaaaagaccacagaagcaaacgagtgaaagcaccacacggggacgaagaggaacaacgggggaagggaaaggggggagtagctgagcgnacaatgaccctgttcaaaaacaggatggtatatccaatatcaagactgcccacacccagggaaacacattatgagatccgcggaagtctatggaggcaaccgtaatgaactttcggatgtgaaagctttaaagcacgctcacatag

SEQ ID NO: 85942 - DNA, 282 bp, Glycine max
taagcaaaagccagaagaagatgaagaacccctccccatgttaaaagacgggggcgcatgcgtagaagaagaataagaagaagaataagatgaacaataagaggaagaagaagaagtgtgtgaccatttggaaggagaaaactaaggagaaagagaatctgaatattggtgtgtattctgtgactaccggtacagatcgtgcggtttcttgttctaacactgcgccttcctttaccgcttttgttttcacacgatcaaaacaactcttagcttggattttta

SEQ ID NO: 85943 - DNA, 290 bp, Glycine max
attattctttctatatgactcgaggcagaacagaacaacacaaccggaaaaccaaaccacctgtggctgctcccgccgctgtgtttcgccgctgtcacgggcgatcccaccttaccgtggcggagcgcgcctcttcgatgggaaagttcatgaagaaagccaagcctaaaggagaactcgcgctcgtataatccaccaccagaaacaccaccacctcctacatgggggtacgaacccgcggcaaaaccctagcgctttaaaaataacacgcgcagcaagacgagcttatc

SEQ ID NO: 85944 - DNA, 547 bp, Glycine max
atttggatttcttgaaacatgggaaaggcattaatacaggcttaaaatgggcattattgtgaacacatactcagctacaaagacctgttattaatattttgttgaagaggctatcttgatgacatccagctgatggccaattcgatacgagcatgaggtgcctactgcatttggtgcatgaaaaacccaactaggaatgaacgcccctcagtgaactgatggagtaacaactctaggaatagacctgatgagcaagtctatattctctcgcatgtgtgatgatctgattgcttcaaaaccattagcaagcatactgattatgctagataatctcgtaacaatgatgagtgcttcctgacttcttaaccactagatgctgagctgtcttacaatattattcaataatcacttttggaaattttatgtccataggcatggtaataccaaagaaaccccataacttcggcagagtgaaagctagaactctgtttgcaggaaaacagatggcaaactaactgttctagtaataccaccagactacaagcca

SEQ ID NO: 85945 - DNA, 287 bp, Glycine max
aaaaaaaaaaaaaaaaaaaattgcgtacaaaaaaaaacaaacaaaaaaaaaaaaaaaagggggcgcttcatacacacagaaaaatcccctcgcaaaaaaaaaagggcgggccgtcctctttatacgacccacccttcccttccctgccatgctacggcattaacttttcttttgcgtaacctaaattcaattcccttgcctttattaaccaacatctggaataaaaaagccctgtccctacccaatttaattgcctgacaacccattcccctcttttcagctggaat

SEQ ID NO: 85946 - DNA, 276 bp, Glycine max
gcccgatttcagattgcaaaattacgatggataaaacggtgaaagacaactcagggtggagcgacatcttatttcacggggtaattgttctggagatgggactgtgctacttcttgatgcacatactgcccaataagctgtgggaccaactccgtataagtaacacggcccacatgcaagtcaagcaccaattgctccaacgcgcccagatcctggcccggtcccgatcttgcaagtacaaggacactttcaaggaagaacatgcccaggctcaga

SEQ ID NO: 85947 - DNA, 86 bp, Glycine max
cactttgtttcggcttttaacattacccattgtggtttccaaagctggcgcggaagcgcgggggaacctgacaagaacttctaacc

SEQ ID NO: 85948 - DNA, 52 bp, Glycine max
cactatgtctaaaattgtaacattacccatttttatttccattgctgccgct

SEQ ID NO: 85949 - DNA, 339 bp, Glycine max
cagcagttcaaagaccggggaagaacaatttgggaatgggattgggtgcggggttgcttggaggagccttgggtggacttctaattggggacatgatttctgatgccggttcttacgacgctggttttggagatttcggtggatttgatttttaaatctcttgttagttttctttgtttgggggtagttttttatgttcaaatgtgaacttaaattagaatatgttttttgcacgtaaaaagaaaactcttttaagatacagcgaaaaaccccgctcctataatatctctttgacacggcgcgcatggagaagtttgctctctgttgaatacccctaca

SEQ ID NO: 85950 - DNA, 565 bp, Glycine max
cccacgcgtccgatatattccattctctctgtgtatttccctacctctcccttcaagatgcagatcttcgtcaagaccctcaccggcaagaccatcacccttgaggtggaaagctctgacaccatcgacaacgtcaaggccaagatccaggacaaggaaggaatccccccggaccagcaacgtctcattttcgccggaaagcaacttgaggacggccgtacccttgctgactacaacattcagaaggagagtactcttcacctcgtcctccgtctccgtggtggcatgcagatcttcgttaagacactcaccggcaagaccataaccctagaggttgaaagctccgacaccatcgataacgtcaaggccaagatccaggacaaggagggtatccccccggaccagcaacgtctcatcttcgccggaaagcagctcgaggacggccgcaccctcgccgactacaacatccagaaggaatcaacccttcacctcgtcctccgtctccgtggtggcatgcagatcttcgttaagaccctcaccggcaagactattaccctagaagtcg

SEQ ID NO: 85951 - DNA, 220 bp, Glycine max
aatgtatatgttatatttgatataaaatttttattaaatggcaagatagttttttgttgaggggttttttaaagatcgagggaatcgatatttctattagtaatatagtacgttttttaaaatatttcgtactttttaacggttagactatgagatttattttaaataaaaacttttaatttttatatggttaaaaagatattgctattttaaaatttta

SEQ ID NO: 85952 - DNA, 263 bp, Glycine max
taaaaaatgaaaaatatggtccatatactgtttactctcacagctgttccctatcgttgaaaaaaaaagaagatgttatactataaaaaaaggaaaaaaaaactttgtcaattgtttgttcatggggatccctgcattgagcaatccgaataatgggcagcacatattacgcataactgatcccatttcattggctggaccaactgaggatgatgtgatcaagacgcgtgaacttgagaagtacttgcaaggtgttggattgt

SEQ ID NO: 85953 - DNA, 80 bp, Glycine max
cccacgcgtccgattttttaatcgattgtttatccatgtatcagaaagcaataccgagtaaagatcagaaattacatatt

SEQ ID NO: 85954 - DNA, 196 bp, Glycine max
accatccttcaaagaaattatttttcatattataattccactgattccgtctgaggggggggatcttttcttatggtagaagaaccacatgatgatacagacccttccaattatttcaaacatctacactctaacccctttccacgaggcgatcaccccctttccctgatatgcctcgcccacaaagattcaccac

SEQ ID NO: 85955 - DNA, 209 bp, Glycine max
gttgatagagacatgtcttatcacactgtttaaaattttttcaacgactccctcgagggggttgtacctttaactaagcatgcccctctgcattcttggactcaattgagttcgcgcgattactacttctatttaaattatagtaccactgctccactgcctcccaaacatgtttcgaatgttatctcataactcgataaaatattttc

SEQ ID NO: 85956 - DNA, 210 bp, Glycine max
actcgttcgattattcgcattcaacaacgtatgtaatgatatgatgtacttccactggggggttgtacctctttctgttcatacaccgctaacaatatttctacaatataatacccacgacaaataagcggggggctataatgataatacagtggtagggcctcccaataatgtctttatggaccctacatacttaaaaataatctcttg

SEQ ID NO: 85957 - DNA, 245 bp, Glycine max
cataatatagacatatcttttcccattactttcaaattttgcaactaccccctcgcgggggttttatctttatctaagcatgttcctctagatacatggaaccaatggagatcgcacatttactacttctcttgtcattatgcacccactgctccacagcctcctaagcaattttctacctctctctaataattcaaaaaaatactttctcccctgtctactataattgagcaccgcccgttctt

SEQ ID NO: 85958 - DNA, 410 bp, Glycine max
gttgatagatacatggcttatgacacggctggcaaatttttcaaggactgccgccagggcggggaacctttaactacgcatgcagccctgcatccttggacaaaaaagaaatggggtgattactacgtctatctaaattatggtaccactgatatactgcctattacggaagtttgtgagggtatcaaataattcaacaacgtgcattctatcttgtctactgtgagtgagcaaggctcgaccactgctattgagcttttacctactactaatacgagttctagagatactctaaacaggtttgacggatttcttccttatacataacacgctgactctctgatatcagacttataccagcgcttagaggaaccgaactttctacgcagttgtgattttaacatactgta

SEQ ID NO: 85959 - DNA, 346 bp, Glycine max
actctcatcgagcactaatcggctttcattgttaatatagatgttcagtgcaacacaatcaattgagagtgattatacaatcatagttatgggacaagctcaaaagaaacgatgctaataacatcaaactgatgcagatcatgtaaaaaaattatgtaatttgtacgctcactataggaaaaaaacttaaccgcacaaaaccttgaagtaattattctactttgggtatgtaacgtggatactattatggtataaatgattagtatactggcttaacataagttccgtgtgcttctgttctaaaattaggacaaaatactattatctgagctctaagtccagattt

SEQ ID NO: 85960 - DNA, 172 bp, Glycine max
aacaatcctaatccatcaaaacataaaacataagaaagactatatgcatcaatagtacaaagtaaacctaacacctcaacaataaatgaatagaaaaaacatactacaaacatagatgatcaacagaaagaaaaaaagaaaaacatatgaagacaaagattattataaatat

SEQ ID NO: 85961 - DNA, 258 bp, Glycine max
taaagtaaatattttgacgggaaaacgacctatccgcgatggctaatgaatattcaatacaaataccgactcatgttatgagagtactgaacaggattttacgcccaaaacatcattcttgagaacgattcgatcaggcgggagctttaacatctgaagttttacaatgaaaggcggggcttatgatatgaccgcctatagacgtaatgtaattaatacaacgttgtacattgtctaccccgaaattattaccacgca

SEQ ID NO: 85962 - DNA, 418 bp, Glycine max
ccaacaattagatctaaatgaataaaacatcatgaggagatgtctttacagagcacaagtagatgcccaatttttttgacttgaggacatatatatagttggaggattcaaatcctaagcatattccaaacattttggacatcattagagattgcctttgctttaagaaacaggaacaaataatagatctataaaactaacctaccaaaagttattttatatcaaacacttcctgttgggcacctggctgtaacataactaccgattgaacttcattaaaagattagggacatttatacgcttctgatatgtctagacttgacactgtttgtacaacgcctgtgaccgatcgacgctgaggcacttcttggaggtaactggatatgatatgtcggaatgttcgtcatcccaatcacga

SEQ ID NO: 85963 - DNA, 97 bp, Glycine max
ttccaaactaggaacttaaatataccattgagaagacttgatgctctacataagttgttagctcattgctcatggctcattttaccaaactggaatg

SEQ ID NO: 85964 - DNA, 291 bp, Glycine max
  unsure (1)..(291): unsure at all n locations
tctagagcgccgccttnntgtttttttttttttttnntttntnnnntgtnggggcccaactttttttttttattttcctttacaaaaaactttactctttgggtggggttttttttttttgccnnggggggggggccccttttccaaaattttttttttaaaaaaattttgccccaaatatttttttttccacccctggccccatccctgggggactttttgtggaaaaattaaatttaaaaaatttttgtggagggggcccctgattttttaatttagggataaaatttt

SEQ ID NO: 85965 - DNA, 277 bp, Glycine max
  unsure (1)..(277): unsure at all n locations
ttnnnnnttttttnnaanngnnnnnnnnnaannggnaaaccannaaaaantttacgggtgnngggggaaaaacagggggaaccctgncaagggaaaaacagggaaaaaaaaatttttttttttgccagcccaacaaaaaacccttttttatttttcttaaaaaaaatagccacttccactttttttttcttaaaataatcctccaacctctggcccccattttttcaaacccccccccacaaatttttcggacccccctttggaatttccccccccc

SEQ ID NO: 85966 - DNA, 135 bp, Glycine max
ataatcactcaaaatacaataatgcactcgtataacatatgaatgtggcgtgcggaaaacacaggcaccgtgatatgtcccgagagcaagatgaaggagtcaaacacaaacacaaattaaatagataatttgtac

SEQ ID NO: 85967 - DNA, 277 bp, Glycine max
aaaacccccccaaacaaacctaatgtaaacaaacattttatgaattataaatattcgcctaacaacctgttaaataaatagaaaagcgcaaagtaaaaaatccaaattaaaaattctcaaaactctcataaatcttcacaattcaaacaaaacatttaaaatactcacacctaacacttgcatcattcatcataaaaattatcgataacaacttaacaaaacttttaacaatccaaaccaactcaaactcaaagatttttaaaccaaattaacaacc

SEQ ID NO: 85968 - DNA, 77 bp, Glycine max
cggagcggccgcttttttttttttctttttttttttttttttgttcccttcaacccatttttttgcggggcaatttc

SEQ ID NO: 85969 - DNA, 400 bp, Glycine max
cctttagcttttcctcctctttctacaaagtacaacaaacaaacattacatctggatacatcagaactgcaaaataaaatcagaggtcaaagcttcaattgagatacagactttcctttcagattcttttcctttggttgccattggcggaggaataaaagatggtacatactccttcattttgacttggtcttgtttctttcctgcttttaatctgcattttggttaagtttcgatcaactaagttggtaattggttgttttgttgggggcgtaatgaggacgttttgtttgtaccgtgatgtggatctgttttgcaagtcacatattttttatacgtgttttgatgatgatgtacgatgatgatgcttctatatcacggataaatgaaagtttttttt

SEQ ID NO: 85970 - DNA, 156 bp, Glycine max
ttttttggggtgggcgttggttccacaattaattttgtgaataaaagaatggaaagaggttacaaatcggttagtttttcttcaaaacaaaacaggttaagaacccttaccaccagttactggcccattttgtgttacttttactaaactaacaat

SEQ ID NO: 85971 - DNA, 461 bp, Glycine max
  unsure (1)..(461): unsure at all n locations
gctggatcctctagagggcgcgcccttttttttttttttctccttgttcttctccatagtccatgctctactcagatgcctctgaagctgctcatccaagcttttcagatctatctgatccgctctcacataccccccactctcactcttcttcatctctctctctctgtctgtgtgacacacacacacacacacacacttgttgtgttcaaaattcaaaaaattcaccacaccccacttggctttgagctcaaagcacttggatataaaaatgtacttggagcagttggttgcaaaatctggggcctggcttttctacaacaacagtttgtcatatgtgttgtntggagctagataaaaactttttttttttttattttacacaggacagttccgcctgcgcctgcgcctgcgcctgtaccgatcgacgctgggcattctttaggtaatggaatgattgt

SEQ ID NO: 85972 - DNA, 301 bp, Glycine max
tctacgaaagcattcaaatgcagagtatgtattcatgatgtaaatacaacacaataacaagtcatccataagcatataggatttctgagaggtacatgtaaagccagaagaaaaatatacaagatactcttcatccacaatgtctagtaaaaggaccctaaaaaaaaaaatatgacatgatgggttaactgtgatgaattaattaaaggaattatgaaccactaaaatattgaaattatgcattaattttttatttaaggcttgtttgtaaactcataaatgtatgttaattgatctcaca

SEQ ID NO: 85973 - DNA, 293 bp, Glycine max
aaccttattaaagaatctttcttgaacatttcccgggtgaatagaagaagaatttttttccaatttcctttacaaagaatgaattggggcagtttcccgtcaaaaagaaaaaaagaatttggggtaacatatgaagggtgcgggggattttgccatcaatttttggggggaagaaaaatcctggcttttaattttgaacaatggtttttgcaacgatttttacatacttccacacttactaaccgggctttctttttttttttttttaaacaaaaagggttttgcataacccc

SEQ ID NO: 85974 - DNA, 270 bp, Glycine max
  unsure (1)..(270): unsure at all n locations
tttttaaatatccaaccgctatttatatataatgaaattactaaatggtacagcaatttattgatgaaactcaatccgaatgatcttgccttgatttcccgtcagctcaactttattttgttctttaacttattattcaaccaataatatgtaaccacgttatttcgtgattagattagtacaaacttatttgcactgttancaatattctaatggngtacaaacatattacttttgttatacattgccaccatcctaatatatgcataa

SEQ ID NO: 85975 - DNA, 59 bp, Glycine max
cacaacgaggacccccaaatacggggcgtttttcatactggcggattcttacatacaca

SEQ ID NO: 85976 - DNA, 265 bp, Glycine max
aaggaaaaaaacttcccaacacccgccgtttttaaaccatcgtgtaatttaaaaaacaccctacccctttaaccccctatctcagaccaccaatctccttcccaccacccaaaaatttcataactttcccagcccgcctaccaaaaatcttaaaaattaagctctgccttcaaattatccaaattcatttaattactaacatcttctcaaacaaaatcttccccaacaaatatcttccttcaacactcctcaaccattaaccttt

SEQ ID NO: 85977 - DNA, 223 bp, Glycine max
aactgaaaacttgataccaatagtttcgtgcatgttgccaaagtagaaatatcgatcaccgtttagcatacgagaacaacatattagtgattttagggcaaccccttcccacaattaaaaaaaaatagtgaaagacaaaaataagatttcaacaagtgctaaaaaaacctaaataagaaatatgaaagagacacttattaacatctaaaaacggacgaacaat

SEQ ID NO: 85978 - DNA, 56 bp, Glycine max
aacatcataaacataaatagtactaacttcttgtgaagggcaataagaacctcaat

SEQ ID NO: 85979 - DNA, 106 bp, Glycine max
  unsure (1)..(106): unsure at all n locations
aaactacacatctattttcgttatttgactgggttgggtatttgtttttcagatattgcttttcataagttaatcagtcaatgaaataaaagttgttaatgaanaa

SEQ ID NO: 85980 - DNA, 135 bp, Glycine max
ctcatccttactaccccaactctgcgaccagagtactattgcttgtgctccaatcttgtgagcctccacatgatggaaaaggaccgggaggagatctataattacctctaacaatagctcgattgctttgccaac

SEQ ID NO: 85981 - DNA, 274 bp, Glycine max
atcgcatgttcgcacattaacctaatcaattcttgtcattaactcgtgagatggacacacgctcaatcttgtaattttacttgaaatagccttaattgcttactttaccgctaaaactttattggctgcattaaaatcttaactcagactccggggaatatatcttagatgcatgctcacacccatgacgacgcagattgtttaattttggctacgtttcaatgtggaaattctgatatagcacccattaagggccatgtttatacattagttg

SEQ ID NO: 85982 - DNA, 247 bp, Glycine max
atcgcaggttcgtgcatgaatctaatcaatgattctcattaacttgtgcgatggacacacgcacaatcttgcaattttactttaattagccatacttgcttcctttaacgctaaaactttgtaggctgcattacattccgaattcagattcagaggaatgcagttagatgctgctcaaaccgatgacgacgaagattgtgaacttctggctacggttcggtgtggtaaatatcatattgcacccatt

SEQ ID NO: 85983 - DNA, 245 bp, Glycine max
aatgttcgcgcattaacctcttctatgcttctcattaactcgtgcgatgcacacgggctcactcttgccattttcctttacttagccttacttgcttacgttgacgcctaaactttgttggctacattcaactctgaacacagagtccggagaatacatcttaatgctgctcaaatcattcactgacgaggattgtggacttttggctacggttcgatatggaaaaggtcatatagcaaccgttt

SEQ ID NO: 85984 - DNA, 293 bp, Glycine max
  unsure (1)..(293): unsure at all n locations
tcaccacgcgtcgattcattctgtatgcgtttggatggtgtangaggtaatgccggatttcgacctggtcaaggaggcaattttggtggtttaaggaaatcaaccacacaaaccccttttgagtatgctggaaggattctttctggtccaatgcaatccatggtaaatcaaggaggaatgcaaagaaatagccctgatggagaaaggtggcagcgtgctactagctttcagcagaggggtttaattccatctccttctactcctcaaactcctttacagatgatgcacaaagc

SEQ ID NO: 85985 - DNA, 476 bp, Glycine max
ctttgtgtcacactgttcacacgaacagaaacacaaacactgaaagaaaagaaaattgtttggcgcgtgatggcggcggcggcggtcaccagaaaagtcattggaaaaagagaaagggtcgctggaagatgggcagcgagcagaaaggtccactagggacagtaggtccttgatggagaaccacttttgttattccactgtgaagagtaaccgctgtgatcatggttatcaaactctcgagttaactcgctgacccttacgagtttacgagttgactcttgagtaaactctttttttagtagactctgcataaactttataaactctaagtaaactcggtagactctcgagtttaccatcgagtcaacgagttagctagttaaaaaaattaggccaaaatgtaggtaattttttttattggtttctggctatttagcattcaacataccttcatttagcgcattattctcaaatac

SEQ ID NO: 85986 - DNA, 129 bp, Glycine max
accatgtattcttcaatgcactcggacacttatacgggctattttcatgtgcactcttgggtaatccaaagaaagtactagagacatagatataaatataaaacgtatttgttttatgaaatcaagaca

SEQ ID NO: 85987 - DNA, 288 bp, Glycine max
cggccgattcgggtcgaccacgcgtcggagagctggttggtggattggcgggtctctcctaccaatcaaatacgttggggtcggaaggactataccattatcaggcccagatggcgtctgatggtcgtccaggagtgcaactattattttgcaccttttttcgagtactacaaaccctcctttgctgtatattccttaatggacggcccaaaaccgtactagaattttacgaagagggagcttcataaaattccggccaccatcccagtccgggggaccaaaatttct

SEQ ID NO: 85988 - DNA, 224 bp, Glycine max
aaaaacactgacattgcatttttcaccgttttccgcactccaccacaacgatggacaagggccgtgtctaccgccgcaccgatgtccttaccaaccacctgctccgacgcacacccacattcttcggccttttccatccacacccttgacttaactactgccacctggatctctccaacaccatctccttctacacgcgtgagatacaaaaactattggattgc

SEQ ID NO: 85989 - DNA, 356 bp, Glycine max
cacacgcatatttttggttttcacacatttttctatgtctgatcttcaagatccactgggtgtttttcaaggcagcgaggggacttatgcttttcgattgatcaaacactttaccctgatgctcggacaagaaccaacgcagacaacatccaatctgtgacctacttttctttcagacacccaatcttaaaaccggggctcaatccttccttacacccccataggccttatttacaagatgaaatatcttgaggagaatatgttgcttaatcttcacttgaacaaatgcactgatggctcgactcttctccatttttgtacacactcccaaacttatgaacattctgtacaggaaa

SEQ ID NO: 85990 - DNA, 370 bp, Glycine max
aaaaacactgtcattgcattgttgacacgtttctgcactccagcacagcgatggacaagggccgcgtctcccgccgggccgaggtcctcaccaaccacctccttcgtcgcacacccgcacccttcgaccttttgcacccgcacccgtgccttatctactcccccccggagctgtccgacacccatgtccttcgacactcgtgaaatgcgaaaactaacggattgccacaatctggatgagcgcgactggatcttgtctctcatccttcagagccatgtgcttaacccccgccaccgacccggaagggtgttcgattaccccgactacgaccagaccatggaacaccagcgcctggacaacatgaagcgca

SEQ ID NO: 85991 - DNA, 184 bp, Glycine max
  unsure (1)..(184): unsure at all n locations
gggaaaaaaaaaaaaaaaaaaaaaaaaaaaaaaaaaaaaaaaanaaaatataaagggggggtggaaaaatatagaggatatgggnttaagaatgcgggggtccgaggttaggtatgcttaattgcgtccccttttttttattaactggcctcttttatacaaccttttggactgaaaatacttt

SEQ ID NO: 85992 - DNA, 139 bp, Glycine max
tcgcggacgcgtgggaaaaaaaaataaacactgtttttccttaaaaataaatactattatacaagtggaggctaattttcttcactcctcactcggaaatcgctggagcccagcctctgcaaatctaacttggatgatg

SEQ ID NO: 85993 - DNA, 291 bp, Glycine max
cggcccgaattccggtcgaccacgcgtccggaggcgctgcttgaatacatggacgagggattgtgattgttggtggttgtgttgtgggttggggttgccagtagctgatcgcattgaggcgcttgtaaccatgctctacgaatgctgcagtgatatatctgtccacatgatttcggacaccaaattaatcatcaaaacaatctgctgccagaaaggacagtgagatgtgatgactttctaggataaacttgttcaagatctgagaatagaatgcagggaattagagtcttt

SEQ ID NO: 85994 - DNA, 75 bp, Glycine max
atcataaaagatccaaggttacgtacgcgtgcctgcgacggcttacctcttctttcgtgccacctaatttcaatt

SEQ ID NO: 85995 - DNA, 163 bp, Glycine max
gagaaaaaaaaatagatgttgtgcgtgtctgtgaaaaatgtgccccacacatttgtggggggagtgacagttatgttataaaccccaagtatcttgtagagaatggatattattttttagcccccagggatgttcgcaaacgtgttcggttagactctaaatg

SEQ ID NO: 85996 - DNA, 421 bp, Glycine max
gataaaaaagaattaggtgctatttatatcactagatgattcttagcatgctgtgctcgtgaagggtaagtaagcagtgaagaatttgcgtactttagctttagattgagtgcttcataagattttcattgaggatgtttgaatagttaccaaaattgagtctgggacccaaaatcaaggtgatgattgaaaaagtggaagcaactatttgctgttttggctgtcaacgtgattttggaattatgggaaaattgaatctaatccaagcttgataccaatatcttcctttcatatattggatttccaagtgtaaagggatggtttcagcttttttgggggtattttttatatgcatatataaaaaaaaaaacataaatgaaagataaagaccattttatatgaaattatatgcattttttat

SEQ ID NO: 85997 - DNA, 584 bp, Glycine max
  unsure (1)..(584): unsure at all n locations
cgcgtacgtatgcttggatcctctagtgcggccgcttttttttttttttttttttttttttttggggtcgacatgagtgttgcccttgctcctacgtatcctcaggtgcaatgaggaattcagacctacgtagttctttaaagtgagaaagttgtgtgttgagttgatgttaggcttttaaaagattcatttttaactaataagaacaaaaagaggccatcaaggcattggaccttgaacgatctcaagtgacttcaatggaggtaaattcagttatatgttgattttaatcttggttttgttcattaactttcaatctctttaaaaatatgatttacggcaccaatgatcgattgaaatttactttacaagtagaaaaaagattacgatgatagaagaaggagatgaagatgcacaaaacaactaagaggacccctaagggtgcatagatcgtatccaaatccttaaaacacaaactaaccggatgacgaacgaagaacaccgaacgaagaacgatgtagaagttgattatagtcgcaattcggtagcgcctcggcctcgnttctctcttctttattcttttt

SEQ ID NO: 85998 - DNA, 444 bp, Glycine max
gcactctactatacaggaccttaattggggcaaactctctaacatgagcccatcaccactaaattctaaagccgtctctctaaatatagagtgaacgagtaggagggtcgtctaccctagaatacgttgccccggcgtaaataaaagataaaggaaagagagaaactgtcctacaaaactactacataggtgtggttccgtcacgtaccacataatcatgactcagatcaagtgaagtaaagtaaagtaaaacacacacaaattaaggacacgcaataatactatacgaaactgttacaagcttttttttcaaatactataaactccatcaaaatgaattttgccaaaaatttaaaccaaacatggcttacttgggaagatcgcaaccgtgaggttgccacctccaatgctggtaatccttgtcgggtcgtccatgttcttgac

SEQ ID NO: 85999 - DNA, 385 bp, Glycine max
aaaaaaaaaaaaaaaaaaaaaaaaactgccgtttttataacaatcctcccccctccaacaacagcataatactcatcaatgtctgcaaaatgcattgaaaatgatcgggcacagtcaaacttactatacttaataaccaatatcaatcaataaggtcaataggcacatccctatccttttcaaaacgccaaagatcctagggctataaataaaaaatacctgcgcgggatccttactccaaaatgtggccagatggatcaatttttccctgctcgaagtactccctctggacataaatgactttagaaggtcggaggagtacaatctttctcgccctcatgaataccaaaccagtggttaagcaatcggggcattaaaatgggga

SEQ ID NO: 86000 - DNA, 439 bp, Glycine max
  unsure (1)..(439): unsure at all n locations
ataaaaccanngnaaaaaacaacacggccgccaattttacatctttaacaaaacctaccttacactcaaataatcctacaaactttttcttttaaatacacaaacgtattaataaattactgtactcaatacaacatccaaataaaaagtaattctcttttgaaattttcacaatttcttttttcaatatccatctttttcatatactacataacacaattaaacatatgattcaaaattaattttcactaaataatcttcaacctttccttttaaatactcacaatactatactccatacatacctgacttctcatccaaaatattagcattattctctcaacttcatttaaatcaactctgactatatggactaatcgacatcttaaaactatcgcgttattttctaaacttctgtctaattctacatccgattata

SEQ ID NO: 86001 - DNA, 472 bp, Glycine max
  unsure (1)..(472): unsure at all n locations
gccgctgggaaaaaaaaaaaaacacacaaaaattaataannaaaaaaattaataaatagtgttntttttttttttatttttttactttaacaatgtattttnnaaatgtaaagaaaaaggagaaaggtgaaagaataaatttngttaaccataccatgcactaaacattactaatgcgcacaattnaactnagcaaataatatattgaaatttcttagagtcacaataccccaggaaatgatattccgccatatttggtatctagggaatggcacaccaaaaactggctgcacacaatattctncacccaaaactgtatgctttttaaaatggttgggngaaaaaataatgntncttgaaaccccccgtcgtctaaaaggaactcgtcgacaannnatctcccgtttccattccacatcaaacaaattctttaaaaacaaatcttttctttctnctttttttccaaaatttt

SEQ ID NO: 86002 - DNA, 388 bp, Glycine max
aaaaaacatttccggaaaacgtgtttcttataaatattttcaaagggattcaatccaaaaaatagtctgtgagaactatcatatcaatgtttatgtaccccgaaataatgagatgtgcaaatgtggctagtgcacaatcactaattaattgacctgttacgacctattttgtaataaaggaacattatggcacgatgactccaagttctcaacccctttctcaatctggatatcttcttatggattttccccacagtacggcataaaatcctatcacgattataaccgcaccaatcaaacttccaaggcttaagtgaaaccaactgtaaaacatatcaacgaggacgcgcaatataaaatttgtgggcgtacacagacactaaaactt

SEQ ID NO: 86003 - DNA, 407 bp, Glycine max
  unsure (1)..(407): unsure at all n locations
aactncggggggaaactctaacaaaaaggggtgaaaattacacagatgctggtaaacgaattaatgttaaaactattaacgtaaactacttttacacaccagttcagtttagtgattaaatttccagcattattggtttctctgagaaccagaacagacagaaacatcagatatcctcagaaacgtattgtctctccaaaaattcataaatcatccctgaaaatttcctcaagtagtttgacaagaaagaaaaaactatagtagttggtaagtagcatgtaatggcagatttatacacatccttagaagagatggagaagttgcacattgtttgtgaccgcatggcattgaaaaacatgctggagctctttccttatcatgaaatacaattattaaatgcctatacg

SEQ ID NO: 86004 - DNA, 338 bp, Glycine max
  unsure (1)..(338): unsure at all n locations
ttaaaaatttttttgacaacaaaccatntacaacagagggtggatttgccacacattatccaccatggatactccgaaaagtccatcacaaagtcaaactgttcacatttcactgtacagaacaccgactgcttaattttgtataatatttaaaaactcaatatacagttaatggaatacaaggaaagatgcagaaaataattaactagtgtgatttccaacgcacacactccaagaaattgcatgatgctgtctatgtactaaagcagacccctcatacctgcttacatcatttaaagccgaccaaaatatgggagtatatgctcatttccccccct

SEQ ID NO: 86005 - DNA, 352 bp, Glycine max
cccccccaaaaaaaaaaaaaaaaattccccccccttttaaaaggggaaaccccccccgggggttaaaaaaaaccccccccccttttttaaaaaaaaaggggggggaaaaaaaatttttaaaccccccccaaaagggggggggttaaaaaaaaaaaagcccccccccccctttttaaaaacctttttttttggggtttttttcgggggaaaaaaaaaagggggggttccctgggggggggggaaaaccccattttttgaaaaccccccccccctttttttaaaaaaaaagggggggggaaaaaaaatttttgaaaaattttttggggggttttttggggggaaaaaaaattta

SEQ ID NO: 86006 - DNA, 500 bp, Glycine max
ccctgataaatacataatttccttgaacacccacaaaaataaagtattcacatcacactagccaccaaatgatagaaatccccatcgaaaacacccttgctctcctaacctaaagtaaggtaagacactttcatcctaggttagggttccaataaaaatatcatgtggctagctctaaggggctagcaaatgataaaagtaatatacattaggacagttgtttggccaatggcttaaaaatgaaaagaaagaaaaaagaatgcttagatcacatccatgaatcatatgttattataattagaaattcatgcaaaaccaactgtagaacatatcaacgaggacacgcaatataaaatttgtggtcgcacacggtcactaaagcttagggcctatttctatattaagatcaaatcagtgtttcgaaagttgttcttttaccaattccatgcaaaaaaacacctttgctctcctaacatgcagttgtttaaaatatgtataaa

SEQ ID NO: 86007 - DNA, 377 bp, Glycine max
gagcggccgattggtttttttttttttttaaaaatttttaaaaaaccacaaaaaaaaaaaaaaccgccgactttaaactgttagtttccccccccacctctaaaaattgaaccaaacaaaaccgacctacattcatcacttgaaaataaaatcctaattaattacttgactaaataattcaaaacttgtttaccacaaatatttatccgggtttaagaaacaaaaaaaaaacacctaattttccacactcaaactctactcactcactttttgcagcttcctccaacacgtaaaattggaaccggaaccttaaacgaggggacaacctttacctcacattttcctttgtttcgccgccataacctttttaacaaaac

SEQ ID NO: 86008 - DNA, 106 bp, Glycine max
cctctagagcggccgctgtggatataacccaaccccccctttttgtgagacataaccatagacaatattaagttaattttaagaatacaattcgtaaacagtcttt

SEQ ID NO: 86009 - DNA, 487 bp, Glycine max
  unsure (1)..(487): unsure at all n locations
aaaaaaaaaattaaaaaaaattttttaacannnccnccannaaaaaaaaaaaaaccgggggaattttaaaaaantaannttccccccaacccgtaaaaattgaaccaaacaaaaccgaactacattcattagtttaagtttaattattaatttattacatgactcattaattcaaaacttgtatacaacatgtaattgtaagggtttaggaaataaaaataaaacacctaatttcacacactcagtctctactctctcactctttggagtctcgtctaacacgtaaaattggaactggaaccttaaacgtggggacaacctctacctcgcatgtctctgtgtttgtgacaataacctcttcaacaaacgtgtggactccttttcatccctgcgtgcaaattctcttcaacgtgtcccccctctacagattaacgttgtttatgttggcaatcatgactctctgcatctctgcctctctatctatctc

SEQ ID NO: 86010 - DNA, 330 bp, Glycine max
  unsure (1)..(330): unsure at all n locations
gagcggccgcttgtttttttttttttttaaaaaatttttaaaaaaaaacaaaacaaaacaacagccgccattttattaaaatactctcccctcaaacaaccttaaattaatacatagtataacatggttcgaaatccccttggacggctcttaacaacaccgnaaaaacccaaaagattctctccccatctcactgctctaactcttactaaaaacttaacaacttcttcaaaaacaaatgaaaatataaaacgcataaagtaacattcactccctcaaaaattggtattgcaaattcctgaaatctcacaaataataaataaaacaaaa

SEQ ID NO: 86011 - DNA, 488 bp, Glycine max
acgcgtacgtatgcttggatcctctagtgcggccgcttttttttttttttttttttttttttttttggaaaccacaaaaaaaaaaaaaacaaaggacatcagtctgttagttttcggtttgacctgtaaaaattgaaccaaacaaaaccgaactacattcattagtttaagtttaattattaatttattacatgactcattaattcaagacttgtatacgacatgtagttgtaagggtttaggaaataagaataaaacacctaatttcacacactcagtctctactctctcactctttggagtctcgtctaacacgtaaaattggaactggaaccttaaacgtggtgacaacctctacctcgcatgtctctgtgtttgtggcgataacctcttcgacaaacgtgtgggctccttttcatccctgcgtgcaaattctcttcaacgtgtcccccctctacggattaacgttgtttatgttggcaatcatg

SEQ ID NO: 86012 - DNA, 519 bp, Glycine max
acgcgtacgtatgcttggatcctctagtgcggccgcttttttttttttttttttttttttttttctacattggtggcactaaaattttaatctgttaacttataaaaactactacttaagcccctcaccacaattacaacaactagcttgatgatataaatgaatgctacatttaaaatcccacgcatccagcatatcattatcaacagcatataacaatgtacaatctataaactttcctatcttcaacgcattacatctgtagatgatgtttatttgtaaattagaacgaatatccggttaacccatttactatcactgcatcaatgaaagcccttaaacccatggattttttctgtatatggtatcagaagagtaaaattactaaacaaaaatgaaaaaaaaaagagtctaaattctttcattcatcaatttcataataaatatgaatcaagtgaaagaaaagaaaagacaaaccatacatgaatgttggttagaaactaaaaacatgtatgtatt

SEQ ID NO: 86013 - DNA, 306 bp, Glycine max
  unsure (1)..(306): unsure at all n locations
aaaacataaacccccctttttaaaacatttnaaacccccccaacaattaaccaatatatatatatatacacacacacacacacacacacacacacacacattaatcatgaccaaaatacatcatcaaccatccccaacaaaaacatatcatccaatgaaagataccccccctcacactccttcccaaaacaatctcaaccctcctaaatcccaaaacgaacttcgcaatcattttttttttcacttaactctctttatcaccttcaaaacaaaaaaaagtctaccattatctcaaacgtcctttca

SEQ ID NO: 86014 - DNA, 283 bp, Glycine max
gataggattaacatgataaatagttgtattgggatcatgaaattatgattgaaattgtgtataagtgataaattaaatatgtgatgaattgcaggataacatggtgctttgaaattataatattggtattgagattgagtataagtgcaaaggtgaacatgtgttaatttgggagaaacacctaaacattggaaggggggttgggacattatgagatgttaaactggggacatgaaatctgggtgggaataaatgtgtgtttaacacttaatgtgacaatact

SEQ ID NO: 86015 - DNA, 491 bp, Glycine max
  unsure (1)..(491): unsure at all n locations
agattatgcactatttatcatgtaaaataacctaatcaaaacctaaaagtcacttttattcttgcattttttttgaaagaaattattacacgattcaggattattacggttttggtcaattttcacataatatagtagtaagcaagttttattaacttttttttcataaattgtaaaatcttaatgacttggctggtagagattgaatggaactatggtcatgtgatgatcttggattaatcatttctccttctccggaataagacattaataggtcacactattgagtaagttgtcctttgattcagagaccaaaattatcagcattttaaaattagcccccactctaactaatgtctagctaagaaaaagaataagactctgctgtcaccatcagcttacatctctgcaataaaccctttataatatgaattttagctgtcatgatccttctttatcatagtcaagcangagatcatactgatagaaaa

SEQ ID NO: 86016 - DNA, 342 bp, Glycine max
gaccaggtccacaaaacaaccccaacaaattcacctaccgttttttcggagatggatataaatgattaacaaagacaaaacctgcacctaaattataacttatcctgatattccactttttaactcatttcctttgtcaacttaaattaagaacccaacttcttaatgaccattatctgtgggtttcatgaaaaagaccatcaccatttcactgggacatatatatttatttgcactgccatatccatgtatattgcaaagccatgatgttaactgcattatacattttatggctgaatttcctgatttgataatcatgaaacagaaaatccttatcaaaca

SEQ ID NO: 86017 - DNA, 168 bp, Glycine max
cttattacctttttttaataaatcatgattttattatttttatctcactttatattttttagttatttcaactattaattttattgaacacttataatttggtaagctaattttttaactttcaagtactaattttttagcttccacctctttaatagttttgtcaaa

SEQ ID NO: 86018 - DNA, 106 bp, Glycine max
ggaaaaaaaaaaaaaaaaaaaaaaatttaaaaaaaaaaaaaaaaaaaaaaacccgccttttttaaaaaaatcatccccccacccacccccaaaacaccaaaaatca

SEQ ID NO: 86019 - DNA, 488 bp, Glycine max
  unsure (1)..(488): unsure at all n locations
aancacagaaaacaattatatattggggctttttttacatttaacattgtaataaccaagtctcattctcggctccagtacaacgatatcataatgtaaattccacatctacacaaacatataataacttacacatgaatccaacatatacaaatatctaatcacaaggaaagcacagcacacatgtattatccaatgtccatgaagaaattcagccagtcccttgttcttcaattggaccactcttgatttcacctacaacctggtgaacctgttccacttctgcaccagaatttgtattcttggataaatcttcacctcctttttcctcggctttgccaaaccaagagccaacaacacccttaagcttaccaaccacacctttccctggactcttcacactgatctcttcacacattttatcattgccgtcatccaagtttccatcctcatttttcactggctcttcctttttcttatgtaaagct

SEQ ID NO: 86020 - DNA, 482 bp, Glycine max
aagaaaataaacttagttgtcattagttacaaatataacttaactttttatttatttattagaaagtgcttcttaacgctcatcacgatttatggtttatgaaaagatccgaaaatagttttgcattctttgtggttcaaatttcttaaccttggcgataagatcaaaacattacttgggatgtataaatttgtcatcaattactttacaagtttgttgtccccagatcgagcttaccgaatataagggccctatacaaaaggacatgattaatgttataggacagaagtgagagtcacatccttaattaatcttatagcacatactccatcttattactacggcatttagctaagtccaaaataaatattcttctggaatattaaaacggaaattagtagatcaaaacgggaattattatcatctataaaaaaaaataggagtttgagatcgaattaacatctatttagtaatagtattta

SEQ ID NO: 86021 - DNA, 141 bp, Glycine max
caacacaaaaacacaaaaaagctgtcgcctttttttacccttgtccccaatttaccgcccgattggggctgcattcccaaacaacccgactcgcccacagcgcctccccttctgtcgttttttctcatacgtactgaccct

SEQ ID NO: 86022 - DNA, 359 bp, Glycine max
aaaaatccgaaaaacggccgcaaatttaaagggtttgtgaaatccaaaacggcggattatagttttggaaactgaactggttttgctggtttctgaagaatgcttttgttgggggcttactaatcaatcatgatcactaatcagtccttaagaaaaacataaacttgatgctggtttctgatgaatggtatgaattgtggtttttcttgatctttctggcttcctgtttgatgtgttccctctaatttggtctatgatggatgaaatggaattgtttcaaagaaaaattgtaaaatgggatggcacaccatccttttgaatataaaaatgtgagaaccttttgataaccagccttaaca

SEQ ID NO: 86023 - DNA, 162 bp, Glycine max
aaaccccccaccaaaaaaaacacattattttttcctataattaactaacgacaccaaaccattaaaacccacactcaaaatattaaatacccaaatcttatccaccaaaatacacaataaccacaactacctaaaacccccatcattccataaaaatctaaa

SEQ ID NO: 86024 - DNA, 458 bp, Glycine max
gggacaaaatgaaggctgctgacttatattgacgcttggttggattattatgtgacctgccaacaacctcatttgttgcatcagatgccaagaattcaactgatgaatcaggagacacaacatgttgcttagacatactgctgtcttcatatgttttgttcctcacttcatcatttgctgagcatctctcttgcaagatctgacagtctatcaaggcggaagaaggactagaacttgacaattgaggaggcatagttaccttatcagacaaattgctcccataacgtctcttctctgatgtatggcctgtagaattctcttcagtgtgattactattgaaataagaggaaagagaagggaatttctcatggccaggactgaggttcacatcttccaaacattctttcttgttaacattttgattctttgacttccatgataatcgatttgcagatgca

SEQ ID NO: 86025 - DNA, 375 bp, Glycine max
  unsure (1)..(375): unsure at all n locations
ttaaaaaaatttttaaaaaaacaaacctgcaaacccaccgtcctttttatacacttttgtccccccccaacnacaccaaaagagcattctttcctattttatttaacctaacatataatacattaagaaaaaagcaaacctttttatcatgtaattcataatcagacagcggtatcttgcaattatatgacattaaaggttccataactttactgcacgcagactatcaataacttaaggcttattccctaaacgtaatccaaattctcactcaaaattgcctatagctactatatgtctgctccatacaatgctcataaaaattctcctataatccctgatacatactcacaaccattttctacctacaattca

SEQ ID NO: 86026 - DNA, 471 bp, Glycine max
tttttattttttttgaccctataaaacaaggggttcaaggggagggtttttttgttttattatcgaccaaaaaaaagaattacgggtgagtttgtttatttgaacaaatgttctatctaataactgtatagaagacaaggactaccctgactgggtgcatgccaacttgaatcgggagctaacaacctgtgaaaaggcctacattgattttatggtgtaggaaggcattcttcaaacaaacaatcaaacattcattaaagccttctcatgttgcagttctctgattactctataacctcaacaaggacaccgatgggtgaaaagttctagctggaatgataatatttgtcgacagaagttcagaggctataaagtaactagaaggattgaaaccacttaaaatcaaaattggagaaaggacaattacgattccaattgggtacaggaaaaaggtcggcctctccaaaaagg

SEQ ID NO: 86027 - DNA, 484 bp, Glycine max
  unsure (1)..(484): unsure at all n locations
cgcgtatgtgaagcgaggcccctagagcgcgggcgnnnntttttttttttttttttttttttttttgaacaggaatcaaatattatattgaggcaagcaccggcacatatgtatctacatatttacaaattacactactcaaaggatttttccacagactcctagttagtaaaaaccaaaaatcaaaaggcacagaaaaataaaaccaacctatagagaaaaaatcaaaatcaaagaaaccagctatcaagaaagttggattgatattgcaccattatcagcaacaccgggatcaaagcagccccaccccatggagagctcctttctgaaggggcttaatgaattctccagccgcgcctttcccctggtaacgaagcatagaggaaccaatctgaattttccattgatgatgataactaactaactatgagaattagcaccactggggtggcaaacagttaccaacccaattgttgttcaacac

SEQ ID NO: 86028 - DNA, 83 bp, Glycine max
  unsure (1)..(83): unsure at all n locations
aaacaccaaaaaaaaaaaaacccgccaattttaaaaaacancacccccccaccatcaaaaaaaaaataaacatcaatgaacaa

SEQ ID NO: 86029 - DNA, 393 bp, Glycine max
  unsure (1)..(393): unsure at all n locations
atattgattgctatatgtaattctctctactcatgaatgatataaacacaacacatcattatgtatctactgtagcatcttaatgtatttgttactcaaagatctaatcctgcatcttaaaactgtttgatcagaaactaactataatagcacatagtttcccgataccagttttccttaggcttctacaagactgaccagaatgctggtcctcgatgtaattactatactagagaggtattattcattgcagagatgcgtaattggtacaatcttgaacttaatgtattcattcttgcttattctatanaatatgttactatatagcagttagaattttttgtaattgggaagataaattatgggaaggtagtattggacaataattgaatg

SEQ ID NO: 86030 - DNA, 259 bp, Glycine max
gctacgtacgctgcatgcacgcatacttttatggcactaatcatcactgccgcgtgacacgctgacggaaacctgcgtaccactaatgctgcgacatcccttcgcagtgggaatacaaaggccgaccgacgccttccacagtgcgcagctgatggaatggacgcccctgagcggccatagcgcggggtgtggggtaccgcacgtgaccgtcactgcaggccctaccccgctctttgcttcttccttcttctcgcacgtc

SEQ ID NO: 86031 - DNA, 140 bp, Glycine max
  unsure (1)..(140): unsure at all n locations
ggngcgcccggaaaactattattactacactcccaaatggactcaaagtggctctgaaacatcaccgactccactggtggtggctatatgtaatgggtcaatatacagactcgatagtttggggtcacattgtaaacaat

SEQ ID NO: 86032 - DNA, 255 bp, Glycine max
  unsure (1)..(255): unsure at all n locations
gagagagacatanctntctctcactctccttcttcctttgatcaactccccacacagcacggcacataaacgatggtgtgcaaacctaccgactctgcttccaaacctcgaaaacaacatggagagccagcaaatgatgcaattggaaacttgtccctcaagataaatcagatgaaaaacaaantccggcggagagaatttgtcattaaaaaaaattcaacaatgaaaaactcaattcatatgcagagtctgcaa

SEQ ID NO: 86033 - DNA, 320 bp, Glycine max
  unsure (1)..(320): unsure at all n locations
ggnggagctatgtnncaagagagnnagntagggataatagggcagggaagaataagagggatgtacaaagaacgagagcgagttggtgtttctgtttccgcttccaaatcggaggatcggaagcgaatcaacgacgttctcgataagcacttggaacgatcctctccttcacttctcgcccatcacctcgctcaagaatcaacctcaatgaggaattaaacggaaggaaagttgatgtgggcttgatggatacactntgatctcgggttgatctaaggatagtcttgtagtgatatatacatcagatacttactattggt

SEQ ID NO: 86034 - DNA, 195 bp, Glycine max
  unsure (1)..(195): unsure at all n locations
gcgtccggtgaatataaagtactnggttggcgtctcagttaacatgttttgtgctctgtgattgcagtttgtatgaaattagcagaattgatcctgagatttattttggctggttagctgtcaaaaagactttggtcttgacgacttgcctgatcaagtagatctggaatgaataaacttaatagaagggttttc

SEQ ID NO: 86035 - DNA, 174 bp, Glycine max
ggcgccacgcgtcgagacatagcttatctactcagagcgcaagaacccgatcgacaccatgggggttgtcgtgcctgctctctgctcttgtggagcgcactcacgcatacacggtgtgggctgcaccaccgcgcggtattaccgcgcgggcattgcactcggtccctgcacctc

SEQ ID NO: 86036 - DNA, 218 bp, Glycine max
gaaattcctgtatctccctcacaatactaaacgaggagctggtaacagactagatttgtcctatccgatttctttgatggcaacataaatccaatcatgttctccaatccactttcttctttaggatcataatgctgggttcttcatgacttaggaaatccaaatgcctattggggagccaatccgcatgcagaaaaccccagagcttaaaaatcaat

SEQ ID NO: 86037 - DNA, 567 bp, Glycine max
ggtgcaactttatttaaaactattgttttttaattggaagtatctataaacttatacaacagtgttgcagtaatgagttgtttcttcctccctagtgttttaaataacttaatagatttaataaaaaaaaaaaacaatctaaagaaactttagtttctacataatataagtaatcaaaacacttaccaaggaaatcagctctggcaaatgcaacaagcgagccaagaagagccccgtatagggaaccacttaccactagtccaagctgaatggcagaaagattgaaccatgatataccgctaagctcaggtgactgcagtgagattgtaacgccagaggtggcaccaatatcataaccaaataacaagccacccaatgcaaggaatagaaacctaaattttgaaataacatactgattaattggaatagaaatcaagcagaagattattatacattctaaaattaacaatggttgatcattaaactaggattgatatgggatgcttttcttttccacacattcataataaagtaacaaaattttcactttcccctccaaaacattac

SEQ ID NO: 86038 - DNA, 325 bp, Glycine max
  unsure (1)..(325): unsure at all n locations
ctaacccaatccggggggttctgttttgaggaaggaccaacaaggggaanaccgaancgaccaaggcataaccaacaaccggagggcaaaagaactacccccggggcacactacacaagtcccctggaaatgaaccgcctctgcannctggaattgcacattacctgggaatatcataattcaaatcggaccaaaggggggagcaaaacaagtccaggaataaaggacttaaaaataacccacttccctttattatattgctcccacaaaaacaagggacaatactcgcaattccttacggtttgaaaacaaaaaatgggaaaaa

SEQ ID NO: 86039 - DNA, 360 bp, Glycine max
gggaattgattgaaatagtattaaaaatttataataactcattttattcaaatgcgctagaccaccttaatatttctcctttgtttgattttcatttagatattgagtcccattttgtcttcggtagaactttaaattattgttgcacaaacattagtttttactatttggctagatagtcgatcggttttaactcattatggattggatggaataagcattttctctattaatccttgaaaattttcgcagagggaaatgaaagtaaaacctcatttaatttatttttggttactagtttgacctcaaagggatacataaaccggttccagcccttaagatgccattgggttggaattt

SEQ ID NO: 86040 - DNA, 332 bp, Glycine max
gggctaaaaaatatttttggaaaacatttttctcaaaaatattattattattaaaaatagatacatgaaaaaccaatacataaacattacaacttctaactaactttttaagggttttgcaatatcacattgttctccatgtcaaatattcaacctacctgttacgtcctattttgtaataaaggaacattatggcacgatgactccaagttctcaacccctttctcaatcttggtatcttctatgggattttccccacagtacggcataaaatcctatcacgattataaccgcaccaatcaaacttccaaggcttaagtcatccccgagaa

SEQ ID NO: 86041 - DNA, 262 bp, Glycine max
gggagatccatgaactttcataatattcaggggttttatcatagaattaattgtttccaattttggttcatgagacgtggaactcatgaagtttgacataataaaaagtgtactgcaagtctgcaacaatataagttaacacagtgactacatatgcttcgcagagactttcaatcaatcttttagttaaaggaattttacatttgggtccaagaccacgttgaaaattcatggtttaatttttaagataccaagggaaaaa

SEQ ID NO: 86042 - DNA, 288 bp, Glycine max
ccggacctaattattaagaactcaggttattggagagacactttcacaccttagttgacaactcctgagtcaaggactgagttgtgataaaaggctattattgtttaacacaatgctaaataccttgaaaatatacaagtcttgttggattttaaaaaattaatatatcttgaaaaataatgtataacttactgtcggttgacatatggaccaccgctaacctatcaacatatgtatcaattgaaaacttcaggagctcataaaatgtttataacttaaaattagtta

SEQ ID NO: 86043 - DNA, 225 bp, Glycine max
  unsure (1)..(225): unsure at all n locations
tagagcggccgcttntttnttttatttnntttcttttattccgaaataacctacaccaactccnctcacaaaaagcggcttttcctactcatttccaccacaacccaataaaactcttcttccttaaatttaaacaacaactattcaatcaaatgaatctaacctcctataaccccaaactctattaggactttcctaaaaaataaacaaagaaaaatctcaacc

SEQ ID NO: 86044 - DNA, 373 bp, Glycine max
cgaaaacaaaataacctaattgcatattcaaaaaccaaggaacttaattaagtatttaaattaaactaagaaaccaaattgaataccaagccatttaataataacttggatgtctcacaatcacataatgaagagcaaaaccaagtttgaacagaacaagttcgccgaaatgtcacgcctagcatccgaaacgaactgctaggtttgtttctactagcttgttgccgctaacattaatttgcttcatgcctgcttctcttgcctatttaaaggcacattagcatcagcaaaccactaattatctccttttgtgaccgttgatcttgaatctatcccatgggatatcacaaatttgtttatgcataggatatat

SEQ ID NO: 86045 - DNA, 194 bp, Glycine max
  unsure (1)..(194): unsure at all n locations
agagcgggcgctttntggttttttttttntattttttttcccaaatgataagccgagattcataattcagagggcccggactttatacagaagcgaccattttccaaaggttggaaaaaaacaaagtagctgattttcattttgaacatggattgagaagatttcaaattggcaaaagaaaggatttttaaatt

SEQ ID NO: 86046 - DNA, 258 bp, Glycine max
  unsure (1)..(258): unsure at all n locations
gcggccgctttttttgggttttttttatttatttttttgcttgaataatttagataatccacgtaaaaagttgtccgatttttatccatggttccagcaaattacaaaaccccagacaaatttcccaccttaccgttttctttcggatgataggataatcaaattgatataaacaaattacaaaaacagctgcnnnnaaattattaacttaatcgtttatattttcactttcttaactccatttcctctgtcaacttc

SEQ ID NO: 86047 - DNA, 240 bp, Glycine max
ccgaagaatatagtaaactctacccaaaataaaacgaagagagtttttatcatacaaaaacgtattaatttattctctttgacaactcaaccactttaaatatcacccccctgacacaaaaagcacttaccatttatcaagtccattaaaatgttttaattacattctttagctcatatacatacaaccaacgtctttattgcccaatgaaaacttttatatctaaatctccaaactaac

SEQ ID NO: 86048 - DNA, 323 bp, Glycine max
  unsure (1)..(323): unsure at all n locations
gnggtacataatattatcaatatcagagaaacgtattcaattgttagacgaaatctgcttgttaagtatacactatacagacataatctcaccaactgcttgttccgttaacactcaagggctaaattaaaaagatcatgtcaacgaaactaccaataattcccctgttcataatacctgctggtacagatcaggtgtacacaaaaatggaaaagtatcagagagaaatagggagggggctctaatgactacctggtgggttagtacctataacttaaatttatgtacaattttaacaatacttaggatttgacactaaatta

SEQ ID NO: 86049 - DNA, 501 bp, Glycine max
gggatcaatgtattaagtactttggttattttgagcacactatcacacctgtgttgttaagtactgtgttaaggactgtgttgtgataaaaggctatcattgtttaacacagtgttaaataccttgaaaatatacaagtctgttggattttaaaaaattaatatatcttgaaaaataatgtcaaacttactgttgtttgtcatttggtccacggctaaactatcaacatatgtatcaattgataacttaaggtgtgcttaaaatgtttgataacttaagataatgtaagcaaacgtaatatatatcaattgataattgataagttaagatgtcatcaattggttgacaataaaatttgacaagaaggatccaatactttttattatagttggcaataatggcattgggtaaagaatgacctggcgtgatagtttaaatcaaattgatcagatggtactgattatatatggcaataacaactactggtttgataagtacaca

SEQ ID NO: 86050 - DNA, 56 bp, Glycine max
ccaactttccatatagtgagccgtattaaaagcttggcctaatcacggtcatagct

SEQ ID NO: 86051 - DNA, 435 bp, Glycine max
gtgggatacagcaaggcgaccgtcgagaagcttgtcgacgaattcagatttttatgcttgttataaggacattgccatacattcgagataattcgaatgaagtttcaacaataaatcctacagcatttagtgcttcatcataatttaagttgactacgtcaaagctatgaatatattttcgcatttctttattttcactactatattctactttacgttcttcagggatttgtgttgttatatgtgatgtacctacacctacttatggtccaggatctctgaatgtggtgtctgtattaaaacgaaaacctaatgcatttattacactggctttgccgaaccgtgtttgttccgcattccaatttataagttcatttgtcatagcccctatcatgaacgaccacttgctgatgcacgtacccaacgttggtattt

SEQ ID NO: 86052 - DNA, 256 bp, Glycine max
  unsure (1)..(256): unsure at all n locations
tttnnttnnnncnaggttttttacagagatcgatcttaaacatatggtgaagtctacgctcaaaaaacttccaccctaaaacaacggaatgaattacttaggccctcttccaccctagggggttgacaccctccccccatcagttaagggcttatgtctcaaaactaacctttaaacaaatgggtctagaactttttattcctcacttcaccatcattagtcccaaccagaggatatatgttcctagaaccaaatt

SEQ ID NO: 86053 - DNA, 61 bp, Glycine max
  unsure (1)..(61): unsure at all n locations
cttaagacaaggatccctctangagcggcgcgctttttgtgttttttttttatttttattt

SEQ ID NO: 86054 - DNA, 440 bp, Glycine max
acttgtcaatgttgtcataaattatttatgcttataacaacttcaattgcttgtttaaatactacaaaagttctaattcacaattaaataatgtaagataatgaataaataacagttaaaacaagggggaaaaggagttgtttggctagaaacattttagctaaactaatcattacatgcctttgaggtagttcagcagcaaaattggcagagaccttcagaattcctggaaccaactaaagaagtttgccataacgatattgaataataatgcatatatcttgtgcaggtttctgtggacagaccatccttctcaagttgaattatatctacgacctttctcagaatggagaaccaacaccatcataggtccctgctgtaaaaaatacatccataaaaaatagcctcgatgttgtcattgatgatatatttaggatttc

SEQ ID NO: 86055 - DNA, 103 bp, Glycine max
  unsure (1)..(103): unsure at all n locations
gatcccctagagcggccgctttnntgttttttttntttttttttttacccgtcatttttgncataaattatttatgcttagaacaacttcctgacctgaggtc

SEQ ID NO: 86056 - DNA, 401 bp, Glycine max
ttaattttttttggggtggttctaattaactaacgtctcttcatcgggtgtgttcctttcttcatttgatacccggttatagtatttctccccatcctctttactccgctttagattcataaatgtttatccagcaatacagtaacgaagatgtcgaaccaaactctgtattgtgtctgccaatagataggtcaaaccatctcaagaggatgtatctgcagtttctgcaatcctagttagatcccttagtattgggctccccattccaccaccgaacattgcaacctcgatgcttgatcacagtaactgaatttccagtgctgcctttatagaatgcaaccaaaaacatacccgatgcaaaaatcagaaaaagcccgaagtcccctgtgactttccttttc

SEQ ID NO: 86057 - DNA, 130 bp, Glycine max
tatttttttttttatttttttttttcgcttattatttaaaacactaaacactccctgtgcaaaattttccaattcacctaacactacaactaaatttattaaatatgaatctaacatatttatattaaac

SEQ ID NO: 86058 - DNA, 56 bp, Glycine max
ccctccgcttattgatatgcttaaactcagcgggtagccccgcctgacctgaggtc

SEQ ID NO: 86059 - DNA, 532 bp, Glycine max
ggggaggggaaataaacccaaggtttgtcgtaatagaataaatcagcaatgcttgtgaaaattttaatttccttagaatacatttatactgctggtagtattctgcagacgaaagggagaagaataaagagataaagattgaggagagaagaacaaagatcggatggaaaacaagagagaagaactgaacaacataaattacaagctggtaaacaacgggtgagactcaaagtaaatagtgaaaagccttctgattctaataatactcttggcaatgatcaagaattattgtagctgtgaaggcccagagtagcaacctagtgtgtcattttctgaagaatgatgatgcatgttgaagcatatttttaatttaacagggaaaacttaacatcaaaaacttaaggggcaatcaaataaaaaggaagcaaagcaaggattcaatttcaatgatctgtaaactatagggcctctgtgttttcattttgcaattcaggtcactatcaccacttcaaaaaaaaatggcagtcatgac

SEQ ID NO: 86060 - DNA, 307 bp, Glycine max
  unsure (1)..(307): unsure at all n locations
tnnttttttttttttnnnggggtgttgggtaaataaaaccacaaggttggccgggggggaattatattatctacgcgtgctaacaattttattctccataaagattcctttattactctgtttaggttataggtttcggcttatatgggtttaatgtatttagcatattattggattggtcatatggaaaccccaaattttattagtttggtagagaatgaatatgtctcttttggaataaagaataaataattttgttttataaaaaataaattttcaattaaaaaaaattattttatttctttct

SEQ ID NO: 86061 - DNA, 378 bp, Glycine max
ccaaaaatatttgggttttatatttgacattcaattaattttcttccaccggatcaattcatttaaaaaaaaatgatttttcttattctaacttcatgtccaaataaaaaattgaactctaaatcttaattaaagaactctgaatcaattgtgctagcaactttttggtaagccctcacccatctaattggcaatatactttcctctactcctttattataaaataatctagaaaaagaaaatgatgggacatctacatatagttatgaggttacatccagcctactatatgttctttttaattataaacatgtgtgctatgcataaaggataatgatgtatatctgctaaattaatggacatgaggcatcaatcatt

SEQ ID NO: 86062 - DNA, 416 bp, Glycine max
gaaaaaaaactatttattttattaaaaaagtttaaataaacggatcctatatctatcatactatattggatgaaagtattctaactatcaatcaatgttgtctataaatatagacattgttgaatcagaatatcatctgaaatcacctaaaaactatacaaaattgaattgaaagaattgctctttatatgagccacctttccatttgaattttatgattgtatcccaaacgaaaggacacgattgcttaatcttcttcatggtggtgtaccttcctataggggcatgagtcttctgtacttgaagaaccacacaaatgcagaaaatatgaagactccacaaactcctgttattataaggacccactggaaagcagaggggacatcaaataattcaatttcaaaattcatcccaaa

SEQ ID NO: 86063 - DNA, 114 bp, Glycine max
  unsure (1)..(114): unsure at all n locations
tcgctaaataatatttntatcctttgaatcacgccgcgaattttcctattgaaaggcatccccaactatgtaagaattggaaccgaattgtcacatgtttgtccatcaaacaat

SEQ ID NO: 86064 - DNA, 421 bp, Glycine max
actgggcataagttattgcgattgtagtgtttatgttttttctatttaggtgttatgttcatgtctgctacataagtttcctttttactctttttaggttataggttttggtttatatggttttaatgtatttagcatattattgatttggtcatatggaaacgtcaatttaattagtttggtagagattgtatatgtctcttttggattaaagaataaataattttgttttataataaataaattttcattaaaaataatttattttatttctttctaattacgtaaaaatatttcattccaaagtcagataaagcaagaatgttaagctaggaaaatagaacataatttccagtgctatatccttggcaatcttgccaagattgaagtttgtagttcatcactaagactcaaaacatta

SEQ ID NO: 86065 - DNA, 397 bp, Glycine max
ggcatgtatggtatgggaaaagccctagttgtaaatctttactacttatgaaaatataataaataataaagttcgtaaaaatgtgctgaaaattaagaaaaaaggtgtaagctcagtgtactggagatgcgcttattaagcctttctagctttgaagcaaacttattccttgagtctgcgccgtcttaaaaaccaaaccctaatcttgctagttcagttcgtgtgttttacgggagcgcgttgaactagtgtgcatggaccttagccacgagtttttcggcctagacgctacctcttccctgtcttgtctttcaagagaagtgaagtgggcgaacgataagaagagtgactttctctctttgctctccgtaatatgattgattaaggaaacccttgc

SEQ ID NO: 86066 - DNA, 250 bp, Glycine max
  unsure (1)..(250): unsure at all n locations
tttnnttnnnnggcgctatttttgggangggaacaagccctatttcggagattttcactactcatgaaactcgaccctagggaaacaatctgattactgtgcccctattaaaaaaaaaggtgtaagctcaatgtactggaaatgcccttattaagcccttctagctttgaagcaaacttattccttgagtctgcgccgccttaaaaaccaaaccctaatcttgctaggtcaactcctgtgttttaccgga

SEQ ID NO: 86067 - DNA, 151 bp, Glycine max
ggaaatcactatgggaaacaccattccaacaggtagcatgtcaatctagaacttaacatgaaaaatgaaaataaatatccatcttttggtttgttatttcctttggcaaagatctcactctagtaactgtttccaccaaaacctttcaaat

SEQ ID NO: 86068 - DNA, 299 bp, Glycine max
cccccagcggcgcgctctttttttttttatttttacttttacccaactaataattaccccaccacaaaatgtatatacgaggttttcttgccattacaggaaaaccactaaggcaaaatccttcattcattctctaactctcgaagccatgcatctttcatcaaaacctaccatgaaaattcaattacattttgtctccttaattaactcaactacttttaaaaaaataaccacatttctctaatgctttttattctaacatacttttcaaaaacttcttattttctccaaaatatcat

SEQ ID NO: 86069 - DNA, 257 bp, Glycine max
  unsure (1)..(257): unsure at all n locations
tttnttttttttncgctacataaaaaacccgtaacaaaacaaaaatagacgttttttacaatacttacccaactcaatacacaacgaangcctacacttctgcgatacacaagaaatcaaataaaactgattaaagcttactattagtaattagctttaccaattttccaaccctcatatttgaaaagantataaaaataaactagtcttcactctaattaatttggattactttattattcataaaaacattttaa

SEQ ID NO: 86070 - DNA, 406 bp, Glycine max
attattccaaataaaagaaatgaaaacaaaattgtctagtctcctagacaaaccacttcccactccaccaaattaatatcaaggaccccactttttccacttgaaccatagactactccatcaagtccaagtcaatgtccttcattttttcatcttgaaccttaggacactccacagccaaccatatttaggtctgtatcttcttcaacatgaaccataggtcactacattaccttcatatcaagttccttatcattgacaacaaatgtttagaattaagtaagcaaggaaaaaaattataaatgatgaatacatcaattataggtaaatgatctaatttaaagactatttcggttaaaaaatctatataaaaaaagactctttcgtttcaatctaactatttaat

SEQ ID NO: 86071 - DNA, 270 bp, Glycine max
gcggcagcacaaaaaaaccattggttgtttaagatcacatacctttataccatacggaggggggatattagagtactattcttaatggcccgcggttgtgttctacacaggccgggctcattactaagggtctttatctcggacccataaaaccttacattggttaaaaagccttgggaaaaaattgaacaacactcattaggttatgaggcaccttcggcgacattggacgtttttccgggtaccttttcttgtggatgtcatactcat

SEQ ID NO: 86072 - DNA, 326 bp, Glycine max
gcgacgtagctggatcctctagagcggccgtttttttttttttttttttttttttttaaccctttatcgaaaaactattataatctttggggatcgtaattttattacacccacccatctattctcttttcaaaaaattacaaaaataatattcaacctctaataaccatatactttaaaatcgcttagctttttaaaaactcaaatggttctattcaaagtttaaacctatactaaaaaaaaattccttctttctttacacttaaaatttatcactacttcccaaaaaacaagcacatggattaaaaaaaaatatatattttttt

SEQ ID NO: 86073 - DNA, 399 bp, Glycine max
ggatccgcacttcggggtagttgaaggattgtagctcataatctggttctccacgtttggttggagtatgcatgcatttaacattaaacaagtgatcatgaatttagcaaacagtggagacccatttgcctatgctgatttcatttatcccctaattcctggctttagaaattatgacatcctttgcctttttattcataatctccattgatacatcgaattttgctattcccacaccattttctttttaacaaaaatacatttgatgggaatgtggtgaagtcacatctcctaataataatacaaggaaaacttattttaattgtctatctcaaaaaatatcatgaagataccaacaaaaatacaattttgttgtgtatgccacaagatgtacatttg

SEQ ID NO: 86074 - DNA, 337 bp, Glycine max
gggaaccttacttcggcgaactaaaaggcttggggggcataatatggttctccacgacgggcccgagaatccatgcatttatcattaaacaagggatcatccattcagcaaacagtggacacccatttgcatattctaacaaaatcaattccctaattgctaactttagaaattttgacaccctttgccttgttatttataatcaccactgatgcatccaatttacctattcccactcctttttctttctaacaaaaggacatttgaaaagaaccttatgaagtaacatttcctaatcttactacaaggaaaacttatttgaatcgtctttcccaaa

SEQ ID NO: 86075 - DNA, 357 bp, Glycine max
gaaaaactaatttaacctttaaaataattaatggtgaagaattgtttagtttgtacagcaaccaggtagaaagatcacattcgaggaagacataaagtgccttgtgtgtcaatgggtaacacccctatgaagacttaccaaaaaccaatggcaaaattgaaaattctatttccttctaaaccacattctgctcactttcattcaacagacttttcccacagtataccctttccatatatttaaacgcaggcaacacatgggatgttcaaattagctatatagagttgaagtcatccccctaacgatgcctacaaagtcactgaatcaatgcagcagcatggaataatattcagcatt

SEQ ID NO: 86076 - DNA, 303 bp, Glycine max
agttaatcctaaaatttaggtctagaagtgaaatgcaataacaagaatatcaaagaacattttagtacatattaacttagataagacatttatacactaccgacaatgttttacccaatttagtgttatagacttgtagtgtcatgtttttaacttttagggaacctatatatcttatagtatactagtattatgaattgatgagtatgggataaaatcaagatgaaaagctatttattaatccatgccttatgcttatcatgttggcacgtcacctatcacatttcttactgtgttgtctga

SEQ ID NO: 86077 - DNA, 300 bp, Glycine max
  unsure (1)..(300): unsure at all n locations
attgctgctctccaacaaagatgatccacttgtccaccctcccgcaagacataaccgaagaggagattgtgagccttttggaggagcatggaaccattgtcaacagcaaggtctttgagatgaatggaaaaaagcggcacttgttagtttggactgggacatgctctgaaccctgtgtcaacatgcagccactttgacggtgtcgattctttcagtgaaaaataccaacttgtagctgaggaacattatgtgactgtcgtataggcngatctgatggagaattatgcaaagactatgatg

SEQ ID NO: 86078 - DNA, 146 bp, Glycine max
  unsure (1)..(146): unsure at all n locations
ctacatnncactnnacatgagnngctgaaannagnngctaagatacaagattattgttttagtaatattgtattagtgaattgataggaagagcttacttatcttctagattaattcttacatagttgagctagaggaacatattt

SEQ ID NO: 86079 - DNA, 262 bp, Glycine max
  unsure (1)..(262): unsure at all n locations
accgtcgtcgctggagaagacgacagaagngaaaatctaataanaaaaaaccaaatattatattttcttaaagccaaaatgttgttatgctgaaatctttaattggtctgtttgtatncactccgcctttattcaatagtttttctcggcgaaattgccgaagcctacctttttaatcaattgggattatgccatatccctacttttttttacttgttgcagcgtgagttcatatttgattgatagtaaaaataaatataaa

SEQ ID NO: 86080 - DNA, 280 bp, Glycine max
  unsure (1)..(280): unsure at all n locations
ngaactataaagaaactaaggtaagaatgccctactagcaactgacttccttcaggtatgattcgttcgtgacctataagtgagcaagtcttcgcccgttgccattcaatagcaaaagctgtagttactacactcttctttctctgattatctatcgtgctgccaagaagcaaggttacgcagtcctctacctatacgtaccttaagaagaactatttaatctctcttgaatcacaatgaaacttcgttgtctataatattcaaacttaacaagcaccaa

SEQ ID NO: 86081 - DNA, 133 bp, Glycine max
  unsure (1)..(133): unsure at all n locations
atttgagaggttntggtggaaacagttactagagtgagatctttgcaaaaggaaataacataccagaagatggatatctatttcattctcatgtaagtctagatgcatctcctgtgaatgtgttccatatgta

SEQ ID NO: 86082 - DNA, 164 bp, Glycine max
  unsure (1)..(164): unsure at all n locations
aagaatgctcacgagacacgcatggngtcagccacatgctatccctgctgctcctccttctctctacggtggtggtgactcgccgganaacacccactgccacctctaacgccgccgccggcgaacaccgcttgtaaaatctcacccgacccaattcacctttc

SEQ ID NO: 86083 - DNA, 274 bp, Glycine max
  unsure (1)..(274): unsure at all n locations
gtcttcactctctacgattattntataaaanaaccatcttaganaaaattatccttctaagacggttcttaactaagagatatcttagaaagatacctttntaaaacgattcttagttaaaaaccatcttacaatggtagattntttaaaatggttgttcagagaaccgtcttagaatatatattntaaaaaaatatatattcggaaattctaagacggttntttccaaaaaaaattgtcttanaatatgtacattctaagaatgtttttatgt

SEQ ID NO: 86084 - DNA, 331 bp, Glycine max
ggcagatagaagacgacagcagggtcccgtagcaagctcgtagaacagggtagggtgtgagagctgcatcctcatctcccgagtgggatgatgccaatatcgctccttttctactggagtccccaattgggcagatcctttctcagactctggaagatcacccacatcttgagcctgctgccgtctaccaacaactccaccagcaccaaactgaccgtgatgctcatctacaaaaccaacaacagacttgcttcacccacttggttagttttttacaggtcaatcgctgaggtcatggctaactaaaggaggaaaagctctttagagatct

SEQ ID NO: 86085 - DNA, 317 bp, Glycine max
aaccgactttggagtgcacgaacactggatggggagcgaggggtgcacaaacgccagccgcccctgttattgtaaactgggcgcctgcggttttataactgaaacacgcgtataacctgaccagcgcgatggacaggatgctgaactttaagacacaataaagtcgatcggaataactgttacgttggaagtgttaatgcacgaacgcacatctggatgctgcttgtcaggtgcggacaaccaaaaccttccatgcacatgcaaatagagcgactacacaattaaaccccttactgtggcaaacaatgccataatat

SEQ ID NO: 86086 - DNA, 285 bp, Glycine max
gtaagcagttcattatatatatctattataatcggacagttgtttcacaggttgtgctccttttttgctaatagggcgaaaatcacattcttttactttacaatttctatatggggatgagccgatacatggatacaagacgctgctaagctccatttacgactacactttatcaatagatgccgactcctagaggaacacccctgccctaaagaggataggtcattatctttctactgtgtcagagactgtgatggacctcatgatatttataaatacatactg

SEQ ID NO: 86087 - DNA, 385 bp, Glycine max
gactgtttttcatggcaaaaaaaattcaccatgttgttaaacggaaggtagcagatatcgtacatagaaggaaaaaaacttctatgtagatgttcattttctgactaaaattggtcagacaatgtgaacacaagaaacttcatcctaatcataggagcaagaatttgtcactgaatccaggttctaggttgtttcctaatacgagataaagttttatttatttattttttgctaggcaatacgaggtagtttcctaattaagattaataaatatagcataatacttgccttgtttccagtacctttgttcccacgctcactctagaattttttacctctcacacttcaccttcttcttctttattccttgctcttcaatggcttc

SEQ ID NO: 86088 - DNA, 170 bp, Glycine max
cggccggattccggtcgccccgcgcccgcctgctgcgagatgacagcagaaagagagagcgacctggtgtcatggccaaaaacactcaccatgctgttaaacggcaggtagcagatatcgctcataagatgaaaaatactgccatgtagacgcgcattctctgactaaaa

SEQ ID NO: 86089 - DNA, 265 bp, Glycine max
acatcccatcaaggcatataaggagtcatagcctagagtggcattaatatgaattatgacaccgccatcaactattcacaattgtattacatagacagctctggtgtgcgctggctacatttcacttaacatgagttgctgaaattagctgctaagatacatgactattgattgagttttattggaataagtggaattggatagttgaaggtagctttactttatgctttctagatctcaattttccttcagcaattatgatttg

SEQ ID NO: 86090 - DNA, 141 bp, Glycine max
gggcacccgaagggcatttcttcaaggcttctgatgggacatctccccgcgtggcatgaacattaataatgacacccccctccactattcacaagtgtcattcaaatacagctctggtgtgggcttgctcctttttaattt

SEQ ID NO: 86091 - DNA, 209 bp, Glycine max
cgtataaagtgtgatgggtgcaagggttatgtgagggcatggaatacgtctcacagtgaaacgtgctccaaatattctcacaattcgcgctgcacagatttcagtgggggagggttgaatatcttatctagagagttacttttatttgagactctacgatcgtagggcctctacatttgttccccctccttttatggttctttttattt

SEQ ID NO: 86092 - DNA, 385 bp, Glycine max
ggttctagtgtgtgattgtttgttgttgtaactcgttcttcttcttttgttgttctgtgtttgtgtttgttttttctctcacctgaaaatgtcttgctgcggtggtaactgtggttgcggaagctcctgcaagtgcggcaacggctgcggaggctgcaagatgtacccagacttgagctacactgagtcaaccaccaccgagaccttggtcatgggagtggcacctgttaaggctcaatttgagggtgctgaaatgggtgtgcccgctgagaacgatggctgcaaatgtggaccaaactgctcctgcaacccctgcacttgcaagtgaggtgttgggagagcaagcttcaagcagagatagcccttaattaggaataatgataaa

SEQ ID NO: 86093 - DNA, 259 bp, Glycine max
cctatttcacattcacattattcatatcaaacttgaggtgacaccttattaactctttttttatctcttaaaaattcttgtcaattaaaaaacatgattatttatcacattaacattgataggatcatatggtttgaggaatcatgcaacaatttctcatctaactaagattaatctgctgattttaattcaacatattatttttttacaggtcactttgtccaccaaaagtcatttctataacctttaagtgtagtcc

SEQ ID NO: 86094 - DNA, 254 bp, Glycine max
cgacggggggggacgcggctgtaatttacacgttgactaaaccaatctaactcatataaacacgggcggctttttattatgatccaagctatgtgacctgagttattacgtggtacagtgaatatgtatacacccgaatactttcagcagacctaccttagaatgctgcgcagcctttccatttatcatggcatgataggaaatcaagatgcaggtcgtctttctttaaacttatactatgggtgaccataggc

SEQ ID NO: 86095 - DNA, 326 bp, Glycine max
cgggcgcccagcgccagacgctggagaagtcgacagaaggggaccgccagcaccgtccatgagagagaaccggggagataaaacgaggaaaaaagctcataggcaagcaaggcgtagggaatcatcaaccatcacagcgaaagaaaagccacgcaacccgcagagggggtaacacgataatcgatctaacgcacgccgggcaaaagcagagataaagccacgagccgagaagccggcgacggaaacaaaggtaaaaagcggacgagttacgcgctccaagaacggacccggaaaggatagccaaaccgtcctacgcagaccgagcg

SEQ ID NO: 86096 - DNA, 224 bp, Glycine max
gcaccttgtaggtgtaaaggattattgaggagcgggggtttttgaaaggcactgctagcatagtgaggaaacttgaggaatccagaattctaatcgtaatgtctaaagcatcagaggctactagcagtagttatagctgatgaggacaagctatcatatagggtgaccctcatagtagtagcatattaatggtgggaacaatgcatccgagaaagagttttttg

SEQ ID NO: 86097 - DNA, 53 bp, Glycine max
gacctcaggtcaggcggggctacccgctgagtttaagcatatcaataagcgga

SEQ ID NO: 86098 - DNA, 349 bp, Glycine max
tgcttaattaggggtacctgctatactcttgctaacttattgcagctcccatgaaaaaccaaagaggtgttacgccatgttaatgattgtagaaacttgaaaccaaggttgtggtacctaacacatgcacaaacccagattgtgttgttcgttagagggcgggcaaggtgggagaaaaacggcgaacctaattcgacgatgaatggatcattggaaataatgaaacggggggttccggtagacatgacacatacatcatatcttatcaatcacatgggcttagtgctcccctagctttagaacgaggagtgccgggaactataataattgggaggatgatgaccaggaa

SEQ ID NO: 86099 - DNA, 199 bp, Glycine max
ggtggtggtggtgccaatagtaacacttccaccaccaattattggaacctcacgatgcgccaagaagcgaataatcctgcacaaagggtcccgatcaacgcggctaatcttgataataaaaaggccgtgccggagagtgaggcattaccccctctaagaccctgtctttatggtgtgcctagattgctgcaacacggcc

SEQ ID NO: 86100 - DNA, 249 bp, Glycine max
cgtccgcttaaggaagatgaatatcatattattcttatttttcccaatctagacttgctgggggggggtttgtgtaattgatatggcacgtctaactttgagtaattaaatttaccttgtaggttttaaagcttctgccgatggctctctcatttcaaatagggctgtatttcatgagccatattttaatgacccttaaaactatggcttacaagttgttgaattcataggtgttttcaacatcacaat

SEQ ID NO: 86101 - DNA, 297 bp, Glycine max
  unsure (1)..(297): unsure at all n locations
attgaaatatttaaatatttatataaaagtttttttttttnttttnttttttttgttttttaatttattttaaaatatattttttttaaaaaggaaatattttataatttttttaaatatgtttattataatttttttatattttttatatatttttagagaaaaaattaaattttttataattttgataaatttataatatttattaaatggttattgagttttattaaaaaattttatttaaaaaatatttnngtcataataatattttattatattcttttgatttttgaattt

SEQ ID NO: 86102 - DNA, 210 bp, Glycine max
  unsure (1)..(210): unsure at all n locations
ggcatttggggggggtttttttttatctaaatcaacaaaagnnnntaattnatttaaaccccgaaacaaaaaacaacatgtggaaatctctaacatggagttggggaccacaattttaacaacaaaaaagaaaaatttggcccctttttggaccgccnttatttccttttattcattaaaataaagcattaacgtttncttgggaaggaa

SEQ ID NO: 86103 - DNA, 428 bp, Glycine max
caaggaacggctaaaatatgttgcattacctatcccaaacacatggatggatggactaagatgattgtttcactctacagccaatagtaataggaaaagaaaaaaaaaagtaaaggacataatatctggaccaccatagactcctatagttacggtatcagcagatatcatgggatatcatctatctcctttcttgctccttcccccatttcaccctgtttctcctcctgtacgtaaaaaccacatcttttctgccaagttagcagaagaaagattggtcatcacccaccgacttcctccatagcaatgcagaacaataaatttttaaaaataaaaatgaaaaagcagactccatgaccatgttatgttgttgctgacatgaaatgcagacccaaatgaccgaacacctgttcccaaaaatggtgatg

SEQ ID NO: 86104 - DNA, 415 bp, Glycine max
acctcactaatttaacaaaatttattttgtaaactttgacggccttgttctgagccatatatgtttttaataagttatatttggtaatagtaaagggaatgtaaaccttttacccacgtgaatgtgtttatcagtatttttatatggttttatttatttatatggatattgagggagagggggcgacatttagtggtatcagagcaggtcgaacctttcgaccagtgtgttatttgcttaccatattctggggggcactctgggtgattacttatgaatgcttttggtgagcatgcctgaattgccaattatattttcctttgcgtgatcaaaagacactgaatgatgcttgtgatgtgcgatgcatccttaatgtctggtataccataaatccattgttgaggcatgagatatg

SEQ ID NO: 86105 - DNA, 805 bp, Glycine max
  unsure (1)..(805): unsure at all n locations
tcctgtagagcggccgcgagagccccaanttttttatctttctttttactttannnaaaccccttattaacccggttgttaaaaaagaaacatatcctacacacccctattacatacacaattagtaatattttgcttatgtactcaagataactgtaattataccaaccccagcttcaacaggcctattacatcattaaagagtctccttatctttttaactgtttaaagctttaacgtaattatgcaacgcttatacagattaatatacttaaaaatacaagcttattttattacaaacccggaaacagtttctacaaattgattttctccctttgtagtactcaaagtttaatttttcttagcaatgaagttaaaattataacctttataataatttatttttaaaaaaaagtatttctttataatactcttnattattttttttaaattttaaataccatctctctccttttttttgtatatacccccatacttgttaattanttatttttttttataaagtttatctttaatcatttacatttattctttctttcagtgaattttattcatatatttaattaatggatttttattaattttattttttntttttaaatagttatttattataattaattgtggtttttattttttcgttaattatttttgtttctctcattaaagtgaaaaatattatatttaatatttgttttttatcattgtatttttttttttaatataaaatacatatttttccttcttttatatcttatgtttatgtaagttaactatttttttc

SEQ ID NO: 86106 - DNA, 307 bp, Glycine max
ggagaaatcgttaagatataccttaatgttgtaaattactatcacaacacatgtatttcagaacatgcaatctagatattaactagctatagaagtgttacagattgagaaatccgtaaggattgcatatatgtaaaggttttggatcacatgatttggaatggtattatgtctcttttggaataaataattcagaacaccttacaaattagttgtgacattttagaacacctatttcggaagagacacaatatattacggatgatataatccaaaacctccatagaattgcaaactttacaagttt

SEQ ID NO: 86107 - DNA, 372 bp, Glycine max
  unsure (1)..(372): unsure at all n locations
attcttttttttttttttnttttgttttcacagaaaacaattatatatgggcagtttttttacatttaacattgtaataaccaactcttattttcggctccagtacaacgatatcataatgtaaattccacatttacccaaacatataataacttacacatgattccaacatatacaaatatctaattacaaggaaaacacaacacacatgtattatccaatccccatgaaaaaattcaacccctccctttttctttaataattccacaaatatacttttggaaatatcccttaaaacttaaaaacacttaccccaaaaataataatcgttgataaattctctcctcctttttcctcggcccttattttcat

SEQ ID NO: 86108 - DNA, 52 bp, Glycine max
cgttccaaatttccatataggggggccaatcataccttggcgaaaaaaagga

SEQ ID NO: 86109 - DNA, 52 bp, Glycine max
gggccctcccccatccgaaatgggtggggaaccaaacagacgccctattttt

SEQ ID NO: 86110 - DNA, 181 bp, Glycine max
  unsure (1)..(181): unsure at all n locations
cccaacccctccccaaaatagaattttctaattgcaataatnncccattaacttcttcattttcaaaacaacgcgcaaaatatcctttatttaaatttgcgtgtgctaaatcttataaaaatctgtttgaaaattcacacaataaaaacaagtattattgtaataaatctaaatccttttt

SEQ ID NO: 86111 - DNA, 478 bp, Glycine max
atattacaatgtttaaccattataatatttacaatatttattttattatttcagcattacatcaagatattgttatcgatagatgatatgtgtattttattttactaattaacataaaaaaattaaaaattatataagaatataatataaatatgtttatttaattttattattttatttttatcaattatttcagtaaataattttatcaaacatttatatttcaataagtcaacttaataactttcaattataaattacaaactttcaacaagctttttaattacttttgtcaaatatagtcatatttaaaacataaaattcaccaagctttatctccaatacaaaataattacttaaaactaattctaagagtcatgctaaccagtgtcattaatatattaattaagaaatcataatttttttttattaaaaatgttgcattgaaaatcatgaaagagtctatcacatgcacttt

SEQ ID NO: 86112 - DNA, 575 bp, Glycine max
ggggctatcaaaaccacacgacccaaattctattctaagggtatattgatttcggatcctgctatttacacccacgtttttctaattacaccctatacctccccccctttgcctctcaattactcattatgcctttttttaaaaaagaaatacacctattttgctttccaaaaatgtatttgggaaattacatatacctattccaaaaaagtatttcctgaattatgattcatagttccagagatatacttttgaaatatcacttaagaattaagatgactgacaaaaaataaaaaaaatgataaatggttatcttataatcatgtttattagttttattttcatcctatcattagtggtttttaaatcctgtttaaaatcttattttcatcggatatttattattctttaaactctaattttaaattatcttcatcatatattcattataatagggggcttttatcattattatgcactattttatgttttccttcatgtgtcactttgttttaagatatgttcatcactaaattcaaatattatacacctttattacaaagcaaaatttttta

SEQ ID NO: 86113 - DNA, 205 bp, Glycine max
ggagaagtgatcctagaggcgttttttttttttttttttgggcttcaaaaccaccaccgaggtatttaaggatatgatgatcctgtatacacccattttttaattacaccctatacctcccctttgcttaatactattatgcctttttaaaaaaaacacctattgttcaaaaagtttgggaaatacttcctattcaaaaagtttc

SEQ ID NO: 86114 - DNA, 489 bp, Glycine max
ggatgataatgctccgtaagttcttgcaagagacaaattgttacaataggaccaaacattatttatgctggattcactaattttgcttgttttcctaaatggtcttcttatcctacctagttaatagcacgagaaggtcataagatcttcaaacaaaattttctagaaaatgatattttagaacattaactctgactaatcacaatcgacacccaactgcttatggtgacagacgatgttaaattccaagaaaaaaaaaaagcttaaaaaaagataagataaaacatttttccatttcaacataagaagaatagaagaggcagctaatgagacttgaaagagcggaataaatgaataaattaccccatggctccaacatctattaacagagatcatagatgagccatatttgctgcaactgaataggacttggaacatatactcaagataacgcaagcttggattcataagcaagcatacagttcagtc

SEQ ID NO: 86115 - DNA, 166 bp, Glycine max
  unsure (1)..(166): unsure at all n locations
tttttggggggggtttttcccataaattattaaanccacaaaatataaaacatcattttgaaattttttacattacttgtttacccacatcttaaacaccctaaaatgaatctagtccccctattttaacccatttttttacatatacatagataggatcatacta

SEQ ID NO: 86116 - DNA, 416 bp, Glycine max
  unsure (1)..(416): unsure at all n locations
aaaaagaacattttttctcagcgcgaacataccctattaaattacttcacaaaccnttcagacacctttttttaaacggtaattcatgaccgttacctccacatataaaaacttttccaattattagttttactaaatcttcacgcaatcattaacatattcttttcctgaataaaaattttattctcttactatttcaaactacatactatcctcaatcataaaatttaaataattggttccccttatgggggagtgtacccacaaaaaaagctttacctacaatatcaaatttccaaacaataataacatactttccataatattttaattaattttctaatttatgttagaaaatttttttattaattaaaaactcttttttaaactctttaatatttatgttttttcaatat

SEQ ID NO: 86117 - DNA, 473 bp, Glycine max
  unsure (1)..(473): unsure at all n locations
aaaaaaaaaatcccccaggggggggctagacaaaaatttctctctcacccccccaatttttctgcgtttcaaaatttcttttttttaaaaaacgtttttttcttcccccctttatccccagaagggcttaatcttttacaaaaaatttttaaaaaaagatatttttataaaaaataatatttttactattaacaaattacaccccaccttcttttttttgtcaccaccaattttttttatttccacgaaaaaaaaaaaaccttttaaaaaattgattaaacattttttcctttcccctttgaaaaatataaaaggccnctttttaaacctcttaaaaaacgcgtaaaaaaaataattttccccccttttcttacatttttttttatccaagaaaattattttttgccccctttttttttcccctcaatataaaacctttgcactattctcccccataaacccccccttttttt

SEQ ID NO: 86118 - DNA, 473 bp, Glycine max
ggtgggaacaagtgattggtgtaccaataagaagaggtgcccttttatttgacagttaaagtagaggattgttcagcaataaaaaaagggaagaatgttcccttcttacttgttcctcgatagtccagaataaagttagtgattgtgctgttaaaaaacattatagactttgtaccagactagaaaataaccaccgaaagcgttatgatacgaaatacacgtgaaaatttggtccaaattcagccttgtacactaaaatatttaacgcgttaaagtatataatgcggtatttagtattggatcattacataatgttattcctcgagtgtttagagaagccacctgagcttatagtttaaggtgaaatagttattgagtagaaaaaaaaattgtctatagttgttcagactaaatattttgacattttctgaaaacttaaaaaaatgtaacttttacatttacattttgaaaaa

SEQ ID NO: 86119 - DNA, 271 bp, Glycine max
ggggcagggggttggttggttgaaattgtttgatgtacacgtaaatacttgttcactcttgaagggagaagaatcaacaaagttgattggtgcttcttcccaaaagcagcagagttatgttgtgcaacacttttttaacatttataagttgagtgtttcaggtcgttagcgtggacttgcatgtgttactgtgataaccaaatgtaaaagacgtcttttatactgccgttaaaggggttcttcaaccaccaaaggaaaaagcaacaaaaag

SEQ ID NO: 86120 - DNA, 407 bp, Glycine max
  unsure (1)..(407): unsure at all n locations
atttaagattggatcctctagagacggccgctnnnnnnntttttatttttttatttttttttggaaaagaaccnccaaacacacccgggccgctttataaaaaaaaaagacccacttctttatacacccatttttttatacacacacaaaatatctacaaaaaacacccccccccaacatattcctttaataaaataatttttttttttccaaccactatttttaaacaaaaaccaaaacaaaacttttattcttttaaacaaaaaaaaaacattcattcttttaacaaaaaaaaaacaatttccaatccaaaagataactttaattttacaacccacatcctatacattacccaaagacagaatctcctttaaataaaacctatccatacaaaataccataaccat

SEQ ID NO: 86121 - DNA, 504 bp, Glycine max
  unsure (1)..(504): unsure at all n locations
cgtaagcttaatcctctagagcggccgcttttcttttttttttagactacnnannttgggataaaggacattggatatacaatggatgctgaccaaaccattcactttttcctgtggaataaatatacaatttaacagtgaagtacctaacctggctaatttaatgtctattgcctagccttctgtaaaacttgcttctaaaccaaagcaattctctgcgacatatggagctccaaaaacctttccttcactctttcataccctttctttaccattgttagcctcttctcaacatgactagccaatttcacaatgttctccgcgagaggtgtcacgccttctttcccaacaggatgcagcaaaccggttgtcccattcaccacaatctccatcgtgcctccagaacagttcccagttcaggcagccgaaatgccattgattcaatggttatccttccaaaacatttctgcccgtgcctgagaaattttgacaagaacattaaca

SEQ ID NO: 86122 - DNA, 119 bp, Glycine max
tttattttttttttaaaaaatctttacttaattaaagaaagtataaatcttatccaatcacacccatatatattacacccaataaccataaagttcataacaaataaaaccattttttt

SEQ ID NO: 86123 - DNA, 514 bp, Glycine max
ggcaaataagtcattaaggctcaatggtatttctttagcccaagagacaggaaaaatccaaatggattgaggccaaacaaggctgcaggctcaagatactggttcattgaggtaatacttaataataaaaagttgtttatgacttatgagagcttatggaagaatacccccacaattaccccattttattttgaattgaaataatagctagcaattacaaatgagtaaacctactttgattcagaataccccacaattagctaaagattggcctattccagggtacacactctttcatgatggtgttgaatatgttaaattggcttatagattgacccttcattatgtgtgaaatttcaatcttcaataaaatcaaagcataacaagtaaaagaaacaacacatgacccttcattttggttgaaagaactactttgttaccattgaaagaatactcaatacactacaaagaaaaaggcactaatataaattctatacatgtatttgattatttc

SEQ ID NO: 86124 - DNA, 180 bp, Glycine max
tttgcacatccaatgttctctacaaagacagaggaatacgtggagttaaacatagcaaaaaaagaaataaaagattgtgaaattggcattaaaaattccattggaacaataggaccattggactcattactaaacttgggggggattaaattgaaccaaaaattaatacccacaattaaa

SEQ ID NO: 86125 - DNA, 463 bp, Glycine max
ggaggagttattccatgaaactggtgcacgaaataatttgttttggattctttgatgttcaaaccatagaaaaaacgagtcacaagtatcattaatgtgttcgacatatttttaaaaaaatgcagcacatggatacttaaccatagttgcaagggttcaaatcatagttttttttcattttgggcttctattttgaggtgttattccatggaactggtgcacgatataattttttttggattctttgacgttcaaaccatggaaaaagtgtgtcactaatatcattaaagtgttggacataatttgaaaaaaatgcagaacatgaacacttaaatatagttgcagggtccaaatcatatttaatgatgtcgttacaggggtacttaaacatatttgatcccattatcacaacattttatacttcaatgaccaagacgatgactagtcccacaaggtggtggac

SEQ ID NO: 86126 - DNA, 250 bp, Glycine max
gtctgttattaattaatccattttacaattgttaaattataaaattttttccatataacaattatcattttggatgatccattccttattattcccattttttcttttacatcccactttaattatttgctaaattataaaccctttttataataatacatttaatggaatattcaattttaaaattctttatccctttatttacacacatcatagagtgaatattaaaaaaatttctttaaccatattt

SEQ ID NO: 86127 - DNA, 130 bp, Glycine max
  unsure (1)..(130): unsure at all n locations
annannanatattttttgtgttggtgttttttacaggaaagatctaaacttttgatttgctttattaaattgttaaaaacaattttattcatttaaaacttatacttataacatagtttaaaatttttgg

SEQ ID NO: 86128 - DNA, 174 bp, Glycine max
cacattgtaagcaaattaaaatagcatgggaatatgggacaaatccaaatattggtggtgcattggcacataatctacaaaaccctggaaactaaccgcaatcaaatatggtccccatttggaatttgaataccaaaaccgggcattgattattttacccttttttccaaaccc

SEQ ID NO: 86129 - DNA, 377 bp, Glycine max
  unsure (1)..(377): unsure at all n locations
nnnnnnnnnnttttttttaaaaggggaaaaatggtatagctagtacttgagacacatcaaaatatacctgaaaccacactttttttttacccaaataccacactttataacacgggaaacaaccacttttgcttgcgacgtgctaacttattatacctggacagctgttaaaaaaagtttaatgatgggaaggattacaatagttcgtattggaagacattaaaacaatccgtctgatgaaaactctgaaacgtcaacttgacagagaaaattcacacataacttgaattgggacatggacgaattgctatatcagggactcggtggaacatgaacaccacactcttcattgatagggcgaaaaaaagtttatattg

SEQ ID NO: 86130 - DNA, 442 bp, Glycine max
ggggcccaatgactcgatcccctcgttgcagctataattcgcggaatcttaacccaattgggtaatagaatattcatttccatttatcttccaagttccaacaataaatagatactacactacaaaattaggttttatcacttttacttttatcttttccatagtatttgttttttttttctcaggggacccaatactttagattcaaattctaattttagtaaaatctaagagctaataagggaataatatattccattaataattttaatagggtgttagggcaaaatatttgtattgccaactaattataataattcacgattaaaatattatacgaccatgtaaacaaatattaattattagtttattctaataaaatgcaaaataattttaaaaaatgttatatctcacttcgaaatctatgtctctttataaatac

SEQ ID NO: 86131 - DNA, 307 bp, Glycine max
tttaatctcttttcttcccaaaaaccgcaaatttaaattgattgtgtatttaggaaaaaaaaaaacaatattaatatttccttatacctattacataacctcttttacataaaccagaatacacttttcccccctttttttctttacaaaaaaattcatttttttatttttaaatctttttcaccccaaaggttttgtttttatttttatttcaaaaaaaaaacctttttttcataaaaaaaaacggaaaaataaatttttttttttttcccgccctttttttttttttaaaaaatatatatttttt

SEQ ID NO: 86132 - DNA, 376 bp, Glycine max
ggttgtagagttaggaatacagatcaaaagttacgaacacgaagacgaacttaagttggttaattaatgttaggaaaaggaccccgtttaaagttacgtacacgaagacgaacttcttaacgataattaactgtaattttaagaaatagcctattaataatttccgtatttattatatatattcgtttgccttggttgcattttatttacgacttttttcgttgggttttacgtaaatagtcttttattcaactaatatattaaggtgtcaagaaaatttaacttaattagttgaatagaacttgtgaataattataaatcatttaatactaatttcaattttaatgataaaaaaattaaagttcatgttatttaa

SEQ ID NO: 86133 - DNA, 409 bp, Glycine max
ccccaggagttggcctgtggattttttttaagaaattctttggtttttttaaagcttatgcaaaggtcttccgaatgtttctacaataattcatcctctaccttaaagatctttataatacttttattggaagatttatccaagacccccccctaaagatcctgctaagcatataactaaacacctcgtaccaatagattattaatccaattttactaaaagtccatccaaccgcaggcaaatccaagacagaagggggtaactaaaagcccatccaaacgcaggcaaatccaagacagaagggggtaactaaaagcacatccaaacgcccaccgtggcttgcaaagtcgtcggggtgtgatgacaatttgtaaggatccataatagagtcctttttgggagagtgatc

SEQ ID NO: 86134 - DNA, 437 bp, Glycine max
tttttggagtgaaaattctggtacaaactgtttatgacttgacttttcagaatggggcacgcacgactatagaatttaaggtgagtcaactgccaacaaatttttgtttgatttagtgaagtttgcagaagatgataagcaacctcagatagtatcacactattttgtttatcagtatagaaaattaatgcgactatgttttaagaagaaagaaagacaaaccaaacaattcctatccgctttggtcttctctctctctctctctatatggacatatatttatttatcaagaggctcacatacatgatatccactagggaaggatgataagcacaaaaaaaaactctggatatttactattcctttcctcgttctttttgtatcaactccctgtgtagttactagccttaatgccggccactagcactctttgcatt

SEQ ID NO: 86135 - DNA, 238 bp, Glycine max
  unsure (1)..(238): unsure at all n locations
gatcctctagagacaggccgcttctcctttttttttttccccattttngtcngcaaaacanaacnncncaccggggagagaaccttaggcaaatttcactaaaaatccaaaccaccccattctattattcccnttttacccatataaaattgacttataactaggcctaataaaaccacaaagtcttttccttttaagtngttttcttaatcctaataaaatttatactttttaaaaa

SEQ ID NO: 86136 - DNA, 363 bp, Glycine max
  unsure (1)..(363): unsure at all n locations
gccactctttcgaatactacagaattttgttttgcatgagaactattaacataagaccggacattgtttccttagagcaagttacacacggtgcataataagaccactttgatcatgataagaagtctgttctgaataaagtcaaagcaaaggctaataaaattaaggacacgattaataagcatggccatctagtgcttgatcgtggtcatgagtataacattnaagatcagcatacccttgatgatcatgacttatactatgattattaaatgtctgaagacccacaatttcatataacaccaattcacgaaattgaatatgtttaaacttgcacaccttcttctgancaattcgtaaatt

SEQ ID NO: 86137 - DNA, 241 bp, Glycine max
tatttttcattacctacatccattcacgagaaaggaattttacagtttaaggtaccaagctatgaacattgtggtggttaggcttgtgagagcaaaaccaccccttatgaaagaggttgtggagttcaatctttattttgacttttaaattttgatcttgataagaaccaaagtcaattttttataatttggtcattttttttttgtggcatttttttttatcaattttctttgttaggta

SEQ ID NO: 86138 - DNA, 178 bp, Glycine max
gaatttttaattttaatataataggaaacaaacaagggggtgggtggaatatatgatccaggattataaacacaaatatgatatttaataattgtattataaagtcacctataatcaattaaatgaacaaaggtataaaactatgggactgagaaaaacatgaaattatccaaattaa

SEQ ID NO: 86139 - DNA, 349 bp, Glycine max
cgacagaagggggcacaagtgagtttgttgggcgagataactagaaacagtgtgatgaaaatgaaggtccttgttttcttcgttgctacaattttggtagcatggcaatgccatgcgtacgatatgttccctctccgaatgaacactggctatggtgcccgtactccggaggtgaaatgcgcaagttggaggcttgctgtggaagcacacaacatctttggctttgagaccattcctgaagagtgcgttgaagcaacaaaggaatacatccatggcgaacaatatagatcagactccaaaacagttaaccaacaagcttacttttatgccagagacctcgaagcccatc

SEQ ID NO: 86140 - DNA, 325 bp, Glycine max
actcctgctataagactactttattttattatagtcattgcaattgaaagacaaggtacctatccaaatgtcaaatctacctccacatgccacatgtgctatcaacaacatcgatgaaatctttgttatccattttaatcacttttttccttccccaaggcctctgcaccataatctgagatcaatacatccctatatatttatatatatttattcactattcattctccaatttctgtaatgctaaatacatcatttttaaaacaataatgcttgaaatataaggttctctccatcctctcctattcaatactcaacccaattt

SEQ ID NO: 86141 - DNA, 90 bp, Glycine max
attggggtggcgattgagtttaaacgcaaagttgaatgtattggattgcgagatacacgtaaacatgagatgattgattgtgacataatg

SEQ ID NO: 86142 - DNA, 358 bp, Glycine max
gggacaacaaaaagataacattaataacaattaacaaacggccggtgtctaaaaacaccgccgttacgggcctattttttttgatccaccccttctttctttatgctctttcaccggggaaggatgtggtgggaacatcaacaatctcttcttgctaaagcaacttctttcatctcttcttgttagcttcaacacaatccataacccacaacaataagcccgcgctttacctttctctctctataactccttaaggcaagtaagaaaatggggagccttataaaggggaacaatgacctaaacctggtttaaaacaataattacacataaaactttaaaccctttaaaggttaaaagt

SEQ ID NO: 86143 - DNA, 177 bp, Glycine max
  unsure (1)..(177): unsure at all n locations
ataaaaatgaaaatatattgattgatagaaagagaatccttattttttcttctcttttttgaactgcttctgcgaaattactttcttttacttataaaaatcccttttttttttttagtgccacatttttttccttatatccttttttttttacttttttttganttctcctattta

SEQ ID NO: 86144 - DNA, 352 bp, Glycine max
tctaaagacctcataatttttttcaatcaatcagaccatcttgaagggggtgttgttaatattataaagaatacaaccccaaaaataaaataattatcttaaatctttttgtacaacttttattattgaatggagaaaatactataaattgcttcaatttttatttaaatgtaaatcacatgtaccttatatttaattgaatttttgtattcaatgctcttgtaatactttacataacagctccattattatttgcattacaattatctgctatgattgtactaaaatttttccgaatccatcaaacatcttccttatacattaattattcaaccacttccacattcaacct

SEQ ID NO: 86145 - DNA, 364 bp, Glycine max
gagagccaacgtccaactgctactagaaactacttaattttttccgaggaaaagaaagatataggaaagttttataaaaacacagcgtcctatatttccttttctcttcttcgtaagaaagataaatcaaacaatacattgtcgttcgcttttttcctcgtcatatatctcttctcttttgtcttcatactctctgcttaccaacaatttaattaatattgatttgattgttgacctgcttcatatgcactcatacctaaatttgattcctttacacatcttttgcattcttaattgtgcttttatattccatattttaatcttaaattttcaattatttaattcttatgcttttatattcttt

SEQ ID NO: 86146 - DNA, 157 bp, Glycine max
cacttattttaaagatggtgggagtcattcctggaaggaggtgctgaatgagtcattccctaaccctgttgtgactgttaacatcgatccggtgccgaatgtggtgcatcaggattttgttgattttgtcttgaaatgctatcattaattttacccg

SEQ ID NO: 86147 - DNA, 330 bp, Glycine max
ttgggaggctggagatgtattacattcaaacactctactttacttttgggtacatgtattgtttcgtttagtttcatcccactcaacgtattttttttttttttcaccgttcactaatgtcttgttaatgtgtggaaagtctactagatattatcttattctaagtaagtttatgtggttcacattgttaagcatgttccactcaatgtattttacatatcccattaaatgactaataactgttaacttgctaatatttttttttttttcaaaatattgcagattaaatttgtagggtattttactattaatttgagaatttgttttttt

SEQ ID NO: 86148 - DNA, 184 bp, Glycine max
ttattttactacagaatgggtcataaagcaggaagaagatgccttgtcagcgttcctcattcattgcttttggttttcttatattcacaagttgagttacttatattaaaggaatgtctgataaaccccttataattataaatcccaatgtattttctccttaaaaagaattattaatttttta

SEQ ID NO: 86149 - DNA, 391 bp, Glycine max
ataattttttttttttatatttttttttcataaaaaatataatattcatataatagcccgcttttttttaaaaaattaatattccccttaattttttaaccatttatattatctaagcttttattaccaaacccatctcaataattttctatatttaaataatatacataaattacatttaaaactaaatttattcattatatcattccaactataatataccttaatctatcactctcaaaatttctccctcctctccatttttttcaccaaaatctcataaaataattccccctattctaaacttccaattttatctttcccccttcaaattttaataatccacatttttaatttgttaccctaaaattttctccacttcacctatttt

SEQ ID NO: 86150 - DNA, 484 bp, Glycine max
  unsure (1)..(484): unsure at all n locations
ttttntttttttttttttggttacaacataacaaacttaattaaatatttcctcgtngggttttaatattnaaanatatacaccctcctacataatttaaattctctaatatccacacctaaaaaacctttaaacttttacattcaactaccttaacatctnnnnnntgcaacaacatccattaccttaaacttaatttgtaataatccacattaaactccaaaaaattttcctccaacttatatttcccctataacaatttaacctttaaccaaccactattttatccttctttccctttcataaacaattaccaaacatctttacaatttttttttgccataaaccattaatattcgtctccctaaattaatccaccttaacttcaaattctaattaacttatataatattttttcttcaacatttatccaatttaaataattttttaatccctcttttaaaccataacaatctcttaaaaa

SEQ ID NO: 86151 - DNA, 472 bp, Glycine max
  unsure (1)..(472): unsure at all n locations
tctagagcggccgctcgcannttttttttttttttttttttttgggtgttttaattatttatatttatattattttgtcgaagaaattattaaacctgtgtattcaaactatttttaatttcaatttattttattcataaaaatcctaaataaataaccacttaattttcatcaaataaaatatttaaccaaccactttaatttaactaaaatatttaaatttttaataacatttaaaattcttaaaaataacaaaaaacattttaattccaaacaaccccctaaaattttttaaatatacacaacaccacataaatttaacttttaaaccttcaacctacattcccatgaccttttttttcttaatgttttaaaaacttacatataacattatttttttttacccttatctcacataatccttttgttttaaacaccaccctactactcaacatatcttaaaatttatttt

SEQ ID NO: 86152 - DNA, 186 bp, Glycine max
  unsure (1)..(186): unsure at all n locations
ctccactttttttttnttntttttttttttttttttttcataaaaaatgaaataaaaaaaaaaaaaggggtgtttttttttaaattttatattccccttaaattttttaccataaattttaaataatttttcattacaaaacccttctaattaatatttttatttataattatctaaataattaac

SEQ ID NO: 86153 - DNA, 567 bp, Glycine max
tttttttttttttggctgactcattcttcaatggcacactcaacgaacgcaatcaggagacataaataacacacaccaaattaaaagtaaatctaacaaaaacatgaagatctcataagtaatatgatcatcaccatcatcacttaataaagatagtaatgataatgatcatattaaggatgactacatttggcataacatttaaaatacatgtaatatacgaaaaacatattatgacttttaatactctttacatgttttataaatccattgcacactatatgtgtatatatgaaatctgcaagaaagaaaaattgtagctattattgctgatgttttcacaaaaattagtgggaattttgacttaaactataattttttcctacttcttgtgaatttaaaactaaccaactaacaacaataacaacaaaaggaattgcagaaatctcttatgaaattatttggtagcatatatacacaaaaaggttcttgtaaacttacttggaaatgttttttttttcaaatttggctgcaaataatttagggatttaactgcagtttttcgtt

SEQ ID NO: 86154 - DNA, 558 bp, Glycine max
gggatgaagcacatttttttttaaatgacaggatttaacaatatttttctcaaaatataaccaatgagcgtgacaaaaaaaactttgaaggatatatattgctgtgacaagtacaaatgccccatctagactctcggggagagaaaaaccgttaaataaggtacacaacgcatgaaaaaaagtataaaaaatgacttgaaaataataagtaattgaaagagggaaaaaaggtaaatgcttgtaatattttatagaaaaatattttattaatgatcataatttcaaaacatgaattattaaatatggctcatttaatttttttaaaatgaagacccgtataaatattgaagcaaattacattaacacctactgagattttttcgaattatacaaaatatccctctttgttaaatgtcacaagagaacttataagttaataattctaagtgttaaaaaactttccgtgtaaagagaaaattttagtttccaattaaaatgggttatcaaagaaacaagtgtaattgtttaagagcaaaagacaacataatcaagcgtcta

SEQ ID NO: 86155 - DNA, 645 bp, Glycine max
  unsure (1)..(645): unsure at all n locations
tcctctagagcggccgctaaannnnntttttttttttttttttttcctaaatcaatttaatttaatttactatatatataccgaggttctttttaaaacttttattacctttaaatctaaaccagattncacatttnngcaatgtctactctatttatataccaaaaacttttaacaaatcacactactattttaccactaaccattcctatataaaaacctaaaaatttaactttatattttgtcctcattaactaaacacactcctttaaaaaacataccaccttattatctacctccaaaacaaaaataaatatacaatctctaaaaaaacacaccattacattatctatcaaacttcaaacatttaaacttttgtaaatatatttttttctataattcctactattataacatattattactaactaaaatgttttaaaaaattttacctttattttattatactcaactttttaccaatttataattccccactatctataattttaaaacactcaaaattatttttctcacttctttatttaaataaataatttacaaatttcatttaaattaagtaccttactaaataattttttttacattttattatatctatatttnttataccctctcttctat

SEQ ID NO: 86156 - DNA, 536 bp, Glycine max
ctctagagcggccgctaagaatttttttttttttttttttttttcccgaatcaatttaagttaatgtactatatatatgacgaaatttttttgaaaactgttactaattttaaaccttaaccacatttcacattgttgcaaggcctactcttctgaataaccattaacttctaacaaattacactactatatgaccactgaccattcctatataaatagcaaaatattgcacttcacataaagtgttcaaaaactaaacacactactgataaaaaattaccacctcattatctaccaccaaatcataaatatatttatcatctttataaaaacaaaccataacattacctatctaacttttaacactcaaccacgttttaatttactttcttcctaaatacaacaattcttacattacaatctatattttaacttaaaaataattactttttaataataaccaaacttacctattattaaaatttcctactaaacataatttttttaacactttataaccacttaaccattttttt

SEQ ID NO: 86157 - DNA, 349 bp, Glycine max
  unsure (1)..(349): unsure at all n locations
cttntgcaaactaataaatnaaactaaaaatatagccagactttatttaaacctttttttcacccacaaaattaaacataattttaataaaatcaagaagaacttataatgaatntcaaaatnatttttatnaattaatcaacaaattnaccattatcaacatcttaataattaataaatttttgnttttattaaaaattcattttatttactaaaaacaaattatgaatattaacacccttaaaattttttataaaaccaattaacactatatcttcttatataaaaacctccataaaaaaaaatcttaaccatcataccaccatatctccacaaaaaatatttttaa

SEQ ID NO: 86158 - DNA, 467 bp, Glycine max
gagaattactccataaaactaatcacacaaaaggggggaaatttttaaaaaacatattcatatcataaccatttatacaataatataacagcacccatataaatatatttaaaccgactaatatttttaatactaatccaatattacaaacactccatttttaaaccctaatgattattcgcgtaaaaacgatactcataactttacatactgcatacgttgctccaccacatattataagctattactttaaagactcactttttttttcttttaatacatgcaaagaaataacattcaaatctaacaaaatccttttacactactacaaaaaatatatttaacacacatttattaatatcccactttgacacaaccaattttaacaaaaatttggacgcattgtttcaaatattatacacaaataacttcctttttttataaaacccaatctatttttcactttt

SEQ ID NO: 86159 - DNA, 563 bp, Glycine max
gggggggatcttgatctggtatttctgtatacgaggagtgcttggcgatttcatgtagccgtgccctgcacggatgggtattcaaaaaattcatagaattaaattactcataagttcattcacccaaaaaaatcataagaaaatacttatgagttctgtttgggctggaacagattcggctttatttaaatcgatacatgatatgaaattaaattttgaaaaggtccttttttatgtactccaaaaatctcagcttacactttcttttattatggaatcttcgatgcggaaggaaagttttacgttccagattaattaatccggaatttacaagaaaagattaatctagaattgtctctcattaggggtgagaataggtcaggtcgacctacaggggcctacgacctggcctgaactggcctatttaattaaaaagttaggttcaggctttttcaaaaacctattaaattaaatagaccaaacttagatttattaaaaaacctgataagccgacatatatatatatatatatattattttttggatataattattttttttga

SEQ ID NO: 86160 - DNA, 407 bp, Glycine max
gagaaaaacgccttttaggaaatcacaaaaaagggagttattttttctttaaattatatatattatatccatctttccctaaatttatcaaaactcctttaattatctcttaacctactatttatctggaaacttaacccttgaaactatatattcttttaaaacactcacgaccactaacaattaaaggaaactctataaacatataaaggaacactatattaaaattattactgttatgtcctaaaccaagcattgatccgatttatctctttatctttagaatcaatttttttttctttctaaaaccaaaactaacctcttctaccaaatacaaacttaacaacttgtttataatgcaaaatattgccaaaaccagaaccttcacaaatgtgggtacatttacc

SEQ ID NO: 86161 - DNA, 577 bp, Glycine max
ggaaacttattaaatatttttaaacttgagttatttgggaaatcctagaaatttaagatggcttagttatctaattggcttggtctatttaaggcctgttatttacatccaaattatccaattgccatttatttagaaataagaatttagaattagaattttgagttgacatgagttgagttcagttaactattttttttcctctattctcctgtctatatttttctctccccaactctttttccctttcccttgttgtactgtttgtccaacatctcagagacagatgataagatatcctcccaaaacaaaaacaaaaaaaacaagacagcaaaaggataagagacaaataacatcaaaagtcagctcaagaagactctcttttccttttcatggttgataaggaaaacattacacagaaaagcacgatgatcagctcaaaagagcttctactccccaggcttttcaatgatattactttctctggctcagaattatgtaatactgggggaaaacacaaataatgagtttaaaataacacttttaaaattaattatgaaaagagcactacaattcg

SEQ ID NO: 86162 - DNA, 488 bp, Glycine max
cggcatcatgttggggtttatacaccgcttctatttatgccggatgtgattatatattgctatatattggaggaagccctctgaaagcaattttttctttaagattttcaaaagaaaactcattatggtggatacaaacacaattgtacctttacacttttatctttttccttttcaacatagggttgtatcacaattatgtgaattgtcggctacatcacaattacatgaattattttttattattgtaaagtccgggaatgactataacaagaaagtatacataaagatgtcatacacttctttagttatggattattgcgttggattttcaattttttttggcattattggttaattgatatacatgattagcgatgctagaataaatttgtgatagctttattcacagatgcgatatttacttattgtattttaagtataaatcaatgatagagttaaatataatttaaggatataatatttac

SEQ ID NO: 86163 - DNA, 326 bp, Glycine max
  unsure (1)..(326): unsure at all n locations
ttttttttttttttttttnattcaaacctattaaatatttttaaaccttaagtgtggggtaaatcccaaaaatttaagaaggcttaattatctaatttgctttgtctatttaacgccctttatttacatccaaattatccaattgccctttatttaaaaataaaaatttaaaattaaaattttgagttgacattagttgagttcaattaactattttttttcctttattctcccggctatatttttctctccccaactcttttttccttttcccttgttgactgtttgtccaacatctcaaaaaccaaagataaaatatcctcccc

SEQ ID NO: 86164 - DNA, 297 bp, Glycine max
gaactggataccaaccataaggccgcggccgggttttcaaaactttcattacattaatgggttgttgttcatagggtgggagagaaacaactatgtacagcaacaactacaaggtgggattgttttaaaaaaaaaaaaaagcaagggcgatatcaccctatatcacctcactcaaaaacacaattgattaaatactagggattgtataactgggcaggcttatactactaattccgggatttccaaaatgggacggatactactttttaaatgccattttatatatttgatttgaag

SEQ ID NO: 86165 - DNA, 420 bp, Glycine max
  unsure (1)..(420): unsure at all n locations
ctctagagcggccgcgcacccantnttttttttttttttttttttaaatttacacataaaacaacactattaacataacctgttgttttaaacaaagaaatttatatcccctattttacattaaaaaattgtgaaatttactgtctttttattccatcaaaattacctaaatcactttttaccctttttcccaattaaacttctatattcaatatcaaatttaatgtggcttataaaacatttatttttctcctttcccctcacaaaatttttatatttcccactattacatcacccacctaattttcttttatggtccacaataccctctcaatttaatataaaacccccccttacttctacacaaactaaacctagccttctcccttgcttttttaaactcttctactttttaaatat

SEQ ID NO: 86166 - DNA, 457 bp, Glycine max
  unsure (1)..(457): unsure at all n locations
catccactcgcgcgggcggtcgcaannnnatttttttttttttttttttnnnattaacaaaccaccattcttttgaaaataaccgggggtttttataaaagggtacacccttcactaatggggctcctccacaacataaaatatttgtttttttcaacacacctttttttcctctttggttattaattcatgaaaagcctcctacaacaaaaanaatatgttaaaagaaaagagtaaacctatatacttttattggcatttcctaacttattgaaattgaacattttatatcttttnnnttgagataactaatgtaattacatgcctatccctagtttttttattatcctttaagncccacacccttcaaacttcaactcattttatcaatgatnntnaaaactttttttcacaattttttattaaaaaattgtgcaaaaccctacccctttttctt

SEQ ID NO: 86167 - DNA, 477 bp, Glycine max
gaaacttattaaatatttttaaactttactgggtgtggaaatcctaaaaatttaaaatggcttagttatctaatttgcttggtctatttaaggcctgttttttacatccaaattatccaattgccatttatttataaataaaaatttaaaattagaatttttagttgacatgagttgagttcaattaactattttttttcctctattctcctgcctatatttttctctccccaactctttttccctttcccttgttgtactgtttgtccaacatttcaaaaacagattataagatatcctccccaaacaaaaacaaaaaaaaccagacagctaaaggattagaaacaaattacatccaaagtcagctcaagaagactctcttttccttttcattgttgataaggaaaacattacacaaaaaaacaccatgatcagcttaaaagaacttctacttcccaagcttttaatgatatactt

SEQ ID NO: 86168 - DNA, 340 bp, Glycine max
atcctgagcggcgttttttttttttttttggaaagcagaaaccctactttataggggggcattcatgaagactggctggtctgaatattgaggaattattttgtgccggtacttttaagtcctataaaaccaaattcatccatccctatttcaacatatcttgacattttggacctacgtacaagagaactgtaaatttctcagcttccgatctgtatgatcataatttaccttcttaactaaactttgataaggcatcctataacgatctattaatgcccccgtggtataaattgtccttatttttttcatggaaaatacggctgactttatcattggt

SEQ ID NO: 86169 - DNA, 480 bp, Glycine max
gaagcacatttttttttaaatgacaggggttaacaatatttttctcaaaatataaccaatgggcggggccaaaaaaaccttggaaggatttttttggtgggaccaggtccaatgaccccacttgggacttacgggaagagaatcaccggttaataagggcccccacgcctgaaaaaaagtataaaaaatgacttgaaaataataagtaattgaaagagggaaaaaaggtaaatgcttgtaatattttatagaaaaatattttattaatgatcataatttcaaaacatgaattattaaatatggctcatttaatttttttaaaatgaagacccgtataaatattgaagcaaattacattaacacctactgagattttttcgaattatacaaaatatccctctttgttaaatgtcacaagagaacttataagttaataattctaagtgttaaaaaactttccgtgtaaagagaaaattttag

SEQ ID NO: 86170 - DNA, 521 bp, Glycine max
  unsure (1)..(521): unsure at all n locations
attgtaaaaaccaaaaataaaccctactttaatgctgagattttttatcaaantaatagactcttcttttattaattcaatcaaatcattaaaatattttttaattctatttttttttttaatttcccctaaaatttcaaataatcaattccaaacccctatttataaccacatcaatacttgttcattatatatttattcacaacttaacaaaaataaactttctcaaaataatcaacaatacatctacccctttcccataattaacataaaattttttacctttctctacaaccatcacaactctttatttataaattattaaacctataaactattttactaatactaataacccccccgtttttataatcaacattccttcattttcatatttttctcctcaaataaaaaaaaaatttactttaacctctaaattttctttttattccaattttattgctataaataaaaaataaaaaacactttcttattatacaactattccttttctcaatatt

SEQ ID NO: 86171 - DNA, 463 bp, Glycine max
  unsure (1)..(463): unsure at all n locations
agctnggatcctctagagcggccgctcgcnnnnctttttttttttttttttttttatactaatacaaatttaaataccaaaaaaactacagaggtcttatcattttattatacctacaataactcatgggnaattttaaaacatgaattctatcattatctacaaatttttacattaattccacatntattttattcatctaattggataaggcttttgttgttaaaagatttattatatgtcctattatctccaatttgnnccctatgattataaaaagtgtattatccccatatccatgtaaaatcatatgtatgtctccattcctactattttcccttttatttcccatgatttctccacaaattaaaaaaaatacaacactttcaatgttttattatctaaatttggaaaaaaattgtaactatttaacccaaatggttttttctacaaactaaaaatt

SEQ ID NO: 86172 - DNA, 512 bp, Glycine max
aggcttggaaacttcatttttttttacactggggggttatataagctgaggttctgattcaagcagaaatggaaactatagcaccacatgcacaacaaaatcgattagtccatcttcaattatctaccaacaatcaataggtcctcgaatgaagaatgtagctcagcagtaaaaaaaaagttagacttaattgtaaatttcgtttctctattttgtctatttcactaaatcgggcatcttattttttaatttattatccgagtacccccatatttcaaaatttattatcttagtccaattaagagctaattttaaccgttgactaaccattgacggttaaattttaaaagttgactagagtagaaagttgactaatattttcttaaaaaaataagaacttaaaaaattacttgaggaatgactagaaccatgatcctgtgagtgaatgacacattcctttaccagtcaacggttaaaatcaacatttaaaatttaaaattcaatggttaaaa

SEQ ID NO: 86173 - DNA, 361 bp, Glycine max
  unsure (1)..(361): unsure at all n locations
tcctctagagcggccacttattttttttttttttttttttttttttnggataaaaaaacatcctaattatttcacagtagtctgttttattaaagtcaaatatatctcaatatttaacacaactattttttcaaaaactctaactcccgactaataattaaaataaacacacacacataaataaaaaaccctgtttacccctaacttattcttatacaaataaaacacaactactacactaatcttccccaacccctatttgataattctcaattttcacccaaaaaaatcaaccttttcaaattacacacaccctcctttttcttcaaaattccaaccactcctttcatcacctttttac

SEQ ID NO: 86174 - DNA, 559 bp, Glycine max
gggggtacaatggcagcaatggagtgatacgaggacactagcttggtttctatctatgacgaaactagggcacatgtgcgtgtaaatgctttacagaaactactttagtgattttgtggctaatttttacgatgaaacttccaccaagttctttatatcaagttttcaaattaaacaactaaaattggattattatttccacaataaaatcccccatcaagaatatgttgcagaatttggaggggaggggggaatataaagaatttgatctaaaatttctccttttcttttaaactgctaggcatgacagtgactaaaaatttgtgatgtgtcatgtgtcatgtgtgagcattgtcaactgcacaagacaataaacacaaatgatttcacgaagtaaaatggatcaaattgtcggcaatgactaatgagggttcaagagattggagattgatttaaaattctagtgactcacagcgtatacaacggctagtatttctgattgcttcaaaatccagttagttgactcattaaccatgaacaatgatacaatcaacgtcag

SEQ ID NO: 86175 - DNA, 170 bp, Glycine max
  unsure (1)..(170): unsure at all n locations
aaacctacaaaacacnaaacattttacaaaaacagcagagttttttttaaaaaaccacttttctttcaaaaaaaaaaatttttaaattcttacaagtttaaataaaacaataccttaaattttaccactcaaatttaaaaaaaataaattccttttaaacaattattttt

SEQ ID NO: 86176 - DNA, 170 bp, Glycine max
  unsure (1)..(170): unsure at all n locations
atattttttttttttttttttttaaaaaaattaaaaaacttnaaaaaaataataaatttgttgttcatattataattatctaaaaangnaaaaaaaaacaaattttttatttttaaaaaaaaaacatttttttataantttacttttaaaacaattctttttatactttt

SEQ ID NO: 86177 - DNA, 566 bp, Glycine max
ggtgggaggtcttggattgttgttggtttggctgaagtattttctaatcttctaagaatgttactaacatcaaatttgttattggtaataaaatccttttgtttaggttttacttccaatgttttcttgagcttttctagaaaatttttcttttcctgggggtcaggtatagaattaattgcttcaaacatgaggtcttgttctcttgttaaagtattgatttttctttcatcctctgtagatgacaattgatcatcttgttgaattagattgagattttcatcagagatcatggaggatgaagtttttgtttcttcttcctccgaactttctatgagcaaattattaatttgctcttcaatggctggttctaaattaagatttcttaattttctttttaacctataatatttgctaatgtgaccttgttttccacagttatagcatgttactttagattttagtttttggtttggggtttctatttctttactaattgaaggcttgtgccagtatctccttcctggaaatatctttttggtaaccaccttattttatggcctttt

SEQ ID NO: 86178 - DNA, 231 bp, Glycine max
cccctagagcggccgctttttctttttcactattttttttctccttatttaaaaacaaaaaacaaccactattaagagtcgtattttaacaaaaaattatccccccatcacaaattcttccaaaatacaaataaaaaatttccctcatataacttttcaatacataaaaaacttctacttattatacaaaacaaaaaaacattaaaaccacacctaaaatctcctactctt

SEQ ID NO: 86179 - DNA, 294 bp, Glycine max
  unsure (1)..(294): unsure at all n locations
caaaaaaaaacaacaatttttntaaaatgggcggtttttttttataatcttttaacacatctactaacaccacatcccctattcntaataaaaatcatttttttactttttacttataaaaattttttnaccactcctataaaattttacttttccttaaaaccaattatataattaaattctccaaacattaaattttaaactattcataaaaaaataatttttctttcaccctttcaaaattacaatatatcatcaactacaattaaatttatacaatcatnaaaaaacatc

SEQ ID NO: 86180 - DNA, 216 bp, Glycine max
  unsure (1)..(216): unsure at all n locations
ataaaaatactttangaccaaaacacgttgttgtattatttaaaacntacatcaaaaaaatcaaacaacaattcctaattttttaatcattaatactaccaacaaacaatacctaacaacattccattaaataacaactaaaattcccacaaaaccttacaaaaatnaaattaccatttaaacaacaattttattcttaantcaccatttaatttt

SEQ ID NO: 86181 - DNA, 388 bp, Glycine max
  unsure (1)..(388): unsure at all n locations
aaaataaaaaattaaccccccaattttataaaaaaaatactttaatacccccttttctaagtaacccaaaatatcctctatttaattaaaatttatctaattcacctatataaacacccctttcctttttttctctagcacacactttttaatccaatttaactcaattctccttttctaacacaaatattaattcacttttcaatacttatattaaacaaacaatgttacaacaacaacacatnttttcatttaatgttttcttcttttttaaaagtccctccccccattttccctcccctttcaaaaaaccaataattattttttttttaaacaaaataatcaccctaaccttttattaaaacactaaattccaattcccattccc

SEQ ID NO: 86182 - DNA, 388 bp, Glycine max
ggggagctcatttttatatttttttatttatggggggggaatatattatttctttttaacaagctaaagcttagtaagcttcagcatgagggtgagtgttgaaaatcagaatattaggttctgattctattaataatagtggtttataggcacatttagaggaaacagaatatcctctatttatgtgaaatttatgtaattgacctatataaacacgcatccgttgtgtactctagcacacggttttcagtccattataactcatttctcctattttaacagaagtattagtgcagtattcaatactgatatgaatcagacaaggttacaacacaacacagctatcatttaagggtttcgtctgtcttaaggtcctcccccatttttt

SEQ ID NO: 86183 - DNA, 419 bp, Glycine max
gaataaaagatagctttggttgcacatgcatggagggtgcgttacaccccaaaggaaggattaccatttatactacatatggcagcgacagagactatatttttccatatacacacctttgttctttactggatgaagacatgaactcctgctaccaccaaatttatacggcactttttttttggaaatctttttaacctgattcataccaaaattcatcttgacagccttgattgagaaaacctccataggacgtaaaacccccaaaagccggaggatccgtctatggcctccagacccatgaatgaactttaacatacactgggtctcaatgaaaagcttgagaaggatcttgtgagctaccttcatgtgcatgaaacacatggtttaacagcttttataattgataaaatgcctcc

SEQ ID NO: 86184 - DNA, 285 bp, Glycine max
  unsure (1)..(285): unsure at all n locations
aatgtgcaacacatacttatattttcttatatattctgaagtaatatattattttttttaaacaacctaaaccttattaatcttcatcataaggtttagagttgaaaaacaaaatataaagttctccttctattaataatcggggnttataaccacatttactataaacaaaaaatcctctatttatttgaaattcatgtaattaacctatataaacacccctcctttgtgtactctaacacacggatttcaatccattataaatcatttctcctatttaaacat

SEQ ID NO: 86185 - DNA, 130 bp, Glycine max
gaaaaataaacagcctatttcaattcacatgcgggtgttttttttattaaaaccaaaccattcttacaatttttatcaaccacacccttctgtcataacacccgtacggacacatgaacggactcttgga

SEQ ID NO: 86186 - DNA, 570 bp, Glycine max
  unsure (1)..(570): unsure at all n locations
ggagaaatgtaatacttcactcgctgcaacttgggggtatttggatctcttcgcaaaggcccaaacccgaggagactaggaagtcttctcctcgtaaatttcaacacatgaaacaaaacaaacccatatatagcagctctgacaagaaaccaaaaaaaccatggaacttcttcatcatcatctgttgttgtttgtctggatctaaaattcaattctgcctctgattgccatttcaagtaccatgtggagtcaactgtctgatatatttcctctggccaagccatccccaattgtatcctcaccgggtaagggactaaaaattccacaataggaaacactatcaccaccattatgtcatcagntgtatccttaatattcttaaagatccaatttctcacattcgtgacaactccagaactccacaagccactcaaaatcccacgagacactcttaatatcaatagaaactgttggcggatattcaattctgagaaaggaatccacatcagatgaaccgctgttggaataccacaggcaagcattttcatatacagcccatcaaatcccccc

SEQ ID NO: 86187 - DNA, 438 bp, Glycine max
  unsure (1)..(438): unsure at all n locations
gagaaaaataaaactacactcactacaactacgccgcattgataataataaacaaaccccccaacccccnnaaactataaaaatttctcctcttaaatttcaacacattaaacaaaacaaacccatatatatcattttttacaaaaaaccaaaaaaaccactaaacttctacataataattacttgatacttgtttttatctaaaattaaattatccctctaattaccatttcaataaccatttaaattcaactacctaatatatttcccctccccaatcnatncgcaattctatccacaccctttaaactactaaaaattccacaataaaaaacactatcaccaccattaatccatcaaatctatccctattattcataaaaaacccaatttctcacatttaaaacaacttcataactccccaaaccactcaaaatc

SEQ ID NO: 86188 - DNA, 560 bp, Glycine max
gggagaaattattccgtagtcatgcatggtattgcagtcatcaattttcaaacaatcaaattgttattgaatacaaagatattttaacttcttttcatatatagtaattcatattttgaaagccttaaatctcactataagtttcgttcttattcatgcaataattcatacagtggggctacaataaggggttggatgttctccactgctacaacactactcttactgtggtcttacaagctttgctatgatgcaggtgttactgttaaggcgtgtggcgactgttaaggatagcaatatagttgatacacttccatttagcatattgtcatctcattgaaagttgcatccccgacaacaaagatttccttactatcatcgttcaaggtatgtatgtgattctcacacttatgtgcttaagtattataggcaatggttgacatgttactattctttagtagtacattgtaattcattgagtgagccatagttccccgtttaatattgaatacaacgattaatacggacagtttggattaattgttgtattcaatcttgaa

SEQ ID NO: 86189 - DNA, 274 bp, Glycine max
ggcgatagaatgattcacaggcaattatttgataagggcccttttgaacaatggtaacctcttgctactattgcacacaaatgttgccacagatcccctatgaaacgccccttcattctatatggttctagggtgtattgaggattaggaaaagatgccacctgaatgcacactccatgtgctttgcaagcatcaatttgttgcgaggcgtgatccagatgcagtagctccaatgcgaattgatatgaatagccaccatggaccacacggaaat

SEQ ID NO: 86190 - DNA, 205 bp, Glycine max
cccacacgtcctaattcgaacggacgctttctttttttataacataactttttagtggtctggggactgtcatggaagttaatactaatacaaccactgtaccttcatgtccactaatttagaaccatttttacacacaacaccttttacatttaaaaatacttagtcataaccatagccatggccatttcccctccaaaaccat

SEQ ID NO: 86191 - DNA, 56 bp, Glycine max
accctttagaacaccacagaaagggccatttaaatatcattcctataaacaaatca

SEQ ID NO: 86192 - DNA, 193 bp, Glycine max
acgcgtccaaacacctgttagagtactatttaacggacatgcgtaaaaaaactgcttatagattgtgggtcaggaaaagactactcttctaatcatactaaaacttattttttgagcatttatagggacatacattctcttatctatatgaggatgcaatcacttctttccatcaccaagtaattggattttg

SEQ ID NO: 86193 - DNA, 347 bp, Glycine max
ctaaacctttcatccaacctttcttattttttttatatcataatccatcaccaaatcggaatcgtcacttttattcacttactttaaccctaaactttttaaacaatatttatttccacgatctattttttaatccccttttcctcacaaatataaactctcttatttatattttatttattatacttcacttattcaacaatacaattctaacccccattattctttcattttattattttaatctttttttaaaaataattattatttccttttttatatattattatatttataatctatttttttttattttaataatttatacttaatttttctttttattt

SEQ ID NO: 86194 - DNA, 290 bp, Glycine max
  unsure (1)..(290): unsure at all n locations
ttcacgcgtncgtactactactaaaatactatttaagggttatggacaaatatataggtaaatgtggataatcatacttacttactttatttataatttactattctagctacaaatcggtgctaatgactcttataatcataacgaagataaatatcaaacctatactaatttatgttataaagtttgtcaattaatgcttaaaataaacacatatacattacgttaataatgtcctgacatttaatactattagatggaatctattcttaaaattatctatttatact

SEQ ID NO: 86195 - DNA, 103 bp, Glycine max
caccacccaggggacattttaaaattcccgcttcttcatcttttacccttgttttgaaatataatcatctcctatccccccttatttattgcctaaatcaata

SEQ ID NO: 86196 - DNA, 282 bp, Glycine max
cttcacagcatttatttattatttttttttctgtccttctctttttattttattctgatctatcttttttttttcctgaactttgtttgtttaacattctcttttttttctatttttttctgggcccttttttcccttgatcatctccttctgaaaaccgaagccaacttcaaacaccaccacatcaatgtcaatattgacatgtttaagtcatacggctcttatctttcttggtagggatgctatgacatacatatgtcgattttttattacatcttttgg

SEQ ID NO: 86197 - DNA, 339 bp, Glycine max
cctccactacccatgctcaacagcccaccaaaggtatattaattagaagaaattacttccaaatgcatgggagaatgaaccaaagccatgaaaaaaaactaattgaatctattactaaaaagacctattttatttctagtgaaatcagctgagatgaaagatgggaggagaccccaccacaaaaagtcatgtgaagaggtaccatgaaatattaacctatatgcataagtattactcagggtagacgtgtcccactacaaaacacatactttttaaaatcataattgtacaacttttccacctattccaactatacaatatagcttgttagctagacta

SEQ ID NO: 86198 - DNA, 316 bp, Glycine max
cccacgcgttctactacttcaaaaagaccacataatggtttcctgttttttaaaaaacttattggaattggtataatatcgtttgattataacttataatcaatttattaaattttaaataaactttctaatatatgtcaaaaattcttaaaaacatataatcttatttacaattttttttcttatttttttaataaattaattcaatattaattcttaaataaattattaaatgtttggacttatttaaatattcttaattgaactcttattaaacaataatgatttaattatatcccccttctattatcttata

SEQ ID NO: 86199 - DNA, 236 bp, Glycine max
ttcaaaaaaaacaacttaacgtttactttaacatctataaattgtcgtttcctgtcttataacataattttactacctacataaagagtccatttaacttaagttgctctatacctcaagcagaccatcttcaagataatccttctttgaaacacttttgtaattctcatatatttgttcttccaactcaaaactcataccatattcaattgtctttttattcttactgtctaaaa

SEQ ID NO: 86200 - DNA, 330 bp, Glycine max
ggagagcgagcgagatcaaaaaatggcgtcctgtgcttgtaccaaacccatttttcccttttgctttaccggcttttaagcaaaagttttttggtattgttattgtttctttaacttccccaaacccattttctaacacttccgaaagcttttttatgccttttaacgtttcttggtggtcaacagcgttttgaaaacagttgacccgacacaaacctctttgcggagatacaactccgaggatgttgggtctctgtgagaaaagcccaccatactgttctccgagaaacttggagaggcacggctgcaagtgttacatggcgttgggca

SEQ ID NO: 86201 - DNA, 201 bp, Glycine max
  unsure (1)..(201): unsure at all n locations
acgtgtnagaacacctcagaaaggactacttaatgtttattataaagtatttatactagaggtatcggtcctatattttaattatattatatacattaagtaaacttacaacataattttttttctctcaaaaccatacttacttgaagataattcttgttttaaacaccttggtatttcacttaaaatttaatatagatt

SEQ ID NO: 86202 - DNA, 114 bp, Glycine max
aggaccactcaaggtgtagtcttataatatctaaatcgaggggtggtagggaatgctctcagaaatcctcccatagtccatcaatttataccacttcatacacctctaacaatc

SEQ ID NO: 86203 - DNA, 326 bp, Glycine max
ggttctagtgtgtgattgtttgttgttgtaactcgttcttcttcttttgttgttctgtgtttgtgtttgttttttctctcacctgaaaatgtcttgctgcggtggtaactgtggttgcggaagctcctgcaagtgcggcaacggctgcggaggctgcaagatgtacccagacttgagctacactgagtcaaccaccaccgagaccttggtcatgggagtggcacctgttaaggctcaatttgagggtgctgaaatgggtgtgcccgctgagaacgatggctgcaaatgtggaccaaactgctcctgcaacccctgcacttgcaagt

SEQ ID NO: 86204 - DNA, 250 bp, Glycine max
ggcagaatagtgagagtgagacatggatcaatttttggggagggtgttgtctttgcttacaatccttgtttcctttggagagttcttctactttcaggattcttacactacacatttatttcctctcataaagttaccgcggaataagtgcagccttcttgctcatcgtctcttatggatatccaactaacgtattgtgaccccacactggatcatttatggtttagttgaaataccatgattttttaat

SEQ ID NO: 86205 - DNA, 214 bp, Glycine max
cccacgcgtccgcggacgaatacctttttattttaatgcactgcctaattttattggggttagggtgcgcttttaaccaatatattctacttctataatattgatgattcattttcattttaaggatactttatacataaggttttgcattattttatctattaggattgttactgatactgttttttaatttattataatccttaactgatgc

SEQ ID NO: 86206 - DNA, 271 bp, Glycine max
tcagattctataatactactaacttttttttttcccaaacaaaatactaaatatggggtcttgttttaatttcatgaatggatttttttttactctaattaaacaattcaacttcatttcattaatcatcattatatactattataataaatataaccctatctatatccttctttaaacagatattattttttttcttttcttaatctgataatatatcatctaaatactgtattgtattttttaataatcttgatataattttttaaat

SEQ ID NO: 86207 - DNA, 317 bp, Glycine max
ccacgcgtcactacacctccgagaggacaacataagtttctggtgtaagggaaaaaaaaaaaggagaggggataatggctgtgttatctcttttcataaccattatatcacccactcctttatctttttttattttcactacctctaaaccatcttcactcttttttgaaccttacccgtacttactttaacactcggtttacgttcattcattgttccttcctctcttctccttcccatctttctttccattcctccgtttcagtcttgttacttggattggatttgacatataatttttggaccataatatgaaa

SEQ ID NO: 86208 - DNA, 350 bp, Glycine max
cctattaatgttgttaaattaaaaacactctacactgggcatggtcttaattgtctatatcaacacaaccaaaaaccgaaccatactaaactagaattctacatttcacctctcttctacaaaaaaaaacaagctctattgaaaaactattttgcttaaaattacaaaacgtagaagttaaattaacttatagccaagaccaaaatattttaatatacattacaaacctcaaatttgatttcctatcttaaaatctatatcaatatatatatttttttggctttggtaattctttttaaaaaaattgaattttactttattttcccttatatatttatttctaaaatttt

SEQ ID NO: 86209 - DNA, 329 bp, Glycine max
  unsure (1)..(329): unsure at all n locations
acttcatattagacattaactttatttaataacacaatctttatattcattaacgacagttgtctaatttattcttattcaataaacaattctataattcataaatatttctatatacccttaacttttgcaaacaaattctacattccttttattatttagatattattataataattttttttaacaaaaaaaactttaattttaatattatattaaatttactattacatcatataaactcatnntntatatttttattttccaaaattcttaattatttttatttttaacactctatcttttataaaattatattatttgatatc

SEQ ID NO: 86210 - DNA, 346 bp, Glycine max
aggactattgaacattaaggttgttcagacggttaaactggagccggttcatctaagtgtatataacatactttagctatacggttttcgcgagtaagtgcgacttaaaattcaaaatccgaatcagcctgtacaattcataaccggttattcgaatcgaaatttataaaagtaccaaatcctctgagactgctagttaatcacacagagcactgagccaaagctgcgaagttaaacttggttacttgcgaatagcaagatatatcagaccaaacatcctttctgacgccgggttgcctactaggatgagacaatggcgggaaagcattacgaatctcacttctgc

SEQ ID NO: 86211 - DNA, 326 bp, Glycine max
cccacccatacgaccacagacgacttacagtccaaacccacgcacaaactcgggggcgtggctatcgctaaaaagcctgctatggatgcatttacttatgctcatgaccaaaattcttttaccatttttaatccaccatattcctggtatcccaagaagaacataaactatcatattgtgaggttgatgaccctctttcacctcacaaacaatccatcaattaacacagctgcttcagaaaaggaaacacctcctgtaactcatgcgcacacctgcatgctttttatagttttactgaagcctgatatactagtttacgagtgcct

SEQ ID NO: 86212 - DNA, 202 bp, Glycine max
ctttttgctttcttgaaaatatctttacttttcgatctttaataaccttaacctcttctacatcacctataatgttaatcccccagtacatattggtttttggatctcgcatgtatattatgatcaaatcatatactctcttctgactgtttaatgacccttccaagctttccaattgtaactattattttttcatctcttt

SEQ ID NO: 86213 - DNA, 244 bp, Glycine max
ctttaccctatccacctatgacatcttttatgaccctgctcaatatattatcaaagcggtgcaggctctactctagtgacgtacaattaaatccgtcttatatattcctacaaactagtacctagtgtatgctgcttttctatgacactttgcaatgttatctagaaccttttttcttctgttccactcttttagccgtcttatgactgtccttcttaaaattcgtgtgctcctcgtaagatat

SEQ ID NO: 86214 - DNA, 260 bp, Glycine max
cccacgcgtccgacggataaaacaaacaacaaaagggcgaacacgatattcatactcaaattacaaatcttacgagcttgtagaccctaattagtgctaattaactaaacatactttaccttcttccacacaccataatgggaaacattcccgaatacataacggttttccgcttatccaaccttttctttaaacaccttatttaagaaaatccacaccaaattcttttaaacacccctctatattggttatttcacctt

SEQ ID NO: 86215 - DNA, 124 bp, Glycine max
gggggcaaaagatcacgctaacacaacaacgaggcagcgccaatcagagataaagagaaaaaaaatgagaaaggaaactgcttaacatgcaaagagaatgcatatcttctgtaaagaacctaca

SEQ ID NO: 86216 - DNA, 94 bp, Glycine max
  unsure (1)..(94): unsure at all n locations
gnctccctcacatcgcacacgctttcgctttcttggtctgggggcttatctggagtttgtgatctgaatataaagatggaactgagtagcatca

SEQ ID NO: 86217 - DNA, 335 bp, Glycine max
ccccaccccttcctaccgcttccaaaaaaccacttaaaggggtttccatttccacttttgtgtggagatataaaaactcttacctcattcaaatcaagttcaaagtgtatttatccctctctcacttctcttttctgaactcaaacccatgtttttttcttctctactcaccactttatatttttccaacgcccactttttactattctttgccccattttcaaaccaacacttatattcaacccccgccgaacaccacgaacaccactcttactcactgctattaccttcttcgccaagaacacaccactcccccacgaccaccttttttttaa

SEQ ID NO: 86218 - DNA, 361 bp, Glycine max
aatcagtcaatcttccatttcatactttaaagaagtggataattaatgtaagtcatgcttttgctacaacatgtgttgcaaagtgcaaatcaccttctgcgaatgttactaataagccaactatggatcagcaagttgctcttaataaggtggtttgggatgagagaagtagttaagcagctgctagctcactcaaattaatacagtatgtttcagcagtcgggttgagagcaacctctccaagtactaactcaactttctacttcaccagctaataagccgaaggcacatcatgtagtgggtgacccttctgatttctttccattattttgcgtgcaagggatacttgcttaccaaccac

SEQ ID NO: 86219 - DNA, 429 bp, Glycine max
ggaggggtaggtggaaaaaattgtttattacagttgatttatttttcattctagttaattcagcagcaaaatgacatgggttaaacctaacaggtattgtagaaacaaaatatacctgcttttcatgtctgatgtacattctcttttggaacatttcataacaaaaataattagaactttgtgatttcttttttgttgtatttacataaaagaattgatttgcttgataaaattaaattcttaattagttgcacagcattattgttgagtaattaatagtccagtgactggcttagtcgcatatcgattatggacacaatggatttgattattattctttaagtgcaatcttggctgttttagattaatcgcatattggtagcccccaagtttggtgtatagatgggcatgcaaaacatcaagtaatta

SEQ ID NO: 86220 - DNA, 106 bp, Glycine max
gcgcaaatatcatcctctaataaactgttctaactgaaatccagttcacagcggcagcaatttccatttgaaaacaaataaaccaagcataaaataactgacatct

SEQ ID NO: 86221 - DNA, 535 bp, Glycine max
ggaggactatatcaataccacatacctttgttatcctatggtgggcacacccaacgaaatataagatttgacctctaaattttgattacatttaaattaaattcaaaatgagatcttatagtttctaaacaattgttgcattaatttaaaaaaaagcacaataattttatttatgtacatattataccaataaaattttataaacataaatgtatacgaatattataatataatatcatatttaaatattataatactacaattttataatttattttaaatattatgacattataattttaaattattgatgtggtaaaaaatgattaaaaaaagttggaaaactatgttaaataataaattatataatttattattagatgtttttatcattatatttattggataaattttttttaaaacatatttaaaattaaataaataatacaaaatatgaattaacttttatagtagttgttagggttttatttcacgttagattcaacttattggtcaagtttaacacaatcatgat

SEQ ID NO: 86222 - DNA, 451 bp, Glycine max
ccaaacctgtaatttctgtgtaacaaacgcgaaacaaaattatgggataataaagtttacaatcatacaaacatatttatagaaaggaatttaatagtataattcatgtatttataatagaattgaatcggaagttttacctagatcatatagaaaatatatatccaattatcactactaataactagtaaagcatacaattctttcatattgtagcaagaaagaacaagcaaaagaggtagacattctccctgcttttctctcactcatcactctcccctagaaacatccaagttaaaactcagctaatggctttggaagaaaatcctaacaaggatatgccttctcagttgatactaaaagatctgggtgcatatcatatagctaaacattatataaaattcaccacaatagaaataaggacaatgaaaatattgacttggaaaaaaga

SEQ ID NO: 86223 - DNA, 335 bp, Glycine max
  unsure (1)..(335): unsure at all n locations
ccgctaattttttnnnnttttttttttttttacccaatttatcacacacttntatacaaaacacaacacgccagcattatattttattctgctctcaanactatcaacaacaaataccatattaattcactttacgaaagtgactgcaaacgtgatttcaaaacaaacaattttttttcaaaaaaaccatcaatcaaatttttaccttcccattaaacaaaaaaaaaaaatcctttttactttttaaaaacaacaaccactttttttccaacattttttcccttaaaaagcccaaccattaaccaaaactcatttttaaaccccctaattttttt

SEQ ID NO: 86224 - DNA, 451 bp, Glycine max
gggattgatcttagctcactacttacatattttaaattatcttaaatttatgcatgttggctaaagcattgtttttctaaggactaaaaagagggtactatccgtacaaaacaagacataaactttcctagctagttgctacatgctgttgcaaatggatttgggataagtttcactattccctccatagctcgcaggagcacaggaaatgggctacgtattgcaaaagggatggaaggaaatatcaaatatctttggttgcagagtggagaatggaacttacagttcttcacactgaaaactttgaccacatgtagatgtgacatctttgatttgattcccttactatgtttcctcataacggatctttagaaaacttaaccagtatagttttgcctaagaattaattggcttcattttatgaatatcatcaatgtaacactaaatagta

SEQ ID NO: 86225 - DNA, 322 bp, Glycine max
  unsure (1)..(322): unsure at all n locations
cctctaggagcggcgccgctttnnttttttttttnnttttttttttttttttnntaagcttctcacatatcttacagacacaaacaaccaaatccgtctcgaactgaacaaaatttactagggaataatactttttttatttctaacaacttattcattcctcacctccatcatttttagacccacctaaaagagaactcgtgaccgacaactttctttcaactacaaaattttgtctgagattttaacaaaccaaactcctttaaatttccataaatgccatttacttctttaaatattatttcactatcacctactaaat

SEQ ID NO: 86226 - DNA, 400 bp, Glycine max
  unsure (1)..(400): unsure at all n locations
aatcctctagagcggccgtttttttttttttttttttttttttttttttgaaattcttaacccttaaaatccaacanctttacccgcccatttaaataacatcacgcacttaaaaatccaattaaatgaccatttacacaataacattaacatctgttcataaacagtaaataatgcctactacactaactactacataaacataaaggaacacattatacgaaaaacacaaaggcatttgattttcattctttggcaccttttttgatcacttactcgtgaatgttacctataacaccaccaccatcaattctcctttaaattaatgtatcaagctcttcctctcccctaataacaactttcaaatgccttcttctgatctcttacacctccacatctt

SEQ ID NO: 86227 - DNA, 368 bp, Glycine max
ctatggggtaatctttgttgggttcacacgatgcttgtgagtgtgggtaattttatctgtgagagcattgattatctaacagaaattaactaaatggttgtatgaaaacacaaaagaatctgagtaaagtatgctgacaagttatgcagctgcatatgttcgaaaactgtaatggtatctgaaaaaaaaaattatccccgcaaatcctcttataaactctcgagcaagccatgggataacacctcagtaactcttttctagaaagagaatagagtcttcaaggtctgtgactctgaggatgaagtttgtacaagcatcattactctatatttgacagggtagatggtggtcaggatgacaatttcaaa

SEQ ID NO: 86228 - DNA, 58 bp, Glycine max
taacgggcttaaagaggtgcataaactcagcgggtggccccgcctgacctgaggtctc

SEQ ID NO: 86229 - DNA, 464 bp, Glycine max
tttttttttttttccttaaatgtttcttgaattcatgactgaatataagtgttatcggtttattagtttttttaggaaagttgattagatatttactttggtttactttaaaaaatttgaagaaaagtaatttttaaaatagtcaatgaattcactgtatttgatttggtaggtttgcatagtgaatgccaatccggatgctgctcaatagtcaatgtgagggttgccccacaagtaaagcgtagccacgtcttagttgtttcgtgcaggagttttatttatttttaattaattgagctaaatccttttaaatttatctttctagttgtatatgataaattttttacctaaatatatttttattagtgtaatttaattttttattttatctttattttagccttcgaaaaatatgtttattttattttttattttaaagtattttgtaaaatgtctttgtcatg

SEQ ID NO: 86230 - DNA, 54 bp, Glycine max
ccgcttattgatatgcttaaactcagcgggtagccccgcctgacctgaggtctc

SEQ ID NO: 86231 - DNA, 263 bp, Glycine max
ccacaatcgctatttggctggtatgaaccaacagcaccccatatgagtctatgaaccagggaatatgaggcccaccaagccgcatggggaggcgcataaatcgatgtctaaatgccaaagcctttataaaagcctatagttcaatcaatacacccattatgctgaatgctaacatccgaactcttatgtcgattggtgccatccgtaccctattgtccaaattgttgaagcccaccctactgatgattgctggctatcgaaca

SEQ ID NO: 86232 - DNA, 474 bp, Glycine max
aatatgtatgatcataaatattatttttaaaaaaagtgccccactaactccaggtcctagtccttggtccgccactgtctcctccctttatctcccccccctcattttctctccattcaaacaaacagagggttaaacttcaaggttgggggaaataagtgagaagtaagacatccaattaacagagtgtccaaagaatagaaaagacagactgcagcatcgattgacagaaatgcactagttatattaacctttatgaacagctcagcgaccctataaatagataataaaaaactctagtagattatagaacaataattctctaaattattctgagcacaatacataatcaataaatcaaatgtttgatgaaagataaattaagccagaaacaaggaaagtattgggtcagttactcatttactgattgaacaatcagataaatcaggaatgtgacagagtcaaaagtcaaca

SEQ ID NO: 86233 - DNA, 205 bp, Glycine max
aagaataaaaaaacaatagtaaagaaagaaagaaggagagagctccccccgccaatgttgcagcgagtgacccatgtccttttctgcatctgagatacttgaaagaaacagaaacactcaccctccaagccaagccagggggttatatttgggtgtggaaaggaaaaatggggtgcgctttcgggatctgatacccgcccatatt

SEQ ID NO: 86234 - DNA, 287 bp, Glycine max
cgacttcaaatatcctcatcctatcaacaaaccacgcgtaccttttaaacttccgagcgattatcttaactttttctgtccttaaactctcactctaaaacatcaaaagaccaataccctcaaatctttaatcgaacacataaaatataatttccattttcaaatttttttttcaactttcttacaaaaaaatcttcaaacaccaaaaaacatctttcacaacttctcaactttttacctttgcaactttctcactttaatttttttcacaaacaccttaccctttc

SEQ ID NO: 86235 - DNA, 493 bp, Glycine max
gggaaggtaactttattatacaactcttctatttaggttgtgcttcaatataaaatcaacattatttattaacattaatggctcttaacaatcatggtaatataattagtggtgctcaatatcagtttaattttaatttttttatccttcgggagaatcttgtttctttctcctatgtgagagtatcatttttaggattttaggtgacatattgttgctagggtttgtgtacaagtactgtggaaacacatatgaagggtttattgttgatgaacaaggaggaggattggctagtttttgatgtagagaaaaataatgacaacaatgttaaccttgaactctatttggtgggaaattttttgacaaaagaagtccttagggtttcgataatgaaagagagaatgtttagtatatggagaccgaaaagaggtgtatcaaggaaaatgctacatggacattcctattttaattttttcactaactggacttgatg

SEQ ID NO: 86236 - DNA, 79 bp, Glycine max
  unsure (1)..(79): unsure at all n locations
ttttnggcctaaactcaacgggtagccccgcctgacctgaggtcttcccttctgtcgccttttgcaaccccaagaccca

SEQ ID NO: 86237 - DNA, 97 bp, Glycine max
aactctattaaacaactctaatatggcgtgcgctctttaatttgacatcaacatcttatataaacattttcgcctcttaacaatcatgaaaatataa

SEQ ID NO: 86238 - DNA, 441 bp, Glycine max
ggggggcaggggttgctcgcccaggcgagctaacctgccacattttttttttgagaggaacattaaccatgtcccctcctcccttacgggctagcgtttgcctacttgaacctactaaaactagaattaggtgttgattacttatttaaaacaaacaatagtaaaagaaaccacgaatgcaaaggatactgggctaccttgcagcgatgttctctgcttgtttagcgccgggaaagggcaacgatcggtcggtcgtgaccctatccccacttgcattcgtccccatgtacctgcaagtaggaaacaaaatccatggccaatcgtgtccggtcatcgtcttaccttggttgatttccgcagtcaacttgtcttgacttctaactgtgacctgagacgattctgctccttgctatcacaagatatgcatgtgcatgtgcatgt

SEQ ID NO: 86239 - DNA, 560 bp, Glycine max
ggggaagaagatatcttgtagtcgaaaatgaaattaactcatgattattattcactccaaattgcaaactcataccaccaaacctatggactataatatcctctacagtaatgccaacattgtcccaaacaatttatctgtgtgtgggttttttggagcctatatagtaattcatgggagcagaatatagtgggaaaaaaatgacactgcagtttcatagtattaccattgccacaccaaaaatattgtcttaccactgatttttcttttttaattttactttataacagaagtattacgttaattattaataaaatttaaggaaaggtcaggatattctgctgtagtaatgtcactgcagaggatcattcctagtaattcatgtatatcaaacattgaaattatctaacttacctcaagtaaaaaggataaataatcttataacatctcattggcgcaatgatatttacaacaatcaaatgaagttgtttaattctatttttactttaacatctcttatattttttttaataacgtaactactctcatatatttacttt

SEQ ID NO: 86240 - DNA, 435 bp, Glycine max
ccacattccctatttggctggtatgaaccaacagcgcccaatttgttccttggaacgagggaatatagggctcacaaagtcgctgggggaggaacacaaatcgatgcctacatgcccatgatgtttttaaacaaaatacttgaaacaatcctcggataatactgaaagctaacatcttagctcggatgaggattggtgcactcctcccacgattgtccaaaaatatgaagccctccctacagattcatgctggctattcgacaaaaggcggggcttgcactggcactatcataaccttccctattggcggacaaattggccatatagtgggaggcattgtagcttacactagttaccttaaggatcacatcgtgtggaagattgatattggaagacattaacacgcgatataactttcttatgaatacaatggat

SEQ ID NO: 86241 - DNA, 412 bp, Glycine max
ccgaaaaaagaaagagaaccatttattactgctaacaggcctaacactgtaataaagaatacaataattagctaactaataattataagtctttgcctaaaaagttaacatgtaattatagtgttgcgcacgtgtaagtaaataaaaagaattactaattaataaacatattcagattgttagatctaagtttatgtaattgtttgcaaaagacggcgtaaaagaactggaatcaacgacggaatgattagcagctgcagctgcagtcgatgacgaaaaacgcattatctctttgttattctcactttgcatcatggaaattagaggcatgctaaaggggatcaatgattgatcagcaaaattttcttcttcatttgacacatcatcactaagcaagagtactgcacttgac

SEQ ID NO: 86242 - DNA, 68 bp, Glycine max
  unsure (1)..(68): unsure at all n locations
tacgtatagctcgaatccctctagagccggcccgcttnatttttttttttnntttttttttttttttt

SEQ ID NO: 86243 - DNA, 438 bp, Glycine max
ccgcgttgaaaatatcttgccctccaaaataaaatcagcgcatttttattattcaccgcaaaatactaacttataccaccaaacctgtcaacctcaataaactgacagttgttaaccacatggttctcttacgaatcatattgaatatgagggactttaccatatttattcttgcagttgctacaatcatttcgcaaaacatttcccaacccacctgccaccatatactcacttcacaataaacaacaacacccaccaacttaattcattatcaacctatactcaataacaaaagtacaacgtcaactatcaataaaattaaacgaaagctcaacatattctcctctagtaatgtcactgcaaaggatcattcctaagaattcatgtatatcaaacattgaaattatctaacttacctcaagtaaaaaagataaataa

SEQ ID NO: 86244 - DNA, 450 bp, Glycine max
cggataataggttgatgggtggttttcttcttttcggaaatggggagatgggttctgaactctgaagctataattctgatgagtttgaaggagaaaacatatattgcgctttaaaattaaaagacacattattatccgtgttgcaagttgatttgatggcacaacaactatagtacctcctatggaccaaagcctttctttgtttctttattttttaaattatattttactcgcccttgttgttcgtttgtactttgtttaaattaataatccttttcaaattgactagaaaactcgtaaatgtaatatgaaattataatttatgaatcataattcgatttttctttttcgttctaaagatggccagtcatttccatacgtccatcatgtcggctccttgtgatctctgagagagcatcttaataatggtaatggatcagacgcaactga

SEQ ID NO: 86245 - DNA, 440 bp, Glycine max
cccaaaggagaaatgattttcttgtaattaatatgcgcaactaatatggcattgaacaggaagctagagaaacatcctaatgaggaaaatagtagggcaaaacaaaataaaaataatgcccttctctataacagaatttagctaagggaaattaccttgtcacatctacaactgttatggcagagatattacacgagaattacatcaaaaccttttacgtataaaatgataatatgccgttccaagaattcagatggccaattctccagttgctggctgcactaatggtaaatcttgtttatcttggaactttttcattccttcaatcgtttagaattgggcatcctcggggagctcatacgcttgtccatttgctgattagtggcgttaggggtacttgacctagtctcagcatccaaagccttataagcaggaattta

SEQ ID NO: 86246 - DNA, 495 bp, Glycine max
caactcatattcaaataaaacattaaaaaatatagcccgtctgtcagaaacatgtgcaacgtaccgaaacttttgcttttggggcagtaaacaaattaaaaaaataatttataatagtaaataaatataaaccaaaacttcaaattcttctttgaaaaaatttataattacgcacgtcatttcttaataataccttgttttttaagaaaatataaacattaaacaatcatatcacaccttacacaaccaaataattaacatttaagtggcaggtactaacattaaattttcgcctttctaaaatttgtcatgttcgtaaaaaaaaaagaaattcacaaataaatagggaaattcactgaaaaatccagtaattaaaacaaaattactacacacatttactttatgccaatgcagtgctatcaaaaactgatgacgttttgattgttgaggaaactgcgacattgatatgaaaaaaaaaaaaaaaaagtgtgtaaa

SEQ ID NO: 86247 - DNA, 145 bp, Glycine max
ccaccaaccctttttggcctggatagacccacaggcccccaaatgggcctttgaaacagggaattttgggcccaacaaacctcctggggaaggacccaaaatgagttcctcatttccaattttttttttaaaaaaatactttcaa

SEQ ID NO: 86248 - DNA, 472 bp, Glycine max
atgcggttattgttgcttatgattgaaaacaattgatatggttttattaccacacacaccacacactcaaagaggagcatcatgcatgtgtcatcaagttgatctttttggtgtaattataaatattttatgtatggagagagagtggaagaagcgtgacgttcaaaccattccaatttcttgcatacggtccttttcgtctgaaactatcgtccatcggaaaaaaagagaaaaaaacttgcccttttaaattcttcaaatttcagttaactttaccggctttttgtatttttgtttccttctttctttttaccctcctgcgttggtgttttcatcactatgccatactagtactagtactactacacagtacattttttataggatatcatcaataaactaatcttatatttttataaatttattctttcttggtggaaaattaaatggtggtgtaatagtgtgtttgaat

SEQ ID NO: 86249 - DNA, 419 bp, Glycine max
  unsure (1)..(419): unsure at all n locations
aacgtattaaccgncgcccctataggccaaataaccgcaatgttttatcacaacgcacaccacacacttaaattagaacatcctgcacctatcataaaattgatcttttcaaagtaatatatacaaattttatttatgcacagacactgtcaaaaccttcaccttaacaccattccaatttctttcattccattcttttcaggtaaaacaataactcttcagaaaaaaaaataaaaaacccagcccttttaaattcttcaaatttcactttactttaccggcttttaacatataacataccttctttctcttcaccctcctgcattggtgttttcataactatgccatactagtacctctactactacacagcccattctatataagcacccactaaaaaactaatcttacaccttata

SEQ ID NO: 86250 - DNA, 372 bp, Glycine max
gggaattatactgcaacagctacacgtcatatattgagtcctatcaatcccaatacagtttgttttccaaaaaagacttacacttaatggcacgtatacttgaccggttgtcacactaaacactatttccctagccacggtcacgaattatgatctaactactgcccaaagaaataaaaaaatctaatctgggcattctaaatttaacccactgtgccgtttatcgcaacttttactaagtatgcactttaaatctttaggggtaaattgtgatgccacgacactaaacttgcaatgtcattaaatttgataacccccacgactgtatgtatataaggcacaaaagaaggcaacgactatgataaaattata

SEQ ID NO: 86251 - DNA, 539 bp, Glycine max
ttttttttttttctttttttttttttttttttttttttttttttttgcggtttttttttttttttttttttttttttttttttttttttttttttttttttttttttttttttttttaaaaaacccccaaaattttttttaaaaaaacccccccccaaaaaaacccctttttttttttgggggggttttttttaaacccccccccccaaaaaaattttttccccccccccaaaaagggggggaaaaaaaccccccattttttttttttttcccaaaaaacccctgggggggggggtaaaaaaaaaaaaaaaaacccttttttttttttttgggggggggtttttttccccccttttttttttttaaaaaaaaattggggggggaaaaattttttttttttttgggggggcccccccccccaaaaaaaaaaaaggctttttcccggggggggggggggggttttttttttttcccccccccccttttttgggggcacctttttttttttttgttccccaaaaaaaagagcccccccccgc

SEQ ID NO: 86252 - DNA, 470 bp, Glycine max
ccgctcattgattggcttaaacaaactgagtgggccgccctgacttgatgttgtcgcttttggcatctttaccattctgacccttttgtggactcgtaccattctgacccttttttccacttgtaccaacccttcggacgcctcggcggacgcccgggtaatcccggaaatttccctccgggccttccaggtttacctattttgagtataatgagagctattagaactcatggtaataatggtcatcggtgtgaaatgggtaaaagtgcaatacgctacacattatacacaccgtacgcgtcgggtgcataacctgtggagcctaaggagcctaatgactgacattaattacattaatttcactgccctcactgcacgctttaaacctgggaaaccagctgcgttaattaatttaacaaatcgcccaacgagccgggataggcattttgcgcattggtcgctattgtttt

SEQ ID NO: 86253 - DNA, 340 bp, Glycine max
agacattgaattagggaaagcaggaatttaaaaagtgcaaaacataattgtttaaatatctgaaatctaatagctatagacaggtagaaagatcaacttctgagaagacttgaaaaaggaaattcataataccgctccactgtgtagaaagatcaaattccatagagaatagttatagacaggtgatagttacttggtttttcgaacctgatctccctggttgcgatcttctatctgcactcaatagatttgcattttggagagtagaaatcataaatggcacaaaaaggttatcgtaggtggtcatttatcttgcatcacataagcctaaacttggttt

SEQ ID NO: 86254 - DNA, 352 bp, Glycine max
tacttccagtatacaattttccatggcttgaatttgacactgaaaccagccgctggttctcaatacaccaaacttctaagcctctaagaacattaagttaagttcaaaacagaaacttgaaaaaagaaatgtgatgcatttaaaaataaaatttacagatgaaacacaaatctagaagagctaagagacatctttaaaaataaaactcaagaaataagtctccacgtcaagacttttatgtgcttcccaactattttaaaatatatcattattagaatacaagaacctatttccatatcatatcctatctttctttttttttctccataaccaatgagacatgggctaatgc

SEQ ID NO: 86255 - DNA, 178 bp, Glycine max
gggggggtacttataatttgtcttttgttttcgaatccttacattttttaagtagcttttattgttttagctagtcttgcttgacgacaagcaatactctaagcttggcgagccgataaatgttaaatttattggatttttctatgtattccgtgaccactatttaccattttatgtt

SEQ ID NO: 86256 - DNA, 195 bp, Glycine max
ggaccacgcgtgcgagaagcgtcagaaagggagaccttaagtcaagcggggctaccgggtgaagttaaacatatcaatcacccaaaatataaaaacagataaaaaaaacttaaggcggtcgctgtaaaggatacaaacttacgcacgcgtgcatgcaacgccataaatattgtataggggcccctaaattcaatt

SEQ ID NO: 86257 - DNA, 223 bp, Glycine max
cctacgaaaagacgagactaaacaattccagggccttaggaaccttaatgcacaggcctattaagctttacatgcttcctacaatatcccaaaaccagtgtttgccgcaatcttaaataaatacaccaaaggaattatgttagccatacccgatagttcttttgaaactttggagccctacaaaccaggttaattaaattttgccacagaacaacgtgatcta

SEQ ID NO: 86258 - DNA, 51 bp, Glycine max
  unsure (1)..(51): unsure at all n locations
gagaccncagggcaggcggggctacccgctgagnggggcanannggaaaaa

SEQ ID NO: 86259 - DNA, 310 bp, Glycine max
  unsure (1)..(310): unsure at all n locations
aacttnagaagacgccttaatacggttattacaacacgacagaactaagggctacttggggccatttaccaattaataaacactttcttacatgcaacccactatataaccggtgttaacaacgaattccatacaaataatcacttggaaccatatctttgaatcgtacatacaagtatatcaacctattttttgctaaacgcaaccctcacactcagaggtattttattcatctgctataccacgagtcttaaattcttaacgcccaaacctatacattttagctaatccaacatcaatttgaactgaa

SEQ ID NO: 86260 - DNA, 243 bp, Glycine max
gaacccatccgtcacctaggaaccaggatctgcaaatttctccacttgcagatgaaaagctctaaactttaccataattaaatcctatccccagatttcttcctctcactttaggcactccccaatttgccacttttcccctctgtcttaaaagaggggcgtgagccactatctatctcataaatgggagagcgaaagactgtaccttctttactttctatttttccataatacaagttaacc

SEQ ID NO: 86261 - DNA, 202 bp, Glycine max
  unsure (1)..(202): unsure at all n locations
cacaggcgccagaacagcagagaagacgacacaaggggaccaagccaaccggggggcggaaaggaggacgcaaaagcacaaaaggaaaanaancacaaaacaggcaccaccgcagagcagagggcgaaaaaaggagggaaggagcgagaggacaaaaaaaccacggcagcgaacaaagacaaagacaaggagacgaaacggc

SEQ ID NO: 86262 - DNA, 386 bp, Glycine max
gatatttacagcaataaatgataggaattattctataattttataataagaaaaaaattgagcttctaagtttgagtttaagaatgtttaagctgaagtaggaagggagggacaaggccaggttgagtaaaaatctggtaagggaaagagtacccagaagaccaccatgggttcatgtttaggtggttggttgtgagaccttaactatgctttgttattattccttgttctttcatcattatttggcttgcatttaaataatcatgattttaaattttcttctgtgattgttcacatgcaagcagttgtacttgatatgctctccctctctctaattgttttgattttcagttgggtgcagcagattatattgcagtagctgaaaa

SEQ ID NO: 86263 - DNA, 56 bp, Glycine max
gagacctcaggtcaggcggggctacccgctgagtttaagcatatcaataagcgaag

SEQ ID NO: 86264 - DNA, 278 bp, Glycine max
  unsure (1)..(278): unsure at all n locations
cccacacgaccgaacgggtgacagaagacgaccgaaggagcccacgggacactggacggcaaggcccccgacacccgcctagctngaagacagccaaaaaaaggagaacaanaagcccgcgggaaccgccaaagagggggaaaagaaagggaaaagagcgaaaaagaaggacgaacagaaaacgccccnggangacaacccgaacaggaccaaggacacgagagaccgcgcggaagaccccaccaacaaaaacgcaactagtcactgagacaagggga

SEQ ID NO: 86265 - DNA, 179 bp, Glycine max
  unsure (1)..(179): unsure at all n locations
cccacgcgaccgaagagaacgncaggagccggagcccacaatnggaaagcagggggaaaccgggctgnancaagagccagacagcgaacccacggcanacccnacancgagacagcaacgggcaccgcgaacaaaaacnganaaacaacaagcacgacgnacaaagggaaaaaaaccaa

SEQ ID NO: 86266 - DNA, 338 bp, Glycine max
tactccggattgttcatgtacaatcaaatgtacctatgatttgattaaatcaatccaaaagaaacaggaaattgaacaagtgatatgtttcttgaaaggtttaggagaagtttatggtactgcgaaatcaaatattttgatgatggatcctctcccttccatcaacaaggcttatgccttggtcttgcaacaagaaggacaactgcaaggaaatggaactagtgactcaaaggttttttttacctcttcaaatcagtagaataatcaagggaattggaggccacaagggaaaaaaggtagcaactttggtagaggaagaggtaatggaatcttgggca

SEQ ID NO: 86267 - DNA, 225 bp, Glycine max
gactgctgcaaaaaaaccacattaagatacggatgggaatagacgacaaaaggggtgggctgatagaacactagactgggataacggtttcgaaattcctagattggcttaggccccttgaattttaaaatagtgggacatcttacatcattgttcattaaaggagggggagtgcacccgaacccctagatggggcgagaacgagagagagaaatggggtctgct

SEQ ID NO: 86268 - DNA, 397 bp, Glycine max
cgacagaaggggagggatccaaaggttgtacatgtaacatgcttgatttttgacttttcgacggctctcacactataacacttcacgtggtgacacttcactcaacatccttgttagtcaaaatcctccaacggtcaaaatcctccatagatagccatttccaagacctcgaaaatcaactttgtctacttccaagatcaatgaccaatcccacaaaccaacacaagacttttcagcatgttttatcttcactcacacgctttttgagaaactttctagaatgtcactcatctcataaccactccaagtcaaacatgcttaaccgtggatttcttaagtgatgggctactgaaaagtagatttctctctttttggcgtgattcatctggatattaca

SEQ ID NO: 86269 - DNA, 110 bp, Glycine max
agaattgggagaggacgcattaacagggggcactggggtggacttcagaagattcaaacaaataataacaacagctaatgctgtgaacacccattctcaaaatcatcagg

SEQ ID NO: 86270 - DNA, 178 bp, Glycine max
gaccctcgtaacttcgtgggacaaataggggaggggcaggtcaagcttccttcactctcttttattctttatgccgacctgccagaaatcaaaatggtcctaaaaaactgtgctgttacatctgtaatttagtacctggatcaccctatcaatgttatgtatcaaatcttcgattcct

SEQ ID NO: 86271 - DNA, 340 bp, Glycine max
atggcagttcttcatcagcaaaataacggtataaaaataacaggcagtggagatcacagtaaatatatgcgagtataaagacaacaacaaaataataagcgcaacataaaataggcggtgaaaaataaaacacacgcatgcattaacttgatggacaagggaacagagtgaaggacaaaaatgcttatatgtgtcaacaaatcattccattcctcttcttcctccagctcttctggttcttcaatgaaggcgtgtttgataaccgagaatcataagtatttattttaaatattccaattatttgtctgtgtttatgagtttctaaatggcgtagaaaaat

SEQ ID NO: 86272 - DNA, 247 bp, Glycine max
tataggctcggctgctggatgactaaaattggttaccgccgctagaattcatctgatgagtactgctgctaccatagacgaagtgggactcatgattacaacgacaataaaatacatgctgataaaaacgacacataggtgcggatgcaaaatgaccacaaaatgttacggttgttagaaaaacgacagcgggagctccgaattttacaagactagattcgaaaggatgcaacaacatttgtataat

SEQ ID NO: 86273 - DNA, 232 bp, Glycine max
ctttatttttcaggtgttacacacagattaatttagggcacatacaggagcacattctgatagtccaaaaaatccttacttccaccccttatttgctcaccatggcaagataaagatcttcttatatctagaaatagtataaatgtaacacatacgccgacaacgtaaataattttgcacattattcgaatgatatgactgaccctcggtcacattacatgccaggaataga

SEQ ID NO: 86274 - DNA, 72 bp, Glycine max
aaaaaaaccacactttgctgtattttagagcagagaaacaaaggggaattcttggcacatttctatgcacat

SEQ ID NO: 86275 - DNA, 166 bp, Glycine max
ggcggctgggagaagacgggagaagggttccgcttctagaagactacataaaggttcggttgctagaaaacgacaaaaggggtccgctgccggaacaataacatgctgttggagcgacagaattcattgctaattaaggttccgggctaacaaaaggggggtaaat

SEQ ID NO: 86276 - DNA, 221 bp, Glycine max
aagaccggatgccaggcgaggctacccgtttcgattaaccgtggaaataagcggaaaaaaaaaaaaaaaaaaaaagcgggcgctgtggacgatccaaacgaaccaaccctaccatgccacgcaatcgacgttatatcgcgtctatagagtcaaataaactgaacgcactgttacaacgtttaaaccgggaaaactgtgaaaacaccgaacttaatcaactt

SEQ ID NO: 86277 - DNA, 464 bp, Glycine max
gggaataaaaattccaatagaggaaataaatgaagggattgttatcaggctgtagaataattttccctagtcaatagagtttttgtgctcaataatagatattgcaacagtttataaactttaaaaatttgcaccggcatcaacaaaataacagcaaaggcatgtatttgtcatgtatgcaaagacggggaaagagatcaaaatatataggtgcaaataaaggaaacaaaaataccaaaggatccttcaaatggttatcacataaccaattggccaaaaatataagcagcttacgtcccacaggttcatcaccgggcacatttccaatatactgcatcagtattaatggtcacagaattgctgaattcaagactacagaacattgttcaggcaattaactaacactaaagcagaagtattaaatatgacatcaagcataaaaattatatccagaaaaagaaaaa

SEQ ID NO: 86278 - DNA, 343 bp, Glycine max
ccaaacccccttttgacatgctttaaccatttatttgagctggtttctcgcctaataaacaataaaatgaatttccacctatcatttgagttggaatatcggttaatccctgctaaaataaaatccaatcgatctttcacgccgtaaccacgtttaaaaccaaaaggggcaaaataataattaaataatcgaaggatttttgaataaaataattaaaaaatcaattggacgtttttctttgggattttccttaattgaattgaccaataaccaaagtgaaactaaggctaaaatcaactcacaaattaagcttttgccattaaaatcacttaaaaaccgtttt

SEQ ID NO: 86279 - DNA, 223 bp, Glycine max
cggattaaaaaaaaaaactttactaataataacttgtggcgtaccaaaatctgtacggcaaccactcatactttcatttaatggcatacaaaacggcttttctatattacttcaaaataatgcaaaatatccataatagccctcaaatatttcctctcctttgtaccaacaggagaacgttattagcttcccttaggagtaccattgctgctagaccttgtgt

SEQ ID NO: 86280 - DNA, 598 bp, Glycine max
  unsure (1)..(598): unsure at all n locations
gtacgtatagctnggatcctctagagccggccgctttntttttttttttttttttttttttttcgctattttttttttttttttttttttttttttttggtgtttttttttttttttttttttttttttttttttttttccccccccccctttttttttttttttttttttaaaaaaagggggctttttttttttcccccccctttaaagggcaaaaatttttttttttttttgggggaaaaaaaaccccctttttttttggggggttttttttaacccaaaacccccggggggccaaaaaaaaccttcccaattttttggggggttcaacccccctttttttttttttttttttttaaagggcccttttttttttaaatttttttttcccccacccccttttttgaggggggggggggggggggctattttttcccctttttccccccccttttttttttttttttcaaccccaaccccccctggggcccccccgtttcaaccccctaaatttccgcgcggggcctctggggccccccatttttttttttatgggggtttttaaaaccttgggaaaaaataggcaaatttttttttc

SEQ ID NO: 86281 - DNA, 347 bp, Glycine max
ataaaaagaaacctaatccaagcagcgggtgtgtttgggatagttgaaaaaaaatctgatcattccaatatttgattatatatgcaatctattatagttaaaatcaattatgattagaattaacttttatttgagtatgggtgctgaaaagggattttaagataatctatttcgtattgggcaaaaataaaatcaattttacatagtaattataaaaaatgggacttagttatttaattttgttagtaaaatataacttggtgactccaatggacctaacttgtgttgctggaagcaacagaatcatatgatgtgggggttctattaaaggatggaggcgattggat

SEQ ID NO: 86282 - DNA, 407 bp, Glycine max
  unsure (1)..(407): unsure at all n locations
cgtacgtatagcttggatcctctagggcggccggttttttttttttttttttttttttttttaagaattttgaaatatgggacccgaattacttnaccggaatttttcaaaatgcagggggtcccaaaaataaccaacattttttccttgattgaaagcaaaattgaaaaggttaaagagtcttgaatacaaaaatcttcaaccaaataaaatattccattcatcaaggaagacaaagaagaaagatggcttaaacagtacttttgccagttacgaggacgtgcaactgcaacttcggccatagtggaaaggcatttcacaatctttacacttctttcatatgggataggattattttgaaaaccaccagatttgtttgtgtgtttataaagacttttggcttcagg

SEQ ID NO: 86283 - DNA, 337 bp, Glycine max
ttaaacaattaaaataacttagataattaagaagagggaagcgcaacaaaaaccgttacaattaacggtttgcaatttcaaccctaaaagagttaaacaacaaatccaaagaagaagaaaaaaacactcctatttataattataaagatagacattgcaggcttgcaactgtagtgcctacaggaatgagaaaattaaggaaaacagcaaattaattgctagagaatatcaatcagtgccggtcattttaagccgtctgattggagaatcaatcactgaactgggtgacgatgggagtggtgatgaagaaatggaccgtggtgatgatggcgacaca

SEQ ID NO: 86284 - DNA, 297 bp, Glycine max
aaaaccctaaaataaataacacaaccggcgctcttcataactctgaccggtacacgacttgcatttacacccctaaatgcttcaaaccctgaattccaataacaacacacattcactcctactaataattcttaatatagacattgccatcttccaactcatgtcccttccattatcatacatttaacgtaaacaccacattaactgctacaaacaattaatcattgcgccacattttaactccccataatgctcaattaattaatcatctctgtgaccattctagttgtaattatt

SEQ ID NO: 86285 - DNA, 414 bp, Glycine max
gggcaaatacttcaatctgtgttttcaactttttataaccttagctatatttttatttctggaaagcaagctattcccataatggaaaggcaatcagaaatttaaaagtctgaaagatatagaaatcattagtgaattttatttttttgaataaagtaattttcataaatatgatcacaggatcactaaatttagaggaaagaagaaaatttagaaatttatttaaaaaacaaaacggtgagaacgtacaaaaggtgaatagtagtagtgtgtaggtggagaatagtgtgagagttgaatgacatgtaagcaacagcacaatcacacccgtaaccaggaacatgccacgttctcttcatgcaagcaactctcccctctttataatctcacttgcacacgttctgatcaatggca

SEQ ID NO: 86286 - DNA, 128 bp, Glycine max
  unsure (1)..(128): unsure at all n locations
aaaaacgatttgataaaaacctcanaaaaaaaaccaaccgggagattatccatcattttaagactatataaaaaaataaccactcctcatttccaacttatttcaccctataaaaatttttataaaaa

SEQ ID NO: 86287 - DNA, 55 bp, Glycine max
gccgcttattgatatgcttaaactcagcggatagcggcgcctgacctgaggtctc

SEQ ID NO: 86288 - DNA, 308 bp, Glycine max
ggggttgtactaacctctgtttactatgaacaggggctctaaagaataagtctaattaagaattattttcatcaaagattaaacttgattactatccaaacaattcaactttaatatattaaccatatatgttcaatcacttgttggttagttagtgtatgaattctttaagactttaatcatattggatttatataattagtaggtaagcttataaactccaagtaactaattaactagggaatgaaatttacattcgggaatgacacatggaagaaagctagcggcatatttatcatcgtcatctt

SEQ ID NO: 86289 - DNA, 356 bp, Glycine max
aataatattaatcgatcatattttgtgcgtttgtttcaacaaatttggttcgcaacaaatttgattgcaacaaatcttattgcaagaaatgagtttgtaagaaatagaattgattcaaactattattgtaaatctcgttaaaaaaaatattatttgaattaatctattttagaatattatgttcatggtattaaattaatcaatttatactactttcagacatttaataatactatgacaattgtctctgatatttcaatgaatcattatataaaatggtagttctaaaaaaaaacatcaaatttaaatggataacccgttgactcgaaccaaaccaaaccattcatgaatggatt

SEQ ID NO: 86290 - DNA, 163 bp, Glycine max
cggcttaaatatgttttttattcttgatatatactggaattttgcatttgattcttgatatattttttcttcgaattgaatccctcgtatttcaaaagttttattttacatctctgttgttagttgttagttaagtatttgatggtgcaatttgcgacggctc

SEQ ID NO: 86291 - DNA, 121 bp, Glycine max
aaaggagtaacaatgatcaaatatactgcgaaacgttgaggagttgaagggatacaaatttctgttcatcaagtcaatatttacaaggtagcaaataatatatacatgaaagcatgaaact

SEQ ID NO: 86292 - DNA, 105 bp, Glycine max
  unsure (1)..(105): unsure at all n locations
ctctagagcggccgcttttantttttttttttaatttttaaaaaggctttttagataaacacattcaaccctatttccgggttttataaaacgtaccctggtgtc

SEQ ID NO: 86293 - DNA, 480 bp, Glycine max
agagtatcaaaatattctatatcttttattcgagtggtgaggctacactacactagtcgtggagtcatggacaatcaattaattattgcactataagaacttttaaactgagaaatagaaatcgactattttttaaaaaaacaaaattggatatattgttataacacatgatgtgtatgttaaggagagctattgcccaatcttttttattctaaaactgtaaaatatatgaaggggtgtgtacaagaaaatgtgtgtcaatgttcctaaaatttatataaaaaaattgttatattgtgacatcgtggtgtgacatgtaaaatattatattacattatattaatgtctttctttaccttaaaaacacatggttataaatccaccattatgcaagatgtttctattcacattgtggtatcacaaacttagtgagttctcaagctacaaagtgttcacacttttaaaaaagatttctattat

SEQ ID NO: 86294 - DNA, 273 bp, Glycine max
ccccctgactctaggtgtataaatagataagagatgggtgagggggggaccaaaattagaaactcagctagctagctccccgtattgaacgggtcataatgtgatatctatatattctaatagtggggttacgtacttggagtgaggttcgaacaaagaaggtcattaattaatttcattgtttattgtacttataacaatgttaatatggaagaatcaaataatccattttgctcttcactaaacggacatatataaagcttttgacttgac

SEQ ID NO: 86295 - DNA, 576 bp, Glycine max
ttggaggaaaggaatcttaaatattgataaaacaaatatttcataatttatttgaagagtttcataaacttattattcgttatgttagtagacacaatctttgttgtctatggttgtcacaggaagaaggaaatgaaagtgaaaatgtaaaaaaaagaagaagaaaaagaaataagataaaaaatataaattgtttggtagaaaagaaatagaataaaatataaaaaaatttaattaacatgattcagttacatttgataaaactaactgaaaaattaactcaaagttagagaacttattaaaaattgaaaaaattatcttatcgaatgataaaattatcttataatagttaaaaaatataaattacataaatgataaaaataatataattttaccttaaatagaaaaaattaaaaaaatatatttaaaaattaaaagagaattaatgtgaaaaatttaaaactaaaagttatcattttaaaaaatcttactgcaaataacataaaataattaaaagttactaaaaaaaatcgtttattaaacaagtaaaaaaatttcattagtgaaaaaaattaa

SEQ ID NO: 86296 - DNA, 560 bp, Glycine max
cggttctataggaagacttttccatcaagttcagtagattagtacttgagtctgtttaaatccaagactaaaaagttcttttgacagcttttctactaaaagaagttttatattttcagtaaagaaactctcaaaaacacacttatatcttgtatccaaacaaattcaaaagtcacagaaaacagatttaacttgtatgaacttttcctttggaatatgttctagtggcactgacacctacttctttagagagaatatgattgctcctacacatcaccctatagtattctgctctctcttgccattgctatattaaatggtgttgcatataaattatagcacgagtatatgaaaattgatccaaataaatggtttttttagattagggaatttatatgttatcatttggatgttatttggttttattttaatttcttaaaatactagatggtgacacatgtatagttgtcattcattagggttattatataatatatgatttgcacctattgaggagatatcaaatgaagaaatctgaaatttatcttatttatctcttt

SEQ ID NO: 86297 - DNA, 181 bp, Glycine max
ataatatgactaatcaataaaaacccggcgattattttatgaacagggtggaacacaaaactcaaaactttacttccaacaaccacttctccctcaatatttattttctcatttcccacactattagccccactcttaactctttctttctaaatactctccaagtcctagaaaacgaacc

SEQ ID NO: 86298 - DNA, 257 bp, Glycine max
aacactaccgatttgcttggttacaacctaaaactaccgatttgctgctacaaacgggggtatttggctctcataaactggcttggatgggcgcacagatgatactgacagtaaaaattcatgttaaacaaaattaattgcaacattatgctgattataaagtaacctatcattggttcccaaaaatcgtttggatcctgccatacccggttggccattattagtaaactagccttcaaacgggttttgtgtaaagg

SEQ ID NO: 86299 - DNA, 318 bp, Glycine max
  unsure (1)..(318): unsure at all n locations
gaacgttagcgagaatcctctagagcggccgctaaaatttttttttttttttttttttttnagcaatctaaatncaccgaaaaaaaaaaaaaacgcgcaggattttttcgcttaaacgagttcaatacatcattttaaaacataataaacagcaccacttaaaccagaaatccaaagcacaattttaagggagacactgaacaaacaaataagacatttgaaaacacttcataaaagggattccccttaacaaccacccccaatgccaaagacaatattcaaaatggatttccttctgaaatatttgtaattttgcca

SEQ ID NO: 86300 - DNA, 288 bp, Glycine max
ccaaaacctttattcatttaaacaccctgggcctccaaaatggtggatggggaaccctttccaacctaacaacttccaattacccaattttcctacaccaaatttttttcattcaccccaaattaaagccccagccttaacttttttacttttattaattttacaaatttggaattgaaagggaaggaaaagaacttctttaaactgaattttaaaagaaggtggtttcatttcaaaattaatggcattcacccacttattattaactttttcccattcattttttat

SEQ ID NO: 86301 - DNA, 419 bp, Glycine max
  unsure (1)..(419): unsure at all n locations
gcatatgaaattctccgaatgtagtccttaccgagaagggagggtaataaacaagaacaaaatagattcatcgaaaaagatctttcttcttatcttccttcagaaaaagataatttgtataaaatagaggataaatatatctgttgatcttaaaacccacttttattttaccgtttggcaaagtcacaatgttgaaataggtcaacaatagcatatcagagttgcttccaaagtatctcagcagtaggggatcataaaacttacaagctagtctcatggatttcccacaaaaacgaaacatagtagagctaagtaactcattctatattaacaagnacatacttagcataaattgttgaaacaaaaatgcctcagcatagatgaagaatacagaaaataaataaaactgtagtatacat

SEQ ID NO: 86302 - DNA, 527 bp, Glycine max
ccatccaagtaaactggccttttcttaattatgcatgaaaatgaaaaatattttctcaactcagcttttagaactgtcaacagccttaattatcctgtgagattgaatcgaaatcacccttaagcaagcatcccttgtgtagaaaagaaattgttcaacttcattattgaatcatttatctcactttcttcacaacaaatcactgcacaccacttttttcaatcataatttaacattgcaacaccaaaccaataggtactataatctttcaatctaatctaatctagacactgcatgttacgatgccttaaatggttgattttgataggcaatgaacattggtagttcttgggttatccaaatattttctctcggtttcattgttggttttgcttcttccattttatttagacatttataaacctacaaaatcatcttcaaaatgtgatattatatagcattcattaaacttacacgaatagtttctttaataacaaaaggtgtttagattttattttattttatgg

SEQ ID NO: 86303 - DNA, 355 bp, Glycine max
gggaagaaggcgagaataggagagaggaatgaacattataacatgttgagagtcatacaatacatcatttacatccatctctattgcacaaatagtccattcatggagaatgaataagaaaaagtaaagaaagctagtaagcacattcatcatttgatgtagtatggaaggtccaagaaaaaataactagcttttttctcccatcagccgccaccttctcaccaaccattttgccttgctggatgttgcaaaacgaaggatgaccagcagtggagcaagtcacaagtcacagagcctgtccagcgacggcacaaatggaggagtggctgcaaaatcagctgcaattagtggcact

SEQ ID NO: 86304 - DNA, 477 bp, Glycine max
gggactgtaatactttattattagaaaatttgaataattttttcttggatatcaaaatgataatttcttagatcttcttgatgtaaggttttgatgtgcctcacacttatataaatggtggcttcattgatgtaatagtatgtctcttgtgtgtttgtatgaacacactccattaaatactaccaaatcatttcatttcatgattatattttcttacttcttgacatttcttaatggagatttgttgttggtaatttgtatcaatagagattcctgagaaccgaaggtggatgtattagaggttggatgctaataaatgttggacaaataagtttagagaaggagtgtttgaatttgtatagtttgttactagtcaggacatgcttcaaatgcaaggagaacaaacaaggtgtccctgcaagaaatgcaaatataatgttttcaagtttgttgatgatgtgatgagggatctttatg

SEQ ID NO: 86305 - DNA, 236 bp, Glycine max
atcccaattgtaataccatattataaaaaaaaacacacgctattttttaaactctcaatcttataacacataatatcttcctaaaaaaaaatttttatttacctcacacttatataaaccaaagcttcattgatctcatattctccctataaagacattgtattaacacactccattaaatactaccaaatcatttcatttcataattatattttcttactttttaacattactta

SEQ ID NO: 86306 - DNA, 490 bp, Glycine max
  unsure (1)..(490): unsure at all n locations
gtacgtatgctgggatcctctagagcggccgtttttntttttttttttttttttttttttttaattaagttgattttctacgtgaaataaatatgttggataatcaaacttttcaattgaattaagctttctagcttaacaaaattgttggtgagcttgaatcataagtcaaaccatgagctaaataaattcttattaagtcaagttggttcaattcaactcaacttattttcaaacttagttatgttggtttagagtgtgttttgtgaattctacacataatcagtcacaaattttaaaaataaattcacaaatagcatcaaagtttaggtcaacacgatatcgagaaactaatgcatagtagatgccatgtgtgattctgcatcagctttcgcgatttaacgactacttattacttatgctaaatgcgaaattttttgtagtgatactctcaattggagaatattcttcggataattattattattat

SEQ ID NO: 86307 - DNA, 375 bp, Glycine max
gggggtgaaaagaatgatattactcaacccaagcggaaacagattacacctcagtttttataatcagttacacaactgtaactgtcaactaactataaactaactagtaactgtagtttagcctttatagattagctaagaaaagaaaactacactaccgagtaagtatactactatacccccccgcaagctcatgaggggttggcagaatgcctttcaaccactctgagctaggacctgtatgtagtaagatttgaaggagtacgagccttagtcagaatgtctgcttttttatcaatagctggaacatggatgacttgatgttgttcagccataactttttccctgaaaaaaaacaactccaactccacatgt

SEQ ID NO: 86308 - DNA, 122 bp, Glycine max
caccacacccacaaggcttaatacttggatcgatttttacttcacataattccactcacaccttacatcaaaccacaaaatcttctatctaacacaacaacatcaatgcatataaaataata

SEQ ID NO: 86309 - DNA, 325 bp, Glycine max
aaaacgcacttttttaacactcccataacatctaaaaaatccgccacttttttaaattcacgtggacccaactcacacccttacactcaaaaccacacaatgcatttgtcaaaacaaaaccacatcaaattatttaaaaaaatcctatcccaatctatcccgacttttaatacaaaccaatcttaaaacatttcacttacaaacatttaaaccaacattggccctcatagagtcatagtacaattatgttgcccttcgcctttgcgaataacaaccacctttataaaggacaaaccaaagaccattccttcactacatcaatctt

SEQ ID NO: 86310 - DNA, 498 bp, Glycine max
ccggcacaagaactagtcctttttaattgaagaaacaaattctagtaccttgtaattctatcagatggataatagagaatcaagactcacttattgcatgtttattagattagaggagcactaatttacatgacacacaaatttataagtagaaacgtgacatttttttacttgcagttaaaagtaaatatattatatttttctttcttttttttaagcctttctttatattatataactttatcataaattattttataattaaaaattatattccttttcttgtttggatcttttaggcactgatttggatgcttcaactttctgagtatgagtgtatccaaacacgtcgttttgtaaatctttgaagtagcaaacaaatattgggtttcaccgtagatatatcaagatttacttttagtgtgagactattgccattgcacgacatttttcttctggttttaagcttttaacaatttggaagtaaattatttttat

SEQ ID NO: 86311 - DNA, 559 bp, Glycine max
tcctctagagcggccgcttgcggtctttactttttttttttttttgccggtttataacctaacccttattaattgaccaaggggattttattaccttgtaattacaccactttgatgacacaaactcaaaactaacttattgcatgtttattaaattagaggaccactaatttacatgacacacaaatttataagtaaaaacgtgacatttttttacttgcagttaaaagtaaatatattatatttttctttcttttttttaagcctttctttatattatataacttaatcataaattattttataataaaaaattatattccttttattgattgaatcttttacgcactgatttggatgctacaactttttgaatatgaatgtatccaaacacctcgttttgtaaatctttgaagagcaaacaaatattggtttcaccgtacatatatcaagatttacttttagtgtgagactattgccattgcacgacattttttttctggttttaggcttttaacaatttgcaagaaaaattatttttatggttttggggggctac

SEQ ID NO: 86312 - DNA, 293 bp, Glycine max
accaaggcctttctaaccgtctcccaagctagatttctcaaccatctctaaatctctgctgctatcatcttcatattgcattacaaaagggtttgacaagctcaaagctgcagcggctgcaacagcatatgccagaagcatatttggattacatttatgctcatgccttgtatttttaatgacagtgagaagcattctagaatgacgaggactcaagggataatgtgccatggcttttcctaaaagtgtaagttcatccttgttatcaagtgcttcaagagctttcaagcaat

SEQ ID NO: 86313 - DNA, 306 bp, Glycine max
gggttaataaaccatggactgccacatccatggttgttatattaactaagacaggaacttggaatgatacagactgaatgactacacatacctgaggttggataaccgcacacacatttattcatacaaaaattacattatttggatatttggattgacaaacacatggcacttacattttcatacatattacttaacggccacacgtgcagtccgagcaaatgcagttagagccacactttcactatcaatcatgcttagttgatgaaacatgcatgacaacaggatggatgtaactttagtcag

SEQ ID NO: 86314 - DNA, 348 bp, Glycine max
ataataaggctaacattaaagttgcatgggaagataaatacatgatgcataaggtacttcatgttactggtatgctcccgtacatctgggcatgcaatgcaatttgaagctcactaattttcaatcacctaaattgtttaaggaaaccacaggacattcctgagaggctgacacagtgtttatttaatttagtattataatatgatgtcctccaatggttgttaaggaagggtgtgaggcttatcgaaatcctcgagactggtggggcgaaaccaggccttctcctccagcgcatcaaagtgaatggcaaaagcaatttggtcaccttctccggggggcccaaatacc

SEQ ID NO: 86315 - DNA, 318 bp, Glycine max
tcctctagagcggccgcttattttctttactttttctcactttctgcgcgttttcaacacaacacaacacccccaacccatgcgaaattttctaccacacctatacaccccttaactaaccaaaacctatttagaaacccaaaccaacaacacccccattcataacttttacaccactatcaaaaacctgcaatttcctgacccaccagattcacaaatattaattcgctaatacacacttatctataaataactgaccatactaactatcctgctcaacaacaccatcataaccttcataaatgctattatcatcac

SEQ ID NO: 86316 - DNA, 560 bp, Glycine max
gccatacaacttatttgttgtgtgtgttgatgctttacctttttctttgcattctaactgactttactcccccaaatttggggtaaattttgccttgaaccatatgctctcctagaatctaagcaaggtatcaagagataattatttaagttcagggttcaatttatgacaaaatcattcagcatataaagggagcaaaggatacaattatcttgcaaggtaagctgtttggtcaaaaggcttgtgtatacacaaattatggccttcatcatattctcattttacacatatcattctaaaattcaaagattcatgccaagattattaactacaggctggcggtcactcacaaagtaaggtcactctcaccagttttggttcaagcttttctttcacaatcaatctgtctactgactaacaattctaaatgcaatttcacattcttgttcgttctttgtctaacatacacacttgctcaaaatcatgaaaagaaacacaaattccatcaaaatcatgcactcaattcaaaataaagatatacacccatttttcacaaaaag

SEQ ID NO: 86317 - DNA, 379 bp, Glycine max
ccggaagtagttggaggttggcctaacgttaagtagcataagcaaagtctttatatcgaagagacctaatctaattttatatgtacacaaccattacggtaaggaatctagtgggagctagttttttatgggtgaaaatgattaagagaatgctaacacattattagtatactgatactaaataactagaaataagcatatttattatgctaaaaatataaaatgtattttaatacttaaagtaattaaaaggtaatattaagcattttttgttacactatttacttaatccttatatttgtctcaattttaaattgtaggaaaatagatcctctcgattttttttctctccgtttcttaaattttagtgcctacacgt

SEQ ID NO: 86318 - DNA, 83 bp, Glycine max
  unsure (1)..(83): unsure at all n locations
cgtacgttagctnggaacctctagagcgggcgatttnnttttttttttaaattttttttttttggaaaaatggaattaccttt

SEQ ID NO: 86319 - DNA, 70 bp, Glycine max
gaacttaagaaatggacccttatgctgtattctagcattcggacccttttgtcgagttgtaccattcgga

SEQ ID NO: 86320 - DNA, 338 bp, Glycine max
  unsure (1)..(338): unsure at all n locations
tacttagttctttgagaactgaatgttggtaaagttgtttttatccttttttttgcaagatatgtctttaccgaacaaaagtcgtttaaggcgttggaccatttaaacgatcttttgattcttttgaaaggagagaaacatttaaggtgtttgaccattaatgatctcttgttttttttttaaagtagtgacaagtttacatgttgattttatgctttcgaaagtccacgtttaaccaataaaaagcaaagaggactgtttaaggcgttggaccttaaaacggtttttaagtgatttttatggacaaagcttgatttgtgagtngattttagccttag

SEQ ID NO: 86321 - DNA, 225 bp, Glycine max
ggggtggttcattttatcctccaagggagaagaaaatctcgatagggaggaggacacacgtctcacggccccctacacaaaagtttccccgcatatcacaaagcgctgtcacactatttcccggaagggtttttgcgcgcgcatgtggtttttggtattctacacggcaaaacaagacgacgatcctgttgtattgggctggaggcatccttgggagggtcatca

SEQ ID NO: 86322 - DNA, 106 bp, Glycine max
tgacgaggtttagacactgcatggcaggggtttcaagaacttctcattcaatgaaccaataactgattcaaggaactctagatgatatagttttgcggtccaaggt

SEQ ID NO: 86323 - DNA, 338 bp, Glycine max
attcgagcggccggtcgacttaaggttacttatttctttgctaagcaatattcggaagacatatttatgtatgtataggtgaacattatcttgttgctttgagatatccatcattcaaaggtgccttatgactttacagaaatacaccatatcattctcaatattttagattggctccacatttcaaatccatgatgaaatagttaattttcatcactctaggtcaagacgagttattggcagaacttttggcgtttgtaaaacaagacgggcaatattacaatgcctgattagttttaaacatgaaactcaaatttttatcatatggacatatattg

SEQ ID NO: 86324 - DNA, 226 bp, Glycine max
aggtcctgttgatagaactccacattagagggccaggggcaactacaccacttaagctttcctctgctattagacaacactaaggttcagctgcgaaatgaccactgaacggtactgctgatacaaaacgacacaagggtaccgctgctagattgacaacatattgtggagaaaactaatgagagattgattttctgacagacacagcagattatagatcctcttc

SEQ ID NO: 86325 - DNA, 133 bp, Glycine max
cctcccgtcagaagacagaatacgtcacaaatggaggattcctcaaacttgggtctaaaggtactaacatatcttactcttacctttcacttttttctctttttctattctcaaaccaaaaaacgcaccctaa

SEQ ID NO: 86326 - DNA, 335 bp, Glycine max
gacgattcctgccactctgtgtcaaaaggaattactatatctatgtctcccatctctctctataatcaatacctatcctcacaaccagaaaactgagtctaacacctgccatttctataggcgacgaaaggcaaaaaacattgccggttttggtataaaacagaaaaccacccccaaagctgctggcataaaccgtccaggacagtatcattattggcaatgccatcgaacacttactcaaactttcacctactaaagttactgccaaaaatagagatctgagaacactgcaatcgcatgtactatgggaccaacaacccacccactgtgaaact

SEQ ID NO: 86327 - DNA, 112 bp, Glycine max
cagttttagatatggaagcaagagtacttggttcaaattcgtcacttagtgggtctgcaaagaacgccgatcgatcaactgtcctattaggacagtatacaatgctagctat

SEQ ID NO: 86328 - DNA, 334 bp, Glycine max
gatatagttgataattttatatatatacaccgttaacaactaacttgtagcttaggtttagatttattaactgctagcagctactcttcctctattttgacttattcatacaccactattgaatagaagaaagcttcttttgcttacttttcactcttctagatgacaataacacgtaaatttcttcgaatacggggcagcaggagaagaaaatttgcgataaaagttagtactataattgttttctgttgttaatggaacatgaaagctatgtgccaccgttttctaactcaaaagtctggggtatgtgaagcatacgaatgtctatacatat

SEQ ID NO: 86329 - DNA, 257 bp, Glycine max
cccactctgaaactgctaatgactcgggaaatgatttattctttgcttgatattctccactactcatatcaccatattccatttacaacttatacactcaacaaaccccgtcatcttataaacgatgcatctatttgataaaatgtccacacatgctatatctgttgatatcatgattcatgattacttgtctaatcgcaccatcttttttccgcccacaatatttacatattcttggcctatacactttccataca

SEQ ID NO: 86330 - DNA, 339 bp, Glycine max
agatgggttctgctgctacaatacgaccgaggggtactgttttcaatttctgcaaaaacccctcaacagcctctcctcactcgttgcttatcacctcttctacttcttcggaattcaccccttatcgaaataatgcgttcttgtttccttacaataaataccctaactagcttccatggcattcatgaataagcactaagacgtcatcacacccttgtccatgtacaacgtcttggcagacgacaatacggtggtcgcataatactaccacgtcgaagtttatggcgatgcttggattcggatggaataagatgccgtcggagacgcaacatttgcagc

SEQ ID NO: 86331 - DNA, 278 bp, Glycine max
tcaggcgtgcgaagacgagtaagagaggttccgttaagcagcagaaggcaagttgggtctggtataaagttgtcctacaacccactgacagtctctcctgagttattgattctccacaactcttcatttttagattatagcatcatatcagacaaattggacttgatcccatccagaaataaccgtatctagctcccatggcgtccaagatgtatcactgatattgcatcaccttgttgttcatgtacaacgacgaggtagacgacgtactgggggtc

SEQ ID NO: 86332 - DNA, 205 bp, Glycine max
cctctttcaaaaatggggaagtcattaatggtccaatgccttaatgttttcccactttttaaaaaaatcgaaagattgtctaatggcccaaccccttaaatgacctttcattcaataaaaagatgtcttgctcgagattattaaattataaaaaaatttaaagcggccgctcttaaggatccaaacttacgtacccctgcattcg

SEQ ID NO: 86333 - DNA, 308 bp, Glycine max
ggccctcttcagaccactcgtgtcggaggcgtcttagcactgatcctaagtcggtttacgtaccatggttatgcattccacttcatgagacggtgcatgtttgcgcaatctaaacactatctcacactatcctccatccaatagcatagggtacacgaaccctcataatcatatgggataagattgtctgttcatgactataccgaaaccactactgaacataacaatgtcactcatagacaaactacacctttcgtgacacaggcaaccagctagaacatctttgttactcgtactaaggaaaccga

SEQ ID NO: 86334 - DNA, 171 bp, Glycine max
tgcaagacgacagagggggacgggaagaattcttgggacttacgagaaagagagaaaagtgtgtgtattgaaccattgtatcgatgtggccacttgtaaaatggtcttttgatcttatcataatgcttctttttacatatccatatcatatacgggccctttgccaatcct

SEQ ID NO: 86335 - DNA, 317 bp, Glycine max
tgctttagaagacgtgctgcaccctgcggattttctcattgaaatttatgatactcttggtaacctcaagaataaaaactcgtgaatgaggaagagaacaccatcatcttttcttctttttttttgacaatgaaccgccgtcattgaataaagaaaataaatgacatatagtctaaacttattcttaaaaagggaaataaagttgaaacctgagaattgagatgatgaaaaataatgacatttgggtgatcggaaagaaaattaaaaaataacaagtaccgaaacagagcactttttaaataaaaaaagaaaggaac

SEQ ID NO: 86336 - DNA, 350 bp, Glycine max
agtcttttttggtgttttattatggggtttgggaggatgaaggtggggaataataataataaggggccaactgaggagaagaaggagcggctgtagccactgcaatggaggggaatggtcctcgggagagtaatagagatgactgtgttgttggtggtagcggttgcaccagcggtggcaactggggttgtggtggccaccattaagcatgatggtagttgttcatgagtcactgaggcatagatggaactatgaaaacaccaatggttaatggtagaatgctaaaaaattacactatttctactcctaataaaatactataaaaagactagagaaaaactataaagaga

SEQ ID NO: 86337 - DNA, 381 bp, Glycine max
tcgtccacacgtcccgtatcaggtgtacaatacgacattatttctattctcttcccaaataagaaccttgatatgtttcatcatgtcactcctaattacccttattgaggaaaaaaaattgttggttcaaccaattttctaatatttcaagttaatgatatttgcgctccttaatatacttctttatctaaccagaccttttactttttgtgccctacttctgactctaaattttttgttccacaccttttttttcttctgattttctattataaacccccttgtaataaaagtgctgtgtggttatagtatatttctcttctctaatgtttagcttactaataaggctctattttttggctgaattaaataattgtaaac

SEQ ID NO: 86338 - DNA, 344 bp, Glycine max
tgcggatgggataagactacctaagggtacggttgaaaaaggactacaaagcggtgcgtctgcaagaagactacatacagcctctgctgtcggatcaaatacataagattcagcctttaagataaatcttatgactaacgcacctaatatagctagagatataacatttaaccttatcgggtataaactctaatatggtgcaattattatctagttgggcatccacattgataaactactctctggatccctttttatatgcataggaaagcttagactataccagaatgaattcctcctatcgcagccaacgcgagagtaaatacacatcgatacatgaatat

SEQ ID NO: 86339 - DNA, 311 bp, Glycine max
gactgatctgctaagactagcttaaggctctccgacctaataactccaatgagctgcctctacaagtagtcgacatgcgacgtcaatattctgatcaaatacttctgagtgtaccttttcattgaatcattagcattactcacttaataaagctatcgtttagatgtttcaccatcaagatatactctgtaatctgatgatggttaatcactatactgttacaaaagctgattactttctgtcagttccatatagatgtacatcaaaatgcctatagactaacagttagttacagagcacagctgttacac

SEQ ID NO: 86340 - DNA, 313 bp, Glycine max
atcagacaggagatagacgaaatggaacctttccagctccataactctacccaacactcctccgtactagcgttgcttcgaaaccctaaccctatccatcagattcctacgttcgcctccaacgccaatacactctatccaactgtcatatacagtatgatcccaatctctctttgagatgaatatcaaaaacacacaatctcttttgtgggagcgaaactcatcaaagcaatttcacactgatctgtaacaacatatccaacagctgcaggaacacaagcttttgtcatattcatatgtaaaggcactacat

SEQ ID NO: 86341 - DNA, 328 bp, Glycine max
tcattaaaataataatgtataacaattatattaatatttaataataatatttaattttaaaaatcatgaaaattatataattttaaacaacatgagagaagtcaaattcatactttgacgtctgactatgtgtgtatatatgacaaattaatataaacactcaattaaaaaataaaaaatagagacctaattaaaaaatttataaagatatgggaagctagagcctaatttaagcaatattttaattgattttgaaaactgtggaaaaggaaaataaagaaaatggaagattattggcgatagtgggaggcacacaagacatccatat

SEQ ID NO: 86342 - DNA, 121 bp, Glycine max
acgcgtgagaagactacaaaatgacgacagaaggagtcacatgattcagtagcgccgtgattacacactaactccacctttttataaactatactcaacaacaatattgccaaacctaaaa

SEQ ID NO: 86343 - DNA, 210 bp, Glycine max
tatgttaatttgggaataccacagccatggggacggatgctacatgcattgaattacaacttgatgtaaaaaacatctttttatctatctttaaaaaaagaagggtattggcttttctctagaaatcagaatggttttagaaaccatcaaccctacccgttatgcattctccaatgctgctagctgccaactgatatgtatctgccgttc

SEQ ID NO: 86344 - DNA, 355 bp, Glycine max
tggtatgttaatttgtaagtttccagcgtgaggtcgaatgcaacattcactaaattatgactgatctgaaagatccctttgtagctaagttcataaggatttgattatgtactttctgtatcaatcagaatggtatattgaaccaaaaccccaacaagttatgcattctccactgctgctagctgcaatccgttatctatctgcctttctttttgatttgaaccaatgcccaattactttgtcacttgatgacattgaacatcaaatgcaccatgtagacctatacattatcaaaggatagaaatagttaattcttttgtgcactttgttataaatgatttcagttttatataat

SEQ ID NO: 86345 - DNA, 374 bp, Glycine max
cccactcgtccggcgagacgaccactcaggggggagaattcaaatgagaggtggagatggcttgcatacatttttattcctttgctctattcatcttccattcgctgacaccaagaaccctaacagaagatcttacatcaaaacccataagctgaaatctacgaagatgatagttttgcatgtagccatatagaagatttagagtaatttatccgattttctagttagactttatttaagctgaagcaaaggaaaatgcaattagacttggataatgctggaagagtatcaatatattgtacattcactacatggagttccattcgtcattctcatcagatggtcatgtgatggatggtgatcatagtcttaac

SEQ ID NO: 86346 - DNA, 112 bp, Glycine max
agccagccggcctcgttgccggcgaccatcccgtataccggcaacattaacgaaccgggcacggggatcgggcccgggaccttcaacccggcggggcccgtcggggcgcgca

SEQ ID NO: 86347 - DNA, 338 bp, Glycine max
cactaagcccaggtaacttagacaattttttgttgattgccgcacgctaagccgagctttcctgggccaagcttgatttgttgcggcatctgctgagctttgaaaagttggtgccactaagcgcagcctttaatgagcttagcgcatatccttgcggcagatgttcaacttagtgggcactgtccagctaagccaattctgcagaagctgaatttttgcaacttccgctaagcggctccatatgtcgctaagcggtagtgtttttttttttttttttgcaaaggccagctaagcggaccatgtcttgctatgcgggcaatgtctttttcagttttgat

SEQ ID NO: 86348 - DNA, 331 bp, Glycine max
aatttttagaatctctttgatgctttgtgtgttatatcagtatggttagttccactattatggctgtttccaagaaaccccggcttaagcttagagatgtggctctgtgccgtctgttatctgtggtgtttgttactttatgtggggttttgcttctgatatttctccttgcatcaaattcaacaccaattgggactcatgatatgatagacaatgctgatgcataccatcatgacatgaagtttgaaaagttgcatgatctcccacagcagaatgacttatcacttagattggaaaggctaaatgggttgccacctatgaacttggattt

SEQ ID NO: 86349 - DNA, 346 bp, Glycine max
cacacgcgtgagcagatgtcagatgacgacagaagggaattcttaggatctaggggatgctttgtgtgttatatctatatgcttagtcccactattatggctgtttccaataaaccctgtcttatgcttacagatgtggctctacaccgactgttatcagtgctgctcgttactttatgtaggattctgcttataatattccttctttcatcaaacttaacaccaatttgtactcatgatatcattgacaatgctctttcataccatcatgacatgaaccttgaaaagtcccgtgatctcccacagcataataacttatcacttatattggaaaggctcaatggat

SEQ ID NO: 86350 - DNA, 242 bp, Glycine max
atctcagaatccgtctgcggccatggggaaagtatcctgctgagattcgcgacccattaaaggtggttccaagatagcctcggatctttcagcaatacttaagtatctgccagaggttacgatgctggtgcgtggatgaaccgtggcaagtaagccaaagtgtatttccctgatgagccttcacacgctgtttgctcttatggtatgatagagaatgctgatgctcaccctatgaacataaa

SEQ ID NO: 86351 - DNA, 345 bp, Glycine max
gaattgcaatcaaattagttcattctctttgcgcagttccctacctctcctttcaagatgcagatcttcgtcaagaccctcaccggaaagaccatcacccttgaggtggaaagctctgacaccatcgacaacgtcaaggccaagatccaggacaaggaaggaattcccccggatcagcaacgtctcatcttcgccggaaagcagctcgaggacggccgtaccctcgccgactacaacattcagaaggagtcaacccttcaccttgtccttcgtctgcgtggtggcatgcagatcttcgtcaagactctcactggcaacaaccataccctagaggtcgagagctct

SEQ ID NO: 86352 - DNA, 129 bp, Glycine max
ccgaactgtataataaaacaatcaggcgttatttcaacaccaacgcttcctgattccaaatataaaggcactcttatatgaacaacattaaattccaattacagacctgccaatccttgatcgagacca

SEQ ID NO: 86353 - DNA, 64 bp, Glycine max
agagggacctgaagcgggtgctcctttagcagctcatcccgatgtagacaagattgcctttact

SEQ ID NO: 86354 - DNA, 213 bp, Glycine max
aggaaaaaaaaaccggtcggcctcgaccacgcaccgctgcaagcataccacacttttttactactccaaaaagactaccatagggcacggcttttttaataccacttactcctctctctgctattcttcttcccccacacccgacgagagaaaaacaacataacttttcactttttagaatacgacataaatttactccttatacaatactac

SEQ ID NO: 86355 - DNA, 205 bp, Glycine max
ggtgcacaagtgagtttgttgatcgagataactagaaacagtgtgatgaaaatgaaggtccttgttttcttcgttgctacaattttggtagcatggcaatgccatgcgtacgatatgttccctctccgaatgaacactggctatggtgcccgtactccggaggtgaaatgcgcaagttggaggcttgctgtggaagcacacaaca

SEQ ID NO: 86356 - DNA, 285 bp, Glycine max
ggggtcctgtccgtggcttagagagaaagacgtgcagagtgtgaatgaagctatctgtcctgttctaatgatcttctcttgaaacctacgactcttgacgctggagttgtgcaattgaacagactgtgcctaataaataaaggctcagtataatgactggaaattgtatctgtatgggtggaggagaaccagctacatgatgttataagaacggctcacatcatcttagatcgcaatataaatctctggatgaaactactgtgaaagactactcttaaactgatg

SEQ ID NO: 86357 - DNA, 131 bp, Glycine max
tcaggcgtgcgtacagatgtcgatggagcgccaattggtcaacctggggatcggtacacagctggttacttctaactctattttcaaattaatacttattaattgctagtgactactcttccgttattaat

SEQ ID NO: 86358 - DNA, 305 bp, Glycine max
  unsure (1)..(305): unsure at all n locations
aaaaaaaccgcgncgacccacccatccgaatataaaccaccaatttttattttttaaaaacaaaacaaatcaaatcgttctgtttttttaacaatcttttcttcacctaaattaaaacaacaccatttctttcacttctatactatccaaacacatatattccttaaataatttacaatatcatacattttaatcaaatgaaaattatcattaaatatacccaaattttaatttctcatcccaatttctcccctctcaattaaaatacttttttacttatctaatatctccattcataaaattct

SEQ ID NO: 86359 - DNA, 285 bp, Glycine max
ccaggcgtgcgaacaggtgtaaaagaggctccgatgggtcaaactgagcaacggttcaatgctgcttactgtttattctatctaccatatatttattttttttttttagtgacacttcgccagaaggtaatatggcccatgaaaaataaatatacacatgtgtatcaagaaaagaagggcactctatcaaggtctgggtccagatcggccttactgtgctaaattcgtgattggagcaggagcctaataggatgggtgccttaaagacctgcaccaagaggaaca

SEQ ID NO: 86360 - DNA, 320 bp, Glycine max
ccaccccttccaccaacccttccttctttttgtaaaaaaacaacaaaaaagtggggtttgattttacctaaccaatttaacctaccggaatttttttttttaaaaaatccaatgggttaccttttaagtcttttttttccttaaaataattacccgtggattttaaaaattcaattttttttggggcttggggtggaccacaccctgtccctatttcgcttaattttgtttttttctaaaaaaaaatgtgttattaaaaccaaatttatttgaaaacttgtgaggtagtgtcaataaacaaaaattttgtttttttaacc

SEQ ID NO: 86361 - DNA, 318 bp, Glycine max
tgggaaacctcatttcactccggggtgtccattttttttaaacgtatccaaacataaaatttaaataaacaaaaattcatctctctacctataggatccaagataacttactgcctccttgcgactttataaactataaattagtgtgacctaaattcaattaacgggccattttttttcatctctgtaactgtaattaccactccttataacaattacataatccttatctacatctcaatctcaccatttggtttactatcgaatagaccctaatttaccttcctttttaataacatcacagccttaattattaat

SEQ ID NO: 86362 - DNA, 226 bp, Glycine max
acctattaaaacacaacaaattttttattatactaaaacaaaaaaaaagcgtcttgtttatttacctaacaaatttaacttaccccaattttttattttaaataatccatttggttaccttttaaatttttttttcctttaaaataaacacccctggaattcaacaactccttttattttgtgctctttaatcaacacaaacacttccctaatttgattatttttt

SEQ ID NO: 86363 - DNA, 345 bp, Glycine max
ggtgtgattgtttgttgttgtaactcgttcttcttcttttgttgttctgtgtttgagtttgttttttctctcacctgaaaatgtcttgctgcggtggtaactgtggttgcggaagctcctgcaagtgcggcaacggctgcggaggctgcaagatgtacccagacttgagctacactgagtcaaccaccaccgagaccttggtcatgggagtggcacctgttaaggctcaatttgagggtgctgaaatgggtgtgcccgctgagaacgatggctgcaaatgtggaccaaactgctcctgcaacccctgcacttgcaagtgaggtgttgggagagcaagcttcaagc

SEQ ID NO: 86364 - DNA, 318 bp, Glycine max
tcttaaaaaaaacatttaattttatcaaaattatacttatatgtgggtgttatcttctaagtaaacacttaataaccataaacccttcaaccaacatattacattttattttatatatatgttacactgaaatgctatctttgtgaattcaaatacgtaacgctgacatctctcaactctcttttactgatgagcttgcataataattttataggatgtttgcatacttataaactttttatttgctaataataatattatcttgaaaaatcaatctcgctctacttatccttttaatatatttttgaaaaacatcat

SEQ ID NO: 86365 - DNA, 378 bp, Glycine max
ccacgcgtgcgaagacaccgaagggggggcccatttatacatacatcttaatgtaatttgtgaatgtgaaattgatcattgaagagattttattagtgcgcaccatacgtgaaccaaccagcatcacacaaaataaaggttttgcagattttgcagttcatgtgctgaaaaactggcaccacttgtgaaaggagactctgctcgctaacgctatctacctgaaatgaagccgtgatacattattctaaaccatggtcgttggaattagcctatacaaagcaattagctagatgttagaaatataatctgtaaccgtaattgaaaccaagattggaaattatgggcatgatcacagttttattgcgatctatcatatta

SEQ ID NO: 86366 - DNA, 276 bp, Glycine max
aattttgattatttgaaaaattaccaacttcgggccggccttcacggcaagaagaccatagtacctttgacccttcaaccacacaagttcatgctattagtcagaaatgtcaaacagcaacgtcctctttttatagtgagatacatcatgctttcaatccctacactctattttgctgaatgatcattgttagcaattccatggtcgaatcacagcttcattaactttacacttgatgatagtacgatcactatcaattatcaacgacgctctgct

SEQ ID NO: 86367 - DNA, 352 bp, Glycine max
cgagcacaggctaattctacctcaaattatacgtcaaaaggacattcaatgccttggctaaataagaagcttatattgaacctatattgtcggttcaaatacataagatcaaacatttaagttaaattttatgattaaccgatataatgtaattagagatataaaatttaacctttacgggtaaaaaaactaatataatgcgaattattatcgacgtttggcatccaaattgataaacttctgtctggatgccttaatatatgcatagaaaagctcagccttgatcagaatgaatacgacgtatcaaagtcatcccgagagtaaatacacatggctacatgtgtattttatt

SEQ ID NO: 86368 - DNA, 340 bp, Glycine max
agtatgatatggagtgactcaactagtagtaatagtagtctaatattgatacgtaaaatatgtaaggcttctataaaggcaggtgtacgctacataataataatagaggactcaaaagtctagatatcaaatgcaaaagatcagctgcattcctaattagttgagggtattatactaacaattgaggcgattaaaaagattatttaaatattcttatggttgtggtctttagaattaaacacattaataatatgtctagagaagttttgagttatgataagaatggtcaggggttatgacttgctggtaccaaatttataccaactaacgttgtaaatga

SEQ ID NO: 86369 - DNA, 366 bp, Glycine max
acggagggtggccagccgtcgaagacctgcttcaggggagctaggaccgaggcgaacgctctttcatttaaaaccaggaacgctatgaggtgcatttgctactattggacttacacagccggaaacctatattgagatcatggccagaaaactaaaagctgtccatgcggaccacaagatcgatctctgaacacacaatcacgaatatggatagtgggaaaccaccttaatagtggatgacatggaggaagggaaagagctgactctacagcttgaggactattgatgtgacaaagatgtcactgatgatccgtctccttatgtgccaatggagttggtgagcatcatcgagaaaagcttaaccac

SEQ ID NO: 86370 - DNA, 380 bp, Glycine max
gaattgcaatcaaattagttcattctctttgcgcagttccctacctctcctttcaagatgcagatcttcgtcaagaccctcaccggaaagaccatcacccttgaggtggaaagctctgacaccatcgacaacgtcaaggccaagatccaggacaaggaaggaattcccccggatcagcaacgtctcatcttcgccggaaagcagctcgaggacggccgtaccctcgccgactacaacatccagaaggagtcaacccttcaccttgtccttcgtctccgtggtggcatgcagatcttcgtcaagactctcactggcaaaaccataaccctagaggtcgaaagctctgacaccattgacaacgtcaaggccaagatccagga

SEQ ID NO: 86371 - DNA, 188 bp, Glycine max
gcactatcgcttatgcaaaacaataattcttatttctggacggaaaaaacagagagtttccctcgatagatgaaactaattcgtctcaaccaccgaacaccataatcatggaagtgcgtcatcttttaggagcgggtggttgtaaaagcacttattttttcccacctgaacaccctacggaggcaccc

SEQ ID NO: 86372 - DNA, 258 bp, Glycine max
gacacatttactaggggttgaacggcgccttgggttatggcgtaaaaatggtggctttctattttagggaatagggatgctgctgcctgcggtggtggcttattattatcagaagaagtttaccttaaggttagtacctagaatctgttttggcaatgggttcagtcacggtctagacagtattgattgctacactttatgcaatcatctcactcaggacttacttgcctagtatcaatgtagatgcaagtaataatg

SEQ ID NO: 86373 - DNA, 301 bp, Glycine max
gcgcgggagggagaaaaagagggaaagaaaccccaaaaggtgccaagttataaaaaagaaaaggaaagcttgaataagaggaaacacaattaaggtcttgatagaataaaagaaaaacaaggtgaggtagtataagtctaaaaaaggaaaaagacgccaataaaccaagaggggggcggaccattcctacatctaagagggtccttcaagaccgccgttattaaaatacctaaaagctaaaagaagcataaacaaaaactgaaaatttctaacgaagactaaaatctagtacttgggccgc

SEQ ID NO: 86374 - DNA, 247 bp, Glycine max
acgcgtacgtgtgggtgcacgcatacatccgaatgggagttagagaacgacgagttatggggggggggggcttaacactgggaacaaacggcatgtgtttatggataatatagcagtcggcttacgtttaaggttctctcttcacttataactaataaccgttggatttcaataaataaagtggattaggggtcttgtgacggacacaacctgtgcttaattcgggtcattgtgatgtgcacataaa

SEQ ID NO: 86375 - DNA, 312 bp, Glycine max
gattcataccctttgcacattcttcttcttattcttgatctctttctctctttgaaacaagagcagagcaattaataactcatgttatgggtcactcaacgaccgtgatgatcgtaaagatattggctctagagtgatgggattgtgctctactgtccccagaggcgctaacgatgacatgatgctcaaactctagttcagttcataatctgacaagcttgcgattgcttcaacatccatcatgggacagcaacatcaacaaccccaaaatgggtggtcaacagctcggacaacgaccaccttcactgacca

SEQ ID NO: 86376 - DNA, 392 bp, Glycine max
ggtgtgattgtttgttgttgtaactcggtcttcttcttttgttgttctgagcttgcgtttgttttttctctcacctgaaaatgtcttgctgcggtggtaactgtggttgcggaagctcctgcaagtgcggcaacggctgccgaggctgcaagatgtacccagacttgagctacactgagtcaaccaccaccgagaccttggtcatgggagtggcacctgttaaggctcaatttgagggtgctgaaatgggtgtgcccgctgagaacgatggctgcaaatgtggaccaaactgctcctgcaacccctgcacttgcaagtgaggtgttgggagagcaagcttcaatcagagatagcccttaattacgaataatgataaactattaatgtgtagc

SEQ ID NO: 86377 - DNA, 377 bp, Glycine max
gacgacagaagggggagctactccatctgctggtgttccacagaatcagggcgctgtcgttttggaagaaaggattaaaaagcttgtatcaatgatctttgataggactcacgtggagagtggcgctggctgctgctgatggcgatctcaatgtgggagtggaaatactcatgagccaataagggtgaaaaagaaagcttctgttgtattataaacgcgacctcactgacactgttaatagagggtgtcatggccctacgtgtaatcagggaagctgggtaaacgtgggactaccacttacaattcgcacacacctgatagcgatgctaacgccaatgagcataattgaacatatgttaatgatacaagcaatgttt

SEQ ID NO: 86378 - DNA, 378 bp, Glycine max
  unsure (1)..(378): unsure at all n locations
tatcacaattttacttatatctagtttcaatttacttgggaaagacttaataatcttgatcccttccaccagcgtattccatatgatttgtcttataggttccactgaactgttatctttgtggatacaaatacgggaggctgacatctatcgactctcttttgcggtagagcttcctgaataattttatgggaggttggcgtctcgacgaactgtctatttgataataatagtaatatctcgaattatcaatgttgctctccctatccttataatattgctttgtataacatcatccgtgggacaaattgacgctattaactttgcctgnttgattcaacaattctgctcatactaaaattgcaactactgtgtgtt

SEQ ID NO: 86379 - DNA, 302 bp, Glycine max
ggactaaacctagatgattggactgtatgtttgtcgcttaaaccgcattcgaaatctctctaacatatctactggtgctcccatacgaatccacaaccagacggaatttacaaaaaacgttatcatgtttgacgatgacagagaggagaaggcctttggtctcacttttgcggaagctgggactatgtacatgagcgccgctgagattgataacaaggccttgcagttagattttacgaaatgtataccatagacatagataagtgacctttgcgagaaatcgtgattctatattatgagag

SEQ ID NO: 86380 - DNA, 326 bp, Glycine max
acgcacacgcgggcgagaacgccaacgggggggccgttcttttgatagatcttaatctaattggatggatgggattgtatgaactggatatattttattaaggcgtaccatacatgaaagaactttgttcttctttaccacaaggtgtttgcaaattttcagtttatgtctgcaaaatcttgtcccatttttgaaaggagactctgctcgctaactctgattatcatgaaatgaagccgtgatccatgattttaaaccactgtcgtaggaatttgcccatacccagcgagtagcgagatgttctttgtatgatctttaaccgtaat

SEQ ID NO: 86381 - DNA, 385 bp, Glycine max
aaggcctgccagacctacctaattatggtatcaatgaacgggaggaagaccaaataatctttaacacttcaacctaccaagtgcaaactaaccgtcatatatgttaaacagaaatgtgctctttgtagattcagatacgggaggctgacatctctcaactctatttttgccgtagagcttgctgaaaaattctatgggaggattcgcatcttcatgaactttttatttggtaataatagtattaccatgaataataaatgttgctctccttatccttttaatatagctttgtaaaacatcaattgggggataaatggtagtgatcaactttgcttgtggaatcacaaatcctgcacatactaaatttgcacctacggtgtgttaa

SEQ ID NO: 86382 - DNA, 232 bp, Glycine max
ggagcgcagtcgaattgcacctctaattgtacgtcaaaagggcactgaatgccatggctatataagaggcttatattgaacctatactgttgggtcaaatacataagttcaaacaggggagtcaaatcttatgaataacacgctataatctaatctcgtgggctaaattttaacctttctgggttaagaagcttatagaatgtgaattattttcttcgtatggcgtccaaat

SEQ ID NO: 86383 - DNA, 352 bp, Glycine max
atgcccattacgaactcttttaattgacattggactgatttccatgtgaataagaggcctggttctacccctcttctttgcctgaacccccacaagcgccacgcattaatactacaatgctcacaatagaactctgatgactgtcattcaatcttagttagcagaagctgctatccctatccattgctactaaggatttactcccatatgcccattaatgttcttccttgcatagaccctattggaggggtactataaatacagcggggcttacaccacatggaacaagagaagaatgaattatattcagtaacaggttcagggccatgttatcttgatataccgaaacaat

SEQ ID NO: 86384 - DNA, 215 bp, Glycine max
gcggcggatcgacgaatataaattgccattgttcgcatttacatgatgatagagagcgagagtgattgcgctgttattttgctgagcgcacaagagagtctgacattgatggctacaattcgtcacaacaaaggctcgatgacggtccctcatgcattggaagagcgtctatcttttttcataatatgcctcaaagttttactaccggtgaccct

SEQ ID NO: 86385 - DNA, 151 bp, Glycine max
aagcgggggatatgatctggtgcgactaaacgacagataggtactcgtgtggatattgctacgtaaaaaatcggaggcttgtatacatgcgaggggggggtccattataattatcgaggactcaagaggcctcgacatcaaattcaaaaga

SEQ ID NO: 86386 - DNA, 409 bp, Glycine max
  unsure (1)..(409): unsure at all n locations
ataacaaatgtttaaaattaattgggtgtactaaaattataaatactataaaatatattttttgtcaagaaaatcaaattaaaatttgcataaaagtattacataaatatgtttaattatgtaattttatatttttcatctacttaaatagacaactttactaaatatttatgattcattaagatagtttttcaacttttaactattttttaatcatttgttatagttttttaacttcaaactaattttttaactttttaatttttcaactagttttggaaaacatagcttaacacttgggaatgggtcttttttatggttttacagncattaaatttttctcttaacaaacaattttttttgtaccaaataaaaaacaaatcggatatattttcttaaaatttattta

SEQ ID NO: 86387 - DNA, 194 bp, Glycine max
acacaaaaattacaaaacctataaaattccgtccttttttaaacttcttcccaaaacccaaaaaaaattctttaattaaattctacactcccccacaacacaaaatttttttctaccaaaaattttaaaaacccttattaaatttcacttttaaaagaatttgcacaacaatattatattcttataaatataat

SEQ ID NO: 86388 - DNA, 214 bp, Glycine max
  unsure (1)..(214): unsure at all n locations
aaaacaaannggnaaaactaattgattgttctttttataaaaataccatcccctacattntttgncacgacacccaaactcacatttacaatataatattacctacatataaaaaattattttattacatatttctcacctaccaaaacccacaactttaccccccctttcttattcattttgatacattctcaaccttcaactattttttaat

SEQ ID NO: 86389 - DNA, 371 bp, Glycine max
tttttttttttttgcaacattaaccttaccgaaacctttacataaacggggttcctttactcaaaacaacggtgctcgatctatattaaagtccttataaccccaaaacttactatttctcgcacaaactataattaagtttactgaaggctttccaaattccaacataaacaaattacaaactttctccctttaaccactttttgtttaccactctcaaaatataagaacggactctcaacaaatttggactgtccatatatagggaggaaaatcattttaacacactttaaaaccctccttaaccccctttttctccttagaccattttggacccccacaaaaactaaattccttaatggaatttctac

SEQ ID NO: 86390 - DNA, 262 bp, Glycine max
ggggattaaaaacatgagcggaacaatcccaaagatgtccttttattaaaacatacaaatatattctcaacataaagcccaaaccttcaaaagaacgagcttctcaacatataaaagatgagggtataaatctcctccctgtaaaatggctacatactaacctcatattctgcctatcttgaaaataacataaatgccattaaacacagaatcttctgtcctagagacaataaaccaccccctcctttaagatctatacttt

SEQ ID NO: 86391 - DNA, 319 bp, Glycine max
tttttttttttctcatttaaaggattacataatattgactagaaagggaagttcttcagtgttcacttgaaaggatggtgacgctgcatgactatgtgacgggttaaggactaatgaaaattatatgaaaggatcttgaggaactgcacttaacctttgtcaggatagtatatgtctttatccttcacattttttagttgaatgatacttataataacaacaaactattttgataagcgaaatggctattcagtcattccccaaattgaatatagagcaacagccgggttccccagtaaaaattaaggcaatttttttt

SEQ ID NO: 86392 - DNA, 316 bp, Glycine max
  unsure (1)..(316): unsure at all n locations
aaacaaaaaaatccttttataaaaaacccgtgcttttttaaaaaaaacccccattctttttcaattttttattataacntcccaacccctccaatttcaaggcttaaaaaaacttttcaaacaaaaaaaacttttcaaataaaaaaaatttcatttcaccctcccaccatacacaaagaaattacctcaatatctattccacaataaaaacatggttttttttttttttctttcaatgcatcatttataaaaaacattatctccactctttttcattttcaaatatccttccctcccactttttatcattttaatt

SEQ ID NO: 86393 - DNA, 231 bp, Glycine max
aaaaaaaataaaaacgtcgtattggagtcgccggggacctctggaatgggaggtaaatcttcacacggggctttgcatatttttcgggatgggttgtggttttgtaatgaactttgtattaaagctgaacactgaaaacctaacatattacagctactcgttctggcgaatgcgataatctaaagaagaacccttaaaaatggataccaaagaactcgttcgttctttcat

SEQ ID NO: 86394 - DNA, 163 bp, Glycine max
gggaaaaccttaccctcccatccttaccaaaggggtccttttatgttttaaaaaaacagacatacagactcattggtatacccttaaataacgggaccggcacaccgcgggcgtacaattcttatcatatatgtgaggaagcataaaatgcttgtcagaaaac

SEQ ID NO: 86395 - DNA, 251 bp, Glycine max
  unsure (1)..(251): unsure at all n locations
tttttnttttttttttttttagctgaataacnaaacacctacactctccaaagaagcaagtcttatataacaagccccaattccaaacacaaactaacttacctacctttatacttacaccaccaaaaaccaaaccttcatccatctctataaagagacaaaaattgcccccattaacttaacacacccaaaacaagtcccaaacacttgtactttcttaaagacaacaaattaccactttattttaaacc

SEQ ID NO: 86396 - DNA, 360 bp, Glycine max
ggctgaatgacaacaacttgggaaaattacaaggctaattactgggtcttattttcatttaataacatctattgcactcttcagatcataactagaaaaaaaaactttatggcttagcttcatatcatggaagcgtattgatggatgttaaatcaacaatttttaatcctatttctataaaatgatctgagtaaaaaagtggacgagagctagtaaaatttactcttttatattaaattttaaaaaagggtacattattggtttgggctctttttttaaattaaaataatcaatttgggtcctttaatttattttttgaaaaccaaacctttatttatggtcgaattgggccgttaaaaa

SEQ ID NO: 86397 - DNA, 538 bp, Glycine max
ccccttaaatttcaattaggcctattgagtcttcaattatcacaattatattaacaattgtcttatccaaaacttctgttcattcttaaaaataatcactgactaattatcatttccaattttttgacgatgatcagttttagttaatttgacatgtcttcacaatcaatgttaatgacttacttttgcttcttcgcaaacttttagaatatttagttagcagggaaaataatactattcatcttttaactttaattagcagggaaaataatgctattcatcttttagctttattttaaggtttagcttaatcattaatcttttccccccgctgagcttgattctctagttaagtttttcaaccaagcctttgccatatcatgttctaattgacaattatttacttcaaaggttgccctttaaagtaacaaaggaaaataatactattcatcttttagctttatttagcaggtaaaataatcatgttcatcttttagctctattttaagggttaacttaatcattaatcttttccccc

SEQ ID NO: 86398 - DNA, 296 bp, Glycine max
  unsure (1)..(296): unsure at all n locations
tagcaaaaaaactagagggacgaaaaattttttttttttttttttttttncttttttaaaaaaaaccaaaaaaaaaaaattttcctttttaaaaatatatgacccattcacaaatacattttttttttttatttttttaaaaaaatttttctataaattattttgatttattaaaaaaaaaattttcccttccattacttaagaacttcaattcaaaattttcaaaaaaaatattatatttaaattatttaaaaaaaaaacttttttaataaattattaaaaaataacattattta

SEQ ID NO: 86399 - DNA, 275 bp, Glycine max
caaaacaaacaatttcacccttacccccctaacggaaaccttaacaaaaaaaaaaaaacaatctattggtgcaagcaaaaaaaaaaatccttttaaaaaaagagcttcactgtcctccccccttaaaacaaattaaaaaatttaatggtaacctcctggaataaaacacattgttttccctatgaaaagaaaacaaaaccctccaaaatggaaaaataaaaaaaggctcccaaaacccaaacataaaaatgggtttgtttaaaaaaaaacaaaaa

SEQ ID NO: 86400 - DNA, 353 bp, Glycine max
gggaaatactacttatatatcataagagaaaatgggagactaggctattcaacatatatataaaacaagtacagaagatacaagacaaaatttttggaatattatagtctatagattctaaaacttggtagatcttctaattttgatagacattaatttctagttgcttgagatctaaatttctgaataaaggcctctatcctcctattaagatcctcatttgacatcatagaaaactcattttcttcttcaacaacatttgcttataccttcttagtctctgacctttgcaccttgttcaccctctgctcactcaccacatgcttggctctattgggtctatcaaatttact

SEQ ID NO: 86401 - DNA, 346 bp, Glycine max
ggggggtccacaaacaaatgaaaaattttcagctttacccacataacggagacgttaacaaaaaatacaaaacaatccgtgggtgcgagcgaaataaaaattcgtttgaaataactggcatcactgtcctcacccttgaaaacgaattaaaattgttaatgataagctcatgggataaaacagtttgtttaacataagaaaagaaaacaaaatcctgcaaaagggagagataaaaaagggttcccaaaccccttcctaaaattggtttggttgataaaaaaactaatcaacggtttgcattatttttttgggagcgaacttggtacccttctttttattggggggg

SEQ ID NO: 86402 - DNA, 410 bp, Glycine max
gggagaggaaaatacaaggatcatgtatgagcaaacaaaaagtatgttgaacgcatatgatgatgcaatgactcatgcaaaatgtgaggctggaatatgataacggacaaatgcaggaacgatatgttcattatgatattatgaagagatgcttatgcgatgcatgatatgaatgcattttacggacacgagagcccggaaaattatctcttcttacttgcgcatttggggacgcagtgccccatgtgtacaattaagaaggtgatatggaccctccgttggtttgtttacacaagggatcaagacagaacccatatgcgatgcctatgcaaaagacacaatgcgggaatgtacacagtatgacaatattcacttgacataagcaaaaaggtatatgatacttatgcatg

SEQ ID NO: 86403 - DNA, 283 bp, Glycine max
  unsure (1)..(283): unsure at all n locations
attgggggaacaaaaaacatccattctttgttcttttttaccaactacacctttccctncactaaactttactacaccaaacaaaaactcccctttttattaaataaaccatacattaaaaaaaacccaaaacaaaaaaaaatcaaaggaaaataggtaccacctaaagttcactaaattcttataaccaaatacaaaaaggttttcagcccccatttaactttttttcttatatcccaatttaaaaacaactccctttcaaaacccaacttttcctttttct

SEQ ID NO: 86404 - DNA, 104 bp, Glycine max
gggggtaaaaacacaggaaagccctatctgacctgagggctttctttaagtcgtattattacacccaaacccttcagtcgtgttctgctatactaacattactg

SEQ ID NO: 86405 - DNA, 253 bp, Glycine max
gacaaggaaaatacattgttcatttctcaaacttggagaagtattttcaacctatcttctgacacataaacttacctaattttttcgatcaattacacttccttacaaacttcggaaacatatattcacttttattttattaaaacatgaacatcctattcatgatataaaatcattataccgacacttatatctttcaaaaaaataaactattactcatctatttagagactcaccctcacattttttcttt

SEQ ID NO: 86406 - DNA, 264 bp, Glycine max
aaccaattaaattatttttttgatgttccctaaagtaatttttttaaattaagggtcatacaaattaagtttattatgaataataaaatttacaatgaagggattcaaaacgctcttaagctcacttaaccccaactcaacaaacaaacaaaaaaagctcacttaatccaaaatacaaagttcccttataaaggaaacaacaagtaattgtctaactgaaaatggtttccacataaaaacataaaacaattaccgttacaatac

SEQ ID NO: 86407 - DNA, 269 bp, Glycine max
agaccagaggctgtgacacttttacattgctggaggtttgctgaaaaaggttatcccagggatcattcttggtccaaaacaccagccatctatgttaaagggggaatgacattccttaatagcactaaacgaaatattgctatgttaacgaaaaaaaactccctcctggctttaaattttattctaagaaggagcctttgatctttctcccttatcctactaccattcctcggggtgtctatcacccccactccaacttaatgttggcc

SEQ ID NO: 86408 - DNA, 247 bp, Glycine max
ggctgccaaaggaatacaagcaacaaagagaggaaagaactcacctcatgcacaccaaaggccaaaggtggaacgtacctacaaaaatacatttgcataagtcaaagaaaaaaaaaattgtcccaaaaaattatgaattcgggaaagggaaaattcaatgttgcatgcaaatgggtagttttataaaaataaaaaagtaaagaatttcttaaactttattaaaataaatgaaaggatgggggggata

SEQ ID NO: 86409 - DNA, 487 bp, Glycine max
  unsure (1)..(487): unsure at all n locations
cgttagctaggaacctctagagcggccgcttgantttttttttttttttttttttttnggagattattaatcctagtcgataaaaaatcaagttgtaatttcaaatcaattaaatgaaattttgttcatttaaatagtggataaatggaaagttctaggcattgagacaagttgttgtggaaacgatactctacatacatttttaattatttgtatacgtacacttgcctagaggtcaactccaacttgttcaaactcattcaagtatgggttgggtcatgggtgttaaactttaaacccatgaaccaaacccattgactcattgatgtgacatgtctttaaaattactattgttgtttatatgcttacatattttttatatttaaaagttccaatattagtgataacacattcactaactttgttagacttcaaagtctttcatgagatactaagttcccattctctctctcactctctacactta

SEQ ID NO: 86410 - DNA, 225 bp, Glycine max
ggctgataattaaaaatttttatttctctaggaggatatacaatcaaacataacccaagtagcggggttacaaaccaaccaaaccacagactaatagcactcgaattagcaaccagatacacgcacaatttctcacttttgtttttctcactcataaatagatcacaagatagggaaaaaggaaaaagagagagagagagagagagagagagagagagagagaga

SEQ ID NO: 86411 - DNA, 409 bp, Glycine max
  unsure (1)..(409): unsure at all n locations
gcacacgnaagntagaatcctatagagcgagcgctttttttttttttttttttttttttttttntaccctccctatttcacatagaaaaaaaaacggcggctaatttaaccttttaaataatccaacaataccccctccatttttattcaacccaacatataccctatatccaaattaaccaccctttttataacaaataattcttataaatacaaactttttcctcaatactccattaccaacacttccaaaaatctcatttagccgaaacaatttttcgttttatgaaaagccgttaataaaaaaaactactgaattttcttcctaaacagtgcttcttccagcatatttaaaaccactccctaatttcctacttgattaccactaacctgtttcatttaaaaatta

SEQ ID NO: 86412 - DNA, 217 bp, Glycine max
ggagaaaacggatatgaatgacctatctcactgggagggtttcataaagccgtacccttacagccgtatcattcaagcgaaaccttttatccgattccttctgtcgtacccttaaaatctaacattggaggcggcctcttctgttcgtatccttcagccagtttcttacatccgaacccttaaaacataatcttttaaccgttcctttcagtcaaat

SEQ ID NO: 86413 - DNA, 153 bp, Glycine max
ttttttttttttttttttttcaaaaaaaaatctcgcccacataaacaatttaagtgaccgaacctgttttaaacaacttccccaatttttaataaaataaaacatttaagggaaacaaaaattccattttggcattggatatactggccaact

SEQ ID NO: 86414 - DNA, 430 bp, Glycine max
  unsure (1)..(430): unsure at all n locations
accagagcgggcggttttttttttttttttttttttttttttggggaaatatcacccatccaaacctaaanaaacacgggcgcgcataatcacaaactcatgttaccctgccaataaaataaaccctcatacctaaactccagcaccagcaacagcttgctcactataatacacaactcctaaaatttctcatgttaccacgtgctaagcacgctgatgcggagccaattgttgtgctcacacttaggcataccctccataatacaaccaaagacttaaccatcatataataatacccttttaatactcacgtgaactaacccattaattaaaaaaaaaagcttttcaacatgacatgcaaactggtaaacctaatgatccccacaactaagaccatttttaaacttgtttttctcactcacactgtcca

SEQ ID NO: 86415 - DNA, 274 bp, Glycine max
caaatcgacccacacacctatatgtcgtacttatttcaaataacaaaacacctcattcaaactctgcactttgtcacatcaccctataaactaaaatcttgaactttacatccatacacattcataatataagatacaagctcccattgatcttactatacacttccatgttacccaaccactttttcacaaatcacatatctacccctccaatgcatattctaccctccaaaattgcaaatccatcttcctacaaagcctccttattataaat

SEQ ID NO: 86416 - DNA, 239 bp, Glycine max
ggggtacattacagttacagcccttttcaaactatgtggggaacttaccccattggcggcttataacagactgacccttctaaccaattttaataacaacacccttttgacctattttaacacccggcccttaatttcccttttttaaatcaatccgaaccattggacaaaccgttaaatacccacctgttcctctatgattaccaacatgtcctatatagagttgtataatagcttaa

SEQ ID NO: 86417 - DNA, 397 bp, Glycine max
ggcatctgcagctttcattgcccgatgaaaccttgttccaggaatgttaagggggaagccaatcatccctttcagaaattcatcaaattttaaggaaagctttgatatatggtcagagtcttcaatgcttaaaaataagcaacaagccaattcaaacgtgtatagctgtactatgggatagacaaacacctgctcctttccttcccaataggtgtctatatggcgctgagcaatgctatccatttttggcaagtagtttctgagtgtttctgcattaagaaagctcatgagcaatcttctcaccatctttgcctcgtcaccaaccttattaaccagagacaaccttaacaacttgcttaccgaactaggccaccacacttgaacattcttgttctca

SEQ ID NO: 86418 - DNA, 316 bp, Glycine max
gggcgcccaacaaaacgacacacacacatatatgggagagggagtgcgaattacaaaagagcaaaatagaatgctgcagtgtatcacatcacacgaagaactagaatcttgaactatacatccatacacatgcataatataagatacaagctccaggtgatgtaacaatacactaccatgataccaaaacactggttcacaaatcacatatctacacccgcagtgcataatctgcccgccaaaatcgtaaattcatgttcctacaaagcctcctgattataaatccaccaccaccatcaatcatggatcccgggat

SEQ ID NO: 86419 - DNA, 556 bp, Glycine max
  unsure (1)..(556): unsure at all n locations
tttttntttttcaaggatcaggaaaatgacgagtggggatgtgcactatagttttgaatgtgctggaaatttaaacgttataagggatgccttcttgtcagctcatatggtatatatattcatgtaactattttgctaagattttaaattgtacgtaattgtcatcacaattgcagactcattgctatcattccttagtatagcgggcataaaatttcaaaattatcattaatgtggctataattacagatggaaattctgatattcttataattaaccaggattggggattgactgtgatattagggattcatccatcaccaaaattgcttcccatccacccaatggagttgttccaaggtcgcaaaataataggatcggtttttggaggcttcaaagggaagactcaattgccacgttttgccaaaaaatgcatggatggagtatggactaccgttctttacatgtgttctttagggttcaattcaccacttatttcaaaataggaatacctcatataaccttttctaaaatggaataaaatttaaaatctaat

SEQ ID NO: 86420 - DNA, 431 bp, Glycine max
actactacagctctgctcgcttccccattcagaataccgttttcctgcaacaaatgtttctaattttctctcttttactgtatagcatgtttgggatgatggcaaggtaagtaaaaattaatgtgaatcaaaattaattttaaaattatgttgaagataaaataacacattattgtttggaaaaaattatgatgatactgtaattttgagttagttatcatgattttaatagtatccaaacgtgttatgtgtaaagggtataaggtttctctcattcatatattaacaaaacgttttttattaaattgttttaatgacttactactgaatgctttttagcttctaacatattaatttcccttgttttttttaattaataattcatattggtaggtccttaatctatatgtctttactagcaattttacttt

SEQ ID NO: 86421 - DNA, 97 bp, Glycine max
tttttttttttttggaaaccataaaagttttttatttatagtaatctgtggtacaaaagcaccattttctctcttataaatttggattaccatcacc

SEQ ID NO: 86422 - DNA, 212 bp, Glycine max
tatgcctgggtattatttgaaactgtaaatacgggggtaagtgtttatctcttacgtgagtggtgagataagtcctacacccggacttgagggaaacataagataggatgggggtataatcatagtgtctttccgagagtgagtttcggatgtggcacatgtgataaccccgctcaatggagggatcttgggaatattactatgttggcatg

SEQ ID NO: 86423 - DNA, 325 bp, Glycine max
ggggggcgcatataaacccccaaataaatggcgccttccccaaccacaatatttttaactcatttccctcccaatttattctcaaaatttaaatagatatgaaacacattttaggggatgaaaaatttccccccccagaaaatattaacacacaaacccactctcaatgctttttttctataaaaaatttcccactctttatattataccccccataaaatatctctataacacacatttttaatatgccccataattatataatattttgaccttttgaaaaaaactcttgcatatataacacactattttcttctcatataaa

SEQ ID NO: 86424 - DNA, 351 bp, Glycine max
ggaccaaggtcaaagggtgaagggcttgaacctctcgcctgatttctggagccaatcctgacatgaagcagctgaggagaaacggtgccagtaagccgatgattcgattagctagcatttcaaattggctgaggtaagcactcactgaaccttgttgtgtcaatttgcacagggaccccgtgggatcctcatattgggaaggagcgaagcgggcctcgagggcatgaaggagaccgatccaagaggatacctgaccactacgaatgagccattggaaccaggccaaggcaaggccttccatggcaaaggaggaaacaacaaggcgttcgggctcaagggttgagtgacagt

SEQ ID NO: 86425 - DNA, 355 bp, Glycine max
ggcaccgcttgagcagacttaacaacagcacaaagcgggttactgtctgttcaagctaccatctctctctctctttcttagtgcctccttgccagaagttaaaatggcccaagaaactttcctattcacatctgaatcagtgaacgaggggcaccctgacaagctctgtgaccagatctccgatgctgtgctcgatgcatgcttggagcaggaccctgacagcaaggttgcctgtgaaacctgcaccaagaccaacatggtgatggttttcggagagatcacaaccaaggccaacgtggactatgagaagattgtgcgtgacacatgcaggaacattggttttgtctctgatgat

SEQ ID NO: 86426 - DNA, 58 bp, Glycine max
gaaccaaagtcaaacgctgaaattctttaacctcttcccctatttctagaaccaatcc

SEQ ID NO: 86427 - DNA, 266 bp, Glycine max
aattaccacataattgcaaatgccgtaaagggggagatcattaccggctttgtctcgattaccaattaccaaaccctctcttatctcccttcttctccttcacttaactaacgttttaaatttttcctatacccttaattctttctagactctaccatgatcaaagaccaggacccattttaacactcctaactcacttttgcttttcaccaggacaatacagcaaaccttgccaatgctcttaacaacaatatacacacatttgg

SEQ ID NO: 86428 - DNA, 367 bp, Glycine max
ggttctagtgtatgtgattgttgtgactcgttcttcttcgtcgttatcttcttcttttgttgtttgtgtgtttgttttttctctcacctgaaaatgtcttgctgcggtggtaactgtggttgcggaagcgcctgcaagtgcggcaacggctgcggaggctgcaagatgtacccagacttgagctacaccgagtcaaccaccaccgagaccttggtcatgggagtggcaccagttaaggctcaattcgagagtgctgaaatgggtgttcccgctgagaacgatggctgcaaatgtggagctaactgcacctgcaacccctgcacttgcaagtgaggtgttggagagctaaagcttcaagcagaaatgg

SEQ ID NO: 86429 - DNA, 165 bp, Glycine max
tgttgagacctcatgacatgatgagctacccgctgattttaatcccaaaaaaaaaaatcaaataaaaaaaatatgctgccgctctaaagtaaccaaactaacttacgcttgcatgctaaatcataactcttctatagtctcacctaaattcaactaactgcccat

SEQ ID NO: 86430 - DNA, 251 bp, Glycine max
accacgcgtacgaccacacgtcctttttgagaagacaacacaaggggggaccgcgctgaattgaaattcaagtgactccgcttcattttacttaccaatggcggcagatgcgactcgactcatgaatgctctgtactattctagcattaaagtataccctcatccttcaatcaacatcaaattgcctctccactggaccatcaacaatatcctcttctaacaacctctcttacttcaaccatctttttctt

SEQ ID NO: 86431 - DNA, 206 bp, Glycine max
acataagggcaaggtaacaaaacctgagtgttttcaaaaactcaatgcaacaagcatcattctttactcctgcttataataactatgataattcaaatgctcttttcatcattaattctctatattataacctaacttgcaaagaatgctacaatcaagataattttagtgactttattcctaatcttaccttgcttgaatcttta

SEQ ID NO: 86432 - DNA, 151 bp, Glycine max
gacctcaagtcaggcggggctacccgcggggtttaagcataaaaaaaaaaaaaaaaaaaaaaaaaaaaatgcggtctttctagaagatccaatcttacgtacccctgcatgccacgtaataacttttttataaggtcaactaaattaaatt

SEQ ID NO: 86433 - DNA, 100 bp, Glycine max
  unsure (1)..(100): unsure at all n locations
cggaaaaccgggcgacaacgcgaacgaacggcggagaagacaacagaggggaccgcaggaaagcacacaacccggggggnngagcagagaaacagaacac

SEQ ID NO: 86434 - DNA, 162 bp, Glycine max
gataccaaaaacaaaacacaagccaaggaaagtgagaaaaataaatcaagacatatgtcaggatcattcacaaaatggggaaaaccttcatgtgggaaggcacaagaaggaagaagaacattagggtgaacaacattcttgaaaattccaaagggaacaaca

SEQ ID NO: 86435 - DNA, 69 bp, Glycine max
gatacctcacttatttctttgcttccttttgaattgccataatcaactgatcatttggctgcgctctaa

SEQ ID NO: 86436 - DNA, 63 bp, Glycine max
tgttacggctgacataagaccacagaagtcgtcggtttcgaaaagacgacagaacgctacgta

SEQ ID NO: 86437 - DNA, 105 bp, Glycine max
  unsure (1)..(105): unsure at all n locations
agcaaggtattgtgcaacacangtggcgaagggaaggtgcaagagttgaagaaaaagtgccctgcaactganaaccctcaaatcctgaaccagttaaggtcaacc

SEQ ID NO: 86438 - DNA, 362 bp, Glycine max
cattacatgcgccatttacaagtacaatactacactgtactccgaagtgggggtgtcctacaaattacgggcaacagcaggaagaaatatatgagtaattttttttataacttttttttttacttatttcttttatattttcaattatagtaaatatgatgtgttttatatttttaagctattgaatatattttttttgtctaatatgtttttataattagaagaatctctaaaatgataaaatattactcttactaaaaaaacagaaaaaataattttatatccttatatatattttttattaattaaatttcgtcattacctcaagagttgatttttaacaaatcacctattatttattt

SEQ ID NO: 86439 - DNA, 353 bp, Glycine max
  unsure (1)..(353): unsure at all n locations
gtcacattggttattggaggggtagacaacataaaagagttacacagctagggtcatttcggtattctaaaaaatggttgtatatcatgttttttaaatcatttttttaatgaagcctaatgaaaagggccgcacggctacttttcaaaattattgatggatattttcggttggtttgggttgattttttaagaataaaaaataaacttaaattaaattaatttatttgtaaatgatttgagttggatcaatagattaaaatatttaattntatctgttcttattttaaaataatattttttatcagttanaatttttattaaatgaattagatacaatagtttttttattag

SEQ ID NO: 86440 - DNA, 373 bp, Glycine max
tgagcacagtctcattctagctcaaattatacttcaaaaggacattaaaagccatggctaaataagaagcttaaattcaacctatattttcggtttaaatacataagtttaaacatttaagttaaattttatgattaaccgatataatctaattagagatataaaatttaacctttttgggtaaaaaaactaatataatcgaattattatcgagtttggcatccaaatttataaacttctctctgtatccctttttatatgcatagaaaagctcagccttgatcaaaatgaattgttcctatcaaagtcaacgcgagagtaaatacacatggatacatgtttattttatttgtctttaatatttaatgaagaa

SEQ ID NO: 86441 - DNA, 366 bp, Glycine max
  unsure (1)..(366): unsure at all n locations
tttcattacatgcgccatttacaagtacctgcctactctgtactccgaattgcccctgtcctacaaattacngtcaacagcatgaagaaatatatgagtaattttttttataactattttttttacttatttcttttatattttcaattatagtaaatatgatgtgttttatatttttaagctattgaatatattttttttgtctaatatgtttttataattagaataatctctaaaatgataaaatattactcttactaaaaaaacagaaaaaataattttatatccttatatattattttctattaatttaaatttcttcattacctcaatagtttatttttaacaaatcacctattatttatt

SEQ ID NO: 86442 - DNA, 222 bp, Glycine max
gcccatcaactatgcaagtgaccattaaaaggcgtgggggggggtctgataacactaatgggacatggctaacaaagaataactcgctttgaaatgatcctagccaaagaactattagactattattcacggcacctgctggggtgcctcacaaccttattgtttgaaaacctaacgtatgtcaacccttcactggtgcactacgaactttttggttgaacc

SEQ ID NO: 86443 - DNA, 411 bp, Glycine max
gaacctctagagcgggcgctgttttttttttttttttttttttttttccaggaggttatggcacgggaaaaaagtataaatataggggcatcttggatgaaatggaacttactgcgatggttaataaaaaggatgtgtacgtactatacatgagaagcgcttaaaattacgtcctcccactgtctgcactgtttatacacttacctctggtgatggtaacaggcacgaaataaaccgttgcaatctcacaattcataaagtactcataccttcgcacacacaggacagggggagattttttccaacccctaataagtgctaccgaggggaaaattggggaaattttttgacaattttctgggacccgggggacattatttttaaaaacatggtggagggacctcctcctct

SEQ ID NO: 86444 - DNA, 468 bp, Glycine max
aacctctaacaacaaaactgttttttatacccaaaagaaaattttttaaacaatatacctcccctcatatcttaacctacataaaacacaaaactgaattaaaaaaaaaacattactttcactaataccaattaaataccatgtttgaataaaacatcagctacttggatctcctttcttaataatacgtgattccaacaaacaacaaatttcactaatcacgccaactcaattaagtatataatcaaccaccctttatcatcttaataactaaaaaagccatattcttccatcacattatttattcctcttgaaccatccaggtttacaccaaaccaatattactaacttccatccttgtacaaaccaatttttaactcaatgttaaataccatgttacactcaaaactaatcttaaacactaacatggaaaccaatctttatcaatactacaaaaatatattacac

SEQ ID NO: 86445 - DNA, 356 bp, Glycine max
  unsure (1)..(356): unsure at all n locations
gccaagttaccaaaccaaacaattaaacaaaacccggtgctttgttattgaaatccatactacanctccataaatcatataattcaaaccataaaacggttgataattactgaaaattttttttttttccatcgcacaagcccccaaaaataaaatattagctaccttactgcctcctttgtgaaaaattacagaggtgaacaaatttataattccatattgaatcacatatgaacattgtataaatatgcctccctattatcctgacacctaaaaattttggaaacacaccccccgccatttggtttctattcagacaatcctgtccaactccatagcataactaagtgtttgtt

SEQ ID NO: 86446 - DNA, 452 bp, Glycine max
cccctataaaccggaggataacatgggaaatgttcgggaaatttttttttcctatgaaaggactttgattataattttaatgcatataaaaggtttggaattttcgaaaaaagagtacctttgaataaaaatttaaaagtccttttttaaattaaaaaaaaaatcatttatggataaaaattaatttcttttttttaaaattttaattaaataaaaacttttagcttattaaaaataggggaaaaaattttaattgttattaaagggaaagggggcttgtggcaaccattcaaattcaaaagaagattaaaattttggaaccaatttcattggaagtaaaatttttaaattggaaatattccaccaaatttttccaaatccaaataatttggcggccattcaacatggtgggcttgagcctttacaatgaaagcaatttttttttgaatgac

SEQ ID NO: 86447 - DNA, 324 bp, Glycine max
ggaatgaaccaaggaaactagagaatatttatagcgtgacacatggacggtatcattgataaacaactgaagggaaaagcaatctatatataagtcctatttgaatcaattttccaataaatgcttataaaaaaataaaatgtattaagttttttcaaaaatcaaaattaatttatatataagtcaattaacttatatataaattaattttaattagcgagaaaaacataattcattttactcttattgttctgtgcaagtgcatattgaaaagattattctgttcacttattggatgaagggatgaaaaattcaagacccttt

SEQ ID NO: 86448 - DNA, 569 bp, Glycine max
  unsure (1)..(569): unsure at all n locations
aacagagagcggccgattttttttttttttttttttttttttttngccaatccctaaacaccccacaataaatttaacctgtcacattttctctacatttcacccaccactccatgaaaaaattccctctaaacatacattatttaaaccattcttttcacaaattcttctaaaaaaacaaaaattattataaatttacttaaatcacaactactttttatataaatgcccaaaacacctttttcaattaatttttaattccgtcaaaaaccaaaatggatcaatttttaaaaatatgcccctatgcttaatacaacgataattttttgcaccactttcctcaacatagcattataattaatacacttctgtctttctttatacttaactaacataaatcaaaatgcacttcaaacatcatattaacctccagcgtacaaatctttctcactcttttaatatgattctacaataacaaacctcttgttcttcaagctccccaataatactttccattattccactcctataaattaacacacatttttccttcacctccctaattctcc

SEQ ID NO: 86449 - DNA, 272 bp, Glycine max
gggtgactcaaaataactattaaaatttttaaacggggcacattctgggtgaccttaaaacacccattaatttaactccaatccatattacacctttatcttgcactaaactctactacaccgctcataaaacaaacaattttattaagttttccctacataaaaaaataccttatatataagacgatcaacttttatatgtatcacctaaaattcactaaataatcataactcaattcacactgattggcctctcccatggcacattgaaa

SEQ ID NO: 86450 - DNA, 333 bp, Glycine max
gggaatccaataattcccatctgatatacaaatttttgttattcaattattggcgtcctaagaaatccgactcattacaaattttttgagacttcattcactttataaacttactaccataaactgcctaatggaccaacaacgcacaattttgtaccctgcacaaaaaaatgctggcacggccatattattggagcaattgacctccactgagtgggtataagcttaacaagatgaagtattggatcattatcttctatggcccactcaggctattcacccatagcttccaattgaaaaaccactcgttggctgaatttcacaacaatttat

SEQ ID NO: 86451 - DNA, 344 bp, Glycine max
gctaggatcctctagagcgagccgctggtgttttttttttttttttttttttttgggcaactaaccaccttcatacaacttcttttataaaagaagaactattttttctacaaacaatatttcctcatctctttccacaacctaaaaacgcatacgttcttccataccaacagccccaattcaaatcattctttcctcattcttaaccaatttcgtttttcttaatactctaatctcccaccaatcacaaaccattactcttaatctcctccttactcacaactccaacacttttcctgacactgaaaacatcattgctatatatcactctcttcacaaataac

SEQ ID NO: 86452 - DNA, 285 bp, Glycine max
  unsure (1)..(285): unsure at all n locations
ccccncctactctttttgtttccccaaaagtagatctttcaaaacaaattatgcccctttaaatttccacaaaattcttttttaattttaaaacaaaactttaaatttttttttcccctaaaaaccacaattctaaaataacaaatatgccttttaagccccttcaaaccccaactacttcaaaggcttccttatccattgttttaaaaaagaggcttccaccttggcaccaacatcctccaaaaaacccccattttccttcttttgttttccaaaatcaaactt

SEQ ID NO: 86453 - DNA, 437 bp, Glycine max
caggaacatattaagtggaaataaatcaaaataatgtgaaaatgttgatttttatacaatacacaatgaacatataattgagtataaggaaaagattaggtaattttttttaaacaaatgattactttttttaaaaaaaaagtaattaaaaaggatttgcttcataaagattacaaaaaatttatttatttttaaatatggctcaaagagagcaacaatttggttgaaaaaaaatataaaaaaatataatttactattatattttactataattgtttttggaaaaatagttattttccaaattcatttaaatagaacaactattattattatttataaataaatctaaatcagacacacttaatatttttaaaatatatatattaatttaatgtttatgagaagaaaaaaataattgataatttaatgtttatgaa

SEQ ID NO: 86454 - DNA, 353 bp, Glycine max
aggaaacacttgaaacatcaaactttaattcaggggggatataaggtttttgcctccaatcacacagataattttaaaggttacttaatgaaaaaatttgtgaaattctaaaaaacactataattaatacctaaaaaatcattactgtaaaatattttttaaacaaccatttcaactattaattttttctggaaacacgattatacaaacatttatataccattttctatgacttaaaataaaaaatggaacccgttatctcatcaatgtgctgtgccataatttcggaaacaatctccataaatgtggcttcacttgctcttggaaaaacagattcctaaacttcctttaca

SEQ ID NO: 86455 - DNA, 283 bp, Glycine max
ggacgcaaaaaactccaacgttttcactcacattcatgcgtgcataaaagtactccaaataatacaacattgatctatttttcaacaaattaatgtaacgaccttacattttttcaacacattcctccatttccgactacgaacttaaaaccaccacctttaataatgatcgccgttttttccactgtattaaccgacacacccgaccacagtgtgtataatcccaacctcacattattataataacattgcatgtacatacaatcatttgctagaactttct

SEQ ID NO: 86456 - DNA, 316 bp, Glycine max
ggccgaaagaaagaccataaaatacttgatgttcatggctcaaacaaaacttaatgttttttatttaagtctttttaccggggttttaaaccgcctttacctctttccaagatagaaaaagagccgcccccctattttaatacggtccccccctttaccccacaagtttcctgagctgcggaatttgaaataaaccttccattttggtcccccctgggggggataaaaaaattattttcaaaaaccaaagggtgcctttatgtttcttccttttttaaacctcaaatcgaaatttccccttttgtcgttttttgca

SEQ ID NO: 86457 - DNA, 368 bp, Glycine max
cccaacaatttcttcggcgcgggtttctttaaccagggggttttttttattttaaaaaaagacattcccctcccctggttgccctccccctacctattgttgagcctccccacctcagaagagaaccacggcgtacacttttggtcaccaaaataaatttttttttacaaagcctcccccttcttttcctagaagacaaaaaaacccccctcttgttttttcaccattacacctcaaaacttattttcggtctcttccccccctttttttgttttacaaatttcttcctaaacaaaaaaggcccctttaccacacataatataaaacaccccaaaaagcagtaggaactcctttaaaattttgatgcc

SEQ ID NO: 86458 - DNA, 355 bp, Glycine max
  unsure (1)..(355): unsure at all n locations
aaaatccatttattgacccacaaccctcgccctttttacttacanncataccaaaaattcactattttacaaaataataattttaccacctttcatatttacaccaccattctccaacccatactacatacatcaacccaccacattaaaaaatcacctcccctctttccaatttctacacttaaccatcctaaaacactttctataatcccaccaacccattattaaatcaactttttctttccatacattaaatttcttacacttcctttcaacaaacttctttaacttcaaacaacctttacatatactctacaccattttaattttccattcccaataccccattacttct

SEQ ID NO: 86459 - DNA, 271 bp, Glycine max
aagcttgtaaaaaaaacactgccccttctcctaagtgtgctttttataataagaaattctcacttttctaccactttaaatctaaatttttactgtgttaaaaaaattatatagatttttgaaaaatttattttaatcgcgaacaattaaactttttggcatttaatttttaaccaacattttaaaatttgtaaaaccaatttgtttcttaaacaaattaaccctaaaaccgggcttaattaatttttttaaaaaaaaaaaaataaggttg

SEQ ID NO: 86460 - DNA, 391 bp, Glycine max
ggcaaggattgttgtttggaaaccttcactcttggcggttgttctttttccaaccatatagtttaaaacttactaatgtttaagtttcttgttaagtaaatgcatgtaaaaaaactcaatatcctatttagttaggcgctatataattattttttgcaaaaattccatttgaagaactattaaagcaacttatggaacaagctttaagatgaatttttttatgacatcttttgataaatatgtataatactaacctcatttcagtcatcaatatatgtccaatacacacaagtatgcattttaattagtagattgagttaatgtcattggcataactatccaatgtgaatgactttatgtctaattgattggagtactaggtggcataacc

SEQ ID NO: 86461 - DNA, 107 bp, Glycine max
cggggccacattatgtaccaaaacttaaacctcaacctgtttaaaatgaaaaaatttatgtcatatgttaaaatgaaagaatctatgtcatatgtttgatggttata

SEQ ID NO: 86462 - DNA, 263 bp, Glycine max
gcggttgtcgaaggaaacaaaaaccaaaattgccgccaattacattttcaaccctttttattaaaaaaacttattcttttaaaatatttttaaaaaaaaacaaattaataaacactataaacacattctatcaacacatatatctctttttttttcttataaatcaataaaacaataatcttaataccttcatgaacaaacattaatatactactttttatataaaataacttgcaaaaacatttttctttaaccattcttat

SEQ ID NO: 86463 - DNA, 503 bp, Glycine max
ggaaagataacttacaaaaggggaatatgaatcttaagggcaagatacaaagctttggaaaaacaaagattaaaatatttgtgcatagagtatcgtccattacatgtataatagtatcagtatgtaatggttgcttctcttcattttaagtcttttctttatagttaatgaagaaataactctttaagaacttttttggttctgatgttgcattaaatacgcaatatgttgttcacattataagaaagatatggcttgtcctttctaaaagagagagaaaaaatgacagactcttagactcacaatgataactaaacggtgtttttgacataatgaaagtgttttctactactctgcttcatatatattatcatagttgataagacctgtatgcttttgatagtactatgtaacatacaattattctttataataaaaaaatgagagcatattcaaaaagacttgacaaatataaacgttgaaacacttaccgtgtgtttgga

SEQ ID NO: 86464 - DNA, 375 bp, Glycine max
gcccattaaagaaacatgagaccattaaaaaccatgcgggaacgtctaataccacccatattaaacaaaaaataaataatcacgatctttttatttatacaaaccaaatcactatttgtctattatccaccgaccatgatcgtgtacctatcaaccttattgcaataattactaatgattttcaaccaggctctcctacacacacaaaaaatagattcaactaatgtaccatatctgcgctggttttacaacaaagccttaccaaatgcatccattttattatatttctcacaccatcctgatagattaagaaattcctttatgtcaacgttgaatctcttaatagctgtatcaacactaggtgctaaaaacaaa

SEQ ID NO: 86465 - DNA, 565 bp, Glycine max
ggcaaacatcagtgtcttccttcctctcagaatcgggctttctcttctccacctctataagctccttcaatctactcatttccttctccttttccgcagccttattcttctcatcccctaccatcttgcaagcttcagcagctttcttgctctcggaatcagcccttctcttctctgcctctataagcctcttcaatccactgatttccttttccttttcaacaaccttattcttctcattctctagtaacttgcaagcttcagcagccttcttcctctcagaatcagcccttcccttctccgcttctataagcctcttcaatccaccgatttccttttccttttcaacaaccttattcttctgattctctagtaacttacaagcttcaacagccttttttctttcaaaatcagcccttcccttctccacttatggaagctccttcagtctaccaatttccttttcccaatcagcttggaaggtcccattctcatttccaccaccgccatgtcccagctctgttatgggagtaccaatctgagactccaagctgcaattttcact

SEQ ID NO: 86466 - DNA, 311 bp, Glycine max
gcaaacatcaaagaattacttaatttaaaaatcgtccctcactctttccacccttataaactccaaaaaactcctcactttcttctccttttaaccaaccttatatctaactcatccccccccatctttcatgctacatcacttttcttactaccgtaatcaaaccttctattactcttcctttatcaacccatccaatccactgattaccttacccccatcaacaaccttattcttctcattttttagtaccttgcaatcttcaacagccctttttcttttaaaatcaccccttaccttttccgatttta

SEQ ID NO: 86467 - DNA, 337 bp, Glycine max
  unsure (1)..(337): unsure at all n locations
gctaggatcctctatatcagaccgcttcnnnttttttttttttttttttttttttggaaactaaatatccaaacaaaataatccaacaataagttcttattttcaacaccaaattatttctcatttaaaaatccaaaattttacaatcctcagactctctccaacaaaaaaaatcctaaaaaaaataccaaatactcaattccttctaaagcaaatccaaaactcattttttcaaaaatacatgtcttctattttatacccaaattaatcttccctcaaaaatttaacttatattctccataaacatactaaaaaataaaaaactttcttaagattt

SEQ ID NO: 86468 - DNA, 256 bp, Glycine max
ggttgggctccccaccccgcatcaaaaaataaaattctgcaaatttattttaaccttaaacatatatttccacatcaaatctccctaaaaaatttgaatttaatttttaagagtgaatttcctttaattttaaaaaaacctccctatttttttttgttttttttaaacacactaaaaaactaacccacttctccaaatttaatttttacaacctccttttattatccaccccttaaaccacaaaacaacttactac

SEQ ID NO: 86469 - DNA, 443 bp, Glycine max
ccttacggtaaaaatcacgggtgtttatgaaacaatccgtgttgcttgtactgtgcatgactactgctgattcaaaaaaattttacataccgattctcccactaaataaatcgctcctccacatgtaaacactgaaattttttaccactataccaactctttgtgtcgaaagcataatatttttaacaaataatacaaaattctaccctctataagcaaaattttgtgtaactggactgacatttaattatgttttatgcacatattgagaacaattaaatgcattgcttccacagcttcctaattgagaattactattatacaacccaccgatgtgtgggaacataaattatgcatttacaaaaacacatttcccggcctattttacaaaacggaactccgacccctatattatattttattacaaattaataaatcatttt

SEQ ID NO: 86470 - DNA, 86 bp, Glycine max
  unsure (1)..(86): unsure at all n locations
gggaaaagataaaaataaaaaggttgcgccttcttaccttaagtctccccttttttcgtttttttncaaccctaccgacccctgtg

SEQ ID NO: 86471 - DNA, 309 bp, Glycine max
aataagaaatgcacaattatactttctgccctttttttacaatatcctttatacaatttttaccccctctaaattttaaggtccaaaatacatcaaaaaacttcttcaacaacctacctattttcaaaccttaatcttaatactcctccttaccaaacaaactatttacactccccaccatttaaaaaaaaactccttatatttttaacccaatcttaaaccccaaacctacaatttaaaactactttgacaccaaaaatttccctgatttaataccatcacaaataattttcaaatacttttacttaa

SEQ ID NO: 86472 - DNA, 208 bp, Glycine max
  unsure (1)..(208): unsure at all n locations
ggataattttttttttttttttttttaaaaaaaattttttttnnganangcnaaaactaaacaactccgcaaaattttttctnanncccaccctcccaccanaatctcacaacccaacaaaaacttttgcaaacccctgaaacaacccccaaatttaaaaccaataccaacaacccttccaacttttcctaaaaaaaacacttttaaa

SEQ ID NO: 86473 - DNA, 418 bp, Glycine max
aacatagagcgggcggtttttttttttttttttttttttttttttgcaaacacttacctgataatgttgtactaaagggcggtccatttgtttatcacaacacaaataataatttacactttacaatactaatacatgacttacccatacaaatctgttagtccaaaaaatacataatgaacaacaggcaaacttttcaacggagagacagataacacaaccaaccaacgggattaatttttttaagagaaactaattactaccatcctgacgtggaaaacgatgatgcacaacctggtgacctttacagctggcggcatgaataaaacggaatttaggctccacaggttttttattggcagataaaattcgctccaaattctccaaaacatactttatttatgcccgatgtttgggc

SEQ ID NO: 86474 - DNA, 411 bp, Glycine max
  unsure (1)..(411): unsure at all n locations
cccccgaaaaggttgaatattatcccacaaaataagggggaattcaaaataatttacagtaagccatggttgaatatgatgagcccgcagaaaagatctacagtaacgaattcttgatctaacctaacaagtcaatacatatatatcatcatatcaaccagtgaagctgactcccagcgggtaagacaaccgtaagaatctcgaatgaatacgacaaatccaattgctcattctactgctcagtttagccatcatgcctacacctggttcttttatttcttaggtcttttcttcctccgaggcttgtgagcatcaaagttggagcttaaactactaccatgaccaagccctgatcttgagggtcttactttgaagnccgagccgcttttgctatttgatgtgtcgctcgat

SEQ ID NO: 86475 - DNA, 429 bp, Glycine max
  unsure (1)..(429): unsure at all n locations
gaacctatagagcggccgcgggnnttttttttttttttttttttttttggacccctaaacaaataaacgattaacaataataaagggggattgtttcaatacagctatcccattcctctacatatccaacacgggcgctcactcttaccaaaaacaccaattacctgcattaaccccatacaaccataaagtgtctctcctcctttcttctaactaaaagggaaaatctacactccatacaatgttaaaacaccacattttatgacaaaaaaaaaaactctatttcttaacaatcactgttaactcttaacaaaaagtgttcatactggtagagcgactttctgcactttgataaataaactaatttgctgctactgaccgctgttacttaaatacagacatttatccttttggctaaatagaaaagta

SEQ ID NO: 86476 - DNA, 155 bp, Glycine max
ggaaaaattttaggattatcggtatatattattggggtgacttgcgagggaaacctttaaaattgtgctagcgttaaggatgaaaaattggggttgtttaggggaaacaatgaaggtggttgttcagttacaaacaactttttaaacaaaaattg

SEQ ID NO: 86477 - DNA, 305 bp, Glycine max
ggaataaataaatgattaactgtataaattgttggggggcatttaaaggccaccacattactttgtacatttttaaacaatctacttcatgggattattaccagaaacaaagattacagtttttcagttatcaacaaattttttaacaaattattgacaacatattaaataatatcctatgggaccaaattggtaaaaaaaccataaattaaaatttttatctctgccatcacaaggaccatgaacttattgctaaatttcctacataaacaccttaaccgatatatttggtgcaaatctctttc

SEQ ID NO: 86478 - DNA, 340 bp, Glycine max
gttatacctgaattgcatgacattgtccaaaccttcctcaattttaccttcttcctctcctatagacattgtccaaacctttccacaaccaaacaataaaggtatacaagggtgatggtgtgtgcctgagatgtgcatttaaggggaacaataaaatctttaagcataaatacattaatcaaaatactttttctttataacttagatccctagctgaagtgtcctgccaacaagatctgagtttccaattctaatcttgaacacgccaaagtagaagtcataagtcacaactacacattctatgccatggtgcctatggatggctatatatttcatactt

SEQ ID NO: 86479 - DNA, 220 bp, Glycine max
ggaacctgggcgagctatttaccctgtgccacacttcaccgagattacgcttaaaccggattgctactgtgtaagctaataaatgttgcctaaccggtgcgttgtaaccctcaaaggagttccttacgattgcctaacggtgactttaatggctgaccctgacgttctttagcatgaccaccttagcattactcatgaccctagagatcgagatgctgtt

SEQ ID NO: 86480 - DNA, 286 bp, Glycine max
gagggagggagagagagagagtgaaatgttttgcttcctctaatctggcgaatcattcgttctagcaaattttgccgaaaactccaaaaccctcttttagtaaactcgattaacgacaatctcaatcttctacagcttatcctatatctctctcttttcttctcttcccccaacaacaatttcaatcaaaactctctctcagctgaaaggtaaatgatgatccttctgctggttgatgtacgagcatagcttaccagtgaagtaacgaatcattttttgccacatt

SEQ ID NO: 86481 - DNA, 335 bp, Glycine max
aggcgtgcgaacggctgcgaggggactacacagcggtgagtcgaacgaagcgggcaattcgtactagggacgtgatcccgtcatggtaatcgagcgagtgcagtgtgcatatgactatgtggatgtactgttataattacagaatgagtcttttcaggagcacacgtgcggtccgatttacttcgggcgagttatatggggtcgacactggtatattacttaagcattaaatttcaacctatttttcccatgtgcacagttctgtgatctgttgatgctaaggagaatctcattttcttgagcagatcatattacatcaatcgctggcagtctat

SEQ ID NO: 86482 - DNA, 356 bp, Glycine max
acgcgtacgaacgcttgcgattttacgacataagggtgtcatggcttagggtgattcatgataagctccactcaaccacaacagctgttctcgttaatactatcacttgcagatgtcttgctacctgtctgactgaatatgctaaagctggtgcaaacacagctatttatctgaaagctttagaacgaaccacaacttgagctactccgatacaaacactacggagatcttgttcacgctagtctcacccattaccgatacattcaagagtgctgcaatggatgttcccactccgaactgttgatggtaatgtgaaaaataatgaacctggcaaccattgactagcagaagatgtt

SEQ ID NO: 86483 - DNA, 206 bp, Glycine max
agatgtcagagactacggaaggtgataacagcattatacaaggggttggggtcaaaaactaaatccatttcttatccttagctttattttttaaaaatacccatcttaaacatatgcgtcagctgtcactgagctgacaataataactgcacctagaaaaacagctatgctgatataatataaacttatattagctacttcgacac

SEQ ID NO: 86484 - DNA, 371 bp, Glycine max
ccagaagacgagagagggtgttgcacctactagttattactaagctatttgcaggatcagaataagcaaaagcctaatcaagctgagctatgacttgaacatggcttattttgtatccgatcaactgagccagtattgtgtgcaccagcaattgatacccttagatggacctatattcttacagaaattagacctatacctcactctttatttgttttcccacgcagtcagagaaactcaaatatgaaaggctatgacctacagtttgggtacataactatactaaagagatgaatgatactctgcttttatgatgatgtaagagagtataattcaagaagcatggatgtaagcatcatgttagactctac

SEQ ID NO: 86485 - DNA, 348 bp, Glycine max
gaaggtgcaagagtttgttgtgggctataagctagtttatcgtgaggagaatatgaagttgtttgttttctttgttgctgcagtagttttggtagcatggccatgccatggcgcaggctaccaaaggttccctctccgaatgaaaactggctatggtgagcgttcttcggaggtaaaatgcgcaagttttaggcttgctgtggaagcacacaacatccgagcctttaaaaccattcctgaagagtgcgttgaaccaacaaaggactacattaatggcgaacaatttagatcagactctaaaacagttaaccaacaagctttcttttatgctagtgaacgcgaagtcca

SEQ ID NO: 86486 - DNA, 288 bp, Glycine max
gggctggagaagacgacgaggggacctacccagtgcgaagaaaagaccatcaaagtttcacttagccttatccggttagggttcggttttgacccaacctttgacgttcaaaccttagtttgatcagttgacattggtgagaacctttgtcttaagagtagttatgttgaattaacatcaaattctactgcttcatcctttgtgatgcaagctgatactcggtctggtcaaagagttgtgcatattccgtacagacaaatggaggaaagctgcaccgtcaggatgaaa

SEQ ID NO: 86487 - DNA, 342 bp, Glycine max
ctcactggggtggagagacagaggagtgagaagaggcacaacttagatgggatgtaggagaggcacgagtgggtgtaaactgtgaagaagaaatggagaaagatagccgtgtgggtgagaagaaggagaagggttaaaacttataagcgaggggaaaacggggtgtgaagggagacgagtagaataggaattttttaaaaaaaatcaaaaacaaattgggtagtgtgaagacaaaaacaaaagtattactaactttttctggtatttttttatatttaagattattgtcacttagattaaaaaatattgaatgaaactaaaaaatattattgttatatttaa

SEQ ID NO: 86488 - DNA, 331 bp, Glycine max
ctcactggaatggagagacggaggggggagattatgcacaacgttatatgaaaatatagcacatgcacgaagtggatttaaactgttaagaataaatgtagaaagatagccgtttttatgataagaatgaaaacggttaaaacttataatcgaggggaaaaccggttttagaagggagacaagtacaatatgaattattttaaaaacaatcagaatcatattgggtaatttgaacacaaaaactattgtattactaactatgtatggtattatcttatattcaatattcttggcacatagattaaatataattgagtgcaactaaaaaata

SEQ ID NO: 86489 - DNA, 221 bp, Glycine max
tttcctccctaatctaaaaataccgtcctgtgattttacccacccctattttcccatattccttcacccgcctttatttataaactctctcgtcatattcatgtattcatcacctcccccatgcctcatctctaccactacaaaactcatctctcatgcctctaaccattcttttctggacaccatccatccggaaacatttaaccctacacaaacccatt

SEQ ID NO: 86490 - DNA, 219 bp, Glycine max
gactgatctgctaagactagcttaatgcgtcggggagctaataacaacaatgagctacatttactagaatttgacatgtgacgtcaatattctgatcacatactctggattgagcctatttattgaatcattagcttaactccttaatacaagcacaacttgagatatatcacactcacagttttactctgtaatctgattatgaacaatcactgtact

SEQ ID NO: 86491 - DNA, 313 bp, Glycine max
tttgacaacacaacggaaagaggccatatgggaccattccagcttcaaaacgcttcgtttcacttccccgtcctcgcgttgcttggaaaccctaaccctatccacgtcattactcctttctccggcgacaccttcaccttcgcgccaactctcgcataccgaataaacctaatgaatctgagagatgaagacaaacatgacccgatctgagtggtgcgagccaaacacatcgatgctgtctcacgcgcatcttgaacgtcagattgagcatctcttggagtgcaagcctctgtcgaactatgagttgaaagct

SEQ ID NO: 86492 - DNA, 279 bp, Glycine max
ttccacacgaccacacaattgttatttgacaactaatgtatattagagcttatgaaaattttccattttcaaaacactacaatacactctctcgtctattcattacttataatccttaactccattccacgaacaatacttcattctccgtctacacattcacttgccgactatctatctgacccttaataagccctatcttactaataattgtaaaaattcatgattccaactatgatatactaactcaagatatgattcctaataaagctaatttta

SEQ ID NO: 86493 - DNA, 319 bp, Glycine max
ggctaaaaataccccatctcaacttggggagaaagaaaaagaaaatgccttatttttagccaattttaaaattttaaaaaaaaccaaaaggcaatggatcataaaattttaggatttttatttccctaaaattaaaaattaaaaaggtcaattcaaccttttttcagaaattttattttttaaaaatggaaaccggtttccgaaaataaaaatttggaatggaatccaaaaaataaaaaggccaacccaatccccccctagtttttaaaaccaaaaaaatctcaaataaattcctaaatttttaaatgggtaaattaaa

SEQ ID NO: 86494 - DNA, 240 bp, Glycine max
gcaggcgtacgaatacaagcgatttgtaggggatctaccgttaccgggatggagattctttacaagaatcacaaactttattgcaactgaataaacgaccgttcctttctagaatgatatgttctttacctcacaccactataaaaaaattacttgactggcacggtgtgtaatgaccggttgctttacttaaatcaaccgctcagattatccatcccactgcaaggtgggtctatacta

SEQ ID NO: 86495 - DNA, 341 bp, Glycine max
ttgccattgggtttgcatcatagagaaggccatgtgagatgtgtcatcttaaacagtggcagtagcgtggccatgctttcaggctcatgaaaagtgtcattgacaaatgatgaggaataatggtgtgcaaaaatgatgtagagacaaatgttaagaagaattcattgtcaaattctcttgttttagaaggaatttaaaattcttaagttgtagttatttaaaatttctcattaaaatttccaaattttaaattcttcctaacaaactattcaaacagtaaattttataacaaatttttttcaatccctttcaaaattactttcctagctttaaaccccata

SEQ ID NO: 86496 - DNA, 277 bp, Glycine max
gacgtgagaagacacaaggggtggggggtgctctgtctgaatgaaggagagaaaactaaactgattctactgataagctctgtcttcagtccattgctctaactaaggatcctacatacctacagcattatttttgaccctattctaagctaaccatgattgtccggctgcgatggaacataatgtactttgcatatatgattggaaaaagatctgaccctcttgttctggaattaccaaagccatcaattcagctgcactatgtctattatcagct

SEQ ID NO: 86497 - DNA, 353 bp, Glycine max
gatacaacactgaagtggcgctgccttctgttctgttgctatggcgtttagggattactctgttaccgtcgtcactgactcttcttgcgtctagtgcagccaatctgttactcattcactgcattgcgaacaacatggcattgccaacgaatcgagatcagactcccaaatctgactccacaaacccctgctgtgaactctcgaagatgaaatacttgaagacccaagaatcgttgaatgctctgcgacatgccgacaaggctcttgaacacaaaattaacgaaatccagtcccgctacaacaaagtatgtggggtcacagtgggaagagaggaaaaattaggagaatttgtt

SEQ ID NO: 86498 - DNA, 317 bp, Glycine max
ggcagttcaattccaatatattccattctctctgtgtatttccctacctctcccttcaagatgcagatcttcgtcaagaccctcaccggcaagaccatcacccttgaggtggaaagctctgacaccatcgacaacgtcaaggccaagatccaggacaaggaaggaatccccccggaccagcaacgtctcattttcgccggaaagcaacttgaggacggccgtacccttgctgactacaacattcagaaggagagtactcttcacctcgtcctccgtctccgtggtggcatgcagatcttcgttaagacactcaccgg

SEQ ID NO: 86499 - DNA, 338 bp, Glycine max
actggtggaatcttgtgattcgatgctagtaaagaacttaatgtcttcaactagagaatgagttgctccttgccttcagtattatgttatttacttatatagagtcagggattctggatcatgatgctgagataagtgataagattactactattttactggttcctagctagaaatgtccaataagcatgataatgatgacattatttatttggataaatcatgatgattatcagtgttaagtgatgaccaaaattgaagcaaaaagtcttgttttatttaatatgaacaatcagaattccatgaatatcttacttttatgtcttgaatctcttggg

SEQ ID NO: 86500 - DNA, 368 bp, Glycine max
aattcgtgcgcgcggtcttctggattttttttgaatgtcttttttactatcgggggcgggtgataaaatgctgttaatgaactctatcagtgaagatagctaaatgatgtggtacttagcttataaattatgtggtttacttatatagagctagcgtttttggacattgaatctcatagagattttaagtttactaatattatacttgcatgcacctatatatgtactatgggacttagtgagactacgttcttcataccttatattcatgatgacacacaacctttattgccggcggtggattaagcaaaaagacctggcttgaattctattaacaaatatcgtcccctgcataagataattggagg

SEQ ID NO: 86501 - DNA, 250 bp, Glycine max
aattcgcgcgggaagtctacgaaatttcattttattgtcattcttaccttagggggtggtgtagattacattctgttaaagatctcttacttttcaaatttctaatgacttgctacttagctcactaattatatgatttacttatatatagttaggtattttgcaccttaactctcatatagatattaaatttactaatattatacttgcatacatctatatatgtgctataggccttaatttgactaca

SEQ ID NO: 86502 - DNA, 170 bp, Glycine max
gacggggtctttcacatattgcatctcacacctacctaaacgagatctttttattgtattttaccatacaatgatcttaggttgaatataaacaattctttattctcacacctcatcactgattagcactatgataccaccgagatacgagatctccgtacacatatata

SEQ ID NO: 86503 - DNA, 353 bp, Glycine max
gttaaagggaaaaaaacccacccttgctttcttgttcttgaaaaagtaagaggcgactagctctctacctctcttttcatccgctgcacaccatcctgctcggttaattcaaatcgatgacgattctttccacacttaaattcccggctgtcataatctcacgccgtatccggcgaatctatgacgcctgctacgtggcttaacgcattcagaatcttacccgacagcaggacttctttttcgccggagttacaatattctagcatcgctcttctggatactctccgccggatattcagtttccggcgatccctctacagctaacgtgcgcacgattgctagcctgtgccctg

SEQ ID NO: 86504 - DNA, 344 bp, Glycine max
gaatgtaagatggacaaatggagagtgggttttggccaacagtgtactttgatttcattaatcacattccatactgttggaacattgatgactattttgattttattctctgtagtccccacgcacaacaaaattcattaacttttacgcctaagtatgggtttgatttgattccaggacatgggatacctcacggaatgtgataaatctaggaaaaaccgaacccctactaatgaagtccacagtactctgaagcaagatattctacagcttgagagaagattacaagaccaatttcatgtcagatccacgttagaaaaggcacttggattcagatcttcacc

SEQ ID NO: 86505 - DNA, 154 bp, Glycine max
  unsure (1)..(154): unsure at all n locations
ttgtttttttttggtttttttttnaaatttttttgaaagggaaaaaattaaatatttttgtttattttttaaaaaaaaaattttactaatatatatatatntaaaaattaaagaaaaaagtattatttataatataaattataattaaatttat

SEQ ID NO: 86506 - DNA, 183 bp, Glycine max
  unsure (1)..(183): unsure at all n locations
gnaattaaggcgtgtaataaggtctcaggtcgttggtgggttgtggaaacagtgaaagattatttatttaagaacattgaagttttgaccccccaaaatttaaccagttggggaggcggttaaccagtagggaacttacttggaaacttactttgcaaagggagaggaaaagatgatcttgaa

SEQ ID NO: 86507 - DNA, 254 bp, Glycine max
  unsure (1)..(254): unsure at all n locations
cgtatagcttggatncctctagagccgggcgcgnnngnnnntttttttttttttttttttctttccacattttatttgaggaggcgatcgacaatgtatccttctcggaggtgttactttacaggaaactcttgttacccacttttccttttctttataatgataagagttcagtgggactttctcacaaacgtcgcgggcaagcgaaccgctcacagtcgccgcaatctcgaacacttttaccggacacattc

SEQ ID NO: 86508 - DNA, 53 bp, Glycine max
  unsure (1)..(53): unsure at all n locations
cgaagcnggatccttagagcggccgttgttttttttttttttttttttttttt

SEQ ID NO: 86509 - DNA, 212 bp, Glycine max
  unsure (1)..(212): unsure at all n locations
ttttngcagaacagggaaaggacttttatcttttataggaagaggaattgcggttcactaaacagtcaaccatgattaacaagtcaagaaaatcatctgttctatgaggacaaaaaaattatgtgacttgaaaaaaaatcttgcaagcttattctattagagcttatttttaaacccaccaccaaatagttttacctaacactgctctcaaa

SEQ ID NO: 86510 - DNA, 439 bp, Glycine max
aacacaagttggtcacagcataatatattttcttaacatggtataaagacaaatgttctatttgaatctatagggtaaacattctaaacaaacaggtttacaaaacctataactaacattctaaacaaataactttacaaattactaatttgaagtaaaaatgctgcccaacgttgttgaatgtctgcaatatcctcctcaaggaatggacccgaattgttgaagagctgcttccacgaatcaacaatatctacagtgacaacagtgaacatttgcttcatgacataatacccacactcataacccttggattgtgtttgacaacggggcaaaatccacgtaggcttcttccttctagatcttgattgcgaacccaccaacctttgatactcgtccatagctaaattaactataggtttcatttctttggtgatcggtt

SEQ ID NO: 86511 - DNA, 475 bp, Glycine max
ggggagagaaagtaaaaagaaaatatgaaaaatgattaacttctagaccagttttataaaaatcggttcggtccaaccggtaggactagtctaatgaaaatctgatgatctaattggattgtttatgtatgtgatccgggatgatctgaatgattttacaaacttggacttgaccaattttacagactttattattaattttaatacttcaattgttattttgaaatatgaattaactttttttaatcaaataatattagtctcatacttatatataatagataaatatataattgtaaattttttaatatatatcaaatcaaaccgagtcaattactagttcaccaattgaactattaacctactatctcgaccggatcaatgagaaccaattttcatgacattgttctagacccaaatttatttattttttggttccctttcactccaatttaaattttaaacctttcttttt

SEQ ID NO: 86512 - DNA, 100 bp, Glycine max
  unsure (1)..(100): unsure at all n locations
tttttttttntctttnnntccccagtaatagtatttaatattataagcggagattcataattcatattagccgaactttatacagaagcgaccaattacc

SEQ ID NO: 86513 - DNA, 344 bp, Glycine max
  unsure (1)..(344): unsure at all n locations
ggggacttaggtacatgaaaatttatggggaggaaaaattgttgcattccaagtttatgacataacataagccatttgaaatggtacttaaagttacaaatgacataccaatgggcctcatttagataaatttctcaacaaacacttataggagaaaaacaataggaggtaaaatgaatgaaatttctcccttaagtgaaaatcaacttatgcacctaacttctggacaaattagattagggagcttctaaaaaattaatgggagatgtttaattcatttaacctctttattttcttatcttataaattcttgntaaaaagattattcaaactgggcttaagta

SEQ ID NO: 86514 - DNA, 211 bp, Glycine max
  unsure (1)..(211): unsure at all n locations
ggtcaacagcatgaaagtcaggtcaaccattcaatggaagtgatactttgccatgtaacatgctgaaagagttgccngacagaagaaaataaagactgaaattacgaatctgctccttcgccatacaagcaattcctggacacatgaactcgttgacgaacaaaattaagaaaaaggccaatgatctcagcaaacaattcttttggttttg

SEQ ID NO: 86515 - DNA, 141 bp, Glycine max
  unsure (1)..(141): unsure at all n locations
gggancttctatcaangaagcacgagccacatacacgggactcgacaacattcaactagaatctgactgagcaggggttgttaaagtcttcacaggcataaaaacttcacttcccatactctgctgaggcatatcatgggg

SEQ ID NO: 86516 - DNA, 375 bp, Glycine max
gggggtctctcactctctctctctatcttggggtacctgccactcgtgagcggcgttacctttttgcaatggcaaatcatgtgtcacacacagcacactgcaactaactcttgtttgcttctgcttttgtaacaaactttgtcttaaagctactttctctctcataatttaggctttgataataatcttgggtgagtaaaataatgaatagggatagtactaaattactaataatgatctcactgtattagtaatatttccttgcgatttgcatgtatgcggaatagataaccaaattcagcgggaaattagcaacccgctcaaatttaatgttcacattttaaaataacatgtccgattggtctattaattatg

SEQ ID NO: 86517 - DNA, 322 bp, Glycine max
  unsure (1)..(322): unsure at all n locations
agcttggatcctctagagcggccgcttgnnnntttttttttttttttttttttttggggaacatctatggcctcgttcttatgggctgactaaggggccatctttgactgatttacacaatattcgccctgctgatgtaaatggtaagaaaagccactgctcgatatttttactagtcaagattacaatttcagttgatattacaaggttttctcagtcaattcatcaagggggaacaagtactatggtgaatgcattactagctcaagcaaatgtttgaggcccgctaacaaggaagctgctttggacactgaaacagaca

SEQ ID NO: 86518 - DNA, 375 bp, Glycine max
aaagcttattatggtgggtgttcattaggaaattacgcctgtattttattatattataaagtactaacgcatataaatttagatatttacttaaaatggttattttcactgaaagccacctaataaagagttccttgtagttggtgaatgcagagatcgagaattagattcatcctattgggagttacctttctcccaccgagtgttcgcaatattaaataaacaagtgctaagaaaatgaaataagtactgatgtaattctgtcaaaaacaaagagctcatgtaatattgctaactaaaaagatttatcttatggtacgtttggaagatatgaaagcgagtgaaagaaaaaataaaaaaaactttttttttggt

SEQ ID NO: 86519 - DNA, 149 bp, Glycine max
  unsure (1)..(149): unsure at all n locations
anattccgcctttatacggcgcaacacgacatcgggggcttatactctttctaccctaccgacaccttttcgcaaccgaacccttctgtcgactttttgcatccatacccttctgacatcttttttcagccacacagacccatttttct

SEQ ID NO: 86520 - DNA, 263 bp, Glycine max
  unsure (1)..(263): unsure at all n locations
agcttggatcctctagagcggccgcgtggnttttttttttttttttttttttttaagccaattcacaagtcttttgcaaactacatgttaggggccaaaagtttgagctctcacatccaaaaggaaattacaaagtcatttacagatactcttccttggtaagatgtagcaaaacaaagcctttttgttaatttcacttaaaatcagaaagcactcttaacgtaagactagttagaataaccacattttttcctttaatttac

SEQ ID NO: 86521 - DNA, 170 bp, Glycine max
gccgtaaagcacatcaattcattatattttaaaagggccggcgacatcaattcatgttggaaatttaaatacaaaacattcattttatacctcatatttacatttaaaaagaaatggcatgacaatgtcaccggaataacatgcagaaatacgcactaccattttaaaaa

SEQ ID NO: 86522 - DNA, 310 bp, Glycine max
gggggggcttctcttgagtgtaatatacctatgtggagaagacagtattaatgtggaaaaagagtatcagagaagaagaaatacatattttattgaaggcaaaaagaatattacaataatatcttattagatcaattggtatattacaaccatgtatatgcaactgcaagggatacttaaaacagataaaaactgaaaagggatcatttaaatatgatttaaatatatacccatgtttggtatttaggcggtaataaattttttctttaaatctaatctctaatattttaaaagttttatcttactgcta

SEQ ID NO: 86523 - DNA, 425 bp, Glycine max
  unsure (1)..(425): unsure at all n locations
tttttttttttaaatnnttttttttttttttttttttttttttttgtggtttttttttttttttttttttttttttttttttttttttttttttttttttttttttttttttttttttggggtgggaagacaattttttaataattcttcttaaaaaaaacgagcattttaatttttttttctttaccttctcttctaaaaaaaaaaccccaccattattagttttttttattaagcactacataattaatccccgccgggttcttctcaccctatcttttttttgttcctacaaaaaagataattttttttcttccggcagaaaataacacacttcttttggtttttttttgcgccnattttttttgttaaagtggttaaaaaaaaaaaatttttttaaccttatttaaaagggtttttttggc

SEQ ID NO: 86524 - DNA, 111 bp, Glycine max
caaaatggaatcaattttataagtttaaaaaagggcgtgaagttagggatttctcaataggtaatgttgctccaatacctaaccaaagggcagctacagtaccaatcaaaa

SEQ ID NO: 86525 - DNA, 329 bp, Glycine max
aacccagaaatctctccattatcattttgggggtcatcctcggccaagattaacaccctcatgattttttcgggacagcggtgacctggtccaaaagcatttccacaatgataacaccttcctttgtctctcctcttgacatactcagcataaggaatggttcgagttcccttgcttctaaagaaacttggtttggccactaaagacatggatccttgtgaattccgagtcccaccgttggacgcttgggcactatttgcaccttcaaacgcccctgcacgaggtataactccaccgccaccttggtacctaaaactcgaactcgcacc

SEQ ID NO: 86526 - DNA, 364 bp, Glycine max
  unsure (1)..(364): unsure at all n locations
aaacacancaaatccaaaactaaccgcgcgacttttatataaatgcacactttacaataataactttctaacaatattttaatcaacacctattaatttttaaatcacaaacactctatttacccaaacatttacatcatcatccccattttcataaattttaatcctaaattcacacaaaaattattactcccacactttattctatttaaccaaccgcataacattattcttttaaaatacccacacaaactcatgatttttacataaaatcccataccccatcttgacatcatacaaacttgaattataacatttataattatacatttctttcaatatttaaaaaagcttttccttttta

SEQ ID NO: 86527 - DNA, 396 bp, Glycine max
ttttttttttttttttttttttttggtcatttattaaacaaataaccttactagacctcggcgtgtatttttacttttatctcactgcattctaactcttctttttcaatcataaaatctgtccgctcaaatataaatccaaataaaaacatcacatgcctcctctctctctcgaataaaaccaataatgattaactattcaaactactgatattcatccattttattattacctctacaaaattcatatctcaaatccttatcatcttgcctaccctcttaaaacttaaccgacttagaaacagaatcctgaagaaccttatgaaaacacataactgtgaacttgtatttacttgcttcaattccacaattacacatgtctatttttcccgttcg

SEQ ID NO: 86528 - DNA, 137 bp, Glycine max
tttttattttctctcaaaccattttttaaattaataaagtttttccttctaatgttttaaataaaaaaaccctcatcatttttttaaaattttatttattatttttttatacaaaaaagtctttttaatttatttac

SEQ ID NO: 86529 - DNA, 85 bp, Glycine max
ctcgcaaacggaaaaaaaatagggaggcctgtaaaaaaatattaacctccccttttttacattgcattgcaattttaaacaaacc

SEQ ID NO: 86530 - DNA, 203 bp, Glycine max
aacaggcattggatacatcatacactgaaaatcagcgtggaatatcctacatggcacttgcctctcccaaattagagaacacagttcgaaatttatggaacaattgcttcctggattgtaaggagccacaattctttcgcacaaaatgtcccgtattattgggaacgaaaaaaatccctcttccatgaatttgcaaaaaacca

SEQ ID NO: 86531 - DNA, 469 bp, Glycine max
aacagcaagagatttgcttatatttaaaaccggcgttcaaggcatatttttgcttatatcgaaactggagggagtactaaatattcaggcaacaaggggggaacctacacaggatcattaaagagaactccatgttaattgggaatacaaaatgatatacttcacatgctgtatctgatcctgcatatgctgtatgcatatacaggatcattgaaaataactccatatttatgctgtatgcacactactgcattagtaacacatttgatgtttggaaccccaaataaaaaatttaagaaaggaaataaagattgaatctgttgattgtaaaagaacagaaaataggaaagataactctcctccaagggtttccccttcgcaaaagatttctcctttcacaaaatgctaaagctgaatatctacaaatgataagaaccccctctttgcaatccttctttccctatttata

SEQ ID NO: 86532 - DNA, 266 bp, Glycine max
gggggtggcaaccacgccccgtgaaattatgtaaacgtgtgtcgggatttcttttatttatttttctctgatgtttgggtggacctgttgaaattatgtatacattcttcaagggtttactgagatccattcggggcttactgtcgaataatccagccagcgctatagattcagattcatctttgatatttgggttcagtctttaacttttatgttatagatttgtttctagtggattgaaatgactatagttttttatgacttac

SEQ ID NO: 86533 - DNA, 165 bp, Glycine max
ccaccccccctcaaattattaaaacctgtgtttttattacatttatttattcttctccaaaaattgaacacaccttttaaaattatgtatacattctttaaggttttactgaaaaccatccagggcttactgtaaaataatccacccagcgctataaaataaaat

SEQ ID NO: 86534 - DNA, 271 bp, Glycine max
  unsure (1)..(271): unsure at all n locations
gggaattatatgatttctatctgctatcgntagggagcagctttttacagtccactaaactgctagcattattggggtttgctactcaacatcgctacccaagattaaccatttcactactagttacaagttaatgaagttacgcagtaccgtgctcacaatttccttggaaatacttggtacttggcagtaatgtggagtatacttttaatttaaaagcttgaggtataaaatacctgtgtatgatgattttacttctcagagattcaaa

SEQ ID NO: 86535 - DNA, 178 bp, Glycine max
ggaataatgaaaacacaattttgttgatattttgggggtaaccaaacaattgttttgaatcaaaaaaaatttacaatattccatttttttcttttggggcgtgaaaaaaaccatattcaacaggcaaccatcttatggttactgcaagttttccaacacctcccttctaaccttacca

SEQ ID NO: 86536 - DNA, 402 bp, Glycine max
ccaaggaggggtctctatataatagaacagaaaatagtgtctgtttttcgcaacaaaattcaatcataccaattttatctgtccataatgctcaggaacagacagcatgttttcctcattccaaactggattcaagtggctccttattatagttggctggacagtctgcaggctttaagcaatagcaccaaatcaatttcagaaagaaaattattactgtttctgattttacaactttaaatagaaaatacagagcaccggtttcccaagatcatttagtgataccaacctgctggccaaggctcaaaacaacatacggatcacctgactttatatctctgatagctaaattggggcctttaatcactttcaccttcaacattccaataaattccaccatac

SEQ ID NO: 86537 - DNA, 65 bp, Glycine max
ggggggaagatcaaatgaaaaatattggacggggtggatgattaacattccactcccacgccaag

SEQ ID NO: 86538 - DNA, 63 bp, Glycine max
  unsure (1)..(63): unsure at all n locations
ctctagacggccgcttnnntttttttttttttttttttttttngggaatgaggaaatacacaa

SEQ ID NO: 86539 - DNA, 124 bp, Glycine max
ccagtaatagtatttaatattataagcagagattcatgggtcagattagccgaactttatacagaagcgaccaattaccaaacattaaaaaaaaaaaaagaggcaaccatgagcttaacacacc

SEQ ID NO: 86540 - DNA, 280 bp, Glycine max
ggcaatgaaagaaaaagattaattggttggtcgggcggttcagaaaggtcaatccaaaaaacaccaaagtgactaaacatgacagaaagaccagtgggggtatgtattgacaattttgtttaatccttcatatcaatcttctatgacgcagccatccggggacttcgctttgatattgaattttcctaattattattattattatatttttggtgaaaaatgctattggttctttgtgtgtaagaagttaatccctcctttatactatacctaattattt

SEQ ID NO: 86541 - DNA, 288 bp, Glycine max
ggggtggtggtgggtgaccaataaatcaaatctggatgggtatgattaaaaaattcagtcatttattaattatggtggattttgtagtatgtaggttcatgtatattataaatttatataaaacctgattaatgaatgaaataatctatattttgggtaggcacaattgacaagcttttccatgtgttctgtttatatggaaaggagactagtcaacggacgccttgtgtgctacagaaattaccttgactgtcgggttcctgcatatgatgttaattaaccaagctt

SEQ ID NO: 86542 - DNA, 443 bp, Glycine max
ggataaattaaaataaaaatatataaatatgggtggggtccatgaaatacttttcaacctcttaaaaattacaccatttcttttttgtgaaaaggaattacaccattggaacatatgcttgaagtttttaaattctatgtaaccatgtaaaacccactaaaagaaagtcaagaagccttctcaattggaaacgctctgatgaacttgtcagctgaaatctgaagtcatgatgatccggaaaaaataagactcttaaaatacaacgatacaaccaacttcatccaacagcattctgctgcatacggcttttcttagtctttattttttttttttcttcccacagtttctcctttgatttatattaacgcatggtgctgcatacggctttatatttttatcttttcctagtcttttttttttttcttcccacagcttctccttga

SEQ ID NO: 86543 - DNA, 330 bp, Glycine max
aacacaaattgcaactaatttcacataaaaactgcggttttttctattaacaggttcttcatcctttaataacggaatctttttttgattccctaccaaatagttattgcttccaacctaacattctattcttcattttcaatcacaaattaccttaaagacaaataaaaaaagaaaacccttttattgctatccactaaacccctagctactattccttatataatgatcaaattggtggcattctttggttgcctcagataataaatacttcactttaatataaccatttcatttaatcctcacatattttttgattatcccttaaat

SEQ ID NO: 86544 - DNA, 305 bp, Glycine max
aaaaaataaaacccaaaatttttaattcaaatttccccctttttttacaaaagcccccttttcccaaactttaaaaaaaaaaaaaaaaaccccccttttttttaaccccccctttaaaagtccaaaaatttttatttttttaaaaggaaaaacaaccccccttttttttaagggtgttttttaaaaaaaaaaaccccaggggcccaaaacccttcccaaacttaaaacaaaagtttttacccccccctaaaaagttaataatttttccaaataaagggttttttttttttaaaattttttttccc

SEQ ID NO: 86545 - DNA, 141 bp, Glycine max
  unsure (1)..(141): unsure at all n locations
tttttttttttatgngttagacaagaggttggcctancaactaactggcgggctttttaatccttaaatcaaccaattatatacttaaaaaccaatttttttttcccttattttttttttagcccttccaaaccccatttt

SEQ ID NO: 86546 - DNA, 517 bp, Glycine max
ttttttttttttgggataaatattttcgataaacatatataatagggggtgagaagtttaaaccacacttatattttttaaattaataattatacctatactttagcttttaaaaggaatgggattttattaaaacgtgattgacacgtaatgacaattattaagctgtaattttacaattgagaatttaattcaaatacattaatagtataaaaaatcatcaaattataaattatcaccctaagatcgtgtaaacctcatactaaaataaccgaaagaatagataacgatttaataaaagtgatttagtcatacgaataacataaaataatagtaatttaataattaggtttaatgtcacttttgatttattatgcattataattatttcactttaatatattactttaatatattaagctttaaagaattctttatgattttctatatttttgaaaatattattttgattattttaaaaatttttgttataaacgctaatattttatttaattgt

SEQ ID NO: 86547 - DNA, 295 bp, Glycine max
gtccgcaaacaaaatgattcattaattcattctgtttttttttggaaataaaaacaataaacttctaaacgcccaaattgtttctaacatatgctaaaaaagacaacacataaaaacaatgacgtatcttccaaaccagacttattttcacaaggacaaaataataaaaacacttaaggaaactaatattcctcatcttcctcattccaccactttaaaatttatctatgtaaaccacagtcactaatcttccaaaattttttgtagacaacacaaccacccatatcaagccctt

SEQ ID NO: 86548 - DNA, 280 bp, Glycine max
cgtccgacggtggagaagacacgagggggcccaccggaatgatagaaaagaacggcgtgttctctttctctgactctagggttcattattttcttgtagatcctctatcaccttcgagctcaaatggacgtccagcactgccttccggcaccgctatcatcctcgaagaccggcaacaagtctgcctaacttcggttcggtccacttttgggttttccagaaaggtaagtaaggttactgcgatggattgattactaaccacaaaaggagcgaaccctgg

SEQ ID NO: 86549 - DNA, 330 bp, Glycine max
  unsure (1)..(330): unsure at all n locations
gggtaaaaanaccccatctcatcttggggtgaatgaaaatgagattgcggtatttttagccaattttaaaattttaaaaaaaaccaaaaggccatggatcataaatttttaggatttttatttccctaaaattaaaaattaaaaaggccaatccaaccttttttcagaaatcttattttttaaaaatgaaaaccggtttcagaaaattaaaattgggaatggaaaccaaaaattaaaatgccaacccaattcaccccttgttctttaaacccaaaaaaatccaaataaattcctaaaatttttaattggttaaattaaaatcctaaaatt

SEQ ID NO: 86550 - DNA, 69 bp, Glycine max
gactacacataagattgcggctgtgagaagactatacacggggttaataacttagttatcctctatatt

SEQ ID NO: 86551 - DNA, 262 bp, Glycine max
ggttctagtgtgtgattgtttgttgttgtaactcgttcttcttcttttgttgttctgtgtttgtgtttgttttttctctcacctgaaaatgtcttgctgcggtggtaactgtggttgcggaagctcctgcaagtgcggcaacggctgcggaggctgcaagatgtacccagacttgagctacactgagtcaaccaccaccgagaccttggtcatgggagtggcacctgttaaggttcaatttgagggtgctgaaatgggtgtg

SEQ ID NO: 86552 - DNA, 293 bp, Glycine max
gcgggtatcagttggctggatgtttgcatccaattcaatgcaggtaataacttcatattggcgaacaacaaaaatcatacctttgatggcttcggtatcaacaatttggattggtataaacctgaacattttggaccccactacttggggggatcaaaatggaagatagcatacctgggcccattggtggaagtggaacccttgggggaattttcttttcaaaggattcaagtgcatgggccttgcttctttgaaagacatcaggggggggattgaacagatcccctcatctg

SEQ ID NO: 86553 - DNA, 388 bp, Glycine max
gctgtgtacatccccttgttgcacttttgcgcatctacattatgtcgtcacgcacacgttgtacgttggtctcgtcttttgtcacgggaaagctgaaaggtccatatcaccttcttaactacacacatggggcattgtgcccccaaatgcgcaagtaagaagagatgattttccgggctcttgtgtctgtaaatgcattcatatcatccactgcataagcatctcttcatcgcatcgtaatggacatatcatttctgcatttgtcacttatcatattcatgcattgcattttgcatagtcatttcatcaccatgcatatgcatctagcatgtttttgcataccctttattttcatgccaaacaaaaaccaaaaagaagcctgaaaatt

SEQ ID NO: 86554 - DNA, 263 bp, Glycine max
gagagtgaagagaatggctcccaagggtttaacctttctggctgtgttaatatgcgtttcagcactgtcactgagtccttctgttgcgggggaagggcaaaataatggccttgttatgaacttctacaaggaatcatgccctcaggctgaagacatcatcacagaacaagtcaagcttctctacaagcgccacaagaacactgctttctcctggctcaagaacatcttccatgactgtgctgttcaaagttgtgatgcttcac

SEQ ID NO: 86555 - DNA, 158 bp, Glycine max
  unsure (1)..(158): unsure at all n locations
aggggatatagtctgattttggaaccatctgcctggagttttaactacatgtattcactgtacctctggtacttgattatatatatatatatatatataagngatctttgccgagcaaaaaaaaaaaggggactaagtctttgtggatgtgctatact

SEQ ID NO: 86556 - DNA, 196 bp, Glycine max
gtcagtggtcattcatgattgtgtatctaaacactgggttcactgtggagttctctcactcccttatccctgacccggataacgcctcgtaagctactctaacaccaaagccagcttgacaaaagacagacatcgcgctcgatgaatgcgacgaaacaacattctatcaattcaacatgactgactagactaaaca

SEQ ID NO: 86557 - DNA, 305 bp, Glycine max
tttcaaaaaacaaccagaaggtaccattgcgaaatgacgacagaaaagaccctcgtttgcggcaatcttcattatttagatatcctcaaaccctgaccaggttaaagacttggaagctgttgttctacaaaatccaagtttacattcgcatgaattcgacctcgtatcaatgtctataaagcaacataaattgaattcaatatccatgattatactacgaggaaactgcaaaaaccttgggatgcatatacttaatatgattacatcacatgcggttttcaccagctgccgttttcccaaaaatg

SEQ ID NO: 86558 - DNA, 263 bp, Glycine max
cccagtaaaactacaatctcgaactcgttaatcgttgggatttgcaaaataatgttctcaaagagagaaattagtctcacacgttgacaactaaatggaactacaatctcttcctcttctctatggcgcttgaaaatcctagcagaacaatcaaaagaaaaatttgaggagtctcacggaatcgctagagataccgctattacaatcagacttaactcgtgagccctcttagaggtaagagatgagtttatcgcaattgggat

SEQ ID NO: 86559 - DNA, 271 bp, Glycine max
gaagaagaaaaaaccctccgagtcaactcggacgaggggcctgatcgtacggttccgtcctcggactctgtcctcttctttcccttacgaaatcaccgttcgcggggctttgctctctctccgttgttcgtgcagatctcacattggcttcagctgaaacgacgcgcggcaatttccttcccttaatgagggacctatatctcaggccgcaactcgaagtgacgatggtgtgggtgttgcgagaaattaaagatcgttgaaggagagagac

SEQ ID NO: 86560 - DNA, 270 bp, Glycine max
acccctatctcatatcttattcatttccctttcttgaatcattttaagctcatttccatttttcccttatctttatttcaatattttgttctgtttttgttattcattcgggttaatttcgattctatgcttatctgcgagatgagatatcatataagttgattggcctcccattcataatctgaatgatctcatgaagactaattgtcacaagaaaaattcgtctaataataagtactttttataccattctcctttcgattacatcat

SEQ ID NO: 86561 - DNA, 293 bp, Glycine max
gatttaatacttgaactgagtatctcctttttgtcttcagcaaattaaaagactgataattcatgtgtttgggttgttcattttccagaacctatgtaagaaacttgatgtgacatcttagcaaagggctgagttgttcttgtggtacccctggtaaattccagtagtgtaaatacctgactttgaaaagagatatgatatttataggccatctatggcatcttagcaaaaagctgagttgttcttgtggtacccctggcacctttgttataatatatctttttccgccaacc

SEQ ID NO: 86562 - DNA, 349 bp, Glycine max
gttatggttattacggcgattcatgcatactgcttggccctgcctcgtcccgtttgatgaagaccagttctgtttttgtgaagcagcttcaagtgtcaaacgaggacaataatcaagttattctccatgccttcaacgaggagcccgagttaagctcccaaactaattggacagtgtcaaatttcttccttgatgaagcgtataaaagcaaggtaatttctttgtggttaaattaaggctccaccatgcgtatgaggtgagaagcacacactactagtagtttggatcagctacatgagatggtgatcaaaggtagaaagaagtttgaactactacaagctaaacaaac

SEQ ID NO: 86563 - DNA, 123 bp, Glycine max
agtgtcttgtcttttggagtggaaatgtaactaataaaaaactctgtcgatattttttaattgattctttcaaaaatactaaaataaatttaaaaaaaaaaaaggcggccgttttaaagattc

SEQ ID NO: 86564 - DNA, 349 bp, Glycine max
ggttctagtgtgtgattgtttgttgttgtaactcgttcttcttcttttgttgttctgtgtttgtgtttgttttttctctcacctgaaaatgtcttgctgcggtggtaactgtggttgcggaagctcctgcaagtgcggcaacggctgcggaggctgcaagatgtacccagacttgagctacactgagtcaaccaccaccgagaccttggtcatgggagtggcacctgttaaggctcaatttgagggtgctgaaatgggtgtgcctgctgagaacgatggctgcaaatgtggaccaaactgctcctgcaacccctgcacttgcaagtgaggtgttgggagagcaagcttc

SEQ ID NO: 86565 - DNA, 354 bp, Glycine max
  unsure (1)..(354): unsure at all n locations
attccgagaataactatctgctctagttttctctcataatatgatcactactaaaagaaaggctttttactatgtacctttgaggtcggtcgcaatatgagcattgtaatagggaggacatgacatttatgtaaatatcttacattctcaatgatgctttcgtgtaagaccattttcgtatgctaggcaggggcatttgtttaattatgaaaaaatttactaagatggtgtatatgaaacaccgtcgttgaaatcatcaaatataaagacgggttttaatatgcattgtcgntaatgatagtttataaaagctttttttctgtctcgcgctaggtcttcctcgaagtccctctc

SEQ ID NO: 86566 - DNA, 254 bp, Glycine max
gatgacacaacataaaaaatcgtttttgtgatactgatttgtaacactcacaaacacaaaatctttgtcctgcttttatttaattttgttccattccatctatctatgttcatctccaccaccccttgttgattcattcattaaaaagccacaaacttttgaattgacgatgggatacctctacctttcttgcagagctgaatccgctgtctcaacctccaattcggtgtcctcttccaaagagaatgagaaaa

SEQ ID NO: 86567 - DNA, 197 bp, Glycine max
  unsure (1)..(197): unsure at all n locations
agggagnataccaaagaatggaggngnnatatacgtctgagatcactcttttctctttatacctaagcggtataatttctaatttttttcaacaaaagtaatagctgaacaatttctatatttttaaccaaatactttttactctacttttctaacgagtattcttgagtactcgccattaagcgacccttaacttt

SEQ ID NO: 86568 - DNA, 250 bp, Glycine max
  unsure (1)..(250): unsure at all n locations
acggacgcgtnaccagacnccntaacatctgcttataagactacagaaagcgataattttaattggggttgggggacttattgaacatacaacattcttttcctaatggctgaggcatcgccaccattaacacaacattgaaccataaataaacactcgtgctctctccgttgggttctagcgaggatccaaacaacacagtcttttttacctactatttcccggacataaaaccctttctatttaaacc

SEQ ID NO: 86569 - DNA, 344 bp, Glycine max
aggttcccgaataccaaagcggacttagatgttttgcatggacttgataaaagaacaattgttgaaacaatgatttgatctgaatgtggaaacagaccctaagctttagtgactacgtaaccacaaaattttatattgagtgtccgcatggatatgttctacgattggttttgcatgaatttctaattgtcataacatatgattcatggaagtgatctaagcattctttatttctaagccattggcaaacagttgtccaatgtcattattttctgcatttgaagcttttgagcagaattgattttacagaacctgactagatgaagttctacctacctagatag

SEQ ID NO: 86570 - DNA, 226 bp, Glycine max
ggttctagagtgtgattgtttgttgttgtaactcggtcttcttcttttgttgttctgtgtttgagtttgttttttctctcacctgaaaatgtcttgctgcggtggtaactgtggttgcggaagctcctgcaagtgcggcaacggctgcggaggctgcaagatgtacccagacttgagctacactgagtcaaccaccaccgagaccttggtcatgggagtggcacct

SEQ ID NO: 86571 - DNA, 104 bp, Glycine max
  unsure (1)..(104): unsure at all n locations
tgcagaaagaggcttggtgagaatatcagcccactgatggagagctggaacgtggacaatagtaagctgcttggccaaaatcttctctcacanaataaaaaaga

SEQ ID NO: 86572 - DNA, 321 bp, Glycine max
ggtgggagacaaattgaaggaaagggatattttgtttgattagtttaaaataataaaaaagtccacttataaaataatatcaacatgcttaaataaatatggatatattgctgcataatgaaaagctgtttttttggcctttcaatttaaagagacttactcctctttgcaactatattttgcttaagcttgaaaataaaaagaaaacctgttaaagctatatttaaaaaaagtgaaatgaatcatacattgtttgactcaagaataatttttagaaaaaaaaatgttttctatcctctctcattcgagatatgaattata

SEQ ID NO: 86573 - DNA, 54 bp, Glycine max
acgctaatggatatgcttaaactcagggggtagccccgcctgacctgaggtctc

SEQ ID NO: 86574 - DNA, 223 bp, Glycine max
  unsure (1)..(223): unsure at all n locations
cgcgnacgtaagcnnggatccgctagagcgcgcgcgcgnttttttntgtttttttttttttttttgaggccacacaaaacgagcccatgggggggattcttaacttcaataacatatttgcgcttttattaacttgacattggaaggaggcaattgaatgcagcgtaaaatctaacccaaatcaatttaattttctggatctaccattgtatacatcattcaa

SEQ ID NO: 86575 - DNA, 264 bp, Glycine max
caaagaggagctgaatatatttatgcgagggggaaccgtcttcaaaaagtggaggattcccacaagccttttttttagaatagtagctcatttcaaccctatgacaaaaacccgtttttaagggggaaattgacccccctgtttaaatccacatatctgaagagcacggcccacaccgattttttattttatgggcgagaaaagggccattagggttaatttccaaagcccaaaaaaaactgggggttaatttgaaaccccctt

SEQ ID NO: 86576 - DNA, 411 bp, Glycine max
caaccgggggaatttaatttattaaagaacaatattgggcttcacttttcacaccacggatggttatttccagattagaatttccattctggtaaccaatttagggcaccatttaactggttaaagggttcaacccggttcaacattactggaattaaaaaacatgcctggcccgtttaagaatcattttggggaccaccaagaaccagcaaccttgatgaaaaagctggaggcatgccttcatcttcactctgagcttcgctgttgaagttgagagcatagctatgttcatcatactggaacctgtttccttggtacttcaccttcttcccatacccacttatctttctaatgaaagtcttccactgggggccagcaattacttctgaaacctcctttgccttccttaat

SEQ ID NO: 86577 - DNA, 459 bp, Glycine max
  unsure (1)..(459): unsure at all n locations
gggttggtgaaatatatgtttgttcttatgcaatgcacttattttcaatttatttctgtggaaaaaaagttttaaattaagtaaatcgtttttaatactgtccttacatataataatggtcatcttttatggtcctttcataaacactcttcttcactttattttatttattctgcattcaatcccgttttgtacatgcgattgcaactgattgtttatattgttatatcagccacttttcggaggtgcttgttaataaggaaatcatccaaacatgcggggtcgtttaacttgggaattcatcttaaaagttagcaaaatgaaaagggaaaccattagtgaatgtattaggcttttcttcctgttcaaatggacctgtttgcanggnagtagcaaatataaaataaatctgtcatatatgatcttaagctgtttattagctgactctgatcttaaaca

SEQ ID NO: 86578 - DNA, 160 bp, Glycine max
ggcctcataaaatgagggatttatggatcataaacacacaacttaaaacaaacattacaacatccattctttctcacctgcaaatcctgtacacacactgaagggtttagcaattataagttactgaaggctatcaaacattagataaagttacaaattc

SEQ ID NO: 86579 - DNA, 305 bp, Glycine max
ctacggggaagtggaaatttattaccaagtccaagcataaactgaacttaaggggagctcaattcccatggccatggtgtacaaaatggcacattcggagagcaagttttttaagggttggcttccggccgagaaaatgaaatcacccttggttttaaaaacttccttaggcccttatacccaattggccttattggatcccccccgaattttggtttttaacaataacaattttcacgaccccaaacttaacattatcctttttatcactccatcttttgacgttttgcatttggggggcttgg

SEQ ID NO: 86580 - DNA, 455 bp, Glycine max
gcagggaagtctagctcccggatgaaccagatttgtccactagaaatagtgtaaaattaatgtacatgtccaggtgcacaaaccaatcaaattcagctgtcaaacagcttgaaaattacattctcactgttgtaatagcctattaggtacgtcatttcagaaccacgtcagagtgaattggacaatatacaatagccaacatgcatttaactgattgaagtatccttgtgtctcgctccttcttgatgattgccaactctattgtaattttgagttagtagtccatttttcgatgttgttcttttggttaatttgtgtttcatcattcttacaattttgaagaaccagaatgcacttaccagttgcaaacctaatcccatagcctttatgagaagtggatagttggcagataaagttacgtaagtgagacatggtccgaccaccatcctagcaaa

SEQ ID NO: 86581 - DNA, 536 bp, Glycine max
acgtaagcttggatcctctagagcgggcggtttttttttttttttttttttttttttttgggatttggcaaaaaaaaaaatttgggtggctgggcccaaccttcccaaaccctggttaacacatttgcccccacccacaaccaccaccggaagaactttaagccttttacctttccctgggaaaccctggtttggttttaaaaggggtcaaagcaaaccaaacttctgacaacaacaatcttcatgttcaaaacatgggtggtgatgatgccgttcctgttcctggcctcaagagttgggaagtgaggaacttccaagctagccatgcacatgagtcaaagatgattgttcctcatgtggaggaaaatgctggtgaatcagggtccattggatcaatggcttatggtgacttgcaatcgttgagcttgtccatgagtcctagctctcagtctagcagtgtcacaagttctcaccgtgcttcacctgctgtcgttgattctgttgccatggatactaagaaaagggggcctgaaaag

SEQ ID NO: 86582 - DNA, 527 bp, Glycine max
actcaaaatggtgttgtattattggccgatttctattttcatattgaatgtttgaaactgagatggggtagggaatttgtacaaatataggtagtcaaaaattcatagacctatacaccatgcagatcagtgctacagttactctgaactgagcagatcccaaagctggaaaaggttccagaagacactagacagggagaggggagttgcagtatgcagcaataaaatctcctcccctcactgaacccaactctcattattgaacaccctggataatgaaaataaggccacaactcttgaccaagtaaaccaaaggccatgtgaattaccagattagtcctcaaaagctttcatttcaccaagggagtcccctcaaaagctttcattgcttctgcagtcattagagcactcatggccttgtgaattactacatctgctttatataacaatctcttagccctatctctcttcaactttgccacatggcgtttaaaacgagcctcagccacagcatcacgtagtcttaa

SEQ ID NO: 86583 - DNA, 502 bp, Glycine max
  unsure (1)..(502): unsure at all n locations
cgggaggacggctggattgggggggaggatacgttgttatcaagataccctaggctgtatgccatttcttctcagcaaaaccaaaaaatacagcaaataggggctttcggaggtacgggttggtagtgggatttcaggcggaggaggccattgttcgatagtgaaattgatatggcggtctcattcctaagggatgttgaaggtcacaggattcagccccagaaaggaaatgagtgggtttggttggcagaccctattggtcactactcggccaaatctgccaccatgtcattaggggggatatgcctgtatagaaccaggntggagcatttgaggagttgtggaaactaaaaattccgcctaaaattgctatatttgcatggagagtgattatagacaggttgccggcaagagttaatctgggaaggcgacttttttttgtagcggatcctagttgcccattttgcagagaaacagaggagagcgcggatcacttgttttt

SEQ ID NO: 86584 - DNA, 329 bp, Glycine max
  unsure (1)..(329): unsure at all n locations
cccctaaattttggaggaaaacattgggaagggtcataaaaattttttttcctttgaaaggaccttgattttgaattttatgcctttcaaagggtttgaattttcgggaagggggtacccttgaataaaaatttaaaaggccctttttaaattaaaaaaaaaatcaattaagggtaaaaattaatttcatttttttcaaattttaatttaataaaaccctttagcttattaaaaataagggaaaaaaatttaatggttattaaagggaaagggaccttgntccaaccattcaaattcaaaggaggtttaaaattttggaaccaatttca

SEQ ID NO: 86585 - DNA, 432 bp, Glycine max
  unsure (1)..(432): unsure at all n locations
gaagggaggctcctgtagagccgccgctttttttttttttttttttnttntttttttaaaaaaaccaaggaaaaaattggggggggccattaaaatattgtgtgccacaaaaacgaccgaaaaactaaaagctaatcgtattcctattacataaataggattacgaacaagatagctgattaaaaattcaaattgtccttttaacataagcaaaaacacactgaactattaaaaataacttcctttttttccaaatttaaattaaaaaaaaccttttacctctttaaaattaagggaaaaaattttacgggatctttaacggaaagggatcttgggtaacccgctgaaaaacaccaatggtacggaggagcgtgcgttacaccaccaccgggcgcagtataatattggaattattccaccaaatttttccaa

SEQ ID NO: 86586 - DNA, 408 bp, Glycine max
  unsure (1)..(408): unsure at all n locations
ccttcccctgggataggaaaaaaacctcttcctaaatccaggattgatttcatgggcccttgaaaattttcaaggtttgggggctattataaattattatagcaaattttgggggctgaagtccatagctggcttgtgcaacagttagcntgtgtgctgcgagtattaaaccctcccaatatctggaccattttgaagttctcccataaaccctgatgaataatacccaatagctgttgactttttttttatgactgtaaagttttaggttacacagtgatgatttaatttaaaaagagtggtcaaagaatgttttgacgtacatgcagtgcgggaaaaccaccagtatcgccaggacgggtagagcagtaggcaaatccttttatctgcatatatcatatatttttt

SEQ ID NO: 86587 - DNA, 288 bp, Glycine max
ggaaaaggggcaacttttggtccatttgtgttcaaagggccagggttcccccgcagaaacagttgtgctttaaaggaattaagggtgccaatcgtttcccagaacccttgaagaaaaacggcttttttcttaattgaaacgggaatgttttgtttttgaattggaaaaaaattttaggggttagagtgaaaaagaaataaaagggtgagggagaatagaggaggcggcttattgagtttcgatatttctttatcgttttctttgaaggcgaagacggtggccccttct

SEQ ID NO: 86588 - DNA, 430 bp, Glycine max
cccccaaaaaaaagttttttggggaaaaaaaaatttttttgggggggggggaaccaccccgggggagggaaaaagtttttttccaaaaaaaaaatttccaccttaaaaccccatgggttaaaacccctttaaaaaaccccttcaaaggtttttttcccccaaattttggaaaaaaaaaaattttccccggaaatttcccggcccaaaaaatgaacatttttttattaccaaaaaaaaaaccccttggaaaaaatttaaattccctttttgggggtttttttccccgttttcaaggggaaaaatcttttttttatttgttcccccaccccgggttcaaaaaaaaaaattttggggggaatttccccatttccacttttttttcccccaggggaatctcgggggaggttttcgggcccggccccttttttcc

SEQ ID NO: 86589 - DNA, 506 bp, Glycine max
ccccaatcattttaagtaaaaatttattcattaagtcatattgggacaaaaagtttaaattaaattgaattttatagaaataaacattttcatctcacaaaattttgttaatttttaaattttagaggtaaatatttacattatattattaatatctaaattatgattgaatacatacaccacagggactttacatgaaaatatattaattttgaaaactaggaatctatctaaacatattacattatgaaatataaatcccttcaaaagaaattgacctaaaaaaacacatttgctttagtgatggaacagggcaattggcaacctctaaaggatcattggttcaaatagtaggtgcttccattttttaaattcgggaaccaatttatgaggtttggccagtttctgactggttcatgacaatccagttgcataagccaggtcagatcagctggagaaccggttcaaggttaacccacttaaaccatccggtccagttttcaaaa

SEQ ID NO: 86590 - DNA, 62 bp, Glycine max
gccccttccctttttgtggttttttggaaggggacccttgggtgaccgggaatttcggaacg

SEQ ID NO: 86591 - DNA, 362 bp, Glycine max
ccaacccccccacaaagtaggaccagtgaaaaattggaagcattactttttttttttttttaagttcaggatggatttaccttaaattttgacccagtctgtaaaagggtcaggaataaggtagggggaatctgccaagttttgcccaaaaacggaatttggttttaaagatatatgacctcaggggcttattcaaaataattaaaataaacctttttcctttttcaggtttaaaaggtatagaaaaatctacaatccaaaggggtttaacggatttataaaatgttcctttaaaaatacaaacaacattttttttaaggagacatgctttaattaaaattagctcgctgcattataatgtt

SEQ ID NO: 86592 - DNA, 435 bp, Glycine max
  unsure (1)..(435): unsure at all n locations
cacattaagagaaatggttgggttggctttttcaccccattttcgttatttttgccagggcaaggaatgggaaagcccttgcttaaaaataaaacggggttttattggatgaacttggaacaaaccctattcgggattaaattttcagaatctacgagaaaagaaatttgtnacagaaagaaatgatactcctgttgattggactcccaagtggaaagtcccaaatcccaatgcgggaaaacttgagtttgtccccaacaaacatggaagtctaccaattctggagcatgctttagccactgcacttgaagcagcacatctagttgcaaccaagttcatcagatggccataatcataaaatgctctgcctcagctacacagctgtagattaaatagcatcagaagaatcctgagaaagcctacttacaaatgatt

SEQ ID NO: 86593 - DNA, 384 bp, Glycine max
gtagccaaagagcccgaccagtacgggcctagttgggctctttttaattcccatgaatattgaataacaatgttttgtttgaattgaatgtactttattagaaatatgttttctcatcttttagacaaattatatgatttctataaattagttaattttgttaatgaacatctcattttaacttatcatgaaatttatctcattatttttttctcttattagggtttctaaataaatttatccaaacaggtcataacactttgtcgaccagtacctgatagcttcaacatcatttgaagtgtcctctccacacattggaggtgctctgaagttgtctcagtgtctatctaatggttaaatgtcacaaacattgatttttcacct

SEQ ID NO: 86594 - DNA, 380 bp, Glycine max
  unsure (1)..(380): unsure at all n locations
gganccaaacaccccaaccaaaaccgccgtattttgtctctttttaattcccattaattttgaataacaatgttttgtttgaattccttcctctttattagaaatattttttatcgtctgatcgacaaacaaacccattcctataaattagttcaaaatcttaaagaacagatgtttttaacttaacaaaaaaatactcccattatttgttcctcttattagcgcttctaaataaatttatccaaacaggggataacactttgtccaccaatacctgataacttcaacatcattcgaagtgacctctccacacattggaagtgctctgaagttgactcagtgcctatttaatggttaaaagtcacaaccattgaattttc

SEQ ID NO: 86595 - DNA, 56 bp, Glycine max
agggagacctcaggtcaggcggggctacccgctgagtttaagcatatcaatcagcg

SEQ ID NO: 86596 - DNA, 57 bp, Glycine max
gagacctcaggtcaggcggggctacccgctgagtttaagcatatcaataagcggggg

SEQ ID NO: 86597 - DNA, 385 bp, Glycine max
  unsure (1)..(385): unsure at all n locations
ggtaccggnaangaacgggggggccgacgcgtccgtacatacgtnagaacacaaccgattgattcattcaaaataaacaataattctgggaggtttttataaaagagaaaacatctctaaaaattgcctatatactcaacagactgttcaaactatctgcgaatccatttctttgataagagaggccttcactaatttgacctattaatatcttagtgctgtaaaatataagccgaatacatacatagccattgatattattctgactatgaagcatgatagagagacatacatggctttcaatatctaatggaagtggggaagtgcatcacacattatgaaattgattcatatattgccatagacaacccttagctgaccatct

SEQ ID NO: 86598 - DNA, 370 bp, Glycine max
actttatgatgaaggaactacagaaaacaagatgtgtagaataatgaatgttatcattacattcacattcatacacataaaacattgacaattctttgtgctaaaaaagaaaataaagtctttccataggatataatccaaaatttgtttgaactcagtgcaatgcagtttccatttacattaatctcctaaattgattcatgttcatcatcatttgtcttgtaggtcgtacatccatttgatgctcaagctgagggggagttaagcctatcagttgatgattttgttgtagttcgtcaggtatttccttgatgactgttatgctatttatgattcatcatcacctgtacttcagataaaccagattctt

SEQ ID NO: 86599 - DNA, 354 bp, Glycine max
ggtgagcaagagtgaagagcgaagagaatggctcccaagggtttaatctttttggctgtgttatgcttctcagcactgtcactgagtcgttgtcttgcggaggataatggacttgttatgaacttctacaaggaatcatgccctcaggctgaagacatcatcaaagaacaagtcaagcttctctacaagcgccacaagaacactgctttctcctggctcagaaacatcttccatgactgtgctgttcagagttgtgatgcttcactgttgctggactccacaagaaggagcttgtctgagaaggaaacagatagaagctttgggttgagaaatttcaagtacattgagaccatc

SEQ ID NO: 86600 - DNA, 358 bp, Glycine max
gacttcaggaagagatgggatagacaatctcaagcattttacaacttaatcagacaggctgatagggttgacaagcttgctaacattatccaaagactggtatttccctgattttcagatatatagttcaagttatttatttgattcatacctgttgtttgttttgaacttttggtactctagatcactgcttatttaatttttccacaggagcaaggtgatctaaagctgcgagttcgaactttggaatctgagagggcattccaacgtgttgctgcagtccagaagactatagggaatgtgagtcaatctaatatgtggactgtaaagtttacttctttggtccatttggttagag

SEQ ID NO: 86601 - DNA, 365 bp, Glycine max
cgttctttaattcaaataacaaatttttaaataattatttgattgaatacgttcttgtcacatctttaaatagtttgatattataatttgttttattgaaagttgaaaataattgtacctagaatgaaaataatagatgtaatgcaaaattaaatggaaggtgattcaatcatgtaacaccacacggtccactctcttttgcctcttccttcttccctcttctaaaacatcaaaattgatttcaaaggtttgcttcttttctaaaataataacaagaacacaaatttttagtttaaagataaaaggtgattcaatcatgtaacaccacttggtccattttcttccttctgcctcttccctttaca

SEQ ID NO: 86602 - DNA, 358 bp, Glycine max
gaaggtgcaagagtttgttgtgagctataagctagtttatcgtgaggagaatatgaagttgtttgttttctttgttgctgcagtagttttggtagcatggtcatgccatggcgcaggctaccaaaggttccctctccgaatgaaaactggctatggtgagcgttcttcggaggtaaaatgcgcaagttttaggcttgctgtggaagcacacaacatccgagcctttaaaaccattcctgaagagtgcgttgaaccaacaaaggactacattaatggcgaacaatttagatcagactctaaaacagttaaccaacaagctttcttttatgctagtgaacgcgaagtccatcacaacgac

SEQ ID NO: 86603 - DNA, 357 bp, Glycine max
ggcgaatatcaacttaagaaatccatggaaggctctctctcactgcatctctgccttagccaccacactctcatatctctccacaataacaaaaccccataaaactaacaccgcttcctccataccagaaccgaaattcacaccttttaacgtaacttacgcgacccacttgcatttgaatcttttctctaacgcttgcacgcgttgcctctccttccttaacggtgtgatgccgatcgacgacacgctgaggtctaagattacgactctgcagaagagtccagcctcgtatgctattcctgttacttcattcataggaaaactaggtcctctgctaagggagagaatgactgatcc

SEQ ID NO: 86604 - DNA, 365 bp, Glycine max
tatatggtgtgacaacctcaaccaacgccgaattatatcgttgcgatcgttttgatttgagcaaggacgaagaggaaagattcgctcacaacaatgacaatgatggctctttcctatttcagttcccgttgttgagaaccttctccaaacattgtcatgcatcttcatcctcatcaacgtactcaagctcacccacactatcatttacatcaacattgtgtttgaaagagaggaaatctttgcggaggctctttttgtgtataagaaaatgggagcttgtttgtgcataatgctttggcctccatgtatggcaagtttggaaaactgcatgttgcacaccacttgtttgaaatatgccaagtaga

SEQ ID NO: 86605 - DNA, 254 bp, Glycine max
taacgacacagctgctacaaaacaacagggggggtagatatatgatgactaacatttcagtaacttaccttagaacaaattccccctgattcctttttgaactatttcttagcacttactgcttcgttaacatcttctattacgaatgttaatcactttgaataactcacacgtctatctgatctatgaaactaactcttatacaacatctacatatctttataaataaggggaaggtgtgctcacttatccgg

SEQ ID NO: 86606 - DNA, 354 bp, Glycine max
gaactacttgtttgccagatgtattggctgttaatgttgattggcatatattgattaaattttccctagaacatatgttctttctgtttgctttaggtattctatgttggatcatttgtgaagcgtaagttatatctgattttttttcggtcggccaaaataaagatttatattaaataagtaccagaggtactacagaacaatttacatagcataaaaagctcctcttcagaggaccatacactggttacataatgaaattactgccaatagttactgatggatgctatcctgctgtgattacaagcccatccctgatattggaagcccactgattgtagttgatgtcgaaat

SEQ ID NO: 86607 - DNA, 371 bp, Glycine max
cccgcgtgcgacaaaaggtgggacgggtgcgcgaaaactccatttcggtgtcagagctattaggaagggggggtctggcacttgtttctagctcttttatatataactcagatgagaacactcaccttttcttatcgattgcgatggggggaatcatcgcgttattatttaaaaataatatagtacattgaacttccgcgcttgctttattgcttggaagagccaattataaacagttatcgaaaacagatttgtgggaattgtgacgcttctatttcaaatgcgtgaggtctagccgaaattaatctctcagcgagaatatcattcctttggctatgaacattaatttgccgctttatgaatgggcaaac

SEQ ID NO: 86608 - DNA, 366 bp, Glycine max
aacgatattggtgaatattatgaagccagagatggacacaaattttcccatgacatgaccatatcaaatgaaaattcaacatgagaagattcattcccgtgtagacttttttgttgaatcttcaccctcatccttcacctgcccaaaagtactcttccacaatttttagcaaactcaatgtttggttagggaactcaaggagtttacaagctggatctagttttcacttctttcaaatccaaaagtttgtcctattcttgttctgtgtctaacctcattctcttgcttcaagtacacaatccgtatatgaaggatgaaacttttatgagaaagaatatcaagtattcggtgggatccaaaattggt

SEQ ID NO: 86609 - DNA, 350 bp, Glycine max
ggttctagtgtgtgattgtttgttgttgtaactcgttcttcttcttttgttgttctgtgtttgtgtttgttttttctctcacctgaaaatgtcttgctgcggtggtaactgtggttgcggaagctcctgcaagtgcggcaacggctgcggaggctgcaagatgtacccagacttgagctacactgagtcaaccaccaccgagaccttggtcatgggagtggcacctgttaaggctcaatttgagggtgctgaaatgggtgtgcccgctgagaacgatggctgcaaatgtggaccaaactgctcctgcaacccctgcacttgcaagtgaggtgttgggagagcaagcttca

SEQ ID NO: 86610 - DNA, 276 bp, Glycine max
gacaccgcctgcaccaacaaagaatgggaaaaagaaataccaaaacacaaaatgcaccctcctcttttctcctttccctttttatctcttcttcactctcacccttatatttttcttcaaatccagaaacaaaccattctcatttcatttgataagaaacccttttctcttcaaggctcttcggaagccgtgtgcttttttatttcttttaaagcacatctagatctgcggtgtaacattgaccatttgaaaatagatgctcaatatgttccatta

SEQ ID NO: 86611 - DNA, 138 bp, Glycine max
aggtccaaaattgggttctaggtctcactagacctagggatgaacataatttttacttaaattaattgcattacatgtccaataacaattatcgatccaacattcttgaatgacatctataccttggatcacctccat

SEQ ID NO: 86612 - DNA, 355 bp, Glycine max
ggcaccgcttgagcagacttaacaacagcacaaagcgggttactgtctgttcaagctaccatctctctctctctttcttagtgcctccttgccagaagttaaaatggcccaagaaactttcctattcacatctgaatcagtgaacgaggggcaccctgacaagctctgtgaccagatctccgatgctgtgctcgatgcatgcttggagcaagaccctgacagcaaggttgcctgtgaaacctgcaccaagaccaacatggtgatggttttcggagagatcacaaccaatgccaacgtggactatgagaagattgtgcgtgacacatgcaggaacattggttttgtctctgatgat

SEQ ID NO: 86613 - DNA, 329 bp, Glycine max
  unsure (1)..(329): unsure at all n locations
gggggaaggaaagaaattagaaatatttattcattgtcaccaaatcttgttccctgcaagagaaagaaagaagggagagaagaagttgttgggttgagttggattggatttctaatctaatctatacctttcttttttcctatgcttttaaggcacaaacccttctttcttccctcttctttcttcttcttattggtattccttgcctttaccctttaaggaaggaagaaggaacaactatactactattatccttattattggtattattggaattaatctttttattatagntattggtggtggtattattcctcaaatatggattc

SEQ ID NO: 86614 - DNA, 367 bp, Glycine max
ggaagagtgaagagaatggctcccaagggtttaacctttctggctgtgttaatatgcgtttcagcactgtcactgagtccttctgttgcgggggaagggcaaaataatggccttgttatgaacttctacaaggaatcatgccctcaggctgaagacatcatcacagaacaagtcaagcttctctacaagcgccacaagaacactgctttctcctggctcaggaacatcttccatgactgtgctgttcagagttgtgatgcttcactgttgctggactccacaagaaggagcttgtctgagaaggaaacagatagaagctttgggttgagaaatttcaggtacattgagaccatcaaagaagctttgg

SEQ ID NO: 86615 - DNA, 367 bp, Glycine max
gaaagtgagaaaaaataaaaatcaaagagcataatgtcagggatcattcacaagattggggagacccttcatgtgggagggcacaagaaggaggaggagcataagggtgagcaccatgctggagaatacaaaggggagcaccatggtgaacacagtagtgagtacaaaggagagcatcatggtgaacacaaagctggagagtaccatggtgagcacaagccagagcacaaagaggggttcctagacaaagtcaaggacaagatccatggtgagggcggcgccgccgagggcgagaagaagaagaaggagaagaagaagaaggagcatggccatgagcatggccatgacagcagcagcagcagtgaca

SEQ ID NO: 86616 - DNA, 387 bp, Glycine max
  unsure (1)..(387): unsure at all n locations
gcgaggaaaccaccggagggggtgcccttttccactggatttttggtattcctggcctctagagaataaggctaccctttggatgatctattttccctaattgcgggcttctacaattatcctccacacatgcatgaatcacccaaaggcaaagttctaccttttttttattctacaaaaggtactaccccaacttcctcactaataaattattcctaatcttgtctagtatatcgactcatctatgcaacattcttttctatggtacattgactttattctgttgacttttgaccgcccaacattctgtcatacaacatcctatgtcctataacggtgtggtaaaatttttccttagtttatagtggtatctntctgtcataacac

SEQ ID NO: 86617 - DNA, 299 bp, Glycine max
taacatacactaataccgactacagtaagagtaaaaagaatcattgtattaacaaaaaagtattaattgtaaaatttgtgtaaatattaaaaatttatgcgcaaacaattaatatatttatcaacgtagaaaaattaacatttaaattttttggttaattttttataatggtacgtaagtgaaaattttcaaataatacttagaatgttgaaaataaaattatcaaaatagttactagctagttatattatgtatattcatcaatacttgaatgaacttcatcagttcaacaagtattc

SEQ ID NO: 86618 - DNA, 359 bp, Glycine max
acattgttccaaaatctggcaagtttgggacgattcatgttgactttcatggtcattctcgaagtgctccttctcctcttgaacaagtcgtagtatcccatttgatcaacttgctggtcacaccaagctttgtaccattctatttcggccctataaggcacaaactttgataatgtaattgctaagttagcagcattcttggttggtgatggacccatcctccttgtcatcttaaggcactccttggcaggttcgatttctgattcctatatatagtagaatggaagttatttgttcagtgaatctccttcttctagtgaaaattatgaatcatgtgtatagctaataataatattact

SEQ ID NO: 86619 - DNA, 189 bp, Glycine max
acattgcttcaaaaactatcaagctgagtaagactgaggctgcctttcttgcttcaccttaaaatgatcctttggacaaccacctcgaaaactaagaaccaggaggcaattgcgcccctactccatgcagcctctcactccttcaagctaccgttaaaaaagtgagcgcgagctgtctatacaacgagt

SEQ ID NO: 86620 - DNA, 340 bp, Glycine max
  unsure (1)..(340): unsure at all n locations
gatattatacatttacggttctatatgtttttctatgcttgaaaaaatttgcatcagtgtcgtaggctggcagtatgtctgcttatctagttacagtcaatttgaatctcaggctttggcccttgggtaacttttatttgtccacgatcttgtataggttcaccatgtcatttgaacttttctcccttgtttaaacgtatgtcaattcagtttaactcttaactactacctaaattaaagttataaagattgatagtatgcatggtcagtgtacaaagccaatcagaaatcattcttgctatgaantttaaagcantattataaaagtcaaggtttatga

SEQ ID NO: 86621 - DNA, 356 bp, Glycine max
  unsure (1)..(356): unsure at all n locations
atttataataaaaataagtagttaaaattaaatatttagaaagaaatttgttatccattacaagattgtgtccgctaaaaagtatgtgcggtctaagagaaaataaaaaagaaaggcaccattgttaagcaatacaaaaagaggcgactttgacttgagtaacttgtcatgaaactttgttagcaagaaaagagaaggtgcaatctgaatctgaatattttatggagacccagtagagttattttacggagcttgaagtcgtttggacagagaaatatgttagaaaaatattaaattttatattttttattaatacagagtatttactaatattttaaatgattaanaaattaata

SEQ ID NO: 86622 - DNA, 250 bp, Glycine max
tgagtgggactgactaagaaccaatctaggtgggggtttctgtgttttaaaacgcggtcttcttataaaaccagccgctgtagaattgtatgtgcgagtttctctcggaccaacactagtatgtgaccggatataaaaaggcgtggaacaaccatagcagcagctcccggcccgggaggaccaggggaacacggcgacgatcaagaagccttctctggtgcagcaaagatctttgtaggcatggtacatc

SEQ ID NO: 86623 - DNA, 467 bp, Glycine max
  unsure (1)..(467): unsure at all n locations
agcaacttcctcaccataaatgctattagaactatggcatatttgaggtcatcttctagtaattgtcacagactcagtatttggaagcagtccaaatcaatagaagtgaatgttatcaaaatgcactatttcacatcctgcataatagacattttgccttttgcaaaaccttggcaaatacaacaaaaagacatccaaagaaatcgatctaacaaacttctctaaaggattgaataagataccaaataaacaataaaagaagaaagccaacaaatgagggaaatgttgtaatattggtactatacttcctcaatcataaaatcatcagcttctggtttgagagtttgttagatgaatacaaaccaaagggaaagataattatgccttcttgtttgatgggaatatagtttacaactgtcctggagtgttcatcatttccccgtgttcatcattaaagntatgttatc

SEQ ID NO: 86624 - DNA, 499 bp, Glycine max
gggacaaaaccgtcaatcactttatataacttccaggatttccctactttattggagttggtaaaatgaaatggtttaagaattgaaggaaaagaattcctagttgatttttggaattcttctaaatttcacaacagcttatttggagttctttttggcatcttaattttaacttaacaacttggaaataatgctttaataccaaaataaccattcaaaatttctaaaataacattgtaaattatttttcaaaggtaatcataatctaactctgcccatggtctcatagccagtcccaaatccaatttaagggaaagggttgtgattagcccttaatcattaacatataacttgttgaaaccccaaacaatcaattaatctatgatggtgtcactatcatgtgtggcagtttaagatggttgaaacatcaaaagatatgcggatacatacagataggttgtgacaatatccttcaatatgtaaatgaacttttgttcat

SEQ ID NO: 86625 - DNA, 487 bp, Glycine max
  unsure (1)..(487): unsure at all n locations
ccacagccttaaacaccaccctccccccttcctagggagacacatcaccattatttcgattcttcaacactcaaaaaacattctttttagacattttttcaaggaatccaaattttattttcattgttcttagccaaataatgttaataaacagagaattatgcttctcttaattgaaacaaaaaattngtttaatgatattttataacaccgggataaaatgaaatttagaaaggtaataaaaaatttgatatctactattttttttattggtaataatcccccctttaatttatatatttgggttacttcaatgtaaaccaggccgccaaactgccctatccgaatcacctgcactattaatcaaaaggtgactcattaagtcaacaaaatttcatgatttaaaaatgaaaacaagaacccccgaaaaaatgaaaatagaattattcacttttgctttaccttgttgggaatcaatttttaaaaa

SEQ ID NO: 86626 - DNA, 221 bp, Glycine max
  unsure (1)..(221): unsure at all n locations
atatcaaacccaaacantaattaacaattatgtgttatttttataccccttattaacccctttttttataactttaaatttctttttacccaaatttattaaagattttaatttatacataatcatgtaaaatttaatcatcaattgatataatgtctaacccttttctcctaaaaaaaatataatagccaaccttaatctccttaaatattatttctccc

SEQ ID NO: 86627 - DNA, 532 bp, Glycine max
agggggaagatatgggctaggtggcatataaaagcaggggaggactttagaaacaaaatatgttctaggcaacaataatacaaatccgcaagctcaactatgagatgagcatcaacaaacaaagaaaagataaccctactttatctacaagtgtagaagggaaagagaatatcacttcttcaagctttctggcatactcttgtctaatctataaaatcaaatctattgtactagtgtttaatatcagacacattggtaacaacaatggcaggagcattactcccttggatagcctattcagactttgtgagttgggatgagcaaccaaaaaattttattagctacaagtttatgattcattcacagaaaatgaacttccatgccctgcttcttggctgattttgaaaaccccttccacatttatggtctcatgatttccatttacttatatcaagcatattaagttatgtaaaattacttcaacagaaagttaatagctgaaaaataatgaactagtttgttcacattttat

SEQ ID NO: 86628 - DNA, 377 bp, Glycine max
gacaacaataatttttttatctcacgcatgatgagggtgactcaattaaagaccaaagaccaaattttcatggatattattttccaaataatctctcctaatttcctccaacattctcattcaccaaaaaaaaatcctccaatattcctaatcttcctttctcccttttcagaagttaaaaaaccatccaatttatcagttaaacaattaaatgttagatgttttgattaaaaaaaactgttataagattataaatgtacctgtgccgtgttttccaatgtatttcaataataaaatctataattcgtttatccaatgctccaagcaagacccttcaagttttaatccgggtcactgaggggcttcatgattttgat

SEQ ID NO: 86629 - DNA, 311 bp, Glycine max
ggttggtaaaggtttctgtgtgttgcgagggaagattgtgatgtgagtgatgggaagcagcgaagaagtggttggcaaagaagaggttatcgcaaaactcaaggacgatggcgactttgacaggcttcgtttgaagatcgttcgcaagctcaaagacaacgaagagttgcgacaacatattacctcaattgtgaagcaatcagtggcactcaatcgtgctggagccagaaatatgaacctagacactgtctgatgcctacatgaaaaagtggtgagtatccttctttactattggtattctacatgtgttt

SEQ ID NO: 86630 - DNA, 355 bp, Glycine max
gaaggtgcaagagtttgttgtgagctataagctagtttatcgtgaggagaatatgaagttgtttgttttctttgttgctgcagtagttttggtagcatggccatgccatggcgcaggctaccaaaggttccctctccgaatgaaaactggctatggtgagcgttcttcggaggtaaaatgcgcaagttttaggcttgctgtggaagcacacaacatccgagcctttaaaaccattcctgaagagtgcgttgaaccaacaaaggactacattaatggcgaacaatttagatcagactctaaaacagttaaccaacaagctttcttttatgctagtgaacgcgaagtccatcacaac

SEQ ID NO: 86631 - DNA, 349 bp, Glycine max
gattcctaggatgatgcgtttatattacgcacgacacctttttccttttcaaattttgtgtcgccccaatcctttatccttctcttctcgccatatccattgtgcgactttgccttgccgccactataattgaatgtagaggacaaccgccatgacagtgcgtccttgttgttcaagacactgtttcagggacttcaactttgctagaagctgggatataggaaggtgtagtgtttttctaactccgtcacacctgtggagcttgtgaacaaggaagtttcagtgcaacaccaatatagcaatgtgctagtcttgataaggaagttattgtatgtgcactgtgatgcat

SEQ ID NO: 86632 - DNA, 149 bp, Glycine max
  unsure (1)..(149): unsure at all n locations
gacaccaacaccaaaacaaacccactaagatggcttcctttgtatccttcctagtgctgcttcttgcagcccttatcctcatgcctcaagggcttgctacttactacaaaccaattaagaagccaccagtgtacaagcctncagtgtac

SEQ ID NO: 86633 - DNA, 190 bp, Glycine max
ccgtccgtacaaggtgtgagaaagaccaccgaaaggacgtttcaaggggacctcaaggaatccggatctgggatttattttaaaatgccttatcccaaaattccctccaaagcccccttttttttagggacccacattttatcgtgtgttaaaaaatattttcgtgtcaaacaaaaactatataaaattt

SEQ ID NO: 86634 - DNA, 324 bp, Glycine max
caaagggcttgtgaatgtccaccgggtgtcattgacctaatagtcaataggggtccttattttgcactcaaattcttattgaacgtaattgctaacttcttttcaagatggcatgctgctttctgggtgtcttttcttccactactggtgagcagatatatcttcagtgccaattgcgcgtgtgtatttcagtttagactaataattaattgattaacttgaaagtgattctggccgttggaacaaagcttcaaggaattataactcgaatggcacttgacatatcaaaaaggcatgctgtagtgcaagggatccctcttgtgc

SEQ ID NO: 86635 - DNA, 233 bp, Glycine max
tttgctcgccaatgcccacctttgggccggggcctagcttttaatccctaacctaaaatttcactttaaaccttattcttcttattatccaacattatttttgcgatggtccactgttttttaaatcttattttttcaactacattactattcaatacatgtacctttccaattgcacatctgtataacactttagattaataacttattgaacttttaaaacatacttcttt

SEQ ID NO: 86636 - DNA, 240 bp, Glycine max
ggattctgttgggcatctcaagccactgacctgatcattttcattctactagggtttccagaatttccccaaatcaactaacgtgtttctgaatgaatctcataacgacgcaatataagaatacgagtcttccatagcttcgattcctacactgtacagcatcattccacaggcctataggtgactggagggggtattaaagagaattctcaaccaaatgggtagtgttgcaatgttcgc

SEQ ID NO: 86637 - DNA, 286 bp, Glycine max
gatagacatttccgttttgtcccattggccaattcggccactctcctctgagaaagcctccagcctctcctccaaagtcccctgcggttcgttcggttattcttcgaaccgttgtctgaagtttacaactcaaaacttcaccgaacgcatttcattcaccaattcgtccaagtctcgtatcaatcaatcagcctatccgtcttgcggtgagttcttttttctttccgattcagttcgtagatacaagatagatcccgttgcgttcgtttcgcgccgcgtggttttt

SEQ ID NO: 86638 - DNA, 360 bp, Glycine max
tttctatatatcatcataattatttaaacaaatatgttaaacaaataattattttttatttcttagaataaataatttgtcatttttttatcaataaatatattagttgttaatttgttaaattttgttagtgagataaatttaaattcatgatctttccatttaatccatttaaccattaagtcaattttatatataacttcaaataatcaatcaattaactatacacaaaaagttttacattaacatctaattactaaaactgtcatgtgtaatatactttttttttcttatacaattatcttaaaaatcatatatccttataatctctaattagttgttactgtaaattcttaaact

SEQ ID NO: 86639 - DNA, 361 bp, Glycine max
gagttcaattccaatatattccattcgctctgggtatttccctacctctcccttcaagatgcagatcttcgtcaagaccctcaccggcaagaccatcacccttgaggtggaaagctctgacaccatcgacaacgtcaaggccaagatccaggacaaggaaggaatccccccggaccagcaacgtctcattttcgccggaaagcaacttgaggacggccgtacccttgctgactacaacattcagaaggagagtactcttcacctcgtcctccgtctccgtggtggcatgcagatcttcgttaagacactcaccggcaagaccataaccctagaggttgaaagctccgacaccatcgataac

SEQ ID NO: 86640 - DNA, 117 bp, Glycine max
gacattttctacgtattgaatctcaagattctaaaaaaggattttgctgctcttttgaaaaaggtgtttgcttgattttggaaatgtcgctgctctcaaatctcatcaaccttaacc

SEQ ID NO: 86641 - DNA, 95 bp, Glycine max
cgccagcctgtccgttacggtagaattttaaatggaaaggccccaattcctccggccctgtcttaacaaaaacaatacttttatcctccattttt

SEQ ID NO: 86642 - DNA, 246 bp, Glycine max
  unsure (1)..(246): unsure at all n locations
cgacccacgcctccggccanaaaacgacaaaaagaggattttttaccataaaccattcaatacctgctggagggttgaatcaaagtctgggctcttaccggcgataatcaagacactgcaatttcaattggtctttcttttaaacttctgagtgcaaatatgcaacaaataattataaattgccctctaaaagtttacttcacaaatctatttacttattccaaaaacaaaaaatctgtgaaatct

SEQ ID NO: 86643 - DNA, 346 bp, Glycine max
gagcgaagagtgaagagaatggctcccaagggtttaacctttctggctgtgttaatatgcgtttcagcactgtcactgagtccttctgttgcgggggaagggcaaaataatggccttgttatgaacttctacaaggaatcatgccctcaggctgaagacatcatcacagaacaagtcaagcttctctacaagcgccacaagaacactgctttctcctggctcaagaacatcttccatgactgtgctgttcaaaagtgtgatgcttcactgttgctggactccacaagaaagagcttgtctgagaaggaaacagatagaagctttgggttgagaaatttcaagtaca

SEQ ID NO: 86644 - DNA, 353 bp, Glycine max
catatgtttaggtgtatgttgataagagcaccaacagtgatgagggtaagggaatgtcatgagacatcattgtactccatctactctgttttgaaatattgtgactgtggtagcatttgccatgtatgttattgtccctcgacatttgagtttaaatgctcatgtttgaggatggaatcttttggcctaccatgtgatcacatagtcacattgttggtagagcttgacttttctgaaattcctaaatgtttagtgttggattggtggaaaaaaaagtgcaaaaaagtctattcgtggaagatatgtagatagttcaactttctgggattcaaatcttttggcaaagcatgcct

SEQ ID NO: 86645 - DNA, 243 bp, Glycine max
tatggtttctttagaccacaaaatggttctgcttctataatacaacataaaggttcttgtgtcagaatacgaaacaacggtactgcttttataacaccacttaaaggcattactacttgatttgttaaatgttgacttttactaccctttaatgccaaagtttattatccttcgccattttttcttgaatgtgccttgtttcaagaccattttttttttttgaaacaattttttttgtcaaat

SEQ ID NO: 86646 - DNA, 78 bp, Glycine max
caggactagtagagctgagaaatgtggacttttcctacccctcaaggccagagtttatgatccttcgcaatttctcct

SEQ ID NO: 86647 - DNA, 346 bp, Glycine max
ttgagacctcacatcaagcggggctgcgggctgggtttaagcaaaaaatataaataaaaaaaaaaaaaaaaagcggtcgatctaaaggatccaatctatacaacacgaacatgcaaacaaaataaatcttgtatctcgtcacaaagaaaaagactcacaaaaccgtcgttcttcacaaatggaaactaggaaaacactgaccttacccaaattaaagaccttgcctgacatcccaatttcaccagctaccaaaataacaaaaactctcataccgcaaacccttcccaacaaaaaaacaaaactgaatagcaaatggaacacgccctgtaacttaatcattaagctc

SEQ ID NO: 86648 - DNA, 307 bp, Glycine max
agaaggggataccgacatgtacccatcttcgccagtcccaaatagtggagttgtaattgaggagatagtggatgatgataaacctgaaaatggatatgatccaactaagaaattaaagaaaaagaaacaggtagctcaattgaaagagaaagacaacaaaagttctgggcttccaattgtcgctaagggtgatactgaccttgtggaaagtgaagacgaagacggctttccaattcccactgcagagaaaggggtgtctgtctctcagaaggcagaagcagaaacgaaaggagaacaagcacgtaag

SEQ ID NO: 86649 - DNA, 379 bp, Glycine max
ctcaaaattaataagtaatcaaacgaatacggggcgcaaacttagctatgttatcaactaattatgtattatcaaattgttaaataagctacctaaattattaaataagttcgattatcttactactaaaccaaaaaaaatatttattttaacagtatgtacaagtaaatgagttatctagttgtttctaattattagttttagttttatatttaatatgttccgtgtaggaaagaacttttcaggtataaaaattgaaattacgataatctaattttatagtattagtttcccccaagcaacagtagaccatatttgctccctggccttattgcatacagtcacatcagttagaaaccagtaagcacgaatcagtaac

SEQ ID NO: 86650 - DNA, 415 bp, Glycine max
gggaatatataaaatagttccatctccatatcttgggggtttcctaataaagaggcaagacccctgttatacaaatcttttcaaacaaaaaaaaccggtactttatgttgtcatactttactaaaacatcttctcaccaaaattataagcatcctatttcgataaaacatgcctaaggcagataaaacattaacaatatgtgttaaaattttttgcatacaaaaaatactctcatctccattctttctaaataaagtatacaccatgagtttttttgttaatccccgaaagtgtaacttctgttttaccctcacgcgttaatctttttagagggttacattttattacaattcttacaatatttaaccctgaaattttaatattttcttcgagctgacaaaatcatatttttggc

SEQ ID NO: 86651 - DNA, 403 bp, Glycine max
  unsure (1)..(403): unsure at all n locations
gggggggtttttataggtggaaatgttcccaggaagcatgggcgaaatgccttctaggtgagactcatgtgtttacacactcttacctaacatatttttanttcttaacagtgagattcaagtgatttatatatactttgatgagaaggcattatataggcagaaccttatttttggagagcatcatgtagtatttcttttgacacattcaccagtaagggcatgttggcttttttagtagatgaatgctgttgcaagcaatcatcactgttaccatagtggttagagcttgctattgctaatgcttttcattaacatccctgtctctcttctgttgatgttgacaacatagcaatgtttacaatgccaaagaaactgttgtgtcacattcacataacataag

SEQ ID NO: 86652 - DNA, 361 bp, Glycine max
cccaaatagctttcttctttttttattattattggggccagatgtctaaaaaattcagtaaaaatttcagttcaaaattcatagtgaccaattcccagtaatttatacaagtttgtatgttcaagctgcgaacaccagcgatttcaacctagaagcttagatagttacaatttgtgtttgcttatgctcaattatcttgaataaaaaaattcaagagagcttaagacttattttgattcacaaatccagccacaactcagcaccacaactcaacttcatcataggcatcatgtaggaaatttagaaaacaaaaaaaaagttcaacaacaagactacttctaggaattgatttaaaacatgc

SEQ ID NO: 86653 - DNA, 331 bp, Glycine max
  unsure (1)..(331): unsure at all n locations
gggccgaaaaaatttttttttatttaatttttttnncccttatattccacccaccctaatacaccaccgcccatttttctaaaaaattcacccacaaacctcaccccaaaactcatactcaccaattcccattaatttatacaagtttctttcttaaacctcccaacaccatccatttcaacctaaaaacttatattgtaacaactttttctcccttattctcaattattctcaataaaaaaattcaacatacctcaacacttattttgattcacaaatccatccacaactcataaccaacaactcaacttccttataaccatcatttctt

SEQ ID NO: 86654 - DNA, 283 bp, Glycine max
  unsure (1)..(283): unsure at all n locations
gccgccgcttttttttttttttttttttttttnnnggaattttttcaaatccatctgaattcataaaggtgtgcatcaacattgtattattccaactaaactaccacaaattcagtcaccacatatttatccacatgctgaaaacactcttccattaaatactctgtctatttagtccacctaacatcaaactataatatatacactatttccccacttctttcaatattaacatccaatttatcataaacttcacatcacaaaacataaacctgaaacttat

SEQ ID NO: 86655 - DNA, 594 bp, Glycine max
  unsure (1)..(594): unsure at all n locations
ggggcggcttttttttttttttttttttttttttttggggttaagtggcaggattaaatttgagtttttgggttttactttatacagaaaaataaaaaaacagaatttttctttttttttcaaataatattaaaaatattttttttataaaagtgaagttattgagagttgtttctttgaaactcaacctctaacataaaaaactcttaaataaaaataataataaatttagtggatagaggttcttgaatttaaaaattcagttaaagaatttttattaaagatgatctgatatgctaaaatatttagatgataaaatatacttaacaaaaattaaaagtgtcaaattgagtttttcttttttttgacagctagtgtcaaattgagttagatagtattatatgtagactagtttgatgtttgcgtaatttgggtgcatgagtcaaatagacagcacaaaagattacaagagtactgtntgaaataagtaattcataaacacatgttgagaaagattaatttatatccaatgtaatttcacattttaatgaatgttttactagataattttattttaaaatctaattttagaat

SEQ ID NO: 86656 - DNA, 518 bp, Glycine max
tcgtaagctgggatcctctagggcggccgcttttttttttttttttttttttttttttttggaaccaaacacaaccttaataattttgtgaaattttacaaggactaagaaagcaaaaaagcttatgccaggttaaaatgtaatttgcgacgaaacacaactaaaaaactatgattttatgatgcacattctaagacaattatctggaatcgtcttagaatgtgaggcgatggcgtttttgtaattaagagggttaaatttattttttacgttggccaatctaaagaatcgtcttagaatatacgttagtgacaaaattgtaaataaactgaaaagagacaacgactagagtgttagagattgtgttgctacttgctagcattccttttattgcaataccaaattgactagagttcatggtgtcatgattgtggaaaatgaaagacaggaagaaaatatgtgaaacacatcacttgaaccaagtcaaataacaaactcaaatcaaaacatggaaaaag

SEQ ID NO: 86657 - DNA, 53 bp, Glycine max
cgcttattgatatgcttaaactcagcgggtagccccgcctgacctgaggtctc

SEQ ID NO: 86658 - DNA, 409 bp, Glycine max
cccttaatgtctagtagatttcagtcaccatattggtatgcccatgatagcaacacttatttcgtgacaaaaccatgttgctcctattttaggaagttttatattttatccctgctgtatttttattctgtatctgttctgcatcttgctattaatactaggtgcgtatattaggaagcaatcccataatcacagggatttgtcccctagaattaactgtccctatttcctaaaatagccaacatgcttgtgtatatataggcacctgatgtacctcataaaaaaacatacaataatattattccttctaaatctgagatttcacatagactggtcatggcctttattagaattgagaatgtatcttgcctaactcaacctaggtggggtactttgtttacttactcta

SEQ ID NO: 86659 - DNA, 174 bp, Glycine max
acgcatctataataaaatgccgccgtcttttaatattattgccaaatcaaaattctccatctcaaaataaattcaaccccgcactacaaactacattatcttaaagcaaacgtttacatctacttgctttatagattaactgcagtgaaaatgaaaaaacccatttctttctta

SEQ ID NO: 86660 - DNA, 383 bp, Glycine max
ggggtcgacaagggggctacccttgctcctatgtatccttaggtgcgatgaggaattcagacctacgtagttctttacaagtgagaatgtttgtgggtcaaattgttttttatgcttttggaaggttcatttttaattaataagaacaaaatgagtcattaaggcgttggacattgaatgatctcaagttactttgatggaaaaaaattcagttatgcattggttttattaactttcaatgtctttaaaagacaactttacagcgctaatgattggttaagattaaacttcacaaaaaaaatgaaatttactgatgatagatggaggaaatgaatatgcacaaaacaacaaggggagccctaaaagtgcatagatcacattca

SEQ ID NO: 86661 - DNA, 456 bp, Glycine max
aataagggggggggtacaactactggtacaaaccctgtattagcaaaaaaaattgcacccatatttcttcaccatcagatcctagtacttgcagctcttgctgaatccttaatcatatactcaatctctctagtgcaatctatcagctcccttctattcttaaaaggaccaaataaacaaataagagtggcaatctgtaatgactttattacatcctatcatgtacaaatgctccatcctgtggacttgtatgctcaacacaaagttatagttctgcaattccacaatgtttcatcgcaattctcttatcgtgtggatgcttgttttcagcctaaaccacttgagttgtagctctgatggatcaactctgagattcggaattctgatgatcatcttgagactttgaattcaaatgatcattttgagactgagagttcaaacgctggtaatttttta

SEQ ID NO: 86662 - DNA, 415 bp, Glycine max
  unsure (1)..(415): unsure at all n locations
ggccatggaagaaccttgaaattccgacgtagtttcatggttcgggattcccttggacggctctttaacagcacgggaaaacccaaaggattccctcaccatctcactgctctaactaacaactncatcaaaaacaaatgaaatgtaaaacgcatatagtaaccattcactcactcatcattcctgagatcccacagaaaaactaactcatcattcctgagatctcacagaaagactaacttataaataacaaaacttataatattgtagaaatctagcctcatattcctacgtagttctgcaaaacttaggcacaaggtatattcaggggctcctcaatccaaccagcaaactcatcagcaccaaaatcaccaaaatcaaaatcaggaagctcagtaggctcattgtcatcaaa

SEQ ID NO: 86663 - DNA, 224 bp, Glycine max
  unsure (1)..(224): unsure at all n locations
cctcataaatcaacaaaaacctncaaacaacgggcgcgatttataaaaacacatgcccccccacaactaatttaacaacactcccaaaacccaaacaaaccctcaccaacttaatgctctaactaacaaccccctcaaaaacaaaataaatgttaaccgcctcaaataaccatccactcactaatcaatacttcaaaccacccgaaaaacaaactaatcattcc

SEQ ID NO: 86664 - DNA, 493 bp, Glycine max
gggatgaagcaatgaactttttggactttggggtgaagcaatctcaagtaaggaatctagatttcactggcttcaaaaaattgatctgcaagcttgttgttatgtatccgaacttggtgtatgctcattctctcctcccacttgagtttcaaatttctcaacaatcatatcaaaattctacttcggttataattgcattaatttgtgatgtagctaatagtacattctttttcaagcatgtgctagtggtgactaatttcctttttacaatcctggcttcttagttccaattttctggatgcatatcttgtatcttcattgatacatttgcaatttttgctgatctttgtgatgtgtttatagaattttttcaagtttctatccattttatccttttgttgtagtattgttattggaactgagggctatcattgaaaagggtagtccaatgcatgattctcccaccattgtgcatagtgtttcaagaaacaca

SEQ ID NO: 86665 - DNA, 288 bp, Glycine max
ttaattcttagctcatctttttctcttccacgaccactaatgtggagtttattagaaacacatcaaaaagaaggttacaaacctttcaatttaatatgaaacaactctcaaagatatgattccatcttccagggcacagcaaaactttttcctacagggatatttaaacccttcaaccctaccatcaatattttttcttcatctccctaccaacacaaaaatttatgttcagatgtgctaactaccgcaccttagatactcatcagtggggctccatctatctcaaaa

SEQ ID NO: 86666 - DNA, 393 bp, Glycine max
  unsure (1)..(393): unsure at all n locations
ccccccccnaccgcagggctccttatcattcttcgtccccccaccccaccattttttaaaattcaattttttttaccaaatttcccaaccccctctctttttattttttcactacctattatatgcaataaactttttttttttcatacaatttttcccttcaaaatatttacccaaccatttccttttttcaacaaatggtaaaaaacattattttttttattttttaaaatttttcttttttcacacaaacaaaaaagaataggaatttcacctttatgaaaaaacaaaaaatcccccctaaagtaccttttccaaattttaattgattttgtttcaaattatctatctatataaatatctattttatgtttagtatccaatccaatttta

SEQ ID NO: 86667 - DNA, 226 bp, Glycine max
  unsure (1)..(226): unsure at all n locations
ntnnnttnttttttgcttatttacaaagcnaaacacccccccaaaagctgtttaattaaacatattcctcaaaatttaaaaaaaaatatttcaaccaaatacaaatttacccaacccccattttataacaactattccccctcccaaaaacccttctttaacacctttttccacattcattttttttcccccagcttttccatctcatcctccataatcctttttt

SEQ ID NO: 86668 - DNA, 469 bp, Glycine max
  unsure (1)..(469): unsure at all n locations
aaaaaatttaatggggaaaaaaaanaaaaaataaaaaaatgnaaaatgaaaaaaatataaaaattttaattaaaaaaaatttataataaaaaataaaaaaaaaaaatataaaaaattttaatttaaaaatataaaaattaaaatttaaaaaaaaaaaattgaaaaaaaaataaaaatttaaatttataaaaaataaataataaaattaattaaatattttaaatttaaaaaatttaaaaataaaaaaaatatattaaaaattatataaaaaaaaaaaaaataaaaattaataaaaaaaataaanaaaaaaaataaaaaaaatatataaaaaaatattaataaaaaatgataaataatattaaaaaaatatatttaatatattaaaaaaaatattttaattatataaatataattatatatataaataaattaattataattaaaaatattaatataaaaaaatattata

SEQ ID NO: 86669 - DNA, 454 bp, Glycine max
  unsure (1)..(454): unsure at all n locations
aacggnntaatcaggggtgcgactatgtcaccaaagggcagaacgcaaatttgaattcaagcanctttcaaagattcaacatnaacatgtgagaggcgagcttaatctaaaagcctccgttagtatggaaaaggaagagcttaattctagctcatctctccttccacgacactaatgggatttatagaaaacataaaagaaggttacaaagtttcaattaagatgaaacaatctcaaagttatgattccatcttccaggtcacagcaaaacttttacctacagggatattcaaacccttcaaccctaccatcaatattttctctccatctccctaccaatacaagtatttatgttcagttgtgctaacttgcgcatttgagatactcattggtggttctccatctatctcaattttaggtagtgctccatttcggttcaatcccaacacattta

SEQ ID NO: 86670 - DNA, 95 bp, Glycine max
cgcttaaactcaccaggtagccccccctgacctgaggtctccccttttgtcgttttctctcaaccatacccttttttcatcttctctcaaccgta

SEQ ID NO: 86671 - DNA, 81 bp, Glycine max
aaaagatagggtttgactataatgtcggagatatacacctttttttgtccccttctcacaaccacacaaacccatttatca

SEQ ID NO: 86672 - DNA, 299 bp, Glycine max
  unsure (1)..(299): unsure at all n locations
accacaaaaaaannnaacaagagtgttagttttttttttccaaaataccatttaaaacaaatttccccaactcggacatgaaataacacaccgcatggaaaaactattttggttccctagaacacatattttacttctttttccacaaacatctttgtttgcgacaatgttccaacatataatccataatttatttgtttgatcctcagggaataaaatcttcgactcattacctggaggaatatactttcattccttctctaaaaaaaaataccacccacacgcttcaaaaaattata

SEQ ID NO: 86673 - DNA, 246 bp, Glycine max
ggattgggttgaaataaactttcctttgccaggttccttgttgcaaatttaacaaatcattttgaaagactgaaactgttgttgcacaatacttaaacaactaatgtaacaacttgttgttttcatttggctgttgctcttattttgaagttaagaatattaataaattacaatttttaatttacagttaccatatttgatctaccttaccttgttttgtttttgaattttatttacttgcaactt

SEQ ID NO: 86674 - DNA, 413 bp, Glycine max
atgatatgtgaattacttgcttaaaaagtcattcttaaagtttttcaaaaatttattatgttatatatatttattttcatataagagtttttagatataaagtattttgaccctctttcaaatcctttcaccctaagaattcattcaacacttaattctgctaaaatgctctctggtacttgattaccacaatgtgtaatcgattatagcaaggtaggctaagtgtaatcaattaccaaaaagatgtaatcgattacaacgcgtccctggtgcttataaattcaaatttcagaattcatgaaattgcaacttcgtctctctcgtgaaacccttattcccaaattttctttctgccataacttactcatttcttatccaaatcacattccacaaagcccaaaaatcatcttttt

SEQ ID NO: 86675 - DNA, 343 bp, Glycine max
gggggaccttttttctaaataaattaattacaaaggtttcagtgttttgtttgcaataatagcattttgaaccaaattgaccatatcatgtaaatgaattcatatgtaacaagaagtacatatattagtaatatataatatatatatacctgaaattccacaaaacctttctatctggttcatgcagtagaagttgaagttctctactggttggttccataaggggttgaaattccagaaactctgaagagtgaagacatgacattcagtctcactccaagaacaagaagagaagatattcaccaaattgaagtaaagagaaaataaatattccaacaaagag

SEQ ID NO: 86676 - DNA, 163 bp, Glycine max
cttccaaaacatacgtcattagttgcaccttagagtatttctaaatctttctaggattgataaaagtctatttagaattaagacccaataatatcatttgtcatttgactaaatcacagaaaatacaagtttaatttgtcttgatataaaaatttctacaaag

SEQ ID NO: 86677 - DNA, 122 bp, Glycine max
  unsure (1)..(122): unsure at all n locations
cgtacgtaagcatggatcctatgagagcggctcgcttnttttttttttttttttttttnntgttacctccgctaattgatatgcttaaactcagcggggagccccacctgacctgaggtctc

SEQ ID NO: 86678 - DNA, 85 bp, Glycine max
gggggtggttgagaaagtggcgaatgacaattcaagaacaacatgtgaataatggagaccaacaacaacctcaacctcattgtcc

SEQ ID NO: 86679 - DNA, 157 bp, Glycine max
aggcgttcgaacagttgagagaggacgactgatgggtacggtcatcaatgacattgtatgtaggacatgggaataaagtcgctctatgcacccttaggggtccttttagctgatctacacattttaatgtggatgatgaaaccatcgacggtcgcat

SEQ ID NO: 86680 - DNA, 191 bp, Glycine max
aaatgggggggtgtgtttttaaggtggccaacgagacacaaggaacggcgtgtctatagtggagggcgacgtcaccctcgaccaaatcttccctaagcctaagcaaaaagtctgggaggcctagttcaaggacggacctaccaaagattctggtgcttatgtctaacgtggaaggcaccctgaggcctatt

SEQ ID NO: 86681 - DNA, 348 bp, Glycine max
ggttctagtgtgtgattgtttgttgttgtaactcgttcttcttcttttgttgttctgtgtttgtgtttgttttttctctcacctgaaaatgtcttgctgcggtggtaactgtggttgcggaagctcctgcaagtgcggcaacggctgcggaggctgcaagatgtacccagacttgagctacactgagtcaaccaccaccgagaccttggtcatgggagtggcacctgttaaagctcaatttgagggtgctgaaatgggtgtgcccgctgagaacgatggctgcaaatgtggaccaaactgctcctgcaacccctgcacttgcaagtgaggtgttgggagagcaagctt

SEQ ID NO: 86682 - DNA, 380 bp, Glycine max
gggttctagtgtgtgattgtttgttgttgtaactcgttcttcttcttttgttgttctgtgtttgtgtttgttttttctctcacctgaaaatgtcttgctgcggtggtaactgtggttgcggaagctcctgcaagtgcggcaacggctgcggaggctgcaagatgtacccagacttgagctacactgagtcaaccaccaccgagaccttggtcatgggagtggcacctgttaaggctcaatttgagggtgctgaaatgggtgtgcccgctgagaacgatggctgcaaatgtggaccaaactgctcctgcaacccctgcacttgcaagtgaggtgttgggagagcaagcttcaagcagagatagccctttattaggaaatat

SEQ ID NO: 86683 - DNA, 75 bp, Glycine max
gacaacagggggggttaacttacggcaggcggggataacccgcggagggggagcataaaaaaaagcgggaccacc

SEQ ID NO: 86684 - DNA, 407 bp, Glycine max
  unsure (1)..(407): unsure at all n locations
cgagaagacgacagagggggtgtgattgtttgttgttgtaactcgttcttcttcttttgttgttctgtgtttgtgtttgttttttctctcacctgaaaatgtcttgctgcggtggtaactgtggttgcggaagctcctgcaagtgcggcaacggctgcggaggctgcaagatgtacccagacttgagctacactgagtcaaccaccaccgagaccttggtcatgggagtggcacctgttaaggctcaatttgagggtgctgaaatgggtgtgcccgctgagaacgatggctgcaaatgtggaccaaactgctcctgcaacccctgcacttgcaagtgaggtgttgggagagcaagcttcaagcagagatagcccttaattaggaataatgatanactattaatgtgt

SEQ ID NO: 86685 - DNA, 242 bp, Glycine max
tgtttttggtagatagatatatactgagagtcgagtagcttatattatcatatcttgaactatatcgtgggatcaaaagagaatttatatatataattaggtcaaagccattagtaagaatgggtatgatagctacggctacagagggtgataaatagaaactctataaaactgactgggagtcccggattactctcattcaataaatcgacttgaccaaacaagaagttaacatatatcat

SEQ ID NO: 86686 - DNA, 365 bp, Glycine max
ggaactctttccataaataggtcatcataggttggatgagacctgttttatattcggttagaccgaatacctatcgtatgtatatcttgtagtcagttattttttatattcttttttctatttgttttccattttttattttttgtttgtgtatcttaatttaattttcttttataatcttattttatttattcttttttatttaacctttcttttttcttttattatttttcttcatttatttttttctattcttttttacttttttctttatttttcttttctttctccttttatatcttatcttttgccttatattattgtgttttacttattttcttatattctttctttttctttttatt

SEQ ID NO: 86687 - DNA, 372 bp, Glycine max
taaggaaattattttgtattccaatcacaattgtactataaccatgaaagtttcttacaatatataacattacaattcatattttagtaaaatgtcattgtttcaatttcaaaactttatctttgtatctcacatcttatgggagttaggccattcaaggggttgatggcgtaatccatttatacatagttgggataattttcctaaattggtttgtatgttttggaaggtcaagtgctctatcaacttcaaagttgaaaagtcaaatattgaatgactactaatggatggtaatgactactaagtggtggtaatggctactaaatgcattcttgatggtaaaatgtctatatataacacatgtgtttggtt

SEQ ID NO: 86688 - DNA, 153 bp, Glycine max
tggaccaacccttccgtccggttgcaaaaggccaccaaagggggtttggctttttaattaagtaattatttcatgccaaggggtttcgcctggataatagtccataatatccaagaatccgataaaaggtgcatcaagaagtgcaatcagaaa

SEQ ID NO: 86689 - DNA, 90 bp, Glycine max
acagaagaacgccacgggaatggacaacccgagaaagaagacaattagaaggaagaaacaccaagtggctccaaactccaaatagatgag

SEQ ID NO: 86690 - DNA, 399 bp, Glycine max
caaatcaacccatatcctcgaatttgttgcatgattaaattgtgcttgaatttattttcttgttcttgtgagccatgcatgattattaatctaatagggaaaaaagaaaaaaaaatgaccgtttatgggtccacaagatcaacataatgaaatgggatacgtgacagtttgtctaactctgagagagtaaaaatgacggtaggtttagcaaagggtaccttgttaagcttcttgatcaaggttgatgccatgtgtcgttcgtttttaaatttttgtttatttgtatggtaagtttcattaataatttagttttttattttacttttttttagttactattattgcttttaatgcttatattattttttttataaaatcataaacatttttttttttttt

SEQ ID NO: 86691 - DNA, 129 bp, Glycine max
ccacccgtcagaagagaaaagaccagtaattggtacgtaaatgtctatatcgaaaggggagcccagcatcccatcctgtggctactatccttctatctaagtgcgactgcttactccaatacaatttct

SEQ ID NO: 86692 - DNA, 166 bp, Glycine max
gaacgatgtaaatttccaattctttctcgtgtgaaaattttatatattatatttagttaaaaaattggcattaattattatcgggccatataaattgaggtccttttttgtatttttgattaacattatttacttgtaacaattctaaattcactgatttttttta

SEQ ID NO: 86693 - DNA, 215 bp, Glycine max
gacagcactgtactctttgcaacacaacatataatgtcttcccagagagcgcgttttattaaacgctcttctatgaaaacccccatatattatgttttttcattttaaattacgcttcttcgatctatagatcttcgagttgaaaaagagtgagtgcattttaattcacattcgccaggcctttattcatgttggaaacgcctgcttggagcttt

SEQ ID NO: 86694 - DNA, 290 bp, Glycine max
  unsure (1)..(290): unsure at all n locations
gcttctngcaccaaaactgcatattttaaggggggctctctacctgttgattcttatccatactcattctacaaacacaaaactatcaaaagattctataaacacaagggaaaaaataaatcgttgcacaattaacaattcacttataaaaacctcacacttctcttcaaatattctacactaaaacctaccctgctttaccacgattcaaattaacatacttcttaatcacacacacagatattaatttatccccaaccatccatatttttatcactcccattcagatt

SEQ ID NO: 86695 - DNA, 218 bp, Glycine max
ttttttttttttagcttaatgcaacacctaactcccttcctacctgaggtttttgttctttttacaccaagatccaatcccaatactatctcatttcaaccgaattccacattccctgatctctgtagaacaaagaataataataggttacttatcttagcctatgccacaaaatgttatgtgcaatgccattgcacacaaatgctgacttttactac

SEQ ID NO: 86696 - DNA, 527 bp, Glycine max
gcttctctctctaaggagacccttccttccctacccataatgttaatgcaacctgtctgttgccttcatcgaattcaatgcttcttaagacctctggccatcgatttcttagggttgtgtagcattaagaaatgtaagcaaatcacacattcaacaacaacctagtcccatggatcaagaccaaccaacttaatcactcacttatttttatcaacatccttcaaaagagcttctagaaaacaaacattatttttcttgagagcaagcatgatactagtcttgcaaagttgtctgaagaggcagagaactctcaacttctttggcagcattggtgtccctctctgcaacagccttggacattccgaacatctgaaaccaaccaaacaccgcactacatcggttaacaaagggatgcacacaaattgtcctaacaagaaagtttaggtacatcactaaataaccttctgaactgttttcttgaagcaagtcttatgttcatccatagaagcattaataaactcgtcaat

SEQ ID NO: 86697 - DNA, 437 bp, Glycine max
atacatttttttggcttttctccccaaaaaaacccttccttccctagccataattttaacacaacctgtcttataccttcatccaattcaacactccttaaaacctctgaccatttatttcataacgttgcataacattaataaatgtaaacaaatcacaccttctacaacaacctagtcccattcttcaaaaccaaccaacttaaacactcacttctttttctcaaccccctttaaaaaaccttctaaaaaaccaaccttatttttattgatcgccagccttacacttgtctttcaaagccgtctgaataagcagaatactctcaacttctttttcaacatacatgttcctctctccaacacccttggacattcctcacattttaaaccaaccaaacaccgtactacatctattaacaaaaggattcccacaaatt

SEQ ID NO: 86698 - DNA, 419 bp, Glycine max
ggcgccagaaattgtaatatttttagcagggagggattattaagattaaccggcctttcttcatacgcgaccgaccacctaccattcattaaaaaaaaaaaagaggcagccatgatcttttcacccccctcataagtagaaaacacttgttcttcttgatgggcgggacaagaccacctttttctaaggaggttggttgaacacaaaacaccacagtggaggaaaaccaccacagaaataatacatcagttgttagctgcaccacaatagttgatcattattcctaattaagggcggcttttgctggaagaatgttgttccaacaccacatttgttagtacagcggttgctggagcagcttggtgcacattatgagccatcattgttcgcgggcgcccccctttttgcaccctcaaaaa

SEQ ID NO: 86699 - DNA, 482 bp, Glycine max
ggctgggaaagaatcttactctctcgatgaggggtcggttctgacttttccaatgaataccagagatcttcttcaaaaagaacttaacttctaccccggctaatttcatccaagtgggaaagaaagaactgttacagaaggaggacgttaatcattaaccgctgctagtgcttgagaataagctgcaatctaactcgagcaattcaatttctttttcatgtcaacatgtccgccttcaaaataaaatgaagtgaatctacgagcggtagggataatatagccaccagcagtagatagagagacaaggtttacgttagctaagctggcatcagtcaagggatttaccacaaaaagcactatgcaagctaggagggattcacctttttggcctaaggcatggggttcagcaccgttccttagtaactctctttgctttcttactgtcccgttgttgcaataaccggtgctttaggaagagtact

SEQ ID NO: 86700 - DNA, 389 bp, Glycine max
  unsure (1)..(389): unsure at all n locations
ccctcgagagcgccctcttttnttttttttttttttttttttttttgccccaaaaataataataccctttccccacgtgcgttatttataaaaagccccctctctttatattcaaccaaccacccccccttaaaaaaaaaaaaaaaaaaagctccccccatctttttacacccaccaaaagttccaaaaaccactttttccttcaaaactggacaacaccacccctttctatcaatgttttttcttcacaaaaaaacacaaagtaccacaaaaaaccctcccaaaataaaaaattttttttcttcccaacaataatttttcattatttccccaaaaaagcgaccattctctaaaaattcttcttctcacaccacacttttttccccatc

SEQ ID NO: 86701 - DNA, 564 bp, Glycine max
  unsure (1)..(564): unsure at all n locations
agatatcccttaataaaaaatcaatgactagggtttcgagatgttgaaatttatttaaagagttgatctctttgaagaatcgaatcatgattgtatgtttaagacacaagattatctataataattaggttgtacctttttgatacacagtattaaaatatatgtatgatatttttagtttttttagaatttacaagttttccttgtaatgactatgaatgaaatattgagagaagctcctccatataatatatctccttccttttacaactataacccatacacaaatatagcatataagtggtgttcgagctaatggttcaagtcccatcagtgatacaagagctcataatttcggagacctagtgatgatcaaagaagagtagaaagataaagccgaagaaaccaagcttcaaaagaagaagcaaagccaaatgcctatggatgttcagtcatggaggagttacttctgcacctttgaatatgaagcgatgcctgtctcaataactgccctttcccaattcttnccatcagcatgcctgatttcaacgtgagtcaacgttc

SEQ ID NO: 86702 - DNA, 270 bp, Glycine max
atattcttctcttgttttcccaatttttcaaatgagtttttttcaagcaaaacccatttattaagttcctccttcttattaaaaaaacttttttttaacccccccaatcaaaaatcttaaaaaaaaaaaccattctaatatccccaccctttcttaacatattaatcctatggcaaaacacataaattgaattaggctttttctataaacctatcccatcaacgtataaataacttttaagactgttttaatctacctcctaaaaattat

SEQ ID NO: 86703 - DNA, 504 bp, Glycine max
gggatcacggatgttcctaatttattaaattagagacttatcttatttacaattaataaaaatcttaagagaatcacacattattagaaaatacactttcaacatcagttatttagaacattttacatcggttctaaaattgatattgaaagtaacgatgttgaatgcatgaatgttaacatcggttttggagaaccgatgttaacatacatatgacaacatcggttctctaaatatccgatattaaacacaatgagcatcagcaaaaaaaaatgtacgcatgatgaacgttgacatcggttttccagtaaaactgaagttaatatgttagtttaacattggttttctaaaaaatcgatgtcaacgttgatgatgcatacaattatttggtgtagttctttgtgtataacattggttaattataaataaccgatgttaatattcaaatattcacatcgattatttataattaactgatgttaatgtacaataagtgacatcggt

SEQ ID NO: 86704 - DNA, 299 bp, Glycine max
cctggggggcccccctgggtaaaaaatatatttaaaccaaacggtgcttgtttaccctaaaaagggggccccgaccccttttttaaaaaaaattttaggtaaaccccgggcccaaaaatcccggggaaatcccttttaaccaaaaggtgcccactcatagttaaaaaccctttgaggcccaacttttttttttccaagaatttttttccccggctaagaatatttaagacaaaggggggaaaaaaccacaaactttttaagcaaccccttaggttaaaaaaaaaaatgtcaaaaaataa

SEQ ID NO: 86705 - DNA, 283 bp, Glycine max
ggggggggatgctcatttttaaagttttttttccagcttggaaaggttctttttttgcccccccctttaaaaaaattaaaaatttaaatttaatttaattcccgggccgggttttccccctaaggcccggggaggaaaatttaaggaaattggggttttttgataaaaccaaatcctccttacattacaagatttttaaaacctttcttttcctaccttttaaaagttcggttttttttttttcaaggaacggttaatggtttttttcatttccgaggggggc

SEQ ID NO: 86706 - DNA, 553 bp, Glycine max
aggggcttagaaattcctattccaaatggcatgagattcaatgatgaaattggccttgatgaccaggctcacgtgttctctgtgatgttaatgttgcttttatggtatttgaaggccaatttagactctccattagcataaatttgtgctgaataagatgttgaacttgtgataaaaaatttgcgtcctatgcccatagacgaaagctgttttgtgggattagtcattgcctgttagatctcatacctggtgtcttctgcatcattttaagatttctaaatagtgacaatgctgtaaagatattgtggtattgaactctgttgtgagcttgaatgatttggtcagttataggtctgaataaaccaaccccaagtgtttagccgcttcattttcaaaatattcatttaaggtagcctccacagctccaccctggaaaaaccttggatatcatgttaacagatcagttaaattacaatttttttattctcttcatccaatcacatgttataatttctgataatatgtatctgctcattacataatcaacagaaca

SEQ ID NO: 86707 - DNA, 149 bp, Glycine max
  unsure (1)..(149): unsure at all n locations
agnggctcagaaattcctataacaaatggcttgagattcaattaataaattggcctttattacgaagctcacctttactctaagatgttactgcttctaaaagggaatgggaaaaccaatttaaacccttcattacctttaatttgggc

SEQ ID NO: 86708 - DNA, 139 bp, Glycine max
agcctctaaaaaattcccatacccaatccccatgcattttatttataaatatggctccatcaccacgctcaccatatcactataaaacccacttttcgtccatattcattacaaccctataaagacccttcattaacaa

SEQ ID NO: 86709 - DNA, 163 bp, Glycine max
aagcaccgacaacaaagattcaaacttattagaagtcatttgaatcacgacctccaatctaaaacactttctttacaaggaattatttacaaatttttttatctaacaaggtgttaaaatttcttctaaaaggtctttagaaaaaaactgaaagaagactgct

SEQ ID NO: 86710 - DNA, 520 bp, Glycine max
aaagaaaataaaaaacatcatttggcttattttcatgttcttcacaaaaaaaaggaaaatattccatttttttataataaaaacatcaatttaaaacgatctcacgctcacaatttctgaactcactaattgctctgattccattgcatttaaaattaacatttcatcttaacttaaggagcgaaagcatacatgatgtcaaagtaaaacagaaattcagcagttaaattcaatttggagaatttcagatggatagtatgcttcggcagttacaattctggctaatggcctaaattatatatatataaaaaaaggcttatctaaataagtgaattccaattgaatgggtacaaacaattgcaccacatttcaattcatacaccattgaattatcccttgattctgcatattatatacttgcacaattgactcaagaaatattatcactttgcttctgcttcttggtcctagaactctcctcctctaaggatttcaatttgttttttatagcggcaatttt

SEQ ID NO: 86711 - DNA, 543 bp, Glycine max
  unsure (1)..(543): unsure at all n locations
ggcacagctttcaaataaacaattttatttggatctgtctgatggatatacactatttacagaaacatacataaaattaaaatatttcctactttaagaggagatggagataatagatgtcaaactatctcaacttttgttagaggctcgaaagggactggtaatcaatgaaacacttgaaaagtgaggcaaaaactccttctgactagtttgttttatcatttcaggacagttatcaacttgcatgggagttggagaatgcatgggaacaaagtattaaatcagggagtccaattgacattgattcttccctaaggaggtaatataccattttgcatttatgcaaatgcaaatgatgatattattgacttgattcgaaaagagagatcgtttcttgcatcaaccatggctcaatagttaatgtttcattattggtttaaatacatttttgtttcttggaatttagtgatcttttgtttttcgttcttgtaaaaaaaaaaaaaaanattcagtcattggaaaatatattatttttttggtttt

SEQ ID NO: 86712 - DNA, 538 bp, Glycine max
  unsure (1)..(538): unsure at all n locations
aaagcaacgacgacgatgatttttacttataaaaagtcatttgtatcacgactttcaatctagaacaatatctttacaaggtattattaagaaaatattttatctaacaaggtgttaagatatctttaaaaaggtatttagaaaaaaatggaatgaattttgctatttgtatttttttattcataagaataaaaaataatatgagaaatttataataatttacccattctattcaatcaaaattatatccttgacatgttgctatttgttttactaaagaaattactagatcaatgaaacaagcatgttaataactaattattttgtgtaacaactaatgtttttgcaacaaaaacaaaaataaccattatttggtataccgtctaaaagaaattatggtatacagtacattttgtacatacatcagttggacggcgcgcgaatagcgagctacccgccacctaaacaaattaacgacctataattaaaaacgaaaaaaaaaaatgcgatgcaattattgaaaanatgtaatgaatcg

SEQ ID NO: 86713 - DNA, 455 bp, Glycine max
aggtaattatcatcacgccaatttactttctcctggggtttttgagataaaaaaatgtgacgtaaagttgacttaagtaatataatggaaagcaattatatgttttttgtaattacttttttcggcatatatatatataaaggcatggctttatcgtacatgaaggctctgcttattccggacatattgagatccagaattcataaaatcaaattcttattgaaaactaaaaagtggattcagaaggatctcaaaatgtttacaactatttacatctgcaatctacagtcaaattgaacataataaaataaaaatttaattagttcgactactttaattactactcttttaatttaggatgaaatatgtgatggaggcttaacttggatattaaagactagaatgagacctttagcaaagctttcggaaggaaatttgctagatatttggataga

SEQ ID NO: 86714 - DNA, 403 bp, Glycine max
  unsure (1)..(403): unsure at all n locations
ggggaattcaggcagtaacgatttatgcaaatgggaaaacatgtctcatgtgagacttaatttataaatcctagtgaaatttcaacaatcaactatgttaataacttataattacatcattaaaataacattaaatttgtagtacatcattaaatttccatgtctcatgtaagtgcatcattaaaattaagatttccaaacatcctaattttaagactacaaaaagattttccaaacatcctaacaatcagctttgaagctttacccctaaacctttatttcatctattgaaattccaaagntgaatatagaagttcaaaattagtcatggttgatgctagagtcagagttggaaaccctagaacaacatgagaacataatgcttttgttaatattgaatgac

SEQ ID NO: 86715 - DNA, 329 bp, Glycine max
cttcccgtgttattcaagccgtaacgatatattcaaagagcaattcttctctcatgtgaaacttaatttatacatcctaataaaatttcaacaatcaactatgttaataacttataatcacatcatctaaatatcattaaatttgcccctcataattaaacttccatttctcatgtaagctcatcattaaaacaaatatttcccatcatactaattccaatacttctaaaatattttgcaaacatcctaacaatcaactttatatctttacccctaaacctttttttcatctattgaaattccaaagttaaatttataaaaacaaaatt

SEQ ID NO: 86716 - DNA, 196 bp, Glycine max
ggcctataaaaagtttgactatctatctaaaggcgtaaatctatcatgatatggaaacatcaccaggagacgcatgtcactttaaaacctattttttgtccaatattattacaacatgaccctgttccagttcccctcactaatactgtaagctggcaaacgattcacaaaaattttgggctaaggctcttaaaaa

SEQ ID NO: 86717 - DNA, 477 bp, Glycine max
actaaaaaagatatttttcgattaacgtggttacggcacgaccgaacggtcgaatttcattttaacagaaattaacatatattacaattcaaatgatcggtggaaatttattttattttttgattaggcgagaaaatgacttaaataaattactaaagcacgtcaaaagggggtacggaaagtaaatgaaatgaaaataaaagtatgcgaaacaaatggggaccaccaagggtacatagaatgaattaaaaagttcgatttcgggaacttaccggttgaagaccgaagaacgacgaataacgaacgaaagatggcagaaaatcttcatggaatcacccacggaaacgtttcggacgcgttacggaagcgcctcggcatggattttcttcccggaaacgatttttttcactaatttcaagtgatcctcagatacccggagggttgaacgtttttcttcttccctcctccccctattta

SEQ ID NO: 86718 - DNA, 380 bp, Glycine max
gggcataaaaaaattctatcatacatatatatttggttcctttccctctttaaggattaaataatatataggacagctattataagcaagatctcttcattcgtcctcggtaaacgcctaagttcttaaatgtgtacatattcaagcgttcatcttcctccacaaacacaaaatgagtggctgatctctcggtcatgtcgttgctcgtactcatcatattcatccatttctttttcagcttcttcagttttgccataatcgaggccattgaccttcactacctaaatcacagttgttcaagtaacaaaaccttcaccccaatcagcttctacaattccaacctccaaacccttctcacatccctatcttcccatgccacc

SEQ ID NO: 86719 - DNA, 456 bp, Glycine max
ggctcaaactcttcttcttcttctccgccgtgcgggttcaacttcgccatgagcttgagcttcttcttctcgcgcctcctttcgtcctcgtcataagacagcttggataccccatgagaggagcgccatcggaggaaagcatcacgcctttcgtcacatggggtttcagtgaccccaacacgagggtattcaaggagttcgcaaggcatgtgatgcggcacaaaggaaggacaaagagcttagaggaagcagtaatgggatcattggcggctatcataagtggttgagggtccgaacacaagggttggattggctcccgaagctaaggggtgcgagaaaggaagaggctaaggggtccagacagaagggtttcagctaactgcacatggagacttgccgtacatcgagttccggtgtcatggcaagcccgcacatagctacttgatagaagaagag

SEQ ID NO: 86720 - DNA, 306 bp, Glycine max
  unsure (1)..(306): unsure at all n locations
ccccaatnnnnnggnnnnnnaaaagaactttttatatattagagaaaccccctccaaatccttacttttaagttaaaaaaaaaagggaaagaataatgccacacatcaacaaaagatatattttttccggctttaaaagcacatttacaaactcttatttatcccacttacttacccttaacaaacaacttcaagcaagggaaatcctaatgttaaaacctcttctccatttaccaccataccttaaaaacacaatttaaggttaactttcacctttttaagaattatgaaacaaaaaatttctta

SEQ ID NO: 86721 - DNA, 467 bp, Glycine max
gggatcacttagtaattctagtctcttagtagggcgcgacacattttctcagttttttcaactgaatataagttgcaatttggaaatctttgaataatcaaagaaggtatcaactgtgaacatggttgattggctcactaagtcagcttatgttaaggaactataaagttatttaacggtgccacttctacaagtgtacaagtgttattcacatctacaagtgtacaagtgttattcacaatgtccttgttgtgttgtatgtttcttcaggttctgtgggtaatgttgggtcttgaaccctttgcttggaaaaaaagaaggaaaaaagatcaaattaacatggtattacatagtaggggacaaggaggaaaaatagtattttctacatcttttgtcacagaaatcactcacatgctgctactgtctacttcttgcgactaagcgatatcaactttcacactcacatg

SEQ ID NO: 86722 - DNA, 370 bp, Glycine max
  unsure (1)..(370): unsure at all n locations
gcaaaaacccaaacactttgaatcanaattgaagagccttttctcaaacttaattaacattcttacacctcttttaattttaaaaacaaacacatttacatacattttttcaatttgcaaatataatctcacacaaactaattctaattcaaccttttttcctatccaatcattcctgtaaccatttactgccaaccatatacaacaaatgcaatccctacgaccttacattatttcttagactggttttaacagctttagttaataagatcacacattattacaaccaaagacccaaacattacttttatatcaacaaaattttttcttccataagaaagaaatgtttttatgaatatgacaccttttt

SEQ ID NO: 86723 - DNA, 65 bp, Glycine max
  unsure (1)..(65): unsure at all n locations
cggccgcttnnnttttttttttttttttttttttttgggttaacaaattcttcaatttatttaca

SEQ ID NO: 86724 - DNA, 496 bp, Glycine max
gggagtatagacatgtgaacaaacccaagtagtgggtggtgcccaacattgttaaggttggaatgcttgttttcaatttataagttggaaacagtttcagttctatttttcagattcacggaataaaaagagtggatacaagaatattattccttaaatgtataaaacagtagagctttataacaagattttcaacaattggtttctatttcataattttcaatgtcgtataatatttaaacatcacaaacaatattaaaataggtgtcgtagcaagtcaatcatcccatatgtagtttccaatgtctgcatctattttgtacaaaattctgagttgctcgctctccactctgtaacatgctcgaatacctgaaaactccaatgtcaaaaatgacaattaaggttatgaatatttttggaaaactacagcttagtttcatgtaatacgatgtggacaaaactttaccagtcatacgtaaatgttgctcaatacaac

SEQ ID NO: 86725 - DNA, 300 bp, Glycine max
ggagcagaaaagaatttagcttttatttccacggacaccagcaaactgattaattctaacaaaatataacttgggaggccaatggtttttacccttttcccttcttgcttatacactccccacaaacacaaaggatgttcggtgtaaagcatttagttaaataatgaaagtgtatatcactactcatttaaaagcaatttaaacatcacaagtgatatggtggataatcatttaaatagatttaaaataaactcttatatgatattaaaatatgaatttaaatttaactcaatttcaaaa

SEQ ID NO: 86726 - DNA, 353 bp, Glycine max
  unsure (1)..(353): unsure at all n locations
aagctnagatcctctagagcgcccgcttnttttttttttttttttttttttttngtgtttcacaaacatattaacctcctattttgagacgcttcacaaaacttgttttttctaccaaatcttactttcaatttctaaatcttataaccatcaaacattctttctaatactcacattataaacacactcactacaccaatttatttttataaactataaaaacattttaccttcccacttatacaaaaacacaagtgtcatttacatttacatgaatactcgtcttatatacaaactccaaatacactttaatatttctttaagttctcaatctaattttcactttttaaccc

SEQ ID NO: 86727 - DNA, 512 bp, Glycine max
ggggtcaaatgatacatacctctgacattatcggccaaggaactggtcctacaccaattgaatatgctgctatgtagatctgatcacaataagattcaaaaaatggaagaatttcaagtttaagtagaatttgagagaagggggatggtttttgtttcagtaaacaattgaacctaaaacttcatgtaaactactcaaatttcctccctaatgggtagggggatgttgtagaacaaaactcaccaacacaccagcaactgcaaatatcggtgcgcactcaagcattaagctttggtcctgatccatcaagtcatagagacgaattttagaataaagacacacacatacacacaatttatggagaaaatattgtacattttatactaaaagacttttttttttttaaagattattttataccaaagacttgccttgagaaagaaagcaatagcggcaataaagcaacctaagaatgtcccagttgcggaaacctgcatgtgtacaagagtttt

SEQ ID NO: 86728 - DNA, 413 bp, Glycine max
aggggtcgacaagagtgtgactcttgctcctacggatcctcaattacgatgaggaactcagaactacgtagttttttaaagaaagaaagttatgtgtagagttgattttagacttttgaaaggttcattttaaccgttaaaagtaaaggagatagttaaggcattggaccttgaatggattcaagtgattttttatggataagaagcttgatttatgtgttggttttaactttggtttcacttggttactttcaaacacattaaaagaggacttgcaaagtaaatgaccagttgaaactttattttacaatgattatatgaggtttcagcacaaacaattggttgaattttacttttacaattgttggaacctgcccttcttcggcgggggcgcaaaaaggccactcggatgg

SEQ ID NO: 86729 - DNA, 349 bp, Glycine max
ggcacaaaccgcaaaagcgtccgctttagatggtgcttttaataaattcgcatagggacctcattcctacgtaggtctttcaaaagcaagaatgttctgcgtgggtgaagaacataaattgttaaacagtgttgtttaaccgatcaaagtcaaaaaaaaaacgctcgttattgcattctaccttccaacaattataaatgaccacaacactttagcggctttacacgtggaataatctcattcatggatgacttgtccttgttcactaatcgaggtgttatttcactaaacacaccactttagtccatctactgagcaagaacacgcgcgcttagtaaaaattcactaa

SEQ ID NO: 86730 - DNA, 472 bp, Glycine max
gctgaaacaagataaatagccttttcttttaagacaaaatctttgttttaatttgtactttcaccaaaaccccgcctacattaaaaattaattagttaagggaataaccatacattagacgaaattatcgtttcattggttttgtttgatcaactcgaacaaaacttacaaaaaaaaaaagcctgaatggattcaaagctcaaacattggtaacaataactcgctcaaattattgacatcatgccaagaagtgcgttatgatattcttcttgccttcaccgccataaacctaactaagcttcggtctcaacttccaagtttaaaacacatgagactctcatcagcctttatttagaatcaccattgcactagccatgccaactcatcttcaaacttcaaatcaaaaggaaaccaaaaattattagttgtctttcctagaactaaaaacgagctttcttcctttttttaaagt

SEQ ID NO: 86731 - DNA, 461 bp, Glycine max
ttttttttttttggggaggggtttgattttcaaaaattagtttaggggttggattttcccaattttggtgggggattagtttttgaaaataaaattattctatagcttgcttttctaattttataatactgaaacataaaatttgactaataacttaaaatggttaattttaggttgaactattataaaaaaaatttaataagaaacttctattttttttactagctattaaaacgagctaatgaaaacttatatacttgccaacattcatgataagtaaataataattataaaagtggttatcaaaaatataaaaaaaaactattaaaatgtacttttgtacttgccatccgaaaacacaaaattctctacccctaaataaggataaaaataagttaggtcacttcacaagaatctatgtcttactctacatcatgtttaggttaagtgagccttttttc

SEQ ID NO: 86732 - DNA, 236 bp, Glycine max
caaaaaaaaggttggggtaaacattaattccggggtggttaacggggcctcttcccgttaaaaataacttgtttttgaaacttgtgcctgtttttgggaacctggccccaattgaaaaccaaaccaaagctttgaaaaattaaattttttttccccccccattggggggctggttccaattttagggggttgtaccaaaggttgctttgcaggttacattccactttggggggatt

SEQ ID NO: 86733 - DNA, 291 bp, Glycine max
cggtgccccgggggacacaaacaacactttcggcgagaaaaaggggaaaagcgcctcgcaaaaaattataaaccctttgctcttttaacccccccctgaaacccctatgaggggtatttttgtgtaccccgaatacaactcttgatttgagggctcttctcaaaaaagacctttctttccatactctgcaaacacatgatttgacacctatatatatgtcaaagggggggtatccctctcgaacactcatgccctttacaaattcccccccacggcccttatatttaaatt

SEQ ID NO: 86734 - DNA, 207 bp, Glycine max
  unsure (1)..(207): unsure at all n locations
acgtaagctggtatcctctagagcgcccgcttttttttttttttttttttttttttttngggtgaaaaacaaataaacattacactctcggcggcattaggcgaacacgagtcgccctttacttcataaaacatattttcattgttccaacttacaccccctaaatataataaatttactccattgggttaacatatttcaataaaa

SEQ ID NO: 86735 - DNA, 252 bp, Glycine max
ggggagagataaatgggaatttacacattcccagctcgctaaacgtgcacaaaattgaacatttttctttgaacaggatttcaatgcttattcaaacacacccttcatttgtaaaatttgtgcctgttcactccaataaatcaagcacgcatatggatccttttaccaaaatgcatcattaaatacgtgaagaagcatgtttagttcaaatggttttccttacagtcttcatattacaaaaaataactaatt

SEQ ID NO: 86736 - DNA, 67 bp, Glycine max
aagcttaaataaaaaaattacccctttttacccgaaatattcctttttcgaaaattattacacccgt

SEQ ID NO: 86737 - DNA, 424 bp, Glycine max
gggctaaataaaaatccaaattttagtgcggggggatgactaacaaatttataccactgcttgcgactgaagaaaaagggcaaagagaatattgaatatcatttttcaactagacttattatcacaactcgaatgatacatttaatggagcgaatggaaaacttcaactatttaatcaaatatcaaccttttctgaaaagattatgttctaaaaaaacataaagaaacttattcacctgttactagcaatttataaaatataatcaaactcaatctattattaaatatacaggcgttttctgcttaaaacatcaatttagttcgtgtcatcaaatccctatacatgcaagaattcttcagctaatagtattgtcccccgatgtagccattgagtccctttaattatccaatattctgctccata

SEQ ID NO: 86738 - DNA, 328 bp, Glycine max
ctcactaaggagacccttcctttcctgggcatttttttaatgcaacctgtctcttgccttcatcgaattcaaagcttcttaaaacctctggccatccatttcttagggttgtgttgcattaagaaatgtatgccaatcacacattctacaacaacctattcccatggatcaagacccaccaacttaatcactcacttatttttatcaacatcctttaaaagagcttctataaaacaaacattatttttcttgagagcaaacatgatacttttctttgaaaattgtctgaaaaggcagagaactctcaacttctttggcagcattggtg

SEQ ID NO: 86739 - DNA, 295 bp, Glycine max
  unsure (1)..(295): unsure at all n locations
attccttagcccggagtataaaatttctaaagaaagttttgacactccaaaaatctctccacntctaacccaattaacacttcatactaggtactcaaatactataatttctacttaaaaaacaacaaggacctcaatattaattaccaaaacaacaacaaaaccagcatattcttccttttccttaagagtgtgcattgtgacaaaatcaggaaaggtagttttataacccttttttccctttaagatcccaaacaagcatgatcttaaccttgatcccaaaaacacccttttt

SEQ ID NO: 86740 - DNA, 168 bp, Glycine max
ggttctagtgtgtgattgtttgttgttgtaactcgttcttcttcttttgttgttctgtgtttgtgtttgttttttctctcacctgaaaatgtcttgctgcggtggtaactgtggttgcggaagctcctgcaagtgccgcaacggctgcggaagctgcaagatgtaccc

SEQ ID NO: 86741 - DNA, 188 bp, Glycine max
caatttgtttttcttgcacgccaaacattgcactgccctaaaaggtgtgtgagctctacttctatcatttcctccacgaaggccatctcattcactttttttcccaatattatttcgaatccctttctctatccaatctcaaattatacagaacagcctgggtctggcacacacagtttacccatatc

SEQ ID NO: 86742 - DNA, 210 bp, Glycine max
ggaactcgtgctagagtgtgagtggttgttactggaacttgttcttttgctgttgtgggtctgagtttgagtttgctcttacctgtcaactgataacggcttgctgcactggtaactgtggatgcggtagctgctgcaaatgcggtagcgactgcggaagatgtaccatgtaccgagactcgatgtacactgcatcaaccacaacctaga

SEQ ID NO: 86743 - DNA, 370 bp, Glycine max
gagtatttgtcatgaactcatggtcacccctttcctgaggttcagtgtctataaaaaattatgtttgagcagaatccatttgttactgaagttgtatcaaaaggattttctagtatatatttatgcctatgactcactttatataacctttgttacttgtgactacagaagccaagattttgcttgtgattattggttatttagatgcctgaaatggatgccgagaaagtggtgcatactggaggctgccattgtaagagtgtaaggtggaaagtggttgcttcttccagtgttattgcatgggattgcaactgctcaaactgctacatgagagccaatactcacttcgttgtacctgctgtcaattttg

SEQ ID NO: 86744 - DNA, 158 bp, Glycine max
acgcgttcgaacacgttagaagacgatttttagaggactacttgatgtggtgatcaaagcgagaattcaccgcaattctcgtgcaataagaaaaaatctgacagaagagaagtcaaacgtctcacacattactttcttgctgtgcaaaaaactgaagc

SEQ ID NO: 86745 - DNA, 361 bp, Glycine max
aggatttgattaaagactttatggtcttcggtttgggtagtcgtctaatatatgatttcccacaggctgttgtcatgaaggataatgtacttaattttgcatggattcaggtcacggtaggtatttcaacgctcctttcatatgtacctgttcaactgggcactgctcatcatgctgaagcctcgacacttctgacatttatgttacttcttaatcacacagtgcgaacaccgaatttaccccttgtcaaatgtttgtctaaagtcggtaaagcacactaattgatacccgatattatatgtggtcatggttcaaggcatttaaggtgacaaaatatgtggctacaaatggatccatgcta

SEQ ID NO: 86746 - DNA, 266 bp, Glycine max
aaacggcttttttttttgactttgcggcttttggcgtggtctgtcctctagtttttgagtttccccaaagctgctgtgattaaaaagtatgctacctatggaaagaggatttatgacgacttattattgtccacgcctggtccataacgaccggagccactgggctctgctcattttcctggtagcccaaaacaggtgacatttatgcctccttttaatacctcactttctacaccgtctgattccttcgcaatatgagacctgca

SEQ ID NO: 86747 - DNA, 370 bp, Glycine max
aaccggtggattcttcacggttcttcgtctgaggtcttgagactgttagagcatttaatgcttgcattaaatgtacatcccttttttcatgcaaattccatgcttgataggttggcatgtcttgtacttcagtaagaaagtcacttcttccatcataataggtctgcactagcaaatcatgccttttgatgaagatcataactttcagactgtagacttcatttattcttcatagaactttgacaaatcccaggagaatgttttatgcaagagagaatcttagacacagattattaatatgacgatcttaaatgcactccttaatgttatgctagattgtcttattggacgtatgtttgaaaactcagac

SEQ ID NO: 86748 - DNA, 147 bp, Glycine max
atgattgttatgattatgcttattgctgactgagaccaccaaagcatgataataaagaatagtactattaataataattaagtagaaacctagcttgaccatagaagtgaagaaccttacctgaaggttctggttcttgtgtaccaa

SEQ ID NO: 86749 - DNA, 399 bp, Glycine max
cccacgcgtacgacaacttgtcggaacgtttttaataaaacacaaaaaggatggatggtagggggattcttaatgctgactgggaccacccaaacatgataataaaaaatagtgctattaataataattaagtggaaacctagcttgaccatataaaagaagaaccttacctgaaggatctgggtcttgtgttccaatattagaaccaacaactccaagagcaacgacgtctctgtagaaacgactttactcatacatcaaagtgcagcttggatatagaaacatcgcacactttccaagacatcatataggaatatttctcataatatcacacaaacacttactgcagtttttgctggatagatcctgcgtgcactgaactagagtatacaaactcct

SEQ ID NO: 86750 - DNA, 263 bp, Glycine max
tttgttttgctagcttcacactactcaccttggggagacctaatcgacaccggcctctattatcacacgtttaaagagctcttgcgatagcatctttcgcataacgcgctgagcatgaaggcaagaccttactgatggagcaaatattcgatgactcatcctctacttccaacaaccataggatcacaaacatgcaccacaaagcagggactgtatagttgctatttccacagcgctggcaggatcgtttaaatcttccttga

SEQ ID NO: 86751 - DNA, 65 bp, Glycine max
tgtggccagagaaaagaacaaggcggggcttatcgaaggcattgtgtcatgtctctatggtatag

SEQ ID NO: 86752 - DNA, 239 bp, Glycine max
tttgtctctcaaacatttactatatgaaaacaaccttcagaagtttgaatttcatccaatacatttttaatctttgcttctgtgtttctttactgcaacaaattcatgggttctgctactgaaatcatgtcactcccgtctcatgtggccccagttacaattggtgttgcttctcctcttgattctggtcttgcccgtcttcttgaacttggtcacaaacaagaactctagcgctttct

SEQ ID NO: 86753 - DNA, 80 bp, Glycine max
gtcggaccaagccgtcggccaagccttcggccaagccgtccgtccggttgcaaaaggcacccggagggggccttttaatt

SEQ ID NO: 86754 - DNA, 333 bp, Glycine max
ggcccttctgattaaccttgcaacttcgggaaatttcaaccacctttctctcccaaaatctcaaagtgtgctgcttcagcgtctggtgtcacagatggcatctttgactgctgtgctgatacttaccctctagaaattctgatggtcatcatggaccaactacggattcatatgagtctcaagcagtcgcaacgggacttagatctctaaagctgacaaatactcatagcggacttagaaccttgaacccggtggaagagctacgtaacataaccccaattaataccaatgcagtgcacgctatgaggtaaggacctcgaggcaagaatgcct

SEQ ID NO: 86755 - DNA, 391 bp, Glycine max
ctcagacgagagaacagaagggggttttcgacagaaagcgtgctacgattgggactaacagaccacctctgtctcataaaatatataccaatgcatgttcaaaggctggtatgacagtaagcttcttacgcagcaagatggacctgaccagtataatatttatgatggccacaatggaccatctactgctcattatgattcatataccacatctatgagaacttagatctctaaagcagacatagacttatagtgagattaacaaatttatacccggtgaggagctactgaacataaccctattgatcaacattaccatgcacgctttgcagttaggaccataaggctcgcatgtcagtactaatagtataaggacttgcggtatgactat

SEQ ID NO: 86756 - DNA, 271 bp, Glycine max
ccacacacccgttcaggggttatattactacagaaggggaaacaggggggattctttgcatggaacatggggtcctaccccttactgagccccgcaacaggaacattgtaacaaaacacagtccacaccacttgtcaatactcctaccatatgaatactatcatggttcctgctttgatatcgcgaacacaactcctgttccgaaacctaatacacccctatatccaatcactcataggaaactgacttctttgataaattgctgaggaca

SEQ ID NO: 86757 - DNA, 364 bp, Glycine max
aggcggaagacgacgccaggggtgtgctgcgttaagaccggaaaatgggacggctgaaaaagaatgtctccctgtgcctctatcatttccttcatgttgggtatttcattcactttttttccccatcctttttgagaatccctttctctaaaaatttttaaatgatacagcccggcttggtaggtcacacaagtttaaacattacattccgtaagcgccttttataaaatcttcgattacattctttagttttcttttgagtatttaaagcccttaattcaaccgcgacgaattatgatgcttacgaggcaaatcggtttgagctaacgggtttagatttatagatagagtctctctttgagtc

SEQ ID NO: 86758 - DNA, 117 bp, Glycine max
gccagacgaccgccgacgggtcggcacgaattttatgtaacaacacaatattctggacttgctcagacttccatcagtgatgggctgtcaaaaacaccacagagagaggaattaaag

SEQ ID NO: 86759 - DNA, 57 bp, Glycine max
gcttaaactcagcgggtagccccgcctgacctgaggtctccccttctgtcgtcttct

SEQ ID NO: 86760 - DNA, 246 bp, Glycine max
aaaaaccattgaaccacaacccccccccaaacataaccataaccatcataactaaactcttaatccctcacaaataaacaaacacgtataaaaacaaaatcctctaccaaaaaaaaaaaaagatcaaaatcaatcaaaacctatgcacacaaaatatataccacccaataaataccctcaaatataccaaataacaccccaattacaacaaatatttacaaactacttaataaaccataatcttcc

SEQ ID NO: 86761 - DNA, 489 bp, Glycine max
  unsure (1)..(489): unsure at all n locations
cgtcagcttggatcctttagagcgggcggttttnnnnnnnttttttttttttttttttttttgaaaaaaacacacacattggctatccatttgtggcagcaaattaattcacatcaaagcgtcacaaagatattttaacaagaccttacatacaataaagtcctagaatgagtgagggttaccatttagtaatgaagcggataaatttcctccatattgaagaggttacaaaaaaactaaacttgacataacactaatctctgttgctatgagaagaaaattcatctgcttcatcacttgaggcaaccatcttattaattaaaccaaaagcaaactactccaaacctctattgatataactaagtttatcaccaccctgcaagtgctcggtagcaaacctttccctgagtcttcatgcctcagcagttgttgagaattttttgttactgagcacaagcgtagtgaccaaaccctctagtacattaatta

SEQ ID NO: 86762 - DNA, 430 bp, Glycine max
ccaaccttcctctatctttccattcactttgtgcgtctccttttgattttcttagctaaagaggatggaagatagaagcgagaatctattttgaaagatttgttgaatccgtatcttagtatttaataagcctcactcatgattttataaattttaattaacaataaagtacttaaacatgcatataggataatggataatgcagaattttttatctctctttatataaatattcggacttacatatctttttctaaagaaagatagacataatttcttttatattaacttcataatatatgattcgtaaattttttatcactcaccataaacaattgcatattatataaaaagtttaagtgacattctaatatgagaatatctatatatattctccatacatacagggcataacaatttgatattctaa

SEQ ID NO: 86763 - DNA, 358 bp, Glycine max
  unsure (1)..(358): unsure at all n locations
aagaatgttctataccaatatgatcctactaccacgtngaacttatatactatcaggggcaaaaccaattttttctggtcccaacaaacttttctatatgttgttagtaattgcctggtattactccatccttaccctcttttatccactttcctcaagtggtgttactacttttctcaaaacatacaaaaatctattgaatgtgacctattgcatggtaaccaacttattactttcatttcaattaattccaatatgaaataaaaataattggatttgaagccaacaacattttatattatcaattttcgtacatattattaacttaattttaatgcatttttacattctttactaa

SEQ ID NO: 86764 - DNA, 121 bp, Glycine max
aaaacaatagaaaaactcgggaacgaaatttaaattgggggcaagaattaaattggaggctttggttttcaattaccatttttttttttgtcggtaggggaactgcagtgccaagggactt

SEQ ID NO: 86765 - DNA, 418 bp, Glycine max
ggggccattagagggaaacacgcttagagaaacaaatggggcccagggcacaaatgaagattcaacggaacttctttttgtaatccggtttttcttctagcactggccttatttttttaacaattgtttacaaaaatatcattactaaaaattagtttctgaagtgttatggaaaaatattttcaaaaattaattcttagaatgtaaaataattactaaaaattggtttcttaagttttgttggaaaagattttcttcaacttattattagaatgttaaataatacattccagatactagtttttaaaatatattttaaaagcttggcatgacttaatcactatttaaaagtatattttataataagacattttcatttaaaaacctgttaaaaaagctacattgggataaaacattt

SEQ ID NO: 86766 - DNA, 517 bp, Glycine max
aaaagaaaacacccttatataaacgaaggggtcccaaggcccaaatgaacatacaaccgaacttctttttaaaaacccctttttttcctaacactgtccttatttttttaacaattgtttacaaaaatattattactaaaaatttgaccatgaaaggttatggaaaaatattttcaaaaattaaatcttataatttaaaaaaattacaaaaaaatggtttctcaaattttggtggaaaagattttctacaactaattattagaatggtaaataattcattccaaatactaatttttaaaatatattttaaaagctttacattactaaatcactttttaaaaggatattttataaaaagacatttttattcaaaaaccttttaaaaaagcttcatttttataaaacatttttaattagtgaagaaacctaaatcaaaataaacttaagaaccttaacttgttcaccaatgccttaaacctaaatcctttggagagaagaaataaattaagtttttaaa

SEQ ID NO: 86767 - DNA, 481 bp, Glycine max
ggcagaatataaattaggaagtattttaatagacaaaaataaaattacattgattatatatatttttgttggttttaaaggaaaattaagattcaatgatatctttcaactatacggaagagttgaaaataaagcatttgggcatgtactttgacaagaaagtaagtgataaaatatatgtttatttctttagttttttttttacaaatattcaatagaattagttatatttttaggagggaaaatttgaaaaactatagaatatttggaaggacgggtacttacttgaaataatttgcccaattaacaaggctagatcaaatttgttactaacaatcttcatattatatcattttcaatcaatcaactatatttttaattttctttagcataggttcactagataaaaatttatttgattggacgagattctactatgtcaacaaataaaactcaactttaaaaatggtaaaaacagaat

SEQ ID NO: 86768 - DNA, 404 bp, Glycine max
gggaaaaaattttatttttttttaaccccaaatttttccatttttaaaaaaaccttccccccgtttaaaaaaaaaaaaaatttttccttattaaaaaaacccttttcccaattttttaaaaaaattcccccgggggcctttttttttaaaaaaaaaattaatttttgtaaaaacccttttttaaaaaaattttttttttttaaaaaatattttttttggaaacccccaaaatccaggacctttttttttttttcccaaaaaaccttttttttttttaaaccccttttgggttttccccctaattaaaaaagccaaaatggcttttaaaaaaaggaaacccctacactaaaatgtcccctttccttttggaaaatttgattttcaaaggggggtatttttccccc

SEQ ID NO: 86769 - DNA, 503 bp, Glycine max
ggtaaaccaaacccctcaaaattcactttatttcttacctatattattcatctctttctctctttcctattaacattcactctatttcttacctcttctttgcttattaaacagacccaaaatgaatttcaggttcctgtaggggtttttatttattaaaaagaaaaagaatacgtcaaacctcctccctctttttttgacataccaaaatcttagaacaaagaaaaatatatattctaattttcttttaataaactaaatataataaattaaaactgttactacgttactactatttaccaacaagtcatgccagcacatgaaaaacgactgacatacgtcagttaatactaataatcaccaatggtacataaacatagtatccgtcaaagcggaattttaaaagggttttataaatatttttgggtatatgaagagtatactccggctgaaggttaaaaataatctttgacaaaattttagggaaagatacatgtaacatc

SEQ ID NO: 86770 - DNA, 310 bp, Glycine max
  unsure (1)..(310): unsure at all n locations
acctctagagcggccgctttntttttnnnatttttttttttttntnccgataataaaaatcaaaactaaccaaaatgatgaaaccataatcagtttatctgcccatactataaaaccaagtttccctattatccaataacaaattgatatggtaagttttgtaatctcatacataaactatcttaaaagtcattcctactatgtccctcccaaagttttaatttattattataaaatttaaaatgactatttaaaaataaacatttttatataaccctaaaaaaaataaacctaactaaaacaccctttt

SEQ ID NO: 86771 - DNA, 514 bp, Glycine max
cttccataaaaatcaaaactacttaaattttggaagagtaaatagtttatctgttaatagtgtaaagtgtttttacactattatccaataacaaattgatatggtaagtttgttgatttttacataaactatcttaaaagtcattcctaccaggctaccatctatttggttgtcagtgtaagaaaatttaaaatgactatataaaaataaactcttttagaagcttttcagaaaatgtgtttgactcgactccttttaagttttaaggagaagaaaaatccaaaaaagctaagctaaacactatctaaatttgcatcaagtaatagcatcccagccatacaaccacatcatacgcctacaggcatggcattgagtcatcatccaactcttttcattccatcctatgacaatatacaacaaatactattccaataattaatgtttttcatagaaattattaatatgatattatatataggaattgggaaagggaaaccatttttttttcacaaaa

SEQ ID NO: 86772 - DNA, 469 bp, Glycine max
  unsure (1)..(469): unsure at all n locations
ctcttttttttttcntnnggggaggtctttaattcagatccataccttgccgggtgcaatttgaattaattttagtttatgggatgtttttaagtataacattttattgttctcttcctcaacttcatcactatattattttgaaacattgttcatattttgatagaccatctttctctattgaattgttataaggataataaattgtttattcccacgtattcattaattgtttcgtcaaataagttattcattagttaaacttccataatacgaagtcttggtgtctccattaagacagttcttaaaatctattgttgataatagcagaagttcttggaataattaatgagggcaagaaagggattgtttcacaatgtaagccttattcttcattgtccacgttgagtccatcccataaatttgcaggcaaagggatcataatacaactctgagctttagttcaaaa

SEQ ID NO: 86773 - DNA, 553 bp, Glycine max
gatgtctagaaaattcagtaaaaaggggagcttaaaaaaacgtagtgaccaataaataacatgttatgaactaaataacatgcatgaattagactcaaaattcaaaagataggctaagaatgacaagaatacatgaacaaatgtatctagaattcaataaacaaaataaaaattcaacacaaacttagaacataatgtgacaattaccatgactaaacatgactctaagacaacatggattaagtgatttacacttagatttttgtgtttttttttctaatcaatattttggaagaaaatttagatctaaaggttcagcacaagaatattatgaatgaaaattgatagaacctaaaatcaacacaaaaacaagattcaagagtagatctacaaaatttgaaccatagaaatgcaagaacaagtgtagatctaagatttaatcggtttatttttttgaatctactctaaacagcaccaaaccacaagataatggagaatatacatggagaataagatgaaaaacaaggaattaaagagaattcaccgaacaaaa

SEQ ID NO: 86774 - DNA, 338 bp, Glycine max
  unsure (1)..(338): unsure at all n locations
atccccgagagcggccgcttttttttttttattaatttttttngaaaatataaacacccaaacnnacnananacagaaaattttaaaacatattgggacctcatccttaaccataaaaattcactcacccaaatcacaatattcttcctagtatttaaatttatatatcttaatctactaaaacacccaaccaaaaaatctaaccaactcctataaattattcctacaatttaactattacatctccagtaacacaattaacctcccatcacaaaaaattctccccactccatacataaaaattctctcccccaaataaaaaataattactccattac

SEQ ID NO: 86775 - DNA, 270 bp, Glycine max
  unsure (1)..(270): unsure at all n locations
tttntnnttttttttttttttttaacattaaatagaatcctttgcagaagaaggtgctgacataatgctgctgcatatatcttgaaatataaatctaattatccaggaaaaaaaatgacattttatgtgttgcattactctttaaattctttaattccttacaaccaattaatttcaattgaaggccaccacccaagggcccagttaatgaaccaattgtttaaccggtcctgggccaaagggaagtggtccttggaacctttttcttaa

SEQ ID NO: 86776 - DNA, 129 bp, Glycine max
ggggaaagaaaccccctttaagccttgtttttttcaaaatttttgctttaaattaatccccttcaaactttggccccttcaatttttttttccaagctttgccactgcatggttcaaattgcaactaac

SEQ ID NO: 86777 - DNA, 435 bp, Glycine max
acaccaataaaacaagaaataataaaaataattaaataaaatacaaacacttcaaaattagaccccctcaaaaacaaattccaaactcagccaacgaaaggataaaaatgcaacaaacaacatctaaaaacaaagacaatttcgtgaccaaaaaaaactgaagaagaaacaaacattgaaccaaaactaaaatgaaaggggagcgaattaagcaaaagggaagaacatactgtatccaaaaaaaactccaataaatctcaagcaaaagaccctaaccaaccaaaaaacccaagcaccacagaaaccaaaacaaagaacagcaaaaccaacccaaaaaccgcaacaaactaaatcagcacaaaaaaaatactaaaaaagcaacaaaaaaaaacaaacaatccaataaaaaaaattttattcaacacaataaaaaca

SEQ ID NO: 86778 - DNA, 505 bp, Glycine max
aatattaggaggtgaaaataaagctggcaagttcatcactgctgaaaaaatattcagcagaatattcttcaactaattacttctattgtgggggtggttaatacaacaatggaatacaacctacctactagaaaaaaaaataatgatttttttcatcatggaggttgtggtcaaaaaataacaacctaactatttttttacttataaaacaacacctgcaggagcagcgtgtgctgaataacaacaaaagaataactgctgaatacaacaattattgtacgcctcggcctccattcataactaccaaaaaaattgtcagcactactttcaggaaaaaaaaaaaaatattgtgcggcggcctacaagcctccaactaatgatgatcgcagcaataacatcattgatgcttaaacacctcttgtagctgcttcgtaaaccacctgttcttcataaagaggagcttccataaataaaaatatatataaatatgggggggggggggggg

SEQ ID NO: 86779 - DNA, 235 bp, Glycine max
ggggggggtggaaaccaattgtatcattgcgtgcatgattgaagagatgaaagaatctcgcgctgctggagtgtttgtaaaacatgaagatccccattctgatgagttggaggggcttctcaaacgccttggactcttaaaaagaggcaactttacttgataagaagaactgttgtatttatgcttaaaatactgttaagtgattttttgatgacaagcttgactttgcaagttg

SEQ ID NO: 86780 - DNA, 381 bp, Glycine max
gggacaatagcatttgaaagcattttgaatattggaaaaataaagcaacaattaggcaatatatgtatatacatcaaccatggcaaaaatacatcatcaagcatggccaaaaaaaacatatcatccaatggaacatacccccccccccccccccacacacacacacacttattcccaaaaaaaaatccaaagctcaaaattccttaagggtagggtgagatcatggtttttcacttaaggcttgtaatgagcttcaaaacaaagaaaggggaacataggctcaaaggggcaatcaaaggaattaattcaaggtaggctcatttggctagaggcttataagaacaaaatgcctaaatcatctcccaacatgcatgtgaacca

SEQ ID NO: 86781 - DNA, 553 bp, Glycine max
  unsure (1)..(553): unsure at all n locations
cgtacgtaagcctggatccctctggaggcggccgctnnntttttttttttttttttttttttcacagatattgtttaaaattttatgcgcagatttggagttttcatattccccgctctttatacaaacgccccctttccccacactttaaaaaaaaaagaggcgcccccgtgctctaaacacacctatcacgtgcacaaaactcttactctctctaaggggcaacacgtcccctcttttttatgggggtgtgtgtaacacacaaaaccccagtgcgcgcaaaccccatcacacacattacacatgtgttttgcgccacacataaagtgtatctcattatcccaaataaggggctatctgttttagaatcttgctctcaacacacctcttttaaatgcacgggtttcgcgggcgcattttgccacatatttgcagacattgttctgagggggcacacctttttgagccccctaaaattgcgccaaaacgggcgcctctcatatcaccagggtctggggggggggagacacagtggctcaaaagtgggggcaca

SEQ ID NO: 86782 - DNA, 467 bp, Glycine max
cctatccaaacttcatcccttcaacttttctggaggatttttataaaccttctgtacacaagtgcagggtgagttaatctgtcatgatagcatttaccaggtggtttatttctagcaacaacataaaaagcgacagatttttcatacatacacactatgctcctttaagtatgcatcataggtcctagcctttttttagtgaaaaccaagacacaacatgacatttttgtcaatttcatgaaaaaaatattgaatatatattgaccttggaaaaaatgaaaatatacattacgctaactagccattacattcaatcatgaaaacttgtaaaaacaatatctagctacaacttcacaacatttgtgtccatactgtttctgtaaatccagatgcagtgcatggctaggtaaataaaaggataagcaagcatggagaggcaacgaataatacttgccttcattaaacat

SEQ ID NO: 86783 - DNA, 432 bp, Glycine max
gcttgttgtacctccctttttcacatctgcgatcaaaattcgaaattaattaaatctttccaaattgaagcataaataactgctaaataattaattctaagttaattttagaccgattttccactattaattcactattatttagcagttatcaggttggcatattcctaacattcttctctataatctcaacaaaagagcaaaatcaataagcattcgagagcaactctctttaaacactagcgttgtttctttctctaataatctatgtttctgtaatgataaaaatgcaaaaaataggcgtaaacgacaaacaaaacgaatgctgacctttggtaacctcgttgccgctgcgaactgacagtgaaagcgagacaaatagtgagagcgagagtgacaccgccaatgagagtgccaacgatgaggagtttc

SEQ ID NO: 86784 - DNA, 299 bp, Glycine max
ggatgcgtatgaacattcgacgctagccttgtgagcctgggaaggttaacgaacagcttatggtcatcaatgaagatattgtccaggtgcgtctccaaaagctttacgtccgaaacgtccttgaacctcacgaagccgaaccttctttcctcttgttacgacgtttggcaaatgaaacttcacgcacattctcccaaaatttaaaacttccccaaagccttactttattaaagttggctgggaaaataggggaggaaaagggtggtattttcttccttgcttttcaatttgggggggtt

SEQ ID NO: 86785 - DNA, 408 bp, Glycine max
ggggaattacattaaacacagataaatgaggccgctatatttgcacgctaaaagagccaaaactaactttgaggaagcattaaacaataaaaactgatataaggacgaaaaaaaaccccatgccaacactataacaaagaattgtcctttttgaagatgaaaacgaaaaaaaccttatttcaagaaataaaagtatttggcctaattaaaattactgataaaactactatgaaactatgcaatttcttaaaaactatccaactttgttctcaataataaacacagtgaatttctttgatatcaagaaaacatgactgtgatacattcaaaaaaaaaaaatcgttttcctactacacaatttttttgtataattaaaaagtagacatgcctcaaccatattataagggg

SEQ ID NO: 86786 - DNA, 220 bp, Glycine max
cctaatttttttaaccaatatcattccccacccaccacaggacaaagcccttttctaatttcaattgaaccaaaacaactcgcgacttacacaaaacaatttctgcaaggaatgaaacttatcatccaataaacattgtgcatcaaaacccctaattaaaccttcaactaaaaccaaacaaaatgcttacaaaaatattatattcaaaattaaacttcca

SEQ ID NO: 86787 - DNA, 449 bp, Glycine max
ggtaaggttatgaaggattcaagagtcgtgttaagttctttagcattcttgatccaccaagaatttgtaactatctttctgaagtctatgatgctggatttcttgggcctattttcaaggtattattcctgatgtttctgtttcatgttaaaatcatatcaagtactttctgcttgtagatttatgtacttcaaacctatttaataatgtaaataggagttagagttaaggtgtacagggatctgacaatcttctaacataatattaatggaactaagtgatagttgatttcttgttattctatttttacttttatggtatttgcatggacatttttcagttggaagtatatttctttctcattcagtaaaatatatttcaggttaccatggaagaacttccaaatgaggctttcacaaacacctcagcagataagtgctgggaatcag

SEQ ID NO: 86788 - DNA, 57 bp, Glycine max
agaagacgacagaaggggagacctcaggtcaggcggggctacccgctgagtttaagc

SEQ ID NO: 86789 - DNA, 371 bp, Glycine max
gggctacctaaagattttatccttttaaatccctttaatttaaaatttctttttttttttggtttctctatgagacatttctaaaatattttatattttttacttttttatctttaatatatttatcaaatttcctgtttattctttttaaataaattatggttttacttttttcaggtattttactctttttaataattttaataactaatttcatcgaatatctataatttaataagtgaatgctttcatttagttttctaagttttttagtagtttcattttttgaaacactactttttaaaatggcaagttctattttctaaccttaatgttctttcattttgaacctcaatatatttatctaattt

SEQ ID NO: 86790 - DNA, 335 bp, Glycine max
ggttagttttcaaatcgagggtttcaaaacattctatggacccgaagaggcccccaattgaaatacgtgcttttattggatttactatctgaaccccctaaaggcgtgctttaatcatttttttatttaatcaaaaaatgaaataaatttccaccgatcatttgaatagtaaaatacggttgtttttgttaaaatgaaataccgccgttcggtcacgccgaaactacattggaagccaaaaaaaagggtaaaataatgatatgttaattaaaaatattttttaattaaaaaaatcaaaaataatgaaacgaacacttttctttgggaagtctctt

SEQ ID NO: 86791 - DNA, 372 bp, Glycine max
ggaagtccaggcacgactacgcctgctgcgggtggaagaagactacggatggggttttagagggcctgggaatgcgatcgggctttgatggaagttagctgtgaagggaatgaggaaaaacgtggaattgtcccaaaattcattcacaagatatggttacttatgctcatatttgtccataatgaagattgggattggtagaaacaaatgacctgcttgccctcttgagactactttctgcttacgttacaactaatacacatctctgtatcactctattgactgagagaaacactatgccgacgagattaacacctagctgatcattcagctacaccacaatcactgacctatctacttggatgtctttat

SEQ ID NO: 86792 - DNA, 300 bp, Glycine max
tatattatattttatttggtatatagatttattttaatggtttgatttatatagaaaattgaagagtggaattatattttttatttaaaatattatttaaggaggtaaaatattttgtaattaaattaataaaataaattttttaaaatttggaaaaattatgtatggataaaattaatgaatttatgatatatttgtattaattgaagatgggtgttttagatttaaatttattatttttttaggttggataaaaaattagtattatggaattttaaaaatttaaaaatataatattaa

SEQ ID NO: 86793 - DNA, 313 bp, Glycine max
gacaagtgagtttgttgatcgagatgactagaaacagtgtgatgaaaatgaaggtccttgttttcttcgttgctacaattttggtagcatggcaatgccatgcgtacgatatgttccctctccgaatgaacactggctatggtgcccgtactccggaggtgaaatgcgcaagttggaggcttgctgtggaagcacacaacatctttggctttgagaccattcctgaagagtgcgttgaagcaacaaaagaatacatccatggcgaacaatatagatcagactccaaaacaggtaaccaacaagcttactttta

SEQ ID NO: 86794 - DNA, 385 bp, Glycine max
agatatcatcttgaccatagtgagtttaattaggaaaattatctttaggtgtttaattaaagtaattgtctttaggaatttaatcaaaatatttatctataatacacttaattaaagtaattatttttagatatcatattagaatatttatctataatgtgtctaattaaaataattgtctttagagatcatattataatacctatacatagtgtgcataattaaagcaattatcttcgggaatctatgaataagaaactagagtctttacttgggggatttgaaattcattagacatttgacgaataacaagaacttttgagaagagaattgcacgaataacaattggggtccgaatctgtaaaaaaaaaatatctcttttatt

SEQ ID NO: 86795 - DNA, 211 bp, Glycine max
atataaaattgggcaaagcatatttaaatcctgtcattgtgaaaatatgctgttccctattttaaaggggagactgaaaacattcttttggatgtttgaacagtatgaaaaagattctaaccgatctatcttacccaaacaacttaaaaaggttttagaacattttgaacttcttttttaagagcataaaattgaacattttttttagtac

SEQ ID NO: 86796 - DNA, 340 bp, Glycine max
gcgccagttttgttttgtggaacactggttagttaagctgacaaccaggaatggatggacaaatattctaaggccgtatttttcttgatcttgttgctcgactctaataatcttaaaaattctcgttgtaaccttaaatgttgtgaaacaatcttatttgattatctttggcgtatcaaaacctgtattcatactttcagaaatatcttacctggaaaaaagtcacgtctagggctgtttataatatttttttctgaatataacctatccaaacatattgccccctttctatttatcttggcgagataatgcattatgattattatatttttaatatttg

SEQ ID NO: 86797 - DNA, 345 bp, Glycine max
gataccaaaaacaaaacacaagccaagtgaaagtgagaaaaaataaaaatcaaagagcataatgtcagggatcattcacaagattggggagacccttcatgtgggagggcacaagaaggaggaggagcataagggtgagcaccatgctggagaatacaaaggggagcaccatggtgaacacagtagtgagtacaaaggagagcatcatggtgaacacaaagctggagagtaccatggtgagcacaagccagagcacaaagaggggttcctagacaaagtcaaggacgagatccatggtgagggcggcgccgccgaaggcgagaagaagaagaaggagaagaagaa

SEQ ID NO: 86798 - DNA, 352 bp, Glycine max
gaacccactggaaatattaatagcagtgaagatacattattgaaaatgctatctgaccattgtcatctcctttcattaccttagatgtaaatttcttaggattgcactgtgccacgaacaatgatggtgatggcggacatgacggtgacaatcgtcagtggtcgcaaggtaacaagcactggggagagaaagtcgcgaggagagaaaagggttttcgagactaagcgggaggagaaaagggtttggagtttttaatttaagtaaaaacacaacatcaattttttaaaaaaactgatgttaactagctcgtgttaacattagtttttttaaaaccaatgttaacattggtttt

SEQ ID NO: 86799 - DNA, 389 bp, Glycine max
gaaggtgcaagagtttgttgtgagctataagctagtttatcgtgaggagaatatgaagttgtttgttttctttgttgctgcagtagttttggtagcatggccatgccatggcgcaggctaccaaaggttccctctccgaatgaaaactggctatggtgagcgttcttcggaggtaaaatgcgcaagttttaggcttgctgtggaagcacacaacatccgagcctttaaaaccattcctgaagagtgcgttgaaccaacaaaggactacattaatggcgaacaatttagatcagactctaaaacagttaaccaacaagctttcttttatgctagtgaacgcgaagtccatcacaacgacatatttatattcggcatagataacaccgtac

SEQ ID NO: 86800 - DNA, 379 bp, Glycine max
aacagaacgggtgggtggatacgacgaacgggcacatggagctgattcacgcattcaggggggagatcagaatagctccatgaagcctacgggatatttgccgcacaaaaaagggataaacatcgaggggcagatgatgggggctgatggaattaaaccgccgcaaggagagggtgatgataatcctccgcattggatgccccccgttactccgcgtactcataggagatatttttgaacgaaagcgtggcgccgctatcatgaattgttgtcaacgcatctatatcaccaacaacttgtatgaaatgttcattgaaatgatggtgcacgatcactaatgctttaaattattcttctgataacaatggagaacaacata

SEQ ID NO: 86801 - DNA, 336 bp, Glycine max
cggtttttgctttttatatgcgcgcattcaaacaaaagtgtgctgtgcatagctcgatgtgtggctttaaggggcgttaggactgaggcatctttcattctcaattaagacttgattcctgcaagggtccaaatcaattttgaccaaaagctcagacaaacaagtgtatctggttacgagcgagcgaggaatctttcattctcaattaaggcttcattctggccaaggtcaaaatcaattgtggccacacgctacgaagaaaatttattattttttgacgcaacaaatcataactttagcagcgaattcataatgatactatattcaacatgattt

SEQ ID NO: 86802 - DNA, 245 bp, Glycine max
cagagacagatccaaaatgcatcaacacattgaaaatcccaactaaacttacaatcacactaacataaaaagaaagaaagaaaatgataagaagagttaccagttttgcgaatgccgaggcgcttggcaacgacaaaccaaaccctccgaacggggaacatcatgttctgccaccactccacccgccgagaaactttcatctcctccatcatgcacacaatgctacaattcgtttccaccccccc

SEQ ID NO: 86803 - DNA, 270 bp, Glycine max
gattgcttttatatgcgtccattaaacgaagggtgtgctttgcatagctcaatgtgcagctttatgtggtgataggaatgaggaatccttcattctcaactaagacttcattcgtgcgagggtgataatcaattttgaccataagctaacaaaagaaagtgtttctggttagaagcgagggaataattcatgattctcaatgaaggcttcattatttcagggctcaatatcaataatgaccaaatgctaagaatataaataattatattt

SEQ ID NO: 86804 - DNA, 386 bp, Glycine max
ggttctagtgtgtgattgtttgttgttgtaactcgttcttcttcttttgttgttctgtgtttgtgtttgttttttctctcacctgaaaatgtcttgctgcggtggtaactgtggttgcggaagctcctgcaagtgcggcaacggctgcggaggctgcaagatgtacccagacttgagctacactgagtcaaccaccaccgagaccttggtcatgggagtggcacctgttaaggctcaatttgagggtgctgaaatgggtgtgcccgctgagaacgatggctgcaaatgtggaccaaactgctcccgcaacccctgcacttgcaagtgaagtgttgggagagcaagcttcaaacaaagatagcccttaattaggaataatgataaac

SEQ ID NO: 86805 - DNA, 205 bp, Glycine max
gcttttattgcagtatcgttgagaaataaggggaaaaaatggtgtctctttaactgcaaaatctccttgcctcaagcgtgcttaagtttttgattattaaatgtgttgcttgacctcattgtattcaacgaattctccattgtcaatttctttgcaaaacatcaagaagtttgttaaggatggttttatcattatgatttcaacc

SEQ ID NO: 86806 - DNA, 318 bp, Glycine max
gtccgatgcttatatatatctacacgcactcatactggaggcctaatactaaaaaaatatatgatgcacagggggagatagctgaccacacttttaagaacaatgcgactctattgaccgagtattatgaccgatgaacaacacctgtcaaacatgtcataccttacacatacctctacgtgactaataatgctcacacattacatggaaacatattaacactcaactataccgagaggcaagcaagaaatggcatacattttaatgaatgaacatgaagtgtttttgaaaagaaaaaaatacacattgttgattatt

SEQ ID NO: 86807 - DNA, 196 bp, Glycine max
aaataatgttaagagatgaaggataaatatataatgagaatggatgtttgagataataacatgctattccttgttgtgtttgtggtgattgtgagtactattggtggggtggagagtgcttattaatgtgtaaaaaaacaatccctgataattgaggcttataactttgcattatgtgcctcagttacacaagatg

SEQ ID NO: 86808 - DNA, 210 bp, Glycine max
ggacaaaggggtgaatatgaaaaatttaaatatagggttatttggcaacttaaatctacttaaaaagggtaggttttctttgataacccaacattaaaagaggggcttcataaaactataatggggaataattttgtttatggagttttaaattataaacttgtgccatactattggaagaatttgggggaaaaaacaatttttggttat

SEQ ID NO: 86809 - DNA, 399 bp, Glycine max
ccttgcgtcgaagcttggcaatttgcttttctgattctgtttgaacagtcacctgtgttccataactaggcatgcgagactgagcatttgaagcatttttatcagacttcaataccaataagccatgatgaatagaatcaacaatctcctttcgatgcaataaaaaaatttgcacagtttcaaatgcactatcgccaacaagatccaacagatctccagctatcttttcaccaggcttttcggaataaagaacccgacaaatggccattgccaattcatcttgggataattgtgaattacaattcttaactattttatcacatgcatctcgtaaccaagtcaggttgaacttttccctgttaacaacagaatgatctgttgggacattatggccatact

SEQ ID NO: 86810 - DNA, 477 bp, Glycine max
aacatgacatctcttttttatataaggatagataaaaagctaaaataagctttgctgcaagcctgcaaattcttattttgacaacttgactcgtataacagagaaattaatgttgacttcaggttactttgctaacaacggagctacaaattcatgcaaccataaagcaaagtcctacttgactacaatgatagctggataagcttctccacaagtacttgcgggagaaaaagattagaagaaaaagtgaaatatgtttcttctacctaacacattggtaagtatgtttaagtcgtaaacaattgcaggcaatacatacattatgaaagaaaatcaatcaaatgaccaaactgcttggcaatgacacataaatgtatcacaaatctattgtgctgtagtcaagaaaaatcaagtattctaaggccataggatatcttataaactcttctatcactctactgatgatgatgatttgag

SEQ ID NO: 86811 - DNA, 463 bp, Glycine max
  unsure (1)..(463): unsure at all n locations
ggggttgacaagggtgttgcccttgctcctacgtatgctcaagtgtgctgaggaattcagacctacgtacttctttaagtctgaaagtttgtgtgttaaattgattttatgttttttttaaaggattgattttaattgcgaacaaaaagtcatttatggcgttggaccttgaaacgatgttttaaatttaaaaagcggagagaatcgttaaggcgttggacattgaaatgatcttttaaatttgaaaagcaaagaaagtcattaaggcattggaccttgaaatgatctcgagtgatatttgataaaaagatgtttcgtgcttttgttgaaactcaacataatgttgttatcaagtgttttagatgtgatctaggtggngaatatacctctaataaattctttgaattacctgtgtctaatggaattgttcatcaaacctcttttactgatactcctgaacaaa

SEQ ID NO: 86812 - DNA, 124 bp, Glycine max
ataaccaaaatttccaaatggattatgctgcccactatccaaacaaacattttaagcgccagaattgctatatttatcaaaagcacccccaaagggtcctaccttagttcaacttaaaacaatt

SEQ ID NO: 86813 - DNA, 517 bp, Glycine max
tttttttttttttggacttgtggacgctattgtttgggaacgagcattttttaaaattggagcaattgaatatagttacgtaaacgataaaatgacgagcgaggagatgggcgtgactgagtggtgaagatttggaaaaatataataataaaggtcagttacgaagttgagatgaagtaataaaaaagtgtgaatgagagcagacctttcatattgtttgcttcccacttagatagatgtatttcacttttttattttcctatgcttttctaatttgtcgtttaggaagagttcatgcttaacaagaacacaagtggatgacaactagcttttaagttgcatgtgccgcttgtttatgttttcctttctttggttcttttttgacatgtcacttcagttggatatatatattttatataaagtctttttttttaatgtagacgcataaagtgtgtaacaaaaaatgttataaaaatgttattcagtactcatcctgtctgccagtagacggctttac

SEQ ID NO: 86814 - DNA, 564 bp, Glycine max
  unsure (1)..(564): unsure at all n locations
tcgtacgtatgcttgaatcctctagagccgccgctttttttttttttttttttntattttnnnnccnttttctannttcagcagtaaaaactgcgggcttttttcctaaaaatgcaggtgccctattattcctaatactcaccacccctgttctaaaactctccttcatcttacacttccaatttcacctaacttttctacatacttcccaacattaatacactttaccttcttccacattttttataaattttactctttcaccatattaatttttttattatttttctaccatatttaaacttttcttttcttctttcatattttatcactttttcgtttgttgctattattcatatttatatacttttttttaccattttcccttataatctttttactctattcttttctttatatatatacactttatttatttatccttcttattactatactatttacttatttaatttttcttttatacctactttctatttttaatttttatatcattttaattttatttttttctatttctaaaatatttttcttacttattat

SEQ ID NO: 86815 - DNA, 316 bp, Glycine max
ccttcgaagaccccttttttatatatttaagcccccccacatacctccctaaaccataaaattacccccccaaaaatattccttacttattttcaaaaatttgcaaaaatataataacaaaaacccctttctcaactttgaccaattaacaaaaaatttttaattaaaacacaccctttatatttttttctttccacttaaaaaaaaacattttactttttaaaactcccaaacctttctaaatttcccccctagaagaattccttctttacaataacacaaatatattacccccccctttttaaatccccacacc

SEQ ID NO: 86816 - DNA, 613 bp, Glycine max
aagacatggtattatgctctgcattggcccttcagtctaattttctgcttggcaaatgaattacaaccaaagacaacattgaccattccaaaatgcattgtcaagtggcaggttagaagctgccccacacaaaatttactgggtggcatcaagctgcagtgagggattggctgcgaactaccaaacctctaaattgatcacttaatgagtcacctcacattcaaattttttttttctaccactcacacaggcccagtcatccattttggacacttctatgccttctaagaatggtgaatatctttcaataatgtactggacctacataaaacacagcggcaatgggtgcaagatggaattgaaaagcactttccccaactgcattttgaataagaaaatctacatgatttaattaaattacctgctccgataagataccggagagaccaacaactgctccgggctttgcatgagagataatttgatcagcaagatccaataaaggatttaagagtatatttgcaacgaccacatcaaacttttcctcatcagtgactggatgtatctcacaagtattttctccctccataactccaaatgtcaagtctttttg

SEQ ID NO: 86817 - DNA, 159 bp, Glycine max
acatcccccacatcaactaattaaatagatagcaaaaaattcccctgttgattacatataaaatccccaaaaattcaatatattaattcacaaaacaattatatataaaatttaactccttcatcatcaattgaaattcctttaaaaaccacaaatttt

SEQ ID NO: 86818 - DNA, 555 bp, Glycine max
  unsure (1)..(555): unsure at all n locations
cttggatcctctagagcggccgcttttnnnnnnnnnnnnnnnnnttttttttgatcaagccataaccggagatctatatatttaaagaatctgaaacagtgcacctttactgttctgaactttggataacaccacactagctcctaattcaaaaacacaactcaaactagaggtgtcctctaaaaatttattcaactagggaaacaaaactaattttcccaatcttaggttatgggggtaaatgaagactaccaggatcgtaaattccagcaccaagagctatgaaaacccaaaatacgagaatacttatgacagcctttctcaacagctggtcagaattgctggtttggtggccatctaattcattagattgatgcagngatggcaaacccctattgtcactgatatcctcctctctatcaatccggctggtcccagttgcatgaggttgcagaatatcccagttgccaattttagaacatctcatgcaagagcagctgcctccaagatatgatggtagggtcggaaaattgtcataaagtaccttccgatata

SEQ ID NO: 86819 - DNA, 493 bp, Glycine max
aaaaaaaaaaggattttttttttttttccccctaaaaaaggggggccccccaaataaatttgggtttttttgaaaattttttttggggccccctaaaaaaaacgtccccccgtttttttttccccttttttacccccctttattttttttccccggggaaaaaaaaggggggggggaacctttcgatctcaccgttaaaacttgggtccccaaggggaaacccaattttttcttccctattttaacaagggttaaaaaaaggggtttttaaacctttttttaaaaaaaaaaaattttttttaaaaaaaatttttttttttctcccaccattttccccctcaccccccattgaatcctcccctttttttgggccttcccccccccccccgccgaaaaaaaaacccccccccccttttcccctaaaaggggggggaaaaaattttttcctttctctcccccaaaaaagattccttttttaaaaaaaaattttttt

SEQ ID NO: 86820 - DNA, 203 bp, Glycine max
ccccacctcaactaattaaatatatagcaaaaaattcccctgttgatgacatttaaaatccccaaaaattcaatatattaattcacaaaacaattatatagaaaatttaactccttcatcatcaattgaaattcctttaaaaaccacaagttttcccttttgtcgtttttttgcaaccctaccgacacctttgtcaaccccaa

SEQ ID NO: 86821 - DNA, 209 bp, Glycine max
  unsure (1)..(209): unsure at all n locations
tttttnttttttttaaaattttaacacctaaatcaaaaggacacttgttaaattttttatagcacataaactacacccaatagtttaaatttaagacacacctttcctccatgcataacattaataactcccgtataaccaatctattaaccctacataaactcatataaaaacaattaacttttttaataccaacttacatactttta

SEQ ID NO: 86822 - DNA, 323 bp, Glycine max
acttaatgttcaattttcatttcatttttaaacacacctacataagcctcccgataaatttaaaaataagcgggggacttccatacccaaaacattaataacaaacaaaatataatccaaatccatacataacaattcaaacccaaagtattactaaactaaatacacttcttaaaaaaatattgtaacttaaaaaaaaccttctcctctttaaactcattcttcttcatatctcccctttcccaaaaccaccctttatttctcccctccactacaaccatattcataattttatcaacacatccctcattctctttatcttc

SEQ ID NO: 86823 - DNA, 386 bp, Glycine max
  unsure (1)..(386): unsure at all n locations
cgaaaggcggtttttttttttttttttnnttattttcctttcgcacccgagtatcggagcaggtaaatttttggagcctccccaccctactttgacccttttaagaatatttttttcttcaaatttttttctttattttatgcatttaactttaaaatatactccatatttatcagtcttaaaaatttcgtggggccaccgctacccccctttttttaatactacaccccaaggctcacactttttccaatttctttagacacaaatttttagatcaattattcttcaaataattaaaaaaagggccgatcaattaattattaatgtggctttcctcattaaaaaaattatccctcttaatgttaaatagatttaaaatagacttt

SEQ ID NO: 86824 - DNA, 307 bp, Glycine max
gcaaaaaaaagacaaaaaaaaaggccacgacaaacaaaagaaaaaaggcagccaaaacaaccacccacaagcataaaacctgggaaagagaaaaaaacaaatgccaaacccccaaagaaaatgaaacgaggcaaaaaaaccataacgaaccaaaaaccgggccacgaggggctgcggcggaaccagatgcaaacaagcaaacactgaaaaggacccggggcagcaaaaacaacaaccccggcataaacaaatcggttcccaacacgcctaaaaagactggcatcaacaacaacaattctaacaaaca

SEQ ID NO: 86825 - DNA, 500 bp, Glycine max
ggctggtgttgtttaggtaagttaaatgctggaaagggggtgaataagcatgacacggtactataacaattataatgcattaaaattaagtaagtactactgtaaactactctttgaatagctaatgtcgtgacaataaaactgctgcattaaaatcaataatttgactgatgactaaattaaaattaaaaaaaaagagcaaactaaggaagaaaaacataaaataaaaaattaaacggaaactaagcaagcataaacgacaaaaaagataatttaacctaaaaattcaatacaagaatatcaatttccataaaatatactataaaatactcggataattaatgtcgtacatgcatagatgtcatttatatcaacttcttaattaacgcataataactactctatataattactttatgtgtttacatatcattaatattatgataaattagtcagaaaaaaaaattattatgacaattaaaaaaaacaaaattaaaaca

SEQ ID NO: 86826 - DNA, 256 bp, Glycine max
  unsure (1)..(256): unsure at all n locations
agcgggcggccttcaaatttttttttttacaccaaataattaaactcaaattttactcaaagnatncacaatggaatggtggctatataatactcgtaactcctaaaataatacatataatgaattcacatcaaaattgatgcctcaaacttctacttttaacaatccaaatgcctaaattttttatattttaatttaacattatacagacctcccatgaacccatacttacctaaaaaaactatcttacccaaat

SEQ ID NO: 86827 - DNA, 514 bp, Glycine max
  unsure (1)..(514): unsure at all n locations
ccgagatggtactggaggtaagtaagggggagaaaatgtacatcagaagtttccagcaagtttactttggacccttttcaggaatttttctttgcatgcagttttttttctttattttatgcatataactagaaaatataatacatatatatcagttttaaaaattttggggggccatggctccccccgtcttttcaatgctccaccccagggcacacctcttggccatttctcggagacacaagttgttggatcaagtggtctcgaaataattaagaagaggggggttaaattaattattaatgtgtcttgactaattaaaaaatttatccttcttaatgttaatagatttaactagacttttactactaagttaagaaagtgaagaacagaaacaaaaacttaaccaaaagtaaaagctacaattaaaagtacatagcagaaattaaagagtgtngggaagaagaagacaaacacaagatttatactggttcgngaacaacccatgcctaca

SEQ ID NO: 86828 - DNA, 517 bp, Glycine max
ggaaaaattaatccatcatattaatagtcatcattaactattttgttttcattgtcaatttttttgttgtcgtcttttttcagtgttcctgtaagctcaaggcaagggagagattagtacaataaaattgatgcatgtttggaagtttctttcttcttgaaaaaagaaaataaaatggtttgttgaatatacaagcgtttcatgttggaaataataatgagtggatattttctaaatgtgttcttattcatatgcatcttcatcatatagattaatatataatgtttaattaagttgaataatttgtgttttaatttccggaaaaaaatgtttcaaataaaaaaaagtgattaattatttcgaattttaaatattttaatgaacgaaatccatgaagtcacccgtaaatcattctttaaaaatgcttctgtcaattcactaatttcatttataaacattttgtcttttcaaataacactaaaaataaaaatgtttttgtcaacatcagtgtcaaatg

SEQ ID NO: 86829 - DNA, 343 bp, Glycine max
acgcacaccttcccaactttatatatagagccattttccgaatgttttggaaacaccacaacaaggtcccctcttcactttctataatctgagagggttctgctgtatcttatgggacttgctcacagataaattctttaggaaagggcttgtacacaccttgggaacaattattcttgatattcagcctcattttacaacaccttattagcaaacacactttgttggaaacagaacataactatattagcaaagacatcgtactagcagattttttctcaaataaacaatgtaactcaagccatttaaatacaagtttatcagcaagcacaccaaaaatttt

SEQ ID NO: 86830 - DNA, 523 bp, Glycine max
ggaaagaattgatatcacataagaatatgaaaatgtggtaaaatggtttccctatgatcacagtcattcatgcagattaacagccctcaattctagctaatgcatgtacatattttactgatctattgttgtgcatcaacactgcacaatgattgcagtattttttttcaaccatgaatataattgcaccacatatcattttgtaaattttgtccagtcttctccctctaatgtaaaagatgctggtattcttatctactatactgatgactcccagaacatgtttgctactagaaatttcacccacttgcataatcacctccactatccatccgcattcttttgcttacataaggctttatcttgattgccatctcagattgagtttcaacatttaacttctgtttctccctctcaaactcttttctggattctcttctgctaccagattgccagactctaccaaaattaggaagccagttggaatcacactcattccttatagactcccccctcctttcct

SEQ ID NO: 86831 - DNA, 84 bp, Glycine max
  unsure (1)..(84): unsure at all n locations
tctagagcggccgctgggnnttttttttttttttttttttttttgcttaaactcagcttgtagccccgcctgacctgagggctg

SEQ ID NO: 86832 - DNA, 518 bp, Glycine max
ggggttaattttggtttctaaatttaaagaaaaagacttttatttggttgcatgtttttattaaatcatttattatatgacattgccaagctgatgcaccaaattagtcttgcaattgttcttcaatatatttatcatgaatgcattttaatatgttagcagttttatattttttcttcatagtgtagtcttttctaaataatatactaacaacatatttaataacaataacctcaataaaattaaatatgtatttcattgtttataagattttaaaacatgaataactattcatatcatcgaagcttaatagaccttgttagtttataaaatatgttatatattttgatcatattagttttgattatcatttaataaggtttacatatttatcattaaatgtatacaattatactatacatttaattttatagtttacccattggtaatagtgactgttcaagggaaagaaaaaaaatgcaatttttggaaattcaaagaaatgcaatttttgaaag

SEQ ID NO: 86833 - DNA, 526 bp, Glycine max
tttttgaaagattccggtgtgtattatcgatagaattatggaaaccgtttaacctctaatttgcttaccacgtgttgacacatggttcttttagaatattttattactatgcactttttctctccttcgcggatccatactccactgtttcgatctttttcttccaattgtttatgctaaacaagaaattgtatcctgatctaagaccaccacgttggccgtggtcccgcccattaaaaggaagacacgtgtcctatagggaagtcctcactaacggagctgtaacaacgtttaatacgaaaatctgaaatttaaaaaacaagattatcattaacagcagattacgtttcatattaattggaaacgatcaatatccaacaacaaataactgccaaatcatactaacaaattttgcacaaatcggctcaaagaggttcaatcttgccgacattcttctgggcatggttggtggactgaagagatcctgttgttacattctttaatgttcaatcacatgaacattttt

SEQ ID NO: 86834 - DNA, 513 bp, Glycine max
  unsure (1)..(513): unsure at all n locations
ctctagaagcggccgcttttttttttttttntttttnttnntttttttcacccgctcattannccccanaanccacagagccaacggtcaaatttggcacgggagctcacgcacaatgcgcgattactccctcgttcaagggcggctggttcaaggcaaccctatttattgcatcaaaacccagcccaatttgaacactaaaacgaacagaaaaggcctgcatcagtaaaagttccacaagtcatcagaagatacaactgacacccaaatacaaggtgcaaacagtcaagaaatactgtacaaagaaataactgccttctcaaaaatctccttactttttagaaatcagcttttttggaagttcattcaagggagtcggttttaaaagaaaaagcctaacagcacgctccatcaaagtacctacacatttcaacccacgtgactgcaataaagacttaaacctttccaaaccaagaacctcaaattccgccgctgaattaaaggcataaaaat

SEQ ID NO: 86835 - DNA, 482 bp, Glycine max
gttgatctgagcgagatgcgtagaaaatttctgagtatttgatctggaaccattgttgtttcttaattaatcaacgaccctttgccatttagtttctaaatggatcttgtgtcatatagattttaagtcagaaattcatgcttcagtttcatcactcatttgagtcagcattcaaatttaccataatatccataccattgtcttcatttgtagtttttctcccacttgggatgtatgcttttcatgtttgtgtgaaaattgttgttttggctgccgttttcccagctaaattgtatcttttaacttggtctaataaatctgaacttaaacaggttttactccttttgtatttctattgcttgtcattggatgcaatgcaaggcctttgtattcacttcccagcaaaggtgatgatggaaataggaagcccctacaaacttttcgcccttataacattgctcatcgcggttcaaacggagagc

SEQ ID NO: 86836 - DNA, 403 bp, Glycine max
  unsure (1)..(403): unsure at all n locations
agctacttattacccantcaattaaaggccccgttccttttaaaaatagaggcggcaacaaaaaacaatcctgacatctattactttaattcacaacatctcacaaattctaataccttaccatccatcataaatttctacaaatttaagcatttttctaaaaaaaaactcaacccatccatttttcacttaaataaattctataatttgcataataactttttaatctcaaccatcccactaccctattatttaactataattttttcagacatcaccactcttaatttctattcaacatataaaaccatacctaatacaacatcctcctaacatttttattctattacataattctatattcctttataaaatcaataccccacctctatatttaaaacaa

SEQ ID NO: 86837 - DNA, 492 bp, Glycine max
ggaataaaaaaagtggtatttgtctatcattttctgggcatattaactacctattcaatttagttaactacgtgaagctaatgctgagttataatagttagttagttggatctagccccggtgaaaccaaagcagtagctggatttccattcggatgcaaataatagggacggtggggatttagggtttgatcaaattttgagctcatcttgctagaaagaaaatctataatgaaggaaaggaagcaaaggtacaagaatagatcagaataacacagtagagttctcatttgaagagcttcgatttagatattaattagaaaaataataataacaagttttatgagccttaaattgtggaagatgaaagttgtaaggttataagttataatgtcttgaataagcaattatgtgagcatttagtattcttgaataaataaattatgtgagtgctcactctattttagtataaatagggggatcaatactcttg

SEQ ID NO: 86838 - DNA, 264 bp, Glycine max
caataacttctttttctttctcttttatcataaatgacacgggatgtaaagctattaacattggttaacatttttcttatcataattttttttatgatatttcattaaattttacaataaatctctattgaaaaaaattcatataataaatttctattgaaaataatatatattatttaatgcatatcaagtgtttaatcagtgcacttaatcctcttgggacagagaatttaaacaaaccccattggtgaatattgcaatctc

SEQ ID NO: 86839 - DNA, 526 bp, Glycine max
gcatgaaaactttcctttgtgaagctataattggcatccagtacataaaaagtggaaaaaagagaccatttccaaggtagacactcgagcttataatacaaaacaagaagagaaatttcatatagagagacacttgggtttaaattcgagtgagaaaacaaaccaaggccagagttaatgctttttgaacatgtaactttttattttcacttatagaaaaggaaccccaaaagcaccaactagcacaaattaaagtccactagtaacaactttttgtagtgtagtgaccatctcttgacaaaggtaactcggctgaaagccacaggtttgatctctaccaccccctccccacttcatatctttacctcatttccatgtcctaactatgcgaaaaatcacattttttcaaggttcttcagccagctttggtgaacagtatgcaacagcctctgcaacagtgaggaagatcttgtcctctccaagcaaagcagcaaagtttgatgtgtggagcttgtctattactatt

SEQ ID NO: 86840 - DNA, 521 bp, Glycine max
gttgaaatgcacaatttgctagtcagggtaccgggtatcctcccctattcattaccccaatggtgctgcatatgtttctcctcctcaaactgagacaaatcaagccatctttttgtctccacctctttttgtaatgtcttcctacatttcacttctagttcttcatttttttaagacctcgaactctcattcactaatcacggaccagaagcagccaaaatagcgctgatgtccaagtttacaacagcactaacttgtggttcatttgagattactaacttttgagggtgacttagacctaaacccaaattctaaaatgatgtccaagccatcttctttgataaatctcatatctgtcatgaatgaatgaatgcaaagcttgcaaaagaataaagttcaaggtcatgggaagcagatagtggaagaaagaaaatggtgaagaggaaaaaaatgaaagagagaaaatggcaaaaggaaaaaaaatgaatatttgtttggatattgctcaaatgagcaaatct

SEQ ID NO: 86841 - DNA, 311 bp, Glycine max
tgacatattattttttgcttccatataacattacagaaaactccaagcgatctttctatttaaggcttaaagaaaaatattcatcctgtcacctttcatattaaacaaaacatagcagcctcatccctttaaatttaaacatccataattatcacctcatactcttatatcctaaacattcgaaaatatcacttatcaaaaacccaactctactatatataactcctgcaaaaactataaattaatccccaactcctatttccatattacttacacacaaacttccgttcaaaaagcccaaactaatccca

SEQ ID NO: 86842 - DNA, 336 bp, Glycine max
gggggggattgataactcctaaaaaactgtgctctgcgctaaaagaatatagtgagaatttatttaaaaatatttatttagcacagatttatgtgaatatgtgaagaaaaaatgtgttatttaaacacatgtgtggatatataaactctggtgacacaaagcacaaaggtgtggaaatatcgcggaaaagagggggtctcattggcccccaccaatgtgtcgctctcagcgcacatctctctatgaacaccccgaattttaaggggcgctataaacacacaacacgctatatgcgcacatccaaaacacaatgtgctaaaagaaatctttttttta

SEQ ID NO: 86843 - DNA, 511 bp, Glycine max
ggcagagagcttttgtgaataatttattgaagttaatgacatcctttggtattatattacttttcttttagttatgtagtatggatagtcaagaaatggaaagtagtatagttgatgctttggctgcttcaagaaaacgtacaagagatgaggaagaggaagaagaacttgaacaagcatttttcattattgttagtgttgccactatgcttttgagtgcactgacttggtatcatgacaagtactttgttaaggaacctgcccgaaatttggaattagaaagacatagtttcctcaatcgtctatataggggaacaaaaactgattgcattgaacaattaagggtcagtaaaaaggcatttttttaagctttgtggaattttacaagagaaaaaggcaattggtaaaaacaagaaatgttcccatagctgaagttgtggcaatgtttttgcatatccttgctcacaacctaaagtatagagttgtgcactttaattattgtagatccatg

SEQ ID NO: 86844 - DNA, 440 bp, Glycine max
aaaaacacaccaaaccctcgcatgggtttataaatatgtaacccaacaacttctttttctaaaaaaattttaacttttacaaattccgcttaaccaacacttatcaagtcagatttttcttaagtaccatctctaaacccaaaagtgaccaccacattaataaaaaccagccatcccccctttaaacccatttgcccacctccccttaatttaatccctcccgaaatccaaccccaactctaaaacctacaaaaagtattctaatttaacaaaacctttttctttcaatcaaaaaatagatctttctaaactcaacctctttcaaaaccccatctttaacataccctattcaaaaaaaaatttatatcgaacaatttaattatcttcattctatacccccatctctttaaaaaaaaaatgccccttccttataatttttt

SEQ ID NO: 86845 - DNA, 541 bp, Glycine max
ggaagcaagaattatgatgacataaaagttggtgggatgggcatttcattaaaaaaaatatttctacaaactaactaataattactaaactaaattgttcatacaaagagagaacaaaagaataaaattaatcaaatttgaacacagatactatataagtttagtagaaaaactgtctaaaagtgttgctcactaaaattatatacactaaaagaaaatattcaaaattatttaaaattatcaaattgagcatgaaagttatatcaattaagtttatacgaccgagtagtttcaagttgaattctgtcctgcaagataatatataaatcttcatatttgaactattttataaaaatccattggttaaaaattttccttatataattgtatattacctaatatttttttcgttgaaacacatggtcaaggggcacagacttttcaatcatttttgatcggaatcaccatatccatagtcaaaagggaacctccaccttacaaaaataaagtacctggccaaaatgaattgaaataagtcatg

SEQ ID NO: 86846 - DNA, 538 bp, Glycine max
  unsure (1)..(538): unsure at all n locations
ggaattcggagggttggagnnnggccaggccagggcattggtccaagactcaaccttaagtgagttggattgggttgacccttacagggggggtttggcccaatggatcggatcaatccgttttgacaactataaatgtaccaacatccaaaacttaagcttttggggtagctagtttaggacaatatgtaattcatttatgtcacataattcataaaaacacttaatgactcactttaaaagcttcaagttggaaagcaacgggattttcacaatatattaagaaatacaccagcgtggttttaaggcagtgagctcgatgtaataaaatttctttgcaagtacaacttacacataaccaattgcaagtcgaattagagaaatgatcctggtccttactgaatcatacgcacttagaaaaccactgtgaacctgcaataattcatcaccaacaacaaatgaatcttatgctcttaaagtcttctagacatctactaaacatgtctgacatatataaaccttccaacagttaacatac

SEQ ID NO: 86847 - DNA, 432 bp, Glycine max
aaaattgggggatgttgcttcattaaaaaaaaatttctacaaacaaactaataattactaaactaaattgttctaccagagagaacaaacaataaaattattaaatttgaaccccaatctttatagtttatataaaaactgctaaaagtgtcctcacttaaattttatcacttaaagaaaatttcaaaattatttaaaattatcaaattgagcatcaaagctatttcaattaaatttataccacccactagtttcaagcttaattctgtccttccaagaaaactataaatcttcatattcaaacttattttaaaaatccattggttaaaaatttcccttatataaactgtatattacctaatatttttttcggtgaaacacaattgccaggggcacatacttttcaataattttttgatcggaattaccatt

SEQ ID NO: 86848 - DNA, 439 bp, Glycine max
ggttaccctactctccagtgaggtgatgcataacctgtttgattgcacgtgaacatttccaccaaagttggttagtggttttcggagcactggtgaagaaatagatgccctgtggaaagatgcgtgtccattaagtactggttgatcaactgtacctctcacctcaagcttcaaatctgcgttgccatgaagccaatttgcatgaggagacaaagccgtaaccaatgtcattcccccatcttttatatcagcatcaatcctgacttctccaacatctaaaatttgccaatttaaacctttaaggctttctgctaactgagtattccaaccttcttcatttctatctctagaaacttttttgtcgctggcatcatcgacggtccctctattcttctccttgacccaatcaggaacccaagtaacttgactcttatctaat

SEQ ID NO: 86849 - DNA, 153 bp, Glycine max
acgcccacgcgctgcgtgcgggtgacatcaaacaagctggcttggtactccggcgtggtacagtcttgcggtgggggtaacgttacttaccactcatggcccagctccaagcctcttggtttcaaccaatcctcggccacgctgctcgcagac

SEQ ID NO: 86850 - DNA, 365 bp, Glycine max
gaaggtgcaagagtttgttgtgagctataagctagtttatcgtgaggagaatatgaagttgtttgttttctttgttgctgcagtagttttggtagcatggccatgccatggcgcaggctaccaaaggttccctctccgaatgaaaactggctatggtgagcgttcttcggaggtaaaaatgcgcaagttttatgcttgctgtggaagcacacaacatccgagcctttaaaaccattcctgaagagtgcgttgaaccaacaaaggactacatttatggcgaacaatttagatcagactctaaaacagttaaccaacaagctttcttttatgctagtgaacgcgaagtccatcacaacgacatattt

SEQ ID NO: 86851 - DNA, 201 bp, Glycine max
tcactagatgatctgcttataccatctctacagagtggggactccttatttgatgttgatacagttcacaggctactggtgaatttcttgcaacgggttgaagaggaagaaaccgaagattatgggtatgaatctgatgggttttgttcttctggccatggttctctgctaaaagtgggacagcttattgatgcttattta

SEQ ID NO: 86852 - DNA, 206 bp, Glycine max
cccttccgcccacccttccgccaacccttcggtaggtgggagaagaccaccgaaaggctccttccctcaagcccttattcctgggttcccattggggggaggttcttcttgacccatcctcttcttggaagggtggcttccctcaacccttcttcttcttcattccacctgaatttaaattccaaaagccaaaggcccccttggtg

SEQ ID NO: 86853 - DNA, 249 bp, Glycine max
aaatctcgtgcggttgcaggaaaccccaccggggggggaagggttaaatttcctttctatgggtttggggaattaacctatggatctttgacaacctcaccccctcatcaatgcaattcatttctttgccctttaaaaacaaaatccgcgacatgacttttaacatcccttccttaacttcccaccctttccattttccgttgctttgctgggcgctgacatgcctttaatttaaatggaaaatggggg

SEQ ID NO: 86854 - DNA, 60 bp, Glycine max
cccacgcgtccgcccacgcgtccgcccacgcgttcgcccacgcgttcgcccacgcgtccg

SEQ ID NO: 86855 - DNA, 405 bp, Glycine max
cagccttccggaggaggacaccagaagggggtttgggagttttttgacctaaatccaaccggattccattccccctttttttttttttttccttttggcaatggattttttctttttttccctttggttaaacctgggaccttggggattttggaatgacccaccacctaaggttttaatcagttggaaccgttgcaaaaaaaaataccgccatagtgggggttgttgttcattttgggtcaaaaaaatagtttctggggtccccaggatattgtaggtttaaagatggggttatctcaattcagttttgtcatcttcaagcgaggttcatgctgcaagtgatgcaattgcgagtggtggggggctaagtcacaatagaaaattcagctatgggtatgctagctc

SEQ ID NO: 86856 - DNA, 354 bp, Glycine max
gattgtagaatttttttgcaactatataatattggaggttaggaatgaagtcagtgtacaattatgtcacgttgagaggaagtacagaaaggagaggctgctggagccgaactggagggaaaacgaatgcttcttgtaagggagggagaaagaaaaagagagatgcgaagcatggcaagctccgcttcctcgcgaggcattgcagctatcgtcggtgtgggccccaacctcggcctctccatcgctcgcaagttcgctcacgatggctacacggttgccatcctcgctcgtgacttggggaggttgtcaagatttgctgatgaaatagcgagggaagagaaagcgcaagttttt

SEQ ID NO: 86857 - DNA, 83 bp, Glycine max
ggatgaagcgagtgaggggagtccccaaacaagggttgggccctccaggggtgatatccctaggggaaatggtggtaggtttg

SEQ ID NO: 86858 - DNA, 187 bp, Glycine max
gctcgcaacttggtccacgaaaccctgggcctgggaaaattccacgaagatgtggagagccagcccttaaccagccccaagatgcccaccccgggttttcttttggtcatgaattggaaccagagccccttaaaaggaaggggtggggggattggggaaagggggtggtccctttttttcacttttg

SEQ ID NO: 86859 - DNA, 282 bp, Glycine max
ctctttaatattaaaaagtataaaaaaatgctagtttggcagaatatttcttccgaaatatttgtcaatccacttaaaacatgacagttatcaatctatttaattataccttctaaaaaaacttcgtttcaaacgcattttttactcttatctttattattttattttaaaattgttcatggaattatttacttatgctatttatataattcaaactaaatttataaaaaaaataatctctaccatttctttttctttttcactcaccttttccatcatatt

SEQ ID NO: 86860 - DNA, 282 bp, Glycine max
gatccaattagaatgagaagaaccaaaattatacaactagcatatttaagggtccatttgctaagaagaaaagaaataggtacaaattagccttttttttatttttttggttttggaaggttatttttttaattttaacacaaacttatgtgaacaaaaatttaaaaaataaacttggaatgaaaaaaattaaaaaaaaatgcttacttacaaattattaaaatatatttaagcgaaaaaaaaacgatggatgaaagagggaaggggatgaaataactaatg

SEQ ID NO: 86861 - DNA, 324 bp, Glycine max
cattcaaaggaccacctaccatttgttgttcacgcatcaagtccaataagaaagtgattttgggcctaactcaaccccaaaagctagctcaaggggtgagagaaagaatatttttctcccctcttttattaactgattagctaggctaaaaatactaatagaatatcgtatcatatattttatcagtctcaatcgattgctttgttctatgtttgatattgagatgcttcaagtgctctctagatgtttgtgattaatcttatttgaagatagcctttgattagttttgattggatttggatggatgccgtatacggtggactc

SEQ ID NO: 86862 - DNA, 203 bp, Glycine max
gatttccgggtccgcccaacccgtccggttggaaaagaccaccgaagggccgattaacccatgcccaggggagagattggagtttgagggttttatggggccacctggttcctttaaaatccaaaaaaaacctaccgaatggtccaaggttattaaaaaaggtttcccctggtttatacctggggtatttggccatttccccc

SEQ ID NO: 86863 - DNA, 280 bp, Glycine max
aggggttctagtgtgtgattgtttgttgttgtaactcgttcttcttcttttgttgttctgtgtttgtgtttgttttttctctcacctgaaaatgtcttgctgcggtggtaactgtggttgcggaagctcctgcaagtgcggcaacagctgcggaggctgcaagatgtacccagacttgagctacactgagtcaaccaccaccgagaccttggtcatgggagtggcacctgttaaggctcaatttgagggtgctgaaatgggtgtgcccgctgagaacgat

SEQ ID NO: 86864 - DNA, 67 bp, Glycine max
  unsure (1)..(67): unsure at all n locations
tttttttaatattttaaaaaaaaaaagtggtaccggttaatattaaaattaatatttttncccnnna

SEQ ID NO: 86865 - DNA, 279 bp, Glycine max
gccacgcgtacgccacgtgccgtgacgaaaaagggacttctcttctctcaacacaatttcatctgggcgggcctcgattctaggagtaggatgtaggattgaatgagttccctaatcctcctcctgacaaaaacgatacggctgatctggaaatgctatgtatacctttaatgattgcttaaatgcatgcatacacagttcaaacgcattgcagaagttgactctcatgttcttgacaaaaagtccatgccttcttggcacctttgtgggagcaattct

SEQ ID NO: 86866 - DNA, 129 bp, Glycine max
atgggttgaatttaactgtcatgattgtgtggaatttaactgtcaataaaggagtggaaaaatttacttatgaatttatttagtaaaaaagttcataaagttgagatttatggttactcttatggctgc

SEQ ID NO: 86867 - DNA, 283 bp, Glycine max
gacacgcacctctttctgattgccttcaaatcacacactctcttcaatttctagggttttgctattgctttgcctccgttccccctttctcacaaaaacaacgccttttctcttctccttcgtatctattctttgcgtttggtttttggttgattgaaggcattcacagcgtaattcgttgctgcattttaatcgatttatctaaccaggactgaatgacctaatggagtctaaaggtgggaaaaagaagtctagtagtagtagtagtaaatcaattttttac

SEQ ID NO: 86868 - DNA, 238 bp, Glycine max
caaggccagggatcccccattggtcctcccctttcctaaaagaagagaaagtggcctttggcttcttcctttttcaaggctaacttttttctggcctttaatcccgacctttgggaagcaccggtttttttccttaaaaacctgggttcagatacctttttattaggcttaccggaaaagttccgttaataattccaaggattttttttgggccgggaagaattaattaccttttttt

SEQ ID NO: 86869 - DNA, 207 bp, Glycine max
cgcaggatgtgacattgcaggttgtttttgctacacccaaggggggatttattccttcgcttatacactaatcatgctacatactctcattttaaacccgagaggtaagtgacaccgcacttttatagtgtatcattatccacaccacacagttaacctttcgattaagaaaagtttcgacgaggtcaacacggtctgacatcaccc

SEQ ID NO: 86870 - DNA, 545 bp, Glycine max
agaaaagtcattaagacaaacaaattaagtgatagtaggacatgatcatgccattagcttagtttgtttgtcttaatgacttttctgaaaataaatagaaaaagaatttttactggagattttttcctcaactatttaaaaaaaaaatgcaaaagaaagcaggaacccaaaaaaatcagcagggctatctagtcctatccatggcaataaccatggtatagccatggcccatgggcataacatcaaagagaaactgaaagcatactcctatccctaagattttagtgcagggagaccaagatacatgcattcaatttcaaccaaatgcaccaaagaacaacatttactggtcacttgttgaaaaatttgggtttcttgttattaccataaccttaaaataaacactcttaaggtagaatagactcagtgaccaaaattgcattggctaatcttctatatggttatctgataagtcagagctttatgaattgttaatttctattttttaatgggaaggtactacttactttttgccataaatgcag

SEQ ID NO: 86871 - DNA, 527 bp, Glycine max
gggaagaaatgaggtgctttgatgttgcatatgtttatgttatgttgcagtgtcataaagtagtttgtttaggtttaaatatttcacgtgatgtcctattttgatatcgtgcattttagcttttggcctttgaaatgtgaaaattttacaagtattttcataattaaattaataaaaattttaaatgaatttaaaaaactctttcgcttgagttagttcctagttccatgtaacagtggtgggtcgttacaataaacacaaaacctaaatttgtagataaacaaacattctcctttgtctgctcatcatccccaaaagaacatcaaacaatttcacacattggagaaacatgtttggataaggtggttaaggtttaataacacccaaaaataatcttttcaaatttaggcatactagaggaggagtgattcataaatttgaaaaagaagatgaaaaaattattaaaatatgagaagaggaagagacaaacgttgagatgaaagagaaatgacaacaataagaagaaa

SEQ ID NO: 86872 - DNA, 426 bp, Glycine max
cggggaaaaggggggttttttttttttggaaccccctttttgaaaaaattccccgggtttaaaggggtttgggggcccctttttttttttggtttttttaacaaaaaaaccttttttttttttttggaatttttttttttgttttttaccacatttgtggggaaaaaaaattttttgaaattttttaaaaaaaaattggaacccttttttttttttttcccctttttgggaaaaatttgtggggcccccaaatattttttttttccgggggtttttttaaaagggggtttttttttccccgcggcccccttccccttttaaaagaaaaaaaaatttttttttttttaaaaaacttttccgccggggaaaaacccccccccttttttaaaaccttttttttggaaaaaaaaataaaatttttttttt

SEQ ID NO: 86873 - DNA, 562 bp, Glycine max
aaagatgaaaaccaaaaacactcaaagcaagggacacctaacgttgctagctatgagcgaaaatctatgtccaatcccatcttacccattgctcattacatttgataatagtctgaaatatataatatataatatataatcgcttcacctaccctcctcccccgtcaaaacatagaagcacggtataaaactaaaggaatgtcaaagtaagaaattcatcatcttcatcttgcaggggtggtcattcttggtttatctaataccagattcaaggtttggaaaaggctggcttgcgaaggccaggtatctgcaaaagaattttatcaacaatcatacgaaccaaatactaagtgggtgtaatattcaaattaaatctaaaatatctatttaaaggtaaagcacatggtacagtgaggacagttgtaaagatatcagcaagagaaatacctcaattccatgagggcctattcggttacgagaaatgaagttaacaatcagagttgcaaattcatcaggtacatcttcctaaaaatattagggtagaaattgttagattacaaat

SEQ ID NO: 86874 - DNA, 508 bp, Glycine max
catggttcatgagcctaatccctctatagttagcaaacttttgcaaatctcccttgttctcaaaaataggaattaaagtgctccctttccatctagcattttatatgatttcattatctcattaaaattttcgaaagccaagttataccttgctcccctagacagtagacacttccaaacttcagaagaataaagaaactataggctcaaaaaaatgaaacattcatgcatttcctcaaaagggaaaggcctaccaaaaggaagggtgcctgcaaaaatctaattttaacttgaagagcagggagaggctggaaactttatcaactgcttttgtttattgacaaaacaattcctttacataacaatttaacctgtttttggtgtcattttaggtctaacctgttccctaggagtccttaatggccattatctcgtcaaagaatgaagaaaggaaaacatggggggaaaactatatatctatttaagtgcttgaatcactcatcacact

SEQ ID NO: 86875 - DNA, 533 bp, Glycine max
ggcagagacgtgttattcattgacgtcgtacataaatgcaagctaaatattatatgagtgaggtatgatactgcctcaacataccatgaagtatgtgctacgcagcaaccatgctagacagagttaaagagtattgcaagcattctttcaggctacaattacctcatcaaataaagatatacgagtacggaggttgttacctgcgcaagcatgggcattttttttaaaaggcaagtacaattgccttttaagaatgtatttgaaaatatacacaataatatgtcagatattaatatcatacaactgatcaaatatcatgatgttagttcatcattcaagtttgtagtaagaccaacatatgatgacccggaaacatcactttaccactacaagccctagacagcttcctgttttacctgccagccttgatttcctgcattagaggcaaccacagtaaagcaaaaattaattgaaacatgaattttagtagcataaccagagtgccattgaatcaaacaacaaatcaagctaac

SEQ ID NO: 86876 - DNA, 567 bp, Glycine max
aaaaaattgaaaatgagacccttatcaaatgtttaacttaacaatgtttttgtcaaaccaaaattttgatcaagagaaagatgcacgtaaagtattgatataatacattataatttatatttcattataagcataacgctaatacaactagagtcttcttaaaactatcaaaacatgatataagtatctcaattatcagtgaagaaatgtaaaacaatcataatttccaacttattgccttctccaagcattaacaaacttagacattggagtcatccaagagggctagtgtcttcaaggactgaaaattaaaaagagaaagaaagaaagaaaagaaaaacaaaatgttagtttccaaaatgtgtaaataaaaataaataaaattcttatacttataaaaaaaattctagtaattcaagtagtcagaataataacatcaagttaatgatagattaaaatcacaatagtttataagaaaaacatttaagtatttaacatcaataattatgagtttaatgattatataacgacaatatagttttatactattaattaatcttaacataa

SEQ ID NO: 86877 - DNA, 568 bp, Glycine max
ggggtgcaatatttggaaaaactagaaccataaggttgctctatgaattaggggaacatctttgattttctgtggaattatatgaaccttagaaatattttatattatttattttccaaaattcctaaaatttgtcctatagcgtgttttaataaggaaaattatttattactttagccatttcaaaagttgttaatcaaagatcattcagctgaaactttgtattgatgtctatgattataaaaactcattttcataaataaaaacacaagaaaaattggtttaaaaaaaacatatttttttagttccactcacaatgggttggagcctagaaaaaggatttgaacttttttgtaatattctttgatctcaaagcttatataccacaatttgagaacgttgcctaatgatatttcatcaatgaaatgtctcacatctgattctatcttagtgtttcttgttggaaaacatgccaaaggggattcagaagctcactagtctccaagtgctcaagagatttctaataagtacttctagaaaaaactcccggtagaatatcatatcatgc

SEQ ID NO: 86878 - DNA, 99 bp, Glycine max
  unsure (1)..(99): unsure at all n locations
acgtatagctgggatcctctagagcggccgcttnnnnnttttttttttttttttttttttgggataccgtgtgtgttggattttttttatatataaccg

SEQ ID NO: 86879 - DNA, 291 bp, Glycine max
gcggccgattaattttttattttatttttttttttttactgtattcacatagtaaaattatatactcgctgtagattttataaaattacattttcctacataaatctattaaaaacatttctttatgtatcatcatataaaatatatattttcttaaagaacacattcatttacatcaaaaaaaagggggaaatttataaaaaaattcaataaaaaaaaaaacataatttattttaaatgtaatgaaacattaataaaattttagctattacttatttaaaattcattttt

SEQ ID NO: 86880 - DNA, 582 bp, Glycine max
gggatgcaatcctaccgtagtagtacaaagaaataaacaatatgattgatatattacactaattattttcagcacaataaaaatgcgcttacacactaaacaccaataatattttgacacaaacacaacagtgatattattatccgttgatgtgtatatttaatttagtttactattgtacatgtgtgtcttattttctattgcattaacttatttttatgatgataaattttttaacattttttatgagataagacataagtcatacttttttttaaaggacataagtcatatacataaaacttataaatcttacacaaaaccccataaatcttttttttgttgtgtacttgttggatttaatgttgtaaataaaaacttaaacaaatagggtaaaacttataaaagaatgattgatttatagtaaaatattagtctttctacttaaaacccaattaacatatcaatttattatattcatagatggaaaattaaattaaattctattttgttcttgtatgcaatgatgagatctgggtcgtctaatttggaacatttgcttgcagaaactttttaaaacta

SEQ ID NO: 86881 - DNA, 414 bp, Glycine max
  unsure (1)..(414): unsure at all n locations
tctacagcggccgctttttttttttttttatataatttttnattggggtttatttctattgtattatttgattacttcgagggaacatataaaacaaaacagaggttacataaaatataaagtaacaacttggcaaaagagatatagacatagatatcgacctatattgtataaagcctatagccccattaaccctcttaagatttcacacgatttgaacaacacatggtggctgattgagagaggcataacacgtgcacatttatacctttattaaaatttttaaccttctccttttttgttgctattgtctgttgtgtatcttgttttggtcacttagcatataacagatttggatttgcttagtttattatgttttaaaattttattctgaaattttgttttaattttatt

SEQ ID NO: 86882 - DNA, 570 bp, Glycine max
gcttgcttgctccttatttcttcactgaatcctagagtgtcatcgtcagggttcattggtggcagtggtgtgtcagacttttcgtcgggacaggtggtttcaacaatatatcaattctggcggctaccataacattactgcttccgtgaccaccaacctccaccctctctaccatacccaacaacaacaaaatgctatgcaaattatagaaatgaagcaattttcaacgtcaagaaccaaaaaggggaaaaacctacggcatctgttttcaagtgagtacttggggaactccgaaaatagtaaatagggtaggagtgggggagagggtgtgatcattgtagttgtggtagtcatggttggtgaaggtggcgacaaatcacccatggaagagggaccatctcggagattggggattttgtttttcatgttgaagagaaagagataaggaaaaagaaagacgtgtctaatttttagtggtgagacatgatacatataggttcggatataatcgaacccaactctaggccacaaatttacacattttatttttacgaggaccaaaaacatttt

SEQ ID NO: 86883 - DNA, 568 bp, Glycine max
cgacaaaatcctatgtgatatacttgaaaaataatcacattaagaatattattaatataatgtgatgagatagacaaataattatatctctcgagcatgatataatacgattaataaataacattgaaaaccatgtctcttagatgtattgcggtaagaaaaatgtctcttagatgtattgcggtaagaaaaatgtctcttagatgtatagttttttttttactgctcttagatgtatagttaagaatttgaatttcagatctgcgtatacggaaaaaaaggacatatgttaaaagaaattagtatctcaaataaatctctctatatctcgagaaatttttactctcgactaaaaaatactctatctacccaaaatttaacagtcacaataatttctactttaacagtcacaataatttctactttcttttttattccgacaacaatttcaggttatgtcaggctccaaaaagtaatcgtgagcggtttctttttttcttcttttaaaaagatcacttaactttttttttagcagaggagaaagattaattaactttacataacataa

SEQ ID NO: 86884 - DNA, 527 bp, Glycine max
gtggacctgccagatataaaaggtattactgtcaattaacacacctatctttacttttatgtaaagattggaccaatagaaaaaggtagcttctcttttcaaggctttctggtaggctttttctattatttggaaatttaaattggaaggaaggtgaagaatttttatttgcattttaactcttatcagccaaattaccttcaaaatttttaaaactaatttttttcaaagggttaatttattttaccatattccttaaatataattttcatttaaatataaaaaatgatttcattcctttgcaggaattactcccagccaatgataccagagctcaagggacatctagtatggagaggccttggttgatttaacatcattaaattttggtggctgggaaggtgaaatttaccaaaaaatatgaattataagcaactagcattatgattgtgtatgataagaagctgaatagataaattcaaggttgttaaaggctacctttgccaacccaaaacctgcaagcttga

SEQ ID NO: 86885 - DNA, 477 bp, Glycine max
  unsure (1)..(477): unsure at all n locations
gggcatgggtgtcagtttagctattggaggggtgtgtgtagttttccaccctttggcatattcttgtggcatatccctttctcatgtgctagagtcacatctttcattcttgtggcatctaaagggaatatgctaagatgcctttgtcatattgttggaatattctaagatgcctttgacatattcttgtaatattctaagatgcctttggcatatccttagaatattcctcttagattcacatgaaatgaaaattaaattcacaaagtgaatttgatttagttagtgaccttggctataaataaaaacatgtgtaacacttgtcacaactttgatgaatgagagttttgtgagacacacttcaaaagttcaactngtatccctttgttccttcaatttttcatgccactttctccttctctccctcattctcttcctccattgaagcttccactctaagcttcttatccaagacac

SEQ ID NO: 86886 - DNA, 204 bp, Glycine max
agatcttcttcatttactagaagccacggaggggtaaaagaaagacaccccactctttttgggggtctcacactggtgtatttttttcttggggaggggccctcgatttttccgtttttaggtgtggtgtcattctttttccctattgccttgtataaattacttattggtgttttttattgtggtggggtggttttattttta

SEQ ID NO: 86887 - DNA, 75 bp, Glycine max
gggaaggcaacaaatacctcagaactgcttagttttcaacaagccaagcttagcaaaagtaattgtgattggagc

SEQ ID NO: 86888 - DNA, 144 bp, Glycine max
accgcttgaagactcactaaagagattttttttttgactctttacaacaaaacaatggaggggtatctcaaaatattggcattgtaattaattatttatgaaaacaattaaaaaaaacaaaaatatattttgtaaaaggggtaa

SEQ ID NO: 86889 - DNA, 356 bp, Glycine max
acctcttgtccagacactagacagttttttttttcgactctttgcgacacaactatgggaggtgacttagaacgcgcggctgtgtatttaatcttttttgaactgcgagaacaatctctatcattagattgtcattcgtgtctttaattctaagcttgaacctatataatgcacagcttgcttattagttttttaacccttttcccaaattaaaccgcattcccgcaccttcctcttaactgcatcaaacactacatttacatcagtgggcattcgctaaatgacagaacaatatgcagtcgatcataatgattgtaacctattttacaacctcactcgaaaagaaaatcaccatc

SEQ ID NO: 86890 - DNA, 346 bp, Glycine max
tgattggggttctagtgtgtgattgcttgggggtgtaactcgatcttcttcttttgttgttctgtgtttgtgtatgctttttctctcacctgaaaatgtcttgctgcggtggtaactgtggttgcggaagctcctgcaagtgcggcaacggctgcggaggctgcaagatgtacccagacttgagctacacttgagtaaccaccaccgaaaccttggtcatgggagtggcacctgttaaggctcaatttgagggtgctgaaatgggtgtgcccgctgagaacgatggctgcaaatgtggaccaaactgctcctgcaacccctgcactttcaaatgaggtgtttggag

SEQ ID NO: 86891 - DNA, 158 bp, Glycine max
tgggtgggatagggattgggatggataaagagaatgtgcataccatactaactgtgtctacctatgtatagcactaggccaaacataaaaaactctaatggggcgaaggtgacataattcctttactaacactactgtattaacagaatatattacat

SEQ ID NO: 86892 - DNA, 367 bp, Glycine max
accgctcgtagaaacacgcgagcgtgtatttttttgactcgttgcgacacgactatagaaggggtccacaaacgatcgacatagtatctaattttctctgtacactcttagaaatatcatttttaattgtgtaattgcggcatttattactatgcttgactcagattatggtgagaacgtgcttatggatttccatcaccctattccggatcatgagcttcgatcccacatatccacaaaatttgccttgatcatgagacttcatccgttgggcaaatgatacatttctggtcaatatatgggcgagtagactatttttgccttttagatactgaaactcacttaaaagatcactttctccgatcga

SEQ ID NO: 86893 - DNA, 348 bp, Glycine max
atatattaaaagagatattattttttgtgatacaatggctaagttgctttcgtaaattataaaagaaagatgagatttattacccataaataattaaatgagtaattatagcatgataattaagtagggtcacgatttcgtgcttggttgagtttattttaataaaactatgtcctatgtaatcttttaaaaatttggatgaaaagttttcattatcaaaataaaatagagatataattagagaaaataagttgtgtattaataatgttaaattattttatattgccatccaattatttactagtatgtatgtaataagtttgtgaaattttaaaaagttatgttaag

SEQ ID NO: 86894 - DNA, 361 bp, Glycine max
ttacacctgatggttatctacaaagtgataagcttgttagtgactccatcgcagaactgcttgagcgcattataaaagtatgatttggtctcttatccgtagaggattgaatatgatattctaggatgattattaaggacgggcaccactgggcgctcggttgcgcttatttaaataaaactatgtgctatgaaaatattgaaatatttgggtgacaagcatgcattatcaagcttaagtaccgatctcattactgaaaataagttgagtgttaataatcgcaaattgttatatattgacatccaaatgtatactaatgtggctgtattctgtgtctgaaatgctacaaaagatattttaa

SEQ ID NO: 86895 - DNA, 175 bp, Glycine max
tgtgtcttttacttaaagttatgactgattgacgcggactcttaaatataaatgggggataaccacaaaaaatttcttttctccccctaaatgtacaatcataagcgatgtatacaatattactatcaaacatttgccatttagtggaagtgtatactattcaaaaagattatta

SEQ ID NO: 86896 - DNA, 137 bp, Glycine max
aatggaaggccgggccgagcgacgcgtccgaccttacaaaaggtgacgactgcatttttttttccatcttacgtacgcttgcatgcgaagggttaatttttctatagggtgacctaaattcaaacttactggaccaa

SEQ ID NO: 86897 - DNA, 351 bp, Glycine max
gtaggatttgtctgagattagtgttgttagaaatgtagagtcaaggtgaagaaggtagtaactattgactctatattttggtttaccgcttttaatatttttcttttttagtttgatcttgttttgctgtatcattgcgataggaaccaatattatgcaaatacagacgactatttctacaatacgcagagtacacagaactttcacctttagttactctaacatgtttgcgctcctaatcacactgataccactatattgaaacaatgtctagattctttcgtataccacagaaacacgcaatcaactattctaatccacaactaaagttgaaatcaattgttgaggtat

SEQ ID NO: 86898 - DNA, 260 bp, Glycine max
caacggcagggcttggtcatactgatccaccacacacggcgtcctactgtctgttcacgctacgatctctatctctgtctcttcgtgcgttctcggcttacgtacacgtgcgtccggagacttggctattctaatgtgaatccgagagccatggacacggctcgccggctctgacggcataactgcgaagactgggtcgatgcatgctttaagcacgactctgacagtacggatgtctgtagatggtgcactaggaacaa

SEQ ID NO: 86899 - DNA, 357 bp, Glycine max
ccacgcgtacggcgacaaatgcatctatttgtccttaccgttgctatatgacgacaaaagggttcatctctataaaattagaaattgttcttggctatgtaaacaactcttacgatataatatattacagcttcatattgctactgctgactaacgatttttttgtcataatatatctgtctttcaattcttattacgactagttctacaatatctagaattgacatccattgcactctaggttagtgtgttatgttaacatcctaagttacactaatagcttcacctacacatagagttttatttattaacgttatcacattaagcgcaatctaaaaaacatatttgaaactactt

SEQ ID NO: 86900 - DNA, 95 bp, Glycine max
gaattgaaacttgataaatataaaattaatgaattgattgatgctaatggtgtgctattcttatcgtaccaatcaatttttttctagcgttggac

SEQ ID NO: 86901 - DNA, 187 bp, Glycine max
tgagttttgtttataaaacacaattgctgggggaggcgtttttgatatcactaccattgcttaaactgcaaattttgatctggagaagaattaatagattacccattcaataacttgttgtagttgggaattggagcgtccatcttgtcaacatactggtggcgatgaggaagccttgaactaccag

SEQ ID NO: 86902 - DNA, 176 bp, Glycine max
aaatgtatcatctcttgttctcagtcaacaacccaagtagatgtaccctctacttgtaccacaaaggatgtatcctccaatgtgttaagacaaagatcttaggcggttaaacctttgatactttgtgaatggggatacaaaagaattctcaggcggttagatgaataacacaagtt

SEQ ID NO: 86903 - DNA, 287 bp, Glycine max
taatattacacacaatggtgcggttggcagaatacatcctatggtgtcggataagaaaagacgactaactgttacgggtaccaaaatactacccttggttatggctgatttatgacgattgactgattcggcttcaatacaacgacttaaaggtgtgtataacaaaaaactataaacgggaagtgtctattctatagttttctattaacactccaaaaaatctgttccttatactatttccagattatatctttacttcaatgtgttaaaacagataacttaattag

SEQ ID NO: 86904 - DNA, 381 bp, Glycine max
tgtttttttataaatcttaattacttcatcactagcggggattatcactacgactgggcgcaacaccaattattactcttaagaagaattaatacatcatcatcacaattacatgatgatctcacgaattaactcttggtgcttagcaacctttcgaagacttattcaataccttgaaataccaataacatatactacaatactcatgctttaaaatcagctcaacaccatctcataaaccatgttcgctcattctatcaagctaacacactttctttttctgctacaaactccacaacactaaaacattcaactgcaaaccattctgattagtccctcacaactgtcatactcttaatctgttttatcccctactaaata

SEQ ID NO: 86905 - DNA, 374 bp, Glycine max
gaagacgacagaaggggatgtacaagtttgttgagatagctagaagcaataagatgaaaatgaaagtgcttgttttgtttgttgctacagttttggtagcatatgaatgccatgactcagactaccagaagttccctctccaaatgaaaactgggtttggtgggcaatacagcaatgaggtggcatgtgccagttggaggcttggcgtggaagcaaacaacgtattcaagtggcaaactgttcctgcagcttgcggagagtacatagctgactacgttctaggagaccaatatagatcagattccaaaacagttaaccaacaagcttatttctatgctaaatccctcaaactcaccaacaaagatgtctttgtc

SEQ ID NO: 86906 - DNA, 296 bp, Glycine max
aaaatgggatgctcatgtgttcgttgagatatctccaagcaatagtatttaaattaatgtccgcgacatgatagctgcttcccttatgctagcttatgttacccatgactcaaagtggcatgtgctccatctcatcttaaaaagtggattccgtgcgtatttcacaaatgatggggcctgccccatgtagtaggtagcccgccgaacaggcaatggcaggaacagaaacactcaaggcgcagagtgcggagagtacttatctgacttcattgaaggagacccgaaggggtgtaaca

SEQ ID NO: 86907 - DNA, 325 bp, Glycine max
ttcttcagaacggtgggtcccagaatataggtagggaacttagtgaccgctcagacagaatatctatagcctactgcgatttctctcaagcgttatggaaggagtaaagggcgttatcgcttctaagagagtcgataccaaacttgatgttaataacaatggcgctagcaccattattaggaagcctaaacctacggcgaatgctgacaatgaacatacctcgccagattctcatctaagtactttctacaataatataggaaatataacgaatgttttttgctatgtatattactaatacaaagcattgcatgatcttggcaaa

SEQ ID NO: 86908 - DNA, 304 bp, Glycine max
tgttggttgagctatttgtaaccagtggaggtatactcaggtaattggcggaagtaaataaacaaaaaattgccatttgattatttaacagggtcctattgttttattgctgaacatgactgcatacggtatccctattcaatcacatcttcattgcataggatacattaatgaaaatacagaccggaatactctactatatcactactcttactgttatacaatgtgctgccgcattcggtatgggtgcaaaactttacgggtacaaaactggtgagatattacatgctctgcaatacattaa

SEQ ID NO: 86909 - DNA, 302 bp, Glycine max
aggcgtgcgaacacgatagattttacgactgtaagtggacagtgaagggcctattggcaagggcggtctctaattaagcggtttgtatatatgtgctgcacagccccatgctccttactactgagaaagaccatgacgttgacatgggcgcgattagaatcgttcaaccagccatactacaccacatgcggcgttctggtaggatacgcactgtgcttcatgctgttggcaataataaacaagatctcaacggccatatttaactaccaagatctattaacagcgctgttgatccttaccta

SEQ ID NO: 86910 - DNA, 249 bp, Glycine max
ctcagacctaggaggctactggaggtctttttctgctgactaataccctgggaggtctacggcggtaatactgtagaatggatgaagctatttcaagacattttgtcgtacgtaagtctcctaagatatcaaaggtgcctagcgttccgtgatattgccacaatggatctcatgcgcaatctataagattaattttggtggttatggacagggatgctattgtaatacacgacatgaaatgtcatacaa

SEQ ID NO: 86911 - DNA, 268 bp, Glycine max
  unsure (1)..(268): unsure at all n locations
ggggggngaggcccacgcccacgctttggttttggaaaacaattacaatgggggggcctccaagacgggatgtgcgtataaaagaaggctttttcctacttcccatgtcccaaaggccctcaccagtctcatattccacctaaacacacgtttgtttattcctactctaataaccccctttgggtgcgtcctcccatcttaaaaacacccgaccatctaataaggctcatggtcaacaaacccatcccctcatatttgacttatttct

SEQ ID NO: 86912 - DNA, 342 bp, Glycine max
tttctcatatgataggtgggcctatatattatcattaattacttaattcttatctttaatgacaccacaaaatattctacctttaaagaattatatttgtctcacaactttttttataatatggagaatcattaaagaaaaaaattttttgctcataatattaaatgctcttcaaaaaaccctcttgctttaactattaaagaaacaaataggcatttaaactgaaagctcttacctatttgtttgcgtaattaaataatataaatttggcaccttttatagtagacaacctctctttcctttttatttaattataaaaatacacaacaaccactttttttc

SEQ ID NO: 86913 - DNA, 364 bp, Glycine max
ttatataccactaaattattttttacattttattcactcactctcatttaaaatatcgttatcttatataataggtggtcatatatattatcattaaattcttaattcttatctctattacccctataaatattttaccttaaaattatattttttggctcaccttctattttaaataaataaaattcactaaataaaaataattattactcataatcttaaatgctcttaaagaaacctactactactaattattataagaaaaaaaggaattttaattaagccttactattttttgttataacattaataaaaattcctcctttatttaacactactttccttttattaattatataaaaca

SEQ ID NO: 86914 - DNA, 347 bp, Glycine max
ggttctagtgtgtgattgtttgttgttgtaactcgttcttcttcttttgttgttctgtgtttgtgtttgttttttctctcacctgaaaatgtcttgctgcggtggtaactgtggttgcggaagctcctgcaagtgcggcaacggctgcggaggctgcaagatgtacccagacttgagctacactgagtcaaccaccaccgagaccttggtcatgggagtggcacctgttaaggctcaatttgagggtgctgaaatgggtgtgcccgctgagaacgatggctgcaaatgtggaccaaactgctcctgcaacccctgcacttgcaagtgaagtgttgggagagcaagct

SEQ ID NO: 86915 - DNA, 347 bp, Glycine max
ctatcatgtgccttgttctagctggatgtaactcctgcgtggcctgaataattatctccgtgtctgttgtgttggctcaagactcatagcttccgaattaagacatatgtgtgagatgtaaaatgcttgaaaggtcaagctcccctgatttttgcttagaaaaaacatccacattaaccttcattgctgcatggactaactatactttcaatataataattgcatctgaaatggatcttaagggtgctaatatagggcaagtcaagcttgcaagctatgggttggcaaatgtacgccactacaaccttgaatttatctattcaagctcacatcatacacaagcataa

SEQ ID NO: 86916 - DNA, 259 bp, Glycine max
tatttctgccacggatcaactgtggagagtgagagaatagagaatagaagatgacgccactcttcatgacgaacttgtctaagaggggctacttctgctctggtcattgtagtatacgtaagcacatgatgcagacctgtagtacgttgtaacgccctatgcatgcaccaccagaggatcctcttcaacgaaaactaccctgcgatttcattctctttcgacatgaccttttttaactttcttaaaaacacagtctact

SEQ ID NO: 86917 - DNA, 74 bp, Glycine max
gctccaatcacaattacttttgctaagcttggcttgttgaaaactaagcagttctgaggtatttgttgccttcc

SEQ ID NO: 86918 - DNA, 136 bp, Glycine max
ccgcttgaagacgacataagaattcgtgtttttttcaaaactacttaaggtaagactggatggttgaaaactaagcagtgggtatttaataaattccttgcaaagaaataataaaaaagcaaaactattacatttc

SEQ ID NO: 86919 - DNA, 531 bp, Glycine max
ggagattaaaatttaaaatttctttgaaaataaatttgttaatattttatacattaagattcgaaaacaactatttaatcgtgcaatttattttgttgtttgaagtgcaattctacacaggttttaaatcaactttattactaaaaaatcgagttacgtatctgtatatggactgaagagtccctattttgatgttttccttaacaatgagatggatcaagtcacagcaggatcatgggatttcgtggaatacacgatccagttataatcttgagccttctttcggtgaatacaattttcttttgcatttttttcttctttttcattatcatgacatgacatgacatgcttaagtattcacaagattaaaatcccaacacttgtttaaggaatcatttttaatactattcggactagatttattggtatttgaaatgtattttttaaatttttgtaggaatcgaagatagataattgagttagatccttgatgaaatataagtttagtaacatatatatgttttaaaattt

SEQ ID NO: 86920 - DNA, 350 bp, Glycine max
  unsure (1)..(350): unsure at all n locations
aaaaatttaaaaaaaatttttaaaacaanaagagagaaaaggagggggaganntggaaaaagaaggggggaaaagaaagaggaaaaaaaaaaagaaagggggagaaaaaaggaaaaagggggagggagaaaaaagggaggggaaaanggaagggaaaaagaaaagggagagaaaagggaaagaagagaaaaagaaagaaggggaaaaagngnagaagaaaagagaaagggaagaaggaagaaanngggggagaaaaaaaaanggaggaaaaaagaaggagaggaaggagggaaaaaaagggaaaaanggaagagaaaaaaaaaagagaaagggggaaggagggaaaagaa

SEQ ID NO: 86921 - DNA, 264 bp, Glycine max
aaaaaaaaaaaataaaaaagagagaaaaaaggaaaataaaaaataaaaaaaaaaagaaaaaaaaaaaaataaagtattaataaataaaaaaaatagaaaaaaaaaaaaaaaaataaaaaaagataaaaaaaaaaaaaaaaaaaaaaataaaaaaaaaaaaaataaaaaggggggggggggaaattaaaaaaaaaaaaaaaaaaaaaaaataaaaaaaagtaaaaagaaaaaaaaatagaaataaaataaaaaaaaaatataaaa

SEQ ID NO: 86922 - DNA, 508 bp, Glycine max
atgggtgtccccccaaacacacacatgcacacacaaaatatgcaaataacatgtaagggtaaacagtaaataatatacagtagacagaacaagaaaaccaataatcaatgtgagccaacctcactctcaataggtagttcaagaggggaggattgcccaattcttacaaggagtattctagccatattcctaatcaatgtgagccatcttaacacatgtccctcacgcccaaaattggacatttagagcatgaaatttgcaacactggcagctgcaggtgactcaacatcaagattggataagcttactcttataacattttaataagtagactaggcctaactctcaataactaggtaagaggagaggattgcctaagtttttgtaaagaatattttggtcatattcataatcaaagtgggatatcttaacaaatataattgaggagcacaacataagcaacaattctagggcactcttaattcatttaccagatgtaattaggtta

SEQ ID NO: 86923 - DNA, 488 bp, Glycine max
ggaaaattctcttatttcttggcctagcaaaattaaagtttttgtatcccgctctagcacaaaacattaatgttgggttcttgctaatgctacctctactactacctatgtgacctctagtaacttttttgtctaacatttagtaaaagtattactaaaagtcttggataacatttaaaaaatattgtcaaattatgaataaatgttattaattttttttttttgacaattgatcaaatattgtgtataacccatgttgctaaagcttgaaaatatcatgaaaaggctttagtaacaaggactatatgcaatatttgataaaatgttgcaaaacatattagtaacatttattcatagtttggtgatattttttgaatgttgacaaaagtttttaggaacatttttattaagaattaggcaaaaaaaaaaatgttaaacatcacatgtatagttgtacttgaaattacatttattatctcatggaaaat

SEQ ID NO: 86924 - DNA, 412 bp, Glycine max
  unsure (1)..(412): unsure at all n locations
caaactcacactttctttctncacnncnnnaggaaaatatcaagtttttatactgcacacaccccncnaaaccaaaaaagacaagaaatcaacgaagaaacaacaacttgtttagctaacctcccaagtaaagaatgtaaatctgctccttctcttcttttcttatctttcctctcattatacccctctacaatttctccctcctaatccacctacccttgttcttcaagaccaaccctttcttgttctcccaaacccatccgcgactgaacccctaccacactaacacagaaaaagcaaaaaccaccccttcccgaataaaaaagaaacaaaacaaactttattaatccacaaggaccaccgcgattgtagccacaacaagaaagacaccactcgaccaacttcttcaacc

SEQ ID NO: 86925 - DNA, 213 bp, Glycine max
aacaaatccaaataaataattcccacccaaaatctaacgcctcataacttatcaaacatcgtaatgcaatacaataatcctgaacaaaatgttatatattatcaatatccatctactcaaccaaatgaaataaaacccttaacgtaaaaacattaaatttgcctcaaaatatcaactaatacacatgtgaaccataaatataaaccctcaaaa

SEQ ID NO: 86926 - DNA, 302 bp, Glycine max
  unsure (1)..(302): unsure at all n locations
cccaaccaaacagccagaaagaaacacaaatatataaaacaaccaataaaacaaaaaagcaaccacaacaaaaaatatatatatattaatccaaacaacacacaacatacatagagcaagcccacctaacctaacacagacacacgagagaccaccccaatttagtagacccaaacccaaacccggctagcccaaaaaaccaacggcaccatagaaccttgtaccaccaatccagcacgaacataatcactctctcactcaaactntcacacagcgaccaccccggtagtccccacaacccc

SEQ ID NO: 86927 - DNA, 498 bp, Glycine max
tttttttttttttgggggaaattttcttattttagttttttatagggtgtagactagctactaggttacttcatctggcaaacttttttgagggttcaaaattgttagaacttaaaatccaaaccgtctaaatcaagatgagggttgagggaacaaaaaaactgttacatcactgagacgctgaaatccaaacctatcctcattattagtgaaaatgacttaggagagagacaggattatataggcatattgaggcaataatctaaaaaaaaaaagtactcaaaaaaaaaattctcaaacaaaaaatagttaattaaatttgaggtaactgcgcgtttgtttgcattcaaagatatagccatatcttggacacagaaaattaaagaaggataaaaaaatccttcatgcatgtgacattgacaaacagaatttgatttttagtcctttcatcctttttctataaaatatgtctagttcatatttgatttagtttatttt

SEQ ID NO: 86928 - DNA, 411 bp, Glycine max
  unsure (1)..(411): unsure at all n locations
actcccactttttttctttacagcntnagagaatgaagaaaatttaatccaaccaacacccatnaagaccaaaaaagaaaagaaatcaacaaatgaacaacacctgcaaaagctaaccttccaaataaagaaaggaaacctaccccctctctaaatctataaactcaaataccaacattgccctatactatatcttactaagaatacataaaaccctagatctccccaaccaggaactatctgcctcttagctaactatctgcgactgaaaacctaccacacttacaaagaacacaagaaaaacaacccgccccgattaaaaaagaaacaaaacaaaattgattaatatacaggcaaagccgagaacgtagccataataggaaagataccacttgacgaacctcctcaacc

SEQ ID NO: 86929 - DNA, 497 bp, Glycine max
ggggcagattatgacactttgagagctctggattctgatactgcttctagtactcgttcaatgaccgaggaagagataaatgccttgcctattcacacttacaaagttccagtcccaccaaagtgagttgatattggatgggacaatttcaaggttgccattcttgaaagattccaaacttcagccactctcaacccttttgccgcaattcgaaaggtttgaaggaagacattggggcagaaatcaaactctacgaaccccccactttatcaatcatggtcaagaaggcattaatgatcgagcaaataaacagagcaatttggaaggtgggacctgatgttgcttcaaactcaatttcaaaagtcaatacctcttaccgaaatccatcccatacaaagactattacttatggtatgagtcagaaaggtggaggaaaaagtaatggcccttttaattctttcactagcagtacatctgtgaacacaccagaaaacaac

SEQ ID NO: 86930 - DNA, 390 bp, Glycine max
ccaaaaaataaaggtaacccaaaaaccaaaaactagcaaaaggacaacgcttcatgcacatcacaatcataaaaaagcggatacacgaggaatataaacatagaccaaagccaacggacaacgaaaaacactggagggaaacaaaaaaagtgcaaagcgagcaaacaaaatgcctaaataaaatagtgaatagccgagcgacccgaaaatccaaggtgccaaagcttaagaacacaccaactaaggcagcaactatgggaagataacaaacgacagaaaaacacccacaaattgaaaccacaaattgtgtggacaagatgacgcaacaacggcatcagcatggcaagcaaagaatatacagcgaacgcctccgttggatggcaggcataa

SEQ ID NO: 86931 - DNA, 488 bp, Glycine max
ttttttttttttttctatcaggttaactttataacccttaagagctgcgttaaattgacaacccatacattttgaatgcagtttataacatgggtggtacgataatggataatctaataaatctaacatctgttaaaataaattctgatactatattaaaatatgaatttagttttaatttaatttaaaaactaactcaaaataaaaatgttgtttacttatataatattttaactatatcacttattattatgatatctcaattttttttttcttaaatactctatcagttcccaaattattaatgttaattaagatttttcacacagataaaataataagtatcttaagagagttaatatttatttggagacaattttaatgaaatatctttgttcattctcttaattttaataaatgtttgaatatttattaaaaagtaaaagcattaatcaatttttattttttcaaagattaaaactacattt

SEQ ID NO: 86932 - DNA, 566 bp, Glycine max
  unsure (1)..(566): unsure at all n locations
aaaaaaggaaaaaaaggaaaaaaaaaaattttaaaaaaaaaaaaaaaaaaaaggggattttaaaaaaggagggggannnnannnnaaaaaaaaaaaaaaaaaaaaaaagaaaaaaaaataaaaagagaaaaaaaaagaaaaatagataaaatgaaaaaaaaaaaaaaagganaataaaaaaaaaaaggaaaaaaaaaatagaataaaaaattaaaaaataaataaaaaaagaaaaaaaaataaaaaaaataggggggggggaaaaaaaaagagggaaaaaaaaaaaaaaaaaaaatgtaaaaaaaaaaagagaaaaataaaaaaaataaaaaaaaaagataaaagaaaaaaagggaaaaaatggatgaaaaaaaagaaataaataaaagaaaaaaaatggaaagggtaaaaaaaaaaaagaaataaaaataagtggagattataaaaaaaaaaaaaaaaagagaaaaataaaaaaaggaaaaatgaagaaaaaaaaaaagaagaataaaaaaaaaaaagaaaaaaaaaatgataaaaaaagggagagaaaaaaaaaaagaagagag

SEQ ID NO: 86933 - DNA, 320 bp, Glycine max
  unsure (1)..(320): unsure at all n locations
atggagaagcttttccacattttgcttttctttnagnatgtggtctagtaccatttaagcgagcacggggaaanggccacataatctaacggaatcttggtacatgccacatgatcacagnccctaactccctaccataatagcacaacaatttaaaattttaaatagctgaccgggataacatagcggattcctttcaacccacaaagatcacttgttcgcccgctcgcttgctttacaacctgtaacaaagatactccgagaaagagaatctctcaatcccttagtgacaagaatcaattcaccgacactactcctga

SEQ ID NO: 86934 - DNA, 339 bp, Glycine max
tattgggtggtttacaccatttgggtgagttgtaactgttgggtggtttgcaacccttggatgttgtccgccctgctgctggtagtccatagttattacttctcttgctcgctgtttgcaggtgtacaccgtgatgatgtgtggcttatgcttatgcttatcaatacccctgcctaaaagactcaccttgtcctcaaggtgataagtcggaaaaacctcttgtaatttagccacagattcccaactattttcattgggagggagattttgtcactgaattaaaactttcacgttggcaggttgtaattcacaaatatttaaaacagaatttggataaac

SEQ ID NO: 86935 - DNA, 399 bp, Glycine max
acagaaggggacacttcccttgtgaacagagttgaaacctcttcaaccttagagttttagttttctctagttgttcatcatagcattattattatggctcagaggtacttgcaccagctacttgaagaggatcaagagccgttccttctaaacaagtacatttccgataggcgaagccaaatgaaaaggccttccccgatgacgagtttgcaagtgaagaaacgcaaatcaaccaatccaaacgcaaacttcccgagaaatctctgcaaaagcgcttgtcttttctccctcacagacactccagacctcagaaaatcaccactcttcgaattcgcttccccagtcaaaagcccttacaaatcaccaaaccctatttttcttcacatcccttctagaacc

SEQ ID NO: 86936 - DNA, 240 bp, Glycine max
ggttctagtgtgtgattgtttgttgttgtaactcgttcttcttcttttgttgttctgtgtttgtgtttgttttttctctcacctgaaaatgtcttgctgcggtggtaactgtggttgcggaagctcctgcaagtgcggcaacggctgcggaggctgcaagatgtacccagacttgagctacactgagtcaaccaccaccgagaccttggtcatgggagtggcacctgttaaggctcaatt

SEQ ID NO: 86937 - DNA, 300 bp, Glycine max
tcatactgggatttttgtttataactcaaaaagcagcgttaatcaagaggcttggaatcccttttgattccctcactcattttcaccttattcatcttatagattcctcctttctctcctttcctttctctttcaccttctgggagttttcaaaactcgcttaaaaccgagatgggtgcccgtcagcgagtgtttacccacagttcttgcacggcggtgctgttcctgtacaccttgtcgatagggttccgtttccgtcccaccgatgagggagcctattgacttactaccctccgcttc

SEQ ID NO: 86938 - DNA, 368 bp, Glycine max
ggagaccgggcctttgcattttcttgcgcagcccatacagactctgcgccctgtgctgcgtgtgtgtgtgtgcgagagagagagacaacgaccccagacgcttccactctttctttggcggcggcgtcgttttctctacgctttacccattcattcattcattctcagtaagtcccctttactccttctatcatcattgggttcggggcatttcattctgattcactatggccaatggtccagcaccgttttctgagattgggaaaagggcaaaagaccttttatacaaggattacaacttcgatcacaagtttagcctctcaattccaaactccactggattggggcttatagcaacaggattgaag

SEQ ID NO: 86939 - DNA, 238 bp, Glycine max
ggggaacttaaatttgggtttacttttataagaatattccattttttcataataatatcaacatggaaatttaatcataatattcataacataaaatagtccaattttacatggaatattgggggataatctcatgggtttcatgtggcaaaatgccacaatacttaatggcatttaacttttaaaaaaacctccttttttggatttgtgcccactggaacacttttggcgggctttc

SEQ ID NO: 86940 - DNA, 304 bp, Glycine max
ccttgagcggcgcatttgtagtcccggaaagatgctaagaaacggctgatctaatatatcgtgtgttattatctttttatgatcttattataacaatgccgtttggctgttaatgattcttcaaactttcatgcattgtgtaacaaagacctgtcccatctaggcttaattatctttaaagcctacatgaagagcgaaaaacgaataaacgcctacgacgctggacccatcgcaccacagcgtcttcgtggtgagccaacaattccagctgaaagagagccctgagcgaatgtcgctgcggagt

SEQ ID NO: 86941 - DNA, 371 bp, Glycine max
cggaatggggacaggggacattgtctattgtgttatctgaaaccttccacgtaacacaaaacacaggtcacatgttacataaagtagcaagtagccactagggatatgagctttggtcttggcctttgtcgtatatcgcctaaggcctcagtcaccatttaccgatttaagactaatcgcacatcgcacagcgcatggtggagaaaggcgtaacgcatacccctggctcctgtattcaaatattaaaaccttcaaccgttccgtggctagtggcgatgggtgctgtgtggtgacgggcaacaaccattagcaggtcgcgggtcctgtttgttggctgctggactcggaacttgtttctaatctcaaaatta

SEQ ID NO: 86942 - DNA, 376 bp, Glycine max
gggggggggtcaataaatgaaactcttggggcagggacttaaaggctttgggtataacattggacatagagaagaaaaataaggttttgagtaaattatatcgatacttactgatattttttttcatattatacacaaaatccttcattttccttttcctacatgaaatttcttaatttttttaaaaacattagacttatatatatattattaactcccttattggttaaaaatattatattatataccccttaaaaaaaagttgttgtaattgtgaacgttaatgaacaaacatattatgtgccatttgaaaaaaaaaaacaaaaatattattgtgacttactttaagaattttaattttcgcattattttttaa

SEQ ID NO: 86943 - DNA, 373 bp, Glycine max
agatggaaagaccataattttgaaaagtacctgaaatatgataagcccaatgaggattggctgtgtatcaaacccaaagcttcgatacagatcaactgaattttgcactagtgtatatcctccaaattgtagaagtgtaagaatctacaacaatatatcaaagcattacaaataatcttatactcaaatattgcaatgcctttttccgttaaacatttaattataattaaatgtaactatgaggtattcaacacataattcgcaaggaactgaagctcaaagagagagtgttgaccataattcacaaggaattcaacacatgtattagcttccctataaatatgggacaacttgaaaagcacccttgtaagct

SEQ ID NO: 86944 - DNA, 319 bp, Glycine max
  unsure (1)..(319): unsure at all n locations
tnnnttaataaatttatagaaaaaataatttaaaggatgggttttattaaattataatcccacaaaaaatcttatcattttaaacccaaaaaaatacaatcactcaaacccaaatttgtaaactaaaacaaacactaactttaacacttaaaggccctttctataactatatctgcccctacaaataacacttacccttttctaattaactttttttaaaaagaaccctttttataaccctttgaatgttctatatcttgcactccaaatataaattcccacttcttcattcacataccaaatggatacacatacttta

SEQ ID NO: 86945 - DNA, 357 bp, Glycine max
agtaaaggagctttggtcctttaagaataccgtagttggcaaaagagaatgtgttacaattcaaagtatagataactgaatactgtaacctacatacaactctcccactaataatctttctaactagagtgatcacataagaacagaaacaaccataacaatctaattgccccaaacattcttttttgggtacaaaggaaagaaatcccaaaattggaagatgtggacaaaactgaaaacaaaaggcaggagcaaatactttcaaatgtaaccccaaaaatagacaaagaaaagcaaaacattaaggttgtcgatcttttcaacatttgggaagatcagagggtggaggtggcagct

SEQ ID NO: 86946 - DNA, 114 bp, Glycine max
gcctggaacccttagagcgggcggctttttttttttttttttttttttttttttggataaaccgtggttcctgaaggatccaagagctttgttggcaaaacctttaaaaatgtt

SEQ ID NO: 86947 - DNA, 310 bp, Glycine max
gcccaacctccattctacaaaggtgagggcttgttgatgttctttagaccatgttaatatatacaaggaaagagggatttttttgcattatcttagttgcgattcttatccacaatggaagctacatatgaacttcataattggcaacttttgaatttaagcagatgagatgaagacccttagctaccattcgatggaacaacactgtgcggaggcatgttttaaatttcactagattggaaacgctccaaaaatcaattgtaatggcttcaaaactatttgctgatgatactgataattctgaggagtt

SEQ ID NO: 86948 - DNA, 215 bp, Glycine max
tttttggacaaaaacactcatgccattgggctttactaaatcgtggatccctctacggatacagatggagcgatcacctgtaatgaacgagaaacaacctgtacttgctctgcaagtggattacaccacaggggcagtgtttgggtacactgatgtaaggaagggcacctgctgtaattgtatactaaccttctatgtgggggctggcttttctg

SEQ ID NO: 86949 - DNA, 370 bp, Glycine max
ggaaacattaatcttatgttaagatttaaattttaaaataattaatttattataatgacaactaaaagtaccatgacaaaaaagtgtattggaaaggcaaacgtcttgggaacaaaaaagcgcattggaaaggcagacgtcttgggaataaaatataaatagttaattattacatatttacatttacaatgataataaattaataaacacatcgtaactggagcaaaagcaacacaaaagacaaaaagtgttaaatgcacaataaaattaataaaattcattaatattaattaataaaaataatgaatacaggttgacagtgacatttttgggcgggaatgaggcccttgcatacaatagcgattgtagt

SEQ ID NO: 86950 - DNA, 338 bp, Glycine max
  unsure (1)..(338): unsure at all n locations
gagcggccgctttttttttattatctttttctttttatactcaccgcncaccacaccacgcgggtgaattttataaggaaaattctcaccctcaaatcttgaatggccagtacacaactttattcgtaaccatttctttttaatcactcataacctacaaactatttttctctttcaaaaatataccccccatcatttaaggcctctacgagagaaatattaaggtgcgagcggtcaacctttatcaaataaagttccctaactttttttattcaaataacaatgttatacaataatctttttattaaatataaaaacaccctttctttactttttgc

SEQ ID NO: 86951 - DNA, 197 bp, Glycine max
gagaaaaggaatagcaccgatttgggaccttgttaatggggatccttaactgttttgctagaaacagaacaaatacggaaaactcaccttttttacgcggatgttgataaaacatttaaaaacaagggaccaaaatggttataagctttacatttacaaaaaacaggggaaagcccatttgaaacaaaaactggatt

SEQ ID NO: 86952 - DNA, 366 bp, Glycine max
  unsure (1)..(366): unsure at all n locations
ttttnttttttttatcaattgcaaaatacctagtatatactgtaaaatgagagaaaatatagagggacaatagactaaaaccgtgtgtcagagtacacagaggatgcaagcctatataggataattacattaattatacataaatagaggatattttgtttccactaaatcaaagataatattcctataaactgtaattaatactagaatcagaatgttaattctaattttcaacactccccctcaagctgaagcttactaagcaatcagcttgttacaagaaaatttattcccacttataaataaaaaaacaacagaaatggagttccacaaaaaaatatttgaaggacaactcaaggatgttga

SEQ ID NO: 86953 - DNA, 257 bp, Glycine max
aggggtcaaaaatgccctttctgcaatataaacgggggtatagcagtacaataaaactttcagtaatgtgatgtattcccaataagcaaaaatacagcacttattttcttgtaaactacaactacactgaatgattagatgttttacatcctccaccgcagaaaatgacaataatccacgtagaagtcctatgttcttagcataacaaaatttctcacttaagatgtttagcaaaccagtttagcatgtcctgatgg

SEQ ID NO: 86954 - DNA, 193 bp, Glycine max
  unsure (1)..(193): unsure at all n locations
ttctcttaataattaatgancaaaaatgccctttgtggcctgttaatagaggtatatcatcacaataaaacattaaataatgtcatgtattcccaattaagcaaaaattcctctcttttttttcagtaaactacatctccacctaataattatatgtgttccctcctgctccttaaaaatattccttaattcc

SEQ ID NO: 86955 - DNA, 260 bp, Glycine max
gggggcggccggtttttattattattatctcccctaaataattcaaaaaccaaactcacacacggtcgcgtttttaaaaataaagcctccctcacacccaaacctaaaaaccctcttaacacaataaaaacgcccttataccaaacaaatacttaatttacacataactaatttttataaaaaaaacacaaaaaaactaacatacttgagctgcctcccaaaataaaaaacaaagcctctaaatttctcattccctaaaa

SEQ ID NO: 86956 - DNA, 373 bp, Glycine max
gggaaaacaggtattgagctccggaagttttgttgcgagccccttgttatactcctggtgttggtatgcataagtcttcttttttttgttgcgagctggtgtttatttttgggagctatcatggattggttttggaggcaaaagttaaaatttgtagtttctgcttccttaatctggtttttgcatggggtctcctaaaagcaaaccccaacactatttgcatgagatcctagtccttcaacgaaatttatttgtataatacatttcttataccgtatgggttatctgagtgcactggatgctcataaatacccctcctaaaaatattaggacattaaaacatatctcttataaagtactcaagtgtttgact

SEQ ID NO: 86957 - DNA, 328 bp, Glycine max
gaggaaaaggatttaaaattataaggcggggttcataattcagattagccggactttattcagaagcgaccaatttcccaacatttaaaaaaaaaaaaggagccaccctgagcttaacacacccaccacaaggccaaaacacttggacttggtgaaagggaagacatgaccactttattttaagggtggttggttaacacaaaacacccgagtgcgcgaaaacccttccaggcattattccttaggttttagcttcccaataataggttatcattattcctaaataaggggtatttctggttggagcttggtttcccaacaccttaat

SEQ ID NO: 86958 - DNA, 330 bp, Glycine max
tttttttttttttgcaaaaaaataatttgttttaggggggttttaattaatttctaattaaaactatatttcacttttcaagttattttttttatttcttactctgccctaaaataatttgtattataattttttcattccttacattttactattatgaatttattaattaataattaattaaaatattttttatgtaggttcatgaaaaataccattataacacttttttttttcaatgaatggctttattaatataatgttgtgttaaatttccattgcctaataaaacctatttatatccatcttgttattattttcaattctttt

SEQ ID NO: 86959 - DNA, 143 bp, Glycine max
cttaaccggatccaccaggttccttttcattcaccaaaggttcctgttttaattaattgacccttttttttttccattaccccctttccacttagcccccattgtcaccttaaaatgctttaaactaaaggttagatcaaaaa

SEQ ID NO: 86960 - DNA, 351 bp, Glycine max
taaaaaagggtaggtaggaaataaaaaaaggaaattgtttaaaaaaaagaaaaaatgtatttttaaaaaaaaatatagtaaaaaaaggaaaaaatgttaaaataaaaaagtttttaaaataaaagttaaaaaaaaaaaaaaaaaagttttaaataataaataaaaaaaatttatattaaaatggattataaagaaaaataaagaattttaagaagaaaaaatgaaaaaaaattaaaaattattagaaaaatataaaatatattaaaaaaaggaaattatgtaaaaaaataaaaaaaatataaattgatgtttaaaaaaaatatataatgtaaaaagaggtggaaaaaaata

SEQ ID NO: 86961 - DNA, 372 bp, Glycine max
ggtcgcagagcgcgcccccaactctagctccccctcctcttaacacctcactctcttctcctctttcacactcgggggtattatatctcatagagataccccaaccccatgtctcacgcctactctaagatttgtggtgggaaaactataggaccccgtgtcctcttgtggcgctctatcaccccagcccccacattatatcgtgtgtgtgagaaaaaccccacggggggtccactctctctctctcacgggtgtgctctctactctaaagcgctggagatattatacgctcacatagacacgcgcgatactcttcttatccccttacacacattggtgtgtcatatagacacagtacaccgtgacatatat

SEQ ID NO: 86962 - DNA, 373 bp, Glycine max
gtctcttgattaaaaattttgttattcttaatatctcagaatttataaaatattatttttattcctttaaaatgaatttaaaagactaaaaaaaatataacttcaactccttttactctttaaagtgaaattgagagactaaaaacaatattttacttaggagtattcatatatatgaataatttataaactcaaactaatccaattaactaagtttgaattttttgagaattgagatgaaattcaacccaacttgtttacacctgttcaatgtatggataaggtaacacattgtgaatatgtggtttgaccaaactagtatcatatgattaaattgattatatatataaattagattattaaatataaaata

SEQ ID NO: 86963 - DNA, 373 bp, Glycine max
tagtgataagtgatactatttgtttgatgttttcttgttgttatttgaaatgtcaaggaatgaggaatgattatgttgttaatgtcaatttgaaaacaatagttcattgtgatagtcaaaaggcctgcctacggggatcaagtaacagagcctctctagttgcttgagatgcttcgcgtgactttcttattgatactagtacctatgaaaaatccaaaaaggttccgcaatttactcactgtgatattggatatggtaaagtagtcaaaagctttaaaagtgtctgttattgggactgttctcagtcgatattttaaggttttgtaaattgaaaattttggtattttgtttttaccatggattgatgcttgaa

SEQ ID NO: 86964 - DNA, 383 bp, Glycine max
gacctggaaatccgttagaaagaggccagtccactgagagaagcgcattgccaacttctataagtttcagagttgcttggcaatgtcagttagcattcaatttgcacctcgaagaacgtaaagcagaaaaaaaactctccacacgcatttcacatgaaaaccaaaacggttaaaggaaatcggaggatgaacaagctcgacttgccttccgttttccttatttgcatcttcttcttcctcgctggattctctgcttccagtctcttctctcactctcagaaacatgaatatgacctgaggctgagaccgagaccgagaccgagagcgaggttacttgaaaaatcgacgcaggagaagacggagtatcatttgttgaaagccgg

SEQ ID NO: 86965 - DNA, 334 bp, Glycine max
atttgtttcgggctattatccgggtaccgctatagacatttaattattagactacctattgggcctgagtagggatgaaacagcccgaatcataaatcaattccttaatggactgcttgttataaaacttcatatcaaacacatctaacatattctcatggaaagccgtcgatatcatcaaaaaactatattctctggcacaaagcatccttaatttatcaatcattcaagattaatgggctattctctctatctccttttataactatcggtgtctttaattattcttcagcagatcaacaggatctcaaccgggagcccgagcttgttgata

SEQ ID NO: 86966 - DNA, 261 bp, Glycine max
gggcctcaggcggggtttgttgtgtgagacaccgagggacgctaggggccctttaccttgggctgcctgcgttactgcgagaacccacttcctctaacgcgctttttcttcaatgttcaaattaccatccatttgcgaaatcgcttctcagatcatcagcaaaagaatttccaaacaaccgtaattactttcctaaaacacgacgccgattctgatgaaaggccatcataggccactgctcgttgctaaggacgacaggga

SEQ ID NO: 86967 - DNA, 334 bp, Glycine max
agagggtgacgagttggcgaattgcttgtgcgaagcagaattacctgcaaatcctgatacagtgggaatcgtgaatttcattcgagcacagtttgatgtaaagagacgggttccatgagatgggaattcataaacacgttttggatttggggaagagaatagtccttcacattaggcagatgcctgctgtgagaagtggtcatgccgctgtttctgaatataaatgctgcgaatggaagaaaatgcaaccatcaactgtatttactgccgtaagaagttatgttcctgctcctaccatagcacctgtgcaagtaactacctttaccaaacctct

SEQ ID NO: 86968 - DNA, 282 bp, Glycine max
gagaaccccatcgccatgcccttttgattatctgtcaatgccgcatgcaataaggcaaggggtctttggctgagagaccccgattttaccgcagtatatgaggctgcgaagggcgcatgtggtactgcattttgccaagagtcatagaatgaccttatgtgactgtcgtagcccatttccatgccggtttccatcataatgacgtacaactacctgtgtatttcatattcgaaaccatgaccattcgtctccaacaacatcatttatcacccatatggtgct

SEQ ID NO: 86969 - DNA, 78 bp, Glycine max
aagaaccccttcactatgccctatttatcatttgacaaatccgcattcaaccagaggaggggtcactctcttagagac

SEQ ID NO: 86970 - DNA, 354 bp, Glycine max
cccacgcgtccggaagactacagaaggggaaggtgcaagagtttgttgagagctataagctagtttatcgtgaggagaatatgaagtggtttgtttcttttgtggttgaagtgtttttggtagattggcattccattgggcaagcttacaaaaggttccctctccgaatgaaaactggctatggtgagcgttcttcggaggtaaaatgcgcaagttttaggtttgttgtggaagcaaacaaattccaagcttttaaaacaattcctgaagagtgcgttgaaccaacaaaggactacattaatggcgaacaatttagatcagactctaaaacagttaacaaaaaagttttttttt

SEQ ID NO: 86971 - DNA, 117 bp, Glycine max
tcgcccacgcttccagaaaattatatatacggtttttacaagactacataagggggtatttgcggattaatcaagaccaatttttggttttgatatattatacttgcgtttacaata

SEQ ID NO: 86972 - DNA, 352 bp, Glycine max
gagaaccccaccggcatgcccttttgaatatctgtcaaagaggcgtgcaagcgggcgaggggactcgcgctgagagacccggaatataccgaagtatataacgcggcgatgggcgcatgttgttactacatcaggcaagaagtaatatagggaccatttgggactggcgaagcccaatgccatgccgatgttcaacatgaccacgtacaagtgcgtgtgtaatacacatacgaaaccagaccaatcgtcgcaaacgacataattaatcacacagatggtgctaacaaaacaaaaaatgacgggttatatgctataaaccacacagggagcacaatatataatttattcaaat

SEQ ID NO: 86973 - DNA, 346 bp, Glycine max
ttgatctctccaactaacaattagttatttgtaatttattttcgtactagtgatcatcttactttgtacattttttccaatctattccattcggcccatttaattcctcttcaaggtgcatgctttatttctcattgcatattcttttaaaatgtgaaatattgtgtgacattgtccaactcgtcttgtgcattagtcttctccttatttgctggttagcgttatgtcgtgtctccccgtttggtcctattctaacaaataacacagagaacaaaccaacctattttaacaaatataatttttttgtcaaaaaagaaaacacaaatatctttttttataatgtaac

SEQ ID NO: 86974 - DNA, 287 bp, Glycine max
aaaaaaacttcttaagggccgctggcccgctatttatcttgggggttatctgaaaaataccctctggtaatcgattaccatttttgggtaatcaattaccgggtttaaaaattgatacaggatgttttgttgcttctggtaatcgattaccaattgtgtggtatcgattacacaatgtgatatgcttctggtaatcgattaccaattgggtgtaatcgattacatattgttacctgctactggttattgatttccatctatttgtaatcaattacaccctggaactt

SEQ ID NO: 86975 - DNA, 361 bp, Glycine max
  unsure (1)..(361): unsure at all n locations
cggctggccagctatttatcttgggtgttatctgaaaaataccctctggtaatcgattaccatttgtgggtaatcgattacagggtttaaaaattgaaacaggatgtttagtagcttctggtaatcgattaccaattgtgtgtaatcgattacacagtgtgatatgctactggtaatcgattaccagttgtgtgtaatcgattacatagtgttacctgctactggtaatcgattaccatttatgtgtaatcgattacacagtgtaacttttagattccaatgtgcaaaggctgtgtaattcgtttttgggcactggtaatcgattacaaaactttgtnatcgattaccagagaggaaatcc

SEQ ID NO: 86976 - DNA, 227 bp, Glycine max
gtggttaggacctaacggttttggacgatttatttggtccgaaaggccatagctctggggggatagtcttattacgaatcctccttccatttagcgctggatctccagacgttgactacgtccgtgaatgctttcgtgcactacgcgatctacttcaaccgcgtctgcatctgctccaagaaatactgccccaattccatgagaagccaaagcacattcccggactg

SEQ ID NO: 86977 - DNA, 363 bp, Glycine max
aggggttgttctttcgcaatcttaacccttttccgccatgcgagcgacacaaccacacgccaataatcgcacaacacaaatcaattcagcctccaattaacgcctccttttgattcggctcggttcgattctgttcggttttccacttctctgaatccgcattttcatgctcaatttgcgatttctgaaattaaacaatgtagctcgtgcatgaatctggcaaataaacctgtgttaacttaggctatgctttgtgtggttactaactagtaacgagtattgatttctttaattaattcaatttgcatttggtaaagtacacaaatcaattaattaattttcagattttgtatgttgacaggg

SEQ ID NO: 86978 - DNA, 333 bp, Glycine max
cgatccacgcacgcgttctctccggtggtaggagaacaccgaagggggaccccccgggaatatttattggcggggggatacctttttggaaaaggctttctgcccttggccttttcctttcattacccttgatgttaatttttttaggatggcctgttgccccgaccatgatggtgatggcgggcattacgggtgctcattgtccgggggcccctgggtacccgcccctgggagtggaaattcgcgggggaaaaaaaggttttcttaacttaaccgggaggggaaaagggtttggggtttttattttaggtaaaacccccactccattttttt

SEQ ID NO: 86979 - DNA, 315 bp, Glycine max
ttttaagggggttgttgaaaaactaaacgccggcggatagcagcaatgtctgagacctgatttattacatcaaacccaccatttctgaaccctattgcaggtgctagtcatgttgatatactctgtcgtgtgaatctttatctataccattacgctaattgcattgacattttactcatttacgacatttatggctatagaatcatcatagttgaggaatattgcagacttggttgcagctgctgaatattatgcggtagaccctgacttttttaatggtgatcaatattaaacttagaatgctagtccggctat

SEQ ID NO: 86980 - DNA, 371 bp, Glycine max
cccacgcgtgcatacggatgccactagacttttagtggggtttggctaaccgaaacgcacaggattcacaggcacattgtaaaactctttatacataccaaaggccttcctttcctctatgtctttttgcaatccctttctttcgttactggcaggagcaccttgtgggataacagaaagtcagtggcgttaaggtactataaataagatgaaacagcggcgataaactatataaagtctggactgattgaaagacttgctgatgctgttgcaattaggtgccttggacgggtttccttctactttgaccctcagttagagcttgtctctagttcttggcaagcatctattcgtagccctggactatttaa

SEQ ID NO: 86981 - DNA, 374 bp, Glycine max
agaatacgacacaaggtgtccttttggtatagaccacacaaaggttctggagggcagggggcctcttaagggacaatacaccatgaaccttataatttgttctaaagaagaataattaattattaaacaaaatcattggtaggtggtactaataattatgcacttataagtaactcattcatcatttccgttccagtacaagaacttgatctactattttattctacgcaactcatccttcttatactgctcatatttcaactagatcctaccctttgcatcttcaatttccaccattttaattgtgaaaaatcatgaatatgtttcaactgttgccaaaaggatgacccacacaaagctgcttaaagttggag

SEQ ID NO: 86982 - DNA, 365 bp, Glycine max
ggagtgagcaagagtgaagagcgaagagaatggctcccaagggtttaatctttttggctgtgttatgcttctcagcactgtcactgagtcgttgtcttgcggaggataatggacttgttatgaacttctacaaggaatcatgccctcaggctgaagacatcatcaaagaacaagtcaagcttctctacaagcgccacaagaacactgctttctcctggctcagaaacatcttccatgactgtgctgttcagagttgtgatgcttcactgttgctggactccacaagaaggagcttgtctgagaaggaaacagatagaagctttgggttgagaaatttcaggtacattgagaccatcaaagaagct

SEQ ID NO: 86983 - DNA, 259 bp, Glycine max
aggggttctagtgtgtgattgtttgttgttgtaactcgttcttcttcttttgatgctctgtgctagagttagatttttctctcacctgaaaatgtcttgctccggtggtaactgtggttgctgaagctcctgctagtgcggcaacggctgcggaggctagaagatgtacccagacttgagctacactgagtcaaccaccaccgagaccttggtcatgggaatggcacctgttaaggctcaatttgagggtgctgaaatg

SEQ ID NO: 86984 - DNA, 199 bp, Glycine max
aacgaccgactcgacacacccactgctttcatacgatttcaaaaatacttttaaagttattgtgaaattaatggacagagataaaagaaaaacatttattgacaatctacgctttccctaccaattttcccttccttgtctcctctgtttattaaccctaattctcctttacatctcagcaccctttacccttttttta

SEQ ID NO: 86985 - DNA, 408 bp, Glycine max
ggtgggtaaaaccataaacggtttttaaaacttcgttttaaattaaatgcaccttaaaacatccctcaccggcaagggaatgggcctaaaccccttttgctgtttgggaaattcgaaatttttaaaactttttttcccataaaaacaaaaaacagtcctcttcaaaaacaaacagcattgaaatttgccccccgccgttcaaaaccctatttttgaaggttccggttccttgaaatcggcggaaccttaaaattttaccttaaacaaaacccctaagactttgcggggttaaacctcctttaagggggtacccccgttgttgttcccttgtgctggcaaaattgcccaaatgcaatcacttttttttggcagcggccttggtgaccttggctccgggggggttttttt

SEQ ID NO: 86986 - DNA, 278 bp, Glycine max
ggggctaaaataccgggatatttgtattgcagtaatcataataggcaattgtggacacaaaatgcatcatacaatttatttggtccattgtcactgagccacagtataactttagggggaagattacaaagtacaaacttgggaagtcctctcattccttccatagcttcaagacaacattgccttcttcaacagcttctgcaattcccccttctgatatgcatctatttgaaaggaacattttttcccagcaacagtgatatcacagccaccaaaaa

SEQ ID NO: 86987 - DNA, 356 bp, Glycine max
  unsure (1)..(356): unsure at all n locations
atccaaaaacagtttataaaccccccttttaaattaaatccaccttaaaacatccctcacccccaaagaaaattgcctaaaccccttttcctttttttaaaattcaaaatttttaaaactttttttcccttcaaaacaaaaaacatttctttttaaaaacaaaccccatttaaaatttccccccccccttcaaaaaccttttttttaaaattcccccttccttaaatcccccaaaacttaaaaattttatttaaacaaaaccccctaaacctttccaggtttaaacttcctttaagggtttcccccctttttgnnnctttttcttacaaaatttcccaaatccaatcccttttttt

SEQ ID NO: 86988 - DNA, 441 bp, Glycine max
  unsure (1)..(441): unsure at all n locations
cccattatattctcttacactttntatttcccctcgtgggttttttccaaaaaagcttttaccaccttttttttaacaaaaaaccttcattatatttccctcttcaacatatccatcaccaaataccccatcatcagcatatacatacattattcttcaaaccaattaatcctcaatataccttctcctcccccctttttaaacaaccaccgaataaatattccgccccccaagattaaaccaatttcttatttctatcatatatccatctgggccataaaagaacaatttatctacttcaattcccccttcttccacaactgcttacacatcctcaatcttcattccatccagtttnnnnattataactttcatttcccaccattcaaaccacttatattttcttttcccttgatcccttttttttttaccggaaccttt

SEQ ID NO: 86989 - DNA, 321 bp, Glycine max
actatagtcacactcacatatgagcggtcattttatatatatcaaaaaacccctcatcattaatcatttctacctgatttatctctttttttttcatttccatctcacaattttacattattatcatacacatctttttcttcttccacaattaatatcaaatctatcatctcctctgaaccattctagaactcaacctcaataaacaaatccagaaaaacaacggcatatgcctttccctatcatatcttcataaggatccttaaaaaacagcttcttaactgaactcccaccttgtttcacaactattgccacatactc

SEQ ID NO: 86990 - DNA, 458 bp, Glycine max
agagaccaagctgtcagaaaagtacccaagattgtacaccatatcgactcagcaacatcaactcatccagcaattaggagtctttaatgaagaaggttgggaatggcaatttcaatggaggagtccattatttgataacaagattgaactagcaattgctttcttgcaagatatcgaagggacaacaatcagatcagattcgcaagaccactggatttgggtggcagaaccaagcggctgctattcagctaggagtgcatatagagtcatttcagaaggcataccaacagagggtcaggatggaggattcaaggaattatggaagctcaaggtaccaccaaaagtggccatgtttgtttggaggctaatcaaagatagattaccaaccagggacaatttgaaaaagaagcgggtagagttacaggattacttatgccctttctgcagattggaggatg

SEQ ID NO: 86991 - DNA, 357 bp, Glycine max
gggaaaccttaatatggctttctaacttacattaggagctttttcatgtggacactttttatagtttgtttcttctaaggtctgctttgggatgaccaatacacacattaatacttacatataacaaccaaaatgatattgcaatatgtataggcaaaattttatgccttcaccattgtcaaacataaagcagtacatgataggaatttaatatataacatttctatttttggcagaatttctcagtgctcctgcagcatttgctgaagaggctggattgatggccttccgtatcttagagacattccaagcagtgttaacagcatgtcctgcagttgcaaacacatgctcagtagc

SEQ ID NO: 86992 - DNA, 322 bp, Glycine max
  unsure (1)..(322): unsure at all n locations
aagtactaattatgagctaaccacnaaaaccaagctgtcgatattttacccaatacagaccaccccatcgactcatcaacattaacttatacaacaatttttattttttaataaaaaaggccttaaaaatcacaaataataatttagtccattttaatataacaaaatctatctcaccatcatttgcttgaattaaaatatctgcacaaccctcatcacaaattgtatcgatcaaacaaattgggtgacaaaaccaaactgctgctattcaaataagagtgcatatttagtcatttaacaaggcataccaacaaattgttaa

SEQ ID NO: 86993 - DNA, 450 bp, Glycine max
ggaaatcaatgttttgcattagacctacatacaagaggaaaaaatttgtggtttcacacacctgtcctaagaatagcaatcccatgaataggaaccctttctaaaatccttttacatgtgtccaaaggctggcctgagcttctggatgtccttggaaaagaaactagaagtttgagactgttcttgctgcttgggatggttatgaggtgacatagcccctaaagtatcaggtaccaaatgcatggatgtttttatatcattgcatatagactcaagagcttggttttgttcagaagaagccagcattgagatagggttatgaaggtactcataccacttagcttcttctgtattatgattctccatcatatgaatttgtgcctctttagtagtagaggtgccacaatctgtcaatccccaagaagaaaagatgttcaaggggctgctact

SEQ ID NO: 86994 - DNA, 331 bp, Glycine max
  unsure (1)..(331): unsure at all n locations
cccccactgataacaaaaaacaaatttnaccaaangaaagaaactttattaattttcaagccaccaaaacatntcctaannacccccattttgatgcccctattaccaccataaaaacacccccccacccaccataatttttcctccataaaaaaacatatccacataataaaaaatttttttttttaaaaaaaaccaaaaaataattttccaaacaaactatatatcttattcaaaaaaaaacatccccaataaaaaattccaaattaaaaaacttgaaacctacaaaacaattagaagaaaacaaacattccaaaactatacactttaa

SEQ ID NO: 86995 - DNA, 462 bp, Glycine max
ggcctcttattttaataatattaatattaatattaatgtgaacattaatatctagtctagttacaacttaagacaactgtctgaaaattccacactctggattctctgtctcatagttttctttgcagaagaaaagaaaagcaatagctcaattctctattttccagaagatacacttttttctcacacaaaccaagggaagaaaaaaaagatcattcctcaatctgaagcataattgtaacacataatcaggtgggagacttgttttctttttctcatttcttaatttgttttctttgatggtgtgcacaaattttcactccatgatgttgattccatgaattgtactgattctgcagaatgaaggttgaaattgaaggcagccacagtgattatgctgaatctgtttccagacaaccagaaaatagaggaagattggaatccaagaagaaactgaagaaa

SEQ ID NO: 86996 - DNA, 418 bp, Glycine max
ggctggggtccataaggcttttttttttaaattatttaagcttttctgaagtcaatacacgaaaacatgtactaatgactcccatgttgatggcccttttatgccttttgagagccatcccatcaaccatgattttcttacaggagaaaacattgcagaaaataaggaatatgtggcttaaagtgttgctcacaaatttttgtccatggcagatatttaattccaaaaaaaaagtagccaattaaagattcctaattataagacttgtaacttactaaacatgtagtagaggagaaacatgcagaaactatacaacttaatgacgtacaatactaagaaataaatgagattagatagatttcaatgaagaaacatctcacttaagctggctttaaaaaagaaaagtgatgatattctc

SEQ ID NO: 86997 - DNA, 140 bp, Glycine max
tccccttctctttactaacatacctataaaaaaaaaggatgtgcttttattaaattgcctagccacaaccccatacaactactttaaaatttctcactataaacccccaacatcattcttttttttccttaataaaacaa

SEQ ID NO: 86998 - DNA, 452 bp, Glycine max
ttcaaaaccatactcttaaaccttaaaagagaaaaatgtagtgcataactagactttatagagaaaacaaattaaaacttgtaaatttgtttgggtaaaccaccaacaaatatcactttagtcaataattaaagattaaagataaactttaatgaaaattaaagattaacttttcaagatgaaagaattcagtcatgtgaattttatctctcttaacaatttttctgtcaaaaaaaagtctctcttaacaatttcttttgtattcacacaatcatgaattgaatccatgtttaagggattcaactatgtgatataacaatgtgaagtttttgttggtaaatttattcgtataagttgattcaactaataagatctaacttaataataactgtgcagtaaaaaaaaaacgtaatcaaaattgttgaaaacattcttactcatattattactta

SEQ ID NO: 86999 - DNA, 471 bp, Glycine max
tttggaaatttttctggaattttttttttcctggaaatggagctaaacctaattttttttttggacccaaagctggaaggccccaggaattaggaccaggaccaaaattgtaccaggaccaggattaggaccgaacaaaaaccccaaccaggaccgcgcaagaccccaaacaggaaacaaattgcagaacaaagacaaaaacacgaaccctggaacaaattacaaaagaaaaaataataggatagggatagaaatagaaacctgtatcaagaagccgaagcttctgataccaagatgatgtgaacctgactaggagcggatcgcttgatacaggctacggagttttggatgacgccacttccagtgaaggaagataagtcaggatagacgccacaaggattaccttgataagtctgagattggttcaacaaggaacctagagagaagctctcaccaaattttattaaatgc

SEQ ID NO: 87000 - DNA, 386 bp, Glycine max
  unsure (1)..(386): unsure at all n locations
aaaaaaaaaaaaaaaaaaaaaaaaaaaaaataaaaaaataaaaaaaaaaaaaaaaaaattaaaataaaaaaaaaaaataaaaaaaaaaaaataaaaaaaataaaaaaaaaaaaaaaaaaaaaaaaaaaaaaataaaaaataaaaaaaaaaaaaaaaaaaaaaaaaaaaaaaaaaaaaaatataataaaaaaaaaaaaaaaaaaaaaaaaaagnatacaacaaaaaacaaaaaaccacaaaaaaaaaaacaaccaaaaaaaaaaaacaacaaaccaaaaaaaaaaaaaaaaccacaaaacaaaaaaaaaaatcccccaacaaaaaaaaaaaacaaccccaaaaaaaaaaaaaaacccccaaaaaaaaaaaaaaaacatccaatcaac

SEQ ID NO: 87001 - DNA, 279 bp, Glycine max
  unsure (1)..(279): unsure at all n locations
acaaacatattcttctccccactctaaccnccccaccaatagcaactttttaaatatttatcacgccccccacaaccccnatttcctcaacaaaaaacaaccacttctttatttctaccaatatctatattaaccacaaaaaaacccaccaagctacctccctttattaatacttcacaattccatccattattaacttcctaaaatacttaacacatcacatcaacaacatcaccctccattctcaaatatacattcttaattcctaccaaacccctt

SEQ ID NO: 87002 - DNA, 206 bp, Glycine max
  unsure (1)..(206): unsure at all n locations
ancnactaatttctcccaccaccaccaacaacctaaaaagaactcttattaaaaattctagacccccccccaanccccacaanacataaaatattctttcttctaccttaatcctaaccacacccataatattaccccacaataaattactattccctcccatactatccacaacatactaaccattaacataaaaaataaaacac

SEQ ID NO: 87003 - DNA, 57 bp, Glycine max
ggggggcgtgttcttgcaagcccaccgaccccttgggtggacccggaatttcggaac

SEQ ID NO: 87004 - DNA, 531 bp, Glycine max
atgagaattatgaatttcattgaaagatcacaagagcattataaaaggctcccacgtcacaacattctacatcaaaagaaagttggggtggagcatcctccacccagacttgatcaaccaaaacaaaggctaactaagctaaagaatcagcaacaatgtttcctatcttctttgtatgtaccaaagcaacagtgtctatatgtgttgtcatgtctctacaatcctgcaaaattgcatctagatatgtacaatcctttggctagcattcctccaagcacttgcaatctccctgcagtcagtttcaaaaaagacattctgcagcagaagttggttcgccatctggatactccatttgaaagctaggtactctgcaatctgggggctatagcactgatcttccaagcgagttgcagatgcaaggacctcacccttatgattgcggaacacaaggccgaaccccatccctttaccaatctttatcgaggcatcaaaatttgcattgatcattccctcttgaggtggctctgatca

SEQ ID NO: 87005 - DNA, 449 bp, Glycine max
ttcccgggtgtatagaacctaagttgggtccattaataagagttagagatattcctttttctttcttttagagagtaaggtattcccagagttataagctataagactaatccctcgagaaggtatcggttaagtgaaactcctccccccacatgtattgctcttcacataactagaatcaaacccttctcattatgcttaaagtaattaaactgtataaattataatgtgattaagaatccaattaatgttcaaagttttgaatttgattttgccaaaaaaagaaattgaacaaaaattcttgaattgttaacaagcataaaaaatttgcaagtaaagtattgaattagtctaaatcaaatgcaaaagttccacccaaattaagaatattgttaaaaagttttaaaaacatagtttcacataacttttaccaagtgatcttacaaaat

SEQ ID NO: 87006 - DNA, 389 bp, Glycine max
cccacatctaattatttcacatcacattttgtttacaccaacctctacattctacattggaaaagaacctcctctttagttctttccccctctttctctctctcttttgtcatctccaaccaaacatttttctattttcccctacaccagtcccttgaaagaaagttgtctttcccatcttttgggactataaggaataaaagtgactattttagtaccctcaggcaagggtaactcatatattgaagggattttctcatgccaaacaaaatcattctcatgtacaaactttctaagcacttcagaagcatcttgaatttgcttttggtaaatagatttccaaggatcttcccctggtatcttctttttcaccttattcaacacagaac

SEQ ID NO: 87007 - DNA, 320 bp, Glycine max
  unsure (1)..(320): unsure at all n locations
acccatcacatatcacaaacgccatctttaacattctacatccccaacaaaccccctntaaaaaactttccccctctttctccccctctttaactcatctccaaccaaacaaaattcaattttcccctacaccaacccctttaaataaaattgtctttcccaccccctaacacaaaaaacaataaaactcactcttatactacccccccccaaaaaaactcatatctcccaccaaatcctattcattccaaacacaaatactctcatttccaaactttctaatctcttcaaaaacaaacttctatttcctccctccaaat

SEQ ID NO: 87008 - DNA, 614 bp, Glycine max
tagagcgggcggttttttttttttttttttttttttttttttaggggtgttaaattttaccaccttttctacccaaaggaaaagatttttggcatgcgatgcgagtgatagatttatcgaatgggttattataaaagtttttttatatcggcaaactacattagatataatttaaatttaaatagatatttttaaaatatttatgtaaaaaatacgagcatttatcgttttgaaaataaattaaaggctaatacacagttaaaaatattaaagagcaaagcgatgaattaaaataaatagtgtttaattattttaaaagcttgcctctattatttttcatttttaatttatgaaaacaatcattaaataaatttcaatgatgattttattaaaaaaatcataaatatttgagtgtatatatatatatagagagagtttcactgtcatcctgtaaaaaatattataattttaatttattgattttataataatatttaaagttgactcaaattatatgtttattggggatagatgaaactttgtttagatatttagagaggaaataatctataaatgttatgtattatttatataaagtcagataaataaatagt

SEQ ID NO: 87009 - DNA, 151 bp, Glycine max
ttttaaacacaaaaaaaaccccaccaaaacaaaaaacaaatccttttcacaaatcaaaaacctatatctcctctatattatatcaattccataaaaataaattttaatcctaaaaaaaaatctaatttattctaaaaaccccctaaatcaa

SEQ ID NO: 87010 - DNA, 315 bp, Glycine max
  unsure (1)..(315): unsure at all n locations
cggccgataatatttttttcttantctttttttcacaaatataataacaacaaccacccnaaaaaaaaaacgactgttttcaaacttattaaacacccccaccaacctcaaaaaaaaaaaaaaaaaaactcatcctacaactaacatattttacccctacccataaaccaaattaacttttccacaataaccatcatttcttcaacaatttcaacaacccaccttactacacatatataatcttaccaaaaataccaaaaccaacctttccaaaattataaaaccaacttttcaaaaatcaccccactttatctc

SEQ ID NO: 87011 - DNA, 451 bp, Glycine max
ggtccaaaaccttccggaacccccccgccggggttaatttttcatttaaaatcgtcttttccccgacttttatttttcttttttttataatatagtgccttatctgtactacaactggctctctcttggctgccaatttgatgtactacatgctgttgctttttgtttttcttacggtgttattctgtttctcttataaagtcttagggttagttttgctcaacctcaaagcttactgtggatggactggtttgtttgttgggtggtgtggcaaaagactggctttgaacagttttattaaaatttggatgttttgcctagacagttgtataaatggcgttattcgagttttttttagttttaaaaaaagtttgctcgtgtatttagtcttgaagtcatgtactttcggtgtattttacacatattttttgtgatttttatttatttttcc

SEQ ID NO: 87012 - DNA, 483 bp, Glycine max
aaaaaaatctattaaaatatctttaatttatttaataaaggttatagcatacattctatatataataaaattttaacaaataagcacttaattaaattatacactcaattatatttttgcttttaattttcattcttgtctcaattgcttttcgtattattggttatcttacaataaaattacttttagtaaagggggtagttttatcatttttaatcattattttttaatttcagtgatttgataattttaaaaatgaaagatatagtacaataacatattaatacaaatttaatgtctaaattttttgtatttaaatgtaaaaattgttctctcaacctattttcataaaattaaaaattcatttctaaatataagttttttaaagagatttctgaatataagttgaatatagtattttcttattaatagatttcaccgtaaaactgtgcatagagtatttttttttcttctaattttgaa

SEQ ID NO: 87013 - DNA, 130 bp, Glycine max
  unsure (1)..(130): unsure at all n locations
atcaaaaacctacnaaaaccccactgcggtttttaatattcaattcaaaaccccctataccccaaactttttatttttctctactattttataaataataaatgcactttttcacattactcacaaacat

SEQ ID NO: 87014 - DNA, 292 bp, Glycine max
  unsure (1)..(292): unsure at all n locations
accaacctccaccatgtgatnagngacaaaattccacgatcattattacaacaataactacctctcttacaaaagtattaaaaaaaatgatttaaaaaaaaacaaacttacctcaagcctacccagctcatacatccaatactcttcttccaaatactccaaaatagatttttctccttgctgcttcaaaacatccacaaccaaacacttcatgcccatttttcttattctatgcggcattatcacaccaactgcttcagttatatatctacacaccaaaaactttttcttc

SEQ ID NO: 87015 - DNA, 340 bp, Glycine max
  unsure (1)..(340): unsure at all n locations
aaatatataatactnnctcatacaagtacatttttaaacatctgtacaccaaaataaataaaaactactcatatacattattccctaaaataaacttaatatcataaatatttacttattacaaaccttttataaaataaccacaattctttatctcatcaaccaaacttttttaagaaacatgacaaactccctaacttaatagtttcataaatttccccctcatcatcacacatttcatttcccaaaatctttattcattaaattacatttcaattacataattacctgttgattagccattatttcatcaccactttgaacacttctttcttttttt

SEQ ID NO: 87016 - DNA, 489 bp, Glycine max
tttggttaaaataaaaccgggggtggggataaaaaatttgggtttttcggtggtaaattttttttattttacccttcccaggttttttttaaaaaaatttcaacttacttggccataatatgggatgggattatcaatataaaatttaaaaatgtttatttttaaaaaaaaaatgaaaacaaaaactcaaatcataaagaaaataaaattaaatgtcagcatattaataaagaatcaaaatatgtgtaagctttaatattaaattatattttttataaaaaatgattgtgatagaattagagcatttttaactacaaatattttctctacggtttattaacggaatagggacatatatctttgtactcgtgcatgcatatatcacttgttagtgttaaaatactttacttatgtattgaagtgtaatttgaattggagcttacaaatttttcatttggatcatattttatattttaagaactattcatg

SEQ ID NO: 87017 - DNA, 303 bp, Glycine max
ggggtacttagcataggaaatatataatacttgctcatacagttacagttggaaacatctgtgcatgaaaataaataagaacttgtggtattcctttttgccctaaaataagttaaatatcataaatggttctttttgacaggggttagaaaaaataaccagaattctgaaactcatgaaccagattttgaaaagagacatgacaaactccctaacttaatagttccataaatgtccccctcatgatcacacatttgatttcccaaaatcttgatacattaagttacatttgaatgacataat

SEQ ID NO: 87018 - DNA, 145 bp, Glycine max
cccacgcgtccgcacacgcgtgaggacacttttaaggtctcccaaagatgacgctaaaacggaattgaagcatgtatgtacctccataagttggagatcaacctaaaccgtatttcaactctgcggattgctggataaagccatg

SEQ ID NO: 87019 - DNA, 379 bp, Glycine max
gttttcttcacggattctatcccgaagaatccctccggcaagattcttaggaaggacctgagagcgcggcttgccgcgggcatcccaagcagtgacaacacacagtccaaaagttgatacgtactttcgtactattcttttctagctgtgccaaaaatcatgctgtgctctattcatgagatggcaatggtatacacaaaacgccaagcggtcgttatcgattcttctagatgggcaagggtaaggtatacttcgtttgtgtccgacatattatgtatttgtatcatgtatagatacgttttgttgacaacaagtgctaattataatgtataccatgtttgggaacctaaaaaaaaaaaatatggaataaaaattttta

SEQ ID NO: 87020 - DNA, 348 bp, Glycine max
aggggtgtgtaagttcattaacatatacaaatactatgagttgtgttgtgtacttgtgtcaattgggttgtggatgtgggaaatatacgcgaacagagaatgactatgaaatctgctatgtgtgcattggcacttgatgctcttgttcaggataaaatggggcccatggtttaggctgatgtgacttgcaaaccaacacatggtgaatacttttattacggggattaaagcatgctctgtatcttccagcgcttattgccagatactgaatgtgcaaaaggcatgcttctgtggctacctcttaaaccctaggttgcaacaagatgttaactctcctaatgccaaaaa

SEQ ID NO: 87021 - DNA, 396 bp, Glycine max
acactgaatggctgcagggatgaagacgattcctcatgctcatcagagtcgagtgaaagtgaatgcgagggccaagttatgaggatgagccgctgcgctacaatcaccgcaccggaaatgccacctccaagcacgggtcttccaatcatagttcctcaaattccagcacctttggcaccacagccgtctcaatctcaaccttcagagccagcaaccgcagtgcaagccaccagagtcagcagcgttgcagtaactgagacatccacaaccagcagaattgaggtctgcatggggggcaaatgcaagaagtcaggcgcgcttgctctcctgcaggagttcgagaaggctgtgggcaccggtggcgcggtcgtcggctgcaagtgcctggggaagtgc

SEQ ID NO: 87022 - DNA, 306 bp, Glycine max
ggagcaggagttaattaacatatacttatcctgtgccgtgggatatctcatgttcacaatcttgaacgtctattatgagatcaaagctgaaatagaacaataccctgcttttgatgtccttcgcaaatgctcgatattgactcagaccggttgatggactacactgtgccggcaggtagaggatatgtgaattcatatcaagtttgcgctgttgtaattcttcctttattagtgggtatacacattcatttgttatgtaagataagatgaagtgtcatgatccatagctatctccctaaatgaaga

SEQ ID NO: 87023 - DNA, 175 bp, Glycine max
ggaccatgcatggtgctctggtcgatgccgtacgtgtgtccctgatacaatactattagtactgatgctagtcatcatatatatcgagctcgccactgcgaagtctgggagataatgcatgtatgcttgacggcgagatctgaggaaaaataatactatatatgcatgtttcgag

SEQ ID NO: 87024 - DNA, 169 bp, Glycine max
gtcggactcccaggaggatgaccggtggcaagaggttctgcggcgggcgggtgccgacggggacgcggtgttcttatcgtggtcttccgccgccatcgtcacctccctcctcgctggcgcctccatcgttcacaacatctacaatcctgacatgaccattccacctgtg

SEQ ID NO: 87025 - DNA, 241 bp, Glycine max
ctgttctttattataagaatccatcactcacggggtgtaacaaactgttgacgtggggatctctattgtggtcttttattaagtgcccagctgatgtgcgcgtgcatgcgacttactaggcttctaaatagataaatgtatgttcaatgcacagagtgtgttgctacaaaggcatgtctgagaaaatcctgtcgctacgcatttcatgcaccttgtgtgacagctggcttatctgagatag

SEQ ID NO: 87026 - DNA, 264 bp, Glycine max
gggtctacaagaggctggctgggcaaggcattcttccggtctggaaggaagaggagggggaggaggaggcctcgaagtagtagattgcgcaggcgcatacgcatacacatacacacagggtgctgccgtgaacatacacatgtaacgctgtaaagttcatctgctagtaaaagttcatctgctgtgaacatacacatgtaacacagatacttcagtttcagcagttaaaaacctaccgtcggtattcttctggtgtgagatgcg

SEQ ID NO: 87027 - DNA, 162 bp, Glycine max
ttggggtggcttatagctaaccccaaacttgagctacggtcccttcaaaccttctactcttccttacatttacaataaagggaacaatatttcttctagatattcccataccatggatcaagcccatcctatgaaacatgaagcgggaattctaagatactt

SEQ ID NO: 87028 - DNA, 381 bp, Glycine max
  unsure (1)..(381): unsure at all n locations
caagtccgccgctgatgttctagctccgacgccaaggagaacgcagatcctaaccccgagcccatggtgagcgaagttcatcgcccgcctggaagttaggcacgcacggcacgggccccaaaacctagggttctgaacgtgctggatttggattcgctgcangtggaggtggagatagagtatgtactggagaaggccgagctggacgaccctctcctcgatgacttcaagaccatcttcgaaaagttcacctttaaggacgctgccgcagcagcggccgaggtatttggattaacgaagcgtttcttcaacccgtctgtcgatgagcgagcctaaagccctgtttgtctacttcgaggattatataagtaagcttatgga

SEQ ID NO: 87029 - DNA, 160 bp, Glycine max
cggacgcgtggggtgaatgtagctggtcaaggcggttatgtctttcattacattggctcttgcacatttttcttcggcagaatttggttccctaccgaagatttgtttctctttggcagaatttgtttccaactaattgtgagtactaggtaccatatcc

SEQ ID NO: 87030 - DNA, 376 bp, Glycine max
aggcgtgcgaagaggtgagaggggacgaccgttggggggcgtggtatgaccgcatctgactcgttcgctgaccggcgggtgctttcacacactatgttcaggaaacaccaaaacattctaactgcttacgctagtgattatctagccattcactaattcacgtccctaaagacgcaatattcattctgagatcgacactgtataatgccggtcccatgtgccaaattgcatagatgcagccagccgcacaattagatgttttatacacgctcctgtgtatttaaattatgaaactcttggttatgtcctcttctctactcctgtacagacgctgacgcacaaatctttacaaccttggatgatgtgactgaccaat

SEQ ID NO: 87031 - DNA, 373 bp, Glycine max
ggaaggattttggttcaatatcttcaagcattctaccttcctcttgccaaagtagtttgaatcttggatcttgcgatgacaaagatgttaggaatcttataacaagtaatggtggttatatgacaagatcccagctgcatggctttgacttctattattctagaatggccccactttgtgccaaaggggaactgcagaaagctaatcaatcagcaaaagaatttctttctgacctgacagagtctatgaactgaacatgtgggatagaaatgtagaattctttttattttaggaactactctcccagtagtgccagcaaatagagcacatggatgactgatgacacctgcaggactgaatcctgagtcagtag

SEQ ID NO: 87032 - DNA, 253 bp, Glycine max
ggcgtgttctatgtgaagaccgaagggacgtacgtctttattagatatgagtttgcgactaaagcttaaaataacgcttattgttcagggtgtgctagtgctaatgacgttgttatagatattagagaccgcatcggttgaactgtgttacatactcacagacggagcatgcttttataatcatggatcacaattgggactcccctgccttagatgctgaatggtcatgggaaagctgctcttgatctaatat

SEQ ID NO: 87033 - DNA, 312 bp, Glycine max
gtgagcggttgaatgcgacacatggcctaatgtattgaagctgcatgtattgaacgttgccatctgaacttctcttggacttgcagggcaccattctgtcgccacatatgcgcccttgaagccataccgcgcacctggcctcacgaaccttgctcatatctacagggatctcctggtgtgtctggccacaaattccatgtattctctaccatggcagctacttaatatctgtgccggcagcgtcacagccgagactacagctgcaataccttgctctacatatcaccccacgttcacttaggctgcgctcgg

SEQ ID NO: 87034 - DNA, 370 bp, Glycine max
  unsure (1)..(370): unsure at all n locations
accagcttgccaaatctctaaccctaggtgcagcggcggagatggcccccaagcgctcggctccacctccgccgcctccgcccccggctgcctcctccgaggagaccgcctctggttcgggctccgaggaggaggaggaggaggaggaggaggaggaggaggatttggagaccgcccactcaccgcctccggncgctcccaagagcgttgctccgctgccgcanaaggtccaggaacccgaagcgtccgacgaggatgagtatgacgatgaagatgacgagccgcacaaggtccaggaacccgaagcgtccgatgaggatgaagacgacgaagaggaggatatcgaagaggacgagaaggccaaccacgt

SEQ ID NO: 87035 - DNA, 339 bp, Glycine max
ataagacaacacaatgtggactcctcattctactaaaacttaaaaacacatttatagtggcgaatatttattttgtatcttatgaacgaagattattatgcagtttgaatactaacaagaaatctatacatgaaattttaaagagatatatttatttatctggacatttatattatgataactactactataaaacatttatgaaatgcttggtttaataaaatcatctctggaattcatatataattgattgttttaaaaattacaaataacttaaataagctttttaagaaattaaacatttattttataccaaaacttccgacactaatattttta

SEQ ID NO: 87036 - DNA, 213 bp, Glycine max
ttgggatttttaaaatctctccttactgcgaggaccattattcattgcgacaagattgctgaagacctcaagtggatattctgaaaacactagatcttcgattcgtttggtaaccgtatatataggcctgattattacacaactctgtgctcgaaggatatggaggtttaaaagattgtaagctatcaagcgaatctgggagcgtcggaattg

SEQ ID NO: 87037 - DNA, 404 bp, Glycine max
cgcaggcgcatacaaacagttgacagggtagactcaaggcaacagtgaggaagtggccgatctgttgaggccgatggaggcagatagcatggtggccatgggctgcggaggtttctactggcagtcgcctccgcgcttgctccttgaacccctcgacctagccgacatcgtcgacagcatgtacgtgccgacgaacgatgctgatgagcccgtatccgggctctgctcatcgaaccggccggcggaggattactccagttcggccgaaggcgccaactcctgctccgcggcggtggttccgtcgccgccgccgacgacgggcgtgatgacgacgacgactaggaacatggccatggagagggacccgcgcatgaagctcaacgagaggctctactcgctcagga

SEQ ID NO: 87038 - DNA, 135 bp, Glycine max
cgagaacatgaacggccaggagctcgacggccgtaacatcaccggtaactcaagcccagtcccgtggcggtggcggtggcggcggtggctacggcggcggtcgcggcggcggcggcggttatggtggcgggcgcc

SEQ ID NO: 87039 - DNA, 328 bp, Glycine max
gagtttgagaaatcgaaagagagcaccatctgattgaaagaattcttctacaacgacatggactggtttggcctctaaagattgggcttcccctgacttgtgctatgattttacatcaccttatgatgtgtcaaaagattgatagtcgtgctactgcctctagaagaaaaacaatagggcttgagagacaatcatcttcatgtttggatgaaattgatggtgaagctactgatacattgacaacttatgctagagtcgtgaacataccatggaatgcagtagacgaggtcgctctaacggacgactttaacggagaaatctatgtgac

SEQ ID NO: 87040 - DNA, 378 bp, Glycine max
gtatttcttcttttatatagattttatcttagataaaatatttactttagggatatttatatttattaatataacgcatctaattaaggttgatcgaagatttttcttatatttgagttataaatattattaagttatctttttttggggaagaattatcaagttatcttgtgttatgtacttttgtataacaataactgtgtccaagaatgtgttcttagctaccgttttacatcacagggattgcaaggtggtggtgtggtgcaattaataatgttggagaactagtgttagttgaaaacacacggactatgttatgcttggagtagtaataattatatatagattgatcgtactggttggtttagagtgtgagga

SEQ ID NO: 87041 - DNA, 355 bp, Glycine max
gtatttcttcttttatatagattttatcttagataaaatatttactttagggatattaatatttattaatataacgcatctaattacggctgatcgaagatttttcttatatccgagctataaatattattaagttatctttttttggggaagaattatcaagatatcttgtgttatgtacttatgtataacatttactgtgtccatgaatgtgaacttagctaccgttttacatcacaggcattgcatggtggcggtgcggtgcaatgaataatcaaggtgaactattgttagttgaaaacacacccactatattatgcctggcgtagccagaatgatatatagattgatcgta

SEQ ID NO: 87042 - DNA, 355 bp, Glycine max
gtttttcttcttttatatagattttatcttagatgaaatatttacttgagggagatttatatttattaatataacgcatctaattaaggttgatcgaagatttttcttatatttgagtgataaatattattaagttatctttttttggggaagaattatcaagttattttgtgttctgtgctatcgagtaacagtaactgtgtccaagaatgtgctgttagctactgttttacataacatggattgcacggtgtgggcgtggtgcaattgatcatggtggagaactagcggtagatgaaaacgcacgaactttgttttgctgggagcagtcataactatatatagattgaacgta

SEQ ID NO: 87043 - DNA, 158 bp, Glycine max
ggtcatgtagatagatctcaggtcggatctgtatcatatacgtataggagccgtcaaatacgaagcgaatatgtatctgcacgtgatctgggacagttctgatgagcgtatgcatgtcttacatgattaatcacacttttacatgtttggaatcagaa

SEQ ID NO: 87044 - DNA, 276 bp, Glycine max
ctcaattgagactactctcatcatcaactctctatgccggtgttaaaattataaagttccccatcatttggctgactggtgactgaaccgaatcaattttcctgtaaggtggatgagaacaaactacaagctaatctgggtgagggagcgactcttgaaggacatcatatgacatgttaccacattgattgattatcacagaagcatcaattaatatataattctgaatgaactgtttgcgaagataatttgggtgtgcctgtggagaatgctact

SEQ ID NO: 87045 - DNA, 178 bp, Glycine max
gactccttcaattgacacacaacggcacccccaaagtcctcatcatcatcatcttcttcttcttcttcaattgacacactacggcaccaccaacgttattttttcttgcaggtacctcaacattttcttcatctacatgaaatttcagtcgcaatttatgaaggaagaaatttgtcgt

SEQ ID NO: 87046 - DNA, 134 bp, Glycine max
gtcaaaagggcatttgggaatttattacacactcttatttgtgtgggtgggtgacaaatttttaagactacacgccctccctgaaacatgtgatgaccacgaatattctgccactgagaggggatccgatcaca

SEQ ID NO: 87047 - DNA, 117 bp, Glycine max
accgaggtgcatttttatgaccccaacgcacagttgattgagcctgatgctaagaaaacacggccagatttctacatatcagaacgaggtcatgaaaccgaccgatcctttcggttg

SEQ ID NO: 87048 - DNA, 246 bp, Glycine max
ggcgttagtcgagagtgttattgaacaagagcattttgcaacctcttcggagttaacggaagaactagcgaatgatgggtccagtgatatcgaacacggagaagaagttctctcttgcattgatttaccgtgggttctcgcgcatgattctgtactttcacacaagcatgatgcttattgaggaagcggcgataattccgtcaaacaggctatggatcatgatcgaggtgttctcgacacacctga

SEQ ID NO: 87049 - DNA, 218 bp, Glycine max
  unsure (1)..(218): unsure at all n locations
cggacgcgtgggggagttttaattttgctcatattgctctatgttggaggatcattactggtagcccgattctatgagggcattggttaaggtttgggtgagggaatgacaattatgcctagtttggttggccgccgatcttaaaatgcctttcaaataccaacgcgttatattgtggggngaaaaaaaaaaaatatgaatttttttttttttttncc

SEQ ID NO: 87050 - DNA, 373 bp, Glycine max
gaaacagtgtgatgaaaatgaaggtccttgttttcttcgttgctacaattttggtagcatggcaatgccatgcgtacgatatgttccctctccgaatgaacactggctatggtgcccgtactccggaggtgaaatgcgcaagttggaggcttgctgtggaagcacacaacatctttggctttgagaccattcctgaagagtgcgttgaagcaacaaaggaatacatccatggcgaacaatatagatcagactccaaaacagttaaccaacaagcttacttttatgccagagacctcgaagtcaatcgcaaggacacatttgtgttcagtatagatggcaccgtactctctaatattccatactacaaaaaaca

SEQ ID NO: 87051 - DNA, 350 bp, Glycine max
ttaatggcgaacaatttagatcagactctaaaacagttaaccaacaagctttcttttatgctagtgaacgcgaagtccatcacaacgacatatttatattcggcatagataacaccgtactctctaatatcccatactatgaaaaacatggatatggggtggaggaatttaatgaaaccttatatgatgaatgggttaacaagggcgacgcaccggcattgccagagactcttaaaaattacaacaagctgttgtctcttggcttcaagattgtattcttgtcaggaagatatcttgacaaaatgggccgtacagaagcaaacctaaagaaggctggcttccacacatgg

SEQ ID NO: 87052 - DNA, 310 bp, Glycine max
cgaagactgaagcactctctccgatgacagtattcagaaggaatccacacatcagcttggtcgtatgctccgtggtggagaactctagttgcaggttgactcttgccactggcagtttcacttccatgaatgtgtctgatataactggatttctaaggcgatgttgacgttatgctcgatggcggtcatctctagttggagggaatcatacgaatcaagtgcacttcaatattgaatgagctcaatcataattgcaacaacttcagcaatgaggttgctcaatttttggttggtgcgtccattcctgaat

SEQ ID NO: 87053 - DNA, 401 bp, Glycine max
gtttgttgtgagctataagctagtttatcgtgaggagaatatgaagttgtttgttttctttgttgctgcagtagttttggtagcatggccatgccatggcgcaggctaccaaaggttccctctccgaatgaaaactggctatggtgagcgttcttcggaggtaaaatgcgcaagttttaggcttgctgtggaagcacacaacatccgagcctttaaaaccattcctgaagagtgcgttgaaccaacaaaggactacattaatggcgaacaatttagattagactctaaaacagttaaccaacaagctttcttttatgctagtgaacgcgaagtccatcacaacgacatatttatattcggcatagataacaccgtactctctaatatcccatactatgaaa

SEQ ID NO: 87054 - DNA, 372 bp, Glycine max
ctagtttcttacaaggctctactctactgcttcaccttctgctctagaaaattcagtggtgatacatggcttcggctactctctctgtagccaaaccagcccttcaggcaaatgggaaaggcttctctgaattctctggcctccgcagctcatcaggcttccttcccttttctagaaaatcttcagaggatttccattctgtcattgccttccagacctatgcagttggaagcagtggaggatacaagaagggtgtgacagaagcaaaactgaaggttgccataaacggatttggaaggattggaaggaacttcttgaggtgctggcacggtcgcaaagactcccctcttgatgtcattgccatcaacgaca

SEQ ID NO: 87055 - DNA, 304 bp, Glycine max
ctcgagccgctcgagccgaatcggctcgaggaagaaagtgcctccacacaaaacgacctggcccactaaggaaattcacttgaccccaaagaaaatcaaaataacttcgcttctccctcttcttctctggtctccatcacttctacacgccagagttgttcccaactttgctgctgagagtatggttccaaaagggacagaatggggtggtggaaactgggaaattaaaacacctactgctgtgaaggatatacctcagtgggagcttgctgcaaaagtgacaacatacatgaaaactgatgat

SEQ ID NO: 87056 - DNA, 361 bp, Glycine max
ggacattcctgaagtggcctgttacaatgatagagttagacgaaagcaggatactacaaagtgtgcacatgacaagagccagtggagaattttgaaagagaaaaaagaattacaaacaggttcctatagacacaaattagatgacaatgtattgttccacaaggatttgtctcctacaaatcttgaaagatccttgtctgctcctgcatcaggaacatcatttgggaggcttcttctagaggaccgccacattttaacgggcgcccttattcagaggaagcttgaagctgttgaagcaatgcctgtggatgtcaaagtaaagaagaaagatgggtttaatactaaagaaaaactttccaat

SEQ ID NO: 87057 - DNA, 366 bp, Glycine max
ggaattcactctctaaagaaaatccttgtatgattggaatcatatggtttaggatcattctatatctcacgcgttattaactctttttcgtaaattgagaaatgtgatactttcatgtgatgacatggagattaattgagattacatgttctgaatcatggaataatttcttttctcatagagaaattattatatgatcttggagcagcacatgcctattgtccgatcaatctccatataacgtgttaagtagagtttgactgagattatgaatatgtggtggtcccaaactgtataataatttctcaggactaaatattaaatataggagatgttttagttttttcacttctcgtgtggttgttg

SEQ ID NO: 87058 - DNA, 281 bp, Glycine max
tgctacaatgggacagtctcacactataggtttacaggaatccgctaaatagcactctgaggcaaaggatttcacaccttctttgacgctgatagactacagaggtgggaggaattatcacctgcagttttaacggcaatttcagcttcaaaggttgctagtagcgggcattcgtgcaaccatgccagctcctcatggcgttgagatgaccatggtcacagctttcactgcatgagggaatggctgttggtcatcaccgtcatttactaaatcaatccttc

SEQ ID NO: 87059 - DNA, 241 bp, Glycine max
  unsure (1)..(241): unsure at all n locations
ggcgcagagtgcaatcgaaattcgatggttcaatttcacgaacgcatagtcacagagcttctagaagacaccaatggcggtctggttgttctctcctcaggcctttctctctccaaactcatcccttctcttctaattctacacttctcatctcacggcacgctccttctcctctcacagtcctccacttccctcaaatccaaaatcgccttccagctcanaaccctaaacccccaattct

SEQ ID NO: 87060 - DNA, 313 bp, Glycine max
  unsure (1)..(313): unsure at all n locations
ttcttcgttgctacaattttggtagcatggcaatgccatgcgtacgatatgtgccctctccgaatgaacactggctatggtgcccgtactccggaggtgaaatgcgcaagttggaggcttgctgtggaagcacacaacatctttggctttgagaccattcctgaagagtgcgttgaagcaacaaaggaatacatccatggcgagcaatatagatcagactccaacacagttaaccaacaagcttacttttatgccatagacctcggagtccatcccaaggacacatttgtgttcagtatanatggcaccgtac

SEQ ID NO: 87061 - DNA, 180 bp, Glycine max
agagaaaaaaatgtctcttccaagacccagtgagggtaaagccccttctcagctgaaagaaggattacaaccggcggcggctgaagcctcaccctcttcttcagggaatattaggcaaaacacttccctcccttggctctatacacaacaagattcacaaatttgacagtgagaaatatg

SEQ ID NO: 87062 - DNA, 219 bp, Glycine max
cattttctctacttcatcgcaggtgacgggcttccttgtatcgcaaatccatgctcctcagcgacagattcctgttggggctgtcttcatatgggggcacatcctcacatgcatcctccataatctcggtgcctctcctgtcatcttgcctcttctgtctactccgcatcacgaagcttaacctctgccgactcacagtaatcttcactgaatgcatgc

SEQ ID NO: 87063 - DNA, 218 bp, Glycine max
  unsure (1)..(218): unsure at all n locations
tttagcgcagcttcttctagatttaaggaagatgggtaaggaaaaggttcacatcagtattgtggtcattggccatgtcgactctgggaaatccactaccactggtcacctgatttacaagcttggaggcattgacaagcgtgttattgaaaggtttgagaaggaagctgctgagatgaacaagaggtctttcaagtatgcctgngtgctggacaaac

SEQ ID NO: 87064 - DNA, 161 bp, Glycine max
aagtgtgaaaaatttgcaaagcatttgtagccgccaccccactttgtttgtttgtacttaaactacattcccatttgtttttgctttttgagatttcatcatcctgtatttttggtttctgttttcggacttcaatggaaattaatggatgagaactaatg

SEQ ID NO: 87065 - DNA, 274 bp, Glycine max
  unsure (1)..(274): unsure at all n locations
gatgctcttcttccctcaccgatttctcttttgccagattcgattttatttcatttggtttgcagaagattccggtaaacaagatatttatgcttttatttaatttttgttgttttcattgcanggggcaangggctggtttggtgtttctttcatttcactttatatgaatacatagaaaagtttgaagggttttagggatttgcatcatgttaggttcattaccaatattgccactccctgctccctcctctgatggaaatctaagtcctct

SEQ ID NO: 87066 - DNA, 111 bp, Glycine max
aagatgagtgcagtgaagatatcaaggtgtaaagtctggtagccaatcttcccgatcatgtagagcaaccatgtgtctgcacacctgatctcgaagggacagatgtacgct

SEQ ID NO: 87067 - DNA, 264 bp, Glycine max
cactctctttgcctctctgactcccacctctgcttaagggttaggttgcacttgtattatagaatgagtagaccgacaacacggagtaaaaataaaagacagaaacaaggggatgatggcaacggcactggcgaaatatggaggaaaattcataatacaggtgtggtaactgaggatgatatgaatcaattgtatatgatttggaagccagtttgttcaagctgccgtgtcaataataaagataacccaaattgcttatgtgca

SEQ ID NO: 87068 - DNA, 400 bp, Glycine max
  unsure (1)..(400): unsure at all n locations
gcctcgtgctgtgtttttgctggaagtgaatggaatcaatggtctctggccttggattaattataataatcaaattctatattggttctctctttcgtaaaaagataatagtgtaatgtattatgaatgcaggtcttggaaatattgtccaggataatccaatgttcagcaattcattttggagtacaaattcagataaagttgacattcaacttccagatgaaaatgatgtttctgtggtttctttggatgagcaactggaagactggactgacaaagaaattagtgattttgttagttttgatttatattatacatgcctatgagctaattctgcattatntgattattacgtttcttgtggaaatgactttgtcattgttttcttattcatcttcga

SEQ ID NO: 87069 - DNA, 128 bp, Glycine max
ttggtggcattctatgatattatgtttttatgtattttggtgtatcactccttgggccttgtttgcctttaatgagagtggcttattaatatcaatatatcacctaccaaacttattgctagcaaaaa

SEQ ID NO: 87070 - DNA, 369 bp, Glycine max
  unsure (1)..(369): unsure at all n locations
gttttgctgctgaggcaaactacgataaagagctttcataagcaaagacaacccaagtagggtatctgatctgatacaacactagtgccaaaatccatcttcacccacaaaacaaaacaaaagcttcaaactttggcaccaatctagcaacccagttgccggaagtcncattttccggcgaagaatggcggtggagagtgacaaaacgggttctgttgggaaaggttggagcttttgcagcatgccattttggcaaacaactcatgcttcttcaacttcttcaacaacaactttttctatgcatcatagcgttcaccatcagagccagattcttcagtctcctgatagatccaccatcaactttcaaca

SEQ ID NO: 87071 - DNA, 307 bp, Glycine max
tgccaccaccgtttcccatggcgtctgtttggacactgcacttccgctctctttctcttcgcccatgcctctacattagtagcaattgcagtagcgctgccactagaaatcgcattagcatcagaaatcgaatctccaattggcgctcttgcgcccaacaagtcaaacacgattccatcaattccattaccaaatttcaccatcaacttgttcattccgttaccattcctccattcctgttgaatcaaaatggtggaagcaattttccgatttgggtatgtgtttcggttgtggttttggttgtggc

SEQ ID NO: 87072 - DNA, 368 bp, Glycine max
  unsure (1)..(368): unsure at all n locations
ctcatgacgtaggcatgatttgaatttggaggatgtgttttttgtctcgttccgatgcagcttagtttttttggttttcttctgcttgtccgaaaactcgacaagtcgtagttggtagttccaataccattaaagggtcgattcgctgtggcctgcactcttcagaagagatagggaagagatctatctactgagattaataattaattttttaagagaaattagatttaaacattaattatatctgaaattttctctacaaaaatgaattttatttggacaacanaagagaaatacttttgtagtataataaaatacagatatgtgcgttaaaacatgatttctttgggagttaatattattaactt

SEQ ID NO: 87073 - DNA, 219 bp, Glycine max
gtaaatatgtggtacaaagaacggggctcgctgttggtcacgttcctgtgtcctgagaaaatctgaggagtgaatacgattacctccagagaaaaagggtggtagccaattactccactcatgatgtagggcatttattcacagccagttactttattctttcaacaattcattatatttcatcgacttcaagattttcataatcttgatataagctgt

SEQ ID NO: 87074 - DNA, 373 bp, Glycine max
gctacaattttggtagcatggcaatgccatgcgtacgatatgttccctctccgaatgaacactggctatggtgcccgtactccggaggtgaaatgcgcaagttggaggcttgctgtggaagcacacaacatctttggctttgagaccattcctgaagagtgcgttgaagcaacaaaggaatacatccatggcgaacaatatagatcagactccaaaacagttaaccaacaagcttacttttatgccagagacctcgaagtccatcccaaggacacatttgtgttcagtatagatggcaccgtactctctaatattccatactacaaaaaacatggatatggggtggagaaatttaactcgaccttgtatgatg

SEQ ID NO: 87075 - DNA, 376 bp, Glycine max
gtatcttcaatttcatccttaatttatttatttaattttccaagtttgggttatgtataattatataacaatagttcatgtcacagccataaattcatatcaggcattcaaaagttcactacttcttcctctttacagactaataggttgtaataaaatggggtgagtcagaaacttgattatgatcctcttcaaagatcaattgaatacatggcatggatttgtcttggaagcctcctcttgttatttaccaagagtttatgttttctcgtccttttgaatgtaaacaaaaagcgtgtcctgtgtactgcttctgcctttgcctcctaaaagaattttccaaagtctccaaggatatcaacattttccccacaaa

SEQ ID NO: 87076 - DNA, 238 bp, Glycine max
cagagaagagccatgagactttcactgataatgacataccttcctttcatccatcccaacacacacgcccactagtctttgttttccaacttgaatattggaagaaaaaaaacccaagaaaaaataaaaattaaattaaaagaaaataatcaagaagaaaacaaataataataagaaataataaaaactaactgaaagaatctagtttaagcagacacaactgtttttttcctccaac

SEQ ID NO: 87077 - DNA, 320 bp, Glycine max
ttttttttttttttttttttttttttttttttttttttttttttttttttttttttttttttttttttttttttgttttttttttttttttttttggagggcaaaggccttttaaaaaaaagccggggaaaaatttaaccccaaaaggaagttccttttggaaacaaacccaagggccgggggggaataaaaaaaacaggaaagaaaaaaaaaaaaccaaagattaaaaaatttaaaattccgagggacaaaaaaaacccaaaaggggacccctggagggcctaagttgggcccaccccaaaactttgctgggaaccccc

SEQ ID NO: 87078 - DNA, 240 bp, Glycine max
aaatagtaaaactttctttgttaatatttaacacttgcatatggccagacgcataactagccaggcatataacactggtgaaaatactaatgattatataaataaatagacactactacattcactggcttctactacataatgcacactttaataattacttaaaatgaacaaacccttacaaaacatttatttctgaaaaccaggaaaaaaaaaaaaaaaggtgacttaaaatgaaaa

SEQ ID NO: 87079 - DNA, 218 bp, Glycine max
accacaatgtccaatcttatttcaagtagttgtcaatttacggcaatatatataactaacaaatatgtgtgggaaatgtcaagacaggaaaaaaaatactacccctacaaagaaccctttatgcataaatgtaatgaaattcaccaataatctttacatgagcaagttccatctttgaaatggtggaagcgattacggtctctcacagtaatttcccg

SEQ ID NO: 87080 - DNA, 181 bp, Glycine max
cttattatattattttttcttttatgcggaaatgttttttatatttcatatatatctttgttattaatataatgtgataaaaaagaaaggggtccccaagcaaaaaaaaaagaaaatctccccaaggagaaaacccctgcaaaggacaaaagcacccccacaaaaaaaacaagaagcaaaa

SEQ ID NO: 87081 - DNA, 293 bp, Glycine max
  unsure (1)..(293): unsure at all n locations
aaaagtagttatcataacgctgcacctttcttttgttgaattatgccatacataaattgcaggagcataaagaataaatataactgcgtactgtaaacttaatgttcttttacaactcgatgaatagcagctaataaacatgtaccttaatcactaactttctactttcaatgttgtagtctatagcctatttttggttccaaacatcnctccttgataagagaatttctaaccatatctttcatattcagccaaaagataatttccaaaaataatgtccagttaagaataaa

SEQ ID NO: 87082 - DNA, 237 bp, Glycine max
ggatataattacttttctcatctggctataattacaaaaagatgaatatgacgatgcacgaagaattggatgaaattttaagcattcgtggatactcgactgtctgcagaaaagcaaaaatacacaactacaatttttcttaagattatggcacacaaagggtctttggttacttcacatcatctaaattagatgggcgatgtagttgtgcagtgtcatttgaagcgctgaatccgt

SEQ ID NO: 87083 - DNA, 370 bp, Glycine max
accagtagcaaattcttattcccagcacaagcattgtcatgtctctagccagttaaaaataataaggcaaaaacacatacactaccaagactcaacaatctgtcctcggcgagaaaatcacagaaaaacatccatataactggtaacgcataccatcatcagtacctcctggggtagcggtccataaaccgacccgaagggcactcatatgccaggtgaccacgacctccacaattgtgacaaatcatcaaggggcccatgcaatccctaatcaagtgacctaattgccggcaattcctggaaacaacatctccgtaaccaacggcggcgctggcaacaagaacaacggcggcggcaacaacggcaacaa

SEQ ID NO: 87084 - DNA, 268 bp, Glycine max
aaaactgtgaaggcattagatgaaactgtcaaacaattacaagctgttcagtttttcatgtttaaagaatacaagatttgatttagatacatatatactatatgagtatcacaaaaatttaaagagacacactctcaagtaccactttatcaattcttaatgctaatcttgagtcgatcattggccccaggcagctatattcagtggccaagctccacttctccaagcttttttttcttcaaaattaccctgatcttcaagttgatac

SEQ ID NO: 87085 - DNA, 197 bp, Glycine max
aaaaaaaccccccaaaaaaaaaaaatttaaaaaaggaattcgggggcaaaaaaaggtttaaaagttgcaaacctctgaaacgggggaaaaaaaaaagggggggcctaaggggggaaaaatcttaaaaaaaaaaagccaaaaaaaagggggaaaaaaaaccccaaaattttttaggggccccaaaaaaaaaggggggg

SEQ ID NO: 87086 - DNA, 290 bp, Glycine max
tttagtaactcttcaacttcaacatacacaacattttttttatgaagttcaacgtacacaacattgtaaaaggtgttttcgtccttcgtcgttttcctggctaaactgttagccaattatcaggttgcagaaccagaactttaattgagttttatgtacaatcaaattgcattacggataaattgggttcggggacaggaggaagtgtaaaattccaaccccccccccccccccaaaaaaaaaaaaaaaaccatgttcagtgaaatcctagtaacaacataacttgacga

SEQ ID NO: 87087 - DNA, 281 bp, Glycine max
aaaaagacattctaattttatacatataaatattcaaaaggtagattctaacacattatacatgtaactttatcctatcattttctgcatagcgataattttagagttggctgatttacccgtcacaaaaattccgggagtggccaaaattaaagactgaaactgaaccgctttgttgcgcagatgcaactaataaaggcgcgtttgtttaaccctttgagcaaaacaattggaacaactgaaaaacaaacacacaataagcaataaccaattttccaacg

SEQ ID NO: 87088 - DNA, 367 bp, Glycine max
aagaaaataaactccaattaattgatgccacgaaaaaggaatattttttctttctgatatacacctttgcagatggaagttaaaatatacctcttaaaaacaaaacaaaaatgtgccctagattagagcatgcaactgattccagggtacactcccataacaggcaaacaccccagtacttccatcttcgagtcgagtcgagtctgttctgtgctaaaactgcctctcatgtattgccactggctttgatcattttttcttcggtctttgcaacctttccggttttttcccctaaaagcattcctttcccctccctggctttttgaaacccctccctaaaatggaataaccttttaatcctcctttt

SEQ ID NO: 87089 - DNA, 176 bp, Glycine max
cccaagggaaattcttaaaccacgcatacatacaattgtaaagctttaaatttcatgtcaccaaaagtaccaaaacctgtaagggagtacaaaaaaaccacggtgttattaggtttcacaatacttccaacggtatactataaacaagcaccatagtcacaaaaaataaaaataaa

SEQ ID NO: 87090 - DNA, 131 bp, Glycine max
ggggaaaaaacccccaaaaaaaaaaaaaagggccccaacgtaccgggttcaaaccaaaaagacccccccaaaaatttgttaaaaaattgcccccgggaaaaaaagggggagagaacccacccccaaagggg

SEQ ID NO: 87091 - DNA, 194 bp, Glycine max
gaaaaggtgtaaaaagcattgcaattaattccacaaaaaaagtaggcttcaaacatgaggaaaacaaaaagttacaaaatcaaaagcacagaaaccaccgggtaaagcatttcaaataaacgcctacacgaggaaaacaatttttaaaaaaaaaagttctgatgtacaaaaacaaagtaagcagcaacatatag

SEQ ID NO: 87092 - DNA, 469 bp, Glycine max
  unsure (1)..(469): unsure at all n locations
cttgcttgcaataactccacgttaaaatggggtacggtcacagttttaaacataagcgtcccagctcatcaagtggacgtattgcaattggtttcatggttttgtaatagcgaagattactgggagacttggttgacaactggtatatccagaatttcaaggaaggaaaacaagttcataactgtaggttgcgacagttacggcaatctcaatagcgtttataatgacaaaacatatacaacaaggtgcttaacaagatgttatggcaatgctttggtgattgatgatggaacatgctcaggtatanggtgttgccaggttgatattcctcctcgaatgactaatatcactattaaagcatttgccttcagaacctcaacgagaaatatcagcataaataatgcctctgtcatctccaattcaacctgcaattaatcctttggtgtcaaaaatggcttttaaaattttt

SEQ ID NO: 87093 - DNA, 447 bp, Glycine max
cctccttcttgttcttcatcatcttcttcgttccctcctagtttcccacgttttcacttgtcgggagcaaaacccatttctctttcttgcagaggaacacgattgtgctccttgaaagggtctaaaactctttggggtagaaaaagttttgtgcttggggctggaaacatgaccatggcagaggttgattctcatgaagagggggagaacgagggtgctttggttggctctgagaatgagaacaattcaaggcctcggagaattgctctctttgtcgagccttctccctttgcatatgtctcaggctacaaaaaccggtttcagaactttattagatgcctacgtgaaatgggtgatgaggtgatggtcgtgacaacacatgaaggagttgcacaggaattttatggaaccaaattaattggattttggaactttccctggcctttg

SEQ ID NO: 87094 - DNA, 416 bp, Glycine max
attccgctcgagcttaataacatcaagtatttttttctatttaaggctgttttagtgttctatgctgaaaataactaccaaaaccaggatccctcgagtgaatgggtctaactctatttaaatttcgttctagattcctcgtcgaacttagtctaaacaagttgcattaagaatacaacatgatataaactaaatccctgcactctgtgtccagacatacagttctctagcctgctctatccagttctaaggatttaaaacactttccaatgccataaattctaactttacacataaatgagtgatcaagccacaaacatgcaagaattaagtgcagatagaagcaataaacacataaaaacaactttaaatagatagtaaaagattttacatcaaagtttagcagaaaccctcaa

SEQ ID NO: 87095 - DNA, 335 bp, Glycine max
ccggcccttcctttgaaaacggtttcaaaccctgactcgccgagtcaactcggcgcgccgccgcagcagcgtcgtttccgcgtgggtcctagacgaccccgcgttcggctcccacgtaaacaacgggtcgtcggaactctacaagcaagtgaagcacgcgcgcgaggttgggcggagtctctgggaagacctcgaatctggaaagccgctaacccgaaccgttgccgctcgggcggcccataaccggtcaggttcgtgtcgcggttcggtctcgctttccggtccggacgttgttgacgtctcgggcgtcatgccgttgccgtgtgggctcacgt

SEQ ID NO: 87096 - DNA, 353 bp, Glycine max
tttctctttcttcgcacttttccggcacgtcgcaatcgccggcaactcacttggcttcgccggagtgcaatcctaccggcgaacggccgttcgcaagagtttttttaatttttattttgtgcatgttgaaacgggggcgtttggttttggtggtgatgaatcgggggaaagtggggtatggatgtagattggttgatcgggggataaggggagaatggttttgggggtggcggtgacaagttccgtagcgacatacgcatgtgctgcggaggtggtggggctgatagtgacgagacggaagaactgtaacaaactggcgaatgtgatgacggaactgtaggaagggtgtggca

SEQ ID NO: 87097 - DNA, 418 bp, Glycine max
attccattcactctgtgtatttccctacctctcccttcaagatgcagatcttcgtcaagaccctcaccggcaagaccatcacccttgaggtggaaagctctgacaccatcgacaacgtcaaggccaagatccaggacaaggaaggaatccccccggaccatcaacgtctcattttcgccggaaagcaacttgaggacggccgtacccttgctgactagaacattcagaaggagagtactcttcatctcgtcctccgtctccgtggtggcatgcagatcttcgttaagacactcaccggcaagatcataaccctagaggttgaaagctccgacaccatcgataacgtcaaggccaagatccaggacaatgatggtatccccccggatcagcaacgtcgcatcttcgccggaaagcagct

SEQ ID NO: 87098 - DNA, 52 bp, Glycine max
aacattttccataagttgaataaaagatcatgtgacttgataatgtttattc

SEQ ID NO: 87099 - DNA, 288 bp, Glycine max
gagacgcacaattgagggcttctctgagtctctctcgtcttgtgctgattccagcggagccgtcacacttcccctcttctacgtcgtcgttttgaaccccattgctccctctctccaattcaaggccaaaggtatgatgagagaaagtttcaagggcaagggtggatcttcttctcttcaatccatgaaggagaaggaaaaacacctggtggagaagattcaagggattttcaacagtcttcagtgtgcaagaaaggacggcaggggtaatgacattgtgatatttga

SEQ ID NO: 87100 - DNA, 441 bp, Glycine max
  unsure (1)..(441): unsure at all n locations
gtttgcgttgggaatttggttctgttttttttttttttggtggtgagtcaccaatggaaggtggaatgatttttgcgtgaaaaaatgcttctcactatttctcaaagtagctttcaaaggttcgccatatttttattattaaaataaaaaaagaattccctttctttttcttctaattttaaagatttaactgccgaggaaaacgaggaaggaccagatacgagagcgagatactaaatacatgacagctcttttatgtttatgtgatttttttttttttgaactagttgcttgtgttgtgcgctttctatgatcaccttcaccggtactttcttctcctgcttctataatcatttttttgtttttgtctttgaaaaagtgtgcataccggttttggctttgctttcacgtacgtaccanaaatgatgattttggttgttg

SEQ ID NO: 87101 - DNA, 206 bp, Glycine max
aacaactcaaaaaaaaattaataaaataaaaataaaaaaaacggccgccactaaaaaatgtcctaattcactcggaaatacatcaagacaaatatcgggcggccctcccactattcacctcttctacctcggatttaattccggactgttccatgcaggcttaaaagctttccctaaaatgattcctactaaaacttggcgtaatc

SEQ ID NO: 87102 - DNA, 389 bp, Glycine max
cttgttttgactacttttcaggatgcattatcaccaatggaacaggtgttgcgtagtccaatagccatgcttgcttttttactcattctgtttttttcaaatcaaaccacagcattaacttggagttttggtggagaagtagttgtgcaaagtttcttaaaattggatattccgggttggcttcattatgctacaattagagtaattgctgttctgcctgccctttactgtgtttggagctctagcaaggaccctggaatattcagatgtaccagttgcaagttttcatcttgatctacctgaaactatcatggagcctgatgttcctgtgactactgtaaaggagactcatccatttacatcatttccttgctccccaacatctgtta

SEQ ID NO: 87103 - DNA, 377 bp, Glycine max
  unsure (1)..(377): unsure at all n locations
gaccatactcaattcatggtgatttaagtttcaatctctatcaaagtacacaaattcagagtatattgagggtgtaacctctctgcattaacatatttcaatacatacaaacacacaaatacacactcctgaaaacaactaactggattattcaaaaagattacgaaaggtaacacagaaatttgatataaaatggagggtatgctgccaagccatgatcatcttccatcatcaaaagcaatttgtacatgatcattaatgctgtcatacccaatagtatattgatggctgctgctatcaccaggttcacagacgctagatgattccttttgaagcaagtgagcctcctctggattttganatgtattgattcaagg

SEQ ID NO: 87104 - DNA, 377 bp, Glycine max
aaattgacaaactcgcattaacccatacgggcaacttgtgtaagagagtgaatgcaagtcagggaggagtgcaatcgatgatgcaactttaagaggaacctaccaaaaatatgtttattaaatttcataataaagctagataattatgaataccaatctagccgagagcattgggggagggagcgttagggatcttcagcacaatcgaatgtcttgtgattgacatataaaacatataattaactaatgcgacaaaactacataagaaacatctagtatgttatttcactagatatttcaccatgtaaggtccttcaagctcatatcccagtttcctgtaataatggcgtgtgccaacccctgaaattacagctatt

SEQ ID NO: 87105 - DNA, 365 bp, Glycine max
  unsure (1)..(365): unsure at all n locations
ttattattattatatatttgtgtgtggtagagggtgtcgcaaagcatgtctttgggcttcttcgtggatcttcttcgcgctaaggttgaactagccgttaagcgaggagacgcgatgagtttgtcttgtgcactacacgagctgttccaatcttcaactttttttaagactttttctttaagtttttgtatcaatttttcttctaaagcacttgtaattttcttcttttgaatcccgctggtcaaaaattaaaatgttattaaaatcctcattatttcatttanaacaatagtaaaatagaggaattctaatcattcctaatcaagattgactaataattaaacctaaattcacagttatcatat

SEQ ID NO: 87106 - DNA, 373 bp, Glycine max
atacaaaaaagttgaatcacttttttcccccagaagtaggtacatgcagttacttggcatgcattaggggcctttattactatgtaatatatcatatcatatactaataatatggggtgtgttcgttcctcctgaatcattcattcagctcagcagcgtgaaccctttctgcagctaagtgatccagctgatgctgttatagaactcacaagtgaagatgattttgctgccaaactagatgctcttgcatagcttgaagattcacctgctcctgatgccgtaaaaaaaccaccttttacatcagatctccacttgacctcaattccaaatcctccactttgcctgtgctgaattctccctctttgtcacctcc

SEQ ID NO: 87107 - DNA, 386 bp, Glycine max
gttgtagacataggcattatgagtcacattcttttaaattaaacaatgaatagcagcccggtagacggtggtaggggaattgaaattataactatgaaaatatgtaaatactagaactcaagggtagctcccggtatttacagcatccggcagtacatatggatctctctctctctcatttcgtgaactacaatgttttaccattgacaatggcatcaaaactcaatagaaaaagaagaaaaaagtgaacccgcacgttgcatatattagaagcatgctcaacaacttgtgtctgatctgggtgtttcattgtaatctagtagagaaatctggcgctgcagcctcatttgctgaaggaatttagcaatgaactcctcagcttgctt

SEQ ID NO: 87108 - DNA, 357 bp, Glycine max
ggtgtaataaataaatctatattttctatggatatcgaatgctatccctcaaattattatacagaacttgcatctgcatcaatatattcccctcccactttccccttgtcatcttccaatgccgggccaaaagaattaagaacgccgaaaaaggggtacaaaaaaagaaccagaaaaacaataataaatagagatttaaaaaaataaaaaaggccatttttatacagggcgacgtttaactaaccaagctccagttatatacaatattcgatggtatggcttcactgcaaaacttgttttctctgtccctctttaactggaatcaaaagatcagaacctaagttttccttgtcaacc

SEQ ID NO: 87109 - DNA, 164 bp, Glycine max
catcttaaactaacttggggaaaatgtattcaaattttcaccaaaaaacacaacttaaactttttctaaactaactccaaccaaaaccaattcgcaccaatcaaaaactcaatcaaattcctttcaatcaactactccatcttaacccagaaatccaactttct

SEQ ID NO: 87110 - DNA, 385 bp, Glycine max
tagaagaagtacgttcatggtaaatatatatattcttatatatatataccttacagatacaagacaggagtgaaactcgatttcggtatcaaatcccagataagattaattgacagaaaaagaaacttgcatatgcgacgcaattattctaagccgtacaattattcacactagaagacaagcaagcaacaacatggtagctagataatgatatatgtattctcctatttaattaagtccaaatttttgcttcaaacttgctcttcagggccttcatgcttccaaatagcattaatcggcttaccattggtccaatccctgagcttaagaagcacaggaacaatcatcccaaacaagaatccaggagcagcactggaccccacca

SEQ ID NO: 87111 - DNA, 275 bp, Glycine max
ccaacaaaaagggaaacacttcccaattaaaaaaacttaacaccttaaaattcaaaacccaaaaataccaacttttttggtcaacaaaaacccccaaaaaaaacctaaaaaaaggaaaccaggttgcacccccccaaaattacaaggcaaatttaccaaaaaaaacaaatacagttactcaaaattattaaaaaacaggtaccccacctcaaaaaaacctttaaagtaaattttacccccaatttaaaaccaaaaagttttaaccaaaccccttt

SEQ ID NO: 87112 - DNA, 210 bp, Glycine max
aaaaaaagacaatcccattatttccaaggcacataaataacaagtcccttaaaccaatttaaataaacaatcattttaaataaaaaaacaaccaaaatcaaacaacatattatcataaaacaccctaacttcggtcataccacaatatattaaatgaagaataagttcggaaaaaccataatccccataataactctaacgatcaaaaca

SEQ ID NO: 87113 - DNA, 277 bp, Glycine max
gggcaggggaaaaaggtaacaaaacaaaaaccaaaccaaaggtatttcaaacattgtccctttgaggaccacatccaacaattcattctaacaaaataatcccctttatttaaaaaacaaatttttaccaagtaaacaaacttatcacctaggctttgcacctaaaacaaactaattaaggtacccaaccacagtgatctatttcacatcaggatatagaactcaagcctccactccaaaagaaaacccaatttcaaagttagtaagatcccccttt

SEQ ID NO: 87114 - DNA, 379 bp, Glycine max
  unsure (1)..(379): unsure at all n locations
gggcaagaaggaataaaactttctttacggagttccctcaaatttacatttgttacagagcttagcaatagggtagggggacaaaaatatggggcctaggttagagctcctaaagaatgaaaggcagcaaaaggaaaaactaatatacaaaaagaatgacactaaaccacagtagctaatctacaaatttggtatgtatgtatttttggaggatatacaaaaaagggtgaccgacttaataatttcccacccctcgagtagaaaaccgcatgttattgcaaataaagtcaaagaccttacacagaattgggaggtgttgttgaatgtgaagaggaatcctcctcctctgggcctgatanatccaatgccgtttcaaggt

SEQ ID NO: 87115 - DNA, 401 bp, Glycine max
aaaaatgtattaaaaatataaaattaccatcattggttgccatattcacatgttgcttatttgacaaaatacattgatattacgtggctacaatatacttccaaatgctcaacactgaacaaaaaaaacaagtacctaggtttgaacatggatcttgtggaaaagttgaagcacaaaaatctactctacataaggagggtcacaaagatggattgtaagaaaaaaagtcctataatacagaaattttaaatattcacggcaatgcagcataacctaacaatacatcacgcaggatacacggttataccagcagccatgtacccccatcttcttaggctgtaacagtttttgttttaaccccaattttctttcaagacacactaggcataatttgttttgtg

SEQ ID NO: 87116 - DNA, 377 bp, Glycine max
aattcataacatatgagccacaatatttttcaacatatatttctttttctctccgggagcatttcaacaaaacggatctaaaaaaaagaaacaaatcaacctatgcaacccaagaaaaaaaaaaagactataaacacttgatgaatccttgttgtcactgctatacaggttgaccaatttgtcatgatcctaatcctaaaaacatgctcaatcttgtatgttcatttatcggatcgaacccagttcgttatagactaattggaagacaattaccatacggaatgaggatgccgataaaacatgaaaaaaataattaacgagcaagattgaccgaactccaaatggagcttgtaaaggttgctccagcagaacttgat

SEQ ID NO: 87117 - DNA, 169 bp, Glycine max
aaaccttaaattgggaggggccacaattaaaattctcaattttagaaaaacaattttcaaatacagtcacaataaaaaagggattttcaccctaaataaaacctaaaagaatctttttccaaattaacccccttaaaacacaaaggcttttttaaacataaaaaccaaa

SEQ ID NO: 87118 - DNA, 157 bp, Glycine max
ctattattattattttttatattattttaattctatattatcatacaatttttgctcagggggataaaccacaacaaaactaatatttttacccatctatctcaaaactaatccaacacctatctctacctagattcactttctccagataaactcc

SEQ ID NO: 87119 - DNA, 52 bp, Glycine max
gaataaacattatcaagtcacatgatcttttattcaacttatggaaaatgtt

SEQ ID NO: 87120 - DNA, 274 bp, Glycine max
gcatgaaaaataagagaagtgatgtctcattcagcagaggggagggtgcatgcatagtatatctatacagaaactctattttgcattcaatttgcagcacttgtagaagtaatacaagataaataaaattgttcccaccatttaaagaacatgtacaaccaaatggacactactaaattttaagaatatgtcagaaatttggttgatagcaaagcagccaacaaaggaaactcccactgatccatcagaaaagttgaataaccaataatttaag

SEQ ID NO: 87121 - DNA, 377 bp, Glycine max
attaaaccttaatttctttaaattaaaataagcccataggtggtacaaatccaaagagaattgacagtcactttaacaggggtttaagcctttatttcaactaacaaaatgctaataaaatcactcaacaaaagtggcaccctctactcttcttggaacatggtgcaattgacaattcgaaacttctccacttgtaacgtggacctaaatttaaatagcatagttaacacttgttgaaaagcttccttgaccttctttattttagcccttgccataagtcctccaagtccttctaaaggttccttactcttattcattaccttgtcatcatcaacatggcaacatagatattatcctttgcatcactagctgaatat

SEQ ID NO: 87122 - DNA, 279 bp, Glycine max
agaatggcatcaatgatcaatatcccaccatttatccaaaggaagtacatgattatatgccatcattaatatcttataccacttgactacgtacgtaacaattattccacccccctcttgaatttgtcatttgagcttaatgacatgacccacaaactaactacttactggtcgctaaaaccttacattagcatacaagtcaaattacaccttctcccactaattctttgattaaagcacccctcaaattaagtaatagtagcgttcacattgacaatg

SEQ ID NO: 87123 - DNA, 396 bp, Glycine max
tgggggaaaactgataatctcttaatttatcattgtacactacagacaatgagaaaagaatatgtatatactttaatgtgggcgagactccgaggtgcatgagttgagttcctccaagtgagaaaacctgaaaaaaaaaatgccataagctcatctcaatctggcagtacaaagttatgtttgctacacgtctccagcatatcttgtccggctaagatcccactggagcacttttagccttggcagcagcagcagtacctgtagctgcggctgtggtggcggcggcagctgctgcagatgcagcagcagatgccgggttgctagatgatggaagcactgtgttggattgtgaactgttctgagcttcaagtgtttggggctgctgccgctgcatct

SEQ ID NO: 87124 - DNA, 155 bp, Glycine max
gggccgagccttaaacaattaaataaaaacctcaccgggaaacaaaaaataacaacccaatttcaccaaaaaaacaccttaaaaaaggggaaaaaacaaaactcacaattcaactccaacattatcactgaacccaaaacggttcttccaacccc

SEQ ID NO: 87125 - DNA, 242 bp, Glycine max
cacggtcaaaccacggcgtgaaaaaacaataaattaaacaattcaacaattcaaacattataacaaccaaaatgataccaccttccaacccaaaatatttaataaataccaaaaaacccaaatttttttcctaacaaattatgggccccatcccctaacaaacctacaattaaaacttccacattttaccaccccttcaaaccatgaaagaggacggaaaaacccctcccaaaattaaggtt

SEQ ID NO: 87126 - DNA, 270 bp, Glycine max
actaaaccaaagcaacaaaacgcatcaaattcctgaaacacgcgtgcgcctaagaaaaatgtaagcaggggttccgactaacccaacagagtaatgcacagattagtaaaagcaattttgcaacagtcaataactaacccatttctgggaatcataattactacattatggcggagactgcatacttcgaccgaaaacaatgcaacttagactccaagacacttgactacagaacatacatcatacacctaatgtcacgaacatcacctg

SEQ ID NO: 87127 - DNA, 288 bp, Glycine max
aacagcaatgtaaaaaaaagcgtcttatactgtgcatctgtgtcattgacttttccctcctagtatttaggcatttttggaatgtccaagtcataaaccacgtaagtggaagtgtggaactacaaaatttctgaaactaatctatgtacttagcttatttgatttcttctagcactgttggattttgagtcaattcgaactgtctttgctgacatgcagtggcgcacatggatttgttgacatgaagtttggacggaagaactgccttgtacatgaacaaccagaatc

SEQ ID NO: 87128 - DNA, 310 bp, Glycine max
agcgaaactgctgaaacatgattgacattgactaattaataatacttttagactgacataataagggccgggatgaaaggttgaatgaatttcatcagtcctgcgtatgaaaatctataattcatttattttattttattaggggaagggttaattttaattagaatccaacattaggattgcctgaaccagcagcagcaactcccatcccaccaacaacatctgatgtagctgccaatgcctcaaggtcccccgaatccttaacatccttaacaaccaattcaattatcagttcaacaattttcccaaa

SEQ ID NO: 87129 - DNA, 161 bp, Glycine max
cttatcttatttattctttcattctattcatatctcttctattttcgcaaccaaattccccaccttacccttcccttcataccacgtcacagcccaaccacagtcttaaccaaaatcaatccccttgcagcacatcaaccaatccccaactggcaaaaccc

SEQ ID NO: 87130 - DNA, 292 bp, Glycine max
gggttgttaaccccatcaaaaacccgacccacccaaatttaacttcccaaaggcaaaaacaaagtaaaaaacttcccacaaaaaacaaaatttccaccaaatatcaaacccccaaagcaaaaataaagcacccccccccacactggacaacctttatcaacaaaccacaaccctcaaaaaatttcaaaaaacccaaaaccaagtgacaaagactcccccactggaaaaatttttaaacccccaagggaaaaaacccccccccaaaaaaaaaggtttccaaaaataacccttg

SEQ ID NO: 87131 - DNA, 256 bp, Glycine max
aaaaaaaaaacattaaacatattccaaaaataaaagaaattttaaaatacccccaaaattataataaccaaaaatatgaggttagtcaatgaaaatgaatcggtaaacaaatttctctgggcatcaaatacagatatgggaaattttaaaaaaaccagttaaaggaaagtgcctatcgaaaattttataaaataaaattttctaccaaatgtcaaaaaaaaattaaatggttctcaaaagtcctcccccaaaattt

SEQ ID NO: 87132 - DNA, 122 bp, Glycine max
aacaaaaatataaaagagacgctgaaataaatcatttgtaaaggggcgatctcagggaattatttctatatatgcacaactaagcttctatcttaattatctggttttttaaccccaaagtt

SEQ ID NO: 87133 - DNA, 298 bp, Glycine max
gtgtaacggggtgaacaaaaaaaaaacaaaccctaaaacttatccaatttaaaactgaaaaaaacacaacaatttccaaaaaagttccaatagacaaaaaaaactttacataaaaagcatcaaaccaaagaatttacaattaacctgacttctaaaaattggccaatttaaagaaatccaaatcaaatggctgcctgtcacaacggattatttcaaaacacaaccccaaatgtgtcccccccactgtaagtcatatataaaaacccatcttcacccttgttttccccaaaaattgcaa

SEQ ID NO: 87134 - DNA, 335 bp, Glycine max
ttttgcctgaccgattcaccggtaaaatcagccagtctaaagtcagagctttataatatatattaatatgaccatttctggtgaggtgaatattcataattgtcaactattacaacgcttataattatatagcccactggcctctacacttgcatgaatgcgatcacatttccttcatgctatggcactatgttacaacagatgacacgagtttaataattatcactcccagatctcagaacttttacccatcaggatatcttccaactacgtacatattcctaattaacatgattcagctcactcacaactggaagcacagtcaaacaggaatt

SEQ ID NO: 87135 - DNA, 100 bp, Glycine max
ggcccatgttcatacaatccctttaaaaatactaaaccacaattaaccacatcatatttaaccatccttaactgttaaaaacaaacccaatttattccca

SEQ ID NO: 87136 - DNA, 137 bp, Glycine max
gtggaagtaaatcacataagaaaaaaatcactttcaaatataacctttaaatgtccacaattttccaagaggaatgggagaaaaaaatttcgaaacaaaatttttttttaaaaaaaaatttttaattcctttaaaaa

SEQ ID NO: 87137 - DNA, 224 bp, Glycine max
attatatgacactactgcataaaacacgtcactaaaataagattgcattcacacatatatgcaaagcgaatgggggatataactggcatgacaacacaatcctttcccaaaacttcaaggaattccccaaaagtttctgcagtgcacgtatacacaaataatagtcatcaaaaatgtgtatgcaaaaaaaatcacagacgatctacaaatacacacgctcatct

SEQ ID NO: 87138 - DNA, 368 bp, Glycine max
aagttgtttgttttctttgttgctgcagtagttttggtagcatggtcatgccatggcgcatgctaccaaaggttccctctccgaatgaggactggctatggtgagcgttcttcggaggtaaaatgcgcaagttttaggcttgctgtggaagcacacaacatccgagcctttaaaaccattcctgaagagtgcgttgaagcaacaaaggactacattaatggcgaacaatttagatcagactctatcacagttaaccaacaagctttcttttatgccagtgaactcgaagtccaacacaacgacatatttatattcggcataggatacaccgtactctctaatatcccatactatgaaaaacatggata

SEQ ID NO: 87139 - DNA, 411 bp, Glycine max
cttcctttcccattcttcatcttcttctctctgaaccgtactcaaactcactttcccacttatttatacaatgtcggcttacaaagaccaggatccccgtcttcatggcatcaaaactaagattcgtgtcgtccccaatttccccaaatccggttcctttttctccctttcccttttaatcttctgttttctttaatgttttgtttttagactaagaaaccaacccgcgaggctttgaattcatgttttgtttgacttccgtttccaatttccagaaagtcttcttcggaggtttctttttctttttttttcattttcactttagcttggtagctaatgttttttattttattttttgcaacggcaggtcttatgttcctagacattactactctattgcttgatccaaag

SEQ ID NO: 87140 - DNA, 389 bp, Glycine max
ggggtagagaatgagtccctaatccacatggacgttgatcaaatcttcttgcctgttccatctcctgttaaggcagctatttttgaaagttttgctagacaaaatatgtctgaatcagaaactgatgtcacagcaagcatcaaaggatttgtcaagagtaactatggttttccaactgatagcagcaccgaatttatatatgctgacaattcaaaggctcttttcaacaagctggtcctctgctgcatcaaagaaggtggcaccctttgttttccagccggattaaatgggaactatgtttcgtctgccagatttttgaaagctgacatagtgacagtacctaccgatgtcaatgtaggatttaagttcacagaaaagacactcactgg

SEQ ID NO: 87141 - DNA, 363 bp, Glycine max
ctgacactgcacatgttgccacaactcagttgcatttagcctggcatatattataactgtaatgccaatccggaattcaattagatgtgtagtcttgtgacaacttgtgaaattttcggctctgcaatcaggcacgctatgctagttcagttactaagctgaactgtttctactacggaaagggaaatttcaatcggtactcattaacttgctacttggatattgcaaatgtaccgtacgcatcaagacatacgtgaaggacattcctcataaattacatcatcatcatcaggatatatctcatatcaaacaggtacctggttacgtggatgactatgcggcactacttgaggtgaaatcttt

SEQ ID NO: 87142 - DNA, 396 bp, Glycine max
gttgtgactcgttcttcttcgtcgttatcttcttcttttgttgtttgtgtgtttgttttttctctcacctgaaaatgtcttgctgcggtggtaactgtggttgcggaagcgcctgcaagtgcggcaacggctgcggaggctgcaagatgtacccagacttgagctacaccgagtcaaccaccaccgagaccttggtcatgggagtggcaccagttaaggctcaattcgagagtgctgaaatgggtgttcccgctgagaacgatggctgcaaatgtggagctaactgcacctgcaacccctgcacttgcaagtgaggtgttggagagctaaagcttcaagcagaaatggcccttagaaataatgataaaaactatatgtagtttcaaaacttcaaaa

SEQ ID NO: 87143 - DNA, 394 bp, Glycine max
gcttgagagaaaagaagaaaatcctttcaaataaataaagtttcattactttatgttgataggtacacccagacccaatttcatccaccatgcatcttttttatctcctcgatctctagccatatgtatctaagttctcacctaaacctagctatttccacccttattacgttaataatttgttcttgatcgatgttctctgaatccggttcttcttcgttttgcttcatgggagtttcttcgaattccaaagtctttctctctgacaaagatctgaaaggagtgatcaacaacatggattcattggtacacaaggaagggtgccaaactttgatccaagaagatcaccagcttattagactcaaacaactatcggtgcaacaagaagaagaag

SEQ ID NO: 87144 - DNA, 154 bp, Glycine max
gtcggacccttatatcacccgctctatcgcacgcgaacacgaatctgtcataacgctcagtacgagggatttacatagcatacccagtttacggaattccatcactttaatgggcagcaatctatcacgtagaacctagatcttcggctttcaa

SEQ ID NO: 87145 - DNA, 401 bp, Glycine max
ccaatatattccattctctctgtgtatttccctacctctcccttcaagatgcagatcttcgtcaagaccctcaccggcaagaccatcacccttgaggtggaaagctctgacaccatcgacaacgtcaaggccaagatccaggacaaggaaggaatccccccggaccagcaacgtctcattttcgccggaaagcaacttgaggacggccgtacccttgctgactacaacattcagaaggagagtactcttcacctcgtcctccgtctccgtggtggcatgcagatcttcgttaagacactcaccggcaagaacataaccccagaggttgaaagctccgacaccatcgataacgtcaaggccaagattcaggacaaagaaggtatccccccggaacagcaacg

SEQ ID NO: 87146 - DNA, 305 bp, Glycine max
acttgatctgtctgtctaaacactcactgattgacacatcacatcataacacactgggaacgttttgtcagagctgcacaagctgactcaagcgagaggatggtaagattacaagagagaagaattgtttgtgaatggatcgacgtggttcaagatgacgcgagatacgtcggcacgctagtgtggggccatcacagacattagtgtgtttgttggaagcatggcatgagatacgctgaacgagataatgagaacatagtttgaactgtctagtgagatattgcaggctgtagtcatcactgaca

SEQ ID NO: 87147 - DNA, 411 bp, Glycine max
ctctcaggttttagaagctcagctaagcacaatagagagtttaattaggccattaacatatcatatgggtgtgactaagcctcatgtgcttatgctgttgatcatcatggttgtctcaattgcagagaaaccatcagtaatagaaggaagggctctttccttgatatctggtcaaggtaattttactccctctcttattgtgcttgctgattttgttgtggagtccagtttttaatataaagatacttttaccattaactaattagaattttttagatataatttttaaataattatcttaaaaataactataaaaagaaaagattccattaaagacaatcaatcaaattttttggcatctaaaaaaaaattaattttcaacaaagtttgttgataaaaaacttactatat

SEQ ID NO: 87148 - DNA, 315 bp, Glycine max
tgcaacctacatcaacattgatcatggtggacgagcttactcacatcgcgcaggtgctctatcagatactcagccccgacgccatcgccgtcacagccgccaccgatgcgctcgatttcctcacgcttactccgcacatgatttgctatctccacaccatttccacgttaccaggagatctgagtcagagcatctctgctgcgatctaccgcatgaatcgcattcgccgtagcttccatagctgtagagttaagccatcaatcgtgagcaatgatttccaattccagctgatgcaggcgttgcttcaaatcgggt

SEQ ID NO: 87149 - DNA, 396 bp, Glycine max
gctgaagtcatagaagagaagaaggaagtggaagtgacggaagagaagaaggaaattgaagtaacagaagagaagaaggaagcagaagtgaaagaagagaagaaggaaggggaagtgacggaagagaagaaggaagttgaagtgacggaagagaagaaggaagcggaagtgatagtagaagagaagaaggaagttgaagtgacggaagagaagaaggaagtggaagtgaccgaaggaaagaaagaagtggaagtgatcgaagagaagaaggaaacagaagtgacagaagaaaagaaagaagtggaagtagaagtgagggaagagaagaaggaaagtgaagtgaaagaagaagaaaaaggtcgggaggttgttccagaggaagttgagatatgggga

SEQ ID NO: 87150 - DNA, 413 bp, Glycine max
ctctgtgtatttccctacctctcccttcaagatgcagatcttcgtcaagaccctcaccggcaagaccatcacccttgaggtggaaagctctgacaccatcgacaacgtcaaggccaagatccaggacaaggaaggaatccccccggaccagcaacgtctcattttcgccggaaagcaacttgaggacggccgtacccttgctgactacaacattcagaaggagagtactcttcacctcgtcctccgtctccgtggtggcatgcagatcttcgttaagacactcaccggcaagaccataaccctagaggttgaaaactccgacaccatcgataacgtcaaggccaagatccaggacaaggaaggtatccccccgggacagcaacgtctcatcttcgccggaaaacagctcgagg

SEQ ID NO: 87151 - DNA, 345 bp, Glycine max
gtaaactggaaattttagtgagcacaaattgaagaaggtttgctaatgtagatgagaaccgtctttaatgtagtgtgtttgggtgagtttttaaaaaatgattttgactttgcaaaattgatttccaagcaatgtggtttatgtttcatgtttcgatgtttttatttcaaaagcaggatacgatttgttatccaatgaagttatctataattgcttcaacgcaatcaattatggactcgtggatcattttttttaacataaaactaaacatatgaatatttacttaaaatcatcttagctagtacttcaactagacatgccattacgaactttacaatgcacaac

SEQ ID NO: 87152 - DNA, 233 bp, Glycine max
gccctcactcttccaaaccttctcttccctcttttctttctttcatccccaaatcaaaacctaacattcccaccttcaactttctcccccaaatcgaccacccccaccactgccaagtcccattatcttctatatctattcgtatatatacatacacagagagcggggagaatggattcggatcacggaaagcttttcatcggtgggatctcatgggatacgacggacgacaa

SEQ ID NO: 87153 - DNA, 167 bp, Glycine max
ttccggtcattccctctgttttgtcttcaaatccattgtttcgtgcaaatcccgatatttaaccatgcttctccgaagcgccgcctctgccgcttctgcttcgtctctctccctcttcagctctacctccgaacctctccgtgcggttcccgctcgtggattcgtgg

SEQ ID NO: 87154 - DNA, 229 bp, Glycine max
gataaaaggaaagattctactccatcaggaaagtcagatgtaaagaaaaaagaaaaggataataatactgttaaggaagaaattgaaggaaaaactggagtgaataacaataacatcgttaaaaatgaaggttctgacattggtgaagaaggcaaaagtgctgaaaaaaaagctagctggggaaactgccactggtcaaaccacaggtggtgtgaagtctgtgaaaaag

SEQ ID NO: 87155 - DNA, 224 bp, Glycine max
tgtgtgtctgcgtaaatttcaaaaccttgtatctcgcttcaatcaaactatgtgtttttgaaacattgcagtgcagggattggtgtttgttcttgttcgtgttaatgagagatggcatgaattaccgtatattactggactctgcaaaaagttgtatattggcttcttctgttcccagaaggcaacaattcttgataaggtgtgtgggaggctccattgatcat

SEQ ID NO: 87156 - DNA, 271 bp, Glycine max
  unsure (1)..(271): unsure at all n locations
tggcaatttacatacgcttcctcaaatacgtgtgtcatgttgtttgtgttggcagttttcttcccttcgccgataaacacttcttagctctatcttgttgctcaatcctctcccctccaatccaattttctctctcttaccctgaataaattcacgcacacccacttcccaatccgcgaacacagatccaaagttcttctctttttcaacgttccacgctaattccccacctgggtcatccanattcacaacattactttgctaatcaacc

SEQ ID NO: 87157 - DNA, 149 bp, Glycine max
gataaagataggaacagcagtggcccaacaaagccgcattaatatgaaacaaacaaacactaatgtttcacttgtcgaacagtagtagcaagtggatatagagataaggaagaattgagcaccaaaagcatcagttacccatggcaccc

SEQ ID NO: 87158 - DNA, 228 bp, Glycine max
  unsure (1)..(228): unsure at all n locations
aattagtcatgtttacgttcagttttgattagggtttatttgacaaccttaatgaaaaagttaagtgtggggacttagttaattcttcattatgatttgataagaagaganacttaggtcttgtatcttccttttcaattccagtagtaattattaacagaggttagtaatgcaatctgtacagactaccgagttttatctacaaactgaaaacaaaactgtagacta

SEQ ID NO: 87159 - DNA, 272 bp, Glycine max
cgaattcgcgtaagaagccgttaatgggggatgttgatgaattgagagtgatatctaatgctaaggtttcccctgcctccactgagttgttctatggggcaaaggtattgataactgagaatgatttgagggatgcgaatttgaaaacgtccaatagtgttctatctgatagtgtaatggagtctgcttctaaggatgatgcttgtgatgctgcatatggggatggccaaaagggattgaacaggtttcacaagtggggtaagtggtggtgt

SEQ ID NO: 87160 - DNA, 106 bp, Glycine max
gttgtaacaatagttcattgtgttgtgccttcagaattcagagtttgcttgcttgtaactttactcaattttttaagcactgctttggatctagcaatggataggc

SEQ ID NO: 87161 - DNA, 270 bp, Glycine max
  unsure (1)..(270): unsure at all n locations
aaaacattttcataaaaacaaaaaaggttttggagcttgatttgtgtagttggttttggctcagttcagtttattattcatccttaagttttctttggtctactgctctgtttttcttnttggtgttgattggtttccaggagaataattatggattttttatgacaacccataattattctcctggaaaccaatcaacaccaaaaagaagcacagagcagtacaccaaagaataattatgggttgtcataaaaaatccagctttaagtg

SEQ ID NO: 87162 - DNA, 282 bp, Glycine max
gccccaggaggacatgggccaggacaatgagaattgttttctgtaatgaccgtgcttagggaggagatacatggtcgtacacgacgaaggtgacggcgacttggcgattgttcgacggccatttttatttaattgaactagctcttttatcaccaacttactctttccttttaacatctctgctctctacaatctacaaaggtgtaaggttggtttttgattgttgttactgtttaatgtatataacaattttcatctgatgtcgttctaactggaatacat

SEQ ID NO: 87163 - DNA, 281 bp, Glycine max
aaagcaacttagaaccagtgcagtttgtgatagtatagctgccatctgtgtcttataaacactgcaatatggtggttttcgtttcttgcacaaaatcaggcctgcctttgttttctaagggcaatgactggccagcaactaggtttcctattcatcaagaaactgatgatgatgacgacgacgatgacgatgacggtgggattgatatagcaccggcagcataatggattgattgggacgaagtgctgcaaagtatgaagaaacttgagcttgtgttattc

SEQ ID NO: 87164 - DNA, 279 bp, Glycine max
caagcaggtggctaattttataagcggccacagattatctgctgtcccataattcccctaaaagataatggcaattcagagatatggtgtcattctgattagtggatatgctgtaatcagggtatgagaaattccagacagcaataatacaaatgcttgttagatcaggacatcaattcaggttttgaagtgttgtactggtattttgtaggctattgccgttccataattttaagaattcggcagagatcctgtgtattttcagttgactccttgatc

SEQ ID NO: 87165 - DNA, 191 bp, Glycine max
attcgctcagcggtacacagtgcagtcgatcaatgcagcgtcgctcacagcatagcgtcatgattcacggcgtcgttgaggctcgacttcgtgtcattgctcacggagatagatgcatctcccaagtcttcgggtggtgcaagcgcacgtgtgcccaataatggaaagctcggaataatgcataaatagga

SEQ ID NO: 87166 - DNA, 279 bp, Glycine max
agaggctgaaacaaagaagtgaaaataacagcaaaaagtaggagctgcagcagctcccccgaagcttatctcagcggcagactctgaaagctgtttgagtagcctcaacccggagaatagcaccaatgggagaggaggaaaacaaaccagaggaacccatggcaaaggagaaaaacccagaggaagaagcaacccaagagaaaaaaccggagcaagagtccaaagaggaagttgctgctgctgctgctgctccgccaccgccaccgccaccgccaccgc

SEQ ID NO: 87167 - DNA, 280 bp, Glycine max
gatgaggataagccttttcctgagtttccctccttcatccccttccatggcagcaccttcactctcctccgctctcaactctctctcctccccctccctctctctctccttctccacctcctcccgccgcttctctctcctccctccaccctcacaccaaccctccaaacccctcttcctcaccctcaaatccaaaccctccgacgacattgacacatcgttcttcgacaacatcaacccgcaagacgacatcacattcaatcccccggagaccccggaa

SEQ ID NO: 87168 - DNA, 281 bp, Glycine max
aagctgctggagctggagcgggtgctggcaagggctatgcttgtaagaaaaggaaagtgagaaatgggtggtatgcatcgctggttaggctttctctatcaacgttgggaatagacggattatgatggggaatcctgttcacatttggtcacaatgtggggattggttagagtagatttttggaaagtgggtttggtttggtgtggggtgttgctttgaagtttgggagagtctgagaatatctgtggactgacgctgatgctgtgtactgtactgagctg

SEQ ID NO: 87169 - DNA, 262 bp, Glycine max
  unsure (1)..(262): unsure at all n locations
gtagtaattctggtggggtttatcctgtaccctttcttggttcaagccaaaaataagaattggattttaattgaagaagccactggctggcagcaatgccattcagaactgactgaccaagaaaatagcggtgttgagcttcttgtgagctcaccattggctagcgtggaagaacaattgtctttaatgcaaagtgattctanaccaagctagcaggatcttgtgctttagaaattaattttgacaagcatacgacgtgttt

SEQ ID NO: 87170 - DNA, 277 bp, Glycine max
atcaacaacaacaacaacaaggttgctgttgaaggaactggttcaactagtgctagcagcatatcggagtatttgatagagactcttcctgggtggcaagttgaagactttcttgattcatattctgttccctttggtttctgtaagaatgatgaagtgttgccacggtttgatggtgaaatggaggggcatctgagttctttctcaaccgagaacatggggatctgggttcctcaagcgccaccaactcttatgtgttcttcacaaatggatcggg

SEQ ID NO: 87171 - DNA, 273 bp, Glycine max
agtacggttaggaaaatttgcagtttcttagcatagattggaggacgaagattgttggcaactgttcccagggagaacaaccttcatcttcttctgaaggtgctcggtgaaagggtgtttgaccaagagaagaaatccagttccagagattttttattcaagctcggcattgtggaaatttacaaaaggaggatggcacttatccttgcagcaaatatgtgctccattacaaattccaaaacggttgaagtgataaaaagaatcgatattgaa

SEQ ID NO: 87172 - DNA, 337 bp, Glycine max
caaatatttcagcttcatgtagcctaactttttcttcactgataaatgagcaatatgaatagaaaaataatgtagcaatatattctccaaaacactgttccaaactggcacaaacttttttttacagatctggcacggacttaatgagaagaaaacagaaaattttgtgactcttctcttttaatgagctcaacttatgattagtaattttctataaaccttaatcaattatacaaaatgtgctacaaagaacatgtcactagggagaaattattacataatttaaaacacggtcatgagtcttattttttttccggaaggaatggttggctaattt

SEQ ID NO: 87173 - DNA, 376 bp, Glycine max
  unsure (1)..(376): unsure at all n locations
tcggctcgagcgtccgtctgccttcttttcttcataccctcccactttgcacactgaccattccctaagtgtatcctccattacgtagcttccactggtcgacccaccataccctcacacttgtagacccaccgttcctctgccatcctttcttgaagcttcacccttttctctgtttcacgaaattcccaacctttctccaccaccctgtccaataactccattccctccttcacccatctcccaacaagctgattctgcttcaaaccaattttatgaattcatcattgacttcgagattcgggttttcttcaacggcctcgcatgagcatgcaagcgaagaagcaaggtnatgtgatcagtctgaacaagttga

SEQ ID NO: 87174 - DNA, 273 bp, Glycine max
  unsure (1)..(273): unsure at all n locations
acctagctctggtgtcgctttcacctcagggctttgaatattgcttgttgattagaagttggtacactttgtgattagttttcttgtattcattcatgttaaattattatttttcccaatgtatatcttggccgcactagtgaataaggcaagggcaaataagttggtatggcctacaaaattgtattggtgtttatattgttcttgatttaaagaattggtattggtggtggaattgtatttgtctatagaatcaaagattanaagttgaaa

SEQ ID NO: 87175 - DNA, 319 bp, Glycine max
gtctccgtcgccgatgagtcgttcggctgggatgccattcgggttggatccgctctcatggagggaagccgggtccgtcgttgggtcctgtcgggcctgttcgttttaggttcgagcctgatcgggtcaaagctggaacacttgatggactggtcagattcggttgcggttcaaggataagcctggcctgatatttcttacggattgttagtgctgtggagttacgttgttatcactgtcttttactgtgactgtagaaaacgccatccaattagggatgccaaccagatgatgatgaccacctacacaacaactctct

SEQ ID NO: 87176 - DNA, 345 bp, Glycine max
  unsure (1)..(345): unsure at all n locations
gaactttctggtttcatttctcttcatcttcctaaaagtttttgttcaaaactttttctttcaagaaaagttctttgatcaaaaacttgtgatattcatctatttcattctttactccctttgtcaaaaagaattcgacaaggactaatgccctgaattcttttagtgtctctcttctgccttttccaaaagacataggactaaccgcctgaattcttatgtgtctctcttctctgttttccaaaagaacgatggactaaccgtctgaattcttatgtgtctctctacttcctttgctanaaagaattcgctaaggactaaccgcttgagatctttttgtgtctc

SEQ ID NO: 87177 - DNA, 354 bp, Glycine max
ataacactaacctttattttattttccccccaccaattgtctctatagtaaaggaaacaacatcgatgccttgtaaggccagagagcaggccccgttttgtgtttctgtttcctgacaagttatttatagatagcctttattatcattatcattatcataagaagaagaagaaaagcaagtaaaaaggtttcaagtttaacccatttgttttgctttatctttttcacttttcagatcctttttctctcaattctgagcagaaaacttatatccttgtctgaggttaacttttttcatcggacacaacagacaacaaccagagcaagaagaaccagtttttgtttgtgtgtcta

SEQ ID NO: 87178 - DNA, 263 bp, Glycine max
gtactcagctagaataaatagcgggaattattggatagaacacatcacatgtctcccaactcccctgttgattggatttatgcttatcaatattgaatattgccattgattgtggtgtggatttctcagaccagcatagtcttttctttagaagagggtcctggtatacttttcaaagcccttgctgtttatgcttgcgtcagattaaccttacaaaggtactttgattatcttttctatgttgatttgatacatcaatggct

SEQ ID NO: 87179 - DNA, 160 bp, Glycine max
caacactgcagtattgagagtcatcaatgtggttaatagggactacaaggaattggacttttggacaccataattcaagattgctggatctcttgggggtgattatgctactaataacttagccggcccattggtttggccaggacgcctaatatctgct

SEQ ID NO: 87180 - DNA, 206 bp, Glycine max
gcacgcagaaagagcatggttcttctgcagctagatccgtgtctcaatgagcttaccagcatgtttgagcgcagaccaagcttggctctgtttgggtgactcttaaacgatgtgggataaggttgtctactttgttaggtattgtgctgaatatgtctcgaaactgattcgtgctcgtgtgcctctgtttagcatctgtgaaatct

SEQ ID NO: 87181 - DNA, 152 bp, Glycine max
ctcatgtgcgcatgatttctctctctgcggtgccatgacgtaaccaacggagccatgcacgtcagcctcatttgcgatgcacgcaaccaccgtaattcacccgaagcgctatctcttcgagcagtgcctctggcgaatctcgcgctgcatct

SEQ ID NO: 87182 - DNA, 211 bp, Glycine max
attcaaacaaagactgatgatcaaggtggatatgatagcaaaagaagaagagcagttgagcaacaaacaattatttgttgagaaccatgattatgtagttggtgtatttgatatatttgtggtaacactgtcaatctttcctggatttttgtatgaaaatactggaacacatcagttaggcacatgattcttgctgatcccagcattctac

SEQ ID NO: 87183 - DNA, 210 bp, Glycine max
catggagtaagacggtatcctacattctttgccatgttggatgcagaaagccttggaaaagttcttcctggagttgatagtagtgaagaatgtgtagaagtctaccagagattttgcacagaggagaaggaacaagcaaatggtgtccttgcaatcgttgttgcaaaattcacccctcaaccatacgattctttggctagattattctgt

SEQ ID NO: 87184 - DNA, 206 bp, Glycine max
catctcctcggtatagatatgttaatgaagccggtagcggaacaaggaaaccatgatggttctgagaaattggaaaatggagacaatgattgtatcaagaccaaaatggaaaataagtcagatatgggttcttcaactccacaagatcctcatggaagtgatgatattagttcaagtcttgctaatgagatgaatgatgaatgcag

SEQ ID NO: 87185 - DNA, 206 bp, Glycine max
cttaagtgaagaattgggtcttagttaacgtgttgattaaatagtgattttggtgatagaaaccttaaaacaatttaatgtgatgataaattacaagcacatgtgagtagtgtggtcacagctatcatggtctctcgactctgctttctccacaatgttaatagtattatgatagtgatcgttgccgtgaatggtaatttcaagtt

SEQ ID NO: 87186 - DNA, 206 bp, Glycine max
ctcttgatgacttggagtctcgctcctagttcgagtcctgtcactaccctttcaacaaagcttcttcttcggtcaacaattcttcttcttctgtcgttgcccaacaggctgagattgcttgtgtgccatgacatggctgggggctacttggatgataagtggattcaaggtggcactaaccctgatgcttatgccatctggcattg

SEQ ID NO: 87187 - DNA, 203 bp, Glycine max
gagagaataagttatagtgacttccatggattagattatgtgggctcaagagattaggcaggggaaaagatggtaaaatcgtccagtgagaatatgcaagacaggttccattggtatctgtctaatgcggatgtgcaagggaattttggaaggttacccatatggcaaaagtctaagatgtgtttctattcaatgagttgtgc

SEQ ID NO: 87188 - DNA, 195 bp, Glycine max
aatggggtctctaatggcctctctgactctcacgcttgtattggcatgactctctctaagcgtgcgatctcaaacctcagcggacaagtacgagtatgcatctccgccagcaccggagaagcctgacaactaccactctccaccaccaccagcacacaagtagccatacaaataaccttctcctccatgagctgt

SEQ ID NO: 87189 - DNA, 204 bp, Glycine max
catgaagattccgcagcagagagtagaagagatggcgcggttgatcacagtggtgtggtgcgcggtggcggtgctactgtgcgccgcggcgagcgcgtcgtgggtggaggaggcggcgaacccgatacgaatggtggcggggatggaggcggaggtggttcgtgtgatagggcagtgccggcagatcctgaagtttgctaggtt

SEQ ID NO: 87190 - DNA, 207 bp, Glycine max
  unsure (1)..(207): unsure at all n locations
tcganacgctaactcgcgattctcgatcgagaccctaactcgcgatggcgatcttgctgggcgaaatgcttcaatcgcggtagcgttgtgctgtatctgatcaagaacccgcagcctcatccgcgacgtgatatcctcaatctgggaccccggtttgctgggtgcccggtgtcggaggctccatgctgcacgccgttgacgaatccg

SEQ ID NO: 87191 - DNA, 205 bp, Glycine max
cgacgatgcggtcggtaaagtggaggtggaggtggccctgtaaagagagtgtccatgtgacgtacgaaacagcaagactttaaaaccgcacaccgatctatcttctcaatgcgaacaaccatacacaaaccattccccacactctcccctcttctttttcattgtcattcttcaccagtattctgcaatatgttgctactcatca

SEQ ID NO: 87192 - DNA, 237 bp, Glycine max
tcagttgataattattttctttaatattcttccttttcctttatttttatttttattttaggtcattttctatacacatgtcaagatggtagaagatcagcttattgcgtttttagccaaccaactttacaggggaaaataaggcagcgcatgaatattcttttggatttgcaaattttgtacttcactttcgagagatatgtttggtttcttcgctactgcatattgcaccagtag

SEQ ID NO: 87193 - DNA, 243 bp, Glycine max
tactatattaatcaagtaccacgattttttaaaattgcaaaatggtatgcaaaattcgtagcttctttaattttcataaagagatgttgtttatactttttttcatattgtgtctttttttcctgaaagtgaaggctaaaggattattagtgtttgatcattgaactcattgcatcaacacagaactgcatgaacttaatctattattcacacccatttcaaataattgtaaaaaaaaagtca

SEQ ID NO: 87194 - DNA, 240 bp, Glycine max
caaggaaataattctacaaaccaaggggtgactggaaacccattaccagcagggttaggaaatgcccagccacagcaacaagttcagcagtctcagcagcaggtcaaccagagccaaatgcaaaatgttgctaatggccagcctaatcaagcaaatagaactgcaacccctttacctcaaggaatatctaggtgtgttcagggtcctgtgtttttcaattgagctatgtaaaatctgtta

SEQ ID NO: 87195 - DNA, 153 bp, Glycine max
tattattatctagtgctaatctaataagagaaatgatagtaacccaatttttttatcacactttttcataccggttaaactattttaggatcatatttgatgggattttccacattttggctgaagctattagttttgcttctactttttttc

SEQ ID NO: 87196 - DNA, 264 bp, Glycine max
ctcgagccgatacaaatttccaaaaaattgaccattttcaggaatcggattccattcttcatgctgatcaaaatcaccatattccaacaacttccaatcggtgcgctgaggaaattggtgaagaaataactaaagttcgggacttattgtccgagtatgactgtaaaattggtaagcttacactagcaagacttttgagtgctcttgattcgttatcatttcaatatgatggaagaaaatctaacactagccaaattcttcaac

SEQ ID NO: 87197 - DNA, 229 bp, Glycine max
attgctattttttagaatagtattacactaagttgttaaatattaaatgttggaacaaattaaagtaacattcttttatctttactctagttacgcatgtatttccttcttattttgatctatataaaattccttatcttatagccattctatgtactagtacccccaatcccttaacaccatcagttccattaacttgaacaaatcatgtattttaataaaagaaatt

SEQ ID NO: 87198 - DNA, 265 bp, Glycine max
tacggagaacgacagaaggggacatataaacaatgccaacgtaagtttcagcaatcacccttcatttatttccgaatggtttctcttgatggtctgggatattgcaccaaggctttcaatatgcttgtagattgtgatcctcttgccttcatcttttccatttagtgttgcataccataattgcagctgtcttattgatacattgactgctactgagagttattgaagggcaaaaatgagtacacatagtatgttggatattgtt

SEQ ID NO: 87199 - DNA, 256 bp, Glycine max
ctcacttcagagagtaaagtaaaatttcagttgtagatgaaaaaatctaacagttcatttttcaacatattatgatttgttatgcatgtgtaacagttcatttttcaacatattatgatttgttatgcatgtgttcttgatattttctcttcaacgaccaagataacttttttggttttctaccggtattcttatttggaagcaattctattcgaaacatggtcattcagatattaaatgtaaacacttcttctaa

SEQ ID NO: 87200 - DNA, 168 bp, Glycine max
gatacatgctttaagcactaatagggtccaaaaaaactaaacacattgggacaccaatctaaataggataaatattccaaattcaccacaggactctggagctggtaaaatccatagctggtaccaaccattttcaataccccatccaagcctaaaaccaggtttttt

SEQ ID NO: 87201 - DNA, 238 bp, Glycine max
gatcaattcaaaatatatcatcaattataagcatgggtttgtggaacacaacgaatgcagtgtcttgccgctttcacaagtttggtgatgaccaaaagaatctggtcttccaaggtgatgccacgtcttcttccaggggcatagaactcacaaagttagacggtggaggaaaaccagtgggtggcagtgtggggagagtgttatactcttctccagtgcacctttgggaaagctctac

SEQ ID NO: 87202 - DNA, 237 bp, Glycine max
gcctcgctgcgtttctattgtgcaaaatgcccttggctgacagtaattacacaccacatgcggaattagtccctcactagtgggttggaagacacacgtactctatgacttgggacaaaaaaaagacgacctaacatacttaactcccagcttcattaatttttccaatgtatttcttgcacgatttgtcaaaactcctataactaacccagaatatgtagaacagtatgtgcaata

SEQ ID NO: 87203 - DNA, 264 bp, Glycine max
gacgacagaagggatgcccccttttcttactactagtcatccaaccatttcttctattagcctctgaagtgtaaagtctttcatggctataagaggctaaacctcatttgggagcctagccagtcaacgcccttgtaatgcaattgctcttcttatctattaatacaatttcaatttctattattcttgtctgctttacatcgttattgtgtggttacgtcatccatgcatatgttttcagggaatactcattgggatatggta

SEQ ID NO: 87204 - DNA, 117 bp, Glycine max
tcccttgactttgtcacctccaaagatggtgtagtgattgtgactgtagcatttacggattaattacctcgctatcttcatgtagtagggattgggaaaggttgtttcgtgtgggag

SEQ ID NO: 87205 - DNA, 237 bp, Glycine max
gtctttgaatttcttattaattcttatcatcattatatatttgagttgtgacttctttgtaatataactttatacaaacctcagaaagagacagaatatcactaacagaattgaggtgaagagttatattattcaacccaatgagaaaaggttacacctcggtttatataggcagttacacaaaagtaactgtcaactgactctagtcagttagctataaaggcactctaaactgta

SEQ ID NO: 87206 - DNA, 261 bp, Glycine max
tacggcgacgacagaaggggtgttgttactgttagtaggttagtttccatggattcgttggatgctatatcttctcctcattcttattcagtcacggccggtatctctgcttaatttcacatcacccattaattacttttttctttgatttcacccttgggtatttggtcaatttttcattattatcaaattatttgctgactaatatgagaggaaccattaattggtatatttattttgcaagtgtatatgtacgtgtgt

SEQ ID NO: 87207 - DNA, 226 bp, Glycine max
gatagccttaagggggttaaatacagcttctaaaattgttgtgggttaaataagctaagatattaggaatattttatcatccaacctcacataatatatggaagcagtttaccgggttaatagcagatgtgaagagaaaaagatcgtttaacatgaatcattcaaggaaaacaacaccattgtagcataagtataagaagtgaatcaagtgattaaggaatattaa

SEQ ID NO: 87208 - DNA, 274 bp, Glycine max
gggaatctccgtaaggtaaacggcaaaggtcgtaaggaatcattgccatctttctactttactttgtggaaagctacagggacacctacactagacagcatactgaaaagatttgggatcatagcaccggtgacatgggagctgatttttatcatcgatacaagggtgacatacaacaagcgatagacattgggctggactctttcagattctctatctcatggtcaagaatattcccaacgggccagggagcagttaacccccttggggttaa

SEQ ID NO: 87209 - DNA, 180 bp, Glycine max
agaaggagtgggtggagaagggtgagttataggatgctggagaatagaaaggggagcatcatggtgtatacagtattgaatacaaaggagaggatgatgttggtgagcagaagccggagtaacatggaggagaagagtagaaagaggggttcctagagaagatcaaggacaagatccacg

SEQ ID NO: 87210 - DNA, 197 bp, Glycine max
gtgacgggcatcatggtctcgtgagcagtgctattgttggatatgtgtgtgcttccggctatggctgtggttattcgtccagcaaagcactcttgttgcgtgaagggtcgcgtctactgtcgatcttgctcgtgctgggtttgcgattccagcaaccaagtacattgccggtgatgacagtatgttgcaatgcaaga

SEQ ID NO: 87211 - DNA, 266 bp, Glycine max
ggagacagttaagatgaagaatatggctggctgcaatggatgaaattttcttctcatttctacgcatgtgaagaacattgatccggatgctgcggattgcttggatggttgcagtactgcctgtgttcaaagcgactcgaggcttcaattacggtgtccacgcaaatgcagcattgaatgcggtccagattccacgatcaaggaggacatgagttgacttgagtatgtaggggggggcgcaacaagcagggggggctcaccatagt

SEQ ID NO: 87212 - DNA, 192 bp, Glycine max
  unsure (1)..(192): unsure at all n locations
aagcaccatacaccgtttcaatagatttccgactatttctagggtttccctgctatcttcctcaattcgaacgcttagnctttcaacacaacatataatatggatatnantngnnaagngtatnngagagtatngatttngttgtatgaaagaggattggtnngttgtgaaggaggaaaatgtattnaagag

SEQ ID NO: 87213 - DNA, 265 bp, Glycine max
cgaggctggtgattaacctctctttctgttttcttgtcaactacagtatcattcaagcacttcacaggtacttcccttagcttcttgacacattcaccaaaaaccagatgaaagaagctagctaacaccaaagttctgtcaagtcaattaagagtttatttcttcattaattttttctacttacatgttgaagaattccacttttttttttgttatgggaatttgttcccccccccgagttctttagggatgcagtatggtttat

SEQ ID NO: 87214 - DNA, 222 bp, Glycine max
caactcgagccgaatctcgctcgacgagtccctggagctttggaaatggacagcggcaggttgtacacaagcttctcggaattgacgcacgaagactcgtcgctcgttggcagaaactagcgctgctcatgccactccaactaggcaacgccgtgtcccaagcgagccggtgttgtttgctgaaaccgacgtcgtcttacttgagtaacggcggaaccattc

SEQ ID NO: 87215 - DNA, 257 bp, Glycine max
cacaatcaacctcatcttccaattcaattaatgtaaacagagttctcgctaaaacaaagtaattacaaaaagaccgcgtaaagatcccatccacatacaaattctccaggctttcctccaatgtagccatccaccctctcttatctagacatcctcggcaatgaggtcgccgttgatgagttctctgtaggaagcaacgggccacctgaaacccctgaagtccaaccgagaagccagaggaacatcgatgatgatct

SEQ ID NO: 87216 - DNA, 247 bp, Glycine max
actatacccaaaacccaaaggcatgtgatgaataaataccccatccattaattatgatacccattgagtcagaatcctattaccatcctattttgatggtaaacaagaccataaagtatccaaaaaaattgtaataaaagacattaacgtcaacgtccacttgctcaaaatcgtatacaaccaacaaattttcacagaaatccttgctatggtagcatatgagaacgaaataagagggggtacgtga

SEQ ID NO: 87217 - DNA, 278 bp, Glycine max
ggcacctttaagaaaaacatattcttcgagtaagtctcatgatgggaaggaaaatggtttcatctcagctgacagtgatgagcaatcaaacatctccaatactgaatctgaatctctgagtctaacaactggcaacaaagaacaagagggaacatcctgtggtgagtcatctttacaacttgttttaactaacgaaagctgtttgagttgtgaacccatcgagaaggcttctcttataaaacccaaccaagttgtaagagtctttcttgactggactg

SEQ ID NO: 87218 - DNA, 262 bp, Glycine max
accaaacccttcactactccaaattccaaaacttcttcacactccttcttttccctcttctgttgcccgatcttcaaggcctcttggctggttatatatatccaggtcacaacatcgtaatatggaagcaaataaaggcttaagtccctctaagaaccgcaacatgatatcttttgcaaatcagaacactccataacttttaaccatttcaaattcaaggtgatcattcccaataccaaaaatcttggaggcagaagatcgg

SEQ ID NO: 87219 - DNA, 265 bp, Glycine max
tccccgaaactggactaaaaccagctgcatttgcggcacttgttccgaacagtgctaataaaccactggaggagttgatagatgaaataatgggagaccatgagatgttgactggagaacagctatgaagagattggaaaagagatctgatctgattgaaaccaacaattttttgcagtatcagggcatcaaactatgcattataaaatataaatcccaatctactgaggattttaagtatatgaaatactgtcttttgtgacgc

SEQ ID NO: 87220 - DNA, 274 bp, Glycine max
ggtttgtatagatgatttacgaaagtatcagtgataccaatgaaaatttgttagttactgggggatacagagctagatttctgggtttgtgtagataatttacgaaagtatcagttataccaatgaaaattaaaataatatattcatgtgcacgttttctgtaagaccagctaaatcttaaacctgttccctaactttctatgttctgatatactagtttctgtttggtctgaatgggttggatatttgaccatatcagtatattggcaatgag

SEQ ID NO: 87221 - DNA, 271 bp, Glycine max
attcagaccaaagattatatgactactggtctatgtcaaaggttgacttgccagagaacatgattctgtattggctgtgtaactaaaaccaaagcataaacccatctatgatgttttctcctaaagtagtagaccattttatgttgctggaaaaaaaaaaaaaaaaaaaaaaaaaaaaaaaaaaaaaaaaaaaaaaaaaaaaaaaaaaaaaaaaaaaaaaaaaaaaaagaaaaaaaaaaaaaaaaagggggggggggcccccttttttttt

SEQ ID NO: 87222 - DNA, 272 bp, Glycine max
atgctagtctacgttatcagttatgtatgtttctgtgtgtgttccatatatcttgcaaggcaactgcaagctggcagatcgacatatcttttctttttttcatggtactgcattgtacgtgtttgtttgaaaaaaataatatatgcatgcgtgttgtgttaaaaaaaaaaaaaaaaaaatccaaaaaaaaaaaaaaaaaaaaaaaaaaaaaaaaaaaaaaaaaaaaaaaggggggggcccccctttttgttccccccccccggggttttttt

SEQ ID NO: 87223 - DNA, 262 bp, Glycine max
caaaaagtttggagagagactggaagacaacaaaaaaagacaaaagtgttcattttttttttaccattaagcaaaggtattaggcaaggcaagcaccctacttattgttgttcattgtgaaatcatcatcatcatgggttgctcagcctcaatccccatcaccatagtggccaacaacaataaccaagaggatccatctccttcagcttctcttgcttcttcttcttcttccttctcttcctcttctgcttcacacaaatcc

SEQ ID NO: 87224 - DNA, 261 bp, Glycine max
  unsure (1)..(261): unsure at all n locations
ggggtctccaatggcctctgccacattgactcttgtattggcaatcgtgtctctaagcttgccgtctcacatttcagctcataactacttgtactcatcacctccaccacccaagaagcctccancggtgtctcacccacaccctcatcctcaccctccctatgtctaccactctcctccaccacctcctaagaagccatactggtaccattctccaccacctccagtccgtcaccacccttatccccatcatgattccca

SEQ ID NO: 87225 - DNA, 263 bp, Glycine max
aaaggaactgcaagaacagccccaaaaaaattgagcacaaggcgaggacggagttattcacggtcaccagtcaggtcacattcacctcgtcgtggcagaagccgtgatcgcagttacagccgagatcgcagctacaggtaagatgattttatagttcggaattcttatgcatgcgatgtagtgatgcagcaaggtttcacattttttgtttgtaaagtcttatcctgtatgctgagttttgggtgccttcggccttgctagtc

SEQ ID NO: 87226 - DNA, 255 bp, Glycine max
atgctattccacgactcagagtaagacccccgaagcccactgagtcagcgctccaaccccccaccttcgctctcaaacactgaccgtggcctcgtgaagaggcacgacattgaaggggatgttcatgatgagaacaagactagcatgctgcacaatggcaaggaaatttagcatcgatcatgatgagcaagagaggattatgacatataatggcctcgagcgttgcatgctgaacaaccagtcttacgaagatga

SEQ ID NO: 87227 - DNA, 260 bp, Glycine max
cacatgcaatccacaaaattattcaactagttcgtctattatcccccttattattgattcagattactaatttttttcttctatcaatttaagttgttagatcctttcagtttatgttattctttttatgaatcttagcaactggatgagcagttcaagactttgatatttgataaaactaataaaacttaagaatctcacaacttaaggttttgtggaattttgattttctttttagtttttttttttatgaatcttag

SEQ ID NO: 87228 - DNA, 177 bp, Glycine max
cgatttggggcttttagattggtatcaggtggctagatgtgcaagttatttatatagcttaccatgttgttctataatgtatcaatgaatttatgggtttagggagacattggaggtattgtcaatgatttttttgttttttagtccttttttcttgaattatgatggtttgtgtat

SEQ ID NO: 87229 - DNA, 272 bp, Glycine max
aagagatggaattttggcgcaatttatgctttttgatacttgcacgcttttgcttggatcactactaccaaattgcgggctttggtcaactgaattagccaagaaactagcaatcacagtacaatgataacgatgttgaatcgctcaaaataaactaggattctaacaattctgtagtataggaataaccaaggtcaactcagagacacaatccaattaggtatcaacttcaattcacttataaatcacagtaagggatttcatcgagcagt

SEQ ID NO: 87230 - DNA, 263 bp, Glycine max
ggctcgagcggctcgaggccattgcccctactccctatggttccaaccgatttcaaggtgcaaggactaggcgatgccatcatcttaagattaaccatgccacccctctttctctccctcaaatttccaccaccagaagctcggttacacgttcatttgggcatgtaaattgcatgctcgaaagattcatctctatgccctccgagaatgagggaagtggcaacagaattttgagaggagtggcagcagcttctctggttctg

SEQ ID NO: 87231 - DNA, 274 bp, Glycine max
ggagaagcaggctgaaaaaactgctgaaaacaaaaggacaagagaagaggcctttatcccacccaaggagcctgcaaacctggtggataaatctgaggatgctaacagtaatgtagctgacatggcaatgtccttaaagaaaaaaacaaagaagtttgggaagcgtaaatctgaagaaaatataaatgccgagacatatattataggatcatcagaacaagcatcgggaaagaaatccaagaagcaaaggtcttaaacataatcttcattttgg

SEQ ID NO: 87232 - DNA, 301 bp, Glycine max
ggtccaattcgcgctcgagacgaattgctagtcttgctttgtgtcttggctgtttctagcacttattggcacctctatgcctagaatcgtggaggagtgttagattggcttgtcttggtgtatggtccttcatccgcttttgctgggtacactgcaggatcgttccatggcatgtttgctgagaatggatgcgaaaggagtgctagtctaggaggaattctttacactggaccagtgtttgttgtaggctctatgctcgacattgtcgcagtatcttacagggctacaattggactccatt

SEQ ID NO: 87233 - DNA, 274 bp, Glycine max
caggttctggtcagaatgtaaatgctactgacacttcgacagtctctgatgcttatgcaaagatgcttacaatttttatcccacttctggtggatgagagttctttttttgcacacttcatgtgctttgaagttcctacacttgttcctcctggaggtgttgttaatggcaacaaagctggatatgatgatgatgatgatttgggaattatggacattgatgagaatgacagcaaatctggtaaaaattctgcggagcttgaagctttgaataa

SEQ ID NO: 87234 - DNA, 152 bp, Glycine max
aacggcaatggcggacacggtaacgctggcgctcggacgtcgccggcttcgcgccttggaagtcgtcgtcgccggagcaaaacgatcagcaacctaccgcgccgttcgcgatgagaaactccaccagctcctcggttcctccacacaacata

SEQ ID NO: 87235 - DNA, 270 bp, Glycine max
cagcagccaataaaaggacaaaagtgtggtggggagttcaatttggagaaatggaatgcacatggagctgcatatcttctgcatgataggttgcacactcgttctgatatcacattgctgatgtttgttcattttgtgcatcaatgcttaaaacaacattcatccaaccttaaaactggccagtttgtaagacttgtgggctaccccctggaagagttccaaaaaagggaactagtcttacaaaattagggtttatgattccttagtctc

SEQ ID NO: 87236 - DNA, 273 bp, Glycine max
ctcgagccgttttaataaactttaactaatagtagagtgctacaaggagtgtattaaagaacgttgctagcacttctcatcagacaatcaaagcaaccagaaataaaaattctgcttctacactacacagaatcacagctcgcaaatagttctattttgagagtgatttggttgtgcatatatcatcactcttttacatgagtggtttagatataattatgctaatggatggaatgctgagtccttatgtcatcctgtgaggtgaaatggatc

SEQ ID NO: 87237 - DNA, 132 bp, Glycine max
tttgaggtgggcatataccactctgccaatttgtctatacatacagggaccccaacaggtcttacccctttatctacttcgcctcgtgacccctttctctgtctcttctctctctgctcctgaatttaacac

SEQ ID NO: 87238 - DNA, 215 bp, Glycine max
ggatccaatactgccattcgttgaacctacagtctcgttctttctctctcatcaactcgttcaactacccaatacccatcatgtcaacctttatcacttctcttctgatcaaaatccaacaccaacctctcaacccattcaacctcttttccatctttctctctctattctgttttctcgcgtgagaagggttgttggggttgtggaggcggatg

SEQ ID NO: 87239 - DNA, 123 bp, Glycine max
ctcgagccgcggcggtgttaagcaaatcgcggagagagaggagaaaatcgagtggtggaaactgtttctgaaaatcgccgcaaagcgaagcacaatctcaatatgaacttccacacaacagac

SEQ ID NO: 87240 - DNA, 253 bp, Glycine max
gctgaattaaatttccttaatgtaatattactcttcatcaagggagatctcaggttaaataatatcattacaacttgagtttttaatcatgctgaatggagtcatgtgattcatgtagcgattgtagccaacatcatatagttggataagactttgttgttataatgtaatattactctaattatataatagtcatatatgccaataacctctatgttccatttttcttacacaggagagtgttggttttata

SEQ ID NO: 87241 - DNA, 258 bp, Glycine max
taaccccatcaatctccataccctcatctcggatttctcgaaaaacctccaatgcattcctcgttagctacattacatacccagtaagtaacctttgtatcaccgctcctagcgtaagcaacattcagcaatgaaggtgaggaaatgtcggcatcatcattgatagagtctccagttcttcaactccatgagatctcagctgtcaagttcggcaactttaagctcaaatctggcatctcctcggcaatctacatagat

SEQ ID NO: 87242 - DNA, 252 bp, Glycine max
ctcgagcgccactttactctcagacacctcccgatcaacatgaaccttttaatgacgaccacacgcacatgatacgacttaagaaaacccagctgactcgttaatttgtagtggcaaaaagccttcctattgctcactatcccttctttattcagtcttcattatcacactcatcacgcactttctctaacatggcttcaaccgcttctgtggttagccaacaagtacaatccaataacagaacaagtttca

SEQ ID NO: 87243 - DNA, 253 bp, Glycine max
caaaaaccatcgttatgcagaaaatgatactgcaacagataacacatcatctgagagtagctcatctttgcaagatcgattgctttgtcaaggacaggatccgtatgatatggagccttctagtcatgtaacacctaatggatctcttctgcctcccaataccaagggtgcaaataacatgggacataaaccatcaggatatttgaaagtgaagggagagatagagcatgctgctattactgctgttaaaaag

SEQ ID NO: 87244 - DNA, 251 bp, Glycine max
ttgcaaactgtgtaattgtttgtttgtcacagaaataacagttaagaagaaactctcagttgaaaaattcaaccgcgcttagatttcgttttttctgaatgtggcccattctcttactcgttgccgtggccggatccactggtttcgccaccaaacgcttccttactcgcagaaacaccattgaaggtgagaacgtcaatctccacgatccaagtgcttttgacttttccagttcggaaagcacttctctg

SEQ ID NO: 87245 - DNA, 264 bp, Glycine max
gttaccatttgggtccctgagacaaagggaaaaactattgaagaaatccaatggtctttcagatgaatttccttctctagcagttgcttttatttttttcctttcacaagctgatttaagaatttcacattttaatgtatctgggattatcgagtgatccaagtattcattagattccttcacttgaaaatggggatcctgtcccggcgataagttctttgatgtttttttgaatgagttggcttcttgaacattcacttagac

SEQ ID NO: 87246 - DNA, 150 bp, Glycine max
ctttacttcctttagatgtaaaattttatttatcctctgttgcaccttgacacattgttttgatttaagataagaaggaaagaacaatgttgaaacttgaaactgtagttttattttgatcctatgttaactttgttttcgacttccttt

SEQ ID NO: 87247 - DNA, 259 bp, Glycine max
tgtcgagccgattcggctcgagaaacaccaattaaggagaaaaaaagacgtattttaacacaaaacgctcaatggtttggacggacatttgttgttaatttaagcttttatgcttttcaaacctttatttgctatttttcacaacttgtttacattgacaaaaaaaggttaaacatgcataatccaattaagaattaagaaaatcgtatctaagtgcagcaataattcgtttactttttgttttttctttgcccttttt

SEQ ID NO: 87248 - DNA, 257 bp, Glycine max
atccaatccatcaaagcatttcataatgaacaaagatctatgccactagaccaccacctcttcttagaagaaattaaaatggcacatcgttacccaaaacccctcttagacaccctctactgcttaaaagaccatattcattgggaggaagaacaagtagaagatgatgagtacagtagtagcacaaccacaacaatcacaaacacaaacacagacacctcctctgtggtctttttagaacacgacctcttctggga

SEQ ID NO: 87249 - DNA, 240 bp, Glycine max
aatccagataagtgtgccttgcacttcacaagagtcaaattcatgttggttgacttaataggattctgttgaaaaattgattatttgcatcttgcctttccttgtttcctaaagtattcctatttaaattagtctaaactctaaaggacactctccacatgtggaaaacatcttaaaatactgtacaaattaatcatttcactagttctaactttgtacatcaatgtttttctctgcaca

SEQ ID NO: 87250 - DNA, 252 bp, Glycine max
tctcgagccgattcggctcgagcaggcctgcagcttcaggttttcactatggccattgtggactttgggcccttccgttctagctagcaactggcatggtcccaacattgtggttaccgatatcatcaatctttctcggccccaatatagccagcctactttccttaattggacttgattgcatatttaacctcggtgcaaccctttttctcctcatggctgatgcttgttcacgaccaaagtctccaacac

SEQ ID NO: 87251 - DNA, 248 bp, Glycine max
ttagcacagaaccttgtgaatacacgagatggattgtacactatatttggttgtaataaagctgagatatacgtggacagtgataactgacatttgaggatacgaattagggtggtctatgctttgaagaaacattagctttgggaagagtgttgatactggtagggactcatttgtagagagggtaaacaaaacagtggagatcgatcatacagtgtttgaccatgatgtatttattaaaaaacaaa

SEQ ID NO: 87252 - DNA, 249 bp, Glycine max
ttctagtttactcttttctctctttccctttctattatctctccaacttcactccttttattcccttatcacttcttagttctttccttatcctttcgctattcatacatgttttgttttactatttgatcggatcggatcggatcttgctttcgccattaattactcatggagatccgtcccgatgcagataccagctccttttcaagtttgttcgcagctgtgtcatatggatttacatcaatggcc

SEQ ID NO: 87253 - DNA, 242 bp, Glycine max
ttcttacaaaactctgttctttcctccatgaattcaatttctttaggtaccttcgtcttcactccccctccagcatgcaagttccgcccccttcttcaaaccaaacaccaacccatcttccacagcctctgcagcattggtctcactctctcccgaatttctctgacccaaaaacccacttttctacgagccacggactcaaacaccgacgcccccatttccctccccgagggcgcgtcctt

SEQ ID NO: 87254 - DNA, 233 bp, Glycine max
cagaagttgagttgctgatccatgtttttttatgtgatgttttggtagatcacaatatgcgtttgtcttttatttctcttatgagttttgctgactgggctgttatttttgccgggaagacaaaaaagagtttctttttgggatcaactctaacaggctatgttattttgaaagaagttacttcgcatcaataatgggttcaggtgattggtttaagacaataattagcttaa

SEQ ID NO: 87255 - DNA, 244 bp, Glycine max
ttgagttgcatgcatcttagttcatttgcaatgctctctatagaacctgggaattatagttcattttggtttttgctttcctctttattttctagactcttgtgtactaacttttcaagatcctaacacaatataaatgtggctctaaaaatataagaactagtttattttttttggtttgctcattcatgcagaaagtaaattttatttatttatttatctttatgtttcagtggatgttgct

SEQ ID NO: 87256 - DNA, 130 bp, Glycine max
tctagatctacttcatcatgcacttgtttaagctgcaggaggactttaatttgggtattatatccagacttttgtgtttttccaattaaatttgactaaaagatcacagatagtagctttccacacaaca

SEQ ID NO: 87257 - DNA, 261 bp, Glycine max
atcctaggttgtcaaactctagatgtaaacttgtgtagcttccgtagactcaactcatagaattggcttgtaaactctttgtaaagttgtaagagtttacctaatgtgaaaaacaatattaaaaaacttgttaatgacatatgctcaacaagatattaacaccacaataatttaacatttaaacttgataataaagaaaaataacaagctaaaatgataaagtcaggtagtacattagtactaaataagatcaaactacgt

SEQ ID NO: 87258 - DNA, 267 bp, Glycine max
aaaaaaccctgaaaatagtgatgtcggagagtggtaggggacaccacggcgccaccgccgagactggcagaagggaacagttcatgacggagaatgttgccggagactcgtcgtcgtcattgtcatggagactcaacgtgaaggagtttcagttgccacgcttaagtcatagccatgatcatcatcatcaacacctccctagttacttcactttccgtgaccttctacggaaaccaaagaagcaacgcaaggttgcagaatactaca

SEQ ID NO: 87259 - DNA, 111 bp, Glycine max
  unsure (1)..(111): unsure at all n locations
atgggttctttagcattgcaaacaatttagtcctcaaaagggtgttgtttcagctcctaggtttccctanattaatacacatctcaacaatttattaaacaggtgaagcat

SEQ ID NO: 87260 - DNA, 272 bp, Glycine max
aagaaaataacaacatgctacaagagcaaagacactcagtagaagggggatctatcatctgaattttgttccttcaagcattaagagttagagatatctcgaccaacctaggttactggaaaccgattattagtatcgaattttcttcaactttggccctcttactaatccaccaggatttagacactgcttttgtggatagcagagacaatgttgtctcagaagcaaggagaggacgcaataatcacaaacctcaaccacacagaacatga

SEQ ID NO: 87261 - DNA, 270 bp, Glycine max
aaaattgacagtattggcacttcagttgcttgttgacaatatggtgcgttatgaatcagatttcattaacagatttaaacctatttaaggacatcttatacatgttcttatcattgacgattaacttttaggtttggaagaaagtggtatatgttgatagactactacagctctttagatacataccccgtgaacaattgaccatcccagatttcgtctttcagttgagtctatgttttcatgttataatcatttgttccttttcataat

SEQ ID NO: 87262 - DNA, 273 bp, Glycine max
tgaagatacttcattggaaagtgggaaggatctcaagattgactacaacctgaggacaaggtcgttttggatggccgcgggaatgttgtgattaagaaccagaacaaagagcaaaacccagagaattatgcagaaacagagcaggaagaaggaaagaatgaaagcagtggcagaccaaaacgtggaagcaacagaccaaggtacctggaggattacgtggccaagtgatgctgagctggcaataccttccagaagcagaatccaccaattctg

SEQ ID NO: 87263 - DNA, 194 bp, Glycine max
gtagtgtggtatgcttatcctgatgtgcaagaaaaagtcacctaacggtgattacaaatattaatatcggacgatgtgaagggctcagacggctaccgtctagggtagggttagggtattaattttcggcacacaacaagacattccacctcactgcaaagcaatctcgctgctttcgtattcggatttcaatc

SEQ ID NO: 87264 - DNA, 280 bp, Glycine max
ttcggctcgagcttttatcttttacatccttaaacacttggtgcttctttggtttaccgaagatcctaacgactcatgaatcaaaaatttcaaatttttatttttcaaaaaaacgtgcatgtaaatgtgtgtttattcaatttaacgtcgaaactgtgagtttgtttcatacgttgttgttggttgtgtttttctttttttacgttgttgttgagttatggctgatgaagcttctggagatgttgatctaaggttgggagagcccaaggggcctaaagag

SEQ ID NO: 87265 - DNA, 265 bp, Glycine max
atgatagtagacagagtaaaaaagaaaaagatgttcttgttgttgatgtcgatcccaaaaaaacctgacccagatgatgctcctgcctcaatttctggggagtcttaaatactatctcagctgatttgtggtggagctccctttcttcactatccttctttttcattttttctgctctaaatttctattccgtatttcttttgtgctaccttctacattattgaccattggatttgttaatctcaaatacttacaagttgttgtt

SEQ ID NO: 87266 - DNA, 261 bp, Glycine max
aaactgcgacggtgcgactgcgagcgagcgagcgagcgagagagagagaatcgaaggcgacacaacttgcatccgattctgagaagaagaagacgagggttctcctcctgttctctttcgaatacaatctttctgcttcatgatgttgaacaaatgatacagaatttattctgtgcacagaaaatctggtacatatggcaagacttatgcctggagagttgtcacatcatggaacatctgatggcaactctggtaaaagtt

SEQ ID NO: 87267 - DNA, 258 bp, Glycine max
  unsure (1)..(258): unsure at all n locations
cctcgagccgctcgagccgctcgagcggtcagggcagagagggactagaatgatcgcatgtttnggtcggctagctatttttgtcaaatgcaagcttgtatgtggatgatgcagaagcatatgacgtgtaccagagagaaccagaatcttatgaaactgaacagaatgggaataggaatgctgctgaagatggcccctgctcctcagcaacagctgcttctgatggtgaagatcttgatgacatagatgatcatgatg

SEQ ID NO: 87268 - DNA, 279 bp, Glycine max
ggaacttcgtgtttcattttgcgaacttcatttttctctctcgtatttcgctctggtgtgtctcattcccgtgcttttgaatcatattcttcgatctgttcttcaacatattttctgctttcaaccgttcgcgtcgtgactcagcttcgaattgttcagtataagttggaacttggaacatgtacgggagtaaagctagtcaacttgtgaaagaatttgcaagtggagaaaaaggtcagcttaccacatacaataatgacttgattcgagaagtagttg

SEQ ID NO: 87269 - DNA, 228 bp, Glycine max
tagtctctctcttgttcggatacaagtaatttctgttccgtcaaactcttccttactcatcattttcgtctttccctatttcttctctcgcttcttctgattatgattatggttattattattagtatcatttcaattgtttcatgatttcttcgattttcgattctttcttggatgcattggagtattgatttcaactttgatgaatagctttctcacttttcattc

SEQ ID NO: 87270 - DNA, 251 bp, Glycine max
gtaaccgtctctctttcatcatcgtatttatgtccattcacagtaccactcccctctctctctctctctgattcttcttcactgttctctctctgatcaaaaccgaggatccctcatagtattggtcaaatattggctaatgtggatggggcattcatctatgtacaagcgcactccttcgagagataattcaaacatgtaggacgtcgaagaaaactcagatcttttagacatcggcctggacaagggaa

SEQ ID NO: 87271 - DNA, 195 bp, Glycine max
cttatttctcttttctgagtcgcgataggattacttcttcattggctacatgccattgccttggccatcctccgggatgaatttataccacaactcatttttatccttaaacccaccattccaaaccagaattcaacttcctttttctgcaaatattccattttcacaccctctcacttcaatctctccccactt

SEQ ID NO: 87272 - DNA, 196 bp, Glycine max
ctggtggatccgtgtaatgatgataaaaagatttgactacactgcacatgttcccttcttgtcttcaacagcataagaaaaaggcagccatcatcatttgcttttgaattctggttttacatatttttagatctttcttgtgtaatggttgtttttcagtttcagtgtcctatatatcattctgttgttacctgtt

SEQ ID NO: 87273 - DNA, 194 bp, Glycine max
gtgaatctagacatgcaaatagatccagagacaaaagaatacaaagcgttcactgacacttttgccacttatcctggttctagtaaggctataattagtctatcacattaactttgtcattgagttttgtttctaaaattgcatagttaattcatttttgctctgcaggttctgattgccattttattatgccc

SEQ ID NO: 87274 - DNA, 193 bp, Glycine max
tctcgagccggaaacttttctcttctctttgattcttctctaccagtgtcaccttccctcgatgtgtaacatcaggcgagatcgcggtttcttcattttctaaactttccctctcgttttgattcttcaatcatttcaggtaacaacatccttcgatctatgcttctttgcttcccaaagacattagggttat

SEQ ID NO: 87275 - DNA, 190 bp, Glycine max
gcatcatatcattggacgtgtaatagcactccacaacttgattaacaacaaggtgagatacactcccctaaattttgctgcatgtatcattgatgtttgctgattactttatattttggatttgttatcatattatgaaaataacagttttgcaaggttggagaaaaaaacttaatcctccatttgtata

SEQ ID NO: 87276 - DNA, 193 bp, Glycine max
  unsure (1)..(193): unsure at all n locations
cattgttatccttccttgctatcttatggcctggatgattcgcataatatagncatcttgngaaagacaagttactaccctgtgcttattctaatattgaagtatttgtattgttttcatttcattttttcctttttcatattttgattaatcatatgatgccgtttggtaggccacttaagatgataagatt

SEQ ID NO: 87277 - DNA, 190 bp, Glycine max
  unsure (1)..(190): unsure at all n locations
cggctcgagctcgagccgaatcggctcgagaaagttccgtgcttttgtttgtaactgctgaagcagtctgactgntctgattctctgggtgctctcatgacgatttgtccaccaacaggttaattgcacaaattgacacttcggttattaactttattaccatttcatgtcacaattcagaaacagatcc

SEQ ID NO: 87278 - DNA, 187 bp, Glycine max
agtctttgcattccaaatggccactgttctggttgcacaacaaacaccaacaactgtgctagtgattaagaaacgaggtaaccaagattgaggtaactatcccagaacaaccagcttcccaggttactaccaccgaagaaccaaaggtagaaaccagcatagaagcaaaagaggtagaagaagcccc

SEQ ID NO: 87279 - DNA, 190 bp, Glycine max
ctcgagccgttatcccctttctccttctaacgagtgaggcaaacatggagcgtaagcagatcagagtgtatgactcaccgaggttgttgcaggagcactttaagagactatatggcaaggagttgcagatacaagtctgcacaagttaccgcctcaactgctttctctgagctacaagagaaggaaacct

SEQ ID NO: 87280 - DNA, 136 bp, Glycine max
agtacgatgctggctctgaagctgggttccaaatgtgattgtgactgcagtatactgagtcttcaaaatgatgaccacagggaaagcttgatatgaagctatcaacatcagggttgggtcaaccgggacatgaatg

SEQ ID NO: 87281 - DNA, 188 bp, Glycine max
cactttcaccaccataaaaacatgggcagaatattcttcgtcagtggcagctagtcatagcatgggcacagtcgtcgaggtatagtagcttattactacttcgcctggtactcatgcccctggagaacatgtcgtatacgttaatgttatccctgcgttttctgtgctcacctggtgtaaaaagtttg

SEQ ID NO: 87282 - DNA, 191 bp, Glycine max
ttcgtgtagtacgtgtacttggcgctgctgctcggagcatgcggcacggtactcggcgctggtgaactcgcgatcaccctttttcgaaggtatcccttcatagcattgttgtcaggcttggcactatacatagtgctccgtattgtttcaattctgcagaatattatgtccatcaccattataactagttt

SEQ ID NO: 87283 - DNA, 183 bp, Glycine max
ttttggccttggtgttgagtactacttgcagtacacacttgtgttggttgttctatcaggagtgctggttcttgcaatgtatcatttgttgattcaaaggttcaagcttgagtattttcgtcgagtgacggctgttgggtattcctgtgttgtttttgggtggatgacaatcctttctgtgaa

SEQ ID NO: 87284 - DNA, 183 bp, Glycine max
atcacgtatgggtctggacctttcaacagggctcctcagaaacatctttgctgctggagccagtcaaccgccatctgcatagtactaataattcaatttccaactgaagctaccattactatccttcgaaatccttacatgttcaagcttatccaggatgatcgtccaaatgctgattaaagt

SEQ ID NO: 87285 - DNA, 185 bp, Glycine max
tagtatttggcggttaaacgtcttcatctgttctcttctctgcatctgacacatgccacattttcaaggagcacagattgaaaaaggatataggatgggcccacttctatcatcttgaaaaaagcaccaagatgccctggttgtctaataaccattcagcagacgatgcccttcttcttgctatt

SEQ ID NO: 87286 - DNA, 273 bp, Glycine max
tcaaaatgagccttgctagctagaggtccggccctgcttccaggaaacatcaaaggtggagatttcaaaatttttaaccacattattgcataaatttccttaagagattcagtctaaatgatatatgttcatagcctcatcactcatgtatagcatgacattgtactgaaggataatgcatttattgcttggtagatcaaattacccttacagtactttcttcgtcttttttttatttgttgaagttgttgacagcaaggtccaactacctat

SEQ ID NO: 87287 - DNA, 269 bp, Glycine max
cttcaaacaactggaatatttactgtgtcactgtttcaagccttgaatagcctcaagaattccttgagaatgagtgactcgtgacaagtagtccattcagataaaatgaaaaacatctcaagctatatattagacatatacatcacaaacttcatttactatgtatgaaagacctagagagaactggcatagtttaagggctttatttagtttcttcttttattcaatatatttattatcaggtatgtgtacatctaagagagagatat

SEQ ID NO: 87288 - DNA, 262 bp, Glycine max
  unsure (1)..(262): unsure at all n locations
cataggtctggacagtcctcttctaggcaccatgcatcacggacggaagcaacacctttgcacnttgtggatcggccccagtctaaaattgatccagaagaaattagagctcgagcaaaacaagctgcacaagatcagcagcgtatgaaggttggcgttttattttttaagttctgacatttatgattgttttaatcctgttttgtggctctttaagcacaatatattgtgcaaatggcttttaactgaatgatttttttga

SEQ ID NO: 87289 - DNA, 267 bp, Glycine max
cggctcgagggagcatttaaagatggcaatcaaatagatccagccatcagaagttcactcctacccaaagctgtcaacaaaatttcaaagggcagtccactgctgtgatataaaggatgaattcaatgatatgcagtgcgacagtagatctactcagttcaacatttggaagttcataaaatcttgcacatcgttcctctatcagattccatttgtcatctttaatttgagaactgctcaaagtagttaaccacagtcctcagagaa

SEQ ID NO: 87290 - DNA, 266 bp, Glycine max
ccaatgcaaattttagggacatagacgtggagaaagcccggtttggttcccattggttagatagttggatggaagaaaattcatggagacaaactagagatgcttcattaaaaattggacgccttgatgatgagaagagtgacaagattcttgaagtggatacttggaagccacacttgaactcacaccatagtagtggcagctcatatcagacatcatcacatcattacttgtattctgattacaacaatgagaattttgtggca

SEQ ID NO: 87291 - DNA, 265 bp, Glycine max
cctcgagcgctcgagccgtctcgagaggggaaagagagacagacagagagagagtgtttcggtgtcacaccgccaacccagaaagtagcaaatgccaaatggtagtgcggtattagcattgtagcgtagtgttagagagagaaagagaagaaagaaaacaggcactaccgtcaccacaaccaactaggcctcggtcggaaagttgctacaaaaaagctctctataattgaccctcgtgaagatgaagcttcttttcttctccaga

SEQ ID NO: 87292 - DNA, 272 bp, Glycine max
gtccaaagcttctctctcttccatttcccacctataaaactagatggaaaaaatacacactgtgcttctcatgatgatagtgtagctgaagctccttctgcagcagcatttatgatttggacacaaaaaagttccatacttttcagttctctgagtttctgtctttgtagctgaggtatggaaataatttcatctggcttcataaacacagcatctttcaaggacagtatggtacttatcaattttgaaggagttcaatactttgccctatt

SEQ ID NO: 87293 - DNA, 186 bp, Glycine max
ttaacatagctatcagctactcaaaacttaagcatggtctccattcttcaattgctgatgtttgcttttacaatgatgttcacgttcatgggagagcgagcaatagctgggggtatatttcgaaccagtctatgggctcttgcccatgtcaccttttatggtgatgcgactgcttctgccactatg

SEQ ID NO: 87294 - DNA, 126 bp, Glycine max
ggacatctagatttctcagagttccaggtggttgtcatgtcggaggttattatctgagaaaccgatttcaatggacagatactattggaccatgggaggagagacctgtgcaccttggagatgcat

SEQ ID NO: 87295 - DNA, 272 bp, Glycine max
ttcgtctcgttaggtggagttggcattgtcaatatggtacacaagatccagaatcatgaatatatgggatttgaggatctttgcaaatacgggtcatagcacatattggaagattatttttttcgtatttacattactattcaaggtccctaccaaagccaagaaccgaggtcgccaaaattgacttcaattacgtgtcatggcttcaatcgtgttagttaggtgtcatttattgtattgtttgttgccaagtcatggagtgattccgtggg

SEQ ID NO: 87296 - DNA, 261 bp, Glycine max
gctaatccttttagctcttgatgaagcaaaaagcagcagaaaaagaccaaagaatctacaataatttcttgatcccccttattataatagcctttgagcattgaaagttttcctcaaattgccatgatttgattcgtcaacaccccccctcccacagacacacacacacaaagttaaaatgggttttactaggaaaccaatgctgtttccttttttgccggttttgttcataactattcttcttgagacaccccatgttgc

SEQ ID NO: 87297 - DNA, 270 bp, Glycine max
gacaaatgcaaaaacaaaaaaacactgttttctttctctcaagactttcatatctcagctaagaacaccagaaagaaagagaactacaaggagaagaaaaacaagaaggggacggctttgaagatgggaatcacaaaccccgtcaaagaccaatccctctccctcatcaagagactgcttccttggaccctctatgctcttcttcccatagttttacttcgcttgtacttctaccctctaccctaccctccatctccagaaactgagctt

SEQ ID NO: 87298 - DNA, 258 bp, Glycine max
gggtgataaagcgggtcaacccgcctcctctgcctaaagcaaggtgggatgagttaacccatcatgaaagtaggtaacaaaagactcttcctgtttagatttttttttgtcaacaaatgttagatgttatttttagttttttattagcgggagaaccgaatctgagattttttttttcttttattctctttttatcacccaactaaccttataattccatactcaccccgtttagatgatgagaaatgaattagattt

SEQ ID NO: 87299 - DNA, 262 bp, Glycine max
gtccagatagaaaaatattgcttgatcgaagtccaggagtcgatgagttatacattgaaggatatatccaagccatgcttgatacagtttatagacaagaataccttagagtgagagttattgacaatcaggtatcctgaaaaacctacctccaaatcattctcttatcaatgagataacgggtcgtgttaaggagttccttgtgagcaaggcattgctaaaaggagatccctcaaccacatcgcgccctttaagccgtctt

SEQ ID NO: 87300 - DNA, 260 bp, Glycine max
gatgctgcaagaagaaagtagtgaacctgacacatgtgagtggggaaatgctgagaatcctcctgccatgatataccaaaaaaatgcacccaaaggtttgaaaagactcctgaaatttgctcggaagagcagggcgatacaggttccactggctggtctagcccatctgttttttctgaaggagaggatgatgttgaggaatttaaaaattctaataaaaggaatgctgataatctactgagaaaggccgcacaaaatgt

SEQ ID NO: 87301 - DNA, 178 bp, Glycine max
gtgggtgccgagatttttgagtatgtaactatcaagtcgctctttaagagatttggcgatttactatctacaaatggggtttggaatatgcagcttcatatagaaaaactgaagggtgattggtggggactttttttctttttcctgattgtacgatgacttaaatatatttattgaa

SEQ ID NO: 87302 - DNA, 109 bp, Glycine max
cggctcgaggtaatctgagagagaaacaaacacaatgaacgtttccactgccaagttccactcacttcacctatgagtttcccttctcatggccttcaacacaaaaccc

SEQ ID NO: 87303 - DNA, 111 bp, Glycine max
cacgcagaacaatgacagtgagagatggatcactttttgtcgacggtgtacgcttagcttacaatccttgtttactttggagcattcttctacttgcaggattcttacaca

SEQ ID NO: 87304 - DNA, 192 bp, Glycine max
ctcgagccgctcgagccgtgctactgaagacggccaaaaggttgctcagaactgaacgacacactttccagactgtattcagacgcattgtaccatatgatcaagcatcctagacttctgctgactaatctagtgtgctgcaaattacacaacaacacacaggcgcacagcctcgccgcctaggcattggct

SEQ ID NO: 87305 - DNA, 275 bp, Glycine max
ctttttcctgcacgacaggatccaactctgccgcttctccctctccaatttcttcactctctctctttctctctccttatttccaattcatcacaccctatctttctctctcaagtcccattcatggaaatggaagatcatcagcatcagcaccaccatcatcacttcggcatgaacgatctaaggcaagtggtgaataacgggccgaggccggcccataccaccttcccctccatgccgccgcacaccacggaggagcttttccccggccacca

SEQ ID NO: 87306 - DNA, 277 bp, Glycine max
tgagtctcacaatgtcataatcgtaggaaaaagaagcaaagaaggaagcttttagaaaatatctggaaacaagtggagctgtcgacgctctcaccaaaggtgatattttgcttttcaaataaattgctaaatctaacactcaaagtgatattcctttgttgccgttgttgctgaagttctggtttctttgtacgagcaaaacgacaagccttcttctgccgtcgagttcattcaacagaaattaagctgtccttccatctcagaatatgaaaagttg

SEQ ID NO: 87307 - DNA, 250 bp, Glycine max
gcggttgcgaaattcctccggcggttccatttccgactccgccccgtaattctggcacgaattttcgcgtaatcgacgacgatgatgtcgaagaaggagaaattttcgaagacgacgacgatgtcgcgaaacagcacgcgcaatctgaagctgagcctggcgaaattgacccgaccggagatcgaggtgttcgatccgataacaaaaatctggtatagccgattcaaacttcgtggaatttgtgtattga

SEQ ID NO: 87308 - DNA, 145 bp, Glycine max
ctcgagccgcttcccctctcgctgcgtggcttgttcgccttggtggtttctactgagtcacacactcggtgagtgagcgagtgaactcaatggcttcttcctcgcgcgcaacgagtagctcaccgttttcttaccgaaaaccttc

SEQ ID NO: 87309 - DNA, 262 bp, Glycine max
aatcgagtgtgactgtagggcttcactgctgcctcagtatcccgctgcagaaatgagcaaatctgtccatggcttgttcagaacctgatgcttgcacagttagtggagcgcctgatcttgtaagggacattgaccttgcagaaaccagggagtgcctgagcatactggtcattgatgttgtacctagcagcatccgccttgagacagttgcagcaatcctatctgaatcattcatcatcttcttaaaagttaaaaaggccaa

SEQ ID NO: 87310 - DNA, 198 bp, Glycine max
tcgcgtcgcttacaacccgatgatctctaccacttcgcacttggctactgacatatcgcaagcctctggcaatgatgtctatgttgcacaccttttagagcctaagagcccctcaggctaacaggacaagccaatttgcagagtcaccaaggatgacctagtctccactcgctacgaagctcgccacaagattcccat

SEQ ID NO: 87311 - DNA, 244 bp, Glycine max
gcaaggcaaactgacaatgacaaagagtggagataatgtctctcctaaatgatgcaatcagagcacaaaaaccaaaaccatccctctgttgctgcatagatattgatgccatttccttgtgtatattgtgagggtgtggaatgtaattctttttctcactattttttctagtttctcttatccctgagaccgtgcattcaaagatttggaacaaatcatctagtaagtcaccaaatcgtgtaca

SEQ ID NO: 87312 - DNA, 140 bp, Glycine max
ctcggttttctagttattcgttttcttgtcattttccagtaaaaaaaataactccgggaaagaagaagtgaaaacagaagcgagatgaggtttttcttagagttcgtgtcttgttgcggcctgccgacgcagcgttcgcc

SEQ ID NO: 87313 - DNA, 217 bp, Glycine max
gtccgctgcaaggatagcaacaggcatcatgctcaggaggctcatcgacgtgccaagttcaagttccctaggtcgtcgacaagttatagttaggaggtaccttgggctgcatccgttgagccgtactgattatctcaatttcaagttagcggaatagcgttgtgctcgatggtgtagctacaaagcttactggggtaccattgatctctggtagctc

SEQ ID NO: 87314 - DNA, 258 bp, Glycine max
ctcccacaatgggatagtcatcttggttcgtatgatctatggaactatcataagattgcctacaccagattatcatttgaaaaaatgttctttcctgttatgtagatccagttcagccccctccccgaacacacatttctctctcctttccatctatttttttctcctcaaatcgtcaagcttctttggtgccatcttcctctaccaacaactacaccaaaacccactcacacaaaccaaatccaaagtcgacccact

SEQ ID NO: 87315 - DNA, 233 bp, Glycine max
ggctcgagctcagcgtgaaactcttggcacaggtggaccaaccgacaagccttattgacaactatgcaaccaaattgagctttgtgctttctcgcaaagcagctagtctcgtgggtcttcaagctcgtcttgcaagattccaacatcgactaaaagagcaagaaattctaagtagaaaaagagttccccgtcaataagagactcggtttctcttattcaacgtcatctgtatt

SEQ ID NO: 87316 - DNA, 219 bp, Glycine max
ctcgcttcttccttctctcttgaagaaaatgcagatcttcgtcaagactttgaccgcgaaaaacctgtgccttgctgtctagatgagcgagtttagttcgtcagtgttcagatgaaaccctggagcagtgtgtatcttagatgagcagagggagatgaagtggtttcgtagagtagttgcagattgtcatcaatctgttgcatcttacttaactcgcgt

SEQ ID NO: 87317 - DNA, 251 bp, Glycine max
cggccttctgccaggtatctaccaatccccatcgaccagcacgacgatgctgcgagtggccatctgcacgagcccttcattcaaccagaggatcccgctgtgtgcttgcatcgagtatggatcagattatagtgtgaaaaatggacccagtgtaatggcgctgcttatgactcttgttgcagtgtgtggtgctttcacagctggaacttgtgtgggctattcagcacgcactcaagcggctatcagggtag

SEQ ID NO: 87318 - DNA, 254 bp, Glycine max
cctcgagccgaatccgctcgagccgctcgagcggctcgagcatcaaaccaagttgaggcattcaaaatcaggctgtcaattacaccattgggctgagtgttcaacacatggcgcttgcaaatgcagccttcttgggggtgttgagtgtattgctagcataacatgtagtaatggaggatggtactgcacctgcactacccttttctgatctcgaggaacctggagctaccattgataatctttggcggcagtgg

SEQ ID NO: 87319 - DNA, 252 bp, Glycine max
gccgctttgtacctggagctgcacatagccgtgtaagtgtccaccccatgatccactgctctttcaagatcatctactatactatcagtacttcctcgtaaaacaacagtggatgatggagtgaacacttacaaggcaatgtgcagggatagccgctttgtacctggagctgcagctactgacattgagttagctataagggtgaaagacttttccttcaaggacacatcgttggatcagtatgctattgca

SEQ ID NO: 87320 - DNA, 227 bp, Glycine max
gctctgaagccggctcgagaaagtaatataatctatagaaagcagaaatggcatccaagaaataagaatcatcacacgacgacccacagatccacgagccaatggccacagagatagggagacgaacagacgagcttggactttccaaaatgtcgctgtcgtatcgcgtttagaacaggtgcatacatgctcgagaaagccacccgagagactatcccgcgagagga

SEQ ID NO: 87321 - DNA, 262 bp, Glycine max
actcgagaagaattggaattgagaagatggtgttagaggaagatgtacctgaggatgggaatgagactatgtatcactggagatggagccacgggagaaactgtatatgatgttgaggaattggtgagatgagaaggaagggatctttgtgactagaagtggtggaacagtgactgttggtatgatgaatatggtcgcactctaggtggttgttgtatatgatagggatgatcaatttgattggtcttgaagttagggggag

SEQ ID NO: 87322 - DNA, 279 bp, Glycine max
  unsure (1)..(279): unsure at all n locations
agaatcggaatgcgggtcgagagggcactggaagttattccccaaagctcgatcagcagcaagcacttgcaaagtttgtgctaagtgttcagttcagagcgactgagcttcacaaaataaaaaaaagggtaggacttggaaatattctaccntccccggggatttaattcggggtgggaacctgtcaggtgtacgattttcccaaaatgagtgggttttaagcttgtggtaaattagggtatagggtattttcgggtgagaattttttgcgtgtccaat

SEQ ID NO: 87323 - DNA, 142 bp, Glycine max
acacgcgacaacctaagcctagacctgaatttgaattgctagcatggctagttgcaactcatatacaggtctcaggcttaggttgggtccttttggaattttattgcgagcttggcgaactccatctaataaatgtcttatt

SEQ ID NO: 87324 - DNA, 256 bp, Glycine max
tccaactctcatcttctctgttccacaaccttaactttccccattctgagaaaggtgctgaatcttctacttctaccatttcccatcttctgaactttcaaaatcgccatttcttcttctttccgtgtttagttgcactgttccgctagtggctcgtttcatcattgcataatattttgaatttgactgctaaggaaagcccccatttttctgagttgtacagtggcttatattttttgagctgaaagtatatctg

SEQ ID NO: 87325 - DNA, 260 bp, Glycine max
caaggatctaaatctgaggaacatagtttcttgtccaaaactttaggaagcaacagggttctacacatggagccacagatggacaacactttgatgccaaccggtggagttgcctcattctctacattgagatcaataataattccatgttgcagggtgattatctgcagccttctttcttatctagtgaatatgcctcggcagaaactgtgaagcaagagggtcagtcccttcgaccgttctttgatgaatggcctaaa

SEQ ID NO: 87326 - DNA, 270 bp, Glycine max
gttcgccaaagtgaagaaggtgctgagttctttttagagtcaaacatcccttccatatgtaaatacaggattcgtgcacatgaaggtggttgtgattccatgttgttttcatacaattccagtaaattgattactgggggacaatatcggttagttaaaatgtgggatgcaaatacaggatccttaagttctgatcttcagggctgccttgggtcagtattgggattcacaatcaaccatgataatcgagctgtcaattgtggaagcaac

SEQ ID NO: 87327 - DNA, 231 bp, Glycine max
tgagaatggccttgccagtcgtcgtcgacgcagagtagctcaaagaggtcgacaatgctcgtcgcgatctagcggcaattcatcgcttaacagaaattgggctcctctcatgcttcgattcgccttgacacgatgccggaacttacggtgctaggaccaagaactggttggacctcagcggttccgatccgttaacgggggaagagtattctcacggcgccaacaatggct

SEQ ID NO: 87328 - DNA, 264 bp, Glycine max
cctctctcctccctctccttcacttgaacaattccttcttcttttccccctcaattttctctcttcttcaattttagccctacacacaacataaactccaacaacaaacacctaaccattcactcagtcacacatttctctctcagttttagcaacagtttgatgaagtcgtcacaaaaagcaacggttttggcttaattattagtattattgttgttattattattacaaggatggagataataacacccacagcaacagcca

SEQ ID NO: 87329 - DNA, 267 bp, Glycine max
ccctcgagccgaatcggctcgagcaaagtatttgtcttccgagcaactagcattcccacttaacttctattccttacttagttctaatcaaattaatttgagtttgtaaccccgtggccttatccaattgatatttttgagttttgtattacttccacttgatttgagatgctgagtctgctacatcttcaatctcagccttcgctcgtcgcaatgggaaccgcagcagcaaaaggggaagatgtggtggtgaaggtgccccctgga

SEQ ID NO: 87330 - DNA, 267 bp, Glycine max
ggccgccctttttttttttttttagtcatatgacccaaaattaatattataatctttggcctgaataaatctccctcgaaaagggggttcaacatgcaaaaccaggattttgaacttaaactcaacagtgtcatacttgaaacgatgtaagatgcagagacaggctgataccagaggccatgggacatagaaaaagacctggcttattttaaaccaaaaagcttttggcaagaagaagcgcaccaggggggcttttttcccccttcg

SEQ ID NO: 87331 - DNA, 249 bp, Glycine max
  unsure (1)..(249): unsure at all n locations
cacgcgcacaaacatgatcaccagngagccacaacaacccactttggtttgtggtgttcttgtttccctcttaggctccttttggtgaacttcagagtgcaaagttggttggttggtgggttggtgtggttgcttcattttctcggtgcattttggttgctccctttttgccatggctggtggacggagccaacagaggctcaacaagtcatgcattctccccatggccattgcaggaatagaagggtt

SEQ ID NO: 87332 - DNA, 260 bp, Glycine max
ttcgactgttagatacacataaagatccagccctacgacctgctgaagttgataagttatcttgtactgcaccagaaagtccatgggatgatgctctatataaggatgctgctgagagaactaacatgggttacatatctcttaatggattcctggcgcagtgggtccttatgacattacttgatccaccatgtagcctggctaatttgatttacattggatatagtggtaatccagctgctgctcttcgtgttacccgt

SEQ ID NO: 87333 - DNA, 234 bp, Glycine max
ccaaaaaatattttttcaaggggaactgttaccagcaatttattcacaatatataaatattattctaaacatttgcgggccctataaatttattaatatatcttcatcctagaaaatagaaatctgctttgttggttttctaaaaactactacttgtcacggccattaaaggttcgccaaagtgactcttaaatcttcaatccagatggcagatgctataataggaaatatttg

SEQ ID NO: 87334 - DNA, 256 bp, Glycine max
gataaaagttctgccaaatcaagaggggttttaagatcatagtgtgtgttttgcaacaatggctaagttctttgctgctatgatcttggcactctttgccatttccatacttcaaacagtggtaatggctgctaatgaacaaggaggccacttgtatgacaacaagagcaaatatggaagtggaagtgtcaagagttaccaatgcccatcacaatgctcgaggagatgtagccagacccaataccacaagccctgc

SEQ ID NO: 87335 - DNA, 259 bp, Glycine max
aattgagcttattgatgaagccattcgttgcttgaaatcattgaaactcaaggccatagaacttggacttgatgctactatataagttttggataattggaaatcagcataattttatcacttatttagtacgttatctttgtgtttttgggttgtagaataaacataggctattaagggtgttgtggtagtggtgagtgtgaatgaatgtgaaatgaatcccttgaagcccttcaattattaagttggaagaagatag

SEQ ID NO: 87336 - DNA, 268 bp, Glycine max
ctttggttgagtctctggtgactgactttgaaggtttgaacggacagttctggactagtgcaaggaggtccattttgtctgctggttgggtcagatcctcatatgggaatgttactaccagttttgtccaagattttgttttcaacaattcaatggtgatgggaaagaatgggaatcagcaaattgtgaatcaagtgattcttttcaatgacagtgttcatgctaaccttccatcaccctttgttgaggacacatacagaaaattttc

SEQ ID NO: 87337 - DNA, 272 bp, Glycine max
ctctgtgtgttacaaagtaaaatacttaccttggctccttctctgcattctgtgctacattggctgtggattcttgttcataaaaggaagctcatcttaagcattgtggcagacctgagtgagcattttttgagtggaaaatatgagctacagtggctcctcaatgagttctggtagtggatcttctagaaggacatttgagtttggaaggacccatgtggtcagacctaaagggaaacaccaggcaactatagtttggctacatggccttg

SEQ ID NO: 87338 - DNA, 267 bp, Glycine max
cagctttcggtaattcccttttctctctatttttccttttttccccctatttatgtgaggttcatgtttcaagttcccgtgcagtgggaccaacacagtacataataagcgatccaattggccaaaacctttgtcactgcgctcaaaatctgttcttgctgttgctggggctgaccctttggaaatggcagaggattggaaccgcacagcccttcttgtgatcgacatgcagaaagattttatagaagatgggggtcccatgctagt

SEQ ID NO: 87339 - DNA, 295 bp, Glycine max
acaaaactcactattaaaattatgtgttatacatgcatgatctttttaatatatttttatgactttcataataaatatttttttcttttagtttcttaattagtgatatcctaaaatactgttatcatcaagatccaaaaaaatatatcccatatcatacatgcacgttgcaatcaaagatcatagtgtgatatatatagctttggcattcagtgcattattaactttaaattcttctacataattttaatagtgagttttgtgcttttgtggccgtgacattaacaggtcataa

SEQ ID NO: 87340 - DNA, 191 bp, Glycine max
gccaacaccaccagagatgacattagcattgtcccaattccccgctcttgaagtatatgcaaaactcggtgggaacgcaagacatggcgtagtgctgagttcataaagacaacaacaaacacttcaccaaataatattcagctcccactttcctagttcctttccccttgtactcaatcaatcacacccct

SEQ ID NO: 87341 - DNA, 285 bp, Glycine max
cgaacttggtggccactgtatataaataagttgtttattttattcgttcatgcagttcagttccacaacacaatcattttgtatatgatcaaattaagtgatggggggcatctgttctaggaagagagatgagcatgagcatgttgtggaagatgaattacacagaggagtctcggggaggtattgtaggagtggcagcacaaaatggatgaaggccagaagtttacgtgctaagcccaatcattgtgccggagggggaacatgcccctccctcatggatttgtg

SEQ ID NO: 87342 - DNA, 124 bp, Glycine max
cacaaactcaacagatcgaaaatccataatgttgttgcgtaagaacaataaaaatctcccatttgtgtgttcttctcttcaggcacaccaacaaaacctctctctcatcggaatctccagaaag

SEQ ID NO: 87343 - DNA, 189 bp, Glycine max
accatttctcttcacaattatccctttttccactctgacgccatttcattattcattcatataaattaggctctctcatcttccattccaattactattagattctgctctccgttattttttctctcttcttcacttcctctttactattcgttcgttctggatccagttgagggaccaaaagtgtgt

SEQ ID NO: 87344 - DNA, 285 bp, Glycine max
cactcgagccgattcggctcgagggctgattgtgtgtcacagcaacagttgagggattatgtacgcctaaatgcatgccttgactaataagctcaataccccaaatcctgattgcattaatggcttgtgatctgcatgtcagcgatcatatggtaacaccaggcattaaagttttgaaggttaagtgtatttggaaagtgtaagtttacatgatcatggaatatggctacattagagtactaggcaaaatgctatttttgtttggagtttcagaaggttttctga

SEQ ID NO: 87345 - DNA, 281 bp, Glycine max
ctcgagccattgatttggaggcaagtaaattcactgcacggatcttaggtgatgatctagagcccttgcaatcccctaaccaatcaaaggatttgactagcgaaggtgcattgaaagaggacttggaatccaaggcagagttgtgaacatgatagacaaaagttttgtgcaagtcaaagttcctgaaaaaaaaaactgttccttgatgcaatttggcaccgcatagcatcatgatatctttctgatcatggactgcctggctgatatatttgcattcccac

SEQ ID NO: 87346 - DNA, 276 bp, Glycine max
gttcaaagtctgctttccaagtctatgacagcatcatagtgtcttccacgtcaccatttccatataacctatacctcacagccacacttacccttgaagattttctccgaccatcgggactattacatatgcctgccttcagattgtgatcacaggtcttggagcagccttaatagataaagctggcaggaagccccttcttctattatccggatcgggattggtcgcaggatgcacatttgtagcagttgcattctatctcaaggttcacgaggt

SEQ ID NO: 87347 - DNA, 276 bp, Glycine max
  unsure (1)..(276): unsure at all n locations
taanggaatagtcgagagtgtagtcatactcacgaatttgaacgcaatcctcagtcagaaacaggtacagaagaagagtgctctccttaggattcagacggttaaacctaataataatcataggaaccgcgagaatcgtcaggttgagcagttgcggtacccgggttatggttctgagaatggaaatggtttttacagggggaaggagcagtattttggtcatggggtgaagggggaagagagagaggagagccctgttgagattgatatttcttt

SEQ ID NO: 87348 - DNA, 106 bp, Glycine max
gcacccgtctaatacactgcaacaggaatccgtagagagattctcactctagaattacgtttactaatttttctacgtttaaacgcggaatccacacaacatacgg

SEQ ID NO: 87349 - DNA, 250 bp, Glycine max
gggtacaataattttctattcttgttttatatcaaggggtggtcgacttaaaagtagtacaagcttaattccccccaagtaagatcttgaatttgatctgtatgggaaaaaaaatataggacgagctagtcccaccatactgtgaatgttctgatctcgtataggattttctcccctatggataatacctacagtctaggaaaaaaatgcagagacatttgctacttagctactatcattttgagggaag

SEQ ID NO: 87350 - DNA, 158 bp, Glycine max
ccctctgtaatcagcagtaccaccaacaccaatggttgatgctggtagtggtagagagtttttcagatcatagacaacaaaacacaaaacaccgtagaagagaatctaaacggtttaaccttgttctttttaaaatatttccctccattccacacaac

SEQ ID NO: 87351 - DNA, 264 bp, Glycine max
gggactttcaatcactatgtgattgttaagttcaaggatggtgtggctgttgatgaactcattcaagggttggagaagatggtctcggggattgaccatgtcaagtccttcgaatggggaaaggacattgaaagtcatgatatgctaagacaaggtttcactcatgttttcttgatggcattcaatgggaaggaggagttgtcttaggggtggtttctttttggctccagctattgttattttgtaattttcagatgggttagg

SEQ ID NO: 87352 - DNA, 174 bp, Glycine max
gggcgcaggagctccggcggtctcctccgacgtgctgcgtcggtggagcggcgctagtgacatgagcatcgacggcagcggccagaagaaagactttgacagctccttacccccgccagcatcctctgtttctgaaaccaagtccgttgtcgtttctgaagataaggttcgaat

SEQ ID NO: 87353 - DNA, 267 bp, Glycine max
cgctgggctggcaaaccttacaagtttaactggcctcactgacctagatttgtttggtgcacgaatcacagattttgggacaaactatttgaaaaaatttaagaacctgaggtccttggaaatatgcggtggagtattgactgatgctggtgtgaaaaatatcaaagagctttcttctctagtgtgcttaaatttatctcaaaacagcaaccttacagacaaaaccctggagttaatttctgggcttactgggttggtttctttgaa

SEQ ID NO: 87354 - DNA, 141 bp, Glycine max
tgcaatttaacggttttgatcatttaagaattgcggttctatcggtgttgaattgggaacagagtttacatattattcattgctgtttcagtctttaaaattgtattatgtttctttcaacaatctcgaataatttacctt

SEQ ID NO: 87355 - DNA, 271 bp, Glycine max
  unsure (1)..(271): unsure at all n locations
cgagcaatttgagctcagtgcttgcttcctactgtatttgactaaattctcatgttattcttttgtcaaattcctaaagagcttttcngttcgtcaaattggtcaaactcctaaagagcttttcgattttgcatttttcgattagagttgacttgaacaattccatctgattattgacatatcacttctttctttattatgctctatttatccccttgtaactgtgagtttagataggtcatagccttgatattgatacaccaaaaagaaa

SEQ ID NO: 87356 - DNA, 277 bp, Glycine max
aaggggtcaaaaacttttcacaaattactccttcacaagtggagaactataaagatatatagaattctaattccaaagcagaatcaaacaacaagcaagtgatgggtctgggaagattgatggtgactctgaaatctaagataaggtctttgaagattatgaagaagcctgattatgataaggtggagaagagtgagagcatgagaatggagattaggagcaggaaggccagaaagctcattgaagagaccctcaaagtggctgattcaccaaagtc

SEQ ID NO: 87357 - DNA, 255 bp, Glycine max
gatgacattacatgttgccatttcttatgaaaacttttcagttttgattctttaattagtgttgttaagtgtccttagggaactacttatcattctccttagtaataaagcacttttaaagatagaaaatatgctccaaaatcgttcccatttcaactcttgtagtgttattcacaactcactaaatctctttttccatcttcaggactggacttagaatggaattatggaaatgaatccttaccagaggcttca

SEQ ID NO: 87358 - DNA, 250 bp, Glycine max
gttcttcgacactttattcagtacattattaatttttttagaaccagaattagtttattgcactatttttttagtcatcctcaatagcagataacagaaacttatcaattgaattgcaaattgaactcgaaccacaagtgaaaccttgaaaataggaaaggtcaaatagaagatattggggttggctgtttgctggggttctcaacaagaatttccagcaagggaaaaactaacttctaaaaatcccttt

SEQ ID NO: 87359 - DNA, 136 bp, Glycine max
tgctgctctaccgtggatgagaacacttgatctgtggctgtaaatgtaaatcttcattttattcattgatgtgccactctccagaaatatgtctgtagtcatgacaataaactaacggaagctcttcgtgggttaa

SEQ ID NO: 87360 - DNA, 228 bp, Glycine max
cggggatcgacccaagatcaagttcttctagcatttaggatgcagcctcagtgtatgttgtcatcccgtgataaaattcatgcagtgatgagtttttgggtagaacaggtgggtttcaattctgcagagattgtcaaagctccaggaatttttctatttagtctccagaagcggattgctccaagggctttagttgtgcagtttcttatctcaaaaagtctgctacaa

SEQ ID NO: 87361 - DNA, 257 bp, Glycine max
ctgacattcacgtcaaggcataaatacgttcatacttgcattaatctctaggactgctcattaggtagttttttatttagaggctaacatgagctttgctgcgccatcacttggttctgctggtggtagatctgctagaagagcatttgagtttgggagaacctatgttgtcaggcctaaaggtaaacaccaagcaactatagtctggttgcatggcctcggggatcatggctccagttggtcccagctattagaga

SEQ ID NO: 87362 - DNA, 258 bp, Glycine max
agaccacacaagaataaacagacaacccaacccttttggccttttttttttaaacacaaacaatagaatggaacctgtaggagccttccctgatggagaatgggattgctttcgccgaatttttgcgagtgatgaggagcatgagcatgatttattcacacctcaatttccacttctgtttgatggtgatgatggattgaacattgtgacacaacacacattttgtgctgctcctgaagccggtgaaaatgcgtgtat

SEQ ID NO: 87363 - DNA, 251 bp, Glycine max
  unsure (1)..(251): unsure at all n locations
ctcgatccttcttaatcttaatgtgcataaatagatttagggatctgcatatgtantgttgctcaaacttaagtttttcgctagcttgcagtaaccccaatacatatatatatctggcaagtttcatcttcatggaatgtatctagtaaagtaaagtaaaaaaatgtcagtgaaacccatcacaatgtgcatagcaagagaaaaacactttttctttgtaaaattatctcttaacaatatttttataatgt

SEQ ID NO: 87364 - DNA, 257 bp, Glycine max
gtttaatgttaatgtcatgtattttgatcattttgcacgagggcttatcataagtaatagtacagtacttttttggattgtcattttattgttatgaaatatgactaattttgcttattttaagtcaaagaacctaataatatgaattgtaattggttgacctaataaaaagatagtgcacgaaaattaaacacttcaaatttatcatagaacatatatagttttttttgtgtgacccttagtatctaaaagttatt

SEQ ID NO: 87365 - DNA, 250 bp, Glycine max
gtttttatatgatctagcctccaaagtgtctgattgcaaatgctctaatttgcaatcagacactttggaggtagatatgatattctgatggtggtcagttcttacatagttggacatttttgaatgaatggttaaatgaggtagtgagagaacaaattaatttcttgacggcatagcctaaacagttgtttctggttctcactggacggaatgtatcttttagctagcaaaagtatatttcttaattacc

SEQ ID NO: 87366 - DNA, 215 bp, Glycine max
tgggtcgtcaagatagtccgtgctcagagttctgtgggttcgtccatccggtgatagtgtagttatgagagccacgacttgacccgatggatgtgatagagtccggatacgtgttggtgattctagtctcagcgacctatataggaacctcttctgagcagtgcatagctagacagtacaatatccatgcccttacgaaaaaggagacagtgggt

SEQ ID NO: 87367 - DNA, 254 bp, Glycine max
ctcgagccgtccaactttgcttacttcaactcttcctttaatagagttgttggtatgtatgtattcattctgagaaatcgtacgtgcttcaacgtgttctcatttcgagtcttcattaaatgcttggggagctctacacgtttttttcttcataagaacaaagagagagagtacaatcgacacatctttaccaaaaagaagctactggttatgacacacaatattactttcctgaacattcctttttctgtact

SEQ ID NO: 87368 - DNA, 252 bp, Glycine max
tctcgagccggagatatcagaatgtaggtttggtcctaactcaacccatgagctagtgtctggcatgaggattgcctcccacttatatattctattgtggccttatctctatccgatgtgggacttgagtttttctcaacacatgtcgatcactggtttatcagctattctgctcatcatttaacttttatctttcttgtacatttatgttcctatgttctaacattgaactgattttgtagccgctttggc

SEQ ID NO: 87369 - DNA, 262 bp, Glycine max
  unsure (1)..(262): unsure at all n locations
ctgcaccttgcaatggtttcgctatcaacatggtttcgctagattgcccacaatgtcgaatcccccctntngntcagntggaagaantaaaaaggaggtnaaattacagatagagaggtaagtgatgttgtttggacaaaattntttcaaggaaagttgangtanttgtaatggaatacaggagaggagatggnacctaacactgatggaaaagccagtaactcttgttcggaaattaccagttgtagacccaagcgtgttt

SEQ ID NO: 87370 - DNA, 225 bp, Glycine max
ataaggtgaagcaggggttgctgcacatggagtttttgaaattgaggtaaatggagggggcatctccattaattcacatcacactatttccaaagaaaaaatgtgaacagatttggagaggtcgacttctagaattcctcaacttgatggaccaattccatatgatcacgatgtgctctctactccaaatatatacaattatggagaagtgtccagtgaggacta

SEQ ID NO: 87371 - DNA, 266 bp, Glycine max
gccgttaatggtggtgttaggcatgactctagtaatttgcttggcaaatgggcaagctacacccccttgcgctaaacacctaagtccatgtcttgatgtcatgaactccactaagccacccgacacatgctgcaatccaatcacagacaccctcagtacatgtttctgccaacttgtatcaactccgggtatgcttgaaggtattggtaccactatcgctcaggctctcaaacttgccaacttatgcggtgtcaacttcacactca

SEQ ID NO: 87372 - DNA, 262 bp, Glycine max
ctggttctagttctcttccgctgtttgtattcttacttgttctgttgctgctgctcgtttcatctagttcttggcgctgtttgatttgttgctgaaaaacgtggtactatttttcttaaaattcttttgcacatgcgaatattctgagtctgtgatgaagatttatctgtgccggaggcgagtgatatgtgttgctcgtcgatgacggcgcaattcctctaagaagttctgagctcaacattcaacctttgattggtatttg

SEQ ID NO: 87373 - DNA, 281 bp, Glycine max
aagccctgatggggatggtgttgttatcactatatttttccagacagcacttatggtgcttttcttaaagttcttcttcgaggatatggataatatggagatatgaaatatcctgtgtttgggatatgcttttgaacatttcaaattctgttttgttgttttttagagttggtaatgttaatatttattttaagaataaaggacatgatcttggtgatctgttatgtgagtaagggaaatacttgtttttatatataggaaccctacgttatgtagtaccg

SEQ ID NO: 87374 - DNA, 183 bp, Glycine max
gtacatcaaaaagacaatgctgatgcatgaggaaatcttcaaataccaggtgagggaactacatagagtatacagtgttcaaaagatccttatggatgacctaagaaaggaaacaaaacaaaagaaattttggacccctatgaatggcatagacataagccattctcatttccttcaacaaca

SEQ ID NO: 87375 - DNA, 116 bp, Glycine max
gcaaatccaaggacaaaggtttctgtcaattaactttccatttctatcaaatgttgttaaagctccctattgaaggagtcttccatgatgcatatgaacatggaggccaggttgga

SEQ ID NO: 87376 - DNA, 276 bp, Glycine max
gaggtatggagactagagaatcttgggcgacacttggatttgagtgaatcagtgaacaaggatgcgccagttgggtcaatcaagttgaaggtagcttcagaggtttctccagcattatcactgggtcgtgctgctgttgctcttgaatctaccattatttcgcatggttctctctacttcctctttcacctcccaatacccacaacttagtattttggatatactcacttttgtttgtagggatgccatatccccaaaatttggtaaattgcaaaa

SEQ ID NO: 87377 - DNA, 250 bp, Glycine max
ggcaattctaatgcatcatcgctgactctatcgtcgcgttcagacgacattcgccttcgtagacgtctttcttcactgtctttgatgatccaagacagcccaacatggtcatattcctactccaattccttctcatccatgggtgactatgtaaggtcatgctgggcctggatcctctccagagaagctatctttgccacagatctcgaaatgaactaccagaaaactaagctccttggctcccctaaca

SEQ ID NO: 87378 - DNA, 253 bp, Glycine max
gtccggtttgtcggtttgagctgcccacagatgatccggactatgagcaggggaaggtcaatagggctgctcgtggtctgttggagcttgcggcagcacggatgcaattttgacttgtctgttgttgcttcaggttatacactcggtcttatgtatatagcagtttgctttgtctcatacaactgatgatgatgatgagaacaaatcttttgtaagtagttttcgtgttgtggtggttttggaataagtttca

SEQ ID NO: 87379 - DNA, 247 bp, Glycine max
cccaatccttaaaccctctttcttcgtttcagttcaatctctctctgtctattcccaattcgcaagtttctctgcgcaatcactgcatatacctattcatttggccacgaacttcacattggggtggtagcagtaactttctcgcaccatctgattcaaaatttgcatctttattagtttatttgcaactctattgatgaatctggttggaattttgaaatttaaacaagtttttttttatgtttct

SEQ ID NO: 87380 - DNA, 252 bp, Glycine max
gctgggactcagaaggccccacttcacccacggcttcgcggacttcgccccggatccgacccgagacgccgtcccgggtcgcgacccggccagcattgcccagaagaagcgccgcgacgcctcggccgaggaggaggaatccgctaacggcgcctccacgaccaatgccgtgaatgaggggggtggtgttactgctgggcaacgggtcaagacgagtcttagtgggaaaggtcaagggcacccagttcagga

SEQ ID NO: 87381 - DNA, 260 bp, Glycine max
cccacctacaatccactctcacctgtcacgcaccccccccgcgaaatcgctcccaagctcagagccagcttcccccccacatatcacgcaggcacccgctttgcttcattgaccattcatctccatcagctcaggtctggtttcgtgttaatgagcaactacctcattaatttacagaagtcgttacctgacagaccacctgaatcgccctcatctaacaatcatgaaggtgtgtcaatgccctcaaacagatcacctcc

SEQ ID NO: 87382 - DNA, 244 bp, Glycine max
ggagtacataattccagaagagtcatcattggagcagcacctacatgtcactgatactacgtttatcgactttgtcagatacttacttagcatcaaccccaaaagaaggcctactgcaagacaagcactgaggcatccatggctttcctatgtttactagttctttctctggtggagagttcagtaattctattggagttatcctcatcaatcgtgatctctaaagcttattttccccatatag

SEQ ID NO: 87383 - DNA, 119 bp, Glycine max
ctttaccgctggtgtgctccgtagttgtgcgaatacccagatgcagtagaaccttgggtatcatgcccatgccatggcgcatgctgtcagatgttgccaccccgactcaaaacatgctc

SEQ ID NO: 87384 - DNA, 276 bp, Glycine max
cggctcgaggcgctctctctccaaaaaaaaaaaaaaactggcaaatttgcaaaattcttttaaaagcctttaaacggaaaccctattcataaacccctagttttaacttaattggttcccctaaatggattggttttcccctttggaaaaccctaattctttcctggttatggaagagggatttggggaagaggaattgggggctcatagaccatttggtaaagggtgcttcgggggcttcggaggcggttgaattatcctgggttctggtggaag

SEQ ID NO: 87385 - DNA, 269 bp, Glycine max
cgcgcgcgtcaagttgcagttattgattccaattccaagtcctaactatctcacagacaaatccattttctctcgtaaaccaaacacacgcaaacccgcgcgaatcgaaaatggcggatccgatcccggcgccaccaagatcgccactgaactcttctcggatccgctggacgcccacccgctgtggttcaaaccggcgtcgtttctctcccccgacttcgactccgaatcctacatttcggagctccgaaccttcgtccccttcgaca

SEQ ID NO: 87386 - DNA, 271 bp, Glycine max
gaataagcaaggaagcttctgaagatgaaattcaaggagcaaggaacttcctgattcaaaaatatgcaggacacaagccaagtgtggatgctattgagtcagcacatgacaaaataatcatgcacaagttctatgaacggaaaacccaaaaattgacattaagaacaaaatgagggaagtcaatcaatccaaatttgtgcaggctgtcagaggcagatttcaaactccatctacaaaattcattataaaaacttcaatagcattcttggta

SEQ ID NO: 87387 - DNA, 147 bp, Glycine max
cgtgacagggtgagacctgtcgcttttagagagaattctccgatccgcttgcttttgcttattcagattaagttcccaaaggccaaaaatatgtgaactcagaataggggtatcaaagtgatgtagtctgccgggccgggttgttct

SEQ ID NO: 87388 - DNA, 262 bp, Glycine max
gatcgacttcagtcggtttcacctgcaattccattctccagttggctcccatacttttatgatgagctactactttatcttgaacaagaatggaaatggtgtatgattgctttccctgatgactataaaactttgtcccaaggctactaagtgagactatgatggctataggttccagtttcatatctcgtctcaaccttgccattggagatgctgttccagaaacaaaagcactcgctaaaggtttgttagatattttagc

SEQ ID NO: 87389 - DNA, 263 bp, Glycine max
  unsure (1)..(263): unsure at all n locations
gtccaatcgtgatgccaaacactcagaacttcaagatgatattagtgaattagagaggacaataacaaatgacagtgataatgagnaccttcctgatgaactacatcattcatttggtgaattagttgaaaagtcaatttgatgaaaaagcaacttgctgctagactgagggatattgtggtattaagacgacagattgatgacctaccgtgccaatcagaagtcatccagtacgaacgccggctctcagtactgtatgcaca

SEQ ID NO: 87390 - DNA, 267 bp, Glycine max
caccccgtaagctaaaattagcttatacttatcttaaaattgtgtttcgaagaagctaaatgagagcttctaagttaattttaactcttgagaagcagattatatcattttacctgagaagtttgtccaaacagggttttattcaataagtgattagttaagctgtttacccaaacaggtatgctcatgctatttatatccatgtcagtactatgtatacccaaacagattatattcatttgtatattttgaaaggttttccttctt

SEQ ID NO: 87391 - DNA, 259 bp, Glycine max
gcaagctccaagttgatgggagaagctacaaatcatacaacttgtgatacctttgaagaagtgtgtgttagtgagatcaactttaaaggagaggtatcatcataaaagaaaaacgtgaaattggattcatccatgtcacttgaacatcctttgttgatacacttctacccttaatactgcctccttaacttgtgcatcctggttagcttgatctgtcataggggtatctgcactagcttcatttgcgagtgctggaggg

SEQ ID NO: 87392 - DNA, 255 bp, Glycine max
caaagatgattgcagttcttctgttgaaatggatctttacgaaagcaactttcaggaaaatgatgaaaccctttctgatggccctcataatacctcatcaagcatgttatctagcccctcatctagcagcagatgttttgcttcccggaagtcaggcaaacggtgtataaggcggtattatttacagcagaaagctcgtcaataacgtttgaacaacagtaggaagtggaaagctgtagatcatgatgacctatt

SEQ ID NO: 87393 - DNA, 260 bp, Glycine max
catagccgtttgatttgaaaacacttttccttttaagtgttctagttagctagtcctgtctgtgctgtatgagaaaaccaaaccactaaaaattactatgagcagagaattaaaaaaagtgttttgggggtgaagggaaaaacatgctgaaaagcttgtgttctcggatctgaagggttttgacttttgaaatcactctagtgtgtgcttttggcatacctttatatggagttatactctgaagcaggagaagatggaag

SEQ ID NO: 87394 - DNA, 259 bp, Glycine max
ttgacttttcatggggtgatccagaataccatcaagagacattggaaaatttgagagttgctatcaaaagtaccaagaaactctgtgcggttatgctagatactgtgggtccagtaaacaagtattttccaataaaaatagtatcacccttcttcacagcctttgatagcccggtaaaatttaatggtaagagatttgaactagcttctttattttgatctggagttaagacaactaatgtgtctgcttcaagggtgat

SEQ ID NO: 87395 - DNA, 268 bp, Glycine max
ggagattcaaaaggtgaaagagaaaattgtggaaaagacagatcaagtaccaaatgccacatgcacacctacacaaaaagcttcatcttctgaactcttcaagttcttttatggtcatgtcatatagctgcatcatccacttttaacaacctgtgcaaattctagtacacaccttgaacaactgttgaacaattccaagttttaaactcattcatggcctccactgtggaagtgcaatcatcttatagtgccaggaaacaagatgatt

SEQ ID NO: 87396 - DNA, 263 bp, Glycine max
gaagtctgctttctgatgattgatcaaaattcaaataatagtcatgaccgaagctttgagtgattttcttctctctgttgtatattaatatacatattgggattgatgttcacacagtctgagatgcagctttttggaatatctgatgctgaggcactcaagcagcattttggacggaagataatggaactggaggatgagaaaagaactgtgcagcgacatacggatcgtctatttgctgaagttgaaaatcttgctgccat

SEQ ID NO: 87397 - DNA, 261 bp, Glycine max
ggataacgcggcactacccccactcactaccaccagcgacgcctccgaaactcttctcttttatcaattcggatatgtcttctgatagtgcaaaggaaaatgcatcagtagttgattcatcagtcactgaatggaggaatgacattggaaattcagatgatccagtgtgtccagatgatcatgacttcagcaatgatagtggagcaaggaatagggtgttgatcacatactcaaaaacatttcatagatgcatgtacatct

SEQ ID NO: 87398 - DNA, 202 bp, Glycine max
gtaaattcccatattgaagcggaggcttcggtttccctcaggaagcatagactccatttgaagaagccatggggaatgcctgtcttgtttctttcatcagttgtgtttgcccttggtcatactgtggttgcttatagaaccagctgcagagcacgcagaaagctcttgtttcatcgagttgaccctgaagctgtcctattgt

SEQ ID NO: 87399 - DNA, 234 bp, Glycine max
cgccctttttttggtggaacaaacggaatgcaaataatcttccagaacagatggggcatgttggtcaagcagagaaaacttagtagcaattgattattcttcttgcttgtactgttctataatcacatgtaataaatataggtatgcacagttcttttttattttctctacaatagatacatattccatattttgagtgggatgaatgttgcatccttcattgattcattagtt

SEQ ID NO: 87400 - DNA, 178 bp, Glycine max
ctttattttactctgaattatgcattacagaaactttattttgtgtttttcgtttgatgtggttgcacgggatatatatatatatattgccgtatctatttcatttctctggccacttgttgggttctgtttacgatttccagacttataaacgcatctatttgcactccaagagtgt

SEQ ID NO: 87401 - DNA, 286 bp, Glycine max
tagccccaaacatgtaaccaatgaccagcaagatatctcaagaacatggatgagacttctttcctttgtgcaaggtgtgaaccctcaaaagagagtaacaggtcaacatatagaagatgaaaatgagcatgtccatttgccttttatatgagggcattctattgccaatattcacactctgttggtggatgggtcattttctgatgctagcaagggggaaatggatgcagagattgtttggagctcttgtaagaatgattcagatgatggagataatctaaggcat

SEQ ID NO: 87402 - DNA, 273 bp, Glycine max
ccgctgaactcacgaatcggctgacgtctcgacggctcgagactctctgacttgcacgcatactctctctgtactttctgttcacaaagatttgtagatttatatttatcataccatatatactatatagtatattgtatgctccacttgtttgaagctgtgttgcatattctggatcctatcatcttgtggctttgatgtctagagcattggaacatgattacatagggttggcagagaatccgtcaatggacggaagctctgacaaactgt

SEQ ID NO: 87403 - DNA, 269 bp, Glycine max
tcggctcgagctcaactccacactctcactctgatcggtttcaatggcttcaccggcgtggttgccgcaggagtcgcagccaccagtgtctggtgaaacgcctcttcccatggcttcttccgctcatacaactccttctactgctccggcaccggcaccgccattcgcttacggcatgcttcagaatgttaacgcttccggaagttctcaacagtcatcgacgcatcctgggatgaaatccaattctgcagtgaatcccatggttgttc

SEQ ID NO: 87404 - DNA, 272 bp, Glycine max
cctcgagcgctcgagccgctcgagccggtgcaaaaaaacacaaattaaacactacaagtataacgtgagaaaatgggtgaagctaaggaaatatggtctgcaccaataacccctagaacagcttcagtggttggaacacctgttgtggcatctccacctgtgtcatgtccaccctctcagcttcactctccatctctaacaaggtcacccctccttcaccctgaggatggagatgcaccacgtcctaataaaattctaagactccaaagaca

SEQ ID NO: 87405 - DNA, 274 bp, Glycine max
accagcaccttctgcaagcctgttcatcagtgctgtctcaaccccaaccacaccttattgcgatcccctcccagcaagagtgcaccacgtcgtacacccgtcagggtgtcaaagtccccactcaaaaccagcagcttcaacacccacaccaacaccagagtcgttgcaccatgtgctcagtcctcgaccgcatcgagtgcctcgagtggtgtttgaagcggtacacccaccactccgtccgccacgccgccgcgcgcgtcatccaaactcgttt

SEQ ID NO: 87406 - DNA, 273 bp, Glycine max
gagctcggttgcttcctcagtgatccctccttatcctggtacatccgaaccacccctggctggcctttgactaccaggggatactgatggctgatctgcagcaactagacgactacttgctgtagagaaaggaggggagtggtgttccaagatcaggatcttttatgcatcccttccttgttggtcacagagcggggagctcggttgcttcctcagtgatccctccttgtcctggtagcaatgctcgtgcccgtgatagagtccaggctcttc

SEQ ID NO: 87407 - DNA, 270 bp, Glycine max
ctctgatccttacccttcttccactggcctaatcagccccccagattttttggtgaaggactcaaactcatcatcaccaagtaaaccaccaaacaatggtgctattgttcattctaagaagatccagagagcaccatccatgccaccattgagattgagagaagaagaccataaaggaagctgttctgttaggagcaaattggtgcaccaaccaacagatcctgttgtgtctcatgcagcaagtgaacctcattgtgcacagatgaaagg

SEQ ID NO: 87408 - DNA, 269 bp, Glycine max
  unsure (1)..(269): unsure at all n locations
gtgcctttgataaagtggttgcttcaagtgacatcttaggcaagcttccctttccacacaacatacgatttatcgnaagggggangtggtgatggccaaaatatccatcttgatgagagtggttttgctagtaggtagcaggagatcgttgatggatgcataatacatgaataaccaagacactagagagtcaatcgatactcgagtagaggatcttgttagcaggatgactcttgaggagaaaattggccaaatgttgcagattgagc

SEQ ID NO: 87409 - DNA, 256 bp, Glycine max
ctctcttctggaatggatctcaccaaagccataaccatcttcatcatcatcaccatctaacactgacactacacacatctgacgcaatacaacacttttcactgcatctttcattccaaatacactccaaccccaacatgacaaacaaaccacctttgtcacttcatcattgagttttgtctcaaacaccaacaaccatcctttccgttcccttatggaaattacacaacaaagcgcgccaaagccaaacttctcc

SEQ ID NO: 87410 - DNA, 273 bp, Glycine max
ctttgtttttttggtactctgttaactatcttgtgtttgaactcaagattttgagtggcccgtgtctgaaactcttgacttaggatactcactcttcatggttctagcaatcatgctttttacaggtccaattgggttcctctcttcattctgtttcgtgcattacttgtactcttctgtcaagttggattgaagtctcaacgctctcacaaattaccattactgagaaaagatttcatcaagaggaccctttgaaatgttcaattttatatg

SEQ ID NO: 87411 - DNA, 285 bp, Glycine max
tggacagtgcagggaggcaaatggaacatgccaataatatagctctcaccttgtcacaccttaagcaagcaaatgaatggttggaaaaactgagaagcacttcaaacttggaaaatgatgagctggtggaaactgttgacagattgaagcaaaaagtttattcttgtttgcttctacatgttgactctgctgcatttgctttggaaaaccgagcttgattctaggacagtgatatgttttaaagcaatatattctatttaatgttgtttataagttaaattatct

SEQ ID NO: 87412 - DNA, 220 bp, Glycine max
cccgcaccgccaccgtcagtgtctggatacagcctgagaatagatagatgtagagagagatgaagtggataaggagtgaatgccagttggatgaacatggaacctgctaataagagaatgtggctgcgtggcatgatgaaatagactctctcaagagtcagcctttcaagcttcctactttgggaccccatgatgtcagagttagagtgaaggctgttgg

SEQ ID NO: 87413 - DNA, 178 bp, Glycine max
tggttagctgtgtgaagcagctcttcatgagactcttaaatctcaactcgacaaacaacctcccttataccatcgaggcttcgctcattagcggagatacacgaagtagttcgtcgaaaagagacagagaagagtgagtcttgaatttgcattagtgagcgaccctccaaaaaccttg

SEQ ID NO: 87414 - DNA, 101 bp, Glycine max
ggaacagtgcgtagagaataagctatgcagttcaatatcacatcacaattccttcatatcttctcaagcaccttcttccttatcattacctcttcactttc

SEQ ID NO: 87415 - DNA, 285 bp, Glycine max
ctcgagccgtttttcaagcaacaaaaccttcaagaagctgaaaagccaacaaaagggtgcataaattgttgagaactcagacatggcttgtgggtgttcttcaacaacattggcagagaagatttcatggaattgttctgtgtttgtggcactaatgctggttttgagtagctgcgagtcaaacacaagtgatttcacaagtcagatgatgcttcatgggagtgtcaccggcaatattagcaacaacaacaacaaggcgtgtgatgagatttacgtggttcgtga

SEQ ID NO: 87416 - DNA, 164 bp, Glycine max
cgagaacagagaaagattgaagaagaaacagaagaagagaaggttttattttgcatggcaagtccaggtttataccgcagggtgctcccatctccttcaatcgagttcgcttcgccggaagggaagaagctgttcggtgaagcgcttgagcgaggaaccatgca

SEQ ID NO: 87417 - DNA, 106 bp, Glycine max
ctcgccatgtctcaggacgtcgccagaggaccttgggcggcgccgtcggctgcatgacgggcctgctcttcgagatgttgcccatctggggcgcgcttctcgtcgg

SEQ ID NO: 87418 - DNA, 271 bp, Glycine max
ggaagtacctaatctttgggctagcttatggttctgggtttttctgttgtttaccttggtataggtgcatggaaggctgataatacagacatgtaccataaggttattattttagatacagggtgcgtaacccaagatcttgaatgtcgatgatggcgtcctcatcctcttccttgtcaccgtctcaggcatcgcaaccgtgatggtttccttcacgcattaagctcgacgatgaaaaattcctctacgaacgtgctaaatgttgaggcca

SEQ ID NO: 87419 - DNA, 253 bp, Glycine max
gcgctcttctctttgctctttttctctttctctcttcgcctggtcttggcatctccgcagcaccaccacccaccaccctgcttagaccaggtcctctctctctctagagagaaagagaaaaaagaaaaaaaaaaacaactaacattaagcttttaatagtaagacatggctcaacccagttccaacggggatctgaataataaccagcagcagggtcaggttcagcaacaacagcagcagggtcagtgggcgg

SEQ ID NO: 87420 - DNA, 256 bp, Glycine max
gaagaactctcgaaaatggatgtgcattgccatcattatactgttgataatagtagctatcatagttgtgggtgttctcaaaccttggaagagtagctagggtgcttgagtgtggcccctttaccttttgtccataatcataagagttgacttggttgcgaaagcatatgcaatttatgcatgtgtgtcaacgggacatcttagagaaggatttttttttaagcttttattttgtatgattgagatgcttgttttg

SEQ ID NO: 87421 - DNA, 241 bp, Glycine max
tgaagctctgcaaaaagatgctatattcattgatgcggatagaattaaaacaaccaaaagtaacaatcttgcttgcattcaagctaaagatcgtacaactggaagatcagagattgcttcttgtgtcaaggttgctgaggtgactcaaattagaatagccagtaaggaagttctgctcaatataattaaccttgccgttggtgcagaacttgatcttccaacaagcttttatgatgctcta

SEQ ID NO: 87422 - DNA, 257 bp, Glycine max
gagaaatttggcgccgcaattgtcatgacccaaaattatatttttctatcgagtaacctttacaaccttgtgtcgtcaaccaccctccaccgcatcgtcgaacccccgtatgtcgtcgtcgtctcaccaccacagcgcctcgcattagagcaccgggccgtcggagcaggttttaaggtcagacctctgaaggctgatctgtcttttttgttatttattttgtttttgtggttctgttttgggtaatccttattgat

SEQ ID NO: 87423 - DNA, 246 bp, Glycine max
gttcaatggcctttatttcttctaagcagtaagatcctgtttgcggttgatttagctatggactgcaactgtactcagactgatctgtggaacagggtatgtagggatgagtatatggcctatgcagttaaggactgctattacagtgttgaaaaaatattatattcattagttgacaacgacggatgactttgggtggagagaatttttcgtgacatccataacagtattatagagggttcgctt

SEQ ID NO: 87424 - DNA, 247 bp, Glycine max
ctaatttgggtttgatatttggaaaaaccttggtaaattcactgcatctgtttaatccgttcttgtgctgttttatcaaaaagtttttttttttttttttgtggattgtaattgatgtaaatgattttttggggttaaattaatttgggggcccaatttccaaatggatccccttttgtaaatgattcaagggatcattcccaaataaaggggtttctgaaaaaggcaggacccatgggcatttcgt

SEQ ID NO: 87425 - DNA, 260 bp, Glycine max
ctcgagccgtataaactcaacaaaagtgttcgcataacaacattttatagtatggtatgattcaaactctgaatatgtttacttttacgtggcttacagctgacatataattccttataacataataattcacgtaaatgcaatgccactttgggctccttcattaaggacatcaagttcatgggttcggtctcactatatttacccaattcaaaagcagagtagataggtggcgggctgctcccagtaaaataataagc

SEQ ID NO: 87426 - DNA, 261 bp, Glycine max
gtgaacgttaataccacatcctgctgcaattattacacactattttttttgtggcagatactcaattagtatttcataattttcaggtaagcgtgtatttgtagttttcttttttattggttcatagaaaatgatgaacaatgatgaaagagaagaggttaatccacccttttcgattctccagagattggatcgccttgagcatcaggtaaattaatattttcttcttcaagtttcattcatgcttcaatccatagaata

SEQ ID NO: 87427 - DNA, 274 bp, Glycine max
ggctcgagatttttatttatttcactttaaaataattgagcgtgtagctcatggtcatgtttctatgatctttgatttcttctttccttgcctttgatcacatccctctacttgatatgtatacatataaactaaacataacagagcagagcaatgaatcatagttcccacatcaatatcacatcaaatggctaccataaaagcttctcacactgtggttccaaatcaaccaacacccaaaggtcgattgtggctatccaacagtgacaattcc

SEQ ID NO: 87428 - DNA, 260 bp, Glycine max
cttggttctgccaatcttgctaatgaattgttttgttttgctgggtcaatgtgctaggccactgaacacagaaggaggagaggatttggtcacagcaacctgcaagcacaccctccatttcgaactatgcatttctaccttgagatcagtccctgctagcaagacatcagatctaaaagtgcttgctgagattgcattgaatctgagcacaacatatgctgcagacactttgttctatgttcatgagctgcagtccaatt

SEQ ID NO: 87429 - DNA, 239 bp, Glycine max
gggagtggctatggaggagatgttgtttatggatatcaaaggcatcatccaatgcaagcacaatacaaacagattgattatactgatggatcgtggtgacaaatcaaaaccatttgttctaagatgtaataaaaaatgttgaagatgtaaagcttgtctgtgttgtaataaaatgtaagtatgtaacatttgaatttgaagatgtgcaatgaagaaaatttcttgcttggttttctgcc

SEQ ID NO: 87430 - DNA, 260 bp, Glycine max
ggaagaaggagagggcgctcgccggcggggcgagggttccgagactgcgacgacgagggaggcggcgttgcaagagcgggatttggccgcgaaggaggtggacaggctgaggaaagtcgtgaggaggcagaagaaggatttgagagcgaggatgctcgaggtttccagagaggaggctgagaggaagagaatgctcgatgaacgagccaattacaggcataagcaagtgatgttggaggcctatgatcgacaatgtgatg

SEQ ID NO: 87431 - DNA, 240 bp, Glycine max
caaatcttgaaacgcataaagaacaataataaatcttaccgaggaaagtggactgatcatgttacaacatgctggaacaagtcgtttctttttcaataaaattaaaataaagccaacgacaacaggtgtgcatatcagcaaaacataaaaggactttcaatactaattacactatgtttggggaaggtgagataggggagggggcgaagatgaattaattcattttagtttcgtgaaggt

SEQ ID NO: 87432 - DNA, 233 bp, Glycine max
atttgtttgatatggataaacttgaatctgcatttggtgggaatgatgatacaggatttgacatgaataaatatgcagaaagaatgaaagaggatgaaaataagattctttctttctggacacaggccaagtctgtgtcttaaataaagctccttttccttagattcaatcagggaagatgcaaactctgatgcttcttacaatacatcttggtttctcaaagggggagaaat

SEQ ID NO: 87433 - DNA, 234 bp, Glycine max
agaggccgtgcatgaccgcatttgcgcccaggaacaaaagatgagtttttcattctcaagcgcaaataacaactaagaagtcctttcttctttgtttttttgtttttctttttcttttaccttaatatgaaaaaaatccaaaataggatgttctaaagtatgatatttttttatcttttgtaggatccggatggttacaggatatagactctcatatatgttaattatctttat

SEQ ID NO: 87434 - DNA, 232 bp, Glycine max
  unsure (1)..(232): unsure at all n locations
caagacctagtgccacaatcctcngaacgaacttgagtgatagaataatccagtctgcaatttgtgactccatcatggagattgaggaatcaacacccataaaaaattccttagaattgaaggatgaagagaagagcaagtcaacaaggtcaatatcagttgagcagaagccttgggtggcctctactccgcagagccaattcaggaatgtcagaaacccttcttcatacaa

SEQ ID NO: 87435 - DNA, 232 bp, Glycine max
gaccgaaacaacacaccagaaggtcgctggtcattcacagattttgggaacttatttttgaaatggaagacaatggaattaagcagcagtcaagtgcttcagcagcaggggtttatgaattacctggagaacctgctattgtaattaatggggtgcctgacataatccctggtggctgcaccattgctcccggtaatgcttcaagcaaggttgaaatgcatgcgccttcagg

SEQ ID NO: 87436 - DNA, 229 bp, Glycine max
aaaacacgaggcaatacatttctgtgctggttcctacaaggtaagttcttccggggtaagtgatttcgaaaggattataaagttacatggtgcctctaaagctgtgttatttcgtagctgctacgagattgaaggagaatatctgaatgcatttcagaaactagttgagaagcctgtgattccaattggtttattgcctgtagagagacaagttgttgatgggtgtagt

SEQ ID NO: 87437 - DNA, 226 bp, Glycine max
ttttcttctcttaaggaaaaatggcatcctctcctttgaactcaaaatctggctcccatggtcgctcaaatagcttgccctctagaccacaccctctcattctcaaatgcaatgaacacttggaaagcttaagggcttccaatgaaacctcttcttccttatcaaatcttagacataaggtaggaggattgcaagatctgattgagtgtgttgaaaaattgattca

SEQ ID NO: 87438 - DNA, 265 bp, Glycine max
gcgacacgcggcggcgatggaggggaggcgattcttgcgtcgtctccgagtgctgacaactcgggaaccctgcaactgaaaccattgatgttcaggaacaggtttctgaactttgcgcgattgggttctgtgattaacggcgccgcggaatcgtttttcaagagcgagattcggaggaggctgttcgtaacggctgtgttaattgtgattagtcgcgttggctattttattcctcttccggggtctgacagaaggttgataccgg

SEQ ID NO: 87439 - DNA, 264 bp, Glycine max
acaaaatgaactggatacttcagctgatataaagccttcaacaacagaagccgaacattcttttgctaagcaggacaaggagggaagccctgaagaaactaagcctgtgcaaatggattccagtcggtcacctgagaagacaaatgaccagtttattatcggaactgctgaatcagttactgacaacttgtccatccaagtggagaatcatgctcttagtctacatgagcaggatactcttgaggatcttgctgatgcttccgg

SEQ ID NO: 87440 - DNA, 258 bp, Glycine max
ctgaaattggctaatgaaacactagcaggactacttaaaggatgtttctgttcggcaccatgaaatgaaagcacctaaagttcgagattctttgtcttggggaaagcgaaagagccaacaagtggtagctgagggtgccggggtcatctctgctgcagtatctagcctaaataagtttgccaatgatggaagctttatgcatgattttggtagcaagatgagtaataattctgacggctctgttttggatagtagtga

SEQ ID NO: 87441 - DNA, 266 bp, Glycine max
tctaaatccaattaatgctgccattcacatttaacacctctggcagcatctagcattcattcattgagcttgtgactaagtttttttaagcctttcactcttttcatatattttctctagttttcatcttctgatctatctaacttcaccagattgtgcacttaaaagttcatcactttatcatcaagaacgatgcaagactcaattgggattcctgcttgcttttcttcttcagcagagaagcagcatagccatgatgatcatgg

SEQ ID NO: 87442 - DNA, 253 bp, Glycine max
aaaaaaatcagcttttcccataagctaaaagtatcttatgcataagctaatttgtagaaactcttttattttaacttattcaaaagactattttattttaacttatgcacaagtttagtttcttatgggagaaacttattttattttttcttcctattttttctcctgtaagtgcttatgaaaaagttgatctaaatagactcttagtgcatttatgtagcagttgattgtccatctaaagtttcgaggtaaa

SEQ ID NO: 87443 - DNA, 252 bp, Glycine max
attctgtggtaaaataactacagatggtaatgccataaccaatgccgtggatgtttaccgcaatccagcgtaagagctaaacacagaactttatctttgaaatttttgtttttggtttagttagtaactgaaccttcactttgcagtgggtcgttgagggtaatcacagcaaataatgattcccaacttcgggtttttgatgcagagaattttgcttctcttggttgtttcaagtatgattggtctgttaat

SEQ ID NO: 87444 - DNA, 253 bp, Glycine max
gtttgctgcaagtgctcgcagattatgtaaagactatgatactctcttcaagtacccttaagattctaaatgtaagttacttaattttgcttcttccttttttacttttcatatttctaataacatgtcctgtttgccaaatttctgtccatcactcaatcttgcctttcaaattatccttcaaaatatgtctctaatccactctcattgtgtagggtctctctacttctggttcaatgataactcaaattcc

SEQ ID NO: 87445 - DNA, 250 bp, Glycine max
ctcgagccgttttcttgttaggttttatgtggtaactggtatgaatctcaattgttagatcatggttattgtgtattgaaaattgaaacttcaaatttgcaaccagttagattttctgcaagtgttttctcttttacccttttgttagagggtgatgattttctggtaaagttgggagaaaattgatagcttagctttcgagagagatgaattgttttcctgttgaggtgattgggcacatatttggttg

SEQ ID NO: 87446 - DNA, 256 bp, Glycine max
ggagatcttttaacttgtttactgtgctaatgagttcattgctgtaatattataatactgatatgctaggggtggcagcttggaagcatatgcacacaacaagggtggcatggtacatttctagtagtataggatttggcatagctgagcatgctatgtagtaaaaaagattaatatatataatcattcaatgacatattatgaacctgaaactataaatccttaacaaggttgtaaattcattttaaaatattgc

SEQ ID NO: 87447 - DNA, 252 bp, Glycine max
gacaacttgttgttagtgtcctttctttgcattgattgctttattctttcaaaattcattctctttttgaagagaaaaataaacccagtaagtgacattgaagtctattatttttcaagactcacgccaatctttgtggacgaagtaatttttggccaaatttattgtcagataattaccaacatctataattgcttttgacagtacatcatactggttcaaattgtgatttagatgatgatccaactgagt

SEQ ID NO: 87448 - DNA, 248 bp, Glycine max
ccgtgttccgacttccgagtaacattcagtttcatagttcactctctgtactcttcacttcttctacgctgctaaataaggttcttctgccactgtgaacagtgaattgttcgtgctgctatgttcaatggcacccatccagaaaaaatcgaagaccaagaagaagaccaagaagttcaaaaaacacaaacaggtgagcctggtccccgttgagcccagaaccagtgagaccgattggtgggactctt

SEQ ID NO: 87449 - DNA, 155 bp, Glycine max
gcagtcactgctttgtgtagagcagaaccagatcgtgttctcttcttccattggcaaacatggcaactcaaatgagcaagcagagccagcatgtggcggatggagtgcacctcgccggaccgaacgagggactgacacgagagttggcggaggac

SEQ ID NO: 87450 - DNA, 255 bp, Glycine max
gtggtaatatgggaggagcattcatgatcctcctttcccttcccttctccctcatcttcctcctcatcctcttctacataaccctccccgcacaacgggccgagggaagaaaatctctggccccgctggtccggcaacctatcccctcataggttgcctgatatccttctacaggaacaggtaccgtttgttggattggtacactgagctactagctcagtccccaaccaacaccatagtggttcaaaggcttgg

SEQ ID NO: 87451 - DNA, 247 bp, Glycine max
ctcgagcgaatcggctcgggggctccagaagagggaaatgacatttcatgattcaaacgctgtcatgaattcgacacttgatgatgatcggcggcttgcgttttagatttttatgaatcgtttgatgttcatctaacgggtgtaattgatgcacggtaaccgcgtgaaatcctagtagtcttttaatagtgtgggtgtgagagaagtgagaagtgagtgagtagtgagaatggagtttcaagggtta

SEQ ID NO: 87452 - DNA, 246 bp, Glycine max
taaatttcaataatttgaactaaattagtttcaagtcctaagaacttacatttcgagatatgcttaattcaacataaccctgttgtacatttgttcgatttcttatgcaagccaaatttcacatttaagccttagtgttaaactgttaatgatcctcactcatagaacttgttcatatcttgtgaaccaactggataaaatattgattagaagcatgaaccttcaattcattatacctaagtttag

SEQ ID NO: 87453 - DNA, 120 bp, Glycine max
ctcagtggaggggaaaccaatgaactatgtgatcagtttaataacaattgtcactgtttatgaaattgtatatctataacttaagtagtatctcatttgttatgattagaatagttactt

SEQ ID NO: 87454 - DNA, 245 bp, Glycine max
ctgacagtggtggcatctctacatatcattcagcacatgagaagcctgatgctgcttctgtgttggaaaggaggattcaaatagattggatagttctgaccaggattggcagggcaatagacatgagagacggagcaaacagagtcgtgaaaaagaaatctccgaagaagtcccagtggtgaaaccaagatctatgcggcgaaggcagtcaagatcacgactacctggttactacgatgccacta

SEQ ID NO: 87455 - DNA, 265 bp, Glycine max
cgtccaccgtcaacgactctcatcgcagggacctatgactagttattgacatgacccgacgtttaccctcctccgggtaacaccttcaacaaccctccaccacccttctacggcgtccatcagccagaaacccacgtgtcccatgtcttcaacaacagcaactactccgctcccccgcctccaccaccttcccataaccaccaccatgactccttcactcacggaggcggcagcaccgtgcaccacacccctcacaacaacgcgc

SEQ ID NO: 87456 - DNA, 281 bp, Glycine max
gggattcttgcatttagatctggaaattttctcgagagacatgaggaaggcatgaggcatgtcgaacaagagagaaatccgaacgcgagagattttgatctggacatcctcgccaccactttgcgctgcgacagcctcgactaggacaagagagaaatccggccagaccaccatgtcgccggggaccgcgactaggcgcggcagcagttcaagacctgacgtcgtggtgcatcctctccgaccccacacgtaagacctgacgccgccgccgaagtgagtgg

SEQ ID NO: 87457 - DNA, 263 bp, Glycine max
gattttgtcactcctgattcaccagaaaatccaaatcacagggacaagattagcgaagatttgagtggaacaaagaatctgaagtaagacaaccactaggtaattcattttcttcacaagagcagagccaaccgtttagttctacaacgccactgacaatgagatcatcttcaacaacttcattacatagagtagatattattgaagatgattttatgagtgtgatcaataagagtggtgctgatttgattcaaccagaacct

SEQ ID NO: 87458 - DNA, 269 bp, Glycine max
acgctttgaagatgggaatcacaaaccccttcaaagacctctccctctccctcatcaaggggcttcttccttggaccctctatgctcttcttcccatagttttacttcgcttgtacttctaccctctacccttccctccatctccagaaactgagcttcctcattccacccccaccaccatcatctcacagtcttctctttctgattctacactaccttcttctccagaaaaggaaaaaacgtatgagcctccatgtgactactttgat

SEQ ID NO: 87459 - DNA, 261 bp, Glycine max
ggaacctgcacttctggtgacacgttttgagtatgctaatctttttcacactgttacagactagtacagtgcttatgtttcttctagagtcactggtctgcctaatcgaccacatttgatctttgttgacggccacagcaaggctcctcttgaagagacatgggaagctttattctcaagcctcagatatgctaaaaacttcagtggttcagtttgttttcgtcatgctattctctcacctttgggatatgagacagcatt

SEQ ID NO: 87460 - DNA, 263 bp, Glycine max
ctcgagccggtactttcatgccccatttttattttgtttatctcgcttcttagtgtgcctttctagtgtcctggagttcctggttgtctgtttctttctgggttgtggtgtgatgctgtcagatccttcaacagtgttggttgattgacaccattgttctcttatgcaaaatattgtcatcaaaggctctcatcattgctaagctcctcgattcaaaaaaagaggtccatgaacaacaaactactttagactacaactcagaa

SEQ ID NO: 87461 - DNA, 253 bp, Glycine max
agacactctctatggctgtgtaggggccatctcatctcttcaccaacaaattgatgtgttgcagacccaattggcagtaccacaggctgaggctgtgcacctcagagtgcgccaagctgcatcactctacagccccactagcccaaccaacagtggctctccatcacaagccaagcccatttttgacatggacatggtggtggaccagaccccccatggtgatccaatctggtgatatatgcctgctactagc

SEQ ID NO: 87462 - DNA, 261 bp, Glycine max
cgatgattgacagcacgaatggcgactgcgcgaggagaagaagaagagaaatgggcaacacgttgggacatgaagagggagaggagaactttttaaaatttgaagtgaaagataattttccggcttcacttaaaatattggtgcatctagcaaatacccaagccttcctagcaacaactgcattattgcattacaaaaagggaaaaaaactacggtagaggaaaagggtattatagtaaaatcaaagaacacgatctgatc

SEQ ID NO: 87463 - DNA, 256 bp, Glycine max
taagctcggattacggtcagctcgaccgtgtcaggtaccttatcagttgattttgaggacttcaactttaaactttgtacatttgggtggtgtacttggagaatcgctcagtccatgtgttgtgtgatcgaaccattatacataaatatgggtgatgaaagaatacaaagtgctgtcttcttggactaagactattgatgtgtctaccagtaacattcctattgggtgcttgttccaatatgctctacaacaaggg

SEQ ID NO: 87464 - DNA, 235 bp, Glycine max
gagaggctaaccattaaacattttatcttaactaatcttgaagcttatcaatgcatatttctttgagccactcagtatgaataatgaatttagcttagccattgcccactgtgttgtgctttagaaaatgttagactggagatgctatactgtctaagaatctttatttctcatgttgtcattctaaaccgaaataccggttgtgccaatgaagtggcaaatcatgtcttataaa

SEQ ID NO: 87465 - DNA, 277 bp, Glycine max
ccaagaccaccagattcacctgacgatgatttcaccaaccaatggcctttggagctctccgagtacttgaattttgatgatgatcaatggccagacgattacccggaatcatttgtttcggggcatgtcttcagccataacaatcaagccaatgaagttggtaactttggaggaagtagcacccactttgaagagtcttctagcagagacgttggcaatgaacgtgagaagaaggaagtcagagatagagttgcattcaaaacaaagtcagaggtag

SEQ ID NO: 87466 - DNA, 189 bp, Glycine max
ggcgttctatatatcattgaactgacaatgaggcctgctctttcgttgctgcctcttcgagttgctgtcttgttagctgccactactgaatcaagacaagatccacgggaatagtggaaaatgatcatgaaagatcaggaaatgccagaatgacgtcaaggtcttgtgtcattgcaatccgaaaataac

SEQ ID NO: 87467 - DNA, 262 bp, Glycine max
ctcgatccgcaaatccaggtaagcctcaggttcttatggtgtactcaaatttggctcaggcacttgttaaccctcatacagcagaagttagtgagcagcttggacaacgtatatggggaatattacaaaagcaaatatttaaagcaaaggattatcccaggggtgatggagtccagttatccaatttgaatctctgttggaaaacagtttgacactagcttcaaaaccattcaaaagacagaagtctgcatctaacctttca

SEQ ID NO: 87468 - DNA, 256 bp, Glycine max
caaaatcaggaaatggaacaaagggatcagaagggtgccaccaacaagaagttgttaccaaggttgtcataggagtaggagcgggaattgttattctatttgtggggacgacctcattgtacttgatataccagaaaaagaaactcaacaaactcagagagaaatactttcagcagaatggtggttccattttgctacagaaactctctacaagagaaaactcctcccaaattcaaattttcacagtggaacaact

SEQ ID NO: 87469 - DNA, 271 bp, Glycine max
gttcctctgcttcatccttaagaccagagctgtgagtctcagtttctttttcttcttctgttgtttgtaaaacatgttttcttctcttttgttcacctgagtgaaggaagacataggcataccttgttgctattgctgtttatgttgtaattgtaattgtaattgttattgttattggtggtgatagattagaatttagatggagccttcactcctactttcttcaccttcatcatccacccctttacctttcttcatctcaaacacactt

SEQ ID NO: 87470 - DNA, 261 bp, Glycine max
cccgtgtcctctcccctccccctacaaacaggttccggctctaatattgtgacactataggcacaggcagtcaggcacccaccactctctctctctctctttctctctcatttcttcagttcctctgaagccgtgcttgcggcggatctagatcaccggcaatggcggactcgccggaggattgttcgagggatcctggaaacggcaaggacatggaggacagtacatcctctgttgccaatggtacaagtagctcttctg

SEQ ID NO: 87471 - DNA, 274 bp, Glycine max
gcatcattgtgctccaataatcacagtagtagtcagtagcagtagttcagacagtagtacttgtacccatgtctaatgtgtcccttctccttttccttgtgttcttgtctctctcatcaggagcgaatttgatcatggctaatggacagaaaacttggtgtgtggcaaagccttcatcagatcaagcaacccttttggccaacctcaattatgcctgctctcaagttgattgcaggattctgcagaaaggatgcccctgctcttaccctgacaa

SEQ ID NO: 87472 - DNA, 234 bp, Glycine max
gctcgaagtccgctcgactagccatgagcactatgtagaaatagagaagacgcgaaacacctgattcccctctccataggccgccgagcccgagagagagactcactcaacacagagcggagcaggaaatagctaaactaatccagaaaatgaacagcgccgctgggaaggcggtgtgtgtcagcggcgcctgcggacacacgagttacaagggagtgagattcctgcgcaatc

SEQ ID NO: 87473 - DNA, 265 bp, Glycine max
tgaaccaactcttccaaaggattctcttaagaaatatgctcgagaaggcaagaatgattccaacaataaggctggcaaagatgatgaacaaagaggttctaaggcgccacctaagggtgttctgcaatcacgtccaacttcaaataatcctagaagtggtcaagttgaacaagtcaaccgccccaaaacaagcactgccgatgaaggtgtgaagtcatgtgagctcacatttggtagctattgcctttggcaacaagaacataga

SEQ ID NO: 87474 - DNA, 158 bp, Glycine max
ttcaaaatgaagaaccgttgttatgagtagttgtgtgacctaacatggagagcgaggaagccatagaacacaaacggatctgccaagataaaatgcgacatcctatccttcttgcatggtcagaaatagatctgatttacacgcatttatcagtttcc

SEQ ID NO: 87475 - DNA, 136 bp, Glycine max
gacttatttgcagttcggctagtgatacggctgtggaggaagctggaagcatcaccatcatcatgaaagatggaagagtggatgtatctggacctgaacaatgcctttaagacgggagacctcctgatcatgggac

SEQ ID NO: 87476 - DNA, 250 bp, Glycine max
gctttccacatgtctccgtattagtgatcatgagacacattattcccatcgctatatattatggctagcatgtaggttacatggagggatgtgatcatgtgcatggccgaggtgggagcaccgatgaatgcgcaagccatgatcatgcaatgatgtgacggtggacattgctcagagcctaacgtacctgatgcacgggcgtacaacggcaacactttgctgcagcgtagtcaataacattcttggctct

SEQ ID NO: 87477 - DNA, 222 bp, Glycine max
gcggccggtggtgacattgttgctgccattatggagttaactaattaattgtctggtttgtctgaattttagaatgtgtagctatttttctttgttgattgaaatttttgttttccttgaatttgaaatactggtttcagtggtttgtcaattgtctgtaattgtttgcacggaaagaaaaagactgtagactcatttgcaacccagtttcgatcttgagtg

SEQ ID NO: 87478 - DNA, 260 bp, Glycine max
cggagacccattcattgcattgcccacaaaaccaccctctctactctttctctttctagttgatagattggtgtaaagggagacatgggaaggcttttcttgatcaatcttgaaggagacttctatagctgcaaacactgccgaacacattttgctcttgaggatgatgtcatttccaggtctttcatttgcaggcatgggatggctcatctttttgataaagttgtaaatgtcacttttggcgagaaagaagaacggat

SEQ ID NO: 87479 - DNA, 252 bp, Glycine max
ctttaattggttaatttcaaaccttgtggagtttgattctgtctccgctccatcatcttcgtttctccacattcaaattcagttccccacacactccaattccaaggaaacaaacaaaacaaccccttttccccaaaagaccgtaaaacctatcaaaagtacaaatttgccactgtaccgacccgaaatcaattcgggttcgggttggaccaccgattgacgggtcgatttatgacccgattcttcgtcttc

SEQ ID NO: 87480 - DNA, 260 bp, Glycine max
attctcttctcttaaagattcttttctctttctttctcacttctttttctttcctttttccgtttgtttcccgggaaaatctccaaccgcaacctcttcttcgatctttcccgctccctccaatcgcttcttgctccgtttttcccctcccgcatttcacctcactcgcattttccgcctcgtacggcatcgctgtccacagtgcaattatctcccgggaaagttgggggtttttctggaaaacagatcattctcccgat

SEQ ID NO: 87481 - DNA, 204 bp, Glycine max
gaaacactaagcgacccaagtattcaaagtttactcagcaagaacttccagcgtgttatttcggcattcttgcttgtcagcattgtattcgttcctattggagttgcttcactaattgcttcaaggaaggttgttgaaattgtttctaggtatgcatactagctctgtgcattcttctctcgctctctgccttccatacaacat

SEQ ID NO: 87482 - DNA, 135 bp, Glycine max
cagttcttgacagaacttttccacgttatcgtattttaactgcttgacttgagccaatgagggagtcgtcataaagttgctttgaagggattatattttccgtcacatttagattaaagtatttgttgaagtttt

SEQ ID NO: 87483 - DNA, 257 bp, Glycine max
cggctcgaggtactgtctctggtagtgcccgtgccaaaaggtcatacacagttcttgtactcaccctcaaacaaggtgaacacattatcttatgtcgcgcctgcactgcaccgattacatcacttctctattcatttcccacttaagtgcttctcaagacttcactttttccctctttatattccaaactctctctgtcactccaggctctgtcacatgtccatcctcgcctgtgaaaatatttcccctctcattct

SEQ ID NO: 87484 - DNA, 257 bp, Glycine max
gaaaattcaaactttgagtgcgtaaaaaccccaaattcgaaccttctctcataatctacacccaaaaagggaaaaaaaaagagagaatggggaacgaggaagaagaagaagaagtggtggctgaagttgagcagtggaagccgtgtatggaaccgattgcgtcattctccgttcattccctccccatttccacatctctctcaaacacagaaccgctgatgtttcatcccaacagtttgtggaagctgttctggaga

SEQ ID NO: 87485 - DNA, 259 bp, Glycine max
  unsure (1)..(259): unsure at all n locations
ctcgagccgctcctccgcatctcgcagccgacaacgtaacggttcgcggtacccgttgctgacgccgccgatctttctcagcctccaccgccagatttacctcttctcctttcggattcgcatttctctttctccaccgcaacacactccccttcagggatacaaaatgataggatcctttccgacctgggcccttgtgatggtttttggctatgcttatccagcttatgaatgctataaagtngttgaaaagaataag

SEQ ID NO: 87486 - DNA, 238 bp, Glycine max
cggaagtcaataatagggcacccaatccaaattgaatcccttaaggatggttcatcggataaacttttttctgcaattgatgactttagtaacgatgggactggctttgagggaagtagtgtacttccaccagcttggaggactgcaatgagaacagcaaattcttcgtgttcctcgtcgccttgtattgccatctaatggtgctgctagttatgcagattccgcattgatctagaaa

SEQ ID NO: 87487 - DNA, 241 bp, Glycine max
ggctcgagcttcaaacacaacatcatcatcaacttcttcttcttcttactcacacagatcaaagtcaaacacagtaggaaccgtgtccttggacagtggagtggactcatgaaccctgttgacccaattgagtatttcgattgtgacaagaaaacaatgccaaggtagttatcacgtgtgcacacataagcattggcacgagtaggggcactaagaaagggacaataacaaagcttgtgaa

SEQ ID NO: 87488 - DNA, 210 bp, Glycine max
ccgctcgatctcgagccgaatcggctcgagtagccagattcattggctctcacactcaacacttgtctaaagttatcttgttgtcctctgtagagactctttttcactcactcagtccccatttctcgcatcccaacaacgccaaagcgtactcccaccaccgtagttcgagccacttcctctttcgggtctcgcctcgaagacaccatc

SEQ ID NO: 87489 - DNA, 137 bp, Glycine max
cctctgtgataaggcattgaagagctcccattctgcctccatggggtattgttcgcattacttttgacaaagtgattaatgcgatggagactcatgatctatcaactagggaagatttgaccaatgctaattcatta

SEQ ID NO: 87490 - DNA, 149 bp, Glycine max
ggtgtggttccgccaggactgcgatgcaaggcaggtgccagtgcatgtcatgtgaccaagttggagggcgcctttggcgaacaacgttgtcagtggttgaaggaactagaagggataaaatatcactgcctataagatcatggaatgtt

SEQ ID NO: 87491 - DNA, 181 bp, Glycine max
gcagccccctctcttttctcagcttccccattcttcttctcctctctttcatggatgtggacatagtgaaaacgtccaacaacaacaacaacacggacgttatggcaatgatgatgcaaatggaaaagttccccgaattattattctgcgacgaccctttttataccaccacacccactta

SEQ ID NO: 87492 - DNA, 238 bp, Glycine max
gatcctcaaacaaagatggatgggagaataactgggatgattagggttatcaggaggcagacgacaagggaaatgatatattaaccacaaagtggaaaatgaaagagagggaaagcatcagagttggggaagttaagatcaagggatgtgagaaatgtggctgtgctagggcttaactttgatgcatgtccatgcaagggactgcaaaaaagaagagaggaagtgtaatagttttaac

SEQ ID NO: 87493 - DNA, 282 bp, Glycine max
cggcagaccagtgcttcctgtgtaaattatctctcttgatgctcctttttcttatccctttttccccagattattacctttgacagctatggtgtctcaggtcattgtaatcatcgtgatgtgcattatggagtatggtaagttgaacattagtattgatcaatatcaaagaactatagcggaaaaatctggggatatagtagcatgattggatggacttagttcaaggaagaaaattgtttgttttctaaatgctctcaaaaagctaacaaaaacaagtgt

SEQ ID NO: 87494 - DNA, 277 bp, Glycine max
ggcgaagttgtctccaccattccaagttcgtactcgatctcctttacatttacctgaatcttaacgtctactcttcgttttgcttctatccttctagcatttttggttttgtaagctaccgtctaccgagcgatcttgttttgaattttaggttccttaatagtatctgatttaattgaatgagctcgcttgtatttataaatagtataattcttggtgtccttgattagagctgtctgtgtgttccttggttaaaaatgtagacaaaattttgcat

SEQ ID NO: 87495 - DNA, 278 bp, Glycine max
tgttccgccaacaaatcagttctctgatcagcatgtcaatggtcagaacggtgttactgttgaagccatggtcttagattctttgcatcatcccgcaaacagctcaaggaatgagggggtccatcgtgatcatattgcacaacatcttggaatttctttggataagctcatgctggctgttaaaaatcttattgatgaaggtgccatttatgaaaccataggtgatcactataagtcaatcatcaatggttgataccttgttggataaggacaacgat

SEQ ID NO: 87496 - DNA, 282 bp, Glycine max
catctgcaccctcctatcccacagtatttggcaatattccagtatctccttcaacctcaacctcacctcaactcacatcaacttttcaacttctcatcattggatttatgatatgtgcgcacttcgcttccttaatgtgaaattaaaatgtccatgtctttgttgccatcgagaccctagatcaattgactcaagattattcaagcttaattggtaatgttgaggtggaattttggaaatgcatatatgtcaaagagaaaactttatcaagcatcatgatct

SEQ ID NO: 87497 - DNA, 128 bp, Glycine max
cgagctcgagccgggctacacagaattggcaacagtgcctatgattgattcaccaaggaatctgattttcccaaagagcaaaccaatgttttgtttttcgtttcagtttctgccaccacaattacttg

SEQ ID NO: 87498 - DNA, 280 bp, Glycine max
tctccctcgacaaaggatgacactcgatgaattgcgtgaagaagtttggtatgctgcaattagccttttgttattagcttttaatgcttttttatttgttgtagttgtgaattgtatgtattcatggctgttcataactttttaacattctgagttgctaattattgtcttaagggcaatggttaaggaatcaaaactgatgattttttattgaaaaatgtaacattatttgttaccaatgcatttccaccatgactgctagtttagctttctattcatt

SEQ ID NO: 87499 - DNA, 279 bp, Glycine max
gcagcttcagttcccgtgtttgctcagtaaagccaccaaacacttaagtggtacattgcatgcataataccaccaactttgattccgtgtctgaaaactaggtgctccgcaatttcgctacttgatctctatcagtattattaagtatcattaatgatgattattacatgctaattacaattttgtctgaagatgcatatgcatggttttctttataatctaatcgtgagtcaaataaattaaactagtatttccactaatttaaatactacagtatat

SEQ ID NO: 87500 - DNA, 192 bp, Glycine max
gttttctgctacttgtgcgcgtgtgcatgcctcgtcccgtcatagcgagttctagtcgtcgtagactcggtgttgtgggactcacccaccaccacaacaacccctgtccctcccacgtgcacagagtcaaacccaaacctctcgtgtgctctccagacccaacaaacaaacaacaacaagagcagagcttcc

SEQ ID NO: 87501 - DNA, 282 bp, Glycine max
tggaaattcggatcgatgtcgagggaactgaagaagcaatgttaagctgcatcagacacagatcgacagagcagggtgttaaaaatatagttaattaaatctgtgtatcattaattatggtttgttatgtaatatatatttcaaacaaagttgtgagatgtcttaagtataaattatgaacagaaacgatataataactctaaattatgttgcaagactttcttatttatttaaaaaaaaaaaataaaagggggggccgccgaaagttggtcttaggggccc

SEQ ID NO: 87502 - DNA, 198 bp, Glycine max
ctgaccaaaggcaaatccatttgtatctgtagctggaattttcgtcattcttactttaccttccttcctcaccttctaattccacacaagttccaacttctatctacgtccaaaaatctttttggttaccattgacttagccgaaagagtctaattctgatcattcccatggtggtcgtatgaagaaccctcgatgag

SEQ ID NO: 87503 - DNA, 270 bp, Glycine max
gctggaggttctgttaaaggtgatgatgggccaagtttatgctgcaatgaaccaagtttaagtgaagtatatgcggatgtgatgagagtaacaaacaaaccaatgatggggagagattcggcaaaccgtgcacaacaaaccccagtgagggagaaacggaaaaaggccagtaataaaaaggctcccaaacctccaagacccccaaaggctccatcattggatgcagctgaccataagctaatcagggagatatctgaacttgccatgttg

SEQ ID NO: 87504 - DNA, 262 bp, Glycine max
gtaaggaggaaagagtggagagacggagattggaaagggagagaagtggtaaattagtccgtgatccaaaagcgatatcatagatcatatctgcatactacggtcaatttggccatgaaattcatcaaattcccatctcagttttctagtcccaaagctcagtcctcatagtcattggcttccatgcaagatctgaccacagagaatttcacactcctcctttttacacttccctcacccctggctcttccaaccccctttt

SEQ ID NO: 87505 - DNA, 130 bp, Glycine max
agaagattaaggatcagatagtaaatgaatgtcaaacatatacgatctgtaacccttttgtatttctgaacaaaaggttcaagcacaagggttcgtttgtatttatcaacatatttgtaattgtgcctac

SEQ ID NO: 87506 - DNA, 263 bp, Glycine max
gttggggtgctgaattgtgaggttctggctgttctgattgccttggcttcctccgggacagcggtggcgcgtgagaatgcggtcggttgtttgtcgaatttgactaattcgggttcgtcggaggaggccgatggtttgttgaatttgagggttatggtggtgaaagaaggtggagttgagtgtttgaagaattactgggattcagggaatcaaattcagagtcttgaagtggctgtggagatgctgcggcatttggctgaaag

SEQ ID NO: 87507 - DNA, 107 bp, Glycine max
ctcagtgtgggaaaacgatagataccattaccatgttggctggacaaccgagatgtgatgaggattgcaacttcaaccattgctttggcttctttactacccagaac

SEQ ID NO: 87508 - DNA, 258 bp, Glycine max
aaacatttgtgattgtgtcaaatctgtatgagttgcagcaatcctcacataccccatgtcgttgaggtcttggttcttgctctcaacagtcacctctaactcggtcttttccattgctttgcctgtgtcggaactagctcgtagctaaaatttaaggaatggagagttcaagttatgtttaagataaagatggaggaagaacaaagacctcaagcacctggggtttgtgaggattgctgctattcaaacatttgtgat

SEQ ID NO: 87509 - DNA, 262 bp, Glycine max
ctcctatttccagcgtcttttgaaggttaggagggatttaagacttctgcaatcggcaaacatggaggagcttgtatcatcatgtctccttgttatcaaaggagatagaccaaaacagaagcttcatcttttagggagcttaaaaaggagaaaatgtgatggtgataaacataattttatggagcgtctgttaggagctgcacgcttactagctgagatggttgaacctatactgaaggctgcttctgaggtatctgtgttg

SEQ ID NO: 87510 - DNA, 268 bp, Glycine max
gcttcaagcggcattcaaatcacccactttcctcaaggttgaaagagttctgtcaacgttgatatcatgttttgggcatacaaaaatcctccacctgcacacctcttcctgatatcgagtgatataggttttgctggcttattacaccggataagcttgaataattacaatatcttgctcgctgtctcaacgaatgctcctgttctctccacggaagcaactataacgtggcaatggtataaattgcttaagggagaaaatcttattg

SEQ ID NO: 87511 - DNA, 264 bp, Glycine max
tagacttttaacagaatacttttacttaaagtcaagatgacattaatcatataatatctgctatatgctagttgtctatactatgtcatggaaagcttgggttacataagaaattgactaattatcaccggaaagaacaattttacagttttgcttggtgcattcaatatttccatttaaaattctctgttcaattttttttatcattttaaagaattacatatctttaactatgttttcctttatctttttgctcaactacct

SEQ ID NO: 87512 - DNA, 260 bp, Glycine max
tcctcctcgcactctttcctctctctccccctctctctctccgaaaaaccagataccttcgaccaagcaaatcctagggtttctcccttcaactttgttagccatagctctctcttcacttagattttaaatgtaattcagattcatttcacttcgcatctcctctctcatcaaactttagggctttcctctctctcttccccaaaaccctctccctagacgatttgcaattcgatcactcgatctcgccatggaatccc

SEQ ID NO: 87513 - DNA, 259 bp, Glycine max
gctctctctcagactcatacaaacatatatatcgctctccatccaatttacatacgcgaacccaagaggcgctacgatgatcgatatccactcgaccgctagacaacgagtcagtagttaatacgcttcctaggatggactggtaaaggaatcagctcaatggagtctcgctacagtgaaggtgcattctatactaccggggctgatagtgagccatccgcagtctgaaagctctcacagcttacacgagagtctgatg

SEQ ID NO: 87514 - DNA, 247 bp, Glycine max
gccgccgatctcggtcccggagaacgcacatgtgcgcgaactgacgcgtcacactagcgggtgaagcgacatcgtcgtcgtcgctcatggccggtgtgactcggtggtcatcatcagatctgggttttgaccatcataacgaaaatctcatacagatctgacagtatctcgactccatggacggtggcgcctttcgccagaagggagaactccgacattgaccactccgtggtggaatcgctacccg

SEQ ID NO: 87515 - DNA, 245 bp, Glycine max
gcgtatctctctctctgacacagactccattgatttgcaacttgtaagcaaccgacattgatacaaacaatagccgcgtttcttgagcattccgaggatatctctctaccttctagtctattgtcttaaaattccaacattccttgactctcttctcttcgcaccatagggacgacttatgggttccacagagaatggattatcgctcgctggagaggctcgtcttcaggatgatgagagcaaac

SEQ ID NO: 87516 - DNA, 259 bp, Glycine max
agattaggatcgagcgatgcttgggcttttgaggaggtagatatgacatttgaaggatcctttaacttttcaacaccataagctttacgggctaatacttgatctgttggtacctggcatatggatttttaagtaaagaaagaaggttttaaattgtgattgtggttatggttccatcacaatccttaatcttgtgagatattccggacaaatgcggccacaattacggtcccaatgcagtcatggggggcccaaaaac

SEQ ID NO: 87517 - DNA, 238 bp, Glycine max
gatcttggttcatcagaaatacttaccattttgaggtactttctttctccgtccaaagatgcttataacagtatggtaactgtgaagaaggattgggagtgccaagtgctgttggccattgagaaagcaaatgatagcaatctgaagaagtacttgcttacggcgaaggaggcttctattttgcttatgatggcatatgatggtttctctgcgtctgagatttgtttgcattatctgt

SEQ ID NO: 87518 - DNA, 286 bp, Glycine max
aagatccaaacggttgcccgaaggaacgaattaagaatattgcaagagtagttagttgcgtcgccaactcatcggaaaaatttgaaaatttctggggaaaaaaaagccatcatcaccaccaacagcgacaacaaggacagagttaaaagttcctgttctgttttcaggaacacacagcaacgttgaacgttcgtttttttttgttttttttttgcaaagaacagagcaggaaaaaaacagaacaacactcacaacaggaattttcccaaattgttggtgttcgtaa

SEQ ID NO: 87519 - DNA, 213 bp, Glycine max
aataaacagggtatgagtgtggcacgaatcctttgaaccccttgctccattataaagttggaagataatagagaaatcaggtgggccttgagtaatggcagtagcctctgtgtgaagaaacagggcgcggtatttcagtcgattatgccgcaataaaggcatgaaaagtcaagactcggcgagatgcttgtgaccccgctgacttgggggtta

SEQ ID NO: 87520 - DNA, 277 bp, Glycine max
gtcccacaaatgggtatgaagaacttcatttctgcccctcaaatgccaaatttgaccaatgctggtgctcaaagaggcatgcctattcggcaaagctatcctcctcagatggcacggccagatatcccaatgcctctgaatcacaagtttgtcaacaatccccccatggcttctggtaagatagcatatgctgcggaccaaatttatgatcccttttcacccacttctgcacctccacaacagaaaggtaatcctggaaaatgagggaattggatgt

SEQ ID NO: 87521 - DNA, 102 bp, Glycine max
cgcatacggtagatatctacgcacccgttgacgaggcaggagcacattaatgaccgccatgttcgaggagttcgtcatcagcgtacacccggggattcccga

SEQ ID NO: 87522 - DNA, 288 bp, Glycine max
ctaaaacactcagtaaaatcacagttttgtgatgaagaagaaaaacataaaattttaaatctttctatcagtagtctgctatgtagaataaaattttagaattatatggcttgatgcttgctttttttttggaaggcaaacatagatatatactattaataatatcaaatcagtaccagaagtactgatgaattacacataaagacaagacactaagagtgtcgcctcccaaacaaagcaagccccccaaaaatccactacaaaggcttgctacttaacggcatttta

SEQ ID NO: 87523 - DNA, 277 bp, Glycine max
ctcgagccgatttcctgcaaattaccttttcaatcattttgatgaccactaaatgcatggcacttaaaattttgcctatcctcaagcttttcatttttgacagctgcatttttcgtttatgcacactgataagcttacccgtgaatgtaattgaaagatgaaagatggagactgtatgtgattgaaactttatgaatgctcttttattaatgtaaaataatcatctgtgtgcaataaaaactaataaacttattactttggggtgcttggtatataa

SEQ ID NO: 87524 - DNA, 276 bp, Glycine max
cttacccttccctgcaacacaataccccatcccaaaatatagtaacattggtagttccaccataaccgtgtcacacgctctaagagctagtggcattactacacctcaacctaatgcacaaaccctgtctggtgcaggtgttgccactggacctgcacttcctcagcaccttgctgtgcatccctactcccaacctactcttcctctggggcattttgctaacatgattagctatccattcttgcctcagagctatacctatatgccatcagcttt

SEQ ID NO: 87525 - DNA, 272 bp, Glycine max
cgagaatttcttgtcgcaagcatttacttccttctgagcatcaactatgcagtaactggcaaacccaaatcgaccttggtttatggcatcagctgcttgtgggagaatgtacttcacaactgggatgtatgactcagcacagaaagccaactgttgctctaattgtccacctgaggtctgcttgataagctcttcaatgtaactgagtgtgtcagtagcatttgtcagaattccattgaccattatgagggccataccctttggatcacttt

SEQ ID NO: 87526 - DNA, 267 bp, Glycine max
ctcgagccagtggaatgttggagaagacgggatatttgtgagtccgtcaacttgttaataggaattcccattagagggaaaattgattgggttgcttaaaattgaggtggcatagagtaggtttcatatatgaagagcattgaaggtgctcttacacacacacacacacgtgtgtgtgtatttttacttgtttaatatagggtcatcctatgtgctatcctgcttttcgcatttttggggttggctactacgtaccactctttagat

SEQ ID NO: 87527 - DNA, 270 bp, Glycine max
aaattctctcattttaaaatcacatggctgaattcacagaaaatatgcaattgcaaagcaatattagaccctcccagtttccattcttagagattgatccaagcatggaactcctaaaccagttcttagggatgaaccaacatgtcctagaaaactcaaacttgattcctatgcacaacttggtgcctttctcctgtgacacctttttgggccctcaagagcctgagtgtccaggaaacttggaagaaaatttccctgcccatgtcaacc

SEQ ID NO: 87528 - DNA, 257 bp, Glycine max
tgctgagataagatatgtttccaaagtttcttattcctatgccatctacctttctgtttgaacatcctagcgctgtatatagataccttggcatttatttgctagtagttttatgtaaatggctaccttgaggacaacttctagggtgcttttattcctatcttttgaagaaaaatcagtgaagttacctccaccctcttccataacttgcttcaaaatggataaagcaattgtctcggcttcttgaagggttaggc

SEQ ID NO: 87529 - DNA, 255 bp, Glycine max
ctggtggaaacagagggcgaggtagaggctgattctaagaagtggcaggaactactcaatgtgtatcggtagcaacttcactgcccgtgtttcctgtgcatccttggcttttaacttgaagtgtttttcttgtgtttatgatcacaaaaatgttagtgctattatattactcgaggaaagtttctctgccagactgcccccatctcctttttaatcccttcctaacagaaaacgtgcctttccctttctttcctt

SEQ ID NO: 87530 - DNA, 180 bp, Glycine max
aaaaatcagtaaattaataatcaatgtctaaatgaactttcatgttacagaaacttacaaattgtattaacatcagatgggtcatgaattacaatgtgaattgtacaaaattccattgttcagcttcatgagtaaggtttaccctgtttgttatccctcttaagctggacctttaatttc

SEQ ID NO: 87531 - DNA, 263 bp, Glycine max
taggcccgatcttcctctatcgatctctgctctttcctctccgctttccagattcgccgcattttgcaattcctaaagacatccacaatcgaaatcgcggtccgttggctctcgattcccacgctccacgttcacgattttcattgagctgaaacttgaaagggcttgatagtcaacaagggaagagaaaatgctgatgcccaggttcatgggaaagtgcttctgttttgggcaatggctgcaatgattactgcctttgcatt

SEQ ID NO: 87532 - DNA, 253 bp, Glycine max
ctcgagccgttaaactcaggagacaatgaaaacgatatggacaacgatacattaaaatgatacaagagatttggaaaagtcaaagaacatattgctttcacctgtcagtcaattgtgctaattgcgaactaatacgagcatattgcgttcaattaccatcaaattatacattggatgaagaaattagatatatcttatcatcatgtgaaaaatgttagctgcacaatctgtaagaactaagaagtattgttta

SEQ ID NO: 87533 - DNA, 264 bp, Glycine max
tctcctatgtattcggagtcataggctaatgagcttttggactttgtgttcatttgtcgtgaattttctctttaatttttcggttgcaaaatttttggctgttatttgtgctgcagactccctcttatagaaaattatggggtccggtgaagcgtctcgaatcattgtatccggattcaaatccacgaggatattatgctgatcctgtttcggaaacaaatgggtttatttttgtccggatacaatggggttttcatgagatca

SEQ ID NO: 87534 - DNA, 267 bp, Glycine max
tctcctcctgagttttgttcttcaatgagaattggtgacacccttgttcatgacccagaacaagttcagtctcaaagtggaaaggtatttgttttcaaacctttggagaagatggcaccgatgcagaatacatgatgcaacaggacctgttactgttaggctctccaagattcttgttcaccatagtagaagaatcataagatgatttagaatctgatgatggcaaatccaagtgtgacaagagtggaaaatgttcaaggggtagaa

SEQ ID NO: 87535 - DNA, 264 bp, Glycine max
ggcttcaacatgcaccaagtgtcccattccaggaacggccacctgatgcagagctgctagagagagatggagatcaagatgatagagatgaaagatgggatcccgattctgacagggaggttggcgatgacagcaatcctgttcgcagaagggtgaaaagtgaatgcgttgatgctgaggataaagatacagataggtatcataaacatctagattgtggaagagattatcttacgccttgcaaggagatttcatgctccaagg

SEQ ID NO: 87536 - DNA, 175 bp, Glycine max
  unsure (1)..(175): unsure at all n locations
gaggtatctgaagtcatagggcaagatgttgtctcacttcccgtgaacaagttttgactaattaagatgttgtctcccttcttcactgctccagtcaccccatcaaaattgataggcactatctctgacgcgngtgcttgtccctgatcaggagttagtactagcatgccatttg

SEQ ID NO: 87537 - DNA, 242 bp, Glycine max
  unsure (1)..(242): unsure at all n locations
tcgagtggtatcagtaatcgagatgataaggggatgcatacgtcagtgtggggagggatcgctgtttgaggctctaggaaagacttacacgcaagatgtaatatgtcacttgtgnttcagtttcgggatcgagntttacgacgtcacgagggagaaggcaattgtgagaaaagagaagcatttggaggaagagaagttgatgaggacgaagaagttatctacaaaatcgaagttcctgccaa

SEQ ID NO: 87538 - DNA, 268 bp, Glycine max
  unsure (1)..(268): unsure at all n locations
caaagtcatttgtattgtccctagccatgaagagcccagagcttccanaatttccatgggacgaatggcttctcatcaagttcaattcatggttggagaagctcaagaagtgcttttagagcactatgatcaggcagcagattttgtgctcattgactgcaaccttgagaaccatgaagagatccttagagcagttcaagagggtaggaagcaaaatgggacagtggttgtagggtacaatgcatttagctgcagaaagtcttgtttg

SEQ ID NO: 87539 - DNA, 131 bp, Glycine max
tctcgacccgttatcggctcgtgattacgaaaatccatcagcgtgtgatgcatttggctggtccaggctggaccagggaatgaatagagatgagattctttcggttgaagagaactgagttaagcggcgtg

SEQ ID NO: 87540 - DNA, 126 bp, Glycine max
gcaagagaatgttaatcatctgatctgaattagtattatatttttggcagggcaacagacctatcgattaataagtggttccccctggggcagtcctagaacctaagcctcattttcacagttgcc

SEQ ID NO: 87541 - DNA, 286 bp, Glycine max
agaagagggctttgttcatctacccaatctccatgcatgctgtgaatcatccaattcccacccatgttctctcaatgcagaaaaccattttaacagttctatttcttaccttggagttgcattgcttggagtaggaatcgctctagatttttttcttacaactgggggaggaagtggatttgagtcttcattgggaaccaggaatggaatggcttagaagaaatgtatgtgaaaactgcttgtggtttcacccatagcctgcggaaaatgctttattgtgtttcgg

SEQ ID NO: 87542 - DNA, 266 bp, Glycine max
atggattcgcaggtgttgcttggtgttgcactttcatccgtgggtggtttcagcacttccatcggtgcacttttcgtaatccttagtaaagctccaagtttgaaggtgcttggactgttacagggttttgctgctggtttgatgctgagtatatcattctttgatctgactcataatgccttgaactcacttggcttcctgagaggcaacctttggttttttgctggtgtcataatcttggctgttgttgccaatttataccgaac

SEQ ID NO: 87543 - DNA, 273 bp, Glycine max
agatgttaaagctgttgttagtctaggttgctgttacaatttattatctgaagaaatgattaaggatggtgaatctcaatttggatttccgatgagtcacgctgtaagatccattggtttatcacttggaaaaagtgcacgtgatcttgcttgccagagtgctgagagatggaggagtctggacatgcatgctggcattcacaactttgagttgcatgcttttcgggctgtttttcaaatggttctttctaaatattatccggaaattgtgat

SEQ ID NO: 87544 - DNA, 282 bp, Glycine max
cgatatgatgcctcgaattggtgtcaaagctgatgcaaatttactgataataatggcacgtgtatatgagagaaatgggcaaagagaagagctcaagaagctgcaaaggcacatggaggaagctccaaatctaaatgatttagagttccgacagttctataattgtttgttgacatgccatttgaaatttagggatctagattctgcatcagacatggttttggaaatgcttaggaaagcaaaggaagcaagaaattctcttgcagctgccaaatttatgac

SEQ ID NO: 87545 - DNA, 262 bp, Glycine max
attgctctatatatactacatacattttgattaattttttacttggtctataatgtttgaactagaagtaaaatactaaacttatgttgatctgaattaaagaagaaaaagcgggaaaacgaataagaattttatgcgaatcagtgaatccattttaaagctaaataaaaccctcctctctttctctgtctctctaacgggaaccaaacatggcttccttccctcctctaggttcactcactctctgcgaagtcaatcgtga

SEQ ID NO: 87546 - DNA, 256 bp, Glycine max
  unsure (1)..(256): unsure at all n locations
ctcctctgtctttttctctctcttgctatccttttggctagtggcactgctgcaagtgtanatccaagaagcgcagtgccaagccaccatgtttcaacattcaacagaagcctttttccttccacttttctcttggacttggttcttctgcttaccaggcagaaggagcagcaagtgtagatgggagaggaccaagcatatgggacacctacactagacagcatactgaaaagatttgggatcatagcaccggtga

SEQ ID NO: 87547 - DNA, 251 bp, Glycine max
cgaacccaacaagcatcttctccttagtcctccccgccatgatcaaattgttcaagaggaacacaaacactgacacgtgtcatcaccaccgttaccgccaccccgttttgggcctgggcctggccacaaggcggcccacaggcctcctaatgttctggaatccgctatgttgaggcccacggctcctccaccgagcgagaagagagtaattattggatccgtggacgacgtcgttacggggctggcgtctt

SEQ ID NO: 87548 - DNA, 254 bp, Glycine max
catctccctcaatttcactagaatgcaaatgatggacaactgagccattaaccaagcagaatgaagaagagcaagatgaaaatgaaaatccagattttcatattcttctgtttcattagttgtttctcttaggttttgctgctgcttccacaaatgatgaagttccagctttgctttctataaaagaaggtctcgttgatccattgaatgcccttcaggattggaaactgcatggcaaagcaccaggaacggat

SEQ ID NO: 87549 - DNA, 250 bp, Glycine max
agaaaatgaagataaaatagtgtatcttgcagccatgattgggaaaacaagccataagcatagagtttaattgaaatctattgtcagttgaaactgagtagttatcagtggaaagatgagggaaggggcagcaaagtatgcgtcacaggagctagtggttacatagcttcctctctggtgaagaagctcttggccaagggtcacagcgtccatgcaactctcagagacctgagtttgtataagaacgagt

SEQ ID NO: 87550 - DNA, 247 bp, Glycine max
acctctttggacattttcttgtagtgaatggttctttccttactcgtccctgttcactctctcaatcatctctttttctcttctctctcactctactcaattcaggacacccttttccttctaatcttctggatattggttcacttgagtgcataatatcagcctgaagctctatgtaattctcaacatctaaagccacacaagaaaatcagcatgcgttggttgggtctttctgttgatgtgttcc

SEQ ID NO: 87551 - DNA, 241 bp, Glycine max
ggggttgtgaggggtttaagaacaaacacaggcttggggtagttttcaggaggattttgttttatcagacaatagcccaagtctctgggtgagaattttttgattgcctttcatcaacaaatttcttcagacaaccaaaaataagtgttcatttttttggtgcaaacataattcaacacaagaagaaaggtgggtatttgtcggcttgattttcaaaccataagagagtggcctcaacatg

SEQ ID NO: 87552 - DNA, 249 bp, Glycine max
gcttatcaggagcagcacccaataacgtgccaccacctgtcacccaaacggcacggcactagtcgttttttcactttaacactcctccaaaaatcaaatctaaaccaaaaaccgttggttaattacacttaaactcaaataatcaaacaaacaaacaagctagatttgaaattgaaagagcaacaacaaatttagaactaagaagaagaagaagaagattgcattggagaacaatggctagtggaagaa

SEQ ID NO: 87553 - DNA, 259 bp, Glycine max
  unsure (1)..(259): unsure at all n locations
ttctcgagccgattcttctcgagcggctcgagctgaagaagaaggcctccagacagtgaagctactttctaacaaggagcacagcggatttagcaatgtcaacgattttctcccaagtgatgcggcaaatcgtctgaagtaaaccatattgggaaaccggtacttttttagnattncaaatttcaaaatttttgctagcttacaatttttattgaggacaatcagtcaggttcagagatcacaaaagttcagaagatcg

SEQ ID NO: 87554 - DNA, 271 bp, Glycine max
cagctcgagattgctctcggtcgaagcgcttataacaatagaggcgtcaactccaataatgaaaggcaggactctggttatgggggcagatggagttctaataatacaaaggactaggatgatggtttaagcaattttccaggggccaaggttcagaattctcctggaatgggagcttctcctgggggctggcgtggtggtggtagaatcggtcgagctgatactagttggcgacatagaagtgttgggtccactaacagtgagaatagtg

SEQ ID NO: 87555 - DNA, 215 bp, Glycine max
tgttgtccctcttaggcactttcttgttttctctctcaccctcatatccatcatcttccacactcatggatcgtactctgagcaatcaataatcaagttacccacagaccaaccaagggtagagatactgacccaggtgacttctttgtactatagcatttcagagtgaattacatcacggcagtgactctgaatgctgcatcagcgagcgcagt

SEQ ID NO: 87556 - DNA, 205 bp, Glycine max
tcgagcttgcattgcagaagcgtctccattttctttcgcgatggccgcgcgagccctgcttgaccagataaaccctagccaccgttctccgcaacgacgcgaacccataatcggagctggcatactgcactatcatctcgggtgccggacagtccgactggatagatatgcgtcgacacacacgcgatcacatgcacaaccacag

SEQ ID NO: 87557 - DNA, 219 bp, Glycine max
gaatttccaagacgcatcaaaatgcatgagaattgaagtgtactagttaatcatactcaactagaggagaggctttgatctactgttttcccatcctcagttgccttggtcaccttatatgaatcaaacatttacacaatgagtaacaacttcagcaagtatgaaactagagaagaggctttcattaggaagagcatgaaaaaaataaatgagtatagt

SEQ ID NO: 87558 - DNA, 182 bp, Glycine max
ctcgagccgtgagcataggtggaactactactttactctcaatagctgtaccaggaggcaatgtcacagttttttcatgcaatttctgcatgaagaagttcttgaatgcgatgcattaggaggcgattacgaacgttataagattgatacgggtgtatttagaagatagcaatctcaaaggt

SEQ ID NO: 87559 - DNA, 280 bp, Glycine max
gtgaattgctgctaactttcattcttgtattctttttggtttttagtttcaggatgctggaagttcatgctcacactgagtcctgcagggctgctcgattcatcaacggtggacgtgcgatcttgacaggttctccggattgcttaatactggctacagatgggcaagactatcacggtggtgaaaatcatcgagccatcagcgagcgaggttcgtgaagcaactgggtttggaaccactttcatgatggacaatgttttgaccgagggtccagagctga

SEQ ID NO: 87560 - DNA, 281 bp, Glycine max
ccaacatttccagcagcagaagccatttgtccatgccagcactcactacatccaccacccagcagccacaggtccagtgccagtttcatcatactccccagtttatgccccaccacaacctcaacaacttcaccctccaattggtcaacaacagtacccagtttatgtaatgccagttggacctacacaagtaacacaaccctacaacatggcattgcagcccaatatagctgatcctaatgtggtagcttcaagcaggtcattaatgccacaaagtattg

SEQ ID NO: 87561 - DNA, 237 bp, Glycine max
catgacgctctaggatgtatgccctgcatatctgttgagataaagcccaaatgtggatttattcctctttcaagattcatatctgaaggaactgctatcaaaaggaggataactcgctttcaaatgcaccaagctctgaaattgcatcaaggagagatatcattgctaagtaaatacaatccacttgatctgttctctggatcaaaggaaagattttgtacagctatcaaggttctc

SEQ ID NO: 87562 - DNA, 283 bp, Glycine max
cggcattctgccgctcgagcgaacacgctctcacaccctttcacgtcgatagacagacagagagagagagagagagagagagacgaagccattttcatttctcaggcgccactttcagaatcggatctacgaaccaaacatgtcttcgaaagagaagggcgacaacgctcaggttctcctccgttacatgccgtttagcgacgaagagttacgacaccacgtgccacaagtcgtgacttggcatgcatacgatgcgtcgatgtggccgtgtctcatagcagct

SEQ ID NO: 87563 - DNA, 140 bp, Glycine max
gtggatatgcaggtcaaggttcaagacaatccaaacctggtagtgagtgtttatcagctggattaccatggttaaaatactggtttacactcatgaatgctcggtggaaaaagctgtaaagggacctgtataacgatggc

SEQ ID NO: 87564 - DNA, 136 bp, Glycine max
cactcatggtaatctaggatctagcccctgcatatctgttgagataaagccctaatgtggatttattcctctttcaggtgagtcgagtcgtgatatgtggcagcgacaacgagcgatctgatctcaggtctttagc

SEQ ID NO: 87565 - DNA, 143 bp, Glycine max
aggatagaggtgtatgggaactgaattgaatgagagtacatgaaggaatagaattgtagttagaaaggtatgttttgggatgtgaatgggttgtgattaatggttatgtgagtagagttttatgaaattgtttaaatatgagg

SEQ ID NO: 87566 - DNA, 277 bp, Glycine max
ccctcgagccgattcggctcgagcggctcgagagatactgagacagtcaaggattcagtatctacccaaggtgattctttcacacatgaggaacgagagaacagaaaaggcttcaaaagatcctaaaagtaaggttaaagtgaatccttcagacagcaaccgtggatcaaaggagagatctgatagaaaaactaataaattgcaatcgaaggtatcgaatagcaatcaaaagaaccctatgaactcaaataaagggccctccaaagttacaaacaaa

SEQ ID NO: 87567 - DNA, 268 bp, Glycine max
ctcgagccgctcgagccgctcgagccgattcggctcgagcccaaccctcttcccttgttcgacaatagccacacatcaaaaccgaaagaaacgattacaaaaacaagaaaagaagaaaaataatcattcattgctcggtgagaagagagagaggaacggcccgatgaccgggaaggcgaacccaagaagcacacggcgaaggaaatcgccgcgaaggtggacgccgccaccactaaccgcggcggcgggaaggccggcctgaaggacc

SEQ ID NO: 87568 - DNA, 268 bp, Glycine max
gcgcttctggggtacttgtggtaatctaccaagacatatatatactcagctaaaaagctagttcatgagtcatcatttggaagttgaaactaaagcggtggctgcaaattgccaaatttcaatgcctcactattagttgcaatgcctgttctgcgccggaattattatataattgcgaatattatgagtgccgtggagtgctcataaatcatgattatcataaaagaaatacacatgctttgacttaatcaaccacaatattacttag

SEQ ID NO: 87569 - DNA, 270 bp, Glycine max
tgggagtgtcaagcagattcatggaagaatatgtcacgagacgagaggagagaagagaagagagatgtgagatctgatggggaaattgatatgacatgtgaaatattattatgtcatgtgtgggtggcatggtacactcattctcatatttatttatgagacacactcactgtatataaagagaaccaatgcaccccaattctgcattccccctcacttttgggttcaaagtgattgctgactccttatttcctagttccgtctttcctt

SEQ ID NO: 87570 - DNA, 270 bp, Glycine max
caacagttgagaagacagaagaggaaactttgaagcaagaagctcctgaggaaacaaaagaaaatgatgatccgactgaggttaagacaccagaagctgcagaagcagtgacagaaacacagaaagaaactgaggctgaagctaaggaagaggctaacacagaagccccggcagagaaaagcgaggaggagaaagaagggccagctgaaaagaaagatgaggaagtgattgcagaagcagaagcagaagttgagaagagcgaggaggtca

SEQ ID NO: 87571 - DNA, 252 bp, Glycine max
gcagccagcactcaggagccagcgagtattcgatcgcttcgctgcagtaatcgtcggtaacgaattcgccggtgccgtgccgagatctctcaatgtccgacgactcagatacctcgattaattttcctccggttatggtgttagggtgtaaatagtacgtagtttttccttatatatggcgtcggagaatgtgatgaccggggatgccgcgtcaccaccatcgtcaatctcggctaggaggccaagctcgcc

SEQ ID NO: 87572 - DNA, 270 bp, Glycine max
ctgaaaacagtgcataggagaaaaaacaggaacatatgttggaatttattactatgtataataatcatctgactactaaacacacataatcatgagcaactacccaagtttgactggattgtccaattggaacttgattagggtcaggcatcacttcatgtttgtccgtgagcttcccttctgttttcctttgtttccgcaacagctaaaaagggttgttaattgtaactaactataactggttttgaatttttagtctttgatatatat

SEQ ID NO: 87573 - DNA, 257 bp, Glycine max
ataaaattaaaatcactactatattctctctctctctctctctctttctggttaggaccagtaagagttgttgttgtttataatttgaaaacgtcaaggcagccaacaaactaggggggttgttcttcatctgttttgtatggacatgaagaagggatattcagtttccttgacaaaacaacaacataagatagagccattttttgcagttcatcacacaagataacaacaccaatgcatccaagcaaatcatgatg

SEQ ID NO: 87574 - DNA, 262 bp, Glycine max
ttcaaaggcaatcctctatgataagttccactttccaaggtgctgatacttcagcgggtccaaatgttagtgccatcaataagatcatggttatggaaaactactctgcttgtagtagtgaaggtaagtctttgtttttggttcagaaccaccaagtctgtgataacccgtatggactagatatgaatatgatcaactgttcaacgggtatcacaccaaatacatcgcagtttgattattcttggccattagcccaacaaag

SEQ ID NO: 87575 - DNA, 252 bp, Glycine max
actcgaaccgctcgagccgctcgagcggtcgacggtggaacttcacctttcattttgcgaacttcattcacctctctcgtatttcgctctgacgtgtctcattcctgtgcttttgaatcatattcttcgatctgttcttcaacatattttctgctttcaaccgttcgcgtcgtgactcagcttcgaattgttcagtataaggtattttcaattctcattgtcttgctgtttgtctcttattcgttctgggct

SEQ ID NO: 87576 - DNA, 264 bp, Glycine max
ggttgctcttggaattgttatctttgaggtaagctaagaagttgtatgattggcgattgaaagaaagctatattgttttgcagtcatatatgtctttgtgcttgtgcccacagataaatagtctctaggattataattcactaatcaaactatccattttataaaggatttaactagattggaccaataacaaattgagaatgcttgaactcttgataaggagaatacactgtttattttattgataatttgatatttgatagg

SEQ ID NO: 87577 - DNA, 261 bp, Glycine max
ctcgagccggaattcttgaatggtaagggtgtggtttacacgcccgtgaaggatgtggacataggcccctatagcaccgagttctacctccaagccaatgtcaatcctccccgcatgactggacttttggtcaagattttcactcatttgttggagtgtccaatacttggaaccttgctactgttcatactgaaaggaaacaatcttattcaccggctcatcacaaatgcagagttcaaagaatcgcctctctttgttccc

SEQ ID NO: 87578 - DNA, 185 bp, Glycine max
gcaaggttaatgatgatggatcagattttggactggtaactactagtcgggcgcctgttcttgcatttctccacggctcttggtgccagtccaaaatctgctccatcatcattagcggtgcctagttgacttagtaactgaagcaaggttaagctgcagcagacacagagggagagagcagggtg

SEQ ID NO: 87579 - DNA, 259 bp, Glycine max
cagaggtttacctttgacaatgcttgctgtatggcgtttggatatgatccgaagtgccttccaaacaagttcagtactaagctctcacactttgcttatcagaaagctttaattgtgcttgaggatgtagcattccacaggcacatcacaccaagatgtttgtggaagctgcaggagtggcttcaaattggtaaagaaaagaagtttaaggaggccatagaagcttttgataagttcttgtttgaacgtattgcatcta

SEQ ID NO: 87580 - DNA, 252 bp, Glycine max
gtgaactcgttctatggaatccatcaattggtgtatacaaacggttacgtttctctgacgaatatgacttaatcaatggatacctatatggttttggctatgacatatcaacagatgactacttgcttattctgatttgtttaggtgcatatgctctatttttctccttcaaaaccaattcctggagcagagtcgatcttcatgctcgatatgtggatcctgacagtgaattccaagctgggactctcttca

SEQ ID NO: 87581 - DNA, 257 bp, Glycine max
cttggatctgcagaagttgaagaagaagagaagaagaagatgcagcgggacttcgtcgcttcgctcctcaccgtcctcaccagttctcagggaatactaacaaccctctcgcaaagtaacgtagagtacaagtatgattacaccacggtcccatttctcgcaaagtaacggagagtacaagtatgattacttcacggtcccatttcttgccgaggttttcaagcttgcggtgtcaagtttgttactgtggagggaat

SEQ ID NO: 87582 - DNA, 255 bp, Glycine max
tgtcgtctgttcccaatatcactattttattggtttttcactattgtccctcctttctcaccactctaacaagcccttctcagtactgcacattctgatacaaacccaactcctacatatatattcttcttcttttccttccccatccctctgcaccacatctgttatttttctcacttttttcagttactctttaaatacttgtccatcccttttccctttcccccctcactcactcttatcattttcacttta

SEQ ID NO: 87583 - DNA, 253 bp, Glycine max
gcttagggtagcaagcttgtagttaattagccaaaatcatcggggtgcaatttggaggcactgcttctgcatgcttactccctagcacccgaaggggaaagagaaccctgatgaggttggaattcactgcaagggttgcatgcttttgatgcctttcctgtatgtatattatgatttcatattgtttattggtttgattcacacttcttttggtttttgcatgatgatcttattcataatcatcaatgggaag

SEQ ID NO: 87584 - DNA, 278 bp, Glycine max
tcggtctcgcattataagcactacgagctccgatcgcgtcatataaagtctctcaactgaagccgcgttgatatctcatgcctgagacttctactgctcctcaaactcaggtcgaacaatttcttcatctataaaggattaacataaccgtgagagttgtgtttagggtctcatggattaataatgcactttccgacactaaactggctgcttactatgatcactcaattgggctagtcccttggttttctgccatcatgcaaataaggattagaatg

SEQ ID NO: 87585 - DNA, 271 bp, Glycine max
cggctcgagaatacccactagttccctatagactcatcacattctccatctcaaccctccttaatactcattcctcaccctcctcctcctcctcaactaattgtataataattaaaaaaccaacaaacatgtacactttcttaatttaattaatttctactctctttttatcctacctttctagttacctcttcaattccctcttaaatattccctctgctttgcttccatactcatactcatacccctctcactctctttttgagataag

SEQ ID NO: 87586 - DNA, 264 bp, Glycine max
ctggtcttgcttagtgtgagtttaattttatgtttctcacgtctaagttagagtgctaattttggataattctgatatagtctgattggtttaacttgaatttggttactaaaattcaatgtcttaacagttatgccttagcctgatggtaatatagtagattctaatcaatttcattaatcatatgatctttgaatggcatagtattatttgttctgcattctaactttctgggattagggcgagacctggtgcagtggtaaa

SEQ ID NO: 87587 - DNA, 260 bp, Glycine max
gttctcttccatgtaggctagcattgaagcatccattgtacctatggatgtgtttatctctgacctcttcattattgctactggtaacgtcacccattgtgaccaattacccacttgtgatctgttttgcaagtggtatacggtttatataactatcacttgcatcgtaggttcaaactctgataggttaggggcatgacatatgccttagtgaggaggcatacagtggtgtttgtacttacaaatagcttacaattaaa

SEQ ID NO: 87588 - DNA, 264 bp, Glycine max
taaaatctaaagatgatcctaaaagtaccaaagagagtggtccttttgaaaacatggagcaaactgatggtcctgatgaggcaaagaaaataaagggtatgaaggggaatcgtgcatttaaatttgcattggttgagtttgttaaggagcttctaaaaccaacatggaaagatggtcaaatcaccaaagaagattataaaacaattgtgaagaaagttgttgataaagtaactggttccatgcagggggtcaatattcctcaga

SEQ ID NO: 87589 - DNA, 261 bp, Glycine max
cgacgtatccattgagatgtcgacggtggctttcgatccgccaccgtgcgatctggtcctccgtaactgacgacggtgtttcgatatcttacatgtctctctagccacaggtgatttgaaacagttcttcctggtctaaaggagtagtggagagatatggaagtcaacaattggcataaggagcttacatatgatgagtgggtaccgatcactgtatctggtgcacgtccagctgatcgctatgagcatgctacagcagta

SEQ ID NO: 87590 - DNA, 266 bp, Glycine max
ctcgagccgaaaagatttggattgatgaggtatcgattcagttaaaacacgtcgtgtcctaacgactactggtactaggtaggttgtacttctacttcatctggagaaacaaatggctaggtctgcgaaagggcatcaggatgaattcgacgaagatgatgaagaagaactcttaactggaaacatctcttccacagtgaaggtggatgaacccagcacggggaagagggtgaaccctcatcgttcaaagcattcagaaactgagc

SEQ ID NO: 87591 - DNA, 259 bp, Glycine max
ctcgagccgcttcactccaccttcttcattcccacccaagtctcaacatacaacaatattaacatgaatatgacatattaggaatggatacagagaagataaatcattctgctgtttccaccccaaacaagtacttattggggtgtgccccttgtgcttgaatgagaggctcctcatactggctgcaaaacaaggtcaccatcaccaaaaccgttcttcttcctcgtctaaatcttcacacaggcttcaagttagttcc

SEQ ID NO: 87592 - DNA, 256 bp, Glycine max
gaagaattgagaaaaagaatgtggtctccaaagtcctagcaatacagatctctagctctccctccgtctctcttgtatccctttatatgaatcttctcagatacgttttctatagcccctttttccttatcatagcctcgctgtagctgatatgtcatgctgttcttgttcctaacaaagtagtatgtgttaccatggtattttaaccggataccggtaataccatttagctgatgcgttctaacagctacctccg

SEQ ID NO: 87593 - DNA, 190 bp, Glycine max
tcgagccgaatcggctcgagatctatgtccctgacgctgagcaacgaggctctccaattcaaagctctcttcagaatctcttccagctcgtcgtacgatctccgcaaactctcgcgcacttgcgcatccttcctcgctcaactctacgtcgtgtcgcatagtagcgatagctcgacgataatggacatga

SEQ ID NO: 87594 - DNA, 257 bp, Glycine max
ctcgagccgaaaaaatcaggaaaatttgtcttggcttatgttcctttatgccaagagaaagactattatcttgcatctgcatgtgaagagatatatgccccacccagtgcttacttttctttgtttggattgactgttcaagcctcattcctcaaaggcgttttagataacataggaatggaaccacaagtggaaaggattggaaaatacaaagcgcaggagatcacttagtcgaagaaccagtctgacgaaattgt

SEQ ID NO: 87595 - DNA, 269 bp, Glycine max
tggagatgggccatgggatccagattctgacatggacattgatgtcgaacgtgagcttgtctcgagcaaagtaaagaaagaaatttctaaacatcagcccaatgatctggaggaccagacaagtggagagcatttgagaggctctgatactgcagttgctgaaacttgcatgaaggctctagatatttcttgtcagaaagctgatgaagataatgtgaaagtagaacaaaatactgtgaatgatttgggcaaagagacggacctgaagt

SEQ ID NO: 87596 - DNA, 265 bp, Glycine max
ttttcacccaagctactccactctcttggttatcggaggataccaggtatatttgtgtactatgctgtatgtttttccttttcgctctttttattgttttatttgcttttatatatatatatatatgtattctttacaacaatctttgtgtgtttactatagtagggcaacagtgtaaatataatagtaccacttgtacttattttattattataatacatgttactttgctgataaaaaaaaatgtaggatacaggggtaattt

SEQ ID NO: 87597 - DNA, 190 bp, Glycine max
ctcgagaatttctccctcttcgctctctctcagtgaccagagacagatgatgatggagatggcgaacgaaacgctgtcgttgcggcactcgggcgtggtgtatgggcgattgggtggagtcagagacgagtagagtgtatcagacgaagtatgaagtgattagcgcatagtgactacatcgtatcactca

SEQ ID NO: 87598 - DNA, 267 bp, Glycine max
cggggtaaacttgctctctctcacttgcttattcctcccaaaagcaaaagacggtttccgttggaaggaataacgagagatattgagtctcatatctgattgtgcggcgacgatggagaccaccgacagcatcatatcccgggatcagatcgcacacgcatcggtgtgggtcggctgcgccgtctcttccggtttcagttcctcattcgaacgcttttcctgcgtcaacgtcggcagctctgaccccgacaacgacgatggcgacga

SEQ ID NO: 87599 - DNA, 289 bp, Glycine max
agaaaaagaagctgcagaagttaaggtaaccgaaactgaggttgatgaagagaaagtggcggtgtctgcttcttctgctgatgaagacggagctaaaacggtggaagctatcgaagaaagcgttgtgtctgtgactgtttccgaggaagcaaaggtggaagctgtttctgcttcacccgaagaagtttccatctggggtgttcctcttcttgctgacgagaggagcgacgtgattctcttaaagtttctgcgtgctcgggacttcaaggtgaaggaggcattcgcgatg

SEQ ID NO: 87600 - DNA, 293 bp, Glycine max
tagtaccaggcggcaaaaccatttccgctgaggactgagacgcggtggtggcggcgcatggtgaagctcaatatacccgaccagcccgagcccaaaaccgtgctagtccagaaaaccatcgaccccaggcccaagccctggcacaatgcccatcatggaaaacacgacaccgtcaaagaaagtgaatccaaggagaaggttgttcacaggaagctttcggagtctgaggagtccggcatgagagtcttaaccattgcaggggaaaacagaggagcgtacacgcaaggctagag

SEQ ID NO: 87601 - DNA, 292 bp, Glycine max
aggtcccttttcagagtctgtctcaattccccttcccattatctcagttgtctgtgcctgagagcaagaacagccacagaaactgagaagaaaagaaaaaaagaatgctatcttcaaatgttgttccatcatcatcccctgtcactttctccaaacccaatcaccattttttcatcaatgcatctcccaatcccaaaccaaatcttctcaggtttcaggcccaacacagaaccactcctctcaaaagttccaaactttcttttatgccaacgtctcagatccaacattcaat

SEQ ID NO: 87602 - DNA, 262 bp, Glycine max
ctcgagcgtgcctatcgggaaagcaaaattacacgcatgctgcaggattccttgaggggcgatagcaaaattttgttaatttcatgcttgaacccatcattttgccaagacactatttacatggttagcttggcatcacgatcgtgtcattggattcatcgggcatctttagattctaccaagataagtgcaagttcagcaaaacaaatggtgaattctcataagaaccagatacctaaaagtgtttcaggaacagcaaaga

SEQ ID NO: 87603 - DNA, 275 bp, Glycine max
ctcgagccgaataacaaacaaaaaagaaaaaaaaaaaaaaagcaaaaggaaaaaaaaaaccaaaaaggaaatggaaacgccaaaaaaagtaaaacaaatagaatggacaagacaacgacaaatgcccctcgcggcgtgacatctccgtcgctgccgaattcgacctgaccgcatgcgcggctggcagcggatggtccactccgacgccggtgagctacccccccccccgccccccccccccccccccccccccccccccgcgccccccggccccc

SEQ ID NO: 87604 - DNA, 237 bp, Glycine max
tgagaattgtgcgagagggtagacattagccatgatgtacaaaggtgcagtggtgagttgatgtgttaatctggtattgctcttcggtggttctaagtagatacaaaaattgtcattatctcatttctgcatatttggtttgggataggagaaactaagatttaagacattggttgctccgttagagtatattgtttcgaagatgaggtgttgtaggtgtgctgtattagaggggag

SEQ ID NO: 87605 - DNA, 265 bp, Glycine max
taacattggaggctcgtttggattgctgcaagtcaaatcccttaaccgacatatcactccaaatttcgaagctccagctgggtctatgagtgtaatcatgatatttacaatatttatttcgatagctctttatgctcgtgtcattattcctcttgcatcaaagcttgaagcaaaacggttaaggtcagtgccaagagaagaatgggacttgggttgcttttctcttatctccacttggtaactgcagcaattgttgagactacaa

SEQ ID NO: 87606 - DNA, 273 bp, Glycine max
cggctcgagctggatcccatcgaatacagctactcatgaagaccagcctcttgagaaaatcgacacagtccagcattcctgataagacagcgcttgactatttatcaacctcagtctctggtgaggagcttacagactacactgttccggattctcctgtcgcaaatgatgttgatgtgagtgttgaatctcattcctcattccggaataatatgaattcagtaacccatcaaatatttgatctgactcacaatacgagtctcgaagataata

SEQ ID NO: 87607 - DNA, 284 bp, Glycine max
caccctcgagctcgagccgttttccttgccaacggcattatgtattgacgtgtctttacgtgaagcacgactcccagggttgttgccattcaatgcctatatagacccatcactctggacacgtgccaagggcgcattaaaagggcaaaaagctgacaaagaaaaacactacagattcaaccaatatatgatatctctaattgaaaatctcgtattcgtttagatcctagctacatcacaattttggctaactaaccaccattgaggtccatccagtgggttgg

SEQ ID NO: 87608 - DNA, 272 bp, Glycine max
acccgttacatcataattatgtatcacatgtacacatttttctcttctatctctctaggtatatagatgagcacatggatttccaaggatcatttctattaagattgagaacatggtgcatcagttgttctaaactctttgcatttatctttgattcctacgaataaaaaaaatgcaaaatgagaaccattaatagctacctaacctggtgaagcaaaaggggaaggactactgggaagtggcggcggcgtcaccgaaccacccctgatttg

SEQ ID NO: 87609 - DNA, 132 bp, Glycine max
ggcaatcttacttttgatttctgaaatctgattatcattggaggatctgatttctgacatctgattctgattatcattggagggaatctcaacccaaagtttagttttttatttttattattattattattg

SEQ ID NO: 87610 - DNA, 268 bp, Glycine max
actctctcttccttccttctccataactcacaccatttctgcatacatacacccaccattaccaattccttccataaaagcttccaaaaaaataaatgggtcactcatcacgttttctcgtgctgcttcttcttacctccctcctctttctctcttttgattatggtatttatggtttctctaactaactctctactggtgttgccacatgcatgaacttaccatcttttaagtttttcttttttcgtttggttttgtcttttgtttg

SEQ ID NO: 87611 - DNA, 265 bp, Glycine max
ggaatatgccaacacattccgtacggagtcatacactgagttttggacacgtgtccttgcatattccaaggatgaatcctctacttgtttgtctagagagtccaccacttcggccaggcttccctcttaccgtttgtttgcggacatctcttggacccagatcagtccacggttactcgggccctatcagaagcccaatgtcggcccataatccattctctcttgtctgactattttgcacacaccgctaatgcttctcttcttt

SEQ ID NO: 87612 - DNA, 266 bp, Glycine max
  unsure (1)..(266): unsure at all n locations
aagcctaaatcccaatttccccccatttccggttnctctctctccaattcctgccctctgtttcgtaattcattctcttctattcgattcgattcttctatggaaccgcagcttcagcccaagctggagcccgcgccagagcttgtgagcgctggcgctgaggattccgagaagtcgcatgtcagtgatgtcacggaggttcgccacgttgccatggctgaggcaaacgccggttgttgcgcttccgttttgaaacggaagcgtgg

SEQ ID NO: 87613 - DNA, 263 bp, Glycine max
tcggccgctcagatgatccttatgaaatgagcggtgatcactgctttcttgctggaggaaatatggggttgataaaagctttatgtgaaggagttcctgttttttatggaaagaccgtcaatactatcagatatggaaatgagggtgttgaggttattgctggggaacatgtctttcaagcagatatcgccctatgcactgtgcctcttggatttcttaaaaagaaggccatcagttttgaacctgaattgcctgcaaggaaa

SEQ ID NO: 87614 - DNA, 128 bp, Glycine max
ccacggcttctcagaaggggtaatcttatattaaccatgtctaaatatctaatttgtacattggtagcctcttgttccagttgttggtgcagaagaaggccagtggctggtcaccaaaccattcagtc

SEQ ID NO: 87615 - DNA, 272 bp, Glycine max
ctcgagctttatgttatgttatatatatataccatgatgccaccagcaacgtactatcgcaatacacacccaccattggatccaccaatctccaaccttcttctccattgttccgtttctctctccaacggaattctgagggccccagaagctgtttggatctgggtttttctttgttttgtgttgaagggaagaacttttttttttgtgtgtgtttttggtggtgagtttgtaagaagcaatggcacgcaagaagatcagagagtatgact

SEQ ID NO: 87616 - DNA, 272 bp, Glycine max
atgatcctattattgttggtgaagaaaactagataaggaggttcagaaagtgacaccaacatgtaacataatagaaacaaagatcaatcaccaaatgacagaaggttgtgccgataaaaactccatatattaacctccaatttttattctgagattgatttcaagctcttgttgctcaaaattcaggtccccatcacagcacaattgcggataaagtgattgagctgaatgctgccacatccaatttgcctccacctcaatttctcatcatc

SEQ ID NO: 87617 - DNA, 257 bp, Glycine max
gccatttcgggctgaaaagtttccacaaggacaatgcctctttacttaccacgagagctgtttctgtggctcaagaagttgtgaggtgtatgttgccgcagagcataaggaacgatcctgataaggctcgagggattcgggtcacggtgagttatttgggtggcaatgtgaggcacccggttcgtgttcttgtgccttctgtggcaagggttagtagccctggtggtggtggtagagttcagaagaggaatagaaac

SEQ ID NO: 87618 - DNA, 256 bp, Glycine max
gctagttttgctttatggatgttttaggaactttattactttacatactttgttggttctgtgctttactttttattactggcctttttccgtttctccctcactggggtttgttgggcacggtttgccgaatctctccccatcattggcttgtttgttactatcatcacatctgcagatacttcacttaaacttggttcattgcagcataaacttggcccatcatcacctttaacagaacctccagcaaacccac

SEQ ID NO: 87619 - DNA, 255 bp, Glycine max
aaagaaggaagagaagaaggaggagaaaaaataatagacaatacttgattatcatctggttttgtctaattctacccttttattttcttttctttttttttaattttgttttgcatattttcccatattcagaagcaattgttagctgcaaaaattgtctatagagtcttttatcttttgctaatgtgggtttcttctcaaatctgttgctcacaatcctttctgaagcatggatcaatcttcaattgctgagaa

SEQ ID NO: 87620 - DNA, 250 bp, Glycine max
gccagtatcaggaagcttgtcacagtcaacccccaaaccaccagagaaggtggcggggggaaaatgaagctgaacaacacagactaatgctttcttgtcagaaattagagggaagcatttgaactattcaaagttttggaatgctaatccctctgcagaaaagcaggtcaagttgtctagcaaagctggcatgcttttgctgtacactcctgctgttcttgctggccttgcatccttctgggtctttcct

SEQ ID NO: 87621 - DNA, 254 bp, Glycine max
ctcttaataaactccaccaccactctacccgtgttctccaacgttattaacaacccaaacgttataactccaccaccatcttcctctaattttattcaacaacaacccatgacaccccatcttgaacccaacttggagaagaggaattctgtggcggctatgagggagatgattttccgcgtagcagtgatgcaacctattcatatagaccctgaatccatcaagccaccgaagagaaggaacgtgaagatttc

SEQ ID NO: 87622 - DNA, 253 bp, Glycine max
cgatatcggtgtaactattcgttgtcgtttccccttgggtcggattccgatctacaggtcgatggtgctcttcctaggatacgtattcgaagcgcggtgtcactgatctacctaccgtacagagttgtgatgatcgtgtctgagttgcttttaaggtttctttcaaaaaatcgttcgatcaataatcggagattgcagcgcagatctagagaagaaagcggagtcacgttcttcgcattccaatgtcggtggt

SEQ ID NO: 87623 - DNA, 252 bp, Glycine max
ctccgagtggttgacaccgatcgaagtagcagcacacagaaaatgggcactcgagaggtgtacgaagagaaactaaggaccggaaatctccaccacgatcccaccatcaaccctggcctcggttccgctcgatgccctcgctgtctctctctcctcaaccctaatttcgtctgtctctctctctctctctctctcttcgcaacgtatttgtgtgttactgcaaataagctgttcgatgaattgactcaacga

SEQ ID NO: 87624 - DNA, 255 bp, Glycine max
acttcctttcccacttaccactctccccccttctttccaaacactccctttccctttctattcacttcccctacccttccgtgatgatgtagatagagaataaaaagagaccagtgtgcagtgagaaagagattgctcacttcttgtgtgggtttgttttgttctttgtgttggaatttgttcatgggtgaagaaggagaagaggtgtcaagagagaaggaacaatacatgggagtttatggaaatgagtggttg

SEQ ID NO: 87625 - DNA, 249 bp, Glycine max
actcgtgatcaaagaaagacgaagaggaccattcttctgctggtgctagggggaaagaaccaaccaacgtcagtggagaaatattttgcttttacaatttttctcattcaggtgctatttattcaatgatatgttttgaatatgtttgatgttggatgtgtataactgaatgttaaatgctagtgccaattgccaaatgttaaggacaaaatcttatgacctatttcacttattctagttccatatata

SEQ ID NO: 87626 - DNA, 282 bp, Glycine max
ctcggaattcggtcaactcgagcgaatcggctcaggttgttgcagttaaaaagctcctgcttgcaaagaataccaatgccacgtaccacgctgcagagatttaaaggaacatctaaggaggctgcagcaacagtctgattcacggcgtagagctgctgtgatggaaatgatgaggcagagagccgcagaagttgctaacaatgctggatgagcaatttatacttgtaaatatgtggcactttgaagaaatgttctagacagaggtataccttagtttcacct

SEQ ID NO: 87627 - DNA, 254 bp, Glycine max
cacttggcttatcttcagttattgcatgtagcatctagtcacaaatgaccccatcatgtaattaaataattaacctacctaggtctaactcttaactatacttcatggtgaacaatgaacattatttgattttgggcacaacttgtcaattgattttgtgataattaaaaagggattatactttttgggaaaaagaaattaattgagagcatggttgttgttgtgtgagagtgtgatatacaactaactggaac

SEQ ID NO: 87628 - DNA, 256 bp, Glycine max
cgaatcgctttagcattaggtggatcgcccaatgaatttgaaggtcaaagagctggggatccattttgggtaatgcggctcattggttacccaggtgtatcatctgtaaatggaaccaatgttcataaaaatgacattggatggtaatgaaatcttggatctggtgtttctaaatgttaccttttttttaattacttggccttacattgctgatgtcttttcctttatgttactttttcttcaattctttgaatca

SEQ ID NO: 87629 - DNA, 253 bp, Glycine max
aaataaagaacagaggagcaaaactatttagttcctcctcataaatacgtttacaatccaaagcctgtcttcgaagatcttcctttgacaatgagcccttgtttcctactacatcaaactttgcaagctcctcaacaacacgaggtaagaacatccagtcctcagttcctttccggatgtcctgtttttcctctagagaacatattgcatcttgcaaacaagttagaatcccctctgcagctatttttgtcaa

SEQ ID NO: 87630 - DNA, 249 bp, Glycine max
ctcgagccgttcctttgcacttggctaagttctactaaggtgagtgtgttgtgctcgtatctataaaatttatgttttccacatgggacatttagtttgataaatgactgtacatttttttaaggttgtgtttggttgttaattatgatcatattataagtattaacctgtcctttttgctctctatcccactcttctccctatttatcagctcatagggatttagggacatatgcttctctttggagg

SEQ ID NO: 87631 - DNA, 265 bp, Glycine max
  unsure (1)..(265): unsure at all n locations
cgaagcatcctcattccaacaactacccatgatcatnncacattgctgtactacctagtccaggcattggccacgtcacctccctcctagagctctccaagctcctggtcacacaccaccagtgccacgttatcttcctcaacgtcaccaccgaatcttccgcagcccaaaacaacctccttcactccccaactctccctcccaacctccacgtcgtcgatctcccacccgttgacctctccaccatggtcaacgaccaaaccac

SEQ ID NO: 87632 - DNA, 269 bp, Glycine max
cgaccgacccaaccctaaacccgattttcgaatcaaaatgccatgaacagcatgcagcacacgaactcccgaactccagagcgagcaccacgtgaactccagcgcgagcacgagcatgagcagcacccaccaacatgagttctctcacggtctcacccgaagtcaacgatggcatcacgcacgcgagcaatggacagcgacggtgacggcggcggcagcaacggctacggactgcgtgatggcaacaccctgtttttttgttctgtttt

SEQ ID NO: 87633 - DNA, 262 bp, Glycine max
tgtaacctggttttatgtgcagaatcttattagttttggtggaggatttacgtgtcttttcagattaatgcttcttggtcgtggaggtgatatattcattaaagagtgtctagactttatgagtagttcaaacatgctattgatcatgtggtgaaccagaaaagtaacttagttggtgctcctgtgggaaaggagataactaatgtagaatcttggcagtagtcagattgatgactttaagttctcgagaggcagttgatca

SEQ ID NO: 87634 - DNA, 263 bp, Glycine max
aatatcccctcctgctagcggtgtagctgttctgcgtcacttccggctttaagagaatacacctcttaactgagagttcctacaagcttgttcttagtgttatagtagttcttgagttcagttagcgactgatccaagggtatatctatcagctatgagttgaagaagctagactgtagttcctgtgcttcccgcccgaacgcagcagattctcgaacaagagcatacaaatacttgatatgagttgactagccttacttgcc

SEQ ID NO: 87635 - DNA, 260 bp, Glycine max
cagcggcccccttttgcttttttttcccccattcaaacaaacaaaaggtcaatcttttggctgttaaatttaatcttcagaggtgttgaaaactctaacttgttgccgaaacttgaatctttcgacggaacagccttctttgcgagatgcaatttactggaccctccgaggccggaaaattctccagcagctcagcaatctcaagcggcttcatcactgtagcatgtagcaccctcttagtcttttcagggtcaaactca

SEQ ID NO: 87636 - DNA, 261 bp, Glycine max
aaacatttcgtctcattattttacatggtccaagttacataccagttgagtagtaccttacgacaatcgtcctttatatctaccacttttaattcggtggatttaaaccccatcctttttttggcgactattggcggaatgctttatcatctaatctctcgtcgactagtgcaaaacataataatactcttttaaatcaatctaccttgaagaaacatctagcattttcataagttcatccaattgaacccatacacccta

SEQ ID NO: 87637 - DNA, 262 bp, Glycine max
ttacaccacacctcctcctcgtttatccatccccccatctacaacagctaatgcgatccaattccaattagatctagggtttctctttccctcgccggagaacaacaccgattttccggcgctggcttcacggatctcgcatcactgtttgataatacattggcaaaatgtacaccaaatcggcgcagtcatcgtttcgggaccggacacacgaattccagagcattgcggagaggttgaagaagacaggatcagcgccaaa

SEQ ID NO: 87638 - DNA, 248 bp, Glycine max
cgtagctggtttacgtgaatggtttgtccaatcagctgaaagacacgctcatcccagaattcccttcatggtcaatatgtccgcaacagctttttcttcgaagaagaattagaagccctatgatttcgctctcaagcttactccctctgatcaaatgaatgctgcaagcagcagttctgcgttgatagatgagtatctgatgatgcagaagattacaaatagcggaactgaacaagaggctaccaaat

SEQ ID NO: 87639 - DNA, 250 bp, Glycine max
ctcgagccgggaaaattgcattacttttgaaatttaaggtacttaatggcaaaaattcttgtgcagatccagatcacttgaaacctgacattttttaatgcgatgacactgactgcagcttattatatgcataaccatagtagtgtttttgttggccagtgtgctagttattttagtgcatcattatatgtagtattaatttctcaactgtttatgaattctttattttgcagacttttttggtttggca

SEQ ID NO: 87640 - DNA, 258 bp, Glycine max
ggataatcgaacttgaaaaagtctaaaacccgcgttctctccgatttttgaaatggaagacgaccaattggaactctgcaacgacgacggcttcgtcttcaagcgcaacgccgccgcgtcgacgccccaccgccgccgccctccgagcccgaccaagaggcggcggaaaaattccggagagagcgtaatatccaaaccctactcaagttcaaatccaagtatgagacagagattcttcaatgggaatcattctcgaac

SEQ ID NO: 87641 - DNA, 272 bp, Glycine max
gcgaatttgaattttcagacaagtgtttgcgcaaatatattgtctgttaaggaggatgagaaagaagataaggaaaacggaatgagtaatgttgttcaggattcaaaggaaggttgtaccccctatacttcatcatccccgggtttaatattaatggaattgaagcaagcgaaattcaatctgaacagaactacacgtgatattgctgatgttcgtccttctgttgaatcgatcaataagaagtcagagaaggaaagactatcacttgagat

SEQ ID NO: 87642 - DNA, 277 bp, Glycine max
aaaagttttgacaatgatttcatcagttaatcatatggcacatatttagacatgtcatggtcatctgatgacatgacatacatctagacatgtcacattacatgtcattttagagtgattgtctacataacatttaaatttatgagtattgaaaccaaatttctcatatttacacagattaaaaacatatttaaattatttagtaccaaattttgatttctacaggtcttgaatatttacacacaggatgcaatccaagtatcattcaccgtgacat

SEQ ID NO: 87643 - DNA, 262 bp, Glycine max
tactctcaaagcctgcagtggcagaagaaccagttatttcaaaggacactacttgttcaactcatttattctccaatgagatcttggaggagcttgaggttagcctgctttttatccttaaattcggaaaaaatatccttgcagattcttcaataaaatgttatgcagccattgtatattgtagatatcagacttccctaaattgcttgttattatctgtgctgtgctaatgttgctcaaaactcggtccactctacatacg

SEQ ID NO: 87644 - DNA, 265 bp, Glycine max
cgtatatagactagttgattgtgccacacaacaatgctatctgggcaattatttgatttttgaattcaacaaaagcatttatttaactgtgatgaactacaaaatccccctacaaggctgtgagattgcaaaaaaaagccaaagggattctcgtgcacgatctttaagaaatgtttgtgggtgtctactaaacactctggagttctatacgaagaaaattggcatcatcctgcatttacatttactacgaaagtaggggaaagta

SEQ ID NO: 87645 - DNA, 261 bp, Glycine max
attgtaaaacatttgacatcatgtattgtcaatttcctctcacaggtttaatgatacacttaatgtttgacacatgtaatctacgatgataaaagaaaaagaaaagtggacgaatcaaagataaacacgcaaatatacgcgacggagagctatcttctcaatttccgatcactgcattggttctgttgacgagggttttgttctacttgacttgcatacttgatggcgtcaaagttgcagaagttgcagtccgcagcatgt

SEQ ID NO: 87646 - DNA, 278 bp, Glycine max
  unsure (1)..(278): unsure at all n locations
ctctacttcacatactgtcacaacccacatgcagtattctctttttaaagcacagccaaacacacactcacacacacaacaaagatcataatcccatttccacaccattctttgaaactcaggcttcactactcccttagttcagttgcaatggaagaatggtactacaagaagagccaagtgccagcatttgggagttgggattggaacgataacctaccttccacacaacaaaaattcccatagaaaaaaactggnnngctacgatgtagtaatta

SEQ ID NO: 87647 - DNA, 277 bp, Glycine max
gtttacacatctctccaacctttcactttcgtttctcagttttattcgaatccctctctcaatctcctttccaaatggccagcgttgaggttgcacagcaaacaccaacaacagttccagaaaatgaaacaaccgaggtaagcaagacccaggaaacaaccccagtcactgaggctcctgcaacagaacaaccagcagctgaggttcctgcaacagaacaaccagccgctgaggctcctgccccagaatcaaccaccgaagcaccaaaggaagaaac

SEQ ID NO: 87648 - DNA, 267 bp, Glycine max
cagactgcaaaatccaaaaccaaaaccaaacacaacacagcattcgtcattcaccgccttgtctcgtcttcttctgtctccgaacacggaatctctctgaatcgcgggattaagagaggaatatgcaacagaggcttaagttgcagcaacaacaacaagccctcatgcagcaagctttgcttcaacagcagcagatgtaccaccctggcatgctcgccgctgctatgtctcagttatgtaggaaatattcatgtaaatgtcaccgat

SEQ ID NO: 87649 - DNA, 304 bp, Glycine max
gtgggaacttatccgatgtcttttatcaaaaatatctccaaggttcttccaaaatgttctcagaacgatcctacaacatgttcatgggaggcaacaaccagtttaacgttgctggttcagatgacatggatgatcttgatgatacaaccactgattcctcggaacctgacttgctttggcaatttaatcattccaaacttaccagcatagccaatggcaacggatcaaaggctaggagacctgtctcaaagcccacaaatagcccagtattgagcaagaataatgttcattcttctcttggtcc

SEQ ID NO: 87650 - DNA, 216 bp, Glycine max
gaggcagtttcatggattttctaatcacactcatagcgttaggtttagggttttacacagagagagtgcacgaatggcgattgcgcaagatttgtatccctcagaagacgatcttctttacgagtaggagttgcttcgaaatcctttcagactcaagctatggtggcgctacctgattgcgcgttctgaagctccgttgaagaagcgcttcgtcat

SEQ ID NO: 87651 - DNA, 197 bp, Glycine max
gctcgagcggctcgagggacgctgtcagttgcctactgctggggacactgaacgtcggcctaaatatatgtttgaaagatgccctaatttgcaaatttttaaatcatggatagtccttttggggatggagctcggagatccggtgtgcatcattattacaacatgagattcctctggatgtcatcctgtaaattgac

SEQ ID NO: 87652 - DNA, 289 bp, Glycine max
cacaatgactcacaagacactaccgaggcaagttcatccacgattggttcaaatctaaatgagataatggcagatagggcagagacgagcaaccaacagaatgctatggctaaaagcagtaatgatgagacattggatgaggaagtggaaagttaccagaagtatgccgaaaccagttatgaggagacagtagaagaggcaagtaatcacaactgtggtgatgggatggaggaagaggtagaggaaattgaacagaattgttatgaaactaattatgactggatcagtg

SEQ ID NO: 87653 - DNA, 158 bp, Glycine max
ctatttgaatgttcgaattaattgaatgtataaggcataaaatccactacttgacattttagtatggaccatatattcattttgtatttgatgacagatgtgttttgtttgtctcctgtttatcgatatataaagaagagaatcggttattccgtaaa

SEQ ID NO: 87654 - DNA, 173 bp, Glycine max
gttggaatcgtggacttcatatgattgtggctggacctagagatgacacttcaactcttcaagctaaagatcaaaggatgatcgttgagagcctcgtcagcataatccccccacagaaggacagtgtctcatgcagcttccttctcaggcttctcagaatggcaaacaacatg

SEQ ID NO: 87655 - DNA, 208 bp, Glycine max
tctgatttctgggttcagtttgggcgttggactttctctccttttcctcactctcatcttgctcaacaacacttcgctctccgttcccaaggttcaagtgtttctccaaggatccggattccaattcctcttcttcttcattctcgtggcgttttcccttcacaaccattctttcttccaacgcttccgtgagtcctctgcatagggt

SEQ ID NO: 87656 - DNA, 212 bp, Glycine max
cttgactgtcttagcaacatgagtaaaagcctagaccttacacagtctactggagataaagggtcaaagttggatgctgaccaagtactcaaactggttccagtatggtctaaaagtgttcaagactggaacttattaattggaccactggttgacaagatgtttggagatccatcaaatgcaactattgtcaaatttttgagttatataag

SEQ ID NO: 87657 - DNA, 282 bp, Glycine max
  unsure (1)..(282): unsure at all n locations
tctcgagccgctcgagccgctcgagcggctgagaggatagctaaacttgtcttataaactactanaataaccgttacaaaagattatttgtacaaaagaaaaaaataaaaaaagcaatgctataaagataaacgaaaaacactcttgtaaggtaagtttattttaaaataagtaagaacttttattttatcataaattttggtgaatttaagtcatggtatacgttaaactaatttgaaatttacaattttttatttatttactcacattaaaaatgaattt

SEQ ID NO: 87658 - DNA, 271 bp, Glycine max
cgttcttcttgtccccaccactcgcgggccaagtcgcgttttcgccactcgctggtgtagttgtgttgggccccaccagcgcgacagggaacgcggccttggagtccgtattcttcttttcgaagctgtggaccccaggcttgcccgcggccacgggacccacctgccacacgtggctgacgtccctcgccgaatcggggatcttgacggagccgtagatggttacggcgccgttggattcttcggccgcgaggtcccacgagtcgaaggt

SEQ ID NO: 87659 - DNA, 273 bp, Glycine max
tccattcccatcaaacaacaatcccaaaacctttcaaattaagagcatctatattctgggataatatataaagggaaaagctagaatggccctcctcaaacacctcctcctctcattcaccatgatcatcatttcttttgttgcttgttatagcactttgcaagaggacccacctagtagtatatatgttgatcattcaccttctattgacgatggtgggacagtcaagaacttgatcgagcaaagcacaaatgttttgagcttaaacaggtt

SEQ ID NO: 87660 - DNA, 290 bp, Glycine max
cggctccggctcgagtgatgcaactactgtctcttactccacacacaatccctgacacactctctctatgagcttgctttacaaggagatcccaatgtggcaccccaccaagcgccatttcttcagctgaaagcctcttatccatcaaacactcgtgtcccattacagtactgtctgttaggcagagaaagaggaaaaaaaaggctataattgagatggatgtgagtaggagaagagttggagttagatgcagtctggttgcagggtcagtgtgggagagcagaatgaag

SEQ ID NO: 87661 - DNA, 267 bp, Glycine max
gcgagcggcctcctttttttttttttttttacgttaacagcttcattcattctttaaaattaaaacattatattaatatcaaaattctatacagattaatacttaactagtattttaagatccttattaccaggaacctaggctattgaggagtttgttgagtccattacattcaattatgaaaaactatgttccacttatgtaatgggaacacattacccctaatcacatgttacttgttgccaactataaggtgaagggtcaagg

SEQ ID NO: 87662 - DNA, 281 bp, Glycine max
agaagccctttcccttgtttttagaagaaactggctacagcgaagaaaacgttctccttcgagaagccacagcaggagtaagtcttgtttgaattttaggaaaaaatgataataattcaatatctgtactgtgttgactaagtcattgatagttattaacacacattctcttttgaggaaggatggaaggctgaaagcaacagaggatgttgttttatttagactgataaaatatgggataaaaaattgatgatagatgccttctttttgcttcactttta

SEQ ID NO: 87663 - DNA, 273 bp, Glycine max
gccagttttccattttagaaatggagatagaacaagccactaccaatgaaaagggtgttaccgactatggtgatgctgaaatgatttcagataataataagagagggatgtatcttgtgtgggaagatttaactgttgtagttccaaattttgggaatgggcacacaagaagattgcttgatgggttgagtggatttgctgaacctaacagaatcatggctatcatgggtccttctggctctggaaaatctactcttcttgatgctctagcag

SEQ ID NO: 87664 - DNA, 262 bp, Glycine max
tccatactgagaatgttgtctactgcagtgagagatcaatgaaaatctttagtcagaaaggccatatgttgaggatccgttataaggtcagtcacaaagtaatacatgcataggcctaacttaacaagtccttattgtagaagataagaaagtaaaataaatcaaacttctctcataagttaaaatcaacttatgcatttcagctttttttagaaaaattctcttatctaacttcttcaaagattgaatgcataatctaatt

SEQ ID NO: 87665 - DNA, 274 bp, Glycine max
agttgttcatcgccaagttttgccgcatcaacatcctcttagacaatttgataaggacctttctgcagaagttcactcttaactaatgttttttcactgtattccctagctatatttcagactggtgtgtgccagtctttttttgttcatagatattgctgaatcttgatgaacgtggggctgacctagaccgcttgtatgagatggaggaaaatcacattggggcattaattcgttatgcgcctggaggaaggttggtcaagcaacacctagg

SEQ ID NO: 87666 - DNA, 111 bp, Glycine max
catatatcatggctacctccatggtgaagcttatgctgttctctgctctcatactcgtgtccttgcaagtagttgagtctgtaagaccactgcattttcaacatcgactag

SEQ ID NO: 87667 - DNA, 269 bp, Glycine max
ctcgagcgacctcaacgcgtgcgtgcgttctcatagattttcgctttggtcgaccaatatggctcggacattgcagtttaaggaaacctggcatgggagttattactgtttctacctcagctgctaggactccattaagattgaatacaaggttgatcagtcatcagcaggtgcataaacgacccataattttagcttttaaaggaaataaatcgaataaaaccactttggtttcacctcaggagaaaattcctctacccctagaaaca

SEQ ID NO: 87668 - DNA, 272 bp, Glycine max
ctcaattactaacgatgtgtgacagctgttatgtcaatacttcaaaatgggttaattggccttttgaaaggagttgaggatgatttgttcatcctataatagaaaaggtgattgaaaattgaaaaataatgcaattcctattggtactattctcaatcgcgcttatttgtggcttccagagttcattagtattgccgctgacaaataatctagttcaaaactcactgagcagttgttatagaaaacccaaggcatgagggaaagatcagttg

SEQ ID NO: 87669 - DNA, 267 bp, Glycine max
ggagtgatcaaccaagggaggaaggaaaatataccggatatgaaggttgtagagttggccatgcagagatggtctgggcagcatagccgtccatttctttttgggattttgagtgatggaactattctttgttaccatgcttacctttatgacagtccagatagtcattctaaagttgaggattcagcatcagccggaggatccattggccttagcagtaccaatgtttccaggcttagaaatttgagatttgttcgtgtgcctttg

SEQ ID NO: 87670 - DNA, 263 bp, Glycine max
  unsure (1)..(263): unsure at all n locations
aatcgagccgctcgagccgctcgagcggtcgagaggatagctaatattgtcttataaactagtanaataaatgttacaaaagattatttgtcaacagaaaaaaataaaaaaagcaatgctataaagataaaagaaaaacactcttgtaaggtaagtttattttaaaataagtaagaacttttattttatcataaattatggtgaatttaagtcatggtatacgttaaactaatttgaaatttacaattttttatttatttact

SEQ ID NO: 87671 - DNA, 266 bp, Glycine max
aaaccatcctatcagctaaaaacgttgaatcatttttacaagctgtaggagacattccagtgctagtcattgcaggtgctggaggttcccttgtctctttggaatcctgtcaagctatggcctcaaaacttctcaattctgtaagtatgcttttaccatcttgtcatgaattgtatgcaaaacttataaatgctgttagtgtgtattaaaggatgaaaatcggaagtggaaaatggatagggagaaaatgaaagctgttagatgtg

SEQ ID NO: 87672 - DNA, 273 bp, Glycine max
aggcacaacaatggaatccaagcggaatgcaactcccaagcaaaaatgaaaacattgtacagagacatattcttgctgattctgttctggctgatgactacccccaaaacattgattataaaaattcatcttttggataccaatagatccactctctcaaaaaattgcatgtgtttgaagatttcttcaagaaacaagattggatgagtgtttgtaacaccccttccccctttttgttgggttggctagggtgttcattgagttcgatttgat

SEQ ID NO: 87673 - DNA, 233 bp, Glycine max
  unsure (1)..(233): unsure at all n locations
gaggagcctagggacagcctgatgatgatgatgatgggcttgagaagacaaagaaaggatctagatagaagaagcggtattcgtcggatgaagactccgtgatttacacaactgaaagtgccagtgagaaagatganaagaagaggcggaggagagcgaaaaagaaaagggacgatggttcgtcacgtgattctggcgaaaggtcaaaaggaagatcacgatccaggagtggt

SEQ ID NO: 87674 - DNA, 252 bp, Glycine max
attccctccttcttggtaaatatgtgccctcaaatgtccagtatcatcaccgggttcaagtaccacttccttccttttcttgtaggcttgcttggcatagctttcattcttctttgcaatttgcaccttcacttggtcatacaatcttttcacatactcaactctgtcctgtgcatccttatgctgagtctcttggggcttgttgttgtaagttggtctgttaggcaatgaagcttctagaaggacatgaga

SEQ ID NO: 87675 - DNA, 178 bp, Glycine max
ctcgagccgttttcaccatatatgtatcataagacagcgtttcttttcaaaagatctagacttatgtaccaaagcaactagtcggacgaagagacggaaaagtatgcgtcggatgcaattgcttttattctttagattgatctacatctgcatatctataatcaaattttgggcttgg

SEQ ID NO: 87676 - DNA, 151 bp, Glycine max
caaacacaaataccgtctcccatcattccttacagtttcaaacacttgtttttcttctctcttctccttttttttctgtgtggatctacacccactaagcatctatggataagatgagtggttgatgagctattatgattccacacaacat

SEQ ID NO: 87677 - DNA, 240 bp, Glycine max
ccgattttgcactaactacagggccttaaataaggcgactatccctgacaagtttcccattcctgtcattgaggagttactagatgaactaaagggaatttgttttggttttcttcgatgacatattgatatatagcgcatcatgggaacctaaaaagtctagagagagaaacactggatgggagagagataggtttagaggttaggcagctgagagagtgagcttcagggaggaccttc

SEQ ID NO: 87678 - DNA, 244 bp, Glycine max
cagttctgccaaatcaagagcggttttaagatcatagtgtgtgttttgcaacaatggctaagttctttgctgctatgatcttggcactctttgccatttccatacttcaaacagtggtaatggctgctaatgaacaaggaggccacttgtatgacaacaagagcaaatatggaactggaagtgtcaagagttaccaatgcccatcacaatgctcgaggagatgtagccagacccaataccacaa

SEQ ID NO: 87679 - DNA, 101 bp, Glycine max
ctcgagcggctcgagatctgattggactagccagtagtagtaaatttgttggagctggttgggaatgacgtcgtaatcgaaatcaaatggaaattccaaat

SEQ ID NO: 87680 - DNA, 266 bp, Glycine max
gcattaggggggccaacctcgtcaggttcgacgcttccgagatcgcaaaggacaagcgcggttggatcttcgatcccatagcacccattattgttggatgcaattggaatacggcgtcgtttttggtttggaagtgtttaccgcgtgttcgtttgtgaattattttcccttcagtggcatttctcactggtagtgatcttgttcctgggcctgctgctggagtgtttccttcaaggggtggtcatggcattggtggaagcatgctt

SEQ ID NO: 87681 - DNA, 272 bp, Glycine max
aaaattatcttctgtacgccagttttgataatttgactaaatgcactatagcatttctggttttcatttctgtaacattttacttctggattttgtctaaatttgcattcattgcaaggttatgcttccaaagtttcagaaacaaatactaatcaaggccatgtcattagcgacaatgttccacagaatgatgaatggccttgtattgagaaccaacatgatgttatagtatatgcagatgtggatgcccatgcaaattctgagtactatgc

SEQ ID NO: 87682 - DNA, 268 bp, Glycine max
cgtgttaattgttaaatatatagtttgatgtggtaaatatgtgattgctcttgtacccttgtattattttgcaaaacaatttttctctcaaaaagaaaggttgattattctttgcgagttgggaatgaaacatactactatttcagaagcgcttgagttcatccgcaagttcttgtcagtgcggtttgtttgatgtactcggcgcaagggaattaaattgttgcaggtcaattgagatttgaggggcagtcacaaggtcttttttttt

SEQ ID NO: 87683 - DNA, 243 bp, Glycine max
gtgagatttcacagaaaccaaatttccatactttaattgagtaaaatgcggctctttttataagtatgtttctggggtatcatatgggaaattaactttattacatactattgactaaataaagaacatttgggcagtcagagagaaagaaattggtttgctggattcggggaactctgactatgaagggaacaagaaatggagattccaaagcatgagtacttgagcgggactttttttctt

SEQ ID NO: 87684 - DNA, 265 bp, Glycine max
gcttactcgggttcttagtggtgatcatatgccacccacctccagagttaaccagatttaccattataatgacgggatttggtaacactggaaatctcctgcttgctgtagttggatctgttggccatactaaagataatccatttgggagacattgcaacactagaggggtggcatatgtttctttatctcaatgggtatctgttatccttgtatacactcttgtttatcatatgatggaacctcctatggagtattatgaggt

SEQ ID NO: 87685 - DNA, 264 bp, Glycine max
ctcgagccgctgtaacaaggcaacccacaaacaagtgttattggtgatggagcaaacctgcaacagatttccatcagttaatttacttaaggttagcaattttgaagtgccctaatattcttaataaaaactagttacactgtctcttataattgatttacaatattaggttgagattgaagaccacccttacttggcaaaatcagaaggtgtgaactgcatcccagcttttaaaatatacaagaatggatcaagggttaaaga

SEQ ID NO: 87686 - DNA, 300 bp, Glycine max
cacgcgtatctgatcgcgtagaacacaacacacactctctctctctctagctctctttctctctctagaatcacgatcatgaagtactgcaacaacaacaccacaaatttctgcgccgcattgctttttgttctcatactccattagcgtcgctgtcgctgtctcaattccgcttcgctttccctcttcttcttccactctttccaaccgacacaaaaatcgaagcggtggccgccgcttttctcttcgccgccgtggttctgtcggcggttgtcgggtctccggtgaccctgacgctgg

SEQ ID NO: 87687 - DNA, 251 bp, Glycine max
atcagttttaaactaatttaaaaccacttcagaaccggttcggttctgaaaagaattataaactggttcgaaactagttcagttcagaactagttcaaaactggttttctaaaccagttcagtttcaaactagtctgaaaaccagttcgcagatttgggttaaaaacaaaactagttaaaccagtttgaaaaccagtttggttcggtttttttccaaaccggtttttgcacagccctcctccacacaacat

SEQ ID NO: 87688 - DNA, 124 bp, Glycine max
agcgtatggggcaggatttcgttgtagagatatacagatatatcttatgagttggcattaaatttgtggtacttaagtgtgagatgactatttctgtttgtgattaatcaaagtacgtccacac

SEQ ID NO: 87689 - DNA, 267 bp, Glycine max
  unsure (1)..(267): unsure at all n locations
aaacaaactatcttactctagaattaaacatcttgtatattaggtacattcattattgtgaaccatttattgttttgtttgcacacaacatacgatagaaatntgtnanaatnncgtgcannnannnnnannngngnnngnnattnaaagaagnntttaggagtttatagtcttcggttgtggagaaaatttgtaaaagttcttttttcataggaattggtttgattttctcaatcaaaattccttcgttattttcatgttctatga

SEQ ID NO: 87690 - DNA, 266 bp, Glycine max
gaaattggagagaaagcaaaattccttgccagaagatagtcatgcagatggaaatgttaatgataactccattttgaacagattgaagtcaacttatagtcgtactactagtacaagaaaatctgctttgaccagtgctgaatatactgataacaggaactcaaaggttcataattcttctatgatgagtagattgaagtctagttacagccgtgctactagtgtgaagaagccacaaatacctacaactgtggaagaaaatacta

SEQ ID NO: 87691 - DNA, 270 bp, Glycine max
cttttaacaaaaagcattatctttctttatattgacatggtaatgcccatagacattaacagaattagtcgttgttcatctactatttgttacatgatgcttataacttgctcctcccctatgttgcatcatccagttaaataatcataaaaaagtaaccactttaacatgtgcaagatgattgcgagtggttaattgctgctagatgatattgaagaagcatagcagaaactggcagaaagattagcagatcatgttggtcacatatta

SEQ ID NO: 87692 - DNA, 266 bp, Glycine max
ggagtacattatcttgtaaagaaaatgtgtgctactatagtttatttttccaaaattaagtatttcatgttttctttcgtaacttcgttgctggtacgccccaattctaaattgagctttcagtaagtacaagttatctgactatcattttttcctttgttatattcagacattccattgcagacatgggaccgcttatctcttcaataatgtgtaagaagttatcctgattttgggcaccttatcattgtgtagtaaacattccc

SEQ ID NO: 87693 - DNA, 269 bp, Glycine max
gttccttcctcatccacaattcattggcttcaccctgagttggttcccatggcttcttcttcaatacgacccgcttcttcaacaccttcctccttttctctcttcagcccttctcgccgtatctctttctcccatcttccctctccctctgtgtctcaatccaatagttttggcctcaaagcttccagagtgttgagacaatatggtaactccacgagaatcatggcatcaggggacttgtctcattcagttgcggctgcttcaccaga

SEQ ID NO: 87694 - DNA, 262 bp, Glycine max
tgaggactgaggagggatgagttcgtcctctccacaacgttctcgcggcgacggcgagaaaaggcccagatttttcgactcaaacgcgaaggccatctgttggtctaaagctgatactgtccccggccgtcaccctgagaggtggcgcaaagacgccgccggtaacgttgtctgcaaacgtttcttcaactgcatcggctgcctctgctacgagtacgatcacatcattcccttttccaaaggtggtgagtccactgcggat

SEQ ID NO: 87695 - DNA, 253 bp, Glycine max
cgagtctttagtggcatctgcatacccaacagagatggtcaaatttccgaaactcctttgcggataagctctgcagataaacatgcaccaaatgagtcctttccatgtaatacaacctccaaggaggttatcaagaatagatccgctgcgacattttctaacactggtcatgctctccgagtccaccacggagatgatatttgccaaccatcagagttgctcgacgtcaaacaccatttttcctcggaacatg

SEQ ID NO: 87696 - DNA, 250 bp, Glycine max
ctcccaattaaagttctttgtggacacattcaacaagtttagttcactaatcaaccttgttcctatattcacattcatatcatattctaaattacattgacaagccttctccactttttttattcacttctaaacattcagaaatgggagttggatggctactggagtacttgtctgatctaatgggtcatggtcaccaccaccacaagaagaagaagatgcagttccaaaccgtggagctaaaggtgat

SEQ ID NO: 87697 - DNA, 145 bp, Glycine max
tttcctttttccttagaagagtcgaaagcgtcttcaggaaaccaagacactatgaatggtgtcgattcttcttccagagagacatcaagtcggaggttggacgggatggaactagctgtcgtttaattgatatagaccagtatga

SEQ ID NO: 87698 - DNA, 260 bp, Glycine max
cggggacaagagcagtaagtgaaagtaacagacggacatgaagagcctcaatttgtggccgaaccctaatggaaggattttgcctcgcatttcaacatgtccaacactcaaccttgtctattctgttcctccttctccttcttcagttcgatgccatagctctccaactcaattgccgctcaggtgcgcagtgctcggtgctggattcgctggcctctcagttgtttggcatttgttgaagcaaagtcctaaggagttgc

SEQ ID NO: 87699 - DNA, 269 bp, Glycine max
cttccttcaagaactccgcgacgcccccgacatccaaatcctcatcacctcccacaaaaaccctcacttcagccctctctcccacttcctctcccaccacttcggcccccacgaccttctccccaaaaccgtccctctcctcttggagcctcgtcacaacgctctctctcttccccaaaacgatcatttcaacgctcttgcgattgctgcgttggaggccgccaataactctcacgcgccctacagcgcgtccccctccggcgtcgcgc

SEQ ID NO: 87700 - DNA, 272 bp, Glycine max
acgtaaggaggctcgtgcagctattagaagtaacagaagatcctacatttcaaaagaataaacaagtatatgaaagaaggcaattcgctacatcagtaattagattctaacattctcaatactcgactttggttattgtaaaagtgagaatacttgttgagttgagtagcatcactcgatagctaaatttaagttgagatacggagtgctatgtggtagagtcagtggaatctcgattagttggtaattctgtgtagcaagtcctaaggtgt

SEQ ID NO: 87701 - DNA, 253 bp, Glycine max
cgaaagggaggtgggataatgatcaggaagctgaacatccagaaggtgaagattatagtccaactcgcaatatatcgtcttcaagatgggcagctggagataactctcctgttgatgagggtgagatcctcaatgatgaggaaatgcccaaacgaaggaggagggtgtctcctgagttattggatggtagactaaggaacaagctattaagccctgaggaatctaaggtagaaggtattgaaagagctagggc

SEQ ID NO: 87702 - DNA, 246 bp, Glycine max
cggctcatgagacggcaggatgttgtccgttactatgtcctatcacaccttaatgtgctaattgtttaacttgtgcaatttatgtttgaaattgtttaactttaagatttattgtttaaattggcgagggagctaagttggtgataagttgccatggggcgttgaccatgggatggtatacaggtttttcccaagctttgttatgagcttggagttatattggttatttgtcatattatgtgtggg

SEQ ID NO: 87703 - DNA, 251 bp, Glycine max
gttacattttcattatggtgaccaagatattatctgttatcagtatatattcagtgtcatacacagtcctgtgtgctagacctgagtttaaagcgtcagatcacaacagctctaccattcacgtcaccaatttcgcttcagaatgcagatctttcaagatgacgtagtctctgaagtcgatccagtgtcttgtgaatttggaattggtagtgtttttagaggcgataaagccatatcaatgtcttttatcg

SEQ ID NO: 87704 - DNA, 253 bp, Glycine max
attaggattgagagctaattttgctgttattattagaagtattgatgtaagttttgatatttgatatcaatacatattccaatctatttttttatttttttttatataaaaagagtttatgtttaagattatgataatttgttcaaattattttaatatataatggtaaagatttaaaggtatttatagaaaagatatggtaaaattataggtagatatgtaattattaaagagtaacattggaatttttgtt

SEQ ID NO: 87705 - DNA, 256 bp, Glycine max
  unsure (1)..(256): unsure at all n locations
attcatctcacattctccgntccatatttcgtacaatacctgtacacttctgtgagcctgacagtttccagcttctctacaatgcgatgtttggtgcaacaaaatgggatcctttatgttcaaaaacatcagatggatcgtagatatctacagtcacatgaaacatcttgaccaaaaggcaagtgctctatctgttgtatctgctctaggagctgaactacagcaggcacgtacacgaattcaggaacttgagact

SEQ ID NO: 87706 - DNA, 211 bp, Glycine max
tacaacgtttgacgctgtaaaggtgctctcacatgtcatggattagtagtctcagagatctgtaactcttgcatcactggtgtataccacttatcatccattgggtcgtctggtgagacgtcagagtatgtgctcgttggtggcacaacctctggatagtgtccatgatggtcaacttgctcttggatcagatatagcaatgagatccatc

SEQ ID NO: 87707 - DNA, 254 bp, Glycine max
ccgaggacccattcctggtggaggtggtgcaggaggaggtggaggtcgttaataaggaggctgcccaggacatattggacgcgatcgagcacagaggtggtagttggcggaagaattctccttgatgcaggatgacgatcagatagtgcgtatggtggctcctcagatcaatgtggtgtggaacgatgcctagtagtattacaagaggtccaggctacggaagtagtcacactaccatccacgcgggagttcgc

SEQ ID NO: 87708 - DNA, 204 bp, Glycine max
cggctcgagaaaaaaaaaaaaaaaaaaaaaaaaaaaagcaggggggccccccgattaggggcctcggcgcccggggatttatttcgggccgggtccctgagggggaacaagtttccgcaaagggggcccgtttaagactttggggaaaccagggcaaaggcttttcccgggggaaattttttacccgcccaaatttccacaaaa

SEQ ID NO: 87709 - DNA, 290 bp, Glycine max
  unsure (1)..(290): unsure at all n locations
cctcgagccgaatcggctcgaggtacgtgggaaagagcaacgcactngagcgtatgcagacgatgatcaagaccttcacacacaagacagttcagttacttctggcccaacgtgacatccatatggttcttctggacgaggctagagagcatgctgtactccaagctgcagcacgggaggacggtagagaacgatgacatcatgagccaagtcatgaccgtgctcagcttcgatggcagcgatcgaggctgggcgatcttctgcagaggcgccaccgagatggccagagc

SEQ ID NO: 87710 - DNA, 285 bp, Glycine max
cgagaatgggagggaagtagcgagagaagtagagagaggagcggtgtagaaggaagaaggggaagttggtactagagagagtccgaagagggaagaggaagtcaatgtggctgggctttcggagtcgtgttcgttttctacttccaacgaagatgcttcttcgagtagtactacggaccctacgtctaataatatttctccgcaagggagaatcaaacggattattaccgccgaaagctggcagaagggtgagtttctcgggggtggctcgtttggctctgttta

SEQ ID NO: 87711 - DNA, 281 bp, Glycine max
gagagactgcaattgctgcacctgaaccaaatgaaactctcatgaaaactaggtctggagaactcataagaccaaatgataaaaataaaaaaaggatctgactatgtcagaatatgacctggaactgggtgggattttctgctgaagggagtggtaaaatcatcaaagtgggagattctgtttatgtgcttcagaaggtctcttcaactgctgaagcagctgcttgaactgtgtatgtggaatctatgtcgatgctatatcagaaataaaaggctactatg

SEQ ID NO: 87712 - DNA, 261 bp, Glycine max
ctcacagatgtgggcagtaatcttgctgaagatctacaatgtggggatatttttcatttgtttgctttagtctcttcaggtgaactttcaatttctccattcctaccagataatggtgttggagatgctgaggacttgagaagtgcaaagcgtaaatctgatactaccgagtcttcatatagtgataaagtcaaaatgtcaaaatccttctttggagtagtaggtgaaattatttctcgtcgggaaaaaggttttcctggt

SEQ ID NO: 87713 - DNA, 284 bp, Glycine max
cgcacgcattaaccttaaccgttgcaaagttcgccggggaatcgggcttggccaccgctctccgatgaacactccataggacaccatggatgagcaaaaaagcgccgccgtcaacgacggcgaatcagaaccgcagcaaaaccaccaccaacaaaaccacaccgacaacaacaataacaagagcaacgacaccgaaaacaacaacaacgacaacgagaagagtacatcagatcccgaactgttctgttgtttgcttcagccagccaccaccgacggcgatcccg

SEQ ID NO: 87714 - DNA, 277 bp, Glycine max
ggaaaagagttttaaacacgttcgaggaaaaggacaagatggaatccaggtcatctcaagaatctgatagaagttcaggagttgggacatggaaagatgaatgtgaattttttgaattggcgggaatggaagaatcgagaagggtaactcaaccaacaaagcagagtaaggatttggtgcaaggtactgaagcccaaaaacatgaccagatggaaagagaagcatctaatgtgcaagacaagcataaacaagtaaaagcaactgcagaaaattatca

SEQ ID NO: 87715 - DNA, 242 bp, Glycine max
aggaggaagacttctgcatggggctagcttcaagtatgttgtcaaatgttaaactctagcataaatttataaagaatatttatatgcaacgagaggagatgcatatctatatgccattcctccactttctctttgttatggttgctaaatctgcacttgcggattgctgcagtttcactgataatgcacgcctatgtggcatacctggattacctacttgtggacctcacctttctgctggt

SEQ ID NO: 87716 - DNA, 111 bp, Glycine max
cgaagatggaactaaaggacgagatgtgttcaatgaaaagccacctgctgatgaacttttgtcagtttcggatattggacagcgcgttacaacatcacttcctgataatgt

SEQ ID NO: 87717 - DNA, 253 bp, Glycine max
cggcaagggaatgagcttaacaaccttggtagacggctgaacgctgaactgacccacaacagggttgcaggtcagaatgcagctgccgtgccggatatctcagatgaagacaatgataatgatggcaggtacatgaagataataatagcaggtacaatgaagatactgatggcggtgtatcttggtcagccgtctcaaccgccatggtggtggcagagtgttattgggtcgttctggtaggaggcggagatgt

SEQ ID NO: 87718 - DNA, 250 bp, Glycine max
agataccccaagttctctgctttttggttgcaaaagttccttctcaagtgatctgaatttagtgttcctttgacatgtctagtgtttttcttgtttatttccctagatttcatcgtatatcacttgtgttggagtaatcaagagatcattttatcaaataaataatgccaaatggcatgtcgaagtaaaaaaaaaaaaaagggggggccgccgattattgacctcgtcgcccggggatttatttcgggcc

SEQ ID NO: 87719 - DNA, 186 bp, Glycine max
gttgcttcataccaatgtgtcagagggagagtatggtgatgccatcattcaaggaggggtgtctctaaacttcaatttccaaactgatgatggtgaattttcttggtctccaactaattgggttctgcataaattcaaggcaatgctaatgaatctattcaggtagaattaacaaacagaacatca

SEQ ID NO: 87720 - DNA, 252 bp, Glycine max
cggctcgaggccttacactatgtctcccagctgcaaacaagtggtgctggtaccgctgatggcattgcagtgtttgactggagctatacatgggagcaggggctgtggcctgtggagtgtggtggaatgttgggtccaatttcaaggtatggaacttgaatcctatgggattctaatgtaaggtttatgtggctttggactctctccaacgacaatggctagcttttgtggtatggtttcccctcatattaa

SEQ ID NO: 87721 - DNA, 249 bp, Glycine max
gtttcctcatgaatctgtgtatttaagtgttaaactattctggtcatgatggtaaagcataatagagtttgttcactttgatatacacactaatatcaatcagggacaaggtagtacttatcagctggtattctgggcttgtgtaaggtatggtgtttcatttgacaggtttggttttgttgctcattggctgttttagtacaattctttaagagaatgaattgaaaagtgacattaaacactagttgg

SEQ ID NO: 87722 - DNA, 244 bp, Glycine max
aggaaaatcatttagattctgaactgccactcatgcctaaagcagtggtcacaattctgcttagcaaaaattctttttcgggtgagataccaaatcactttagtgaattgagtcatcttcagcatctagatcttcatcaaatcatctcagtaagatgcccccatcttccttgttctctttgccaaacattagctatttgaatttagccagtaatgagctaagtggatcccttccacagaaacta

SEQ ID NO: 87723 - DNA, 203 bp, Glycine max
aatccttatgttttcagctgaccttttaaagtaaatcataattatattattgacaagtctatgaatgattaaaacaggatatcctaaataaaggctataaatatgtttggcaagaaacactaaatttgaaaacactggatttcagcaaaatttgttagaaggtctgtttctttctattttattcttgcagatgacaaataaag

SEQ ID NO: 87724 - DNA, 273 bp, Glycine max
atttcgtggcttcctgcgcatctattcattctctctgctttcaattacaagcaccaaaattccgacgaatcagtcatcttccgaaacctcgcagtagctggcttagcatgatggattcaaactcaccgtttctgcctcattgcaattctgatacaaaaaatgcatttcgcaagccttctggtgatgcagctaataggaattatcggcgtcggtcacctgttgaaggatcaccctcacctgatgctagtcctaggcatggacatagctcaagtc

SEQ ID NO: 87725 - DNA, 228 bp, Glycine max
ctcgagtacggcaacatcgctgaagggtgagctcaataatgtgtcctctgaaaatggtcctgtcgaaagtgtataccagaccgatggtcagaaagcaaatgataaaacatgcaccagcgaatacgaagcatcaccgccttcttctacacccggctgcaagcaagcttgggtgttaaccagatgcacatatgtgattttgaattgcaagcatgcgatacacatccaagt

SEQ ID NO: 87726 - DNA, 258 bp, Glycine max
aacccctaatatttggaccagctagccttgtaaatggaaacataacaactgagagagaaagaatggcagctcaggtcttccaacctagtcataggtacgcattatcccctttatcaataaatgcatgcaacctggctaagaaaggctttggaatagggaaatataagttttttaaacagaccatgtgcccaaaaagagatgaagttttatttccttgtagttttcagtgttatattgcctaggactccccattggttg

SEQ ID NO: 87727 - DNA, 260 bp, Glycine max
agcaaattcttctgtggatagtttaacttcactgcattggctgcttccatagctttttttattattacaatttatctcaaacacctattctctttttagtaaatcttatttgagactcaatcaaacactaaatgcaaacatctctcttaaaagagatttgaatcttgattcactaggttatcagaaagtaacattttctactagacttaatcttattgattgctacttccatatagctagctgctgagagagcctcgtca

SEQ ID NO: 87728 - DNA, 252 bp, Glycine max
agatatatggatttaaacatacgtgtcattatttccctttaataaacggatctgtcatatggttgtaatgagcttaatatatttatgcaattgcaaactgtcttcaaaaagttgaagattcacaagacgttttttaaccccccggctagggaaaacagcgtgaaaaagttgcagcaagagataaaacttgaataagttcatatatttgaagtccgatcaagcatcaattctcatattgctgtttgtgatctt

SEQ ID NO: 87729 - DNA, 257 bp, Glycine max
cgtgaggtgagtttctgttctttctctctcgcaaattcagttgagttgattaacactcgtttgttaatgtagtttgtctgtctttgtttagggtttaaaattaaggatttagggttagggtttaagatttagggtttaagaagtagccataagacggctctattataagagtcaacagcaggggcttatttcaatggccacctgactgccgcttagagccaaaacggaaaaaaccagttgaagatccttgaaatcaa

SEQ ID NO: 87730 - DNA, 262 bp, Glycine max
attcgagccgaatcggctcgagtgaagactgtttttcaagcccaccacgctgtgtcttcgaaccgttggtgttaagactaacagtacaaaaagcacaagcacaagcatcaacccttctttgaagatacctcaacaacaaaatgacccacctttgcaaaactttgctgtgccagggaaggcaaggagcaaaaggaagaggctttcagcaccaagaaccaacaaagaccctctaagcatatggtcacaccatttgaaccctcaa

SEQ ID NO: 87731 - DNA, 255 bp, Glycine max
ctgggctcaacgattatccaaacacagcttaacatcacttctttctttcgctagctcgctcatgttctctctcgctgaaacataacaaagttgcaaattgctctctctctgtttccagtgaaagaaaaggatgtcaagtggagcaacatactggtgttacacatgcaggcagccaatctgccttgcaaggagggatcacatttgcccctactgtgacgaaggcttcttgcaagacattgatgaattgcaaggagg

SEQ ID NO: 87732 - DNA, 258 bp, Glycine max
cggaaaggaaagtgagatactctctctatcaccaaaccaaaagcacaaaaaacaagtttgtgaagttttgattttgcagtaaaagggtgtggtgctgttgtggagatccgcgatttgtttcgtctcttatgccccatgaggagtttcttccctgctgaatcctgtaaagaggctcacccaaatgctttgaatcctcagtcttggcttcatattgaaagagggaaacttcccaagttgtcatcacacccctcatctgcc

SEQ ID NO: 87733 - DNA, 268 bp, Glycine max
cagctatccatgcttcatagccccacttgtgaattcccctggtgctacccttggttatgatgacagcaaggagctcttctccatgggaaggcttgattctcagtggcttaatcgatccgcaaacaaaggaaacttccccaatgggtataatactcaaatcttagattttgatgaggctgatctatttgaaatagtcttggatggttcagaaaagtctcaaaacacagtgtcatagctcatagcaaaggaggcataattcaatgtggtt

SEQ ID NO: 87734 - DNA, 255 bp, Glycine max
agagtccgtaagatgcaattttaccttttcagatttatcacgaggttaagctcaagtggttcagatcatgtcgaagccccaagaccaaatcatcgcaaggcctgttttcgtatgaatacctcttaaatttgaagaatataattttgtgaacgaaatttactcttgcacaagaggggaataaagctgatctaggtggtagcaggaatgacaaagttacaacacagaaaaccccttccttcaaagagggatggatgg

SEQ ID NO: 87735 - DNA, 111 bp, Glycine max
caaccagccagatgcgttctttgagtggttgtctgacttgccatgccttttaagcattctttcatgtttgagtgatgtttggattgtccaatacttatttgttatattgaa

SEQ ID NO: 87736 - DNA, 247 bp, Glycine max
cgaccatgtctcccaaaagcataagttggtaggggatttgatcatatgattgcttttaatatctatcacctcattatgcaagaatcctttgagcttgaagcatgacaatttcttcacccactatcttgtgctgaaattcaatttttatttgaaagaatggggccaacaaggattgaactcttgaccacttggtaatagaagttttgataccatctcatggaccaaatcaccagtttaagttgttgaa

SEQ ID NO: 87737 - DNA, 286 bp, Glycine max
aaacatagaagaagttaacaggggtaatgttggaatttttaaaaaaatgttgggggtagaacacatattaactatgcaggaaaaaaatcccatgcaaatttgcaatcaattgagtcaattgctttcttgattcctgttttaaacccaagaccttgggtgttactttgggcacccaacaccccaggtgaaaaggctaaaatgtgcttcacccatttaatatatgaatgaacagtgacttgtccgtacgagtcacttgttcactcctctcgcgccgctacttcgtctt

SEQ ID NO: 87738 - DNA, 288 bp, Glycine max
gctgttgcaaaggctgcccaagaacatggtatgggaccaaggggttctgctcttatttgtggatataccaattatcataggttacttgagtcaagcctggcagatttgaaaaagaaagaggtaacagctggcttgcaagaacttattaaacccttcgagtttgtttattcgttctactttatatcctaactgaagaataattagccgatggctatgatcaaatctgagaatctaaaatcttatgccattgtttaatgtaattgaatactatgaaatggttctccgtcc

SEQ ID NO: 87739 - DNA, 285 bp, Glycine max
ggaatccgttgcaaaattatgtttgaggcaaaactaattttgctaacggatcatgacccttgcttttgcgttcattttgtttttaactgttggatttatcttgaaacgtgcatcgcagcgttttcaactgcaaatcaaacattcattgtaatgtagttgaggtttgttctaagttgaaagtaattagttttgtcttttgattagttctttggttggttttcagatactgggtttgtgttcactatgtggggatggctcctttggtcaactggggcatggggataa

SEQ ID NO: 87740 - DNA, 283 bp, Glycine max
gggtggggttgcaacttcagacttttatagggccatagagacgatgcctattgtcactgaagatatggattctgcattccaaactgcaggagcaaacccgtatccttacaaccattttctttcaaattgctttatagtttgtgttagtttgttgaataggtagtagttattttttagttcagacatttcatgctaaagaaaataaaattcgttttaatttctaatgacaaaggcaccaaaatgaatagctggttaactagcattagcccatgtctcattggtt

SEQ ID NO: 87741 - DNA, 122 bp, Glycine max
gaaccaacgtgatcagcagcttgtggaatgcaaggactgtccaatccaatccatggcaaacgccaattcctgagattcagcgatttctctatgtgagagcctaactagagaccacgattttc

SEQ ID NO: 87742 - DNA, 263 bp, Glycine max
gagctgatccaaaggaaatcgttgatcttttcaagaaacgttttttggctcaacagtgaaaatttggttgcagtgggtatcctctaagttgtagattgctgtcaataaagtgttaccaaatatgatgattttgaactcaggtcaagcgttaccgagaatgatgattttgaaccgagaccaaatattagtaagtatgatgactttgaactcaggtcaagcgttaccgagaatgatgattttgaatcaagaccaagtgttaccaa

SEQ ID NO: 87743 - DNA, 274 bp, Glycine max
ggctgagatacttgaagctgccagaagaaaactcggtagggaggtcgctagcaatgaatataccaaggtcatgagcgagttatgtgtgtcaaaaggttctgtttgggtcttgaaaagcggtgatggaagtaagtaagcaatgatccgaggtccccgaggattgaactgcccacctgctcatgaatggaagtcatactctgctttctcatgagactaccagagtttagtttattggtcatagtcattattctcacatattcaaatcttttccaac

SEQ ID NO: 87744 - DNA, 262 bp, Glycine max
gaaccctcgatcactcccacgcgctcctatatcttctccttcaccgtcgctctctccaacgatcacaacaacatcgtcatcccatggtcggttttattctctaatttctctcttccttttttcgttatccgatttgttctcacgcatcaataactaagtccgcgaatttctagcgttgtatgttttgctcaagttaagtggggtcgaaatttctcagctgcattcgcattagatctgctcatttactttgatcggtggtttt

SEQ ID NO: 87745 - DNA, 258 bp, Glycine max
gaaggccctgtcgtgcccagttcaccgtctaggagtcctccgtcaccggctcgtcgtcgcaagctttctccatcactaagtcatcgtgccttgttccccgtgtaggagtcctctgtcaccagctcgccatcaaagttgtgctgccatcattgtaaatgccaccaccgtcacgtaagccttcgtgaagttgctgtcgtggctgggcaaacactagaagcaataaggacatgacaaagatatcattagctttggtatttg

SEQ ID NO: 87746 - DNA, 267 bp, Glycine max
cgcctcgagtctagatcgcgagcgccgcccttttttctttttttttttgaaataaacacaaacatcctttattacatagatctcaaatctagtttggactcaacatatttaattccaataaagggagcaaaatcgtttgaaacgttttttttcaggaaaacctcaattttatcataagccgattgcagagcatcaaaaagctaaactcttaacaggccttggtccccggggaatttcaccatccaatccggggttcagggcgctaaa

SEQ ID NO: 87747 - DNA, 104 bp, Glycine max
ctttgattttttatggagaaagaaaattcgaagcattggaatgatcatcagctgaagaaagcaggtgggagtgtggaagacaagctaggccaagaagaacatga

SEQ ID NO: 87748 - DNA, 262 bp, Glycine max
cgattttgctttctctagaataactatggaattcggaggctgttctttgatctttttcttctctcttgatatcaatgctatttcttgtcagcttgatattgatcctctgaatccacttacaccatctaattattacagaaatcaacatcaaggcactatctgattagaatggtgctttagtttgttgaatggacgccatgaaggtgaactagatctcacatcggtgggaaagaagaaaaggcacaccagaaaagtgaacaca

SEQ ID NO: 87749 - DNA, 127 bp, Glycine max
ctcgagccgagcagtctccccaatccttttgtgtatgcaaaatgagagcatgcaaatccagatgcaatgttctgtctgctctcattcttcttgtcagattcctttgtgcttccgtccactgtgaaga

SEQ ID NO: 87750 - DNA, 261 bp, Glycine max
ctgggtctctgaagatcagatcctcatcttctaccatttcagatccgatcctcttgagattgggatcaacgccgagtccatgagcacgccagcgctttcagggggcacgggcctcttctctgggttcactcggttatgcaagggccttgcggtggtgcttgtttgcggtcacattgcggttcagtttttcccttcagctgttaactaccttgctcttattcccgccaggttggacagattaaagaaaaatacatataagag

SEQ ID NO: 87751 - DNA, 260 bp, Glycine max
acttattctagttccatatatattgctgcattatttcataaaagtagcagagacaatcatgcagtcaatctgtaattggagatgcgtgtctaagtttgtcctgtttggctccaagcctcaactttgacaaatttatgaaagatttttttattgggtttataattctctacaaaatgaattcttgaattttctaccagttatgtgtggtatgcatgtctcttgctggccattttttgtaaccaagaagtgatacgcctgta

SEQ ID NO: 87752 - DNA, 257 bp, Glycine max
gaaaaactgaaagaaatactaaaggaatagttgacttcatgagacaaaaattttaatttttctttctttctatttcctcttcaatttaatttcaatttttttttctatcaaatcaaataaaagaaacgacatcagacatcgtgatccatgttttttttccatctagtattttctcttccaaacggaccataaattacagtacaagtccaatgattcaaggaccctgcgagcctggatctgaagagctgttagcctct

SEQ ID NO: 87753 - DNA, 259 bp, Glycine max
tactcgagccgaatcggctcgagcggctcgagcggctcgaggttcaccgttcaagagccagtacgttgccgcttcctgtctcaccgctggcatcggtctttttcttccagcttttgtgaggcccatgttggattcatatcaggcaaccaagcaacctccccagcctgctttaagtgacgtggttgcaggaatgactggtaaaaagtaaaggtgatttacttgacagatgcaagggcaaatttgctaagtttcttgtttg

SEQ ID NO: 87754 - DNA, 253 bp, Glycine max
ctccattatccattttattagttcctgctataattttttttgggtttcaaacgggattcttggcaaagaagcgacatttggtgttcagggacgatttttaaaaccctgaaactccactactttggaggcagtctcaaatcgaaggttttgcttctgcactgcatcttgctcaaccaaggcgtgaagcttcaaaacattgagtaccaacctggttccactcttacaagttaacagtttatgcaaatataactca

SEQ ID NO: 87755 - DNA, 254 bp, Glycine max
caacagcaacatcaatggctactaccaccgccaacaaagacgaaaccattagcaccattgcatcttcttcttctccagtcttcatatccacagagaccttatgcaccatcctcacccatcacactctgatgaaccacttccaatctactctccccaaagcctcaaccattctccaaaccccaattcgccaacaccactctctctctccttcctcctccctcctcctcatgccctcttggtcctcttcctcttct

SEQ ID NO: 87756 - DNA, 193 bp, Glycine max
  unsure (1)..(193): unsure at all n locations
ctctctctgtgctggagtttcgcgcttcactcatttggcgtcttctccttattgtctctctcttatctcctcacatcaagggtgatggttctggttacgtcttcttcgtcgatagctcagtaatcaattcatctgcgncagatcctccaactatgagnaacattcactgttgctagaagaagctggtgctgtt

SEQ ID NO: 87757 - DNA, 118 bp, Glycine max
ttaatcgagttatctctggactcttatatcgttctttgtcacaacttaaataatttccaaaattacatccttgttgcctgtggtcctcatccttctacttatgcttcgacacaacata

SEQ ID NO: 87758 - DNA, 212 bp, Glycine max
  unsure (1)..(212): unsure at all n locations
gagcccgagccgagaagatagaggtcaagtcaatgaattgaagtttgaagtcattgtgattggtcgttggtgttcgagtttgcttttccaaggccaagcaatggtcaagaccacgctggattcgggatggctgcagctcggtccaccgaggttcatttcccaggcactcaactctccancangcaccctccctctgcctccacacaacatac

SEQ ID NO: 87759 - DNA, 183 bp, Glycine max
gctccccaaaagcttttgatctctctctgcttatggaaggcccttaaactttcgatctctctgcttcactttctcgcttttgcattttcttgtgaataaaaaaaatcctcagaataataataggtctcttcttctctgatctaccaaagcttccaattctccttagtttggattgtctgtgag

SEQ ID NO: 87760 - DNA, 235 bp, Glycine max
  unsure (1)..(235): unsure at all n locations
gagactctctgcttgtctgcaatcagattcagggtttatggaaagtcnacaaccagaatatgggtatcttgtgtgctgaggccaaggagctgaaggataagtttctgtcattcaagatcagtcatatcctagggaatacaagcatgaagctgatgctcaagcaaacctggccataaatctcagagcttgtgaagttcaagaagattgtcagttgctttaatgctcaactttggta

SEQ ID NO: 87761 - DNA, 235 bp, Glycine max
gcgggccgcccttttctctgtttttttacaaaaataaatagtggcactccatgttcctttcttttgaaaaaaacctttgcattatacaattcttcttgccctaatttcccttttttttcccatcaatttaagattatacaggtttggtgagtggcaatttgaaagaacaaggcaatcaccatctctacctcacgatttcaacagttacaaatttagcaaaggaaactcaaaacct

SEQ ID NO: 87762 - DNA, 162 bp, Glycine max
ataccactctatgtcaattattggttcatggtatctgctaattggtggtttacatgggacatctattatggtgatacctggtggttagtccctcaagaggacacaattgcacgtagattaatgcatctctactcagaaatattgctcgcaagtaaggatgtt

SEQ ID NO: 87763 - DNA, 235 bp, Glycine max
  unsure (1)..(235): unsure at all n locations
gctcgacatggtatgccaccctcacaccctaataccaatatctcacactcatcaccttatcctcaattccccggctcccaatcccaatccaattctctctcccagcctttggactctccccatttcactccgnctacgtccattccaggtctttctctcactactctctcatctctctggattccttgcacccattgaacacttccccttacaaagacacttccttttccgactc

SEQ ID NO: 87764 - DNA, 178 bp, Glycine max
aagcaatgacatcacatcgggattcgattgcagttgcaggtctctctattctggtgcttattcattatcatcaaggtctcagcctgctgaagcaatggtcccaagaacataacatcaaccacataagtatcattgctgaactctgctgataagattaccgacgtgccattagggtcca

SEQ ID NO: 87765 - DNA, 262 bp, Glycine max
gcccgaggtggtattgggaaagagaatgagagttcccatgttggggcttttgatgtaagtaggcttcagaagcttaaaggaaaaaaggggaatgggaagaagaaagatgcccttgttgttgctgctgctgccatcccagagccgaagaaggttgataagcgatcacgccacttgcaggaaaggccaatttggagaagtcagacttggaaccggctctgaaagctctgaaggacaggctcatgaccaagaatgtggccgagga

SEQ ID NO: 87766 - DNA, 253 bp, Glycine max
gaatttcaattcaacaattaaaaacaaaaaaaaaaacaaaaattgatttccctgttcaatcagaaggtaaaaacaaaaccaaatgtgaaagctgattggaggaagaagcaaatgaaataaaaaagagagagaaattgttcttctgtctctattggctttcaactttccccagaagttactttctcactttcttttctctatgacgaattaagtgtcaaattgaatgaatcacacagacccacatgttaatttt

SEQ ID NO: 87767 - DNA, 249 bp, Glycine max
gtccagtaaacatccacttcttcttctagtccttctaatccagaccaccacgatacccaaattcatattgacactgtgtactctttgattgtgtacttgtttgtctgtgactctaacaatctttagaagaattcagcccatgaactgatggtgtcgtcggttagcgatcaaggcgtaagctcgtaatcgcaagtcttggaggtcaagcataatggagtctgaaaatggagtcgatattgaggacgacga

SEQ ID NO: 87768 - DNA, 171 bp, Glycine max
ggctaagactgggaaaagctaaggcggagcgtaaggtagcaacgccgtacggaaaaacctaatgattttccgtacttgtatacgtagcgttcctcattcctccgtcgctatacatcatcagcttcacaacctggatccactgtccgccatccgtaactgatataagcgatg

SEQ ID NO: 87769 - DNA, 232 bp, Glycine max
cttcacctagcgtctagttgtattgatttaatagaatgtatgagctattgtaaatcttccaatatatgattctcaccaatacaaaaaagtcatgacttcttcagttaagagttcagaagagtacaaagaagtttctcatgattttgaattggaggaggaagaggaattgtttgagattgatcttgaggcagtgaattgcattccaccacaccatttcttggccagttgttac

SEQ ID NO: 87770 - DNA, 275 bp, Glycine max
gtgaatccaccagagtctgatgtcatcatcatccaggctgctattagagggttattggctcagagagaactactacagcttaagaaagtagtgaaattgcaagctgctgttcgtgggcacttggtccggagacatgctgtaggaaccctgcgttgtattcaagccatcatcaaaatgcagatccttgtgcgagctcgtcgtgcttggcagtcacgtctggaaaatcatttaaatcataaggatggcaaaagggattcctcagaagcattgggaaa

SEQ ID NO: 87771 - DNA, 280 bp, Glycine max
ctaatctctggtgcttggatcatttactgacttgaatatgcaaaacataaggaaatctatcttgactcgtgtgaatttgaggaggtcaaccgaaagatggtttttgaccagggatgaggttgtgcatatgcaattgagatgttggtgctcttcaacagccgtcagctctgatcaaatactggaccgagtgattgcactggccaagaaatatgataaaatggatggctcaaaggttactgaaacagctgattttcaaaaagatttgcacctggacagtttg

SEQ ID NO: 87772 - DNA, 242 bp, Glycine max
caaaatcatgctgatgacatggatgatgatgatggatgcatgcacaccaaagagtgtggttttgatggtgaccaactacaaaagggttccacctgatcaaacacaccctcttgcaatttatttttttgttttctcaaagtgtatgaggttccaacttggtagtttgagtgggaaattggagctgttgttgggaccatttgttaaggtctctcctatgctgttgtcaggtcgtagctacaaca

SEQ ID NO: 87773 - DNA, 257 bp, Glycine max
gctgtctgcgaggacattgatcaggtatgtatggtttacatctaagtcatgtgaagttttattttgttaaattggtagataaaaggtgttatgcttcattcaatttgaatgtttcttaggctagttgtctttctcacggtagatgtgtttattgatagccaagttagtaaaatatactgctagttttaatgttggttgtttttaccaaaagatgtatacttgcactctgaggtgtgactttcaagctctcctttttt

SEQ ID NO: 87774 - DNA, 279 bp, Glycine max
ctgatactgaggaagcttctctctgcaaagacaacgcatgcacaggaaacataaagaataggaaactcgttaacactcccgtttccacagcccaatccctctccaagaatgtggaagagtccaaggttgacccctcggtaaatggcaatactagaaatgtgaatacattgagcacttcgaagcacaaagatgtccctgaggagcactaccatgaccttgtagagataactgagatggactattctccagcaaagagaaagcctcccatacacaactgag

SEQ ID NO: 87775 - DNA, 281 bp, Glycine max
ggatccacatgattcagagggccccgcatgattttcacttaataataatagaagagtttgttaacaaatgcattccctactctctatatggaaaatgtgagagaggacatttttccattagcattaaaattggagattggtgaactagcaccagttggtcattattagcatttctcttctttatttatttatttttaactttttttgtaagcacaccttgtccactaagaaaaaaagaaaataatctttatattctaattatgcacacccaggccctgaga

SEQ ID NO: 87776 - DNA, 278 bp, Glycine max
ttaagttcttcctataatttctgccaattccttttcagatgatgctagaaagtgttttatgcaatgaaatataacttatttagatatttatactgttggataaaatatgagaaaaagtgttatataaaattcaataaagacaatcttcattttcgtctttttgtgtccacaattctttgttgttcatctggtaaacaactttctgtgatttctttatttctcatggttctgataaatatggtattatgccatattgccatccaacatataactgtgca

SEQ ID NO: 87777 - DNA, 192 bp, Glycine max
ctttgattcaattctctactctactgttctattctgttgtcatcatgggctacatcggtcatcgttttctgggctccgtagctgttaagtatcactgggctttcggcggtactcttatcgtcataccctgaattagtatgttccaagatttgatgtctcgatctggttccgaagattttgtctgatgggtca

SEQ ID NO: 87778 - DNA, 247 bp, Glycine max
ggccgcccttttttttttttttccaaacccaaaatataatttccagtggcattcctataagaataagacctttgaaccaaattccatcaacaaactacaatgccaaattaaaaggaaaaaagaaaaactaaatttagggccttcgattcagcccaaaatctcatattacaagctcaaaattcattccccccatacaaatttgcccttgtgcccattccatgaaaagtaagtcaggctatctcatccc

SEQ ID NO: 87779 - DNA, 133 bp, Glycine max
cgattctatcatcgtttcctcaaatggcttttttgtatggcgctcagcgtctgcttcgccacaccccactgtgttcacttcccactcatgctgtccacttcgatctcacgctcaagctgctcactgtgccccc

SEQ ID NO: 87780 - DNA, 270 bp, Glycine max
ggacacatagcttattggcaaagattattgaggcagaaataaccagtcgttgcattgatatgattattacctttgacagctatggtgtctcaggtcattgtaatcatcgtgatgtgcattatggagtatggtcagttgaacattagtattgatccatatcaaagaactatcgcggaaaaatctggggatatagtagcctgattggctggacttagttcaaggcagaaacattgtttgttttctaaatgctctcaaaaagctaacaaaaac

SEQ ID NO: 87781 - DNA, 254 bp, Glycine max
agggatagaacgtttccgagaccaacccagtaaactctctgcgatggaggatcacaaagttgcgatttttttgtgattggatcggatgcgactcagcattgtgggtatcgaagcaatgcatagagcgatctcgtttctcattcaaccgcgatgcctccttctcatagttgttctctcaattttcttgattctcgcattatctggttccaaacgagttgaagagaaagaagaagaacttgaaattacagatagag

SEQ ID NO: 87782 - DNA, 298 bp, Glycine max
ggctgcttgaggaagatatatggttattcaaaattcaaatgtgttattttgttatttctgattcttagtttatcaattcatggctatattctttttagcaagaaaggttcacacgatgtctggctcattaggggacaggatacaaattttcctgtttttttgtgttgtatagtgctaagatcccagctagggagaaagcatacaagttagtaggatgcaacaatttttttagtaccagcttctatattttcttttgaagaacatcatcatcctttttggcctatgttttaattatgtt

SEQ ID NO: 87783 - DNA, 293 bp, Glycine max
  unsure (1)..(293): unsure at all n locations
tgcgagattggtcctacacaattcacctcctctctcacatttatgttcacgacatgtaagcnctctcactttgtcccgctctacatgtcaatccaatgaatagtactattactttactcacatttttaattgagataaataaattctgttttacaattgattgatctttcatgtatttaaggcaattttgaaagcgcggctcgagtctggagctaagcaatagtgcgcgtttctttgggagtcaataccttccttaatccaagggggccaggcggaagtcaccgcggtttgga

SEQ ID NO: 87784 - DNA, 256 bp, Glycine max
accgccccaaagttgaatcctttctgtccacacaacataaaacagaattcttcggatgccccgaattctgttccgttatcgatgtgcgaggagatgggattttcccggatgaggtggttattcagattctagcaaggttgcctgtgaagtcccttttcaggttcaaaaccgtgtgcaaattgtggtataggttgtctttggataagtatttcattcaactctacatatgacgtgtctaggaagaaccccatgattc

SEQ ID NO: 87785 - DNA, 295 bp, Glycine max
agttgttcaagtcgtcacaaatactgtaagtctatatgttataccggacaatatacatgaaaattgtttctggatgcccgatcagtctgtatatgctactctatctggatcttagttatgattactagagctacctgacccctggtgaggccataatgtactgtaaatcactgaaaaatatcaacctgctcttgattgtgaacagtattgtcgtaatccgaattctttgtcgagccttttccactattcaagctcttctaagtgcataatatacacatgatccgctttctcagaa

SEQ ID NO: 87786 - DNA, 153 bp, Glycine max
atgaggtgtagctttagagcaataatgttaaggaggtcattatttgaggttagcatatatagaagtcaattttgaatgcattgccgcatcatgttcaagactaaaaaagaccattcatttttaaacaggatgaatattgtgacatttaaacat

SEQ ID NO: 87787 - DNA, 295 bp, Glycine max
caccccttcaaaacccttttcctcttttcctcactccttcatcccgatcgtctcaatcttcaatttttgctcgccccgtgatttggttcaccagctttctgtgtgttataagatacccctttgtctcaaaaccttcttttgatgacattgcttccgaatcaatgcgtagtttcttgcagcaggacggtcctcacttgtctgattcagcattggcacccatttgggtgtctaaggctttggtgaagctgaaaggggaccctaaatcagccctgaagttcttcaaggaggcaggggc

SEQ ID NO: 87788 - DNA, 177 bp, Glycine max
cctcgagccgattcggctcgaccggaccaagaggagagcacggaacagcgaaagcaacgccatgctcgccattatcgagctccctaacatgctaagcctacctctggcgtcaaacgccgtcgtccgcctcctcgtcgccgacgccctctggcaatgtggcgccaacgccccgctctc

SEQ ID NO: 87789 - DNA, 193 bp, Glycine max
aaaaaaaaaaaaaaaaaaaaaaaaaaaaaaaaaaaaaggggggataccaattatgggagtaattgacacggggaataatttatggagggaaattcagaggggaacaagttttcctgaaaatggtagatatcaagtatgggagaaatttggaaagaatttttgttattttaaaaatgttgagcgggaaaaagta

SEQ ID NO: 87790 - DNA, 276 bp, Glycine max
agctgataaaataaaccccggcagttgcagtctctgtggcagaccaatgcaatttgagatgcagctgatgcctccattactatactttcttcaggaagcacttggtgaccagagaaagatggtggaaaaatgggattggatgacccttattgtatatacttgctcagaggttggtattcttccattgtcgacttcataagttttccttacccatttacaagtttcactatataagaaaggctttgcagtgataaagctgttagatgccaattgtat

SEQ ID NO: 87791 - DNA, 274 bp, Glycine max
ctcggttcacttcacttctctgtctttaaaatttcacatttttcacttatgtgtgtaattccaggattattcatgtatgtggggaatttctttttgccccttttgtatttgtgtttgctagagctcaagtagggttggattttccaaggaattttggttatttcacatgggtcgtgtgtgattttgtaatttgagttcagaaaattccaagttgttactgtttgttgagatttcgaaatattgggattcaatatgggtcttatgtaattttatc

SEQ ID NO: 87792 - DNA, 136 bp, Glycine max
ccctgctattcattccgtctgagtataattattctgtacagaataaaatgagcacatcaaattcctctgtaattattttgtactttactattgtttaaggggaagtcagatatgatgaacacttaaaaaaaacaaa

SEQ ID NO: 87793 - DNA, 109 bp, Glycine max
tttaaaataatcgtcatttagtattaatgagtcatgagcattttattttctgaggttgctactgatatgctaagttttttgtttgtcaaatatattccacacaacatac

SEQ ID NO: 87794 - DNA, 264 bp, Glycine max
cttgcctctcgatctccgccctaagaagaccagggctattcgcaggaggcttactaagcaccaggtattgttgttatcattattgtcgctactgttattcttctttatttgagtgattatctgatttagttttgtgtaatatgccttgaatgtgtgtcatctttaatatgctgctccagagaaacttttatcggttatttatttaagttatctacccattttactcggatcaatttgtgtgcttgtttctgtgcgttttacgaa

SEQ ID NO: 87795 - DNA, 270 bp, Glycine max
atttaggatggccatgcttgcttatgaggcagcaataattgcagcattcttctgcttcttatacttcttccatcggagacaatgttgcagacaccctctcttcactgactttcccatccttggcatgctgccacaattactcttcaatttgtggcgagcccatgattattcaactcaggtgttgaaacaacgtgggggcaccgctgagttcactggaccttggtttaccaaaatgaactgtttggtcactggtgaccccatcaacgtgca

SEQ ID NO: 87796 - DNA, 259 bp, Glycine max
cgagcacaagctccataatcacacggaacaagtacaagaacaagaacaagaagaaaatgaagaagaagaagaggtttggagttcttcggattctgaaatcggtgaagcgttggactggttggattcgaagaggaagctgaaggctcctccttttccctcactttgtggcgccccaacgctcacggcggtcaccaccaccattcctccactctccaacctctcgccaatcgcaaccagaagttctcccatcacattcgtg

SEQ ID NO: 87797 - DNA, 254 bp, Glycine max
ctgcactgctcaaagtgtaaggtatgatggtgagtcacggcattcttgccgctatgcactttgaagataaatgttagtgctaaatatggaagttttaagataaatgttattgctaaatatggaattatatgttctttcttcttttattggaaaaattgacaatgtggatactgttttgtacactaaatttctctcttttttggtcacttctgtatgttgggataatgtgataggtgagagaaacatgtattcta

SEQ ID NO: 87798 - DNA, 260 bp, Glycine max
gccagactcacttgcaagcttcgacttttactcgaaggttttgcatattgccacttgccaaagttttggtgcataaggcctcacaatcggtatgatgatgattttatcattgtttgaagtattactttgatttgggcccagcatttacttcctttgataaatttatattcttgattttatctttacttcattttgatttattcttctatgccttgctacaatattttcatctttgcttcttcatagtaacttctattaga

SEQ ID NO: 87799 - DNA, 262 bp, Glycine max
catcccagtgccagttcttgcagcttccagttcatcccaaaataaacaagatagttagactgacttacaccaatgcgggaaatggcattttggcattgacatcaaatggtgatcatcttctttggaaatggcctcgtgataaccttaacttggatggcaaggcgactgcacaagtttcccctcacatctggcaatcaaggagtggcttgcaattgatgagcaataaactaacaagttcttacagtggagtcccagtttcctg

SEQ ID NO: 87800 - DNA, 244 bp, Glycine max
catcctccaccatcgaaattcctcaccacctacaacacaacaatgaccgtcgcggtcctgagactgatgatagcgttgacgatctccgagggtgcagcactagttacgactcatatggtcgtaactcgacgagatgctgtcgacgagccgcattgccagatctgagaaatccgaggtacaccgacggcactcatgacgacacaggtctatactagcaatgcggaagccgtaagggcgagtatct

SEQ ID NO: 87801 - DNA, 233 bp, Glycine max
ccccccatggatcttccctcacccaggttttttggaccctttctcacccttactatcttcggcctccgcttctttggatttatcaatataaccctgatcctcatgtgcagccttctaatcctcctcaagcaccatttaaatttgcccatttccttggctcccccccttcccctaaatacgacggtggaaggctggggcccctttaaggggaaacagggtttccccttttccaa

SEQ ID NO: 87802 - DNA, 258 bp, Glycine max
atttactatagagatatgttatgtgatttcttttcttttggaagattgcttaatcattcggtcctcctattaattcatgatttatttttttgatttcaaatgtccttttcctttgattgtgtgattgatagattgtaagttatatttgggccccgtattgatatttttacttccaaatgagtgaggtgattgaaaagattacaagcactatagcgctgtggatgacaatcctctgcagttctctgcagagtgatcaaa

SEQ ID NO: 87803 - DNA, 253 bp, Glycine max
gggattcatacctgatagtttggcatcttcgaatttgaagcttgtgctattgaatggtaatttattggaaggacgagttccagagcaactttattcggttggtgtgcatggtggagctattgatctctctggcaacaagggattgtgcggcgtaccatctcttccatcatgtcctatgttttgggagcatggtagattatccactcggggtcaaattgcaatagccttgtcatgtctctttgttttctgtgtg

SEQ ID NO: 87804 - DNA, 159 bp, Glycine max
ccgagctcgagcctcggacgaggggatcgcagcgaagtccactatgccgaagcgaattcatgagactaaagacctcctcctcactgcaacgcagtaggatccacgctctgtgcaaatcgcacggactaagcttgttgagacgtccacagaccgcagctc

SEQ ID NO: 87805 - DNA, 190 bp, Glycine max
ggtttgaatagctatgcatcatgtaagatgctactgatgtattagaaacgttgcgtgcaaaatcctatggataaggtattggtgatatatttcaaagctgtgaaatcccattcaagtaggtgcaatttccattttcaatacgcaatgtggatacacagtggatcgagcgcagaatcaaggctactgagta

SEQ ID NO: 87806 - DNA, 252 bp, Glycine max
cagtaatctgagagagaaacaaaaacaatgaaggtttccattgccaagttccactcccttcccctatcttttttccttctcttggccttcaacacaaaacccctcctagcagcagaaccagagccagtggttgataagcaagggaaccctttggagccaggagtagggtactacgtgtggccactttgggctgatgaaggaggcctcacactaggccaaacaaggaacaagacatgccctctttatgttatc

SEQ ID NO: 87807 - DNA, 254 bp, Glycine max
ccttcctccatccagcagtatgatatcaacaacacagtcccaggcaaaacaaaactaacacaagacacgtaagaaccaacttgagctggaagataaaagacaaaaaagaactcaaacgtgctactgggagataatacaaaggatgcagatgatgcaaataagctcaatcgcattcttcagctcactggattcagtgatcctgtttatgctcgaagcatatgtcacagtgcatcactatgacattgtccttgatg

SEQ ID NO: 87808 - DNA, 186 bp, Glycine max
aaaaaaaaaaaataaaaataataaaacataataagaaaggatgacgagacaaaaaactacatctttgaaggagtgcattatcacatagctgatccggtaggagagaattctaaagataatggtggcattctgagatttggacaagtttctggactaggtgtatcaccttcatctatattttggggg

SEQ ID NO: 87809 - DNA, 255 bp, Glycine max
actccagcgaatcggctcgagggctgttctagtgtcactgtacgctgtgattttgctccccccattttgatcttttatctttcggaagaaattttagatgcatgagacttaagtgatcctttgccttcagcttctgaacagttttaaatcttgagtttgtggaaatcggtctcctggcttccagatttgctgtgtttcgatctgtttatccatcccaattcatcgaccttagcatctagagagagataaaatttc

SEQ ID NO: 87810 - DNA, 253 bp, Glycine max
gaatagcggatgcaagaggagatgattcaaagttggatttggaggaaacagtgagtgagatcatgattcatgaaggcactaggatagctcccgacccagttcgattttctcatgcaaaaggctcagagctaccagaattaccaagtttctcagggaagaaccccgaaggctggatcttcaaggcagagaaatatttttccccacaccatattggccaccattttctcctgttataccctttccccacaccagg

SEQ ID NO: 87811 - DNA, 246 bp, Glycine max
gaggtcgagtttcacagcagcaatggtgcgtttcggatccctcttctatcgtctctgtagcatactttgttattttgcagaatctgaattttagttatccattttttattcaagctatgttcccatgttttgcattcatatagaatttgagcgttaagtttttttggtagttttaatggaaggaaaggttctcacttatggtggggttttgtttcttgctgttacttccatgagtgccccttttag

SEQ ID NO: 87812 - DNA, 260 bp, Glycine max
caaaaaactaaccaactaataattaacattattcaataaaaaaaaaatcagacttagagactgcttactgtttcaaatttcagtaaattgtgtgataatgagttgggatctatttgatagggaaaaggaaaaggtattggaatcttgtcatatctttctctcatggagggaagttattccatttagatgagcatgtaacattttttgccatttttctcacgagtaatttagcaagtatatttgctgttgtattaatggat

SEQ ID NO: 87813 - DNA, 115 bp, Glycine max
ctctgcgtgttgacaaatacgaagttttgcttatttttggactccaattgaatgttggaaccatgcacggaagtttatttaaacttgattatgccattagatctggtttcatacc

SEQ ID NO: 87814 - DNA, 259 bp, Glycine max
ctgaagatgtccctaatggtgggggcgttttgctttctgaattgtgggctggacctacctactcaaactcaccacctcccagttccttaccaattcccaagttttccgtccggccgaagaggaccgtgtctcttgatcttcctggttcctcctcccctgggattgaaatgcgcctggtggctaagtctgcgccctcttcccctagcagggagcgtttggatctgccttttacaagggatctctttgatgataatgctga

SEQ ID NO: 87815 - DNA, 143 bp, Glycine max
cgacaatgaggcctgctcttgctttgcttcctcttctatttgcgttcttgttagctgccactacagaattcagaaaagatacaggggaatatcggaaaatgatcatgaaagatcaggagatgccagaaggacttcaaggtctt

SEQ ID NO: 87816 - DNA, 141 bp, Glycine max
ttcggctttgatttctctctcctcgactcgatcccaattccactagggattcaattccgatgcgattccgagcttgttagatccacgacaaggtttcgtttcccagattcttttgtaaaaaaaaattcttcctctgcccaa

SEQ ID NO: 87817 - DNA, 142 bp, Glycine max
gccctcgcctgtggcaagggtggtgatcttatcaaatgggacaaggctaaaatcggatattatgttggtattgacattgctgaaggctcgatcaaggactgccggacacgttacaacggtgatgctgaccatcatcagcgac

SEQ ID NO: 87818 - DNA, 142 bp, Glycine max
ctcgagcctgaagactgttgaggtggcacctgatgtcaatatagacgaagtggctcgccggacagagggatatagtggagatgatttgacaaatgtctgtcgcgatgcttccttgaatggaatgatgcgcaagatagcagga

SEQ ID NO: 87819 - DNA, 135 bp, Glycine max
ctcatgcagatgtagcttttgcataaggcatatactcttcacacatcaaagtctggttacttggtgcttcaaaaatcacacaagttgtgtttcatgtactgccattttagatgcttgagttagatgcatgtgtat

SEQ ID NO: 87820 - DNA, 138 bp, Glycine max
ctaggttcagggagagccagtttgatgtggtgaaggcctggaaagctttgaatggtgaggttgtgtccgtgaatccggtttatgtcaaggctggggttgtttctgaagatgggtttgcaatgaacgtccagccttcgg

SEQ ID NO: 87821 - DNA, 123 bp, Glycine max
cgtggatgagaacacttgatctgtggctgtaaatgtaaatcttcattttattcattgatgtgccactctccagaaatatgtctgtagtcatgacaataaactaacggaagctcttcgtgggtt

SEQ ID NO: 87822 - DNA, 288 bp, Glycine max
cttggagaaagcgccggaggggtccttcaagaataagattcatgggttatctactgtttattgttttgttgttcagtggtaaagttgtttatttcttgatttcgagtttttttgcaggttgggcttgcggctcttgtcgcgggttaagccctcggagatatttttgaagtctatatcgaaggaaatcactagtgttgaaatcatctatccatcaagtttgaatgctcaacttgttcgtcgaagactaagacatattgctgtgaggggagcaattatccaccggaaata

SEQ ID NO: 87823 - DNA, 296 bp, Glycine max
cgggattcggatcgagaggatcgagacaggttagagatgagacccagtgcagatactgaggagtcagaagtattaagtccaaggagaaatcttgaggaggaatatttgacctatgaagccaagattattaccaccttcagtgtagtggataacataaaacagcagttttatgctcaacaggggagaatttccaggttttgtattttctttctagataactttatggggttgctttattaacttgagaatttgacagttagttggttcaaataaatataatttgtaatcctgcagta

SEQ ID NO: 87824 - DNA, 287 bp, Glycine max
ctcgagccgttcagcattggtactgtgggtaatgagagaattaccacctgaagaagctgctagcatatctgaagaatcaagtacaatagcttttgttgctgatagttcaattgcaatccatcatcctcaacgctggactacagcaacaagcatgcagaatcagaaaattattttttaatatgaacatggaatgcttaactttgacaggcagcactttaagattcacattcatattgttcctacaagtgtcatcgtacaagacatcaagagcgagtcctatatgatta

SEQ ID NO: 87825 - DNA, 281 bp, Glycine max
ctcttgaatattattcacaaacttgtcattactcaaaagaccctcctagagatagaaggaaaattcctgaaagataacaacaaaaatgaaagcctcatttcttcatgatctatctaatggaatttctgtcacctcaacataccatgttgggaagtggtcaaagagatatcttttgcctgattcttgtggcaaatacagcaagtctatcacgaaatcaaagcaaaatagagcaccctttcatcacaaatctggattcttacaaagattccgagaacatgtga

SEQ ID NO: 87826 - DNA, 283 bp, Glycine max
aattaatctgcatttgcacgaacctaagctactatcgaaagtcgaaacatcccctgtcactttgactcaactcacacaccaatctccatatccctaccaattttccctattcactcatcaattttctcgtatcaggtttgatctgaaatccaggattgctacttaggtttgcatcaatataatctgacaagagaatagtaaggagcatgccatagactatacaaacacacactgctgattatttatttacttgatgtaagtggcctgtgcttggtttcagatt

SEQ ID NO: 87827 - DNA, 275 bp, Glycine max
ctcgagccgttgatgagtttcctacgtagtgttctcattcgttgacggtcgtgctcgtccactttctgtcgccattctcggcgatccgaagcgcaaaacaaccgcaatcccttcgaatttcgtgtctcgatccctaacctcaagctggaagagatgaattggatacagcgcaagatctacctttacaatgtgacttttgggctgtatatgtttgactggtgggagcgttgtaccttcaatattgtggtgattgtattaatagtgttcgttctacg

SEQ ID NO: 87828 - DNA, 258 bp, Glycine max
ccgagctgcactgttgctggcagtggaagaagaacactccagaccagagcacgacgtagattctaagaagaagaagagcgaacgaacgacgatgaacgtggtgagcgcgttaatggtgactcggaaccaactcggagcacctgaaggcatacccttcggatcggtatggttgttcgtctacgccgggatctccttttccctcgtcatcttcgccggaatcatgtcaggtctaaccctaggtctcatgtctctcggcct

SEQ ID NO: 87829 - DNA, 150 bp, Glycine max
cgcacttccaggtctacttctgttgtgtcagtcaccacagatagtttagctccactcgcctctcaccggaaccttaagttggtatgtacctttcttcttctcagctctgtgtaatgtttaaaacttgaagcgaaaccaattgccccattt

SEQ ID NO: 87830 - DNA, 266 bp, Glycine max
aacattagcagctgaagcaaaagctcaatcccttgcgttaatggtggattgtcagatttaattcgattttggaaacaacttatcgatcccccaatccgctgtgaacagatcgagggcgtggcctgtttgatttgaactgaatttcggattgaaggatctcattttcttggagcattaaagcagaaatttctagtattgtgtacatggttctctttatgatacagtgtagaataattgaatatgatattaagagtgagtcagtctac

SEQ ID NO: 87831 - DNA, 268 bp, Glycine max
ggtacattctgctgtgtcccttatcaacaccaaagtacacggcatatataaaatctatcatcaatgctgcttggaagctccatttccaacaccaccaagaagttctttcaaagggctcttgagaacttcaagtcttgtttctctcctggttaccaaaagcttcccaaaacacctccacataatcaattctcttgttctctggacattaataataacccatgctacgaggaattggagaagttctacagtgacttcaccaagcaatggg

SEQ ID NO: 87832 - DNA, 237 bp, Glycine max
agctgccaccctgctatttcaatcccactatagtgtttttgggctcactcactctgtgctgcaattcaagattgataactatgattgagctaaatggaagcttaggccattcaacagggttaaacttcaatactttctatatacttttttcaccctaaagattgcccccttcacttaattgttgtcaatcttgtcttgctctgccaatgggaatttttttggttatttatattctat

SEQ ID NO: 87833 - DNA, 164 bp, Glycine max
aatagctgaagcattcaatgcaataggccaaaatgagttctattacacagagtttcctaggaccatgtccagtgttgctgcttcccagtccagaaagggaagcagcaacactggacatggtcctaggaaactctgtgtctagttttgtcttcagcgttgtacaa

SEQ ID NO: 87834 - DNA, 236 bp, Glycine max
cccaccgtaagcgtttctgcatacgagatgttctagtaccttcttcgttcacctcttctcttcaccgtcgcaacacaacgctgagctgcagcaattcaccaccgcagagttttccaagtccaatctcacttcacttatcgccagggtttaatctgaatatctttcgcgttgccactgaggttgttatctttcttccaaaatggcgacggtgatgcattagatcaaagatatcgaag

SEQ ID NO: 87835 - DNA, 237 bp, Glycine max
gcctttttcccaagccacgaagaataccatacccttctgcatgaattgaagatggatgtagtaccacacaaacccacgtaaccataaataaattcatttcccatatagaacttccatcactgttaagtttgtaggaattgacaataggagggagccaactaatttgaagaggttgcctttgaatttgggtgttgggttgttgaagaagcacgttttgtagagaatgagtttgatttg

SEQ ID NO: 87836 - DNA, 236 bp, Glycine max
ctcacttcacacgttcattttcatttcacctttgttatttactgtggcccaaccaccccaacctaattaagcacccctttactactctttccatcaccttctctctttctatttcttccttttcttttcatcttagttcactctcaacgtacaaacaatataataataatacaaacacatatgggcaacttgtggaccttgatcatccagcttcattctattgctgggccggttgt

SEQ ID NO: 87837 - DNA, 231 bp, Glycine max
agaaggtcaaaacttactttgcttgccataaattttcttaggccgacggttattccaactctctagcaatgttatctttctagcaatactcaccgacttcgccaacatcccgaaattgtctttcaaaccattgttttttggtggaactccatttttatgtttatttagttgggaataaattttcttgtgacaagctgagagcttatactttaatgggggtaaaataatata

SEQ ID NO: 87838 - DNA, 249 bp, Glycine max
ataaattgcagcatctattataaaataatgtttcctaagaagttttttttcttctatttttttattttttaaaactaaaacttggtggaagagatgacagattggcaggataaaatgcagtcagagaataatttaatttcattattaatgtaattaaagattttgtctttcccgtcatcttgaaatattaaataattgaagaataaatgtaatataattgctggtcagaaaataaaaaataattgctca

SEQ ID NO: 87839 - DNA, 253 bp, Glycine max
cttggttgctccagtcactgcaaaagctgtaagtatggacaactatgttggtgatttgtttcaatgtccatttacataaataacttcgggtgttatcaactcttttcaacatccttttggtgagtttactaggagttatttttatcttttttttaaacaaggtcacataagaacctaatgtatattgttattgtatgtaaagtgtaaactcaatcaatacatataatggtctagtaaatcttggttattgcga

SEQ ID NO: 87840 - DNA, 242 bp, Glycine max
aatcatctaactcaagaatcagatatttatagatttggtattagcttgtctggatataattaccggaaggaaagagatttacaattaaaaatctgcaggagagcagaatattgttacgtggtaagaaaatcgtattgttatttcttctcataggtctggctcattcgaaagcctgagagtacaatagtgaattgttaaataaacattgtggatagtttcattcgcatagtaatagtaataat

SEQ ID NO: 87841 - DNA, 238 bp, Glycine max
cctcccgtgactgtttgttaagaagtttaacctgattgtcacaatcttttctttcatttgcatagtcattatttgaatatcaattcttaaagattcttaaagcatatagatcactaatataaatatgcatcataacctatggtatgaaagttggttttgtgggagagttttcgctgttttcaactggtgatgtatatgggatttggtacccttgtacctatatatcatatatgtttta

SEQ ID NO: 87842 - DNA, 244 bp, Glycine max
gtctatctggctatttgtacattcgaaaaagatgggcagcacttccaggagaacctcctcctatagatgatactgacgtagatgattggcttcctcgatttgttgttcttcagggtgcatgctattcttatatttgttgtgtacaggtaatttggttatttctttttcttttctgcctatgcattcgttcttctccttcttttgctctcaactcctattttgtatgcagagttgttgttcttgc

SEQ ID NO: 87843 - DNA, 248 bp, Glycine max
tagagcttcagttgcagaagtgtattattgaaaagaatgatcttgaaattaaaatggaagaagctaaacaggatactgggagaaaagatatcaaatctgagtttcatgttatggcttcagctttatctaaagaaagggaatgatggaaggtcaattaaagcgatggaaagatgcagctcatgaggctgtatcattacgtgagacagcacattcactaagagaagcattgagcacgaagacaagtgaac

SEQ ID NO: 87844 - DNA, 245 bp, Glycine max
cttaactcgcggactgtgcaagtttggtctgtgtgacctgtgtgttgactcgtaagttcgcttactaaatccaaatatatatttttagttaaaaatcgaaagtgtacattgttgtgcatattaaataagcaataacttagataaaaaaaattttactagaataatttttaagtgttatccgtgttgttttttgttaattagaactaataaagttttatcttgagaatatatataatcttttaata

SEQ ID NO: 87845 - DNA, 206 bp, Glycine max
cagtgcttcaaacccctttttctcttctcatttcctttcatcactctcttgcttcttttcttcttctcgcaattttccattttcacacttttagcgtaaggtttagtatctcgcagttatgattctcgaacatttaccttttcatgtctgtattttagagattattgttgtgaattcatgttacatttcgtaattgtgttgaatct

SEQ ID NO: 87846 - DNA, 248 bp, Glycine max
gaaagccaaccgaccaaacaacaataaaatgaagaaagaaaaaactctgcattcaattcgattgattcacaaattgcaactccttctcggctcttcctaatcagcacgaacacaacacaaacacaaacacagagagagacatggattttgaactgagaagagcgagagagaagctagagaaagagcagagggagaggaaggaaagagcaagactgaaacttcagaaggaaaagaaggtcaaagaagag

SEQ ID NO: 87847 - DNA, 243 bp, Glycine max
ctgtactaatgttattttgtcacattctgacatgagttgggaaaaatatgtatttttgtcgtcttcattgtggggaaaatatattatgcattctgatatgggtgaggaaacatatgtgattggtttttgttattgccataagtagtttttctgtttgtttggtatattgcgatcagcatttagaaatgataatgtatttacactgtattggtatcttgaattttcaagaatttccccgtatcc

SEQ ID NO: 87848 - DNA, 239 bp, Glycine max
gtgattttaggtaaatgttctgcatttggttctgtgtcatggaattgattctcggtctagaattggttgagttgaaacaactctaggtagcattatactgagttttatggctaacctgcttgcaaaatagaaacattcaaacattaatcacttcaccttaaaatcaattttaaccaaaattaatcatttcaaaattaattttatgaacattcatccaaacatacacgattacaatgagt

SEQ ID NO: 87849 - DNA, 242 bp, Glycine max
cagtagttcttcagaaaaaatctcagaagacagaatcaggcaaccgggcagtccaaattctgtaagaaaagaggaccagctcactcctgtccctcccaaggaggtttcctcccgacaaagccatgctactgaggcatattcaatggagaggcatgcaagtattttagacaacaatgaggctgagccaaaatgcagacctgatatggtgtccttagaggtgactgaaacagctcaagatcagc

SEQ ID NO: 87850 - DNA, 241 bp, Glycine max
gttgatttttgttcaataacagtggatggagctctagacaatgatattttgcagcaacagctacataatgttgttagacaaagacaagaactactgcaaatggagattgaactaaaggctcaaatgattgctagaactgagataatggaaatgcgaaacacctttgatgctcaactcaaggaccatgagcaactttgtgaaagggagcagacaattcatgagcttgaaaggaaatagaaga

SEQ ID NO: 87851 - DNA, 242 bp, Glycine max
gcaggagcttgtgttgatcggtgtttatcccactttttcgagcttggcggcgattgcgtctaattgtgggaatctggagaggttggccctttgtgggattggaaccgttggtgatgcagagattgagtgcattgctgataagtgtgttgcactcaggaagctttgcattaaagggtgccctgtgtctaatgctgggattggggctctagcttcggggtgtcccaatttggttaagttaaggt

SEQ ID NO: 87852 - DNA, 239 bp, Glycine max
tatattttcacccaacttttctctcttctttggcatattctatatttgattataaaaaaacagttaattaaatatgataatagggggggatcaggagtctaagccacgtttgactcttggagttgacatttgcttcttttttttttataaattttccccctttcgctgcagttggttgtgtggtggagctactggccgagagcatacttggtcaagtatagctggtcatagctgggtcg

SEQ ID NO: 87853 - DNA, 226 bp, Glycine max
ccctttttggtggggttcttttcagttttctcagcctttcttcaaactctttctctgcgtgatagatgtgtttctcctgatcttcagctctggattctgggcttggttgcaaaaaggtcattttttattggcttatgagggtgcaggttttcagcagtgttggcatgtgagtttttttacatgtgtggattttagatattggtctatggtctctcgatctctctga

SEQ ID NO: 87854 - DNA, 103 bp, Glycine max
ctggggatggcctagaggcatggaacaaatcttctaaggtccttaggttcattttggttggacgtgaaccattgggtcaacctgtggtgcaatttggaccttt

SEQ ID NO: 87855 - DNA, 232 bp, Glycine max
cttgaggtaactccatgtttgctttcccctacaagtgagtgtgcatctagcattgatatgggaaaaaaggctgatgatgtaatgaatagaacagtttggtcattgccttattctcttgtgctaagacatactactgaggaggtactagatgcatgcatggaagcaattgagccggaacatgctgcaataacatctgaactccggaagaaagtaatgaatgatcttatggagg

SEQ ID NO: 87856 - DNA, 233 bp, Glycine max
agcgatcgaagtttcacatcagccttatccagtttagggtttcggttccttaccctacctttgacgtatcgaaaccttaaatttgggattaggtctgagcaatctggttggtagaacctttggtcttagagagtcaagttttatgtctggattagacgatcaaattcctactgccttcgatccttttgctgatgcaaatgctgatgactcgggtgctgggtcaaaggatatgt

SEQ ID NO: 87857 - DNA, 248 bp, Glycine max
cgacacgctgtttctgcgctcaaatgctcggatctctcgccggttacgtggcctccagcttgaagcagttggagctgcaaaagtatgtgtttcgatgatttgtggttgtagagctacctttagctttgatatgtttcttatggtctaaggagtgtggcgaaatggttttacattctaattttattattaaaacatggaagagacacgagaagatgccgggcaaccagagcgaaggccatccaacatgt

SEQ ID NO: 87858 - DNA, 246 bp, Glycine max
aaaatctcttgcattggatacagctattggtatgtggcaattattatttgctgagaagcagtggccacttgttgatcattggtgccagttcttgcaggctcggcataacaaagcaatatctagggacacatggtctcagcttttggagtttgcaaaggtaaaataataaacaattaatggtgtcctcataatgtggatttacacttcctgtcttgatagggatttattgttgcatgactacatcta

SEQ ID NO: 87859 - DNA, 245 bp, Glycine max
taatttcccagtacctgatagcctactcagtaacctggtgagtaacctctgtcttaatatataatttaattgtgtggttttcctttgttactaatttaattgacctttcattgtttaaccaatgtgattaggtgataattgtctagggtacatatgttattctaaggcttatgatgtctaagtttcagatgctcggagcataaacggagttcttgtgactcaaggtagccattcacaggcacctt

SEQ ID NO: 87860 - DNA, 247 bp, Glycine max
gaaaaattgtagaaaactacaccaaggtgagtgaagatatatattcatagtttccaagggaattaatatctccataaaaaggaaagtggcgaaaattaatggctgccaccgaggaaccaattctctctaggattgaccgtttggataatatgttgaggcaattggaggtaatcagagggtgcaatccatctccaaagagctcgtgtgcatctactccaacaagtggaagtgatggacacgtgtcatc

SEQ ID NO: 87861 - DNA, 249 bp, Glycine max
agagaagaagaagaagtaggaggaagaaaaggggaaaacgcaaagaaaaaaagaggaagatagatcaagatctcccttgcgtttgtctcagttgaagaaattcaagagcagaacgagactaactcaacggtatcagacgtttcagggtttcagcacttccattttttttttccggatttgagttggaagaagatcaaagaggttcctagttgcttggattgttcctctgggtggtggagactttgtgta

SEQ ID NO: 87862 - DNA, 246 bp, Glycine max
gacaaccttgtttttgtgctatgccactaatgagtaggggacaattggctctccaattccaattttagggcatttctctatcaaaggaaaaaaaatccttttaaatgatttgtcttttgtcaaacttacattaaatatagttttgatatatgatatgattgtttacacgtggctataaaatgaaattcatttactagtagagcatacttcttcctccaaaatactactctcaccttaaggtagtgt

SEQ ID NO: 87863 - DNA, 246 bp, Glycine max
acatttgctcggtaccccctgggtcacctattgagcacttctgccaaatttctcacaggctacaaggacatgtcctaaactcttggtggaaagctggttggtgcgttattatctggaacatttggtataacagaaataagatattgtctggaggaggagaaggtgaggcacaagatactttttgatctttggtcatggctcaaggcttaccagagtgactttaacatctcttttcaacaatggcaa

SEQ ID NO: 87864 - DNA, 247 bp, Glycine max
aagttttgtgggaaaatgataatgctattagcatccctgctaatagaactcataattctcattcaaaaactaagggaatcacgtccaatcagcacccgccaatacctcaaactcatcgagaagaagaaccccaccatttgctacaccaaaagattgaacttgaaggcagagcacgctgctacagctactgagtgtagggtatgtctgtccgaattcgaggaaggggagaaggtgaggaaactgaaat

SEQ ID NO: 87865 - DNA, 246 bp, Glycine max
ccctctgtggtgtattttggggctaacctaattgccattgctgctattggcatgctgaactactgaggattctgttcatactctatagatcgtacccattgattaattgtatttaaaattttcatatattattccaaatagaaattgcagacgtaaattaaaatgcttgttacccaaggtaatcataaatggcatgcgtgtgaaattgtacctgacgattgtaaaatttcagatgttagtcacttt

SEQ ID NO: 87866 - DNA, 235 bp, Glycine max
cttcaacatccaagcaagtgttaaaacagggaaccatatatggtgaataacaaagacatgcaagctcaggcatacctcctccaatatccatgtaagtgttaattcctcttataattccagtaacagtcaccacatctccaggtatgcacgcatcaacgagatcttgggtaagctcgcattccactgttcgaggcacccgtccttcttcatggtcttcaggctttaataattcttg

SEQ ID NO: 87867 - DNA, 245 bp, Glycine max
agaaaagatgctccctcacggttgttggaatggatagatgctggcgtagtataccacaaacaagggggtattggtctcctgcgttatgctgctgtattggcttctggaggagatgcccagttaactactgtcctagtttcagatctgactgatgttgaaaatgttgttggagaatcttccagtggctctgatattaatgttatggagaatctgggaaagtttatatctgaaaagtcttttgacgg

SEQ ID NO: 87868 - DNA, 247 bp, Glycine max
tagatttcttgcaatcttgcttttactttaattttttgaggcttgtggataccagaaaacttgtaactaagccacaaacttataattatatttggagagaaagttttatatgtatatgacatccaaataattccttgtcatgactagtgacttctatctatcttacaacaacaacaacaaagtcttaccccaccaattgaggtcagtttcatagatcacataacaccattcgacttggttaaagcaa

SEQ ID NO: 87869 - DNA, 131 bp, Glycine max
gcactgcatgctctcttcaaaaaaggttcccaaacctttttggactgaagctgtaaactggacgttctacttttcgaatcgatgtccaacacttgctgtgaagaacgtcactcctcacgaagcttggagtg

SEQ ID NO: 87870 - DNA, 129 bp, Glycine max
ccattccaatttccatggcactctcctttcgacccgtcatccacccccgcgtcaccgaccggtcactctttcagttcctcccacccaagcctccccctcttccaacttcgccacctccctccgttctcc

SEQ ID NO: 87871 - DNA, 241 bp, Glycine max
agatctttaagcatttctgttcaagaacacccttagctgctatctgcttctagcttctatcctggaaggagaggttacgaagtagctcgaacaacgggagaggtcaaaaaacggctttttcttaggcgcaggccagctttaatcgaactcagggagaggagtataccagtggttagggaggcttggttgattgacagcattgaaaagcaagaaccacaacctttggaagcttatgatcttg

SEQ ID NO: 87872 - DNA, 130 bp, Glycine max
agatagttttgccatacttggctactaccaaattagtcatggatcttattcataagttcctgaacatagtagcttctataaccaccttctttttcctttgccttttcttgccaccgtattggaccttcaa

SEQ ID NO: 87873 - DNA, 253 bp, Glycine max
caagtgaccagagatgacatgggattgactggagctggacaagctgctcctcttaattgttgctacagcagtagtaatgagagcacccctccgacttggcctcgtagcaaaaggattaatcaaggtgaccagggcaagccaattaaagtaatgccagattttgcacaagtctacagcttcattggcagtgtattcgatccaaattcaactaatcacctacagaaactacaacagatggacccaataaatgtgg

SEQ ID NO: 87874 - DNA, 259 bp, Glycine max
attcctctttttttttttctagaccgaattgaaattgaaactttagttcttcttcttcttctgcactttcaagcaggtatggctcaacaacagggggacgaaatggagtatgctgctgatgataatgaaatggcggaagtagaagatgacatgtatttcagtggtagagtgtttggtgattcagagtccgaatcagacgacgatgatgaatatgactccatggaaaatcggatgacagatacctctgctgcagaagcta

SEQ ID NO: 87875 - DNA, 260 bp, Glycine max
ggaaaaagttgaaacttgctatttgggacactggtaatgtgcaatttgttaattataatttcttgaaagtcaaatcccttttattctatgttgtttgcttctgttatatattttcagaattacatattagttaaggtgaagaattttttccattgctagaaacttatgctgaagagtgagtgtggagctttggagctctgatgtacttgactctttcgagctttaattgagagttttgccataccagttggaatcttcaa

SEQ ID NO: 87876 - DNA, 256 bp, Glycine max
cacaacgcaagcaacacagagaagagaagattggtcttccttccttctgaaacgagaatcgtaatactagctttctttctcaacctctgtaaccaagcaagcataaatcgaaatattgtatagaattaggggagaatccattttgttgtttctctccttcatttcatagtaataatctctcaaaccaatacagcggtaataattaacctaaccctaacagaaaaatggtgaaggttcgcttgaacaccgccgatgt

SEQ ID NO: 87877 - DNA, 257 bp, Glycine max
catcttttctgataatcttttctgggtttgaatggtgcatgtaaaatggtgtaggaattagagggacctgagtgaaacaagtgtggcggagttctctaacaaacatgacagagaagaatggcaaacaaccattgttggagaggaagtactacgaggactgcccaggttgtaaagtggatcaagccaaagagttgagtaagggacaaggtgtatcctttacaaatctttttatcatatgggtggtggtgctgtgtgcc

SEQ ID NO: 87878 - DNA, 260 bp, Glycine max
gacatattcaagattatcatcatcatcacactacgtatccttaacgagatttcctttgtcattgatcatcatggcattcatttaacgaggagagaaaaaagaaaataaacaaaacagacaccctgacacgaccatagataaattatgagcagaaaacaagtggcaaagcaggcaaaagagaatgcatggttgttgcatttgcataccttgttttaataatctctgtgattattcttaaaaggagagcatgcaagaaagaa

SEQ ID NO: 87879 - DNA, 252 bp, Glycine max
gcttgggctttgccttgctcgaatatgtgacaaggctattggtggcaatgagttagagcagagtctattggattcatgtgcggctaaagggagactcattcattatcattcacatttagatgctctcctcctaaaacaacttgagaggagtaaggcaactagcaagagacgtgctggtaatatcaaaccgttggaagggttagagtcgaattcaattgcccatgacgcgaattcgggtggaattcattcgaa

SEQ ID NO: 87880 - DNA, 259 bp, Glycine max
gcaaaagaaagccctggaggaagatccatctgtatttgattatgatggagtctatgaccaaatgaaagagaaagttgctcgtccattggtacaagatcgtgaagagagaaaggtatggttgcagttctaataatcttttcttaattacaatcaaacaaccattgtgttgtttttacaactgtatagaatcatataaatataatgagaaactgagaatctctgccaacttacatcataattatgatgactctgggattag

SEQ ID NO: 87881 - DNA, 254 bp, Glycine max
gcctccttgaaattagagacattgaagacgtagcacaaatttattattgcgagtgtgcgacgaggacgagctcgagatcgtgtaaaagtgaaaattagccacttgaaaattgagtcaccaagtgttcaagcgcgttttctaacaaaaaaataatgtttttagaagttcttcctttaatatttttttagaaattttttaacctttatattttcaattttatctttcgcgtcttggttctaaatttaacttcaata

SEQ ID NO: 87882 - DNA, 251 bp, Glycine max
cttatctgggaaacaaacttcaaatttaagctttataaaccagatgaaatgttttttaaacactacaaagtttcagaatcctatttgaggttctttacaaactggaataaccattcttttacttatatagttccaggtgttatggatctagtgcttagtttctttatgttttgctggtggattcttggtattatttaaaacctaacattgtcttgaagtttttcttgcaacatataaatatgatttcctaa

SEQ ID NO: 87883 - DNA, 249 bp, Glycine max
aaaataaattataatgttttaaaacactatataataatttaaataatttcaatcttgaaatgacaaattaataaacgttagataataatatcataagaataacagaattcatgctcattcctttaactggtacaaaatcttgttaagaaataagtaagacaatgagagcaaaacatgacacttgcatgatagttcactagttcagtttctattttcttcagcgaactttcataagtgctgcagttgaaa

SEQ ID NO: 87884 - DNA, 237 bp, Glycine max
tagggcacaggagcattcggaattgacgtaaatacccttctataaagaaagtaaaaaaaagggaagagaggacgtgttgttattgattgaggggttttggttggttgatttaatttgattttcttaagtttttaaacctttttaggttaatttatgtaaatacagcgagggtggggttcgatttttagatgctgttgtttgatgatgaatttataaaagatccagttacttgtttct

SEQ ID NO: 87885 - DNA, 241 bp, Glycine max
acttcactctctctcttcatcacagttcaatctatactcaaagtctatagaagatgaggaagaattgcaacttggagcttcgccttttccctccttccctctccgatcttcgccccatgtaagctggtcttctctctcttctctttttcattaaggtcatactttgtgatgcgtcttgatatatttgtctatatattaatttgcacaagcttgtactttggattgaattcatggtatctga

SEQ ID NO: 87886 - DNA, 236 bp, Glycine max
ctctctctctctctaaggcctaagctaccaggagctccctatctacagtgtttccctctctttctctctctctctctgcaaaagctacgaagctgtgttctgatccttcaaattagatctgcttctgattccactttaaaccgccctcgcttcatcaagatctatttttttaattcaattctctcaggatcactctcttgcacctgcttctggttgtatgctttttttggggagtt

SEQ ID NO: 87887 - DNA, 246 bp, Glycine max
agtggtggtggtggtgttcagcatgagaggaagtttgaaacgaaagttgaagagaagaagggttttggggaaaaagcagaactcgagagaagaacaagagaggtagagggaagagagtggaacaaagaggagaaacaaagaagttgtccaagagggaaagtagaggcagagaaagcaagaccaatggaagaaacaaaactggaagctaaaggaagagaaaaagctgaaaccaaagagggtggtggt

SEQ ID NO: 87888 - DNA, 235 bp, Glycine max
gtagtaaagatgattctgttgagatggaagatgatatggcacaaagtgagattgatgtaatttgcatggaggaccggatgagatcactagggatgatttccagtgaaagtgtgtatgcatcaaacattgaactttgctgtaagttgttgaagggtattgatctggaagctactattccaatgacaaagataagagcagctgttttgtctatgaagtcaaccaaagcagggaagct

SEQ ID NO: 87889 - DNA, 202 bp, Glycine max
gcgcgagggaatccaaagccatagataatactattaaaatcctctatagctacggcggaatgatccttcctcgccacaccgacgcctagctccgttactacggcggccacaccagagtcctctccctccatccttccacttctttctcagagctgatactatagcttaccgagttatgcgtttcgccggcacataaggggcc

SEQ ID NO: 87890 - DNA, 249 bp, Glycine max
aaattcccaatttcttctgccgttcgatttcagactcttcattcgggatttgccatagcgattccttggttctcattcattcgttgcgtgctcgttcggctgttctcgtcgttccagtgaagagttccgtttcagtcatacaaccttgctcactgatgtttctgcacagttgttcctctatatgttggtgtgtttgtttggacatctatttcagaatgtgcaatgcaagagctctcagccatgggtcga

SEQ ID NO: 87891 - DNA, 250 bp, Glycine max
ggttcatttagcaagggagttgaacaatttcgacaagctttggagatttcaccacggtgtgtgcctgcacaatatggacttgctttggggctgcttggtttggcaaaagattgcattaacctaggagcatatcaatggggggcttcactgttagaggaagcatctgaggttgcaagggcaagtgcttattttttaagaaatatctcatgtatttggaaactacatgctgatattcagcttgcatatgcta

SEQ ID NO: 87892 - DNA, 244 bp, Glycine max
ataagcttcatcatcatctacttctactctgcatcatctctatggctgtagtacgttcacaataagaactatcccaacatgtgcatgtccacgtaactcacacatcacaccccataagtccatggtcgtagtagcgtggcagtggcattctgatactcatcccggtgatatctctcacgggttccctactcctagctctcctcgccggcgttccacttagtgcaatgctactcctcctctccgg

SEQ ID NO: 87893 - DNA, 241 bp, Glycine max
gaaatttggaaataatgagaagaagaagaagaaaaaggaaaataataagggaaaatgagtactctttgagaacttccatggaaaaaattgaaatcttgataatgtattttaaaaatcaaattgatttaaatgcatgaacttgaagggcttgattttacagaaaatttggaaatcatgagaataagaagaaacagaataaggaagaattgtgagaaccttaatggcaaaaattacagtcgtc

SEQ ID NO: 87894 - DNA, 239 bp, Glycine max
cagttagcgggtgagaaaagtaatcgtgatatacgacgagctccaagctttagtggtccattaatgcttccaaaccgcgcttgagagaatagtttatcagcgtcaatcaaatcttctggaggtatttgaatcatcatgtacatcgtaaggctgtgtgcaagtttcagtatttatcaacagccatcgtaaacactttggtgctcatttggtccaccaatgcttgttaggattcagagatt

SEQ ID NO: 87895 - DNA, 251 bp, Glycine max
cggggttgagaggactgtggttacttggactttgttgatgaaatgttactgcaggcagggaagggtcgatgaggccgagaggttgcttcggaggatgaaggaggatgagggggtggttgtggatgatcgcgtgtatggcgtgttggtcaatgggtattgtcaggtggggaggatggatgatgcggttaggattcgagatgagatggccagggtggggttgagggtgaatgtgtttgtatgtaatgcgttgg

SEQ ID NO: 87896 - DNA, 245 bp, Glycine max
cgaatgtcaataactccactcctatacccattgagagccgacaaccccaaactgatcatgcacatgtctcttaaaccgtgggagagacacatgaaattccccaccacaatctagccgactttaagccttgcctcggatatgccactgaagggcaagcagttggtggtatacccctacaaaaccctttggagggccctcagtatcatccccagctacacctcttgcattccacaacaagtaaaaac

SEQ ID NO: 87897 - DNA, 146 bp, Glycine max
acatttttcatcggaaagattttcttgggtgggattaaaatctataagtgttagcatcggtgggtagtttttctctatttcatttttccttgtttaatgttcatggtggttgaaaatttgctaataattgatggagaattagcata

SEQ ID NO: 87898 - DNA, 251 bp, Glycine max
cttcaggatggtggatacttgttatggcactgtatcctgagcttgctttatatcgcgggttatatgagttagcacaattttcctttgaagggagtagttcagagacaggtggtatgaagtggcagaatctgagtgaaagcaccaatggcatgaaagaggtcttaattatcatgtttgttgagtggataatgatgctttttgctgccttctacgttgaccaagtattgtcgtcaggaagtagaaaaggtccg

SEQ ID NO: 87899 - DNA, 241 bp, Glycine max
gtttatgaatcgcatggaacagatactaacacaaaatggttatcaatcaaatctttcatctgctaaccctagagatcagctagtggaattgccttctaatgtacaagggttgccgacacttgaagcattaagcactgtcttgcatcgtgcagaacagttacttggtggtcaagctgttgctgcactatctgtaattaacacatcccatttactaatattcatgttcaccttaatgataaaa

SEQ ID NO: 87900 - DNA, 243 bp, Glycine max
ccaccccacaatggagccgtgaacacaacgttctacctcaactcagctccaccccaccatgtcgtcttcctccgccgccaccaccaccaccaccctcccggtgttggcgtttctcctcctcacgaccaccgcgatcaccgccgcgccgattatcggtctagactcattcttgagccaccaatcccgaatggaccctcacgcctccaacgactccttcctctctctcccttcctccgtcaaaaa

SEQ ID NO: 87901 - DNA, 241 bp, Glycine max
tatgaatctaatgatttactttcattttcttgaccgagttagtgtatctaataagtgtttgatattcactttgcttcttgtctatttaattatttcaattgatcatcctgagatggaaatatagagactgtcttttgtcaataatttattatgtatacagcttttgatgcatccaggaattttttgctttcaggtcgtagttgggcctgagtttgttgttcctccatattcaaatgtatct

SEQ ID NO: 87902 - DNA, 243 bp, Glycine max
cgcggcttcaaccttgtagttattctctttcttcttttttagctatccctctcttgaaaaatctagatctcgttcttccttgatctacgttacgcttttagtgaccggatctgtatggatctgaaccagatctacacgccgatggtggttttggcctggtctttcatagatctgatgcatggaggctcagatctactgtacagaggtgtgcgattcatatactgtagataatcgatgagaaga

SEQ ID NO: 87903 - DNA, 244 bp, Glycine max
aaagagagaggagagagagtgcacagaaacgcaaacactcacttctctttttctacgtttttcatcccaacttttcttttccctcaaccattgcttctgtttgatcaaagtcaaaacacacccaaaaagaccaccattcgcaacctcttctctccctttcaacacaacacaagtgacttttcgcttgctcaaacaagaaccagttccttaaacacgcggggatcgaggaaaaaacaaacagcat

SEQ ID NO: 87904 - DNA, 225 bp, Glycine max
gccatctctctctctcccatcacattctccgcttcttccactgaaatcccacataaatgtcactctcacttcactcgcctctctcccccaatccctctaattctactgactcagctccgctacggtgagatctggaagctagggtttgaacttcaggctcccaattagggttggattccagcgtgtgatgagaaccaggagattcaggtgttgcattggaagtgg

SEQ ID NO: 87905 - DNA, 225 bp, Glycine max
actagctttgtgaaacttcttttgcaggctgttctgggtacaattgcgattattcttggtgtgacaaagggagtagatgattggtaatcttcatgccaagagttgtaaagtttgctagaccagtgcatgtaaagttaatcagttgctggaaattatgtctgagttcggtttatgtattcattgaaaactgctaccatgtctaatatgtattgtttgatttattac

SEQ ID NO: 87906 - DNA, 231 bp, Glycine max
acctatgctattccatttcagggtgcttttggaaatattggctctatttagtttgagaaaatatttttctgttttagtttcatgatttcactaattactaataattatatatgttggagatgaggagaagaacgcaaacacactctagagagaaaatgagaggaatggtagaaaatcttattgatcacacaatcacttgtgttctctgtgttagtcataggtatttatacg

SEQ ID NO: 87907 - DNA, 226 bp, Glycine max
caagtctagacttcagaacctcattcatcagtgaaatactgaaatgaataagtgctcctcagattctctgaagattttataatttaatttaattacattagttttaggctatcttgttttgcttcacctgaattagttttgcatctaattgaaattttctcattgattatgtgttcaaattcaaatgtgtgctcagagaattggttgtctatatcactgcgcatct

SEQ ID NO: 87908 - DNA, 223 bp, Glycine max
gtaaagatggtgtgaaccgtttgcttgcttcgtgtacgtatattctcactcggaggcaccgtcgtgagcttttctctttggttcattttgctgaaacctctttgacctttccaataaatcatttgtttcaccctgtcaatgagaggaaccattggaagaaagatcccaaaccccgatttttccaatgccactagaaaaatgctagttccattctctatatctt

SEQ ID NO: 87909 - DNA, 223 bp, Glycine max
ccaaaaggggctccttttgggtcctaatgctccttcttttaacccaaagacggttaaggagttgattgcgaaggacatagaagttgagcgtttggggaagctgcgtgatgaggctgtttcgtctggggtttctgatttgagtttgaccgagattgagtcgaggattgtgaaggtgaaaaaggaaattgatgatctctttggtggggagggaaaggagaacaaa

SEQ ID NO: 87910 - DNA, 222 bp, Glycine max
tctttataaaatagcatttccaatagattttccgacagaaatggtttgtcaggaatttccgacggatagcaaaaattcatcggttaaaatttcttacgatcattttttcgacaaatttcgacagtcgaaaatacgctttttttttttgtagagttgcaaaccatcaaatttcacaacactattgtaatcgtttttgcttaattgttcccttcacttgttttt

SEQ ID NO: 87911 - DNA, 220 bp, Glycine max
ctgactctgatattcctccacttcctgctcgtctggtcactgatgaagacctgaaacagttctatgaagcaatgaagatatccgatgtgcctaaggctgaggtaaaatctagtggagtaaagagaaagggtggatatattgggggccttgatactcaacattacggcaggggaaaacgtgcaagagaggtacgttcctatgaagagcaatggacagagga

SEQ ID NO: 87912 - DNA, 225 bp, Glycine max
aagactttgggaattttttggaaagctctaacactttaaccatgattttaatattcaatcaacatccccatgataagtttggtctaagactagaaaaaggagcatcatcttctaagtcacaatttgtcttagacaaatgtgacttctatggtaagtctggaaatttcaagtttagatgcatccataagaagaaaaaaatgtctaagggtactaatgcctatgggc

SEQ ID NO: 87913 - DNA, 218 bp, Glycine max
tcaatttttttatcttcatttgcgtgcttctgcttttttgttagagataaaaagagcatgtgatattgtacattgaataaaattgtaacttgtttgtgatggaaatcttcaggttgtgttggctgctcagttgttttgttggactggacagtttattggtcatggcgtgtttgaggtaagggattgatgccattacaatatgcataatgcagaggttt

SEQ ID NO: 87914 - DNA, 253 bp, Glycine max
tgattaatcagttccgtgatttatgctttgcaaagtatcttgagacatttcaggatatatgggaagcaatatctgagatgctgttgcacccgcattcatggatacgcaacagatcagttcgccttgtagccctatactttgcacgtgcaacagatgttagcagagaaactaatggaagctccttaagaagttattttattatgagtccaagtagactatttttaatagccacttctctttgctgccaactaaa

SEQ ID NO: 87915 - DNA, 245 bp, Glycine max
gagatccagtagcatctgcatattgccgtctttatatggctcactgtgctcagaagctgccttcacatgatataggctatcttgttacatgtgtcaatgacatcagagttgttttgatgcaaatcttgtcagccaatgaaagaactcataaaaatgttaaactcaacaaaaaattgcaagtcagtctgatggaaccaaccattgagtatattatgaagtgtatatttactgggttgtctcagtat

SEQ ID NO: 87916 - DNA, 247 bp, Glycine max
ccttgaaccattagaccaaccaggaccccaacacaccactgtcaaattgtttgttgtcaatccacaaacaaagttagaaccagaaacaattacctcaaaggaaactccttctgtaacattactcaccgagaattgcccatttccaccccaacacacaaccgaaccattcgactctctaatcgcacaaccatgctcagcaccaagtgccaacccagaatactcaaaagccccaccttgaggaatatca

SEQ ID NO: 87917 - DNA, 247 bp, Glycine max
atctcttccttctctctcctcatttccaaagttcccaactttcctaacccgaggtcagaatcatcattcatcattcatataataataacaataattcctttctaattaattgtttttgttttcaatttcttattacaaattctttcaattgtgcaatttggaattgaaatttgaacagatctggtgaattgaattgaaattgaaattgttgtcgtggttgctgctgctgcactgcaaggaatgccgc

SEQ ID NO: 87918 - DNA, 251 bp, Glycine max
ctcaccccttccccttcctcctcattttcccccacaccactcatctcaacaagtggcgacattccctcatcaacaacaacctcaccaaatctcattccaccaaccaacggcgatctttcccattcatcgttaatcccattctccccattatcattgttactactcaaattgttattattattactattaaccctagacactacctgaagctcaattctggaagtttcggaatccgaaaccccggcgacgat

SEQ ID NO: 87919 - DNA, 236 bp, Glycine max
gaaatttccatacacttgtcaaggttgtggaaatgaaaatgcaacaactatggtcaggttttggttggaagtgagagttggacaactaaatgaaattgctaactttactttatgggatcgtgagtgcaatgcactcattaatgaaagtgcaagtgagattaaacaacagatgattgctcaggaaggtgaatttgatccaaaggacattccgaaggctattgataggatactgggca

SEQ ID NO: 87920 - DNA, 245 bp, Glycine max
taaggatataacatacaattgttagtagttgttctgtttttaaagaaggcattaatttcctgctcatttataacaataccttctgccactcatgtataaaatataaagtatttattgatttcttctatgaattattttcccccttatttccctttttatatatacttgcagattggttgttatgcagggaaatattctgtataggtttccatctttgcagaggacagcttctcaaaagagtaaga

SEQ ID NO: 87921 - DNA, 241 bp, Glycine max
ctcgagcgaatcggctcaggcgagaaaccacgtttctactcttgaggttaaatcattattattattgagtattgagcatggaggcgccatctctcaccaaacccaacgacccaacaaaaccttccaacacttccagcacccttagtctggagggggggccgggcgaacgagcccactccgaaaaatgtttgcggtggcgtccatcgccgtcggcatacagtacgggtgggctctgcagctg

SEQ ID NO: 87922 - DNA, 244 bp, Glycine max
acggaagttaacactgaagattttgttttgtctctatctgttagtgttggaaattggtgggtagcaacagcatttggatttgtttttggaggagtcaaggtcagacggcaatggttgaaatgaagaatgtgacatataatatatgtagttctcttctcatctttttattttttcccattctaatagctgttgagtctgatcgagtgagtactgctgctgcttcttttgcaccgaatctttggtt

SEQ ID NO: 87923 - DNA, 238 bp, Glycine max
caagttacaagggtgctgaagctcctgaagataggaataaggaagtgaaccttgatgtggaccaatttattaaagacatggaatcaataatgatgcattcagacggtgaagttgccaacagtaatattgaagaaggatcgtcgtctgatctggactttgataattctgatgacagtgatattgttgaattggatgaggataatgaggacagagaggatattttcatgcggtcctattc

SEQ ID NO: 87924 - DNA, 160 bp, Glycine max
gattgctgagagtgcttgaactagtggaatgcgtggttgaggttggcgacgaggaaatggattggatatcgtgttttccggagagtgatgctcagacacatttggaatctcttgtttttgactgcgtggagtgttccgttaatttcgatgctttggagag

SEQ ID NO: 87925 - DNA, 229 bp, Glycine max
  unsure (1)..(229): unsure at all n locations
aaangcaggagaggtttagcggctcagtgaaaaaaaatcttattctagtaagtcatttgtccgttgctggtcatcaatctccggtctcgattcccggttctcccgggcctattcccttaaagcttgttacggtattctcactccgatcgccccaatgaagggcaatctctatcccttctaactttattctgggatttcttattggcattggattttacatgtgagctaa

SEQ ID NO: 87926 - DNA, 233 bp, Glycine max
tggaattggaagtattcttgttgtagcagctcattttggagtaataaccatgggtgctgacattgacattagggtagtccgtgatggacgtggtcccaactgtaatgtttggattaattttaagctgtatggattgcctatgcctgttggtcttctaagagctgacaacaaccttcctccctggcgttctacgctgaaataggtatttgatgccataatatgtgatcctcctt

SEQ ID NO: 87927 - DNA, 234 bp, Glycine max
gcataaccctaaattcaattttttccatttccgatcttgtccccggactgcaaatggggagcaggagggacgtggcgcccgccatatacaacaccaacgtcttcgcggcgctcggcagcttgaactagaagaagaagcccgagaaggactaggaccagggcccgtccaagtccatggcccaggacaacaagaaggacgttcttttaggcccctgcgcctctcacttccaagtca

SEQ ID NO: 87928 - DNA, 190 bp, Glycine max
aatgaatgctacaagcagaatttctgccttgatagattaatattctgatgatgatgaagattttcaaatattagaacctgaactagaggcataccaatttggtcttgagtatgatgtgagacaaacagccttggtagaagaaccggcacatgaaattgccttttcttccttttcgggcaatttgcgccga

SEQ ID NO: 87929 - DNA, 231 bp, Glycine max
aaacctaaaaaggatgtggagaatcaaggacaggatggtaccctgagctctggcaagcagactgcggatgtaaatactgtagtgactgaggtgaagatacctgggaaggtagttcctaagaataagataaaaacacctgtctctaataagcaagaagaaactgcggattctaataaaacagatacaccgtctgacaaaaaggatgaagggagtgttgtggcagttcaagca

SEQ ID NO: 87930 - DNA, 233 bp, Glycine max
atttcatgcacttatgattttcatttggaaaatgctcattggtgcgaattcgtacttatacaaatattttgataaccactcaccacctttgatcaaaggctttgtttttaaaatttcttatttaaaatcatccgattagatttaagcttttgttttcgtacagctcgtgcaattaattttcgcacaatatagtattactgtttttcatttattccaggtaatggcaaaccaag

SEQ ID NO: 87931 - DNA, 230 bp, Glycine max
ctcgaaggatgtcttggcattgatgacgactgcctcgatgttgatcttttaaaacaagggtgcatgacattaaagaaacttgatatctcaggttgccaaaacataagtcacgttgggttatcaaagcttacaagcatttctggaggtttagagaaactcatttcagcagatggttcccctgtcactctttctcttgctgatggtctgaataaactttcagtgttgcaatc

SEQ ID NO: 87932 - DNA, 226 bp, Glycine max
tggagaatagactactcacagattatggcattgaacctgacccctttcccttgactggaattccttcaactacctactcatttggaaagtacgaggagagatgggcgggaagtaattatgtgtcttagaatgtgtgttgtcctgtcacatgatgaactcgatacctttgtccagaatgactctagtatttcatttgtatttcttatagtctcttctttcagtttct

SEQ ID NO: 87933 - DNA, 236 bp, Glycine max
ggaaagtgcagctgtattgtattcaaaagctgctcgtctgttagttttccttctagtggagggaccattcctgattcttaattctccattttcactgataaactcggaccgttacttgcttcggaattacattgatattcttaataacatgcaaggttattcaatgtcccaacgaatgactctactgaaatgtgattactgtcaaggtatccttaaggaaaagtcttagcaatggt

SEQ ID NO: 87934 - DNA, 228 bp, Glycine max
ccatcctgaatatcagtttaatgcaaatccgggacattgataaagctatctaaatcaagattcaaatgtgtactattctttaaatgtttagaaagaaatatctgtgattgtcttcaactacagggtttcttaaccctccccactccactttcgaaaaaaagaaaatgaaaaaactaattaggaggccctaatgtgtaattcataactcaaactttcagaagaaaattt

SEQ ID NO: 87935 - DNA, 227 bp, Glycine max
cgccaatgctcctcagagagttgccctcctaacaccatcatatggttcagcatcttttgatgctccaaaaccttttggtagttcaaaaccttctcatcctgctaactttgagcagagtgccccttctcattatgacaacagggtcctagttggcacagctcctcctgccccaagttccacatatgacattcaggtactatccctacaaaaagtacacagtacttccg

SEQ ID NO: 87936 - DNA, 112 bp, Glycine max
caagagaaggctcaggagcgaaatgagagagtctcaaaagcagctaacgcagttgccagagagagtcacaagcagacaacatctggctaagctgtcatgcgagtgaagggtc

SEQ ID NO: 87937 - DNA, 227 bp, Glycine max
  unsure (1)..(227): unsure at all n locations
gaagtttgcagaactctacgagacccttgtgctggaaaatttaccggagagctttcagagttctttcccgtcattaccttttccatccttgtctgaacggggagactttgacttgaaggaatgantagagtcaccatatttcttcaactgatcaccatcttctgccttctcgtatgcttggactgtcttctagggcttattgataacatttcatgttatgtctgtga

SEQ ID NO: 87938 - DNA, 254 bp, Glycine max
gattgaacaaaccgaagatgaagaaattagttcagatgatgaaaaaagtttagatcgggtgcagccagtggataacaacagtgcatgttctcatgtgggtaaactgttgacaagtgcatctgttgattcattgtgtaaagtgatcaaagaacagtgtaatgttcctgcccttacatgtctcataaatgcttatagggaagcatgccacaatgattctgaagcaatcagtgtcagtggttgtgtctttactcatg

SEQ ID NO: 87939 - DNA, 252 bp, Glycine max
gacattttggcagaattaacagatccaatgccctcttgttctgaaaaagaaaaagaaaacggttacacccaaaaaaaagtacatgcttacccatctgggcatgttataaaaacttgattttttacatcagtgcatcatcaaaaacctcttttcttaaggagaaaaaaaatagtgaatgaaaaaactaggaatttttctcccttggctgcttcccatcctctgagagaattcccagcaaccctaaaaagggaa

SEQ ID NO: 87940 - DNA, 249 bp, Glycine max
tggatttggaaaccagaacctagtggacaatattcggtaagaactgcctataacatgttgaaaggagtggatgttgaggaggataacatgtgggtgtttgaggagctatggatgatacgagttccacctaaattactattttcgcatggaggttattaaaggtgaggctacaaagacagacaaacttgaggaggagaagggtgacaatcaatgacacattatgcccattctgtgggaattttgaggaga

SEQ ID NO: 87941 - DNA, 232 bp, Glycine max
ggttagattgagcaggttcgggaggccgcaaataggatcagtggaaaggagaagattaggtgattttgtgttttatgaattctgtccactgttgagtggaatggtttgggatagaatggaataacaaatgtcattgttggactgattggaataggatgtataatgtgatgaaaatgaaatatatttcagtttgatgcttttaaaaagaaaaaaggtgtcaaaggaaagacaa

SEQ ID NO: 87942 - DNA, 250 bp, Glycine max
aagaaagatgctatgtacaagctatagtacaatactacaactggtatagctacataaaaataaagaataataaataataactaagatggctattatgtcaacaagagaatccaacattccaatttcaaatattgtttactctttcataattaggaaaatgccaatacattattgcaggccttgattcttgatagatatagcagtcacagtggggcgtttctcctcttttactttccttctcatttttccc

SEQ ID NO: 87943 - DNA, 246 bp, Glycine max
gcagcataagcatttcagaaggtagcacaagagagaagaagaaaggtcgcattgggaccaattctttcatccccttcttcagagagccaagtagcattggagactttcaaagggggatcaacaattactggcattaaggccttccaatcctcttaagcgatccaaaattccaccttatgtccctccaagagctaccttgtgatctggaggatcagagatttgtttagcatgcttcaagtgctcaag

SEQ ID NO: 87944 - DNA, 144 bp, Glycine max
gaacacttgatttggaataggggttatttggtagtgctagtgcctagtggaattctgtgttgagttctttgttctttatatttagttgagatgtgtgtcgtgttcttgagttgtggataaaaatctactgtctatgtgcattga

SEQ ID NO: 87945 - DNA, 260 bp, Glycine max
gccgaatctcaccctgagttgctcgaactggctgacaatgggagcttaattttggtctagatgaagcggttcggccctgtcccttattggaggaccgaattcttcgaaccggattccatttggttgattggaaccacccatgtttctgaggattccgccatggaggtgaacgcgtggtgcgtgctttgaggccagagaatgtcgttgttgagctctgcagaagcagtatcttgcatggtcattgaagcggacaaagctgt

SEQ ID NO: 87946 - DNA, 146 bp, Glycine max
gattttcaagaatgttgagaaaataagacttaaagagagtagttaaatgcttggtttataaaaaggctgagttttatgatgataggtacttttataaaaatataacggttggttatgaacctagagataatagaatggatgaaccg

SEQ ID NO: 87947 - DNA, 263 bp, Glycine max
atttgagcatttttggaacagtggtggtgctagagttggggaagaaggggctctcggttggtccgcatggttggagaaagaggaggaaactaggcaaaaagttatgaatgatgagctctcgcgtgaaaatgaaggtggtggttggactggttggtcagaaccatggtctaaagataatgagggtattgtcaatgttgaaaatgaaaccatcaatgatgtggttatggaggatattcaagatgaagaggaatacaaagaagttg

SEQ ID NO: 87948 - DNA, 258 bp, Glycine max
gccaagtattggtagtcgttggatatgtagaataatagatcagtcgctacttgcaatattcgttttcaaattgagaaagctttttacctgttgataacgaatattgcaagttgcgattgatctatttttctacatatccaacaactaccaatacttggcacatcaatgcacccaatattcgttttcaacaggtaacacggtttttcactttgaaagttggatcgggttatgaaatgatgcatgcccctttaccgaaat

SEQ ID NO: 87949 - DNA, 260 bp, Glycine max
gaaagcttcctggacatttgagtagggaagggttgattcttttctcgggagggcgtgccactgcccgtgacctggtcaagaaaaggttgaagaagttcaatgaagttttcgatgagatgtatgcgaacagacaagttggatcatgccagaacgagatctgagggagaagacatgccagcttatagtgcaagcggtggtgcctgtttaccgcagttacatgcagaattatggtcctttggttgagcaagatgctagctcta

SEQ ID NO: 87950 - DNA, 257 bp, Glycine max
atgcaaattgctaacactattctactggaggttattttgaaagaggaaaacaaaattatagtagaacaaatggttcccttttctcggtattaatgacttaaactttgagggccaatgtgttgcacaaacatgaacaccatagtttcttgtcatgtattaaattctaatatagactaaggatgtgtttggtttatatgatggaaaaagaagagaaacttttgaaggtgagtagagtgtaaaaagtgtgggtcccacaa

SEQ ID NO: 87951 - DNA, 257 bp, Glycine max
gttagctctgtatgatagtctttattccctgcatctgaagaaagatagtcctttgctgaaaataaagtatcagtgttttactctttttaaatacaaaacccaactaaacttcttcaccaatggtattggttaggtgcctccagatttccctgggggctgcagacccctacagattgtggtgctggtagatactttggaaattagtaacagttattttgatctgtgagctttcacaaattaaagacaatgtaattctc

SEQ ID NO: 87952 - DNA, 258 bp, Glycine max
ctttggagatgaaatgagacttgatttgaggaagttgtggtagttgaaaaattatagaaaatattccagtgctttcttgatactttgagaggttctctgtaaattcttagtcctaatgagttttcggtttttgagatttttctcacccaactgccttttattggtctaaattgttttcaagctaatgtatggttcttaattgtagcttttggttttagaaaattttatacttagttccttcaatacttcctatctaca

SEQ ID NO: 87953 - DNA, 256 bp, Glycine max
cagaattatatccgtcctttagtcgatctcaagccctattggaactttgaagtctctacgtgtttaacacatggtgatgaagctaatgatatcaggaacgaatagcaatgcagttgtgatgattcttatgtttcttctcatggtgtacaaaatacaatgtacttgtgaataaggcatatcccgtatgaatcctggagtcaccaccttccaatagttgattgagccctttgatctctttgactttttgcttggtggt

SEQ ID NO: 87954 - DNA, 250 bp, Glycine max
caattattgattagagaatagtaccaaaactacattaggatatgcatctaagttttgtctacattgaaattggagaaacttgatttttgattccattgcttgttgatgtgcgtgtttggtttctctttgggcaattgattctgagttcgtaattgattttgaatacattttcaaatgtttggtttcacgctggagaagaatttatgattgattctgggttgaagcaactttgagtagtttctgcatggat

SEQ ID NO: 87955 - DNA, 250 bp, Glycine max
gttgtggtcaatgcgaaagggaagcttgataatgcggtcaagttgatggagtctattattgatgccgagaaagctagggtttctcagaggactcctcacttataatggacgctcaacatggttttatgatgatgataaactggggatgatcgtaaaaatattatttgtgagctctgcttgccagtgacgagcttgatgctcatttcctacgactgatgtcatcatgggaagacatgttgggggtaatggt

SEQ ID NO: 87956 - DNA, 250 bp, Glycine max
atcaattaaacaccatgagccaggaaaagccagagagacctcaagcggagaaagaccccatcaaatacggcgacgagagaagatgcagaaggagtgattggagctgagcttaggaacaacttggacatgaaacaacccctggaaaagggggtgatgcatgaagatctcaagtttccatccagtatagttaagtagtaccacaccctgtgctgaggcatccatggcgatagtgtttatatatattcgggaa

SEQ ID NO: 87957 - DNA, 251 bp, Glycine max
cccaacaccaaattagagagaacagtagtgggtatgggagctgagaggaaatggcttttcactctattcagtgcagtattcctatctctcatgcttcttttgatgtcctctttctctgcctttagtacccaaagtttaccatcctaggaataggtacctcctccatcttgggagggatgccagggatgaggagaggcaggctctggttgctgccgtgagggcggtgacggtgattcgcactttcgggaatg

SEQ ID NO: 87958 - DNA, 248 bp, Glycine max
cattaagcatatgcaggttggatttcccttgctttttctttggtatgcttctggttattgtataatcttgaagtcatgtttaccccttctttttttccctcttctcccttggcaaacaggtaaatgattcttacatgaagtctttggtttctcaccgaagagaaagtatcttaataccaacgaacacagaatgtctggtggtgaaaaggtaagctgtccgtgattgtgcccaattatcttgactttgt

SEQ ID NO: 87959 - DNA, 245 bp, Glycine max
gaaattatatcaattagagtgttggatacccatcgttttagttgctaagttgatatatttttactgtagtttagggactaattggaaggatttttcaatacaatgaaatgcgggggatagtgatcttgtgaactttgattactgtcatgagccttttctttaaagttgcttcatgttttcaaactatgttaggaattgtagttcatatatctgctttacaatacgatatgctcacttttaaggaa

SEQ ID NO: 87960 - DNA, 240 bp, Glycine max
aaaagttttatgttatagggcaagcctattaaactcctacattggataaatacgtgttgtttatcttgtgaatgtggactaattgataaaaattggaatcagggtgttgaggcttcagaaggacacaagtattgtgtgctgggcaggttgtcatctgaagttggatggagctactatgataccattagggtaagtgtttgccttgtgagaggttttgctatcttaatatttcaaaatgtg

SEQ ID NO: 87961 - DNA, 241 bp, Glycine max
gaaaaagttgctttaaatatttttttagtgtgtttgtctaagcttttaaaaaaaatcaaagtccgatattttttttactatttttgagtggctttctcaaaaaactactatgaagagccaagattattgtataaaatgtcttgaatatttgtgtatggttaaaagttataaaagcattctaaagtcgaacatagtacaaaaccataagccaaacgtaataaaatacattatagatgctttt

SEQ ID NO: 87962 - DNA, 240 bp, Glycine max
ctcgaacccttgagcttccacgcagccagcaaaaatctcttgaatccttgagcttccacgcagcaagctcgatctctcgaacttccaccgccaccctccgtcaacaagtttgccttcccttgtgaagagctccgtcgaagtgcatcatctctctctcacttgtggcatcgtgtgtctcattgggcagaaaccctaggccccaatcccgtgaaggataagaaggaataatgaagaagaaga

SEQ ID NO: 87963 - DNA, 169 bp, Glycine max
ggatagaccaagaaagcctgaagtggttccagaccttttgaagaatgatttggtattccagttaatgtggcagatcaccagctagatgagacgctggagcatggcagctgataatcagaagcacagtgcactggccatcatcagaagaggtcgccgcatgttgtcacat

SEQ ID NO: 87964 - DNA, 221 bp, Glycine max
ctcgctaaaaccctaaaccccattttcccattccacaacactcttcccttctcctcttcaatcctttctcgccagaagctcactcgccggagcctatcccgctccgtcctccgtcctaccgccggcgaactttccggcagcgtcgactacgatgaagaatcgggcgaattggacgacctcgatctcgtcggcctcgagcaagaagtccaatgatgccgtcg

SEQ ID NO: 87965 - DNA, 219 bp, Glycine max
tgaggaggaaagcaatgatggtcagctttacaagctttgtgcaatttgccatagtttgggaggagcttctatgttaatgtatgttgttacgcgtaggatagaagccaagccccatagactttcaagattggttttgttatcacctgctggttttcatcatgactctaacctagtcttctctgtggcggagatgtattgtttttgctggcccctatttgg

SEQ ID NO: 87966 - DNA, 219 bp, Glycine max
gagaaattggatctcagaattcgcggtggaaacaatgggaagtgcatcatccgaagaatgaatatttagggttgtgtggatcagggtgtgtgggtagaattacttcagtggcagggcgtttaacttgtggaatcgaagaaggggtatgatattgaaagggggaattcgagggatatgctgtaatttagggttggacttgtcttgacagtgattgggagc

SEQ ID NO: 87967 - DNA, 219 bp, Glycine max
catggattctctactggcgaactatgcctcttcagatgaagaagaagatcaacagccatccccaccaaaaacgacgacgttttcctcccttcctcaacccaaactttctctgtttcaatcccttcctcaacccaaatcttctctgtttcaatcccttcctccacccaaacaaccttccaccgaaagctcttccctccctaaccctaaccctaaccctga

SEQ ID NO: 87968 - DNA, 217 bp, Glycine max
gtgtgattgagttaaagttgctgaagacaatgagttggacaataatgcaattggaacaatctggaaatccttctatagatattcactgctatgttgatgatgccaataaaattccttaatttacaacattgtttggcctcaagtgtgctttgtaggaactaggaagcgaaacctttgcaattccatgaacataatggaaatcgtttacccgttgggt

SEQ ID NO: 87969 - DNA, 217 bp, Glycine max
aaatttaagatggattggacattcacaaggattcaaaccaatactttgtatttagctatatttagactacatattagaccttaagtaaagcagtttaatactttaatcaacttaaatggagaaccaattaatatttaaattctcagatattggaggcagagcgtgtctcccaatctcctatagagggaattatacaaacttctgttgtatcataaag

SEQ ID NO: 87970 - DNA, 217 bp, Glycine max
gctggtacctacccttttccaagaactagttatgtcggttgagtaattttattttcggaaaaaattaaaaaatagagagaggaaattgattggtggtgcaaggcataaagaggagaattggtggggataggcaaaggaggtgagtagtgaatagggtttttgattgattgagaattgaaattgatggatcgcagtgtgtcacgctcacgctctcctt

SEQ ID NO: 87971 - DNA, 254 bp, Glycine max
gtgggttgaaagtggatatctagctgcccttgtggaaatgggggatggtatggtcctgaaattggaagatggaaggctgtgctagctaaaccctattcaaaacattgcaccaatcttggatatggaagttgtagattatcatgatgagaagcaagatcaaatgtttgcttgctgtggtgtggcaccagaggggtcattaaggattattcgaaatggtattaatgtggaaaatctacataggactgcttctatat

SEQ ID NO: 87972 - DNA, 244 bp, Glycine max
tgttgttatacatggtcataaggtgaaccagcaaatgtcatttatttaaaatttaaaattatgggaatgctttaatatgatggacttagattaggcggcaatacgagaacagcagcacaattttgttatccgttgcagccatgcagcaaattgtagagattcaaactaatatagaacaaagagatgggcacatgcatagttgcacacacaaagtacggagaaactgggagaatcacttcaatag

SEQ ID NO: 87973 - DNA, 244 bp, Glycine max
cacatgattattaccctagtctaagaggggactctaatgtgttgtatgaaagctttgcttgcagctggaagaagagttggtagcaaagaagaaagaggaagggaagaaaatgaatagcccaaagaaaggttttaaacagcttgtgaagcaaagtatgaaacctaggggaaaacatagtaataaagaagcatgaatgaattatgaccattgtagctgctcccatcccaactgtgccaacgttttc

SEQ ID NO: 87974 - DNA, 243 bp, Glycine max
ctcgagccgaatcggctcgagatgccagagtacgggaatcaataaggactgctgtggattagatttgccttgtgccctctgccatttctcagactgattctcaaatcggagctcatccaagttcaacaatggagttggagggggcaattgtttgatacagtaatgcaataggcagacaaatgcttattgaagctatggatgacactaatctgcagtgaaggtgctgctaagaattctgatctg

SEQ ID NO: 87975 - DNA, 218 bp, Glycine max
gaagtacatagctgcaaaaagttccacgttttatggagttgtaaaaaaataagaataagaatgtcttgttgtaatactatatatagtaataataatgtgtagctgcatgatgtttattataataaagttgttttatttatggaaatctatcatgcagatgcagtacatgttccacgctttgtggagttgtaaataaataagaatgtctttttgtgatt

SEQ ID NO: 87976 - DNA, 250 bp, Glycine max
aatctctctctgattgtttgggtttgaagcttcccttctttcctctatgaacttcctcacaatcaaaacaaaaccaccacaaggtttcttttcttcctgtgcttgaactccacaaagccaaggaaggaaaacaaaccaaaccaatatcccttatatcccacttgttcaacctgtgcggtttatccttgaaatatggttcaaagaaaggtgcctagcaagcttggcatcgaagctgaacatgttaaatcag

SEQ ID NO: 87977 - DNA, 251 bp, Glycine max
gtcaagcctctctacattagagtctcgcgccgctacggcgaaaaactcagcttaaaccccgccgcaaaagcaccgcctccgccgcccacggcggaaccagaaggtgttagtgttggtggcggcgaaacaaacgtgaagagtagtactcaaggccaaaaactaccagcagggcttagcgttgtgtgcaagcatttggggaaaagccgttcagcatcttcggcggtggcggcggcggctcctccggcggtgtt

SEQ ID NO: 87978 - DNA, 251 bp, Glycine max
gcaggaagcatacatggattatggctacctaaaatcccttttgaaagacataatgctccacaagcaaagaaagaagccacattccagtgccaccccagcagcactaatgcgaaagctatcacttaacagaaccttcagcggcctcacacacagatactaccagcccgtgagccctgagcatgacatcgagaaccaacccattttggtgcactcagtgaagcgagatggtcatgaaaaatatgagactaatt

SEQ ID NO: 87979 - DNA, 251 bp, Glycine max
gtcagagacaaataatgaccatggctttgctattgactccaatgttgaacagactgatgaatggccatcgattgagcatcaaccagctgtttctgtatccttggttgtagatggtcatccaacgtctgagtaccatacaaactcgtctaactctggtgaagctaatcagcagctgaagacccatgtaaatgaatttgtagctgaagatgatcctgttgagaatcccgacattgttggatctgctaaaagta

SEQ ID NO: 87980 - DNA, 244 bp, Glycine max
ctctcacatacatggacctaaccaacgacacaaattctcaaaaccctccacaacccaacaccaccacaaacggttccctcaagcaccaccaccaccacccaaccaccgtgtcaccgccgcaacagccaccctccacgacggttttctacaaagagtgcctcaaaaaccatgcagccagcataggtggtcacgcgcttgatgggtgcggtgaattcatgccctcttcttcatccaaccccaatga

SEQ ID NO: 87981 - DNA, 247 bp, Glycine max
gaaagaaatattcactgcaaatgctgatagaaacttggatttctattttaaaatatgaagagtaactccctgcagcagagctagacatctgtaatctctcaaaaacagaaatgaatatggttacagacactttgaggggtctgcttcctccctgcccatgggcccaaaatgctccaggatccgttcctcccttttatccttgctcctactgtcccatacccgtttccacgtaggcaaacgatagacg

SEQ ID NO: 87982 - DNA, 252 bp, Glycine max
gtaatgttaaacccaggaagatggaatctgtggttcagaaaaatatagcccaggttggtgttagatatgtttccccttattttcataatgatagtgaggagaagattaaaggcaaaccattggatatggaaagcaaatctggatccattgctttacccacctttggaaattccattgagaataaactggacggaaataatagtggggagacaattaaacaacacggacttgatagtcatattgattctgttg

SEQ ID NO: 87983 - DNA, 251 bp, Glycine max
ctattcctcgccttcccataactcatgggattaaatgcaatggtgtgtaattgattgaactagctttcaagtaactgggctttataattatttataaccttacttcttttcatagatctgtatgcatttatcattggaagctatgtgatctggactgctgttgctggagttagatactcgattgagcaaataagaaaaaggagatcttctgttttgtttggccaaatatggaagtggtgtggcattcttgt

SEQ ID NO: 87984 - DNA, 246 bp, Glycine max
aacctgacaagtcaaggaactggtcccactatttctgatggctgtgattcttcatctagtatgcctgcaggtttgccagaatcatcaaacacacatcctgttaagccgacttctaaggcaaatgctgaaaatactgttggagaatttaactcaaaacctagaattgggtcaagatctcttagtaatccaaaggagagaacatcacaggcagataagcaggccaaaaaacgattatctctgcctaac

SEQ ID NO: 87985 - DNA, 124 bp, Glycine max
cggctcgagataatgatagattcattcccgtatcatactcttcagaaaatgttgttgaaggaaaagagcttcgaggatacttgcacaaggctagttaagtagtgactcatagtggatatactcg

SEQ ID NO: 87986 - DNA, 256 bp, Glycine max
aatttcaagtgtctatatatacatttttcttcttttatcaaagcttgtgattagactagctacctttgtaccgtacccttgtattattgcatggtttaaggtttaattaattaatttgtagctgttgcttagaactggttttggcaaagagcttgatcttcaagagatttctttgattcttctttctagtgtaaagtcatgtcctattagctaggtacaaaatgatgaaaagaatgggccaccaacgacgacaaag

SEQ ID NO: 87987 - DNA, 254 bp, Glycine max
gaacggccggtcaatgcagttgcaatgtcacctctacttgatcatgtatgtatctgtgtgttgtaaattagttaaccttgtgttgtgatattcttgtcatttatctatgcaagtaatttttcttctgctttatttgattgaggtctttatccttgaaatcggcatcctataattttgggaacctggttaaatatattttcaacacctttctttcttgctagagatttattccacatagaccacaatcatgattc

SEQ ID NO: 87988 - DNA, 258 bp, Glycine max
ctgggttcgagacgaaaaaaaccggtttaatacacgaaccgttagaagatgattttgcacaatatattaacaggacattgagtgtggcggtgcatgatttaagaattcagcttggcttctccgcgccggctgaaatccgagccgtttattcatgcagtgggggacccactgcgctgagctcaaactcagctcggcttggtgatttatacgctgaagaggagaaggagttgttggtggaggttagagtgcccacgtcag

SEQ ID NO: 87989 - DNA, 262 bp, Glycine max
gcttctcctcctagccatggccactaccgcctactgtagctccaaagaaatgaaggctttaaagatggtccaaatccaggtctcacaagctaggagttgggttgatggctacgtgagattgcatggccttttggataaaaaatatgtggccctagaagactgtgtcaagctctatggggagagtgagtctaggctttctcacatgttgactgacatgaacgtttataccacacatgatgcacttacatggattagttctgtg

SEQ ID NO: 87990 - DNA, 261 bp, Glycine max
cccaccgctacgaccccgaccggcaccaccaccccgtggatccatatgagcagaaccctagggagcccctcgcgtggggcggcggtggctaccacgcgccgggccagggcgatgtggaccccacgtcctacgtccgtgtgtacaccgtggagtccgacgccgacgtggcggggagaacaacctccaagagatgggtaatgagtgatagggatagaggaagagagatgcacgagtcttcttctggtttagtgagtagtaatg

SEQ ID NO: 87991 - DNA, 243 bp, Glycine max
cgactctctcgaagttagtttaggtttagggttaagttttcttttccttcaatcttgcaaattcttctccgcacgatgcctcccgggcctctctgaaatccccatgacgtgaacgccccgatgcacgtgccaaatcgccgccgttcgtgttgcagtttagccccaattttcccacggttgatctgtgtcaaacttcttttcgaacaccacacgtgttctctgaaaacggagctagtcctaaag

SEQ ID NO: 87992 - DNA, 246 bp, Glycine max
ctcgagccgaatcggctcgagaaaaaaaatccaaaaaaagaaaaataaaacgcttaacgcagtacaaaaaccacagtttcaatcacatctctctctctctttctcgcaaatttctactttctggtaagattttctctctcgttttctcgggaaaacctcgggatctgtgtttgcttgacgcgattccacgatttcccctaatttttcggtctgaaattgcgattttttgttcttcgtttttgtttc

SEQ ID NO: 87993 - DNA, 248 bp, Glycine max
gcggctgtgtgattaattatgttccactttctcaccaacttctttttcttcttctgggttcccattcaatttttatttctttcacttcacggaaacgcaaaactctcttgtctttgttcatcttcctctgttcctcagaacaattctcactaccccttataaatatatactcaagatgaagtgtttcttcttcaaggagaagtgcaaatccgccccggaactgcacaagaagacaacccccgccgtga

SEQ ID NO: 87994 - DNA, 243 bp, Glycine max
gtagtgatgtaccatagtgctcagttattttctagagctaacttatttcttttataatttgttctcagattcctccattgttgatattctccggcctaagtgcagcatttggaggtaacttctgttctagcctatttcttagatttatattagggccttcaaattttaatagtgctcactgctgaatatttgaaaactattgtgttgtagtggctttaacataaaaagaagcatgaaatgata

SEQ ID NO: 87995 - DNA, 239 bp, Glycine max
gctgagagcgttaaaattaggatgggggcgattacatgtgatgagatgggtgaagattatgtctctgtctctctgaagatgcatgggaattttatgcaaggttgaatttaactgatgactcatgcgaatcagagtggctgtatactttgtggcgcagggtaattaatacgggaaaggggaatggtaattaatgctatattaacttttggtcaaattagcattgttacaggtcgaatatg

SEQ ID NO: 87996 - DNA, 242 bp, Glycine max
cccatgctttccactgaacttgcttgccctacatatcaatgacgaggaatgcctccgccgctctcttccgtcatcgcgctgccattctcaagtccgcacatttacatcacgaatgtttcactgaaattatcttacgcaaatgcgtgccgttggattaccgttgctcgtctttcttatggcaccgcaattcatattcaactggtttcaccagcgtgcatggcgaaacgccctctgctgagtat

SEQ ID NO: 87997 - DNA, 242 bp, Glycine max
atttaatttagtagaactttttatccttgtaaaacttttggtccctccaacgtaaaactctttgatataccaaacatggatcagtcatgacagtttttgtggtaaaacttttggtccttgcagctttattctatttggtatattatgtgtggggtcacttttgatttttgttgacctttcaataatgatattgacaggttttattggaatttaaggagtatgctactgaagttgttcacacg

SEQ ID NO: 87998 - DNA, 250 bp, Glycine max
ggctcgagaaaagaggaaggaagaggcagaggacaagacatgatgagtagtagaacagtagatcctaaagagccagcagatcaggaggatgcactcagatcaaggataatcaagctcaatgacaagctcaagaaattcaattcctattcctcattcctcaatatcctcaatctcatgtctcttacttggcatctcgtttatttggctcaacgacttcaccatatttgctaaaccaaatactctaccaaag

SEQ ID NO: 87999 - DNA, 255 bp, Glycine max
gaagaagaaggacttccatcacctcccttggatgaaggggctttctttgtcactcaggctggttcaatggaactgtcacagttctttgatggcatggacgacgacggaaatcctcgaccaactgggccattcagcaagaaccgtgagaatggcagaaagccggttttcgacagccatgttgtagagaagaggaagtcgcaggcttcccatgacacagccatcattgaccgggatgttaagagtcagcagcaagca

SEQ ID NO: 88000 - DNA, 253 bp, Glycine max
gaagaaaagcctccattattattgaagagccacggtaaatctgggtcttgtatctggactgatcatattctatttcatattctaattcatttggccaattagatgttgaaagcctgtggagtgggttcttccccctgccaccagaattcatatgtagttgaatatctcatgatcaacatacatgataattgagatattgtggtcgatgtaaaaaagattgggaacaattaacatattagacctttatactatt

SEQ ID NO: 88001 - DNA, 218 bp, Glycine max
caaattatggcatcagttgtaatcttcatttcttctgatatttgataattttatgtgtccaaaattgatttaagttttttatttctttggataacttacaggaggtgttcgctgtctgtccatcttaaaccttatctttgctatcgtctttggtggtcttgccttgtttcttggttcaactctcttgacattgatgagcaactgctctaaacctctgt

SEQ ID NO: 88002 - DNA, 242 bp, Glycine max
tggatccctgcctcttcattccgcttccagcgttctctatgataagtcactcataaacttgggaggtaacatagacttaagattacgactttccatcagcctagaccgtgtctttcggggcctaaaatagagtactagtattatctttattacaacgtgaccttcatgctccatcctcttgtgccatagtttttcagatacactagtttccttccgacaccatttcttccttaataactgcg

SEQ ID NO: 88003 - DNA, 251 bp, Glycine max
tgaaggaatgcctatatcaaaagagcctgggatgaaggggaatttgagagttaagcttgacgtcaagtatccttcaaggctaactccagagcagaagtctgatctgaggagagttttagggtaggaaacataaacgactgtttggaaagcgtcaatcttagtgaaacagatagataggtaattcagctgagtttccatcattttgcatcaacttgttttatcttttggttaaagtcatgaagattactagt

SEQ ID NO: 88004 - DNA, 232 bp, Glycine max
aatcgcgtcattatatgctattttttttaaaaagttttttaatcggtgtattttgagcttttctattccttgatttcaagttttttagcaagtgttacttgttgcatattagcggttaagacaatcacgtctaatgtggttattttctttgctcactgtttatgaacttgttcccttttcagttttggttttgcgtcgtggtgcatttgtatttcggaagttgaacggtttg

SEQ ID NO: 88005 - DNA, 229 bp, Glycine max
  unsure (1)..(229): unsure at all n locations
tcgagctcgagccgaatcggctcgcgtgtaattattgactgctgttcaagtcccttgtgcgctacgccgctacatgatatagctatcctgtcattcatgattacttacctttcctctccttgttctcagttgtacgcaataggaagcgagcagttgcagttggatcctcattaaaatctaataagaaggcttcaagcttagntagataggcaagccttttttaaacaaa

SEQ ID NO: 88006 - DNA, 259 bp, Glycine max
agaaatgctaatgtgcggtcacgattgagagatggttttggcccatcagtagctcacgtttgtgcctatcatggtcaaccagattgtatgcgggaattactattagctggagctgatcccaatgcagtggatgatgaaggtgaatctgttctgcatagagcaattgccaagaagtacacagactgtgctcttgtgatattggagaatggaggctgtagatcaatggccatcttgaattcaaagaatctgacaccgttgc

SEQ ID NO: 88007 - DNA, 254 bp, Glycine max
ctcattctggacactattactgctatgttcgcacttcaaataacatgtggtataccttggatgacaaccgggtaagtcatgtaagtgagcgggaagttttaaaccagcaagcatacatgttgttttatgttcgtgatagaaaaagtattgttccaaggaagcctgttgacattgctaagaaggaaaatatgaagactaatttgaatgtaaatagagaatcttcaacttcaaaccatgtattgaaggaatatcca

SEQ ID NO: 88008 - DNA, 251 bp, Glycine max
gagatcttattgaaatgtttgggcatgtgggtgcagtttaattccattatgtattttgttgaaggattgagcattttattgaagtgattataatttattgatgataatggttgggaatttggctgaattggttcaagttttttaattgaaatgctagggcatttgggtgcagtgttaatgtgtaattgtggtttgtgctttgttccaggattaaactcccatctggttcaaaaaagattgttcctagtgac

SEQ ID NO: 88009 - DNA, 249 bp, Glycine max
aagaaggtagccacataaaatatgtatttttccatttgactttgttgcttgcattcaagtgtatctcatttaaagagcatcaaaagaattatgtgtctgcagagagttgacagtgcatttaattgtgactggtctagcaggtttctgtgacagtagttaccctgtctactgttctcttttatagtctgggccaaggattatttgtcctagtatggcagatttgtaatttgtttaaacttcattactgga

SEQ ID NO: 88010 - DNA, 103 bp, Glycine max
ctcactctccctttctctagctcaatccctccactcttaaaccgcacttatcgttccctttcacacctcagacaattgccaaaatcccacccttgtgccctct

SEQ ID NO: 88011 - DNA, 243 bp, Glycine max
gaaagattccattatgctgggcccaaaatcaagattccaagagttcattaatgcacagactgaagatcagggcgaggaccaagggcatatttctatgccaagaaatagagagaaaacagtatctaattctcttgttacaaaggcaacttccttgctggaaaagaaatttggtcccttcgttgagtgggataatgttgaagtgttgaagaagcaaaatagaaaggcccgaacaactaatgatga

SEQ ID NO: 88012 - DNA, 243 bp, Glycine max
gtcgttacatggttgtttatcagtatgggtcagctgttttgtttaatatcgaggatcatgaagtggaaagttacctggaattagttaagaagcatgcatctggtttacttcaagatatgaggaaagatgattatgcgataaaggagaagccactgcaagttgaggacatgcaaggaggtccagactacatagttctgaaatcgttggatactgatggtatccgtataattggaagtgtattgg

SEQ ID NO: 88013 - DNA, 241 bp, Glycine max
atcggttttgggaagaactgatattgtttttgcattttttaacattttgtttatttattaaatgaacccaaacctgcaaattaaaaacaaaaccaatccaggcgaaaactaaatcaatctatgcattatatattacattaaaattattattaaataaatattaataaatacaataatgtcaatacctaactatcatctataatctaagatttacttaagtctaacatttgcaaaatttctt

SEQ ID NO: 88014 - DNA, 246 bp, Glycine max
gaagattctgcagttatcttatccaaattatttgaagatgagatagttgaaaatgctaggagtctattggataactataatttaatgaaggatggcttcaagcctgtgaaaattaagtcagggcatcattggtggaagtcatcatgttatgaaaagttagagaaaattggtggttctgatttcagtgcttgggcaagtgagtatgtacctgcatatcggttagagattgacaccaagatattggga

SEQ ID NO: 88015 - DNA, 242 bp, Glycine max
gtttctcaaggtctttgaaagagttgaattttcccatttcgtcagctccttccctttccttagcatagatttcaaaaaagaaatccatagcaatttcttgtgccaagggagtgattgttggattacctgtatcagcttcatcacatgcaggttttccatgaaagaccatttgctcactataagagtctttttttgtgtcacaggggggcaccttccatctttgagggcttgcagcttccggc

SEQ ID NO: 88016 - DNA, 233 bp, Glycine max
gctgctgctatacagttgaaagaaaagcttgaagcatccctatccaaaagttgattgtcagatcatatttatgtgtagcatctcaatgatattgtaaaccatgttagaaatactctgtcttgtaggttaagtggctaacataatattgttcttagtgcaaaaaaaaaaaaaaaaaaaaaaaaaaaaggggggcccgccgattaagaacccccccgcccggggaattatttccg

SEQ ID NO: 88017 - DNA, 236 bp, Glycine max
ggaaaaaagcatcaccgtcttagccattgctgctccctcgtcttctccatttttcaacgctttttcccagaggtactccttgaagatctccttcaattttcttttcgggtttatttcaataaattaagattaatatttgtgtaaaagatttgtgatttcaattttgaaattgaagccatattataggataggattttcattattactggtgttattagttagagtatggtttattt

SEQ ID NO: 88018 - DNA, 229 bp, Glycine max
agagaaggttgctctagatgaacttttgtgcggaaaagttctacctcacttaagagtcatatcagaaaatgttcaagatgcaataacaagaacagaacggattattgcttccctatctggggtctggtctggtccaagtgtcattggagacaaaaagtatgttgatgccgcaaattgcagcctctggtgacttatgtgctgtcacttggaaggattctagagagaagaa

SEQ ID NO: 88019 - DNA, 228 bp, Glycine max
ctttgggtggggaaggcctgagaaagtggctgtcacatccgttgataaaacgggtgcgttttcgctctcggagagtagggatcatagtggagggattcaaattgggttggcgttgaccaagaatcaaatggaggcgttttctagggtttttgctcaaggacttgagtccttggaatcatgatgatgaggaatctttggtgagagaaagaggttagtggctcaattaaa

SEQ ID NO: 88020 - DNA, 234 bp, Glycine max
catcagtacccatttttgtactaagaagcatttgttacatttatgtaaccaaaggaaaatcaaaagtacgcaggaggtgaagctcggtggcgaaatcaacatgcaacgcagtgaaagcatgcgactaaagaaaaagaagagaagaaacaggagaagaaaaacaataaagcctggaggagatttctaagcacagagctgaagctcaacaaaaagcaatgagttcaattgaaggtg

SEQ ID NO: 88021 - DNA, 230 bp, Glycine max
ccttctcagcgaagacgaccccagcttccctcacctcaaatctggcctcctcatcctcaccacgcaccgcctactctggctcccggactccgccgcatccgccggcggcaccgccgggccatccccctcgccgccgtctcccacattttctcccccaagatgtccctgcggaaggtgttcgcctcgccgcgggtccggttccaggtgtcactgtcgccggagggaagggt

SEQ ID NO: 88022 - DNA, 225 bp, Glycine max
atcgattctctcccttctctttctctctgcgacaccagatgatggagacgacggcgaacgaacacgctgtcgttgcgccaatcgcggcgttgttgttggtggtgctactcgcggcgagtgtggtggtggaggctcaggagaactcggacgtgaagacgctggtgaagcacatgcacgggaagaagtactgcgacaaaggatgggaatgtaagggctggtcaattt

SEQ ID NO: 88023 - DNA, 225 bp, Glycine max
atctacattggatttgcatcctgatctattttagatcttagcttatgtttattaatatcatctttattggttaattgctgggaaactgaaatggaactacatctggaatattctggtcattagtgctttagaggccttactttaaaatttcaggataagatgccctgtaacttaccttttacaggttagaatgtttatagtcttttaactgttgtgtttaagtat

SEQ ID NO: 88024 - DNA, 222 bp, Glycine max
ctaattgcaaagatgaataccaagcccgttttcttcttgtgcttcctctgtgcactgcttctcatctctgttgtggcaactgagccatccaaagatgagacacaagcagaagaaccaaagacacagccagatgcctggggaagaggtggaagtggggggcatgatggaagctggggacacggtggagactgggggcatggcggaggaggacacggtggagga

SEQ ID NO: 88025 - DNA, 265 bp, Glycine max
cacatgcaagaatttgtaagatctttctttttcaaaagggaagtagagaataaattgaatgaagcacttatatgaagctcggtttgagccaaaatgtttgaggttaagtgttttttgtctattatatgtcagctttttaatctttgcttccactatattgaacaagtagtaattacattctcctgattattctgttaatatagttcaggttgttttttctattagctttgtacatcaaatggttttatgattcaaaataggtttt

SEQ ID NO: 88026 - DNA, 249 bp, Glycine max
cggaggatctgttctgttccataaggtaatgcaaattccctctctttttttttcccactttttctttggtttcttcatttcatattatgtcatcatttctgaaaattttgatattgctgatgctgtctggttcatatcatagaaacttaattgaaaggttttctttgtagcaatatgagtaatacccatcaaaactttttctgtttgatgaaacaatttgatctcctccccgtttcgttatactcctct

SEQ ID NO: 88027 - DNA, 100 bp, Glycine max
ttctcatcccagtctcactttgcctcgcgtctctcagtatgggttctggttggagaagagccttttgcactagcgacccagataattccacacaacatac

SEQ ID NO: 88028 - DNA, 232 bp, Glycine max
aagaaatgtctaacagacaaaaaaaaagaagtaaaaagccagcttatcatagggagaagggagctgctgtaccatcaggtacttctttagtgtcatcacgtggacatcttgctgtccaacttcacatgggacttttgggcatacatccaatctctgaagcttaaatttcagaactgtattttagatttgagttttgtcactccaacgaagaggcatctagacttggggcttc

SEQ ID NO: 88029 - DNA, 262 bp, Glycine max
gtgctagcttccaaattctttatgactgtttaagagttactttagcaacgtgaaattctatttaatgaagagtcgagttttgttacttaatatgcaagaccatcgtgtttatgattttgaagtcctgaatgcaaccaagttttatggtgtgttaggtccaatgtcaagatgcatgagatgtgtgaatttttggaagcaacctactgttgcttctactatttttaaaaaattgtcatggttttacatgtttgagacgtgtgtc

SEQ ID NO: 88030 - DNA, 256 bp, Glycine max
tgaagctctaattgattgcgatgagaagcactgaacactgagggtgatggaagactatgatagttacatagcgcagagtggtaggggagaaaatggattgacagtggcatcgcgtgcttgttcgcgcgacgaatttcgcccacgtggcggaaaagtactatcgcgtgttgctgctgttgcggctgcaagaaacggttcttcgacttcaagatatgatatggctgtgacgagtaatgttaagaaaaagcaaaaacgt

SEQ ID NO: 88031 - DNA, 259 bp, Glycine max
  unsure (1)..(259): unsure at all n locations
ctcgagcctctcgagccggattaatgcatttagacattttcctcttattgtttaccctgatgaagttaaatttattccattctttatctgtgcaatcaccatatcagagacctttttgcaatcttaatgatagttccagtaaatgagcancacaatttacaaatgctgggataactgaatgtactgaagttttgctttgaagtttaaaagtcattaagatttatttataaaaagggaaacccttggtgcaacaatgggg

SEQ ID NO: 88032 - DNA, 249 bp, Glycine max
tactatttaatagtagtcgaaacgccaatgctcctcagagagttgccctcccaacaccatcatatggttcagcatctatgggcacttcaaaaccatatggttcagcatctttcggcgcttcaaaaccttatggttcagcatcttttgatgccccaaaaccttttggcagttctaaaccttctcatggtgctaactttgagcagagtgccccttcttattatgacaacagggacctggttggcacagctc

SEQ ID NO: 88033 - DNA, 249 bp, Glycine max
gccaccacctgatcctgtggcagtgttacgtggccatcgagcttcggtcacagacatttcttttcatccctctaagccaatattattctccggttctgctgatggtgaagtgcggatttgggatacacttcagcatcggacagtgtcatcagcatggttacatagtgccgcacatggtattgttgctgttgctggtagttcttcccttggaaacaataaatttgtcagccagggtagggatggactgta

SEQ ID NO: 88034 - DNA, 249 bp, Glycine max
caaccacaaattttgcagggagattctgttaagaagaaattataatgtcagaatttttttttgtataattaaattaaattgagctaggtcaggtttctctttctttctattttgaaaatcaggcacccagaaaaactgttgatgggccaagcaaaagagagtggagatgcggaagtaaaagcagaatacagattctcccataagtaataatactgtagtattatgttccttctcttttggcttgcttat

SEQ ID NO: 88035 - DNA, 222 bp, Glycine max
agaacatatcgtgcattggtccttagatttttgaaagatcgaattgcagctctattgttgcttgaggtaagcactaggcagctaatggttcctgtataatctgtttgactctccatgccatttgttgattgccctagtacaaaatctcagtgtataaaacatccaagatgggctagttgcatctgtgattagttagttagggatgactttacttttttttag

SEQ ID NO: 88036 - DNA, 108 bp, Glycine max
ataaatttccggttcacaacctttcttctccagcgttttcgatgctgcaaacacccttgaacaggttttccgcacgcgttgcgtattgagactggtccttcttcggaa

SEQ ID NO: 88037 - DNA, 108 bp, Glycine max
aggagaggcaaaagtaacttaaacagacgaaactccaattctttgtcagctgagaagcgcaggtaaaataggtgcggattgggaaacaggcaaggtcaaaattgtgaa

SEQ ID NO: 88038 - DNA, 257 bp, Glycine max
agacagaacaaacgaagaaaatggaagaaggagaagaagcggtgaatcgtagaacgaaacaacacgcggaacgcggaatcggaggtgctccaccggcgatcgctcatcgacgccggcgaacttcagatcgctgcacttgcttcaccgaagattgtgccatgcggatattcacataggcatctgcagttggaatcttgtagtacgggtttataaggatcactggtcgaaaattgtcatagatgggctgaggtctgctt

SEQ ID NO: 88039 - DNA, 261 bp, Glycine max
actatacatgttgtagtagtgtggatgacgaagatacctcactggattagattattcagggaaaacccactcttgctcatttcccttctcttcctctaaaacaccaaacctctcttgtttactttctatcaaacacagtgcgtgcttgtttgtacgtgttcttgttctcacgttctcctaattgtttcggtgtatgagtgacttacttggtggactaacaccatcagtaccaggaagactgcagcgatttcacctccgagg

SEQ ID NO: 88040 - DNA, 264 bp, Glycine max
catgactcaaatggtctaaccacttggttgatcggactaagtccaatatgattcgctctagtcactttatacaaccttccttgtgcaattgattcatctcaagtagtctgattatccagcaataagatacaagagaaggaaaaaagagttacacttgtgtttatgaacagtaactggaggcgtttgtcagagctataagtggaggaatgatctatgacttgtggtgtgcttgtggtgatataatatgtgcggtatacgtttcat

SEQ ID NO: 88041 - DNA, 260 bp, Glycine max
ctgatacgaaagtatcctgagggcctcgctgttattgacctaaaggatgcttaccccaccgtgatggaagatttgcaggctttgaaagctgcagggcagatttggctgctatccaacttcgattcacaggaagacattgcctaccctaacgaccccaaagtgcacattaaggtggatgatgacctgaaacagcttttccgcagtattgaattgcctcgtgatatgattgatatagaaaaggatcttcaaaagaatggaat

SEQ ID NO: 88042 - DNA, 259 bp, Glycine max
tagcactgtggaattccttccttggagatcctgggaagtcattagtggaggtcttgattcaatgctcatgttgtgggacttctccaaagggcgctcctacaaagtagtggattttgctacatctgatgtgagtagtggcattgctgaccggtgtgtcaatcctgcttatgttcatgcaatagctattccagaagtcgacatgctagataaattagacaaaatatgtgctgttgcaaggggagatggagctattgatgtg

SEQ ID NO: 88043 - DNA, 259 bp, Glycine max
gattattggtgaacatgaacttagatgtatcctgattcctgactaccagatggattgaatagaatggctgttggtaagtaacccctcaagccagcagatagggaaattgttcatatatctcccggtcattatatttatattgatctttatatccacgaggagattggaattttgtttaaccaggctcttccacactaataaatcaagcagtgggacgtgcattcaggttgcagaggcattattcattgagtagttttat

SEQ ID NO: 88044 - DNA, 240 bp, Glycine max
tagggctcgtgcaagacttcgttgagcgctcgcagtatcgcagagcttgggtactacgcgaactacgtcgcgcgactctgctacatcgcgtgtgggtttacactgtaccgtcacatccgtgaaatgtacgtgtacgagatccagcatatgtactatagctccttcgatacccgctcggatcgtctcgtcatggttaccgctatggcctccgtttacgccgtcgcttactacttcgactca

SEQ ID NO: 88045 - DNA, 249 bp, Glycine max
cggaatttcccttcaatccagaaccaatcacgtaaccctttccgatctcaaaaactctcttatccctcaatcacaccaatccttctacttcaccttcaatggcaaacccctccccgacaaaacccctctttcccaattcccacctctctgtaccctctctctacgctcccgcgtcctaggcggcggcggagacggtggcgctacctgagccgagtcccgcgactgctacctcaacatgtacgccgacaa

SEQ ID NO: 88046 - DNA, 262 bp, Glycine max
cagcagcgtacacttggctctctccgaacacctgctacaccctgctggacctcatccttgaactctactacttcgtttctggtctctacgcctcctctaccgagtaccgccacaacgccgcctcgcgtgacttcgagcgtcagactgagcgtctgcgataccctgttcatatccgtgaggtcaccgttgaagaactcaacgtctacgacggctccgatcccgagtgtcctctcctcatggcgatctagggccagatctatga

SEQ ID NO: 88047 - DNA, 258 bp, Glycine max
acaaattctcattctcataggaacatagattaaactacacaccatgacaacaaaatacttatgcaaatattaagtctgggaaggagtcaaaaaccaatccttattctaagcaaaattcgattcacaagaagacattgcctaccctaccgacttcgtagtgcacattaacgtgggataggacgtgactggcccgaggtcgcagatggtattgcctcctgatatgcttgatatagaaaaggggctttaaggggatcgtct

SEQ ID NO: 88048 - DNA, 262 bp, Glycine max
caaacaggagaagagatacaatcgagcctggaggagatttctaagcacagagctgacagctcaacagacagcagtgagttcaattgggggtgctactgagagatacgcgagagccgaagatgaagcaagtaaagcttccatagagagaaacattcaagcaaataagagggctgaagaagacagaagaaaagcagacagtggtaggggtgttcatgtggctaagtctgtagagaaggaggcttcagtgctgaaagcagaactc

SEQ ID NO: 88049 - DNA, 247 bp, Glycine max
cgtctcgtcatcgagtcttcgtgtgtcctcaactgcgacgtttctgcgctcaaagacaaggactaaattgttgatcctctcttagtacctggtcttcaggagcttcggcaccgtgtcaccattttcgcggatcgcgcgggctatccagagggtcccgagtgatgtagattatcagcatgttgaggtcgaacacgtcccgtcatgctagctcaaacctcccgcagatcgtgtttctcaagacatggga

SEQ ID NO: 88050 - DNA, 236 bp, Glycine max
  unsure (1)..(236): unsure at all n locations
ctctctttctcttcgaaggtttggagatctcttcctccctaggagcatnaagtcgagccaccgctgcgacgcagatcgtgcatttttgaggagcagctgacatatttcggcgtcgtggaccaaagacaaatgatcactccacatattatgatattctcgggatttccaaaactgccagagaagatggaatcaaggtggactatcgaaaggcggatctggagccccgtccagtcggg

SEQ ID NO: 88051 - DNA, 236 bp, Glycine max
gcaagatcggaaatggagagcaggagggacgaggcgcccgccataaacaacaccagcgtattcgcggcgctcggcagctggaagaagaggtagtagcccgagaaggaccaggaccaaggcccgtccaagtccaaggcccaggacaacaggaaagacgtcttatgggcacccgcgactctcacctccaggtcatgcgccgatgtcggcgacatatatgacgacgactactagccacc

SEQ ID NO: 88052 - DNA, 237 bp, Glycine max
cagaactaccctttagctcttgctctttgttctttaccattgagtggccacaacaacaatggccttccatgatgatgagggtgctgatagagagtcgccacaaagtaagtttcagatggtcgactccacgagggctttcaacgctaatgcaggcgaaattcgtgtgatgacaagccatggtggtaggatattttataggcacatgcacatgggctacatctctatggaacagagtcc

SEQ ID NO: 88053 - DNA, 235 bp, Glycine max
aagccgaatttcccttctatccacaaccaaccacgaaaccctttccgttctcaaaaactctcttttccctcaatcacaccaatccttctacttcaccttcaatggcaaacccctccccgacaaaacccctctatcccaattcccacctctatccaccctctctctccgctctcgtctacttggcggctgcggagacggcggcgccacaggagccgagtctcacgactgctacctc

SEQ ID NO: 88054 - DNA, 237 bp, Glycine max
cacgattttcgtttcgccaattcgtgaaatcgaaagattcccacagaattgtacgaattattgttcatttttttgtctgttattgggaacagtatttttgtttcccagattcctctgattggttttgtgattccaatggtttttcttttctgttaatcctcatctactgtcgtgctccaacttggtaaactagaagttcatttattgttttcattcttcaatgggggatgcgagaat

SEQ ID NO: 88055 - DNA, 234 bp, Glycine max
aaaacaggaggccattttaggcgtgttaaggagcaatggaagagcagcagtcatgaaaaacggagagaaagatcagacgatgaagagggagggactggtgacgagcagagaataaaaggtggaaaacggagaaacaaggataagcactctgaattgcgctatgacgcagaggaaccagaagatgatttgatggatgaacagggaatggaggatgcagaagctgatataactaca

SEQ ID NO: 88056 - DNA, 253 bp, Glycine max
ctagttctagatcgcgagcggcctatgcaaaaattagggtaatagaaaatagaaatagaagggagaagaaaaaaatcaggggcatgttgttaaggttttgtccccaaaatccaaactacaaaaggatataagtcaagatttgaaatgacacatagccatatttcaacatcccaaacactagtttatccattgctaccacttccgagccaaagcatacttgttttctaaaaacaataggaggaaaacagcagag

SEQ ID NO: 88057 - DNA, 259 bp, Glycine max
gattgtcagacctattatctgagggtcctttagccatgattgtagtgctgttgtctatcatatttgttattacctaatgcataatttgtttagtttatctactatcaattattagttactgtccactgctaagtgttattgtcataaaatgtgttaaatgtctcagagaagcttgtgagtctgctctgaaggaaaaacattttctggatttctctcaaatggaaggatttgtagatgatgctactacttcccagtcaga

SEQ ID NO: 88058 - DNA, 252 bp, Glycine max
aagatgacgaatctgggaattctattgccacccctcgagggacagaggttactgtgcaactcaaggttatgacacccgctgaacacgtgtctctctctgaagatgaggaaggatgatcatcatggtaagtgtgtgtgtgtgtgtgtgtgtgtgtgtgtgtgttgatatcatttcagaataattgtttttggattcgacttatttgataccaccctacttagctcaattagtgtataattttcagggttgcaa

SEQ ID NO: 88059 - DNA, 242 bp, Glycine max
gtaaatattacttaatacgataagggatggtggtgatgctctatcgccccgatattaataagttgtgttagcttttgtgcagtttattgtgagttttatgtaagcatcttgtgagttatatatgtcaataagaatgtacaactagtagttgtgtagtaataatggtgtacatataaaatgtattattgtagtctatgtttatgtttagaaaatttcgttttaaatttcttatgatttgatcc

SEQ ID NO: 88060 - DNA, 258 bp, Glycine max
cccaattttaacaaagattgaaattccggagaattctttaaattctttgagtatccaaatggagcatttcattaaacagtaatttaaatagcccgataattactttacccgcttgaaatgtcatatccaaacacacatatttggagttaggaattgacttctttaattaccacatgagtggttactctaatattcctgtcacactcaaggagaatggattaatgaaaatgggttggataccctaagtttgtcatgcaa

SEQ ID NO: 88061 - DNA, 243 bp, Glycine max
gtaagcttgcaacctagctaccgtactataacattgattgagtcgtgacgagctagctgcttctggttttcttcgtgtcctcccgtggccccgaatgttagcaatcaattacaaattcaaatatatctctggaaacatggtatttttgggtgttctcttggtggggtttctcttaggtgcttatggggacagtgatggttggatggatgctcatgctaccttctatggagggggcgatgcctc

SEQ ID NO: 88062 - DNA, 253 bp, Glycine max
tgaacccacccccaaaaatgtcgtattgatatataccccagacacatttttaataaagacatcttcttagtcataattttctatacatatgctttgttctgttcctttcaatagtaatcagaccgaatgtaaatgtttctaaagagccttggggagtagaaatttaaaacacatcgttgaaaatgcatgctcacgtattaggacaacacgcccacattcgtctcacctcttttaattgtcgtaatgatgtgtg

SEQ ID NO: 88063 - DNA, 257 bp, Glycine max
ataacagccaataatctgtatgtaataagagggggcctatgacaatttgttaagtagacagatttttcagattaaggaagccgccttttatattttttttggcatcattctttcttgcccatgttgttccttttctaaagtatcacttatcattacttgttgcttttaacaaaattattggtgcattttatttgtttacaatgtgcttctacaataacttacaacttcaatatttgtgattgctatgatacttaatg

SEQ ID NO: 88064 - DNA, 172 bp, Glycine max
  unsure (1)..(172): unsure at all n locations
agctaggaggctattcatccagcctttctacttcgaatgtgattgggtcacgctccttcaggcttgatcagtctggcgaacagccacggttgccttgaatccaagagctgctgcctttgcaaagcggagccagagcttcattgagcgtactnnggtgaaccatcattctgag

SEQ ID NO: 88065 - DNA, 107 bp, Glycine max
agacttgtaaatatgatttaggtgctggttcaaccacaagaggtcagtctttcactccatgaccccaagacttgtaaatatgattttagtgctcctatatgccatgg

SEQ ID NO: 88066 - DNA, 146 bp, Glycine max
attctcagcaatatgaaccttgctatggtgtttgaatttttaaactaattggtctggttcacttcatgttaacaatatgtggtcctcttctgcgtatttgtgagcagaacagaaaagagaagaagaaatggtgtcaggcgtgagag

SEQ ID NO: 88067 - DNA, 255 bp, Glycine max
cgagccgctcgagccgctcgagccgcgacgctcagctacgattccgttgcgggaggtagtcgctctgacggttacgtttaagacgagaacacgccggtgaaagcggcggttaacaacaacgacgacgacgacgacgaagcagttggcgttggcgttctctctccgagcctgcagaggaaagactcctcggacttcgcgttcgcagatgagaacgagaaaccgctggtttccgccagattcagccaccgcaaatcc

SEQ ID NO: 88068 - DNA, 248 bp, Glycine max
ttatgactcctctgttattgaggcttatcccagaaaattaagggatgttgagaatatgggtgtgtgtgaaaggttcaaagctgtagccacagcccccttgctgcaaaaggtagatgctgttgcttacccacaaaatattatgggtgaaaaatgcatgcatacttcatatactaatggtgccaaccaatattatgaaacaggaaaggagaatccttgtaatgtttcaacacactttcttgagagaattg

SEQ ID NO: 88069 - DNA, 119 bp, Glycine max
ccctccaaagaaataacaatgatggaaacatcatcatggtaacggcgcctatcaccctgtggagggaaggatatggagattctgtgtataaataagtatactgaaaatcatatatatta

SEQ ID NO: 88070 - DNA, 224 bp, Glycine max
gaatagggtcacactcattttagtagagaagaataggaggacgatgcaagtgtaaatatcacttccttggttttgtctgctggttcttgacatcagatcgccagagcagctggggtaggcatagtgtgctttctctggattttgatatcattatccaaacaggtttgtattctgtttctcaccatctctcgtggctgggggtttctctccacttcactcctaga

SEQ ID NO: 88071 - DNA, 240 bp, Glycine max
atttggaggcctttttcaggcggtggttggtgtagttttgtgggttgtctctatttaaagaaccctcacacactcacttttgatccaaagtattgattttgatacaaaagtttttaagttttagagaagaatggaagggaataagcaaaagggtacttcttcttcattcacctctgagctctttgggtccaaagagtctcgtccctcttcttcttctgggatttttggctccattttttc

SEQ ID NO: 88072 - DNA, 244 bp, Glycine max
attactacatcgtattctgcaaattcaaactgcttgctcatggggtagctggtgcagcacatggtggacatgggtacccacctggggcttacccaccaccacctggggcataccctccgcaccaagggtaccctccacaacatgggtatcctccggctgggtaccctccacatcaaggttaccctcctgctggttacccaccagctggttatcctggttcatctcatgcaccaggttctcatgg

SEQ ID NO: 88073 - DNA, 116 bp, Glycine max
tcggtaagtaattttaacttaaatttgtcacgtatgcatactacaatgaaaatccttgattccattgcattggttaaatgggcttattccttgcagttgtgtgcaaatacggaact

SEQ ID NO: 88074 - DNA, 259 bp, Glycine max
atcctttgatcaaccaaggtgcatggacgaatgaagaggacaaatctcttttacttattgtccaagatattggcatcaggaactggtttgatattgccacatcattgggcacaagcaggactccatttcaatgcttgcacgattccaaaggagcttaaatccttccatgctaaatagtgaatggactgaggaagaagattctcaactctgtcctgctgtggcaagttttggtgctagggattggcaatctgtggcttct

SEQ ID NO: 88075 - DNA, 260 bp, Glycine max
cagagcatgaactgccggattgggtatactctccactaaataaggatgataaggtcaaaatatttgacagtggtagtgttactggaaagcgtaaaagaaatgaagtggtatatgcagatacattaagtgacctacatggatgaaggctgtggagaacggacaggacatatctaagctttcagtcaaagggaaaagaagagaccacctccctgttgacaaccatgcacaagctagtgatgacatggggacagaagaacggt

SEQ ID NO: 88076 - DNA, 254 bp, Glycine max
gtgcgtgaagctcctcaggaaccgtttcaaagccgtgaaggaaacagagggctggaaattcctcgagagccacgacccctggctcgaactcgacgttctccgcctcatgggcgaactcgaaaagaggaagagggggtgaggaagtggagggaggaggagaggttgtacgtgcagctgagcgaggcgatggagtgtttggagcacatatgcacggaggggtgtacggaggtggggccatacgaggtggaggttgg

SEQ ID NO: 88077 - DNA, 262 bp, Glycine max
caatttttggttggtgcgtccattcctgaatatattctccagctgcccaatgaagtcatgagcagcccaatgggagctcttatatgtgagttattgcatttccatgtcacttacctgcatctacattattgcatatttttcattttcaccctttgttcattttcattcatctttaacaaactatagagagttttaagcagaatcttatttagagtgatctttcttcatttatgttcatgtgcgtattaatcttaccactttt

SEQ ID NO: 88078 - DNA, 106 bp, Glycine max
ggagaaaatcacgagaattgagaaccggagcagaaaaccgatccgattcactaaaccttaattgtctactttcctttcgcaactgaccctcttgtctataaacctg

SEQ ID NO: 88079 - DNA, 258 bp, Glycine max
ggctttaaaaccggacccccctgaaattgctcaggaaaatcagtattcatttacatcgcagtctcatggatttaattatgaaaatgcccaacaaccggaggtcacatttcctctttcacagaccagctcacagatgcagcatcttgctcccttctctggtgtaatggtaattcatgttttatggcttggtcatattttagatctttagtgaataagtttagaatgacttactgcctgtttttattagatatttcatgg

SEQ ID NO: 88080 - DNA, 260 bp, Glycine max
ctcctggaatagatcaggcagaatcttattcagatgtggccaagaaggatggaagcatttctaaaaatctgataccctctttgaaagaaaaagttcctgtcataaagcggaatcattctatcagtactgttaagactgcaaccacagctggagcaaaaggtgatggcttggattcagtatctaatgcacagaacaagttgcagacttctgtgcggagtactgctaagattgaactcccagttgttgaacctccatctgat

SEQ ID NO: 88081 - DNA, 257 bp, Glycine max
aggtgaatcatttccctggataaactgaaaagaaggtcaagcattaagactttcttgtgcttgtacttggatgtgacaagcaagtttttcttcatcatctgcttctaccaaattctcttcaattatactctgaattgttgttggtgaaagaaagctgagagatcttcagagttgttgatctaattttccttcaggagaaaatgggactgcagctgattttcttgctaattgagctgcatttagttttctgcactcag

SEQ ID NO: 88082 - DNA, 279 bp, Glycine max
tcgctcttccgctcgagattaaatattaataaagattctgtattatcatctcctgcaactgaatccaaagacaaacatcgtccaataatttcttttgcattgagcagcccacaagggaatgtctcgaatattgcagatcctaacatggatcaatcagatccttttaacttgagcactcttgaggctgaaataaaaagagaatccattaagtcagatgtcgccttggaggaaaaacccatgcaagagtcaactgatttggcttcctcatcttctgtatct

SEQ ID NO: 88083 - DNA, 251 bp, Glycine max
cgttctcgtctttgtctgatacccaaacctcttcttctttttcccaagctgaaatggttttattgatgatgccgtgtgcgtgcgtgcgaatttgaattcgcaaactggattccgattggcagcagaaccgtgtttttgtttgattccccggtgtgatttcagatccagaatgtgattcccttttgtgtgttgacgtgttgatgaaaatgggagttcaacggcatgaagcgttttctgaagacaacgatcct

SEQ ID NO: 88084 - DNA, 245 bp, Glycine max
gttaaggagaggactaaggacctgtttgggtaagttttctctagaaacacttctaggagaaaaaataagaagaaaaaaaatgaaataaatttctccataggctaaagagagctcccctttagctaatcattaattaattcttagatgttccctcatcttttacagaagttatatgagagagcttctacaaattagctaatggctagctaatggaaaactattttaacctatggagaagttcatct

SEQ ID NO: 88085 - DNA, 159 bp, Glycine max
gaatatatgatgaaaatacaatgttaaggttcaatattaaataaaataaatgtgtttttacttgtttacccttatatttaggttaggaaagtggtccatactccacaggggtgataatatggtaactataaacgtaatatatttctgttcctcactact

SEQ ID NO: 88086 - DNA, 254 bp, Glycine max
gaaaagaagaggaggaggagagcgaaaaagaaaagggatgatggttcgtcacgtgattctggcgaaaggtcaaaaggaagatcacgatccaggagtggtaaaaaagaatatacatctgaggatgaggaagactcttattcttctgatggtagtgatagtttttcgggtcttaaaggtaagcaccaaaagtcagatagaaaagatgggagtcagaggaacaagatcgaaggtggcacggtaaattctacaagtga

SEQ ID NO: 88087 - DNA, 258 bp, Glycine max
cccaattgaagcatatattatctatctgttgtattataccattttttttctcaggaatatatatacacacaaaaataaagcttccagagatgtacaatacttgtgtaaagaaagagcaaagacaactgcttcaaataaataatgcaagggaatgacagcagagaatgagataaggggggaaattgttcctaggtttattattatttttggttagctgagttaatactacttactacagaaacaggtaaatgcttatgt

SEQ ID NO: 88088 - DNA, 249 bp, Glycine max
gttcaacggtgacacgaagttactggaagagaatgagaatttaagggagatgatgaagaagttgcttgaagccgggaatgaacagttaagcgtgataacaaatttgactggcagagtgaaggacttggagaagaaactagccaggagcaggagtaagagagtgaagacaaaacggtatagaccagcaacttccaaaatgtcttgcatgaaatgaaatactcctaatgtttcactgcatgtgagagcctt

SEQ ID NO: 88089 - DNA, 249 bp, Glycine max
atcgttggctaggaaaccagggtaaacatgacaggagtagaactggtccagccttctgagggtaaattccctgttaaacatgtgatcacggtatcactaaactatggacaaataggtccgtaaatatgtcaaaagtttgttctctgaaaataagtttttttctttctttctttggttgaatgcattcaaatagtgagatttgaatgggtctgaagaactgaaggattgttgattgattaaagagtatat

SEQ ID NO: 88090 - DNA, 233 bp, Glycine max
catggtctctatcacctgataccaaaccagttaaccatcaaagctgtgaactctactatcactcatcctcgatgcaatgtaaacttggataggctttgcaggaattcattctccttcaaggttaggtcagctagtcaatctgccccactttttgttgataataagcgtgattctagcgaaaagctgagacagatgcggccaactttatctcggaagttcaattcatatgtgct

SEQ ID NO: 88091 - DNA, 221 bp, Glycine max
cagaaacatcaaagacagagttgagatcaatatacagtcagttatatcaggatggtatgtgtatggataggcggtcgggtgcatcacatcgctcggcctttgctgcacctggcggctatgctcatttgaatgctcagctcatgtcaatgtcagacgatcttctcctatgtgatctagacacttcatgatgtctaacggtagatggctatgtggccttggca

SEQ ID NO: 88092 - DNA, 238 bp, Glycine max
ggttaggtcgctatgcgcctgtgtttgaagtgcatgaggtggatgatgaggttttacccatgttgactctagaggatctcaaggatatggggattagtgctgttgggtcacggagaacaatgtacactgcgcattcagaagcttggaaagggcttctcctgagctgaacttatccgtggtgatgctgccagaggccggatgtagatccgcagctttagcgaattattcagatgcgtgt

SEQ ID NO: 88093 - DNA, 249 bp, Glycine max
cggcattcggctcatcacgagcaatcggctgagagaattttttcgggactaaacatcgaacaattattaagctactaaaaatggacttaagctgatcttcaggactacaacgaataagcaaagtttacgaggtactacaaacgaacacccacaaaagcagagggaccaaaaagtttataaaccctacttagtagctcattaccttatgtagaataccgtacacgttttacccaagaaactattttgact

SEQ ID NO: 88094 - DNA, 240 bp, Glycine max
tagaattcaggggtttagtaaatatgaaccttgaattgaatccgtagtgaagagcattatttgtgtgtgcaagagagcgagggttcttagatatcataaaattatgcctttgtacaatcctaactcatttggtgttaggatttattgattacaactatgaaaggatcttccgggatattcaaaatctattaccatttggatgtttaagtattggaattttagttaattgctgttcatttg

SEQ ID NO: 88095 - DNA, 245 bp, Glycine max
agcgaagtaggaggaaggggagaaggagcgagaagggatgaggaggtaggcgaaggcgatagcgaggcttggtgaagtgtctgacagattcgaggcgcagcagctagggcagatggtggatttggagaaacggaggaatgagtttgctaggagacgagaagtgcacaggatggagatgcatatggacacacaggttcagctcgagaggatcaagcgcgcgaaaagatctggctctaacgatatgt

SEQ ID NO: 88096 - DNA, 213 bp, Glycine max
ggaaggcatggatgtttgtgttaaaattataagaaacaacaaggactgttttgaccatcgtcttgacgatatcaaagcatctcaagtatgtccataagcgtgatcgtgcagaccagtgtcacagtctacgattatgtagttataactattatcgtgaatactaggtaatagtatgtggcataccaaaagcaagcttgtatgatgatcatgcat

SEQ ID NO: 88097 - DNA, 222 bp, Glycine max
gtaaagcttacttcagcacctataattgtctacaagtaattcagcggctgcatactcaccggagacgatgagtcaggtccagccaccgtgtctcagaagccagaaccccatcgtatacggcgacgtactgggtcgtctccggggaccttagctagaagcctgtcgcaccggcactttctgccatgatgcagagcgcgtagactctagtgctcggacaaaccc

SEQ ID NO: 88098 - DNA, 104 bp, Glycine max
aacagatagtatatgtagggagttgcagggattcactaatctgatcgagcgcctatgttacgtaccagctcttgatggcgtcgctcatgcaccctgaatgaggt

SEQ ID NO: 88099 - DNA, 113 bp, Glycine max
gtcgcgcgcgcgcgtgcaggctctcggttcgcctctcgcgccataattggtctttgatcatgcacggtggtgggaaagctggagacgccctcggcgtgactgctgcaaacttt

SEQ ID NO: 88100 - DNA, 239 bp, Glycine max
gggacgctgggccaaggtgccaggccctgtggcccgtggttttctcgtagtggcggaggtactcttcaccgtcaagctcggcgaagttgttgatgatgaaaccgttgctcttgagcgccaccgtgagaaggggttccaagaaatcacgcgcgtccttgggtagcggctgagttgattgtgatgtggtgacggaaatctggaatgacgaagggaccatcgatgcggtgcgttttgacgga

SEQ ID NO: 88101 - DNA, 223 bp, Glycine max
cgcagtgttactgagcatccttcagtttctaccaccgactccggggaaggcaagatggaacgaaggtgtggactataatgccggctcaacacccatgagagacgtgttgttcgtcgttgcattcatgttgtagctgctcctcactctctcactcgcttcgtggtcatagtctgctagatgcaaggatgagtgcgtcctccatcacgcggcaaaagacgccgtt

SEQ ID NO: 88102 - DNA, 238 bp, Glycine max
aggtgtccgaggaagctgtaactgcaaacgacgtatttggaggctctagtgagtgcgagtattcatgcgtttcggagtcagtgtttcctattcctaacgaggcggtgtttcactctgagagcacgttagatatgtttgatgaagggattagtaatgttgtggcagagactagtatattcttggcggaggaattagatttggcttctacgacttggcatagagagtgtgataatttcca

SEQ ID NO: 88103 - DNA, 253 bp, Glycine max
tggggagacagggaaatcctaagaagcagcaaccgttaaaacatcctgactcggttgtagtcacaacaaaatgggaaacttttgattgaggcttttagatttgcaacgaaaatgcctcacacaccttaagagtgcaatattcagtgagtcatctagttgtgggttgcttctgccataaaagaaattattatttttctcattatatatctgcaaattagaataatgtttggttcacattatttttgctttacat

SEQ ID NO: 88104 - DNA, 236 bp, Glycine max
atccatgaccgtgaccatggcggctgcgtttacaagtacaagtgcaacactgccgctgtcaaatgtcggagagagcagaggtttgcagctgcgtaagtgtaaccctaatcctaataagcctaaggttatgggggggtttggaggttgttctggagtgactcagaaagtattctttgacgtcagtattggaaatccagttgggaagcttgtgggacgtattgtgattggactgtacg

SEQ ID NO: 88105 - DNA, 233 bp, Glycine max
tttgctggtgcatgttgaaaatacctctggacaaagaaatgatattgatattggtgctgaggaggtactagcttcaacaatcttccatctccaactgcgtcttggtgtcaatcatgaagtgctaccatcagttgtatgtgctctctgtctcctgatgtttggtgcctctaaatttgcagtcagcagaactgatttattgaaagactacaacacattaatatcatcatacagtt

SEQ ID NO: 88106 - DNA, 222 bp, Glycine max
acagtgtgaagcaattgacattgacaacaggcactggattagtcttacagagagtgacggagatgagaagaggatggagggaagtgtggcaaggagagaaaagagatcaatggaagaaacaaaactggaagctaaaggaagagaaaaagctgaaaccaaagagggtggtggtgaggaaaaaggaatgagaagagaagaaataggagaagaaaataaacaatc

SEQ ID NO: 88107 - DNA, 127 bp, Glycine max
ctctctctctcagatagattctataagatcgcagtttccaaagaagctaactgaagttcaaacccccataacctctctttcacgttcctcaacgacacataaaacacacaccatggactcttcttct

SEQ ID NO: 88108 - DNA, 233 bp, Glycine max
aaggtgatattttatttactatatcatcatttagtggatattatcttaccgcagataataaaataaaatgcaaaaaatgaatggtagttcgtttttgaaaacgaccattaagataaacttacttaaataactaatctaaaaggtttagtgttactatgcagcagcatcacctccctagccacgtgtcaatttgcatagccaaagccttaatttaggtcaggtagattttcaag

SEQ ID NO: 88109 - DNA, 229 bp, Glycine max
ggctcgagcggcgataagaccgcaacgttatagccctactcacgagcctttttacctcgctcagtatgcagggagagtgcaacaacaaacgcaccagatggataggtatcagagggtagagaagcccaaggcagagactcctataaacgactctgagatacgcgtcactactcaaggaaggatgaggaattacatcacctacgccaccactctcctccaggagaaagga

SEQ ID NO: 88110 - DNA, 250 bp, Glycine max
gaagtccttccttctgaattaagagagttaatcttgggaaaagatggagttgagttgggtggttggatgcctttgtacagctgatgtgaaggatttcatgctaaagattcacactgttaattatgctgaggaagtttgcttcaatgacttcttatccttgggtgatactcaagatggtgagaatggggataattactctgtttcaactgctgataagttactgcctattagttctcaagatttggctgga

SEQ ID NO: 88111 - DNA, 249 bp, Glycine max
ataagtataggttgtgtagtaggtatgttaggaggttgcaaaataaaacaagtaaaatgtaaattgaagtgattcaactaagtctatccccaatgtggtcctttcttgcctttttaggtatttttattgtgtgggcttttctttgtattatttggtgcctctgagggaaagagaagagattatccgaatgcgtgatggtttggttggatcatgtttatttagcttgtgagaattaattgttgtagcact

SEQ ID NO: 88112 - DNA, 143 bp, Glycine max
gaacacttgatttggaataggggttatttggtagtgctagtgcctagtggaattctgtgttgagttttttgttctttatatttagttgagatgtgtgttgtgttcttgagttgtgaataaaaatctactttctttgtgcattg

SEQ ID NO: 88113 - DNA, 234 bp, Glycine max
gtttctttacatgacatacactggagagaacactttcggctcccactaggttccaaatttatgatatactctgtaaatagttgctgcaagatgtaaactttctgctgtcgatagttaatgcctatcttgtttattgtttatggtttacgtatctattcagcagttattttgctgctttgtttatgtgcattatctttacattatcgatttcaatatatgaacttagattttatg

SEQ ID NO: 88114 - DNA, 195 bp, Glycine max
cccttttctgtgagctatgggaccgtagctggttacctggtggcattggttgcatcattgggctctgttcttgcttgttgtagatcataatatatcaaaagataatgaagtgctagtagaagcatctgattatactaattggtcagttactttaccaatagctgttttctttttttactcagttgaaatcaaatg

SEQ ID NO: 88115 - DNA, 100 bp, Glycine max
acacgacattggccaaaagtgttatggtggggctcaggataccattggtcgagtggacaacattactacaccacttgcttcaaaggctcaagttgctggt

SEQ ID NO: 88116 - DNA, 236 bp, Glycine max
  unsure (1)..(236): unsure at all n locations
attccttctgttgcttagactttcccatgaactccttttcattcacttttctagctttctcttccttagttttctcatatctttctcacaccttgatttttcttgtataaaactcagatccaagctatctttcttacaatttaccctagcttcactgcaaattttctcgctcttgccctnctctaaaactcatgcctctgatattgccacaaagtagtctgaggttatggttctca

SEQ ID NO: 88117 - DNA, 225 bp, Glycine max
gctaccaagtaatcaccggcttaactacgtctttttcgtccccgagacgccaacctgatagcttatatttaagggatccgagtctagtttcactctaaccaactctaacccattcatacgatgctgtaatgagatgtgacttgagcggctgcggattgaattgtaattttagagtgtctgggctttcaggtagtaaagaagttgctcaaagtcaggtatctgttg

SEQ ID NO: 88118 - DNA, 237 bp, Glycine max
  unsure (1)..(237): unsure at all n locations
ggaatttatgacatcttntaagattgtaagatnttgtggttgtggtggtggaggatgggttgtgaagggtatgtttagcttgtaatttcaggtaggaatggacaaaataagctatattaaaaaaacaagacaaataagggaggatgatggggggtcgatttgtaaaagccggaagtgtatggggttctttatgtgggctaaaaaggattctgcttgtaggtctgtctacccttttgt

SEQ ID NO: 88119 - DNA, 230 bp, Glycine max
agtgggggtggctgctttgttgtggaaaccaaagtgaaaaaacttgcatgcttgatccctctaaataaaggctattcttaatgctaccttcactttttggtcctagagaatgctactatcctgtatgagatgtcattctaaatttgattagcacgaggattggctcttctttttgttgaaggaatccatgttaggattgtaataatagtattttctattccatcctctta

SEQ ID NO: 88120 - DNA, 236 bp, Glycine max
ctctcgagccgattcggctcgaggaaggccgaagagggagggcggcttggtttggtgcaaatagtttccttagaagacagcggttgttgggattttctcgattactctttcatcgatcaagcgccccctgatttcctttggtccaataacaataatagtgtgagcaccgaaattgacattccaggtgatgctgttgcttgtcaagagaacaccaagaagaggggacgcaccgattc

SEQ ID NO: 88121 - DNA, 107 bp, Glycine max
cttgggactttctgcatcaacagattctgcatctggcagagaaacagttagtagttttgagacttcaattacacttgaagatgttgctgactcagattgtaaagctc

SEQ ID NO: 88122 - DNA, 248 bp, Glycine max
ggatttggttacttggaatgtcatgattagtgggtatttgaagggtaggaaccccggttatgcgatgaagttgtttcgcgaaatgggcaggttgggattgagggggaatgctaggactatggtctgtgtggctacagcttgtgttttatttccgctctttgatgcgtgggtttttccccaacagctacaccttcgtgccactcgttgcttcgtgtgccaaaatgggttgcattggttctgggaaggag

SEQ ID NO: 88123 - DNA, 157 bp, Glycine max
tttagatctgtgggctaaacccagatgaatgaacaatcatcaagaagtcattttgtattcactcttcgaatatacggtgtaaatgaggtaaagattttctattatgacaatgactaaaaccatgttctatattcaatttttaatttccacacaacat

SEQ ID NO: 88124 - DNA, 244 bp, Glycine max
gtgcttcttatttgcagtcttcttctgctaaagctcaagattggctgaatactgctattggtatctcgaaacagaatttgatggaaagttgttcctctggtggaaagatttccgaaattattactcataaaaagtcatggaagaggtgtgcagctcatgttcacatcagtcatctcatccgtagtttagaagtgtcaaaacgacaggtgggcaaagaacatgagctttgtcctcaaacaagagt

SEQ ID NO: 88125 - DNA, 237 bp, Glycine max
cctccatatacaaaaccccctcttttcaactcttcaaaagaccagccgccacaaccacctccgttttcttcaacacccttccccgtacccgtaacgccacactctcttccgttccttccgccattgacaacccatccattctcaccgatcaacccttaaagggcttaactttggacgaccttagtaatagcgaccaatttggctatgacttcgaacccgacaccaacgttagcgacc

SEQ ID NO: 88126 - DNA, 237 bp, Glycine max
ccaccacttcctcttctcaccttcttctcctcctaacccctcctaacccctcttcgtctcttacaccaaatccggaaataggttggccagtgaggacaataaaatcttgcttgacaagtatggctgcgatgttgacgctgatgagtacttttctcagtcgtcttctaagtccaagaggagataggactcaaaggagcaaccaaggagacagaggagggaagcaagtgctggacccac

SEQ ID NO: 88127 - DNA, 220 bp, Glycine max
catcaggcaagtttttgtttcctaataaacttttttgttgacaatttttgttgtgaaaataaaaaaacaatatgaacagtttgtcttgtctgtttaggtagttttcctgacttgtatgacactagtcacatgaggacgatcttaagaattgatagattaaatcagtgcttttcctctcaattttcttttacaaagaatggaagaatttagacagcattac

SEQ ID NO: 88128 - DNA, 224 bp, Glycine max
cacgagacccatagtgctgccaaattatagtaactctctttctctatctgaagaagaagaagttctgaagaagcatgtgtggaggtgctatcatctcagacttcattggtgtgaagcgtggccgcacctcgccgcgcaggaactgtggtccgagcttgaccctttctctgacctccttggcttcgataccaccaccaccaccaccaaccatccaccccttccat

SEQ ID NO: 88129 - DNA, 245 bp, Glycine max
cttccttgaagaaggaaaatgttcctgtgaagagacttattgtcaaccagattcttccaccgtctacatctgattgcaagttttgtgctatgaaaagaaaggtactttaattgttttctctttaattgatatgtaacagaactgatagctgagcataccaaagaagaacttgaaggagaaggggaagaaaaactcttgtgtcttgtacgttatgttcatttttatttaaagagctaaaacttgca

SEQ ID NO: 88130 - DNA, 236 bp, Glycine max
gaggattgatttttttttttttttatggaaattacatgttggattgtcttttaacaaatagcacataaacaacattagtttctatatcgtttatgacactaatcaatgtagaaaatcattttcttctcgattctatgctcgatgtaggaaagtcccactttctatgatactcaatgactaaaatagtaacattctcatgtggggaagatttggcgacttgagcaacattagccgat

SEQ ID NO: 88131 - DNA, 233 bp, Glycine max
ggcgaacggcccttgaattctggaggcagttgtgttttgtgtcgtttctctcttcaagaaagagaaagaattgtgcataagaaaaaaaaaaacaaggaggaagggttagtgatcacgtgcggaagggtatacgataagcgaaagagagcttatttgcacactttggggcgtaaagcggtgaatgaaatttaatctattggaagcgtgtgaagcaggaatgttcaagtgatgtt

SEQ ID NO: 88132 - DNA, 231 bp, Glycine max
cgcaccagcaccgccgagcccagccctgccggcatcttctggaacgtccgcaaggacgtctcgaaatactcctccctcctcgccaagcccaaccaggacctcaccatgatgctcgaaaacatcgtcaataatgaattcaccggcgtctaccacgttaccgtcactctcctcttctacaacgagtacgccgttagggttccgtttgtcccctgccccgaagaactcaataat

SEQ ID NO: 88133 - DNA, 234 bp, Glycine max
attttcccgcttccattcaccatcaccgctaagtttcccccttctctgatggcaccggttactccaagaaccgcgttccccaaggttctcatcgagagagactctgactccgaacagagttcatcgaagaagaagaagaagaagaagaagaagaaaaacttgacgaagaagaagaagttggggtttctactgcaaatgagaagaccgagatactggaactgggttccgacgcaa

SEQ ID NO: 88134 - DNA, 224 bp, Glycine max
cttgtaatgtatgcagtatccttgaaataagagatgcgattcaatgtaaatagtgctaataaataaccctactttttagtttgtgacagacaaagcaacaagtagggttatttattagcactatatacgttgtattggtgtgtattctagacttgtaatgcatgcagtatccttgaaatatgagatgcgattcaatgtaatgcaacgcatgtttaataacaaag

SEQ ID NO: 88135 - DNA, 227 bp, Glycine max
gttagatatatatagctacacattacaaaagtagtgaaatcaaagggcgagcagagtgaggaaatatggaggaagtgcagagagaaagagtatcggcatggaattcatacagtccatgccattcatggaacaagttgtgaaagctttctctaattgcctgggtctttatacaacttctacgaaagatggaggagtcacatccacgacatcacgagcaatgaggaggc

SEQ ID NO: 88136 - DNA, 113 bp, Glycine max
gcgagcatcgggattcgagcgcgagccacagacacttggggtctcagcgcatcagtgctagttctacctcgtttactgttgcactaggaatccaagatgaatagcaactacga

SEQ ID NO: 88137 - DNA, 231 bp, Glycine max
gcacgcagcttatcaagcttcttcgaagatgttacaagttgttgctccctcattgtcccttgtctcctcccaaccttctacttccatagatgccgaatccgcctccgctgctaacatggatttgatgttgatctaacaatcggggggcgcaatctttcctctatgctgcagaagctccttcttttggagttgatactctttatcgtagttaaggtagatgcgaagatgcgt

SEQ ID NO: 88138 - DNA, 233 bp, Glycine max
ccagaagccagcctctgggcaagtttttcttgtttatgggttgcttgtaaaaccatcatttagaaaaattctagtgcattctggtgcggacataaaattgaatgtctctcatgatggtgtcttcttccaatgagtcaatctcttgttaaatataagaaggggacaaatgctcaaacagctactgcactagaccgagctaatgctgaggatgccttgcttccaattcctaaggt

SEQ ID NO: 88139 - DNA, 187 bp, Glycine max
attttgtgccagcagatatacagggagtttatgaacacacaacattggcttctccaccaactatagagcagaactctgcttctcataatcaacttgatgctgatgacattgaggagaggaagttggttcagtgcataggggtctaagaggctcgctgagtggtggtaatgacgctgctgttgctcgt

SEQ ID NO: 88140 - DNA, 268 bp, Glycine max
gattcttttgagagaggaagcagggtcattgcaatactagatccaataacgactgacaaaagccaatacaaggcggagttggattcgtcaccaaatgaggatcacgacgatgattgggatggtgaagatcctgatgagggcatcatttatgtggaatagatgtctccctatgtaactctatcactactgtgcatctttcatatggacaaacctttcactgttgataggtatgtattgatcaaggattacattacttttggataatcat

SEQ ID NO: 88141 - DNA, 269 bp, Glycine max
tgataatttgaggtcgtacgtctgaattctcactggatatcttggatgatagagtcagagtgcgagcatcttatcatgacctgctctgatgctctagtattcctgataacgggtgtcttctatgtctgaaatccggttactcgcgagtacaggttgcttcccaagagtagggacaggcatgttactcgatttcacccggattgcgaggctaccttagttagtgtcgcctatgattcagcatatcggaagttcagtgttgtactagcggg

SEQ ID NO: 88142 - DNA, 266 bp, Glycine max
ggattactccagttctttactcagtgtaggtgtaatgtacgagaaatcgatcttcgtttgcctctagacctcaacaaccaccatctctcagagatggcgaggaatttcgaggggctaacgagcgttaggcttcagagctgttgcctcgttagcggcgagggcttgaaggccctcgccgcagcgttgaaaggcctggaagaattggcgcttgttaactgtgacgtggttgaaacagaaccgggtctgcttgccacattggggcagca

SEQ ID NO: 88143 - DNA, 265 bp, Glycine max
ctgtgctcttttagcatggctatatgatgaggagggaaaatggacaatagagcctggacttgcagcaattttaatcatggagcatgtcctcttgttgactaagttcggtttctctcgcttcattcctgaggtgattgttttgcttcccatccactatcattcttccatttcaaagatgctttatgagagattatgacaggctatggtactgttttctttgaaggaacctgcttgggtaagagccaaccgtgcaaaacacactaca

SEQ ID NO: 88144 - DNA, 132 bp, Glycine max
ctatgatcatagatgtgaaatcttgttaccgacaattggccttaaatagactgcgatgatcctgagacagttgtgaatcgtatcacaagctggattgactctgtcagagtccatggcgcctcggctgtcaag

SEQ ID NO: 88145 - DNA, 262 bp, Glycine max
tctcgagccgaatcggctcgaggtgttattcagtggaacttgtctctggtggatgacgtgactatgggccttaattacgggccttgagtccattctcttgctcgccatgctttgctacttcttcctctgctgtggttgtactctctaatcctcttttttttttttatttcacggatttattttagtttgtttttctatttcatggatgaatcgtagttatagcttaaaatattttctaaggttagttgtgtcggaattgtat

SEQ ID NO: 88146 - DNA, 260 bp, Glycine max
cgtatctattctttgcttttggttttggttgattgaaggccttcacggcattcgttgcggcattttaatcgatttatccaagcaggtaatccatttctaacagcagaacagagtcccaaagttgcagagacgttgaggcagagagaccattcctgctagagactgttgtccaaactttaagatcttggcatgttataaagggtagactgcaaaatggaggcattgaaagcatcttatggggatggatcttctgattcaga

SEQ ID NO: 88147 - DNA, 259 bp, Glycine max
ctccgctctcaactctctctcctccccctccctctctctctccttctccacctcctcccgccgcttctctctcctccctccaccctcacaccaaccctccaaacccctcttcctcaccctcaaatccaaaccctccgacgacattgacacatcgttcttcgacaacatcaacccgcaagacgacatcacattcaatcccccggagcccccggaagggttcgtggcgcctccctccttcgacgacggccctctggagacc

SEQ ID NO: 88148 - DNA, 179 bp, Glycine max
ccaaacatctttgagatttcatgagactttctttctttattttcttacaaattgtcatgcttttcttttcccatcacacataatcccctgtctctttgttgaaagcggtaaacattcataattttttttactctttctgactaatggtcaacatgtccttaaacgtgtgatatgagaga

SEQ ID NO: 88149 - DNA, 251 bp, Glycine max
agacaattgaagctttagatcatcttaagggaatgccttctcgcggtgattttgagcttggggagattccttccttaatggaccttggccttaatccatctgcaacaatgtcacaggttttgtattttaaccaccttttcctccttcccaaccaaccttatatctccgcttattatctgtaacttgttgtgtctttgtttctatgcattcttgtgttagcatcaatggtttatatatatattggttgctaa

SEQ ID NO: 88150 - DNA, 250 bp, Glycine max
gaatcagcaattcaggcaacggaagcttcaaaaagtcaagcaaaacagcttaaagaagaaaaatgtggtgatcctgatggaaccaatcatgcttggaaagaagagttagaaactgccgttaataattttgcatctgtaattacagaacttgatgttgcaaagcaagaactgagtaaaattcgtcaggggtatgatttatccttggaagcaagagtttctgctctcaagcaaacagcagaagctgaagatg

SEQ ID NO: 88151 - DNA, 254 bp, Glycine max
ctttgctttatgtttcacaggactcaacttcttcgtctttatgctttcatagaactcaacatcctcgcctttatgttttcatcagactcaacgtcttcgtctttatgtttcacaagactcaacgtcttatgtctttatgtttccataagactctatgtcctttgtccttatgtttcataggactcaacgtcctatgtctttatgtttcataggactcaacatcctctatctttatgtttcataggactcaatgt

SEQ ID NO: 88152 - DNA, 251 bp, Glycine max
cccaccgccttctccctcgaaacccttccccacaagccagaaacagactcccctcgacggacccaccatccaagactcgccggaaaccctcgccggcgacgccccctccgttcccaccgccgaaaagcctccgactttggactctgcggaaccggaacccgcggaaatgattgatgggtctgacgggaccgtggtggtgagtaccaattccgagcctttctacgtgagaagggttctgaaagaagcgcttg

SEQ ID NO: 88153 - DNA, 232 bp, Glycine max
gtttgtttcttcagcaactattctgtgcatctatgtgttttccctctcggctttgtacatcaaggcacaaatcagactacctatgaaaatttccggtacagagctgacggaaggatcaatgtttttaaccggggctgcttaaataattttctggaaatgttttgcacaaaagtaaagccctcaaggaacaatttcagggcatttgctcgagaggaggtaccaccgagaccgc

SEQ ID NO: 88154 - DNA, 235 bp, Glycine max
gcaaagcaccagcgtccagcgactcaaatctctctctctctctcttcattatcttcacaatcgaagaattgcagtgagtgagatgagttcagcggatcatgactccgaccctcccatccgactcgacttgcctccgctctcaccgagcctcttcgattccgaaccatcatcggagctccaacaacaatccaacggatccgccgcccgaccctcctcctacccctccagccccact

SEQ ID NO: 88155 - DNA, 236 bp, Glycine max
ctcaaattaatactacatgtatgtatgaatgtcttccaacaaaaaaatcggcaagttggacctggacaccttaattcttttttatgctgctaatggtaatttgaggctcaactaaaaaacatcctcagattgaaaaaaagaaaagaacccaccatggtttgtgtggctttttgaaaatcgaaaggacaaaataaaaagaacagagattagttagtaagtactacagtacaagacta

SEQ ID NO: 88156 - DNA, 231 bp, Glycine max
tgtttgttttgtgctttagataaaagttctgccaaatcaagaggggttttaagatcatagtgtgtgttttgcaacaatggctaagttctttgctgctatgatcttggcactctttgccatttccatacttcaaacagtggtaatggctgctaatgaacaaggaggccacttgtatgacaacaagagcaaatatggaagtggaagtgtcaagagttaccaatgcccatcaca

SEQ ID NO: 88157 - DNA, 234 bp, Glycine max
cgacagtccgtggtgaacttcctggagcgtcgccggccccttcgactacggtcctcccggctggcgccgtcaatgtccggcgtcctctccttctggcgcccgtttcatgggtttggtgatttgagattagggtttatggatgggttcttggtggaatttatttatagttctttaggagagaaaatgacatcaaaaagggaaagggaagcgggtgatagagtagaggatgaaggg

SEQ ID NO: 88158 - DNA, 229 bp, Glycine max
cccacactcacactcacgccactccattgagaaagttggttgcagcagcatgatggaggaagaagaagaccagcagaagcttccagattgcaacatgcagtaaagatgcagttagtttcgacattgaggcgctgtcaggttctgtgggttgaaatcaatcacttcatttcaaacttgcaatattatataatgtttgaagtgttggaggtatcatggtcaaattttttgg

SEQ ID NO: 88159 - DNA, 247 bp, Glycine max
ggaagttcttcactgagatcagcttctaatgttctgtcagttaggcctgaggggatactatgaggtggcggaggaaggtcactaatggtggattctggttctcggggtggagtggaaggtggaagtttttcttgttctgaagggaaaacaggagaaagaggttttggtttggaattagactctgatgcaatgtatattttgaggccaatctcacccttaacaggtgagagaaaccacttcttttcaa

SEQ ID NO: 88160 - DNA, 126 bp, Glycine max
tgttgtttggtctcttctctcttatccatggcatcaacgtttctcaccctaccaactcccttcctacacaaaaccaatgccatcagtttctctaacaagagaccctcatttttgcagaggagctct

SEQ ID NO: 88161 - DNA, 244 bp, Glycine max
gaggaaaaaggaatgagaagagaagaaataggagaagaaaataaacaatccagcctggaagagatttttaagtacagagctgaagctcaacggaaagtagaggcagagaaagcaagaccaatggaagaaacaaaactggaagctaaaggaagagaaaaagctgaaaccaaagagggtggtggtgaggaaaaaggaatgagaagagaagaaataggagaagaaaataaacaatccagcctggaag

SEQ ID NO: 88162 - DNA, 200 bp, Glycine max
gtattctcgtcattcggctcgagaaaatacacatttttatgtttctttttccctatatatataataataataataataataataataataataataattgttatttttaggtttggaattagtcaattaggcatggtttaactgggttgagggaaattgtgagtgtaaacattttgatacctatctatctggtttgaaat

SEQ ID NO: 88163 - DNA, 121 bp, Glycine max
cccacactcacactcacgccactccattgagaaagttggttgcagcagcatgatggaggaagaagaagaccagcagaagcttccagattgcaacatgcagtaaagatgcagttagtttcga

SEQ ID NO: 88164 - DNA, 267 bp, Glycine max
attttggcatcctatgagtttttgtgtagtaaatgcttaaactatttgagttatactcttttggtggtatttgttttgaagaaacacagataagggattggaagagaagttgagacctgaagaatttcgcttagcacccaaggtgttgaatctacttagcgggaagatcccgcttagcatgaggaagttgcttggagaacttgaagtcacgtgaagacgtgcttagcacgaaatcacgaaaactcatagcagagtgatgtttaagtg

SEQ ID NO: 88165 - DNA, 250 bp, Glycine max
ccaaagtttggatgagtttctgaacaatattaattcaggaaaggccgtgattgtgtctctttctccccagtcaagggcttctattgcttttcattttggcatttctccaattcagggttctcacttgaaataaatttgggaagaaaaatccaaatttcttcttgtttcccctggctgaaagtcaaactcttgccattgcaggctttcaaaaagctgacaagattttttaaatccttgggagtgaaggcaa

SEQ ID NO: 88166 - DNA, 248 bp, Glycine max
ctagttcttactaaatatgagtaacttatacaaactactccaaaaatttatgaaaattacacttgacatctgttgttttaatacatttctttgcttcaaacaaagttaactaatgggaacacttaaaaagactaaaaaatcccttttctttttgttgtgagaaaccctcccctctaatgggcagtacccttttttgcaacaccccgcactcagcactcacaccaatattgtgttcgattctagaaaaa

SEQ ID NO: 88167 - DNA, 246 bp, Glycine max
cctcagtctagtgatctttattgtggttgcttctttgaaaactggtgcatctatcccaaacttatcaaatctcactttaattgcaaacctcccaacatctccacctgttctaggagttcaacgaaatttatatatgttgatgaagagcttgattattttgctttttaagtacacatcaccggttccaaaatcaaccatgaatgcttgcaaagaggcttgtataggaaactcctcaacttttccttt

SEQ ID NO: 88168 - DNA, 244 bp, Glycine max
attcgcacatggcaaaagcatctggaaattgtgttttgtgccttgggttcgagtaagagagcgttaactgaaggccatttccggagggcaagaaaggcactgatggatttagcattggcaatgcttgatgaaaaagagtctggatcagttttttctcagcgtaataggtcttttgggcgacataactctggcaaggatcatcactcctcatcagggcattcaagatcgcattcgtggagtgtct

SEQ ID NO: 88169 - DNA, 174 bp, Glycine max
cactgcttccaataacgacatatatttaatatatggcaccttgacttgttcccaacggtgtgaaattcagtggtgggttcaaggaaaccgggaacctttcaaagcgttgctaagtgaaaattctcggcggaaaaggtgactaagtgaaaagggttgttgggcttggcaaaaggg

SEQ ID NO: 88170 - DNA, 249 bp, Glycine max
tttcccctcactggtaaaatcttgcatggttcttggaacgttttgtgtcaaaatcaaattcctccatctcttaaaatgcctcactttcaatatttcaatagtttcacaaactcaaccaagaccacctttctctattcaatccaaatcaaatcaacaccaagtttcattgtcgagtgccacaatcatcaatgacaaagaccaaacatcgaagttgctggctctgctatcaaaattcaccaagatgtgtga

SEQ ID NO: 88171 - DNA, 266 bp, Glycine max
gaattggccacagacggattagttgtgggggagggtgagaaggttttgggtgatgaagctgcagggcaagaagctgatactagctcggagaagggtgttgatggacatgaagcaagcaaccaggtgcctggtggttctgacagtgcagcagaaaatggtagtcaaaaggaggaggtgccaccagctgaggagacaaaagttcacagagtccagttatggaagatataagatcatctcttcgaactattgaggatatgatgagtgtt

SEQ ID NO: 88172 - DNA, 241 bp, Glycine max
ttccagatccacgaaatccattttcattgaagccaggttccatctctgcgcttacttctaacttaaaagcatctgaagtggataaatcatcaagcataagtctggccatagctggggcacaagcagcagccactcagttctcaaagaaggatgagaattcccatagtactgcttggaacaatgcacctactaacatgaatctaataatgaggatacagaagttgcaagatcttataatcta

SEQ ID NO: 88173 - DNA, 241 bp, Glycine max
gttgatcatgaaaaaatctctaccatttggtattcttatacattcggtatagtagtggggattgtttcatttgaagttatcataacacttcctttttttatacctttggtatccagtaggatacactctagtggaaatgtcactttactggtagaatgattatggctattttgattttataatgaattaattaatttgtttggtgaccatgaataaggagttgtggatccatgaatatgcg

SEQ ID NO: 88174 - DNA, 234 bp, Glycine max
gcttggtaaagtttccatctttcttcgtcctcctcttcttttttctatctgatcactttctgtatcacttgccatgtcatgatttttatgtttctcacaaatcacgattggttctgattagacctacatttttctgggtttgcgggtaaaagctcctttgggttcaagttgttacagtgttaaatttgaggggatcatatttcttggttctgaaggccaccgttatggctgtac

SEQ ID NO: 88175 - DNA, 248 bp, Glycine max
cttaaaagaaaaagaataacctgagaagagagagcgaatatcatattatgaaacgtgatgtttgattattaagtttatcagcttaatggagaatttgaggttatattccctcagtttgaataataagattataagagcaaattaacaaaatttgtaaacatcgtttatttagcacgtatctgccaaacaaactttcaagtgattggttattccacacacagaagggtcgtactttaccaccaagtacc

SEQ ID NO: 88176 - DNA, 244 bp, Glycine max
cagatgcatacaaggtaagattcctgtctgcccctaaaatttggagcttgcagttcttccttctagtttaacattttgatgagtttttcttctctgttttcaggttttgaggcttcttgattttcttgcgagcttgttggagcatccacttggaaagggcctattgttgagggagggcactcttcagatgctaacaaaagtactggatagatgttttgttattgttgatgttgatggaaagcag

SEQ ID NO: 88177 - DNA, 244 bp, Glycine max
aatacttgtaaacatggtaatttggcttttgtgccaagcatctaagctgatcttgtctctagaaggacggttcttaagataagaaattggaagttcttaaagaaggttcattcaccatcaatcatatagaggtggctgaggtggactggaatgttcctgatggctggaacactcttgaatatgaaaggtctgaatcatcacttagtggtggtggatacaatatggcaaagtgcaagaggtctgt

SEQ ID NO: 88178 - DNA, 248 bp, Glycine max
gtttttgcttgaaattgaagaacggttatgatgatggtatatgtgccctttggcccaccccctttaagtttttttgtctcctttctctcgaacgcgagtttcaattcgagttgttttctggaaaaaagtgaactttcgtcagatcaactttgtgagatactactggtattttatagtagtagtagagtagtcaaggctggtgctttttgaaagggaggtcttttaaactgggataggcttccatctga

SEQ ID NO: 88179 - DNA, 223 bp, Glycine max
gtgaaagaaacaacagtctccactgctgtggctgataaaactatctctgctgttgaaacagctgtactggaaaagcccccaggttcatctgtgctaatgccatccaaaagttttacaatagatggtaaacctcaagttaggacagctgattggtccaaagttgaaaagaaggttgatgtaccaacctctataacttcatccgtctctgatcctatttttaagc

SEQ ID NO: 88180 - DNA, 244 bp, Glycine max
aaattaatgtaaatttaattttgcagtcttttgtttaattttataaatattatatacggatatgttaacatactttaacttattcttttatagatccaaattaggattggatctagcgggatgggtagtccttcacaacttggggaacagagtttcgaatttgagacaatgttgtaattcaagaatatcaacgttatttgctaacttacatctttaggagtatattagcaagttatacattgat

SEQ ID NO: 88181 - DNA, 132 bp, Glycine max
ggcttccgcgccttccgccacatgtccgcactcgacgtcctccccaacgaggccaccgtcaccggcgtcgcgcgcctcgctgcggcgaaaggcgacgcggattacgccttcgagttggtgaagagcatgggc

SEQ ID NO: 88182 - DNA, 247 bp, Glycine max
ttcatccacaggtcatgatgaacaagaggccattaaccgccgtctacaacaaggcgatccccgatctttgcaatcgagaactcggccaccttcccccaaggaatttcgctctccgtcttggcgcctccgaggtcccacgcttctcctaaccctcttttttcattcattcgttctcgtcaatcgtattattttatttttttgttttctctatctggtcgatccattgggatcttgtccttcgacttga

SEQ ID NO: 88183 - DNA, 239 bp, Glycine max
gattgcagttccgttgtgccaagttcatgaaaatcacaagggtgaagggactaaggctttgctcgttagaatcctctcctcatgtcgcgtccagactccagacacagacttgtatatatcatggctttctagtttctatacgaaaaattatactgtaatgttgaaaatagctacatgtatcatacttgcatggttagtgtgaaattttcttcagagtaatggagttcgattggttcttt

SEQ ID NO: 88184 - DNA, 251 bp, Glycine max
gaaagcaagaccaatggaagaaacaaaactggaagctaaaggaagagaaaaagctgaaaccaaagagggtggtggtgaggaaaaaggaatgagaagagaagaaataggagaagaaaataaacaatccagcctggaagagatttttaagtacagagctgaagttcaacagaaagttaaggagagaaacgagagagcaaaacaagcagcagaagctgccaaagagagaaacaagcaggcaaataaagggaatg

SEQ ID NO: 88185 - DNA, 245 bp, Glycine max
accaatccctttttcaattctcatagcatagatctccattttccaattcaaaccctttcctctttcttccctttcttttcagaatccaaatgcgatgttgctttcgttattgtgttttagattttgaatatggttcttctgttattgatttttaggttggtaagttatctacaatctgcatcatggaaggtgttattctgagaagggtcattccttcggataacagttgcctcttcaatgctgtt

SEQ ID NO: 88186 - DNA, 253 bp, Glycine max
caggtcttgatgatgttttaggttcctccagcagaactagaggccttgctactgactcatcctgctattttagatgccgctgttatcccgtaagtctttcagcaatttcatctaccacacctgattaataatgaatatatagaaggagaagagcacttgaatcggagcagttctgagtggtgaatgtttttgtaatgatcaggtatccagataaggaagctgggcagcatccaatggcatacgtggtgaggaa

SEQ ID NO: 88187 - DNA, 233 bp, Glycine max
tatctcttcacgtagaacagctcagcagaaatgtcactgaaaggcatttaacagacattttcagtaactttagtgaggatctaagtgtggcgttggcactggatcgaactgtcactcttccaaaagggtatggatatgtgcagttcaagacacagaggggcggctgaaaaagcatcatagtacatggatggagcccaaacagatggccatgtcatcacggccagatttactct

SEQ ID NO: 88188 - DNA, 178 bp, Glycine max
gatagcaataaccagagcatgtcaatcccctagcagtatatgctgatgatatagcaaaagtagagtgaggttcagcttagataaatacacatactagaaggctcttgaggcaaagttctgcaatggtgttgaggtactctgctctgatggcactgatgcgctccttcgtcgtaatatg

SEQ ID NO: 88189 - DNA, 209 bp, Glycine max
aagaacctaagtgagtaaccaagaaaggccttaattgctctttaaaaatgctcagtggagataaagctgttgagtccatcaaggtgttagttgtagatatatcatgcttctatcaatgcttgatatggaggcaatcaaggccactgtccagagaggacggctgactagacatgacggatacgtgatccgatgcaataaggagtttgcaa

SEQ ID NO: 88190 - DNA, 255 bp, Glycine max
cttgttatctaacttttaacgcaatgcacttctgatatatgtgtggaggttcacatgttttgggatttgtgtgattacaggtgcataatgttagatgtagagactatactagtcctaatgaatcagcacctggagtgaatgctcagccctcaatgtgagggcaacatcgagttcccatgacgggtcctccacctcaacagtagaatggagctgaatacgcatcagttactgagcagactctgatgccgcaatctc

SEQ ID NO: 88191 - DNA, 251 bp, Glycine max
ggaataatagagaaaattaaggagaagcttcctgggacacatcaccacaacaacaaatagactcatgcttttactctcatctcatctcatcatcgtactgtaatatatgcgtagtagcatttattacagtacgatgatgagatgagatgagagtaaaagctactacgcatatatgttgctactaattactatatgtatcgttgagtcagctactgaattatatatgctccgcttagttaatctttattaaa

SEQ ID NO: 88192 - DNA, 251 bp, Glycine max
cgcagtggcaaatctggcttattctccatcaatctgtttgggttcttgatacccaggttccttccaagagcttttgagaggtatttccaagacaagggagagatctatgctaagtctgcagaggataaaagacctgtggttgtcaacaaaactcaattatcagaaaagaaagattaattacagagctataaccaatgtgacttcacttacaatttgaaacactttcagcattctttttttcttttcttaga

SEQ ID NO: 88193 - DNA, 276 bp, Glycine max
atgtaagcgcttaattcggttctagagtgtgtgtgggagagatggctatggcttcttggaagaatctggttctgttgttgtttatctttctcggcacttttaatgcagatgatgaacagagctctaccccgttgtatctggagcagaactgttccggcggcaatagcatcgtcaatagtgcctaccaactcaaccttattaccctcctcacttccctgtcttccaactgcttgaggaccttattctcgaacaacaggtggggattgggatgatccg

SEQ ID NO: 88194 - DNA, 249 bp, Glycine max
ctttttatcagtaaaaaaaaaatacaggggaaggatggaccttggcccagttcatggagcgaaaacaaagaaattgtggcccgcccaggtttccatgatcattgttttcttttcttatgtcctattggtttgaacaacacacccattcgttgaactgatgatgtcgttgtcatcttcttaggaactccgaacaacgcagcgacacgacacgccgaatgggtggccacggtgaagttacaatcttcgccg

SEQ ID NO: 88195 - DNA, 243 bp, Glycine max
ctgccggttcttcaatcttctagagagagagagagagagagagagagagatggcgttgaatcctcaactgtttccatatggaatgcccgttcctctcgtgaacgagatgtttgtgttggactgagacggtgtcgaattcgctgtctataagattcctgcctctggcactcatgggggtaatctcaaaacaaagggcatcgtgtatgtgtcgtatattcggctggtcttcgttgcgaaaagtcc

SEQ ID NO: 88196 - DNA, 249 bp, Glycine max
taacgagagagatgagaacaagaggagaagaaaagcagtgttgctattcccttatgtcgaaaagatggcatcccattcgccaagctatgatgctggccattctaagggctgaactgaggtacaagcgaaccagacgatgggcaatattgcttccaaagctcaagctgttcaggcgaatacccaggctatggcccaagctgcaaaggcgaagactcaatcaaacagccccagctgcctaggtctagactt

SEQ ID NO: 88197 - DNA, 218 bp, Glycine max
gcaaatatttttttgccgaggtgggctaatgttttcctagccgaataaatcggaacatgacagtttcggcagaaacaaaacgtcggttgagcttgcacaaaaaaacctagccgacctacattgtacatattttatgcaacaccaaaacaagaaaacttcctctgccgtaaaaaaaaaattgtcggcctgcaagcgtttttaacaaaaaattgcgcaat

SEQ ID NO: 88198 - DNA, 250 bp, Glycine max
gaattacagagcattttccaacacgattacacgaccgaatcaaaccctctctttctctccgaagctgcgtttaatatcttactcgccttagattgttcttctctttcattatactgttctcttttcgatttgagggaacagtacaagagtgtgaggatcggttaacccaactgcacagatcttttccgagggactgaggtgcctttcttgcaggtagtcactaaaataatggagtctcacgatgagactg

SEQ ID NO: 88199 - DNA, 219 bp, Glycine max
gcttcgacttcttcgaccagcctctctccgtcacctcctccgccttcgcccaccgcttcgtctcatgcaccaaatgctcctccctcactcacctctcctgcctcccttcgcctcctccttcccccttcctctgtcccccttgctcccaacaaaccttctccttcttcccagattctaccgctccattagataaacgccgcgccatcatcctcctctgcg

SEQ ID NO: 88200 - DNA, 243 bp, Glycine max
cttctaactatcgatttctgctaaaatacacatactttggctaaccctatcttcaaatgcatcttcttagctttgattttcatccatgtctcttaggcatgttcagttgatcttaacatatctttgaaactttaatcataacaactatgttggacgctccttgtttttaggatccacgataggtgcaagcttccattgacgagttgaactcatatttgctaaatcttaacttttgaatttatt

SEQ ID NO: 88201 - DNA, 249 bp, Glycine max
atttgcagcctgagtttttaagcttgcttgtgtgcaagcttatgtctagttcttatctcacacggcagcattcatggttgcatgatatcatagagctcatagcttcttacaaatgtaagtcatgctctagatgtacgcttctgaactttttggggaaactctaaaggtcaagttttatattaccaaagatatttttgcacatttgtttaagaaaatgtagtgatttttgagtctttgtttctctggttg

SEQ ID NO: 88202 - DNA, 243 bp, Glycine max
gccctccaaatgcctaggattattgatctaagccctcaacgactcttagaacttgtgcaatctctttcattttcacaacatatgatctttagtgcttcctaggatttctttttctctgcttaacctcctcattctccggtcgtaactcattcacgatgattgtgatttgttgtagggttggaggatcaagagcctaattatgtagtcccatttagtgacgatttcataatcacctagtgtgtg

SEQ ID NO: 88203 - DNA, 254 bp, Glycine max
gaggagttggtcaaactactctcccgcaaagacttacaactacaagatgacaagggatctgctttgctgcagctgttggaacgtgcacatggctgagatgatcagcagaaaaaaatgagtcgtggccaacgataaagggtggagaaggagtcactcctcttcgcttgggaggagtgagatggctcggtttgataaaactagagaaatactctactatgatgattggattacactaatccgttcggtatctgttt

SEQ ID NO: 88204 - DNA, 256 bp, Glycine max
gtaacctcgtgagtgagtttgttcggttatgctatggccacgaaggagtcatgttcatgagggaggcttttgcttaatgcactcccaaattgtttcctgcacttcctatttcattatgaaaagttcattctgaaatgcaactcctattttggaataagcttttcataatacaacaggaagtgcagggagtaacaataggagtgcggaaagttttaacccatgaaggaaaagagggtttccttagtgtaactattct

SEQ ID NO: 88205 - DNA, 260 bp, Glycine max
ttgctagtggcgagctgtgcttaaaatatatattttcatttggaggactcccgaggtcacctcttcttcacaggtttggtgatccatcctcctgctatattgattattgaattaacatttcatttctgcacttctacgtcaaaatacaatgtctttaacaggatggttgtaatttgtaaaacaatgttactcagacaacatttgtgggttgattcaatatggaactcctgtaaaaaattgtaaacgaggctatgaggttt

SEQ ID NO: 88206 - DNA, 242 bp, Glycine max
aaaccttcataagtaaccaaataaaggtttgaacctaaagccagaaaaatatgtcaatttctgtagatactcaaaatctaagcaagtacatatataaaaaatacttctttaatgtttagaattcaagtgattcattgtaaatttataacacctgcctttcaatgataaaaagtgatggtagctacgtttaactgaacttgcttccaacatagttaaacatgtacactgacatatagtgtggc

SEQ ID NO: 88207 - DNA, 241 bp, Glycine max
ttagcatccctccagtttttcacgccctctctactgtttttgcctcttccgtcaccgtgcaagcatgctccccagttgtaccatttaccgttgtagatatgtcttgggtcccctattttgtttctctctctacctcttctgtttctctctctatctctccattctctccctctcattctctctaattaagaataagcatggaagtggcaattgtctaacttgaccccttggttgaaggggc

SEQ ID NO: 88208 - DNA, 237 bp, Glycine max
gcatatgcttttcttggaatgaagaatctactttgaaaatgtccatgtttctgaaattgaacatctagcccctttgatacctctataactaggcttcttattcttctatttacttggtaagccagctaattccagaatagtaagtatgtcctcaatgttcgaattaaatatgatgctgatcttcataatattcctgttgcaaagtatacaaaggtcacatcatcttaaagcatacac

SEQ ID NO: 88209 - DNA, 241 bp, Glycine max
attaaattctacattaaaggtctgaaagcttctgagatgttcttaaggaatgttagatatggaattatggatatagtgacaggggctgttcaatataccctgataggattggcatttaactcaagccttattattattacttgttttgcatttcttcaattgctttctcttggtccataacattgtagtattttacaatacgtgattagatgttgaaacgcaatgcaggtctcttttagtg

SEQ ID NO: 88210 - DNA, 234 bp, Glycine max
aatttgtttttgcttggcgtatgtttatgatgagtgaaaaatcatagttactggttactacccggctttgtgttgtatgaatccattgttgtgcagatattctggtgaattaatattctcaattagggtaagtagatgctttaggttaactattgttttggatgtaatattagtatgtttaaaactgtggttgcaagtttgttttcaaatgtggctgcaattgagatagtggag

SEQ ID NO: 88211 - DNA, 112 bp, Glycine max
cgtctcgacgaattctgctcgacggctcgagcttgggaacttaccgttgctactggacactacttcgccgcggagcgtgactctggagacgaaagcgcgtcccgccggatcc

SEQ ID NO: 88212 - DNA, 229 bp, Glycine max
ctcactctctcactctatcgttcgtcgctattgaaattcgaaactcttctgcgcgttcttcctccttttatactattctgtttcaaacggtttaaacccttcgcggggtttttctttttctcgccataaaaaaataaaaagtgttcaacaaaaaaaatgtggtaaaaaacttgaatgcacgtgatgtaattgtaacagttcaagttttgaaagatgcatcattccttgc

SEQ ID NO: 88213 - DNA, 228 bp, Glycine max
cacacattctcattctcatggatgaccttcccactcccaaacaccgcctcctaactctcctcaactccctcaaagaagcttccaaagtccttcacaccaccaccaaccccttctccttccactccagaaccgattcacgcgccgccatcgacactctcctcgacctcgaagcaaaagcccacgccaccctctcctccgtcgacccaaccctccgcaacctctcccgca

SEQ ID NO: 88214 - DNA, 227 bp, Glycine max
tctcgagccgaatcggctcgaggtcagatttaaacaagcttaaacactatatgaagaaaaccatgttgaaagatcaaaaacacggaacagtagaaaagcttgaagacgtagaagttcaacagcaacagccacaacaacaaatcatcatccaaaatgagcagcaacaagcaccaaaatcccgagatcttcttcagccagagtcagagtcacatccacatgcacaacca

SEQ ID NO: 88215 - DNA, 256 bp, Glycine max
gggacattcaggaaccacagctaagtcctgatgagaagttcaatgcttgctttgaaagcatacctgtctctgccttccctccacctccttcaaatcaagtctgaacccacatctccaaggagtccatccggtggagctgctaatacggctgcagtgaatggaataacttctgaagcattcggccttgaatctgcttcgacaacttcaggcaatttctttgaggatctgacttcttctcaactatataagaacacca

SEQ ID NO: 88216 - DNA, 250 bp, Glycine max
atttgcacgtctttttcttctttcatttgtcaatatgaatataaactacaaaacaacccattcttaccctaaaaatgttcaattatcaatgcttcaattgattgcttattttaaatattcattcttagaatccattttttttataaaaattagtcacgtttttgagtagaaattagttccaatgtattaatactttttaataattgacaaaattataagtcaaggcccttctgtacatttctgggtctaa

SEQ ID NO: 88217 - DNA, 251 bp, Glycine max
ttcaaataccttcttcaattaagatttgaaccaataaatgagttcaagctgcggaagaacccatggattcaatttggacttggccaaatcctcatccacctcaaccctaacttcacccacctcctctccttcttcaacaacaacctcggaaaccaccaactccccccaatcaataatcttcacgaaaaaacctcgtaccctccgaaagcgaccgaaccaaaccttcaatgaagccgccacactcctctcca

SEQ ID NO: 88218 - DNA, 252 bp, Glycine max
aaaactcttgaagtggctgaaatctacaagccaagtgtacatgtcaattccatattttcacctgtaggagctgacacggggaaactttttagtgcttctgaagctactgatattgtcttcaaatatgttgaaaaagaaaatcttgtgaaaccaacaaataaatccgttgtggttcttgatgtaatattatgtgatgcactgttcaagggggctattaaaaaaggaacaacatatcctacagaaattcacaag

SEQ ID NO: 88219 - DNA, 246 bp, Glycine max
cctcactcgcgatctacgcgcgtgacccgtacactctccgcctcctcctcctctccgcctggccggagctctccgccgtcaagctcgtaccggtggcaccagcgcccgccgacctccgctaacgaagccgacttcgccgagctcttcacgaagtgccgatcgctcgcctcgctcgaactctcctccttctaccactggacggaggacatcccgaaagtgctcgcggcgaatcctatctccgccgcc

SEQ ID NO: 88220 - DNA, 246 bp, Glycine max
gttcttcttccccataccaccactactgacactaccaccactgctctcgaacaaagtcatcgtcgcgtttggctcgaaaaaccgataacggaacggtggagccaattcaaatttccctcgacacgcttccggcgacggcgcagccttcgtcgccgtctctcctccgatctccgacgagctcccttccgatcaaggagcttcatgcttctatcgccttcctcggcgcggacgtcaagtgcgcttcga

SEQ ID NO: 88221 - DNA, 241 bp, Glycine max
ctcgaccgattcggctcgaggtgggagatgggtctcccaaccgccaacgatctcaagcctctctcccagccgctgctcccgccggagctcgcttcggccttcagcatctcgccggagccccaccgcaccctcctcgaggtcaaccgcgcctcgcgcaacacgctctccacaatccgcggcggcggtagcgtgcaccaggccttctcatccaacaacaacaacaaccaccactacgacggcg

SEQ ID NO: 88222 - DNA, 243 bp, Glycine max
ctggaaaattcaacatcccaaagcattttctgtattttgttcaagattcggccctttcttcaaagatcacggttcatccagatggtcaaatgacatttatggggtgaatatcaatgaattagagagaagtcattcctccacattgaagaatcaatccaccttaactgctcctttaaagagtcctgagaaagtcaaactgaagccatcaccaaaaaagaccaagaaagtaggcagggagaggga

SEQ ID NO: 88223 - DNA, 238 bp, Glycine max
ccgaagtgctaccctgagatgccggctcggagcgagagggaagggtttgcggaggcggagctggggatgaagatagcgtgtggattggagatgatgtatcagcagcggaagcgagacggggaggaagggaaagggagctcttgggaggcgtttaggaagagtttggagaacagtgggtacttccaaggacagcttccgggttcctctgagtaccagagattgatgcagagtgctcagg

SEQ ID NO: 88224 - DNA, 236 bp, Glycine max
atcttcatatttcaaaacttttgcgaaatttctctcttcttcatcttgctcttacattctgcatggcagcctgggatttgtgtgaaaaatatatctcagttacacaggcttcaatcaaaaccatgtgttttaccaaatagttttggtccttgcttacaaagcttaagagcaacacaatcggttagctcaaaatgttggcccagtttacaatctcggaaacctcttcatatttgctt

SEQ ID NO: 88225 - DNA, 259 bp, Glycine max
cttttggccattgccagatattaaatcacctggggaccctacgtttatggaagcatttggtatgttttctcccacctatcattagctgaaatagctatgcattgtcccttttatgcaaaatgcaaatgttaagttaaagctatgccaaatatctttgtttttatgtagaattgagtccagaggaatctgaggatgttcttttcaaggaggcttggctgacatatttttggagaagagccaaagctcatggtatagagga

SEQ ID NO: 88226 - DNA, 244 bp, Glycine max
caaatatattctagcagtttgaaagttcatttttatggtagagttatctaggttaagatggtacttttgattaaatatgataattaatacttgcttttaaaaacagtaaataaataaaactatacgagtaaatggaaattaaagatattttgtttttttcaacatgacattgacagttatggttgatttgaatttgaagggattgaatttatttgcctttttttcaaatagatgaatgattggt

SEQ ID NO: 88227 - DNA, 249 bp, Glycine max
ttagcaactaactccaaaaaacctcactgtatggccatcaatctcagcaccactgcttctcttcactccaagccttcttttctgacccataaacacaacaacctcatcaaaatctaccatccttcttcctctttactcacaacatgtgctcaaacacaagggactgacactggagttacacaggaagatgcttctgctggtaatggtatatatgctaacaattcctacccactctttattattattatt

SEQ ID NO: 88228 - DNA, 252 bp, Glycine max
tgagtctctgtccgaagccacttgagagaaaatggcggtgcctctgctctcagatgtgatcgtgaagaagagggtaaagaagttcaagaggcctcagagtgacaggaaaatttccgtcaagggttttcctttcttttttgttttgaatttgaatatgggatatgatgacaaccttttgacacccagtcttacttgctccattggggtactatgactaactggcgcagaccaaagggtatcgattctcgtgtt

SEQ ID NO: 88229 - DNA, 246 bp, Glycine max
aaattttctttgggaaatatttctatgaataataataatatgtctaatgagatggtcccaaaattagagcaagagatgaaggagttaaaggagaggcatgaggaagaaatgaaccaaatgaaagagttgaatcaaaagcaagttgcagaattgaccatcatgagacaaaatcaagaaaaaatgatgttagaattatctttcatgagggaagttatgtgtagatttatgcatacggagttaccaacg

SEQ ID NO: 88230 - DNA, 244 bp, Glycine max
gataatttgaggggtgtgtctgaattttcactgaatttcttgaatgatagagtcaaggttcgagcatcttgtaatggcttgctgtgctgctctagtattcctgataagggtgtcttctatgtctgcaatccggttactcgcgagtacaggttgcttcccaagagtagggaaaggcatgtgactcgattttacccggatggcgaggctaccttggttggtttggcctgtgattcagcatatcgga

SEQ ID NO: 88231 - DNA, 249 bp, Glycine max
tatgtgtaaaatctagtatgactgaactgattgttctttcttttctagtaaaacttaagcctgtttgatgttgtgttttagaggttattttctttatgatcccctaattacaagttttcaccccattatgatcctatataatctcaagtttaacaacattgtgtaattgtaactgaatcccttcttggcatggctctcacttgtgaaaaccttttcctttctaaatccctttgagagtgttggcctctg

SEQ ID NO: 88232 - DNA, 240 bp, Glycine max
ggcggagatagaaaaagagagaggtagagaaaagcgaagagtctctctcttcctatctctctctttcaatgtcagggcacaaatcttccacctctactactaaataatcttccttctaacctatatcacaaggaaacgcgaaaaaagaaattaacaaaagaggtaaagggttctagaagccgccaatttttatttgctttaaatttgtctgagtcagagacgttcgagattgtaaccatg

SEQ ID NO: 88233 - DNA, 237 bp, Glycine max
tttgaatttttaaatagttttttatttaattaaaaagtagtatatatttattattatttacatttacaactcacataaaaatatattatattctgaaaaatataaaatggacttaaatattaccatcataaattttgaatgtatcaaatttagcatcgtttgttgtaatactcaggttgcaaatttttacatttacattaagaagtctttacattttagcatattactttgaaactg

SEQ ID NO: 88234 - DNA, 232 bp, Glycine max
gtgattgttgtgactcgttcttcttcgtcgttatcttcttctgttgatgtttgtgtgaatgtctcttctctcagctgacaatgtcttgctgcggtggtaactgttgttgcggtagcgcctgcacgtgctgcaacggctgcggaggcttccatatgtactcagacttgagctataccgtgtcaaccaccaccgagtacttggtcatgggagtggcaccagttaaggctcaatt

SEQ ID NO: 88235 - DNA, 100 bp, Glycine max
gggatccgtctggaggagtctctggcatctgactagcgaggcatctgtcagagaatggactcatggatcagggattgaaggggagtggtgccacgatgct

SEQ ID NO: 88236 - DNA, 247 bp, Glycine max
tcttcctcggtttctgattctgcactctgaagccaatcaatgaaaggttgaggaagaataatttttcctacattctccgttacttatgtttacttgattgtgtcatgttctttatttccataaaggttattgtaggccccatgtgttgttgaactactatactgtgcgaatggtgcatgcttgctggaccagtatgtatgcctcagtgcgttttgtgatgtgcggttctaatgtaattttgtttttg

SEQ ID NO: 88237 - DNA, 236 bp, Glycine max
ggagttgttaccatcagatgttttggacatagcttttcacagtagtaggaatgataagaaagttactcgacatggtgcggcaggcacggcatcagctaatgcagatatacaggatgtggactacactgaaggacgatcctccaaaggaggtggaaagaagaaagggaaaaaggggaaaaaggtcagcccttcagttttgggatttaacgttgtgagtaaccggatcatgatgggtg

SEQ ID NO: 88238 - DNA, 236 bp, Glycine max
aacaaactgaaaccaaaggccaaatcatgaagggtggtggtgaggaacaaggaagaagaagagaagaaaataaacaatccaacctagaagagatctctaagtacagtgaagtcaacagaaaacaatgaaagcaattgaaggtgctaaggagagatacgagagagcacaacaagaagcaagtgaagcatccaaagagagaaatggtcaggcaaatgagggggctgaagaaggcagaa

SEQ ID NO: 88239 - DNA, 235 bp, Glycine max
cgctccgtgaggaggttcacgaaccagagagagagaagagagaactgttacagaattttcaaatttactcccttaaagatagaatttgaaattctattctttcaactaactaaatttcttttaaaattctaaaattttgaattccttttactaaaatatccaaacagttacttttaataaaaaagaatttaattctttataaaaaatatattatctagctaaattaccttatcca

SEQ ID NO: 88240 - DNA, 231 bp, Glycine max
gtgcgaggctagaagcaacagcaaagaaatttcaagtgacatatagctaacaagctgcaatgaaccaccacgactggtgaacttagcaatagagttgaccacagcgaaccagctggcctgttctcggagatgtcagcggttctattgggcctgggcttcaacgtcacctccgccacggcctggacccacaacgacagggtggcctgcataatccacctggaggacgcaaag

SEQ ID NO: 88241 - DNA, 188 bp, Glycine max
caagtattgatggtgaagggaacaagtgtcggaacaccgtgcagatgcctttcactgctaatgaagcttaaaatactactaggttttaatttttgaagggagttgcttaattggatacacttacgattactttgttctttatagtcagaagcaagattacattttaaggaaaaaattccaaaaaggtc

SEQ ID NO: 88242 - DNA, 229 bp, Glycine max
gaacagtgctaaattggtaggagtggtttgagctaattgatgttctatggataggccatgacttcagtgatgcagatgtgttctaatgtcacattttttatccaatggttgtttagttgccagtatattcttagctgcatgttggtataaactttctctttactgactggcaactttatgcccatatatgtatgttgtcacctaagcaggttttctggttgcgtgggtg

SEQ ID NO: 88243 - DNA, 145 bp, Glycine max
tgaatttacgattgcttttctttcttcataacttgcttttactcgctttattattgaatctggagtaaatggctttcttgatattgacatgagatgagaggattaatgatagaagcttctccatttgttaatgtcccgtgtcatc

SEQ ID NO: 88244 - DNA, 146 bp, Glycine max
gaagaattagaattgaaattgttattctaaaacttaaactacaattcttatatccagagtctagtatttgaccgagatgaaatttggcatgtgcattatgtttcaacagtgggctgagtcctttcaagctctctggaaaactaatt

SEQ ID NO: 88245 - DNA, 201 bp, Glycine max
gcttaagagctagtccttgatttataacagatagtttataaggggagttattcggggtgatgcaatgatacccataaaccgagtcagcatccttgccttgggttacgatggtgacttatggaatatatttgatgggagtcctgtgggaaaggaaatccttaatttattgacaatatattaattatacgcgatgtttgtgtc

SEQ ID NO: 88246 - DNA, 230 bp, Glycine max
gaaaaggtttacaccagaggaagatgagaaaattaagttggctgtttttgattatatagagtctcatggtttgggagatgaaggtctagatatggttctccattgcaaatctcatcctgaaattagagattgttggaaggaaattggagcagccttacctcagaggccttatgttagtgtgtatactcgtgctcatattttgtttgaaaggggtgaggatcgtaagtgga

SEQ ID NO: 88247 - DNA, 143 bp, Glycine max
ctgggatataattttatgaccttgtgttaacccatacatcttttggggtttctcaggctttggccgtgcgatagattaactcagattgaccttttccatccctctctttttaactctttaatgccatgaaaaatttacttttt

SEQ ID NO: 88248 - DNA, 223 bp, Glycine max
ttttgaaccaattatattttgaaaccatgaatattatgcctctttgttttcattgctgtcttccccccttcctccaattcaaaaaactggttatagttgtggtccttgaggattattatctcataaggttaggaaatcttatatacatgctgttttacagggaatgagtgatctgctatctccaatattgtttgtgatggatgatgaatcagaggcattttgg

SEQ ID NO: 88249 - DNA, 219 bp, Glycine max
ctccaaccagaagcttgggtttgtcactctgtcttcaagattacaaactgaggagcaagaaatcaattgtggagatgaagttcaatgggaaagccaagggccagtggaatagagggcaaaagctgatgatgaatgggagcaagaaaacgtaacacgagatgaagaattagagagaagaaaactggtggctcaagggcaaaagacgaatagaggaaagca

SEQ ID NO: 88250 - DNA, 207 bp, Glycine max
agccgaaaccgaatcgcgttcacgtttagtaaaaagttcttagattctctcgtttgtgcgttccagaaagcacaagaggaacacaaggaacgatgatgggttcaacggggagggtggcgaactcgggttccttccgccacagcttcgcggagaagaaggagaggctgctctccatgaagggcggcggttactcccaaatagggatag

SEQ ID NO: 88251 - DNA, 263 bp, Glycine max
gagcgactgcgtaaagctacccgttctgtccgttctgttgttctctaggcacgattacttctaattgaagaatatggagatgactttcatatgtacaagcttgtaagacaagaaagtgcaactgagatatgatatgccctaccactgattgagtaagcctgaagatggcacatttgtggagtaagatttcgttcataaaggacaattaggtcttgccatacaatagatttgacccagcaggcctgtttgaagattattaactt

SEQ ID NO: 88252 - DNA, 142 bp, Glycine max
tgaagagcatctactccgagcagtcatttgtgcgggtttgtttcctggacatatcctctgttgtgaacaaagataagtcaatagcgctgaaaacaatggaggatggtcaggttcttttgtattctagctctgtaaatgattc

SEQ ID NO: 88253 - DNA, 239 bp, Glycine max
cgagagaagcttttgatgaagaagcaattgaaggaagaaaaaaagcgacggaaaatgttgaagaaaatggcagaatcagcaaaagatctaccaagtgaccatagtgaaaatgtggaagaagaaagtggtggtgcagcttctgttcctgttcccatgccagatttggccctgctgcttcttttgattctgataaccccatccaccggtatcgttatcttgcattcgtcatcaaatcagtg

SEQ ID NO: 88254 - DNA, 217 bp, Glycine max
taagaatttccgtttgatgtgattctgaaccagcggagagatctcacgggtttattttacgttatgttgcgctgtggtggctgctgctgttggagcttttcttcatgttctgtggaacattgggggttttctcaccacgttggcttccattggaagcatggtttggttgctatctacaccccctgttgaagagcaaaagaggttgtctctgttgatg

SEQ ID NO: 88255 - DNA, 144 bp, Glycine max
gtctcattttatcctaccggccacttttttcattactaatgcttatgctagagtctctggaggacattgtaaaattttgcatactcatctgattataaattgcatttgatattgatatgaaataacttgtataaggttcattct

SEQ ID NO: 88256 - DNA, 244 bp, Glycine max
gaccagcaaccccaccttgcatgcattcaagtacttcttctttgtaaccaaactaaaacctcttgatttattgtttcatttaatcaaatagtagtaataatatcaccaccgcaccgacatggagtagaagtagctcttcattcaaagagtaacgcctctccagagactagtacttcattttgcaccattgatatctcaaatggctcgtgcttcgactaactggctatcgttctctctctccccc

SEQ ID NO: 88257 - DNA, 225 bp, Glycine max
atttttatttcctctgcatctcatattatactttttaaaagagttactgtttgtatgggactaatcagttactgtctttgacaaaacttagatacaatactatagttactttagttactgtctctaatcagaattggaattttacctcagtaatctatataataaaatctccattaaaagattttgcggattacaaaggtaaaacttcaattctgattagagaac

SEQ ID NO: 88258 - DNA, 221 bp, Glycine max
ggagaatcttacgatcatttcgacttggtaattataaggatttcttctgtactgcagcagctcaggcatcatatctgcagttctgcattatgatgccttatatcaatgaagttcgtgtgctggctttatcttgcataaattttggtggatacaagcttcatccatatcctctgttggatctttcaaaactcctgttcataaaggaatcagatttagaatcc

SEQ ID NO: 88259 - DNA, 221 bp, Glycine max
cttcaccagccaattcccagtcccactcgaggttcttcgtctcgcattgatgccgatggttcaaactctaataggggtggtgctgctcgttctattggtactccatcaaggtcaccaggtttggcgtcgttgtatctttcaccgggtgtggtttctccacctaggagtttggctggcgtggattcggtggtttcgagtccttggtctaacaggcgagtctc

SEQ ID NO: 88260 - DNA, 220 bp, Glycine max
gagcctcccataaacctaaaaccctaaatcacactaccatgagctggagaaccctagcttccacttcaagacacactatcaagagactcaatgcaatcctacgatccccttccaccaccatcccttcttcacgcgcctcctcctcactcttcctccacgtgccgttctccaccaccaccctacattccctgccacaacccaccaacgccctcatcgaccc

SEQ ID NO: 88261 - DNA, 254 bp, Glycine max
gtacccagagggtgctttcccatgcccatgccatgtgttatttcgtctgcatgcgcctaacttcactcttctttctcacccagccccatttcatttcttcgtaagagaaaaaaaaaaaaagaaaggagcatggaaggcatcaccgccagcgtgtgcaggggcgtaaaggcatattggaggaggaaggggtacaacaggctaaccgggtagggccggaggagaaggaaccgggtggaccttgggaccccccgaac

SEQ ID NO: 88262 - DNA, 224 bp, Glycine max
  unsure (1)..(224): unsure at all n locations
gtagaccaatggaagatacaaaactggaagctaaaggaagagaaaaagctgaaaccaaagagggtggtggtgaggaaaaaggaatgagaagagaagaaataggagaagaaaataaacaatccagcctggaagagatttttaagtacagagctgaagctcaacagacagttaaggagagaaacgagagagcaaaacaagcagcagaagctgccanagagagaaac

SEQ ID NO: 88263 - DNA, 259 bp, Glycine max
taatgctttcaccaatggataactctactccatctccatgcatcaccatgcatttcacatttgctgtgtcaatcaaccctaagggtttatcatcagattatatttcttaagaactcagtgtaggtaaattgattatcttgctctttttactagcatatgagaatcaccatgcaattttcctttcagtttgaacaattaattaatcggtgctttgaagtcaaaagggaatttctcagacggcaaggttccaaccttcatg

SEQ ID NO: 88264 - DNA, 112 bp, Glycine max
gtaaaattatgggccactggtatggctacgttactcctaacgctgtttctgatttgttggacccacatcttgcaaagggagaggtcaccaaacgacttttcaggggccaaat

SEQ ID NO: 88265 - DNA, 246 bp, Glycine max
gttataatacctcgtcatgacacacctgtgcttatagttaacgttaaacattttgtgcgtgtcgtttaaaatttagctaatagcaggaagctattttactaggtacaggtttaaaccaacaagatcacgaagcagatgttggactacggttgaggcacgtaaatcaacaggtgggctgaattgtattttcagggaggaaggccactgtgtaggttgtgaagcctcgtgctgacatggttcatgaat

SEQ ID NO: 88266 - DNA, 246 bp, Glycine max
tttagaagtttggaacagtgaaatgtcgtaattgtttagtactgtaacctgtagattgataaggatgctttcttgctgttataggccatctttatttagaaattagaacttccatttgtcttttggttgctttcaatgatctcattattaatttaactcttgtatatctaagtccaatacttttaatgtcatgtttggccaagattgtagtaagttcttgaagagcattcactaagttgattgttg

SEQ ID NO: 88267 - DNA, 249 bp, Glycine max
ctcgagccgctcctggattgacatcagtgtcgcctcttaataatgcaggacaatgggccaatttacagcagcagaaacaaccattgttccccgctgctgttggtcagtctattgcacaacaatttacacccctattaggtggagcagcaaataatcagccatggaatgtaccttctgcacccacagtgcaagggcatccaagcacaccaatgccacatacgtacccttatgcttcaaagcctgccaatg

SEQ ID NO: 88268 - DNA, 250 bp, Glycine max
gtagggagagatctataccaagtcagcagaggataaaagatctgtggttgtcaacagaacccaattatcagaaaagaagacagattaagagctatagccaattttgacttcacttgcaattttaaacactttcagcattttttttccttagaaaatagtaatgaatgtgtatgatgatatgtgagcctggacttaaaaatctggctctccgttacattatgaaactatatatggcttttggataaatttt

SEQ ID NO: 88269 - DNA, 259 bp, Glycine max
  unsure (1)..(259): unsure at all n locations
actacgcctcctccctacttatcctgcgcataattccgcgatttctcggcgagattcttgaataactcctcccgtggtccaacttcccaaataacacaataatcttattgaattccaggggaaagatcctgagttgcttcggctgtgtgcagagatgactaccgaagactatgaaagtggangacagcatgtggtaaaaaactcacagggatgatggaacagtcgtgcatcgaaactgcaagcagggactcaactgtta

SEQ ID NO: 88270 - DNA, 279 bp, Glycine max
aaggaggttaatgataatgatgatggtggaagcgatgtgaaggatcgggaggagaaggatgatggcgatggtaatgaagataaaagagaaaaagatgccgttcccgttgaagattcaaagagcgagaaggggaattcggctatttggaaggctatatcactagtttttgagaggatggttgagggagtagaggagacaactgaaggagatgaagaaagtaataaaccttcttccttttttttgaggctacttattcttactgctcaagttggttgtgtt

SEQ ID NO: 88271 - DNA, 274 bp, Glycine max
tgtagtggttaagcattgtgttaagcttctgccatcgatggttaaacattgagatgttatgcttctgtccatagtggctaagccttttgttaagcttctgccatggatggttaagcattgagatgttatgcttctatccatggtggttaagcattatgtcaagcttctgccatggatgttttagcgttgatatgtgttgcttctacctttgtggtggttaagcatttttcattggcttgcttctgccttttaggtggtaaagcatgtttgcttc

SEQ ID NO: 88272 - DNA, 270 bp, Glycine max
  unsure (1)..(270): unsure at all n locations
ggaatctatagtaccatgtaaagaaattatgtggacttgttaaagcacaactgcttaagtgganaataaacatctcaaatttcaaagatcattttccccatgcttttgttatgctttgaaatttgagatgtttattttccacttaagcagtgtgnctgtatacttcaatttttgtgtnttatgcttttgctgataaccaaatgatgtgtgttcaaccatcattttaaccatgcagggaccgctaccgatttgcaactanatcagacaaga

SEQ ID NO: 88273 - DNA, 277 bp, Glycine max
atggaccaagacactcaatgccttcccatgagcatatctgcaatcctcctcctaatgctcctaatacccctagaccgggctatggcaattttagtagcccaagtgcgggtattcctatgcatcatggtgttcccaataccccaagatcttctagttatggcaattttagtggtccaaatgagggtatccccaggcatcctggtgctcccattacccaaagatcttctagttatggcaattttagtgctccaaatgagggtatccctaggcatcccag

SEQ ID NO: 88274 - DNA, 269 bp, Glycine max
cctaaccaccgcaacgcaataaagcaagcaagcattcccttctttttttttttttatgtcgtgtcgtgccctttaatcttaaaggattgcttttccttagcgttaaacttagtcaaagcacaaatgttttttgtttttatttcaatcaatgagcacataatacatccaattaatccctatcccccaccgagcgaaataatttaataatgagccaccaatgcaaatactttggtagataaaatagaggtagaggtgtggtagatttgaga

SEQ ID NO: 88275 - DNA, 264 bp, Glycine max
gcgagaagggttgttttagggaaatctgaccatctaacggaagcatatacttctgtgagaaacttcaccttgttgtagcagcatttgtaatgaatgctttggtcctcgattttatttttttaatatacattatatagcattctgcctctctcacatgaaaataaccatgggaaactgaaattcagaatgctatataatgtatattttcatgtgagagaggcagaagaacatacttgctttggtcctcaaacttggaagtatata

SEQ ID NO: 88276 - DNA, 263 bp, Glycine max
ggaagttgcaaaggacatctttgctcgaaatgcaatccacttctacaagattagttcagctattggtgttgttagttcacatagtaatttgccccaaaagctgaatgatggcttagacattgatttgtcacttgttcgtatcttgtgggttgatggttcaggacagcatagatgtcgtgcggttcctaaaaaacgtttcaatgatattgttgcaaagaatggggttggcttagcatttgcgactttgggattctcttcttata

SEQ ID NO: 88277 - DNA, 229 bp, Glycine max
  unsure (1)..(229): unsure at all n locations
acattttctataggtgnattactctgccctgcttaccatgagctctgtgacactgacccagtagctgtgtctggtcaaatgcctaaattcatgtaattttcaatgggagatttgtgcntgatgggaaaaatgccggatgcctttcttcggattttcatggggaatgatttgcacgtagacgtttcctgcccccagcaaaatgcaatgggcaatggggaatgtgtctttc

SEQ ID NO: 88278 - DNA, 259 bp, Glycine max
gcaagtcgttttggcttttcgtcaattcctgggctgaaatttcacgtggttccctcaaaatatccaaattcccttctctaaaacgttgctttttggatggcgttgaccgccccataaggtttctgttcacaaaggaattagaaaaagaaccgtccaaaaaccttcaaccacaaactcgacctgtgagggtcttccacttcacgaaggaaaaaatcgcggatctgaaatcaaaagctaacgcagaggccaacacggacaa

SEQ ID NO: 88279 - DNA, 259 bp, Glycine max
ctatcaactggaggttcatatcaccgggagattggcatactgatatacttgcttgttgttctgaaccttgtctttgaaaagcaaaaggaagattccaaagtgaaaaagcaatcccaacggaattgtactgcacagccgcagaaggacagcccttgctcactccactacctgctgcattttgttgttgttccttgttcctaatcataacaggctgtctccaccttgtttgctgctgtttcttcttcggtgttggattgct

SEQ ID NO: 88280 - DNA, 142 bp, Glycine max
ggtgcatacaataactagtatgcgttatctaatgcctggggtccggacgcaagaaggaacttgatcaaatcttagacgggtataggtgcggtaagagctccgacttttgctctcagattaccatccttgtaattacatgtac

SEQ ID NO: 88281 - DNA, 255 bp, Glycine max
gttttgcaagggaagcgcaaggccaagtcttgttggcatcgacgcagtcatcgtcaatgaacaacgaggagcgcgccgtgtacacgatcattcgcgagagcaaggagatggggatatggcaaggagacatcaaacgagagaaaaacattcacattcccgatagtctgctgaagaaaaccctaaagatgctcatcaccaagaacctcatcaaggaggtcgtcaacgtccacaacaagtccaagaagcttttgatgg

SEQ ID NO: 88282 - DNA, 249 bp, Glycine max
acattacactctttgtctcgattgggttgttagtagtaataagaaagaaaagtatggaagagaatctattagtattagcgaaaggaagtggggaggagcagaaagttgcatgggaaggtttgggtgaggaaatgaagaggatgattgacatagcagggcctatggtggttgtgaccgcttcccagcgtttgttgcaggttgtgtccgtcatgatggttggtcacctcaacgatgacctctttctctcca

SEQ ID NO: 88283 - DNA, 251 bp, Glycine max
tgctgcattagagacacaaagaaatgatgccaagccaattttatatcttgatgagcaaggattcttaccttctcgctctgctgctaatgggattggggatatcctcaagaggaattttactgatccctggccatcatggaaaaagataccaattagcacaagaaactattggtttgaagagtttttggaaaacttctctgtttctccaccggattacaattgggctaaaaagaattttgaaatgcgaggtt

SEQ ID NO: 88284 - DNA, 251 bp, Glycine max
agaaatcacttattttgtagaacaaattcatctaattcacttaaaaagtggattttacgggccttaaaaacggatcggaccgtcccgtatataaacccctaattttaatataagagaatgtgatagcaccttggtttgtttgggttagtttaatttattgattttctcttttttggtaaggcagttgaattaggagcaactaaccaaaccaccccaatttccaaccacaacacggaatgttcaaccatcgc

SEQ ID NO: 88285 - DNA, 251 bp, Glycine max
gaccaatttttcttaaattactaattaaggccaaattcagatgagtttattaacaaaaaagataataaaattaattagaaaggtaagcaaatcaaactctttccataagttaaaatacacctcaattttttaagaaactttcttagttaacttttccattgaggtacgtaagttaacttataagagaatattgatgtattttacctcatgaaaatccttttatatctttctcataagtgtttgttgagaaa

SEQ ID NO: 88286 - DNA, 209 bp, Glycine max
atgtaagagatagttcaagggttcaactgatctcctttcgccaaggaacataaacgaatctttatacaaattagggagcaacctatctacaagtttgtgtacgaacactcacagatgaaaacggagcaacttcgttatctgtcttcccttttcctgtctcttgtaacaagtcatccatattatgatttatagaagctgcgtgattcttt

SEQ ID NO: 88287 - DNA, 237 bp, Glycine max
caagacattactatgttatgggacataatagctgcggcgagaacagaaagcaatagagtagtgatatcttggaacataataccttcaatgcaaaagaccaaacatcttggccctgtaacaaatgggaatggaggctcctaaaatgaccctcagaaccttggcagctctggttgtaactccaaaatatcactactctattactatctgtcgttgcagcaggtattatgttcgaagaca

SEQ ID NO: 88288 - DNA, 239 bp, Glycine max
caactggctccagacagtggcttctaatcctgaagcaatcctcttcaagtttgtacctatttcctcacttctcacaggaattcctggaagtggctatcttagtcatgcaatcaatttgtatttacgctataagccccctccggatgatttacaatgcttcttggagtttcaaattccaaggcaatgggcacccatgttttatgaccttcctctgaggcatcaaaggaaaaagtgttctt

SEQ ID NO: 88289 - DNA, 225 bp, Glycine max
attagtctcatattcattcggagatgagtggttgcaatcacaaaggtaatggatagcagaactgttgtgtgatagtccataagttacggcgttaacatatggatatcggacaacagttctgctactgagtacctttgtgagtgcaaccattattctcatattcaggcggagattatgcaaccaaacctcagaatcagaatatgcaaagcttccaccagggcctcg

SEQ ID NO: 88290 - DNA, 238 bp, Glycine max
gttcttttcttctctgtcttcctttaccaaccccaaacatttcttatgtgttaaatttactgattctactcagcaatcagcaatcagcaatcagcaatcagcaatcagcatcattacttttcctttgatttataatcaaaaagcaagggacagacacacagaagttgttatcttgaatcagaaaacatgatgctaagaagctcttcaacaccagttcttggatccctcctctcttcct

SEQ ID NO: 88291 - DNA, 235 bp, Glycine max
caaagagggagtatcaactcttgatacttcatttaactgctttcgtgcttatggaggttgctgtggaactggaaaatgacctatgttgtgcagacttgagcaagcaaatttctctcctaattatggatgaagatgaagacccccttgctacttgtcctcctgactctcttcagactttttctggatcaatctatcatcctccacaatctgcgttcctctatgagcaggctttgat

SEQ ID NO: 88292 - DNA, 202 bp, Glycine max
ctcgagccgattcggctcgaggggccgcaccgcagtcaacgtcgctagaatctacgatccaattaccagcacgtctcaagtaagaccgccggtgcactgactcgagatgttacggtctcaaaggaggccatgtggaatcggtacacatcaacagaggtctatgcaagcgtcacttagagctgtaacctctgcggcgaataat

SEQ ID NO: 88293 - DNA, 217 bp, Glycine max
ggggatgtgcgaagaacacagaacgacgcaaatccaagactgaaagtttctagattcgtcacctgcgaattcaatatgccccacaaattcatggcgttcttgtatatctcctgtgaatccatttcagataatttgcgtggctctgggtgctttcgggacttaggaggtggagacatattttgtgataagccgatacccaatttggatcagtggtttg

SEQ ID NO: 88294 - DNA, 232 bp, Glycine max
cgaacattgttgaggtgtttccactcatcctaattcaccaagcagggctcctgcgtcgacctctgcagctcagaggggggatgatgactcaactcctacaattgatgttgccaatctgtctccaactcctgaaactggagaagaatcatcgcatccgactgtagtggcgcctgttcaagcagaacaggtatctgcgtccggctctggaactactgcgctagcgacagcgcaa

SEQ ID NO: 88295 - DNA, 143 bp, Glycine max
gagaaaagttagggttcacaacttttccttttccttttgcttgcgaatctgaatcaaataatcaatcatccattcattattcatcatgtcgtcggcgaagaaaatcacgctgaagagttcggacggcgaggctttcgaggtgg

SEQ ID NO: 88296 - DNA, 159 bp, Glycine max
attcggctcgtgggaggacattcgcttcatggtcattccaggactgatggatggcatgtctcttcttgccaaatatggtagatattagtaggctatatgtattgttaagtgtagaaaggttctcaagttatacaggggatgcgtcatcatctcggttgt

SEQ ID NO: 88297 - DNA, 157 bp, Glycine max
actcagctcgaggtcatcactggatttggcatcgactctctttgacgtctcttgctacatgatgtacctctgattgaagttccttcccgcttattcctggctgggctctacaattcgtccataccggctcatggtcactcggtttctaacgggagac

SEQ ID NO: 88298 - DNA, 141 bp, Glycine max
ggctcgagcgatctcggctcgagtgtgtcaggattagcaggtgcgtcgctctcgaacgcagctgtagaatttcggtcaacaggattcgtacgtcaggcttctgatggcgtccgaagaggatggggcccgtttctgaaggga

SEQ ID NO: 88299 - DNA, 142 bp, Glycine max
acggccatgatgaaaatcctcttcattcacatcggggaatgactactcagattcatgtatagggcaaaacgtaagagacatcgacgcattacaaatgttgataatagatatgtttgaattagaattataggtgattttattt

SEQ ID NO: 88300 - DNA, 123 bp, Glycine max
aaataggggatagaactttgaactatcgggcggtggagagtatgagcttcggatctatgtgtacctaagcccagtccgtatcagctcaatctgctctgcgacgccattcactagatctgcagt

SEQ ID NO: 88301 - DNA, 153 bp, Glycine max
acacaactagccttcttcaagtgttcttcctctttaatttctctatagaatacttacccttttctcaagactaacctctcgatccttctcaaaagaagaaaattaaaatggcaactgaaaagcttagaggttgtgcaaagttttttgcaagct

SEQ ID NO: 88302 - DNA, 142 bp, Glycine max
cgcagagtcacttttgttctcactactctcaatctcaaacctgttttaccaaaaaatctaactgatgctcaataaaaagaactagaggcatggattgaaaatgactttgatcatgtgtaagaactttatttaaaatggttta

SEQ ID NO: 88303 - DNA, 142 bp, Glycine max
ttcagatttttctcctgggaaaacgtgttcaaaatttgttcgcgtttagtaatacagaaatgtcttagaagagattttgaacacggtttcccaggagaaaacgtgttcaaaatttctttgaagacatttctgtattactaaa

SEQ ID NO: 88304 - DNA, 146 bp, Glycine max
taataataaacctatattctaaagccggccaaataccaaaaggaataacagcacatgtctggaaaggtaattatctcggctgattctctcatcctggtgcttagagtagccatatgtatagttctgaccgtcaacaatacgggcga

SEQ ID NO: 88305 - DNA, 140 bp, Glycine max
ccttggatgaatctcaatctgaatcagtcctcctcctcgtcgtatcaggaataaataatcatcggaagaagaatcaggtatggatgttgggaccgtgctgctactttgttgggtgactctgatcccggggattttatcag

SEQ ID NO: 88306 - DNA, 144 bp, Glycine max
gttctagatcgcgagcggccacccttttggattagcataacagagagatccatcctcagtcattcgcaatggcccgacgactccttcgacttacctccctctgtcagctctccatcgccgactcgcgtcgcctcctctcctctg

SEQ ID NO: 88307 - DNA, 144 bp, Glycine max
gagaaaagttagggttcacaacttttccttttccttttgcttgcgaatctgaatcaaataatcaatcatccattcattattcatcaagtcgtcggcgaagaaaatcacgctgaagagttcggacggcgaggctttcgaggtgga

SEQ ID NO: 88308 - DNA, 104 bp, Glycine max
gcacgcacgcgcacggaagcccggacgacggctcgagagatccagtggcttcacctcccacgtcgcaatggcaatggactcaagggtacgtcaagcaaggagtg

SEQ ID NO: 88309 - DNA, 234 bp, Glycine max
aaagtccttctgcaccatctctctcttactctctttcctcttttaccccaaccaaaaagaaacatatccattttcctctttaatttcttcaacttatttactcctatgctcacactgatccattagttaacttctcttaatctctctgtagccacaactacctaccatatttgcttcagaaaaacatggaatttggagagaacaacatgttcagccttaacacccacacaaaga

SEQ ID NO: 88310 - DNA, 208 bp, Glycine max
cggaaaaaaaaacttgaaatttctcccttcggcacaaagtttagggtttttcactttcttccttccttccttcattctcgttccgttccgtcactatccaagtatggaagaaacacccgaacacgtctcatactgtccgttgtcgctgccgccggaagacgaaaacaacagcggcgccaaattggcgaaatcggtgaacgaactcaac

SEQ ID NO: 88311 - DNA, 259 bp, Glycine max
cagctttgaaatattgtagagtagagctgtcgattccaccaaaattctgtgcttcattcgctaacaaaaaagaactcgtttttacttggtgaattccgcaataactcacaattctatgacgaggacatttgaaattgctaaattcaccaagtaaaaacgagttcttttttgttagcgaatgaaacacagaattttggtggaatcgactgctctactctacagctttggactattgttctcttggttaataacatttttg

SEQ ID NO: 88312 - DNA, 130 bp, Glycine max
ctcagttcatagtttactatctgacggatccggtttgagaattggcaatcactgatcctaaggcgctgctggccatgattcctttgtggtctccctcagaaggtgcgcatccgcgagattcgaaaagagg

SEQ ID NO: 88313 - DNA, 112 bp, Glycine max
actccccctcccattttggaaggtcgtggcgttgttaagcgctttggaactaaggttcttgtagttccaatgcattcagattggttttcgcctgccacggtgcacaggttgg

SEQ ID NO: 88314 - DNA, 111 bp, Glycine max
ctttctaccaccgcctgactgagccacatgcaggcaatttaaaggtgacagaggtatacaacttctcccaggatgatttgatgacagaagatattttcatcttggcttggc

SEQ ID NO: 88315 - DNA, 112 bp, Glycine max
tatcgcgaagaatgtgaagccgaagataccgaagaagcctaaggtgacggtcgcggatgccgcggcgaagatcgacgccgctgatctgggcgctttcctcatcgagatatca

SEQ ID NO: 88316 - DNA, 256 bp, Glycine max
attgttctcaagagggacattgttcttaagagggagagttatggggaagaatttgcaaatcagataccttcatctcctccatatttttgtggttctcctccagttcgggcttctaatcccttaatccaagatgctcgatttggagacgaagagtactctcttatatcaacaatttcatcgccttcaggtttactgtctccatcttcagcatctcgcaaagcaggatgtgctaggatgaagtttggacttaaaccgg

SEQ ID NO: 88317 - DNA, 214 bp, Glycine max
tgatgactagtttcactagtgtacttcacttctccaactatgatacaaccaacaggacggagatatctagtactttgcctgctaacgagattctagttgctatgggatatcttttgcaaattgaatatgaggttattggagaagacttggtaaatctgtggcttctcatgttgtcatgctctgccatcaattgcaatttggtgaatgttcctga

SEQ ID NO: 88318 - DNA, 237 bp, Glycine max
  unsure (1)..(237): unsure at all n locations
atgaaagaagccaaaaatttattagctgtgatgacgaaagaaggagtaaaacctaatgttgtttcttataatactttaatggatgggtattgtttaattggtgagtgcagaatgcaaaacaaatgtttcacactatggtccaaaagggagtanatcctaatgtgtacagctacaatataatgattgatagattatgtaagagtacaagggtggatgaggccatgaatctcctaagag

SEQ ID NO: 88319 - DNA, 242 bp, Glycine max
ccatgctgtcacagttatccaacaaacccggaaagtgggttggctaaattaaggttagcttctgaagaaggctggtcaaatttggctcacaatcttgggatctcaccgcttttatttcgactaggaggtatctatggccccggtagaaggtacttaccttttgttattgtaatttatttttcaagtaatgcttctattattagtttctttctaggatctgcaaaagcctataaaagttttgt

SEQ ID NO: 88320 - DNA, 260 bp, Glycine max
gaacaatgaagagattgcctgatgtttggaaaaacacaagtactggtgtctggagcattcttttgtatataatgaatggcggtgaatgaagttgctaaaatgctgtgatgctatatgaagctgtaaaaagaacttgttaatcctttttttccctacatcttttttgccgcaaggttaggttgggactatggattctaaagtggaagttgaattttgaaacaacttaaatgaaaaggaaagagtggagctaatactgtgat

SEQ ID NO: 88321 - DNA, 270 bp, Glycine max
gtgcatcaatcttccactgatgctgcatcatgtctcctagtaaaagctccctcatcgctcgttgagatgtggcgccctattggaatccaattatagcagtcattgttccatttgccctcagatcatcgccatctggaagcaccagcttggtagatgcaacagcgaggtttgctgctgctggatctcttgggaaagcagttttagatccgagcagaatcatccatttcaaataattccgatgatgaggctcaccagtactggcgttgtcag

SEQ ID NO: 88322 - DNA, 257 bp, Glycine max
gatcatcactcatatttttaattactcttttcctaccctatatatagtactattaattagttcttcgtcttatttaattttttattatttgtgaaaatctaatacagcgctcaatcaatcaagttagactctgtagacaccttattttgttaattagttacttcgaattttgttgcttaattactttgatgatcccttgcagatggtcaagaattgctcgcaagctaccagggcgcactgacaatgagattaagaat

SEQ ID NO: 88323 - DNA, 255 bp, Glycine max
atttcatatatatgatatatccctttagaattattgaattagtgaaaacttgtgtaagtttgaatgttgagaatgataggacctttgctgctgttattgtctaatgcatgataaataaaatgtggtttttttgtcgaaaaaaaaaaaaaaaaaaaaaaaaggggggccccccgattagtgacctcgtcacccggggaataattccgggccgggaacttgagggggaaccagtttccccaaaggggggcggtataa

SEQ ID NO: 88324 - DNA, 256 bp, Glycine max
tcatcatggaacggtgtttattactacaaactttggcttttgcacttgttgctgttgtatgcatgttcaacttcttggttaatgccaccacagatcctaatgaagcgagagttttaaacgcaatctttgacaaatggagtataattgcgaatcatgaacactggaacataagtggtgacctatgcagtggaagggccatcgatgacacatctatcactgatcaaacttacaacccattcatcaaatgtgattgttt

SEQ ID NO: 88325 - DNA, 250 bp, Glycine max
gttgtattctttgctgttcgaactcattgtaattcttcttatacagtgaaaaggtagagagatattggacaaaaaaaaaaaaaaaaaaaaaaaaaaagggggcccccccgattatggccctccccccccgggaatttattccggccccggtccctgggggggacccgttttcccctaagggggcccgtttaaggctttggggaaaccggggcaaagctttttcccggggaaaattttttccccccccaaa

SEQ ID NO: 88326 - DNA, 257 bp, Glycine max
cttctttttttaccattttttttcctatttcttcccttttctcatttagttttatgtccttagatcggaactactatttcacgttctattgtgctatattgatttacgaggatctttaggaccgtttgtttgggaattttaattttaattttattttctctgtttttaaccgtgggattactgatgcaatgatgggtttcccgttggatttgtgatgctcgatagatggatctctaattttcttcagtagtttccgc

SEQ ID NO: 88327 - DNA, 257 bp, Glycine max
tctcaatagagtcaccttctcgagaagttgatactcgttctccaccagttgtgatcccgccatctcgagaagctaatacccgatctccacctgttgtgattccacctcctcggccgaaacagaatggggaggttcctcatccagtggaaattccacccccacctgcaaagcacattgagagggagaggttttttcaggaaaacaaggatggttctaatttgtctggccacatgagaggtatcaccttacatagtcgt

SEQ ID NO: 88328 - DNA, 255 bp, Glycine max
aaagaagtactaatgtagacgaagggatgctagaaacaattcttttgtcattctatgtatgttgtgtatgatatcattcttatttcttatcatagacattggcaaatggcaattttagtttgttggacaattttgtaattattattattatttttctaatttttggtttctcggatattattggctggaacaacctttgtggaactagtaggtccaatccaagataaatatctatttatctccttctttttttaa

SEQ ID NO: 88329 - DNA, 110 bp, Glycine max
gttaaactgttccaggtcacccatgaggttaaggaaccgtgaatccttcttccaattgatttgtccaggcaactgttgcatggaagggcaggttgctcccccagacaagt

SEQ ID NO: 88330 - DNA, 255 bp, Glycine max
gggacatgacccttgggaacagtcacaaccaaccattatgatccgctcaaggggtgcaaggtcaggagatgcgaatcaagggaatgacccttggaaacagtcacaaccattcagaataattgtgtcaattagatgtagtataaatataagtaaaccagaatgggaaagacacttgggaattaggaagaatctgaattgtggagaaacagactctcgaaaacttgtgtaataacatatctcaaattatctataaga

SEQ ID NO: 88331 - DNA, 248 bp, Glycine max
tgcagttaaaacatatagctagcatcaagaagtattgcttgccatggctgagaagtttcaagctgctatttatggtgaaagttagtggaatattattaatccaacaagaagtgtgtttcctcttatgccatcaacttgttctgtggcagtagctgatgcaggaaactacaacacttggcaaagtattactgatttcgtggatttgaagggaacaaggtcttgtgttgaggagactaatattaacttgg

SEQ ID NO: 88332 - DNA, 248 bp, Glycine max
tctctctcttcttcgccaaatcccaaaccccatttcaatgatccccctccctccaacaatgttcccacacccttaaaaaacgacaaaaaccaaaaaaaaaaaaacccccaacccatgtttcccttccctcacaccatcatcttcaccctggccttcccaatcattatttctggctccggggcctcgccgttgggcctgagtagcattgggaggaccatctacggggccctgagcgagcaggggttgcc

SEQ ID NO: 88333 - DNA, 266 bp, Glycine max
gttctaactatattgaccacctgggttttgcttcactaactgtgtggaacatgaagacgtggaaagccatgacagtccttcctcttggagaagatccgccagcaattacttctctatgctttaatcacaatggaaagattttggcagcttctgctgttgatggaatgattcacatgtttgacatgtctgctggtctacaaatcactggctggccagcacatgattcttccatcagttctattctgtttggaccagatgagactagc

SEQ ID NO: 88334 - DNA, 255 bp, Glycine max
tcggctctagggaagctcgaatccaatgtcaatgtttgtgctggactgtgatgcatagtgaaatactcaacgctattcatcaatctccagtgttgcactgggatcaatgtccactaccatttcttcccttcccttctctctgccccttcgtcaaaagtctagggttaggcttttaatcgattctcgtctgctggtgcatccctgtcgtcagtcacctttcctaaaagatcatgtggtcttctgttgttgaggcat

SEQ ID NO: 88335 - DNA, 262 bp, Glycine max
  unsure (1)..(262): unsure at all n locations
ctctccattcagttcctttttttcccttccctcaaaccctaattcacgcaaaaagccaacgagatctactccttagtgagtacctcctcgtaattcacgccccactctgccctcaatcctttcccaattatgcatcataattaagatctacatgcatagtttctttttgttctttttccagacgccaggtttctcaattggattttgnggaaacttcatctccaaacacgtaattaggttctcaattccaccctttttctta

SEQ ID NO: 88336 - DNA, 257 bp, Glycine max
tgctttagtcattgaagaacttgacattgacaaagaccgcacaattaatgagaaggaatttgttgctgggtttgagaaatggcttagctcaacttcagctcctgctcctgtgtcagattctgagtctcaagaagatatgtttcagacctgggaagaggctgcatcgtagtggaagagaggcaaaacaatgcagtagttgataaatcaatatgggcatggattaaggccataacatatgttatgctaggatatgctat

SEQ ID NO: 88337 - DNA, 214 bp, Glycine max
cgactatatcaactactacgctaccgtctctccttaacactgcgacatgcaagaccatgtctagggtcttcggttttctcgcgattctacaattctcgcgctccggcatcgcttcgacgtggcatttccgaccaagatgctgctcgacgagcccaatgacttgtgactgaattcattgaaggacttgtggcgacagatcctggcatacagtatt

SEQ ID NO: 88338 - DNA, 258 bp, Glycine max
cttttcaggtaccctgcattttttgaaagccgcttgggtgatggacttcaaatgtcatttatgtttatgcaatctatttgtggaagttctgaaaatgttgatcataagattcaatctaagatccctacttctggaaaagggaagcctgaggctgggtcactgctcaagctaaacttggggtttctcgaatttacaagctcatccgagggaatcgggtatcaaggaacaaatttttgtcctcaatcgtgcggaaatttg

SEQ ID NO: 88339 - DNA, 256 bp, Glycine max
atctatgccaaaaacccatcacagaattcaccaccctttttctcctcctcctccttctctttttccccccacatattattatcttttttcctcctctgtaattgccaacaaggttctgtgcagtgtttgtagagagagagagagagagagaggtagatagtagatagaccacagaactagatgcaaaatattataggaagagagggatacactactagagcgtcctatgctgggggactcagcagtgttgggaaca

SEQ ID NO: 88340 - DNA, 252 bp, Glycine max
gagcaagaggctgctgctctatctattttccacataccgtggctggcatttgttgttttcatcttgtttataatgcttaatggatggcttcgtatattcaaacgtaatcgaagagaacaagagatgatggaatatgatgttgttgaggaaattatttcggcttggaatctggaattttgtttgggatggcatctgtaatatcaaagatggggtttctgttcttggagcaaggcttccccaagctgttggttc

SEQ ID NO: 88341 - DNA, 252 bp, Glycine max
caaaagctgaggaggagtttcagtcccaacataacataacaacttctggaggggctgaaaagttgtgcttccagaaccctcaagtatactctgatcacttgcactacttgaaccctgattccaacaaaccatattccatgtgccaatcagattgcatctgaaatccacaagaaattcgagtcatgtgtctgtttttaatgagatgctgtcaaactcaaggagtgagtatgtaggtggaaaaatggaagttgc

SEQ ID NO: 88342 - DNA, 247 bp, Glycine max
gcagaaaaattttctgggaaaatatcttggtatgggaaagggatcttttcaggactctgttaaagctctggaagctgacattcagtatgctaatacccttggtagagttggactttgaagctgagaatttgtgtaaagaagatgttgatgaactgacctgtgaatttgcatgacactcagttggaaaattgaattagataacacttttcaatatccagaaacttcattgatatgtttatgatggagt

SEQ ID NO: 88343 - DNA, 255 bp, Glycine max
ttttggcgcattttggcatcaaaccaccaagccctaaaaaagcattatcctccttctttgttctttgctttgctcttttctctggtctcttgtcctctgagaacacaccctctttacagatcctgttgtttctctctctgtctccacaatggctcatgatcgcgctttgtaggtaggaggacaatttgctcaatatttctaaaggtttgagctttagatctgcgggagctaaggttgtttgcagcaatggcgaca

SEQ ID NO: 88344 - DNA, 251 bp, Glycine max
gggttttgctgctggtttgatgcttagcatatcgttctttgatttggctcacaatgctttgaactcattgggcttcttgaaaggcaacctttggttttttgctggggtaatattctttgctgttgttgccagttttatcccagagccaacacttaacccacttctgatgtgaagggcagaaagatgtaatcacatgcttgaaaatagaaaaatggggatgaaggaggcaaggatattatgaaaaagcatcg

SEQ ID NO: 88345 - DNA, 250 bp, Glycine max
cagatagcagttcagcaacatacaacagacagttggatgtggaaacctgaccccaatgccactactccacaaagagtgcgtataatctgttgcagggagaaacagcggaggagaacttggatggagcttttgcggacctatggaagctaaggactcaactaaaacatcaatctttgcttggcggctaattagagatcgattgccaactaagtccaacttgcgaaggagacacgtagaggtaagtgattta

SEQ ID NO: 88346 - DNA, 247 bp, Glycine max
ggaaatgaaggaaaatggagaacttcatgtggtggtgaggagccattcattcaacaatgactctccttgtaactgttcaacgtcaaaccattgtagcgaggcagagatctgttccatgcaacgatctttgagttttaatacaacacgtgatctcaaaagagagggttctaaagaggagatgtcgaagatcgaccaggaaaaaatgtccaggaaggacgcttgtaatcacctttctaatggagtgaaa

SEQ ID NO: 88347 - DNA, 249 bp, Glycine max
gagctgagcgttgcagatggaagttcacagaattccacaaatcattgagagaacgaggagttgttcggccttttacagggtctgaggatatatcggaaaattggagttatccaccccttgatgacacttctgatgcagctaaacgggttcataagcgcttgctgcccgagggtggaaactgaagatatagaacacaattattagttcacatgatactcaatttttgttatatttatcgttaaggtcgta

SEQ ID NO: 88348 - DNA, 249 bp, Glycine max
cagaaagagagtatatataatcacacgggttaatatatcaatatgaaaccgaaaaacatggaaacatcaaagaatgtgtcaaaagaataataatgttacaacaagctggccaaaatcttacttgtgcccctgtcatggtgattttttttcgtcttctccattttcccctaccaaatatttgttttgcccactttgtgtattgcaagaactctaaagaaagatatctatcaactttattctagttacttt

SEQ ID NO: 88349 - DNA, 182 bp, Glycine max
gaagcgcgagagccttcgttgttcaagatgagagctaagtggaagaagaagcgcatgaggagttgaacgagaacgccgaagatgagacaagatctaagtagtgcttgaacaggagtggaatgatgcttcactgtacactatcattatcgcagctagtactagcatgcagactcactatatac

SEQ ID NO: 88350 - DNA, 239 bp, Glycine max
gacatggtggcgcaaggggttcggttggattccaccacggtggcgaccgtgcttcccgcggttgccgagatgcaagaggtgaaggttgggatggggattcagtgtttggctttgaaacttggatttcattttgatgactatgttttgacgggtttgatttcggttttttcgaaatgtgaggatgttgacacggcgaggttgttgtttgggatgattaggaagccggatttggtttctta

SEQ ID NO: 88351 - DNA, 242 bp, Glycine max
aatttgggtctgcatgaacagctgtagaatttaattaggccacttatgtacattgacaaattgcctctcatggtgccagatcctgtgttcatgttttattctcagcacttctgatttccctttagtgacagataatttctacttcaaattccatttggtgtttgatcgtcagtttgtgctgggatgattcaaaatgtaaatacatgttgccttcatagtgaaataatatacttttactccaa

SEQ ID NO: 88352 - DNA, 243 bp, Glycine max
atgacttctcgtgtcagctgggtgatatttgaaactcctgtgtgtagtcctggccctccttacttgtgggtgtgatgatatcctatgggctagtctgatgatactatttttattgctcctatatcagaatcaagtgtctcatgtctttgctaatatgtgactttcttatttgtattactagggggagttttcaagttggaattatttttgccagatgaatatccaatggctgctccaaaggtt

SEQ ID NO: 88353 - DNA, 237 bp, Glycine max
gattgtccaacaggaatcaatgacaaagccaggtgagcgcaggagattatggtcattggaagatgtaagggaagttttaggatacaacacggtaggcttaaaatattgagtgcttttggttgcatcaagcttaggagttttccaaccatcaagttgacctcgcttgaagacctccatccttcatgttatacttgagagttttccaaaaatatcagaaaagatggaaaatgtaaggga

SEQ ID NO: 88354 - DNA, 129 bp, Glycine max
atttaagaaagatagtagcaaagtccttaattaattttcattttctagagaaaaactcagtcagcagaatgatttagattagagtagtcgtggattcactcgcgccatgtaatagaagttagttgaaat

SEQ ID NO: 88355 - DNA, 130 bp, Glycine max
cctaagtcctaacaaatttcagttaatggatagtatgagaaacgttgcatatgatctccgtattctatgtattatcaatcaacatgtatacaattagcacatcgtattttaaatgttttattttgttttt

SEQ ID NO: 88356 - DNA, 243 bp, Glycine max
cttgattttgcgttttaaccaacagaatttggatctagtaaaagtaactagtccttcacaacaagctggcagatcatggttcattgagagagacgtacacattaagtgtcggacatgtcttgaacaagattgtctctgaaacaagatatgcagggaaacacaaaaaatcagcacttgagattctcttcttttgcaattgaatttttgcagtgagcaattgcagcttgaatggctgcttgcaac

SEQ ID NO: 88357 - DNA, 235 bp, Glycine max
gaaagctaagcttaagctaagagcagctttaacgtctaatctccaggcaaagccaccactgtccattctccacacatcacatggcaccgttctttctatcccgcacgcgtaccgcaccctcaccctgcacgtgaaacctctgtacggatacggtacgtccactttcattgccaaccatactcctccagcacctactgtttccctgtacgcctcatttgtccacgtcaccctcccg

SEQ ID NO: 88358 - DNA, 213 bp, Glycine max
cattttcgcttttgccgctttgcacacgcgttacatgttgcgtgctcgcgggggccggtgacgtgtggctgccttattccatggcttgtttctgttgcttcaacaatcaggcggtacgcacttcatgtcgctctggcccgggcacgcgccatcagggctcagttcagtatggctttcgcctagttcacgggcaagcaaaccacccaatggcgg

SEQ ID NO: 88359 - DNA, 241 bp, Glycine max
cgaaaaaacagcacctgacgtcgtcgccgtcgctgtccatcagtactgtgcgtcgtcctcgtgtgcgacgctgctgtttggcgtcgtcgtgctgctgttcgcgtgcaggtgtcgtgtgtgtcgccttcgccgtcgctgccgttcgtcgtcgtgctgctggtcgcgctggagactcctctgttcgtgctctgttctgttcgtgcttgctgttgtgtgctgtacttttgcaagagaaactcgg

SEQ ID NO: 88360 - DNA, 235 bp, Glycine max
gctcgagcggctcgagcggctcgagctcgagccgaatcggctcgagccgtggaaggtggcgcgtgaggctgtttcaggcgacccaggccgacggcgctaagtggtgatcaaggaaatgggtcagaggttaagctgcgtgcaacagcagcacgaggagcatggtgtgctcttcccagcacttgcaagtggagaattggaggttgttgaggccatggtggaggaagaccccactgtg

SEQ ID NO: 88361 - DNA, 239 bp, Glycine max
cgcttgagtattgtgtccccctcggccgcagggcctttgtcaaacgatgttggggatttttctgcattcttactgcctttgaggactggaattaaggagcaacaggctgtcaaggattctatggctcaagacaaacaccacaagctcacagaagagattgaatatcttcatggtttgtacgttcagttgttgaacaaaattgatcagtgccttcaaaaaatggaccagagtttggctgg

SEQ ID NO: 88362 - DNA, 240 bp, Glycine max
gagaacttgagcttgattgtcatcaatcaccaagtgatacagcccttcaacttgatcagaagaatgcactcagacttgtgaaattggagagtacgactcaaaaaatgacaaagcttagactctgaaataagattgaatgtaaattgttttgcagttgttcattacccacaacttcatcctttgactcagttttctgcagttgttgtgtagcatttgctacagcttgaacacctttcccat

SEQ ID NO: 88363 - DNA, 105 bp, Glycine max
ctcgtacatcagctcattattctgctcgagctaacactagagcaatggactcgtaagcttactcactaagaaactaaaggtttctaatttatttcgttcaattct

SEQ ID NO: 88364 - DNA, 238 bp, Glycine max
cgaatacttattattagaaatgtaaaattttccaaaggtcccaattattttccagacagtttgattgcactggaatggcaccggtatccttcaaattgtttaccgtctaattttaattcgaacaaacttgtcgtgtgcaagttacctgacggttgctttacgtcaattggattccatggctcacagaagaagttcaggaatataaaggttttgaagtttgacaagtgcaaatttttat

SEQ ID NO: 88365 - DNA, 252 bp, Glycine max
gaaaaattatttttagaaacagaatgtatttatttttaatttaaacttcaaaattttctccactctttcattttctattaatatttcaaacagtttaaatgagtacaaacttggaaaaaccttaaagttgtagcccagaaaaacaatgaaaagatgtccaatgagaagtcgaagtatgttagtatatctgcaatgaaaagatttaatatacttattttccaaaaagaaaaaaaattcaaaacaattggaatt

SEQ ID NO: 88366 - DNA, 260 bp, Glycine max
gtcgagaaagaccagcagagtagagatgataatagacagaaagaaatttaaaattcggatagacaagtacaggagcgcgtattcggttttgaggtcactcagtcccaccgatgactgatcatcattaacacctttttctttcttcaattatcccaaacctcttcttcttcttctgcttcccctatcacaaaaacgcgtcatcaagagacataaaccctattatcaccatatacttcctgtctgggatctgtagatctaac

SEQ ID NO: 88367 - DNA, 248 bp, Glycine max
gcagcttccactctgttggtttccagcatattgccaacccttttatggccttagtagacagtttattccaacagcatatgtgaaaaaggcacaaacccctgacgtgtcacctcaggagttcacggttgttggcttctcagaacctatttcagcttctccctcaatttgcagcactggattagacacaggaacagtaccagctacaggagtgctagaatcccacaagaacagaagtcttcaacttaaag

SEQ ID NO: 88368 - DNA, 218 bp, Glycine max
gggatggtctaccattaccctttcacattgtctatgattgtctccacattctggaggacgaatctgttgccattccttggcaaaaaggagacattctcttaattgataattgggctgtcctccattcccgaagatcttttgatccacctcgcagggtcctagcttcccttgtcaagtgagccttgtaccaatttcactaacttacattaattatgttg

SEQ ID NO: 88369 - DNA, 233 bp, Glycine max
ctcgagccgttgttccaatatggtagaattagaaatggagagaaggggtttgttattcctttatcctcttaccctgcaacaaaggaagaaaaggaagattgtgttgccaatggactttctcttcagacacctggaactgcagtgaaaagcactagggagggatctggttgtagaaccagctcttgcaaggtgggttcctccgctctttctacgctgcatcagccaaaagcagc

SEQ ID NO: 88370 - DNA, 249 bp, Glycine max
aaaaaatcaaatcatgtgtgtgttccctccctaatgcacttttctacatgatttttgctaagttgtgttccattattactattatgacactgggtatttactctttccactataaaagcaagtgaagcttcctccacttctcttccacaccaagtcctgctcctcttccagagcaacaacaaacaaaccctttctttctggcttcagtttttgcagtgaaaatggcgtgactctaacatcaaccctctt

SEQ ID NO: 88371 - DNA, 240 bp, Glycine max
aggcatgccaccctattattgagataatgaaatctttggttttggttacatggactgctgtaatttgttgctgcttcactacctctgcatctatgtgttatggttccatttgtgatgggtgttagttgaagcttacatgacttggcgtagtacttgaatgtagtacttatgtagaatttctgtagaatttttggttcatagtttttacctagtttagtttcataagttattgactaaatg

SEQ ID NO: 88372 - DNA, 242 bp, Glycine max
ttatgctatagttttgtgtgctgtatttgtgactattaaagttctttttctttgccatattggattaggaaactgtcctgcgtttgacgaaggttgtaggtgccttttcaaacgtgaatatgatttatcttttcagctcttattgttttccacttttctctcaaattatcgaagtatcttttttttttcttgttccttctccatttaaaatgctttccaggaagttccagggtcttcaattt

SEQ ID NO: 88373 - DNA, 238 bp, Glycine max
tggaagccctcactcttccctcttttctttctttcatccccaaatcaaaacctagattcccaccttcaactttctcccccaaatcgaccaccaccactgtcaagcccattcatttatattttattcgtatatatacatacagagagtgagtgagagagagagtgggaagaatggattcggatcaaggcaagcttttcatcggtgggatttcatgggatacgacggaggacaagctcaa

SEQ ID NO: 88374 - DNA, 242 bp, Glycine max
  unsure (1)..(242): unsure at all n locations
ctttccccccccctcttcgcgtcttttcgcaaccgactgcatcttggatactggaatagtgtgccaatatgatctctcgttctggctatgttcnttccgtcttatgntatcggaggagnaagacagcgtttgaccttgaccgtaaccgtgtaccagctggtgagaatcgtgagcaggagggaccttcgactcagtcggcgcctcgagaagttcaagttgaacagctgcagcaggctactcaa

SEQ ID NO: 88375 - DNA, 256 bp, Glycine max
gtgccaccactccgaaaacaacaaaacagaaaccataaagagatgagttacttgctccgcctttggatgccgacaaccgtggccgcggcggagggccactccccaaacagccggcgacgggtgttctccgccggagacttgtcgggcttagacccgccgcgaagagtgacgtggtggtggaggataagcatggccacaccgacgagtctcttcggaaagttatgtacttcagttgctgggtccagggctagctagt

SEQ ID NO: 88376 - DNA, 258 bp, Glycine max
ctcacaacagtttgaaagatctaattgaggagctcaagtcactcaaacttcaaaagctcagcgcctaactgggtggagacggtggcttaggagatcagatatgaataaagatacttatgaaacttcaagtatttcctttggtgttgagtgtatgacagtatgagtgaaaagtaacattttaatttccagactcagttattacttattattagtatatatgtcagcatgatcttctgcgcaggtggcaataagaagaaa

SEQ ID NO: 88377 - DNA, 247 bp, Glycine max
tccaatttgagtagattttgaaagtcaagtcatcaataaatataatttctagttgcattattctcagagtggtaggtgtatatttaaattctaataggttatcactttgtgtggaccttatatgtggctttttccaccatagtgtgcataattgcatatattagcccttatcttcaaaccaagacattagccatctagctcttgttgacattccaataactttggtgctatgatcatggagatcaat

SEQ ID NO: 88378 - DNA, 248 bp, Glycine max
attgtttccaccattgaagaggagtccaggaggcaggaatggttggagtttgaagaagaagatgagaacgctttggcggaaagaaggaggctgattaaagagaagttgcttcaaagagagcaggaagaggcgcttcctaggaagaggaagaggaggaagaagaagaggaggaggaggaggaatctgagtacgagactgactccgatgaggaatatactggagtggctatggtgaagcctgtgtttgtt

SEQ ID NO: 88379 - DNA, 244 bp, Glycine max
cttttcccacaaacgtcttggtttgggggaatcaagctcaaataagttctactggtggtggtggtgcttctttggaggaaggttcatcctcaacctcttccgcttctacttgtgatgatcatggaatgttggtattgatataccaagtgagatgacttcaacctctctgtcgcctgaagatgacgtcaaatcgcctatgacgggaagactcaggtcattgaagaggcttttgagcagggacaaa

SEQ ID NO: 88380 - DNA, 242 bp, Glycine max
taaaataaaataaaataaaataaaatgaaaacaaaaaataaaaataaaaatgctctatctcatccaatttcttgaatgagatagaaggatagttgttgggaattggatcatcagtgcttcttttactattttcgattaatcatatctttgaacccttatcattgtaactgaatttgtaagatgtatattataccctgaagaacaaagattgtgagatgttaactaaatattggactagagct

SEQ ID NO: 88381 - DNA, 246 bp, Glycine max
ggtcctggaaatgaagctaagaagtggcaagaattattcgaggttttcagtgacttcaagatctaaatactttactcaaagcaacagctggacaacgacgagcagtccttataggtcaaggagataaactagtggagaggccagcagaatagtggttgctgaagcttgcgtgcaggcactagatcttgaagtcactgaaaaccaagtatatgaagttaactctgttgagggggaaggtcctggaaa

SEQ ID NO: 88382 - DNA, 237 bp, Glycine max
gattcattgcgctacactctgtagaagatgaaaaataagaaatttgaaaagaattatttcttgtgataaaatgtgctttgtgcttactggaagtaggtcaattagaaagaaatgataataggatgatactgttttcatctcatccattattttttaatgcaaattcagaagcttgaaatgggagttgaaaacaactgttattgcttaaaataaatttgacttacctgcccctttaca

SEQ ID NO: 88383 - DNA, 234 bp, Glycine max
tctgtctttagggaataataatgcatgaaattaaagtaataagtaataatataagtgcttgtgtgtatatttttttttccaacatgtaacattgtgaataaacatgcttcgaaatcaaataataatctttcttgttcaaaaaaaaaaaaaaaggggggccccccaattagtgaccccgtcacccggggatttattccgggccggatccttgagggggtcccagtttcccctaag

SEQ ID NO: 88384 - DNA, 236 bp, Glycine max
gtgatgatgatgcttttgagtattatggcaattttgctaggaagaatgggttctctattaggaaggcaagatctagaattagccctcagttggggatttacaagcgtgattttgtatgttaccgtctgagctttgcccccgtcaagaagaagcttaatggatcacaccatagagataggaaatcggtcaggtgtggatgcgatgcaaagatgtatctctccaaggcagttgtagaa

SEQ ID NO: 88385 - DNA, 249 bp, Glycine max
cacagacaaatatcccctttgattctctctttccctcttcaaaccctgcgtgtctctgcgtgtacaagacacacacacacagtgagagaacatcacaacacaaagtcacataccactttcgttgttttcttcacgtcaaaaaaagagagaagaaaaatagaaaaaaagttgtgttctctgttattactctgcatgaaaacagagtcccctggtttcttgttcttattgcgatgaagtatattaggagca

SEQ ID NO: 88386 - DNA, 256 bp, Glycine max
atgctccgaaaatccaaacgttcaaaaaagagagtatctcatgcgatatcaaatttgatgcctcatgcttcttctcaagggcattccaaacccatggagctgccactacagccttcagagttagcacaaccatgtgctcctcctgtcgtccttgttccatcatcaattagtgcaactcaagatccagttttaccatcggatccatcatcaattcctgtaaatcaagatcctgttttaccatctgatccatcatcaa

SEQ ID NO: 88387 - DNA, 251 bp, Glycine max
cagtttctagacagaataacaatgtcaatgtcaacatcaactcaagacatagcagattagttcgtgcaacggtgatgcctgcctcagatggacatctgaaacaagaggaaacaaatgctccatcttctgtacatgcaaaagctgaggaacataaggctttatctaaatcagaagcaaaaccgttatctcttgatcatgaaggaggtgatattgaagatggcgacgataatgataatgatgatgaacttcct

SEQ ID NO: 88388 - DNA, 231 bp, Glycine max
ctttgcaaagatcgtaaacttattgatgctgagattgtgcttgcagctatgataggtcgtggggtttctccgaatgcagaaagatataatatgctcattgaagctagttgctcattgagtaaattgaaagatgctttcagatttttttgatgaaatgatacaaagtggaatagacgcaactcttgtgactcacaatactttgataaatggactcggaagaaatggaagagt

SEQ ID NO: 88389 - DNA, 241 bp, Glycine max
gatcatatatttttcttccacttattctacttccctggattgctgctggtggtgttatccattcaatgaagcctctaagcagtcgctgtcacatgaaagctcaatggaccatcccagttgtatgcctccattcattgtatattgccattttggttggggttacagctgcagttcatcacatagagttcaggtttgatgaactcaaagacctctggcggggaatacttgtatcagttgtgtc

SEQ ID NO: 88390 - DNA, 235 bp, Glycine max
gtgggacgatcaatggtggaaggcaagccagttgagtgttggggcattcttgattttaccagccaggagtctggttggcgcaaattaaacagcaaacaattcattgagaaccttatgggtaagtatagaaaattgggtattggcatgaaggagccagtttggcgtgaacaatctagtatgtggagtcttggggattacaattcgctgtgtaaattacttgaaaatattgaggata

SEQ ID NO: 88391 - DNA, 237 bp, Glycine max
cgcgggtgagaatatcacccaccggttccacacgatgtcttttctcacttctgggttattcgggtttcctaaggatgatgtggccatcgtgagtcttacgttgtttgtctttgatcagtgattgaatcactgtacgctacttgtcttacttatttactagctagaaattagaatgctggatagtctcttctccactctgctttttctattctgttttttttttcttttccatttcct

SEQ ID NO: 88392 - DNA, 242 bp, Glycine max
cgtacgactcgagcgattcggctcactcgcttcgaaggcaaacgggacgtggaactcggcacgggctgcggcgttgcgggtactgggcctctacctactgggcctgacggacctgctcctcaccgtcatctttcccgtcatgccggccctgaaacgcaacctgaaagtcagcaagcccatcctccgcaagaccctgaaacactccgtgctctactggaacaacccgcagcagatcgcagccc

SEQ ID NO: 88393 - DNA, 235 bp, Glycine max
ctacgttgttccaacgctccccacgcgccatccagcgcgactagattcgacgcgctggttcaactcgccgggtcggtgaccgagtttcccgaaattaaaattaaacagagtgacactgcggcactgttgtattcttcgggtaccaccggcttgagcaagggcgtggttctcacgcacgggaacttcgtcgcggcgtcgttgatgattggcttcgacgatgatttggcaggggtgt

SEQ ID NO: 88394 - DNA, 234 bp, Glycine max
tttacgccaaaattcaaagaaaaaacaagaccaggctacagttttacaatctccaagcttattaccaatgtggaattttggtggcaaaatgatgtttgagaatattattgaagccacagaatattttgacgacaaatatctcattggggttggagggcaaggacgtgtttacaaagccttattgcctactggtgaagtcgttgctgtgaagaaactccactcagttccaaatgg

SEQ ID NO: 88395 - DNA, 230 bp, Glycine max
gttttgggcactcgtgctcttgccatttcattacctttctcctgtgttttgggtcttctttcatctatgattgcttcaaccatgggtaaacctccttccttttattttccttggcatatcaaagtaattttaatttgcctaattttctccatttcatttcctttttgggctggttaatttttggtcatcaagtacggatattgttgaaatagagtgcttgagagaattgg

SEQ ID NO: 88396 - DNA, 258 bp, Glycine max
gtcacaatctactaatatttgttgcattattcttcattgtctgtaacaatactcgttgtaaagttgcattgctttctgtgcactctgcattgaaatcttgtcaaccttaggaaaaggtctacagccccatttatccgcccaaacctctctgaatgactggcatacaagagtaatgcaaactggacatgggttccattaatgatacagttcgcttgaagatagacaatacatgctccattaactaatatgttttgcaat

SEQ ID NO: 88397 - DNA, 252 bp, Glycine max
gcttgtgtatcccttctacggtgcctccatagatgtctgggaaatcctgtacctcaagttttgggatttgttatggaaattttgatgacattgcaagttatggtggagaatatggagccagagaaggtgatacctatcctcagctattttgggggtgtgttgctatgatgcacacggattttgtccatgtctaccgccaggttctagagcttttctctcatgtgattgatcgtttatctttccgtgatcgta

SEQ ID NO: 88398 - DNA, 256 bp, Glycine max
gcaacttaatctattctcaccagatgaatccaaacagttttgttcatgagaattagctctctctaacctaacttgtttcttctatattttaggatgcgcttgcttctatattgttgatcatgaaccgtcacgacaatttcagaaacctcaatctctctctaaaggaactacagatcatagtcagcatcagaacaaggaagatgtggtttctataaaagattgtatctcaccggacttgacatcatttgcgacctcc

SEQ ID NO: 88399 - DNA, 246 bp, Glycine max
aaaagaggagaacgaagaacttcagaaaaaacaggcagaaattatggaaattgagaaaaatcaagcttaggagatgatgaatttgcaacgagaagtgatgagaagacgcgtaagacgaacacaaactggtccaggtagagtgaacactcgactacgattgaagcgttaaaatatatgtgacataattatgaaaaacgtatccagttgtagattgaggctgtggtagtttttagattagcacttgaa

SEQ ID NO: 88400 - DNA, 253 bp, Glycine max
gcatggtgtgggacaggacaagaaatccaaatcacgcagttggttgcacaggatttcaagaactcgaatttttaatgatggccacagagacttggacattggagcaagaggagaaggagaatttgttgaagcagctaatcaatgtcttgcttggagttaggatcaccagcaggagggtatgttgagggaagaaaatcggtgtctttcatagaggcagcagcatcaccagccgcgattggaagcatagttgagg

SEQ ID NO: 88401 - DNA, 244 bp, Glycine max
tgattcggagttgaacaagtggaggaagttcgtttcgttccaagatgaccattttactcacatgaataagaaccatgttgtttttgtcaataatgctctgcactggttgactgctagctctacttatatacttgtgcttgatttaagttgtgaggtttggaggaagatgcaattaccgtatgacttgatttgtggaacgggaaataggatttatctcttggacttcgatggctgcttgtctgtt

SEQ ID NO: 88402 - DNA, 247 bp, Glycine max
agttgctctcagtttcattgagccgtattcctgtctgttctatccttcatttcaatcttcaaccacgaacccaaccctagcggcaagcccgtttctaagcctcgccggcgcacaaccctggccccttctcaatctcgccggcccactccctctctgaatctcgacggcgtaaccgtagttggacttgcttgaacggagagacgtgcagagttggagctgttcgttgagttcagagttttgtattata

SEQ ID NO: 88403 - DNA, 244 bp, Glycine max
cacattcaaaatctagaacagcatcagaatcaatcagcatattctgtcttcttcttcttctgaaaacaaaaatgcctcgcggtggtggcggtagctccggtggcgagtcattgcttatgtctgcaggaagatctgctcattcagctcgaagtcatgcttcacggccagttaaccatgctccacctccagctcctgctcagagtgacaatcgtggatctctctttgggactgtagctgaaggatt

SEQ ID NO: 88404 - DNA, 222 bp, Glycine max
gtttgaatggcctcacatttcctgatcgaactcctcaacctgcaatacatgaggttaagtacttctaccaaccaatcaaggtggctttaaaggaaggaacattggagataaaaaatacccatagcagccacagagcagcaggacaggagttcagctgggctatgcctgtagatggatacaagctcagacccggtcttccgggcagagtgccgacaaagcccc

SEQ ID NO: 88405 - DNA, 269 bp, Glycine max
accaactccaggccactaacacagtattaatagccacctctaaactataattgtaccctctgctaatacataaaccctgctctaagatcgccagaccattgattaaaatgagtggagaaatccttctccaaatttctcagccatgtccacggtaagaaagctgcatcgtccacaagatatgggaggttcctgtgaaagtgttcaatgaaatgatggatatgaacgtgaaggggatgacaaatgtgttgcatagcggaaaagaagatgga

SEQ ID NO: 88406 - DNA, 267 bp, Glycine max
gtttcactaatggatgaagtaatctcaacgttggaaagaaatggtctaagttttgtgaattcggcaatgagggtaaagacaaaaaagaagggaaagcctcatatggcaataagaattgatattccagccaccactcctacggctgttacttccatgttgtgggaggatttagtgaacagtccaatgaaaccagggtatggtggagagttcattaacaagagaaaaattcaatgtgctgagaagatgattagaagtgcatttgtagag

SEQ ID NO: 88407 - DNA, 189 bp, Glycine max
gtcaatttgtttagtttaatttccataaataagattccatcatatcacaatcttatttatgtcaatttgtttagtttaatttccatatgttattgttttttttaatattaagtcaggtactagaaaatttgcatcaattcacactcatgagtcacctgaacaagagctagacccggttttattgtttgt

SEQ ID NO: 88408 - DNA, 259 bp, Glycine max
gaacggcatcgtgcttcgttgtagttgtagactagactagccttgctttcttgcaggattttggcgcatggaacctatcggcgtctccctgaatcgcgtttttctgttctaaactgcaaactgatatgatcagataaattttttttaaaaaaaagcagtactccagtaactactagtaattggcatcctacaatcctggccgtccgttccgttgaccgatgaatatcaaaaacaggcgattcgcacttcccattcccat

SEQ ID NO: 88409 - DNA, 253 bp, Glycine max
gtaacactgaaggggtgagtgtgtttgtggtgtctgacttgcacactgactatgctgagaatttgaagtgggtggagtgcttgtctaatgtgaagcacaagaatgatgtgcttcttgtggcaggtgatgtggctgagacatgttccatgtgtgttgtgacaatgtctcttttgaaagagaggtctgagcatgtcttctatgttcctggaaaccatgacctttggtgccgtcgcgaggggcaaaattatgttga

SEQ ID NO: 88410 - DNA, 255 bp, Glycine max
ctcgatctttaagtaaaattctcggatttgagggtagtcgataactctctacacaatgattttaaataataataaaaaaacaaaactcaagagccaagaggtcagaagtgacatgtgtacctgccctgcactgcactacaaactacaaacctgagaaacagcaccacccttccttccttccttcgagaaaagaaatggaagacgtgataacagaagcagcacccccatcaaggttgctggaagaagacctaaaca

SEQ ID NO: 88411 - DNA, 229 bp, Glycine max
tggacttagatgacacactggtatgtgcatacgagacatcaagtttgccagctgctctacggactcaagcaatcgaaggtggtatgaattggtttgagctggaatgtgtatcgatagacaaggaaggagaaggcaaaccaaaaatcaattatgttacagtatttgaacgcccgggttgaaggaattcttaaagcaactcagtgaatttgctgacatggtgctgttttac

SEQ ID NO: 88412 - DNA, 226 bp, Glycine max
ggcagctgaaacacagcccattgacccagatcacgtaacaataggagcattgttgaaagcatgcacaaaagctggtcaggttgaacgagctcaagaagtgtacaagatggtacaaaaatataacataaaggttgtccagaagtttacaccattgccattaattcttgcagccaaactggagattgggaatatgctcgtactgtatacaatgacatgacccagaaag

SEQ ID NO: 88413 - DNA, 223 bp, Glycine max
gcaaggttttcttcttcttcttcttcctctcccccacgccttttttcaattgcttcttgcaggattcctgcaagtactgctgtagcagattccaaggtgaaaggttcacgttgaactttctttcatgttgaacgggctattatccatttgggagcaattgagttgcttggagagtgtttttcatcttctagaaaaaagaacaggcccttgcctacaagaccca

SEQ ID NO: 88414 - DNA, 222 bp, Glycine max
attgaaggagagacaccaacaactgcaaatgcaatttcagcccaagctattgctgccaatattagttggggatcggatgatgatgaggtaggagatgaggaggatgagttggacaataccaaactgttactgccaatttacacccaaactatctcattccataagaggcaggctctagtgacatacttggagaacaatagagcaggaatcacagtgtttggg

SEQ ID NO: 88415 - DNA, 219 bp, Glycine max
acccagcaaatttcagcccacagattcatctgccagggcctacaacagcacttttaacagtggagggtatactggctgttctgattgggagaatgaatttccagcttctgttgttaaagctgtgtaagatatggaaagaagcagtttgcagttgatgagaccaggcgtgatacttacaaaaatccagtgactttaggaaatgaacgaccgatgttgtcc

SEQ ID NO: 88416 - DNA, 125 bp, Glycine max
ctctttgggagtaatgctccaaacaatataaacgatgatggtttacaatggttttgctaaaatggaaagattaatatatagaatgtacatggaaatggtattgcctgagcaaagtttgctagttg

SEQ ID NO: 88417 - DNA, 219 bp, Glycine max
gatggtcaaagtgatgaactcattggatttgtaacagcacgaattgttcttgcaaaagaaagtgagatagtggatatgcttggatatgactcggctaaatctgaccaaactctagtctatgttctgacgctgggagtagtggaagcatatagaagtcttggaatagcttcttctctgattcgggaggtcataaaatatgcttcaagtattccaacatgc

SEQ ID NO: 88418 - DNA, 214 bp, Glycine max
cgatacagtgatgaatcaaatattggcgatgatctctacaaggatgaggatgacaggcgaaagtttctgagatgactgaactacaaagagagatgatcttatcggatagggctacgaaaaggatgataaaaatttattggggaagatagcatcaaagcgtgagaaaggaaaggtagcagtgcccagaaaacagtctccacccatgtcatcatcg

SEQ ID NO: 88419 - DNA, 216 bp, Glycine max
cacttattccatatattggctcgtttgtaagacgtgccacaattaaggtggtgaaagaaagaatgaacattttatgaaacattgaatttttattttccttcccaataaccagtttgttagatcgtttctctagcaagatgtttggtgtcattagaagaaaactccggcacctttactcaaggatattgtggctactatggaagcgtcccaagtcta

SEQ ID NO: 88420 - DNA, 230 bp, Glycine max
cggctcgagcacacaactacgttttcattctagatccaaccacttccattgccaccaattcctgcttcttgtttattttgctcccataccaacactgtgtgttagatactcacatctcctcacccctcttttctctatgccattcccccagctaggaagggtgtactggaatcagagtgtagctgtggggtacggatttattactagttttgtagcgaatgggcaagtgc

SEQ ID NO: 88421 - DNA, 226 bp, Glycine max
ctagttctagatcgcgatctatatctacgccttggtttccgcgaacggtattcgcttcttctaccgctcctaaccgcacgccatatccacgctaaacggcaccgtatcctctgcccgcgaccctgtcgactcctccgaacgcaaaggatgcatatcgtgggatgactatgttatggcaattgcatttttgtcagctgacaggtccaaagaccacgttggggcttgt

SEQ ID NO: 88422 - DNA, 225 bp, Glycine max
aaaaaatctaaaatcgaaacgagactctctccctaagctccatctctaaactcgacgactcacacgcacggcacaacccaagcgcaaacccactcaggtccaccgtcgccgtcccaagcctgttccaccaccgtcgtcgcgccactgtcatcgcgagttcgcgcacactaggttctgatttcctttcaagcacgatttgctttatacgctgcaggatttaaagca

SEQ ID NO: 88423 - DNA, 227 bp, Glycine max
tcgaggtggattagcagaacaggtcctttggaagcaacactcgaacagaacagaacagttccttcctcaccaacgcacctattcaaaattacaacagagagaaaataattgctgttacagaaggagttgagttgtgattggtcaagaggtcactgagctgagatttgaagccaaggttccaattctgtggtcaattatgactatagttcagagtgagggggcagcaa

SEQ ID NO: 88424 - DNA, 222 bp, Glycine max
aatttagaaagtagaaagacaaaaacttatcgcatatgcttctcttctttgctggtacgagaccttttgattttttgttgcccattgttgcattgacttctctcaactgttcttgttaatggtcttccaagcttgcgtttagattttggtagaaattggacaagttgggtaccgtgaatccgctgcacttcaatgtgagtaaaaagagttgagggtctccaa

SEQ ID NO: 88425 - DNA, 227 bp, Glycine max
gtttctacatgggagctgaggcacgctacgatgttccatatatggcggcgtcagatgatacttctactgttataggtaatggtcctgccactcttcagtccacatagctagtcgctcgtgaacctgatgatgatactatcacttcgaacccgaacttacgatgtcagtatcacgtgtgataggtatcatcgaacaccacgagtatggcatactgggaatgatgagtc

SEQ ID NO: 88426 - DNA, 229 bp, Glycine max
atttcattttcttgcattatattttgtctttactaatgtttcactcaacagccatgcgagaaaacagaaaggacatttcacacatggaacatcccaggaagagaaactcccccttgtcttttgtcaccttcaaattcaatccttccctttctgtctctttctctctcacacggtcctagctaattctttctactccttccaccatcatatgcaaggacaagcgtaacca

SEQ ID NO: 88427 - DNA, 225 bp, Glycine max
gataatgtaaggaaccagcgtgaaaatgttgttttgatgatagcaaataagcagtctcgacttggcatacctgctgaaactgatccaaaaatagatgagaaaacaatcaatgaagtgttcttgaaggtgctagataactatatcaggtggtgcagatacttacgaattcgtcttgcatggaatagtttagaggcaattaaccgggataggaagctttttttggtt

SEQ ID NO: 88428 - DNA, 239 bp, Glycine max
aagattttctcatttagttttaatagaaatttctcatttacttaaattatttaccacattaaattatctaataagagcaatgtggtatttttaccaaagtaaaacttttttctctacttggaaaagttagattctcacctcccctcagggacaatttgtgggaaacacaagtaaaaaaagtcctaggtaacaatattttctgggaatgttatttttaaataataaaccaaacatgggag

SEQ ID NO: 88429 - DNA, 237 bp, Glycine max
ggaaaaaagagcaacaacagaagaactcttctctgaaggaagcttctgaagtgaacaaggaagtaaatggtcaaagtatcagacaccaaagtgctgaagctgatagaattgctgagacctcaaattcacatacagaagatgtatttgctcatagagaattcgatgatggagatatagatgatgggattgtcctgcgctaaaggaaaaaattgacagcatagttgcagtggcagatca

SEQ ID NO: 88430 - DNA, 229 bp, Glycine max
gtctggtgaaagctaaatttaagacactgatttgttgtattgcatacatagttacaccatacaaagcatcatgttaacatttaggaaattgatgtaggagaattactgtttggggaaacaattttctatgaaaataatttccttcatgacaatctttttttttttgattggcagatggaaatgttgttcagcatatattttatgtagcttttatctacatgattttcaa

SEQ ID NO: 88431 - DNA, 229 bp, Glycine max
tggcggactgcggcggtacacggcgccgtggtgtgggatcacaagttgagggcaaaaaagtcaacacgagaagacgaatagtagacaaactagaggtgcctgttagacgcgttcttcgtgcgccacaagagaaaaagataccagcatttttttccttcttagtattgagatatctcttatttttatgttttaccgttgttaagacattaattgaaaattaaaagttatt

SEQ ID NO: 88432 - DNA, 229 bp, Glycine max
ggagttatccaatcctgtttctctccaacctttaagtgaggtttgatgatttgcattgaaaaaggacatggcgggacatcagatgccagcttcttgtagggttgtttttcttcctgcaggatttgatggcaaatgatttttgtttataaaaaaaaagtgtcgttagacaggtttaccgtagaggaatgattgctttatccggctttttctctgttgccttctatttcaa

SEQ ID NO: 88433 - DNA, 235 bp, Glycine max
cttcaacaagaagtaaaactcaaacacttcctgtttcagttccctgtggcagtacaagtacaacccaaaaaagactacaacaaagaaaatcatcagttgaagccggtagcagtggaagcagtaaaaatacaaaccgtagagtccctggcaatggcatgccacagaaaacaaaaactaatagcagaatacacagagaatacctatgctaggttctgataaatgttcagtggtcaga

SEQ ID NO: 88434 - DNA, 235 bp, Glycine max
aatcccttcccatctgccattctctcatttcaaacgtcaaattactattggtaacaatcaattgactaaccaaattaagaaagggtaaagttgtgttgtgtacttgatatgcctttatattgttccactttgggtgcaagctctcccacgtatcttaggacttgggaagagaagtgaaaactacacaatagtcatataaaaacaccctcccattttggttcttgctttttgtctc

SEQ ID NO: 88435 - DNA, 221 bp, Glycine max
atacactgggagatggctcggacccgtctttgttctatgtctgtaccttttcttattctgctaataatcgcctttactttctttgcacagattactccagttagtactggagagacgaagatgaggaaattggctctcctgccaagtcgtcctcctgtacgcaagtgtggcatatcacaacaaccgcgtcgtactcctcggccatatgggcgctaagtgtg

SEQ ID NO: 88436 - DNA, 213 bp, Glycine max
tttcattggtttttccccccttggcaagtctagttgcatacacttgacccaatggctttctttcttcctttattatttctttcacttcaaaagttctatattcttatttgattactcaattagctgaactatgcagatttttttattttactctgcctgtaaagtctgctccaagtctaaagttctctcctctcttgttcaaacagacaactc

SEQ ID NO: 88437 - DNA, 224 bp, Glycine max
cccttttgtaactggggaaccttttacacacccttacaagcctcctcctgagactcctcatatgccagtagttcaaaatatcaaggtggataatcatccaggaggaggacactggtttgctgctggtctatcacctaatgttccaggaaaaagcagagcttccctctatagcagtccacattttcagatggttcaacatccgcctgctaatagttatggcagtg

SEQ ID NO: 88438 - DNA, 232 bp, Glycine max
gtatgctctatgttgttcatgttacattcaacttcgtatattgttttgcctcccacaactaaaatcattccctacaaaatccaaatcaatccaaccaatgggttttgggcaccaaaccatcaattcattctctcccacactaaatcaaatactagaattatctaacaatatatatatatcattcccaaaactaaatggcccaatcttgagagcccaaatgttagataacaac

SEQ ID NO: 88439 - DNA, 236 bp, Glycine max
ctcgcactgctagaagaacaaatttcatgcctattgttccaaatagtgatgaagcttcagctttggatactgcatctgatgtggctggtaatgatcttgggttaggatttgccagacgcttggctggcagttctcctcagcaaattaaacaaaaaggtgatccttcatcttcagctgccttgtctgaaagtgaagagtcaggggtagctgatgttaaaccaaaagaagagggtagg

SEQ ID NO: 88440 - DNA, 249 bp, Glycine max
tagcacttccatatcctatgtgctgtgttgcccattctagataagtgcgagagagagatatagtgagtgatagtggacaatatctcagcagttgtcggtgctctctattgcagtctctatcgtcggttatgcgatcacgcgctcagaagatctttgctgtcaagacttagcgggaaggtgagtcctagatttacatcagactctcttttagcacgtatccctctaggcaatgcatggggttaagtctca

SEQ ID NO: 88441 - DNA, 220 bp, Glycine max
ctcgagccgattcggctcgaggtgacaggtgtcatgaccaacacgtgctgcgaaacgacgtcgcgtgaggcgttcgtgagagggtttagggttttcttctccgcggacgccactgccacctctgacgtggagcttcacgaggccgctttgaagaacttggcttatggttttgcttacttggttgattgccagaggcttcaacatgccctctctggtgcca

SEQ ID NO: 88442 - DNA, 197 bp, Glycine max
tttgaacttctagtctctatcattatcatcctgctctagttcttcatcgctgatcttccttcacctttttattgtaagacaaagaaaatcagcagtataagcacgggtacaggtaaagctgccaccaggattcaggtagcatccactgagcattagatcttgcgagtgatcacttgttgtagcaggtgctacacaat

SEQ ID NO: 88443 - DNA, 227 bp, Glycine max
gctatgaaatcaatgccaaccaaatgccaggcatctaaaagtagctcatccgaagtgttgctggtgctgattcgccttcatacttagatgacatggtagacttaaattcagaggtagctgcttctgtagctgctttaagaaaggcaatggatgaggctcaagtaagaatgaaggttgcaaaagagttgatgagaagaaagaaagaaggttttcctgatcgtgtcaaa

SEQ ID NO: 88444 - DNA, 226 bp, Glycine max
  unsure (1)..(226): unsure at all n locations
atataactgacttacacttgacttttgtttaaattttttacaggaaaggtggtccttgatctttgttaacagtttttgttgaaacagaaatttctttaacaatgatcaatgcatttggataccttctactttggtttttagattttagctgtgttcactgcattctgtttgatgaactttanncaattaggcatttttctgttcttttagtggttttctcatcata

SEQ ID NO: 88445 - DNA, 238 bp, Glycine max
atgttggtcagtgattctgggcaggtttatgcatttggaaaggactcatttggggaagctgagtatggagttcaaggttctaaaacggttgcagctccacagatagtggaatctttgaaaaacatatttgttgtccaagctgcaattggtaactttttcacagctgtgttgtcaagagaaggcagggtttatacattttcttggggcagtgatggcaaacttggtcatcacactgatc

SEQ ID NO: 88446 - DNA, 254 bp, Glycine max
cgaaatgcttcgtgccaaatacccttcttatccatatgaaaataggtgcagcagccaggaaggtgataataacccgcacaacatggacatcaccaaaatatctcaattggggtttcctccattcagaacccttgaacaaatgttgatgactgcatcaaaagttttcaagagaaaggcttcctatgacataataatagttgttgttacattttatgttcgtgtgaggtgtcaatgtcacatgacccataataaag

SEQ ID NO: 88447 - DNA, 244 bp, Glycine max
cactttctcatccttcaatgtattcgattagaaagatgattgaaacagtactgttatggccttgtctgaacgctgattcagtttctaaagcacaacatgggtgcattgattgtctagcattgatgatatgtgctgagctacaagctaaggaatcaataaacaattccattccagacacagtaagggctcttgggaagaaagggaattccgttgtcacctatgtgatcaatcagttctttaataa

SEQ ID NO: 88448 - DNA, 241 bp, Glycine max
cctttgttcattgagatttttagaggtgcataagatttttcaagttttgaaggttggtaaataagagccaagaacttttggttttgttccgttcctctatgtttggcgtctgtgctaagttattcctgttcttttttttcttttgtttttgggcttctgcagatatatttctcttgagaaaaaaagacggattttgaaactctgaactttgtgcaagtcgtacgttacagggacgatcgct

SEQ ID NO: 88449 - DNA, 237 bp, Glycine max
cgccgtgttcatctcgcgtgcatagcagtcaggaaaacactgcgagacagagacgaagaatcagagagagaaacaagagagagaaacaagagagagaaacgaaaaccccttttgaccattgcgcctccgtttccatttcccccattgattctgccaccaaaatctcttctgtattttttttcttcttcttgtgatcattcattcctctcatctggggcacggttctgtttttgtgat

SEQ ID NO: 88450 - DNA, 251 bp, Glycine max
aatttacaacacacgttaattaatttaaggattttctaaatctccctatttataaaattacatatagataacgattttcataaattgttgacaatttggcacgtcaagtaagatttgcaaatttccttatttgatgcgacatgattagaaagtattatcgggtatagagtaattgatgaaagattgaataaacttccactcatagataacaagaaaaaatgttatttagattctggtttgtcatttggaaa

SEQ ID NO: 88451 - DNA, 248 bp, Glycine max
ggcattgttgacatgtcatgggatgatcatcttacagaagaaaaccttttctatacagtacctcctactgcaatggaagcatacagaaagtctattgaatctcattttctacagtatgagaaaactggtagtagcattcaagaggaagttgaaacatctatgtatgatgctgcagcagagtttgggcatgaagaggttgcatatgacgaggatgaaggagaaaatagtacttattatttgcctggtgt

SEQ ID NO: 88452 - DNA, 239 bp, Glycine max
ggagatactcaaggagttgggcgctgctgttgtgttggagtgatgattctgaattttttttctttgtgttctagagttttgtgttagttgtagaataattggaacttgtttgtgggtaataatgatgaatgatgaatgatagatggtaagttatatattattattaaaaaaaaaaaaaaaaaaaaaaaaaaaaaaaaaaaaaaaaaaaaaaaaagaaaaaaaaaaaaaaatacaaacac

SEQ ID NO: 88453 - DNA, 251 bp, Glycine max
ggcaaaagccccttcaaggaggatcacgatgacaacaacaacaacaacgaccaaaacggcgtcgtttctggtggcgacgatatcgtccggtgtcgttttagcggttgcaagaccaaggccatggctttgacgaattactgtcatgcgcatatattgggcgattcaaaacagaagctttaccagggatgcaaagccgttgccaaaaatttgccaacaggaccttctttttgtaataagccagtattgaggtc

SEQ ID NO: 88454 - DNA, 243 bp, Glycine max
atctttgttgactttaaactttctttttatctccattttacagatttgcaacttaggtcttactcaactgtttcttgaataactttgtttcaaatgattttggttcctgttgatctgagaacggttacttttaagagaaattaatcaatctctccatgatcctcccccttttttcaactcgttgaccttgcagattctacaagacagtggagctagaaagatagctacaacatctgggaaaga

SEQ ID NO: 88455 - DNA, 245 bp, Glycine max
acttcaacaaatcaacaaaaaacaaagcagcaacaacagtaagtattcccatcaacacgtgggatcatccacaaaaaaagtagaaggccaaggctatgtgccatttgggaacactcagagtagccacgtgttaaatgaaggacaacatagtggaatctagggcttattggggcaaacaatgttttttgaaagaagggaacttgtacaattttttttattgtgggggaataggttgcccgtgacac

SEQ ID NO: 88456 - DNA, 239 bp, Glycine max
ttaagagtgagacacaccctttctgtcatatttttatggcatcccatatgttttgattaaacggctaaacaaattatgtaaatcgtgtaaagtacgctcattacctcatcacatagttggtcctctgttttttttttttcccaaaagtcttattaatgcacatttgttgccgtttggataaaatgataggaaggatccatcgattcttgcccttgtctgacactctagcatttaacctt

SEQ ID NO: 88457 - DNA, 233 bp, Glycine max
attctttcgaaaatgataacagaaaggctagaacctatctatccttagctaacgctggttcttcttaatattatccaatccaaaaagaagataaataatattaataagtgaagaatgataatttatgattattttggttaccttgatctatctgatagggttactgagagggcatgcacccagcgaacggagaagcagaaagaggatcggaatcggaaaaaaaatgagctgta

SEQ ID NO: 88458 - DNA, 237 bp, Glycine max
ccatcccccaaatctcggccgctggcctctccgtcgccgccgtgctcctcctcctcggtgccaccggcctcatgtccgtcctctaccgctacctccccctccccgtcgtccgcggcgtccaactctcccaaggcctctccttcgccttctccgccgtcaaatacattcgctacgaccaagacctcgccaaatcaaaatccggtcccccccgcccctggctagcagtcgacggcgtcg

SEQ ID NO: 88459 - DNA, 235 bp, Glycine max
gagaaaagaagaggaggaggagctgttttgggttcatttgggatttctggtgtggggagagacggaaggagcggagagaaaaaggacagagagaagaagaagaaaagaaaattatattaaatatgagaattagagtttagattgacatgatgaaatcaaagtctaagctggcgacattttacttgatttcagttgtcaacatctgccccatatctttgacttttgaatcaatctt

SEQ ID NO: 88460 - DNA, 232 bp, Glycine max
ctctatcgcttctagctgtagagaatacagattattccaaacctatctctttctctcatcccctttttgctccttcttcttcttcttcttcttcattactcttccttgctccactcctcatattatctttttctgaggaaacacataatcatggaggggtctcacatggggttgttgctcttcttttgttcttccatgctttttgctgccttcgctgctgcctcctccagaa

SEQ ID NO: 88461 - DNA, 231 bp, Glycine max
caaacccaccctccaatccatggcttccctgaacctccttccccaccctccacttttctcttctttccttcacagaccacactgcaacacccatcttcttctcacaccaaaaccttctcaacgaaggccttctcttgtggtcaaatctactgtgggtgtggctgacccttctccatcttcttcttcctacgctggggatacctctgattccatctcttctttgaagctcaa

SEQ ID NO: 88462 - DNA, 231 bp, Glycine max
atagggagttaggtgcagttgatggtggcgatgttgttgtgcatgatttgcgaaagaagttattagcagatttggagaagttgtttcctcctccgatttcggtgcctgaaggaaggctggagcatttggtagaaaatactgttatgtcttgggttgattcgtgtatgtatcatagttcgtcgagtccaatttcactttatgaggatcatcattgcagcagggatcagattc

SEQ ID NO: 88463 - DNA, 234 bp, Glycine max
gttgcattaccatttactactttctttctctcttctcaacacacccaaaacaaaacaaaaccaccccaaccccttccactcgcattcttcagccacacacggaatgggtgacatgtaccactttgacaagaacctctcttcgcaagacgaaatctcactttttctgcgtcagattctgctccgttcatcaccaccttcttcttcttcatcttcccgccccatgcctactgtatc

SEQ ID NO: 88464 - DNA, 269 bp, Glycine max
atggaggggagaatgggactcttgtttcttgttgtattgggtgctgcatgggcttgttatgctagagaactggctaaccctgatctattaagcaaactaagcagaaaaccagatgcgtgtgcactttgtgaagaatattctactaaggtacttgattatctgaatgaaaacaagacccagcaagagatcattgacatcctgctcaacacttgccaccaaacttcctcttttaagcagaagtgcattactttggtggactattatgctcc

SEQ ID NO: 88465 - DNA, 272 bp, Glycine max
cttttccatttttcaccaaacatttatttcgtgcacacatctttcacgttggtgtattgagttgaagttctattaagatgaggcctggtgaaaagttatatggttttcatgaggaaccaaagaagcgtgatcatcaatggtccacgtccttcctctttggtgatcaacaaagattctcacatgatacgcaaagaaaccaaactccaaaggccacagaggattaatcccatcatcatttacaccgaatctcccaaggttatccacaccaaggc

SEQ ID NO: 88466 - DNA, 264 bp, Glycine max
gttgatcctacgctaaacggaaccttctagaacccaaagtttttctctcagttcttcgtcaatcaagtcaacccccctttcaatttcaaccctatctctgctctctttttcttcatcatttgtttttgggtctctctgtttccaagtttttgagttatggcatcgaaacgcatcgtgaaggagctcaaggatttgcagaaggaccctcctacatcctgcagcgcagaaaattgcagacaaacgcggccattactcgaaatcacg

SEQ ID NO: 88467 - DNA, 267 bp, Glycine max
gtttaaaccgtgtgggaaatgctttagcaggctcttcaaacttagctttgatgacatcagctgtctctcttcggaggccacctggaacagttgtccctgcacatgtcagaggtgagttgaatacagccattattggtcttggtgatgatggaggatatgggggtggttgggttcctcttgttgctcttaagaaggttttgagaggtattctaaagtatcttggagtgtaatggctttttgcccagttacctgaacttttgaaagaga

SEQ ID NO: 88468 - DNA, 263 bp, Glycine max
aaaccaagccgtctcttcatttccgatagaagccattaataggcttctatcttcttgttcttcttcccttaacaccaatctcaagcccttttctcttctccctcgatttgactccgtcagattcaaccctttctacatcaacgcgctgttccttcacctcaatttcatccaagcatgaaaccccacctccattatcgtcttctcctccaaaaaccctaccacccctttccccctctccactcattcattttcatgcctccgtg

SEQ ID NO: 88469 - DNA, 262 bp, Glycine max
catcttcgttgtgagaactttcgctggttggagttctcgttacctctagtgtaagtacgagtctattctgcctttggggactcagttcgctgattgggtattcttgggaacctctttgatgcatttcttgagcgattctgatgagatcttctcgagaccttaccacagaatcttacccttttgcctatatgctggcttcatctgggtaccttctcaccatgctcggtgactgtgttatcacttatgtcacgagcaatatcaa

SEQ ID NO: 88470 - DNA, 270 bp, Glycine max
aatttaagaattctttatcagcaaaggcgacacccccaactgatgaatctgaagacgttagtaatgaggaattgtcagactggaaaggtgttagtttaaagtttgccccacagactggcaaggaccgcatgtctcgcaatgaagacccaaacgactatgttgtgcatgaccctcttctggagaaggggaaagagaagttcaataggatgatagccaaacaaaagagacgagaacgagagtgggctgggagttcccttacttgaccttaca

SEQ ID NO: 88471 - DNA, 275 bp, Glycine max
gttaaaagcttatcttggtttatctggaggatacaacttactggatttagtggatcacttccaaaatcgtggcttggatcgttcgattttcttaagcataatggaaggtgaaaattctttgaaggaattttctcctgaaatcaaaattcaagatccatgcctcaaatcttccattcctcactttccccctgtatatctggtccatggaactgcagattattccataccatcagttgccagtgagcggtttgcggaagtcttaagaaggcaggggt

SEQ ID NO: 88472 - DNA, 267 bp, Glycine max
gtgaaccaagtgtaggtgttataagtccagctctttcacgagctttatgatccaatacctccaacttgaaaagaagactctcaaacctatccaccaaataaattaaatgaaaaccagaagataaagatagcagcatgtatgatgcagatcttatattatcagtacaggatgatatgaaaagtgacacaaccaaaagcataattaaataaaggatacacaaaccaatcagaaaaaaaaacttgctggagcaacacaaggctttcaagt

SEQ ID NO: 88473 - DNA, 259 bp, Glycine max
ggcaggttaatatcatggacaaacaattcagagaggcatattcaagttctgcaaagcattggtataaatataatggtttttctgaagttaaatgacataattagttggaagaaaagcaatactaacaatgtcatgatgcattgcagggattgacccgggctccaagcatgcaactgaacaaagtgagggactggaacatgagataaagcaagtgagagaatctctcatctctgcttatgagaagaatatagctacaagg

SEQ ID NO: 88474 - DNA, 116 bp, Glycine max
gcttagcgaaaatgtcatatgtttagaactttgccggattttatatagaacttgaatttgagtaatgagtactacattttgtttggacatgttatggttattagtggtggttgcat

SEQ ID NO: 88475 - DNA, 250 bp, Glycine max
cctcgagccgctcgagccgctcgagccgcttttgggcagagcaagagagattccgctgcagtactcaggttaccgagttgggctgacggcttcctgggcagtgcgatgatcatcaatgttctaacaacgctacctgcacaacggtcgacagggttgggttccggtgccagtgtatcgaaggtttcaccggagacggcttcaaaaacggcatcggttgccggaaagcttcggcttcaagttgcagtgcttc

SEQ ID NO: 88476 - DNA, 257 bp, Glycine max
ctctctctctccaaacaaacctgcccgattccacttatcatctcttctcacgctttctgtttcaaagagttcagtccaacagcacaaattctttgaaatgggaacttgacttctttggcacattccatgcgtatatgatcaaaagggtatcgacaaattaagcgatggggggcgtttgttctaggaagagagatcagcatgttgtagaacatgatttacacagaggagtctcgggggaggtattgtagaagtggcag

SEQ ID NO: 88477 - DNA, 267 bp, Glycine max
tcggattcggtcagcaaagagcttgtctttctgcgattgctctccttctttagaggacgttttggaggttgcagaaggtctttctcattcctctgtatctggtgctctgttgaaagtattattgatgggtttgaatggcttaggaaagcattagaggggatttctggacctcgcagttctagaagatgtaagttgactgacatacaagatattcttaccgattatcagactattaatatgacctttacagcagtaaaatgtcaactt

SEQ ID NO: 88478 - DNA, 255 bp, Glycine max
gaaaaatagagaatgaagatgacagaagaaaaaaatattatgattgatttgtaaagtgtgtgttacaaagtatttatattctcagatacaagctactactaaacaagatacaactaactagttataatctcaacaccctccctcaagcttatcatggtagatgttgatcatgctaagcttggagacaaaatcatgaaatttgggtggtgccaatgctttggtgagaaaatctgccacttgatcacttgttgaaac

SEQ ID NO: 88479 - DNA, 255 bp, Glycine max
caggttccgattctcttctcgcgattttgcaatgatctgcacaatttttaatttcttgagacagtttctctaaaaaaattgattttttatgtatgaggttgcaaattgctgcagtacttgttccctgaaacccaaaccagtatccacaataaactatagagttccttcgctcacacaatattcgcccttttcaatttgaaattgaggggaagacgcacaaccttcccttgactagaagaacctcaatcttcaaca

SEQ ID NO: 88480 - DNA, 249 bp, Glycine max
atggggataacagggaaatggcaatgcccacagaaacgtaaacctgatgttggacctgctatgaaacaacttaggctcgatcgctgggttcgtagagtttgagttgagagaatattttttacttgtaatagtgttgtaacgcagatcaaatctcttgatcactggatagaaacattttaattgcattgtgtgtgatttccattctattattctagtttattattgaattccttgaaaggaaaggaaaat

SEQ ID NO: 88481 - DNA, 248 bp, Glycine max
cctctcacgcttcctccacctgcttcgcaccttcttcgtcgttttgcgtcaccgaaggttgtcgtttttcaggctgttcaacaactccgtccttttaatcatgcgtttctgtggctcgagttttcgcagtcgcttcaggtgctggcgattcttttttacacggcggtttattccgtcgtatactcgttttggctctggacggaaatcgggttgcctaccaaaacgccgttagcgttgtcgttcaccgc

SEQ ID NO: 88482 - DNA, 250 bp, Glycine max
cctatatcaaattaaaaggtaagtgacaactcagaagcatataccatatgaaccatatagccagacctagctatttgaagataaaaaggagttgtaacggcatagtctcactattgtaatggtcatcttcaatgttcttattttagttcatcaccataaatatattattgcctgtcctcagtgagaggtttgtgttagtaatgttattgtcatcatcgttagcaaaattaaatttctctccctttttggc

SEQ ID NO: 88483 - DNA, 240 bp, Glycine max
gctgggtttcttttggtcatgatcactgtacagaaaagggtcaacttcactcagagtgagtttggtgtcagctctgctatggtgctctagctgctcctcctcccacttgctgttgtttctatggaggaatataaggtctggcagagtaaaaggctcgctttggttgacccctccccggtgaaaatagtaaccgatcagggtgaaaaggtgaaacgaatgagactactaatgttagcagca

SEQ ID NO: 88484 - DNA, 249 bp, Glycine max
gtctcctccaactccttgacgctatctgcagcagaatcgttcattaattcattcattcgacaaaaccttgagcaattgacgatgatgcagatcagctccaccgtaccagcccacaaccttcacaagttccaagcaataaggtgccccagcttcagcttcagatgccaacaagcttcctcttccacctttcagaagcccttcatctccaccgagtcaactcgcttgcacctcgccaacctccacaaatcc

SEQ ID NO: 88485 - DNA, 246 bp, Glycine max
gcaatagtaccattttattgcaatcttgaggttcatattagtttttagttcgttctcaatggccagtgctagaggtactacaagggttggagtaagaacaagggcacgaactccagttgtggaagagatagtacctaattctggatggacagaggactctgcgggccattaccttctagtggatcttcccgatttcaggaaggaggagatgaagctccaggttaatagctatggccgtattgttgt

SEQ ID NO: 88486 - DNA, 245 bp, Glycine max
gtgtgctgcaaaccgaagaaataaaaaaccaaacccaaaccgcttcatgtagattctgcgttcccaactcgttctcccgactcaaccctgactcgcccgattccaaactcaaactcgcgctcatggcgaataacccttccgacgctcccgccgacgacttcctcgaacaaattctcggcctcccgaccttcgcttccgccgactccggcctctccgccgccgatgtcggcctcgccggtgcggcc

SEQ ID NO: 88487 - DNA, 238 bp, Glycine max
gtctatcatttatcagttatcacaaattaagcaaattaagtcttttgacatggcctccaacagctgcttcatcttgggttttttcattgctatttccttctcaagcatggatattggcctagcagctcgctatctgatgcaaactactgtaccaaatttgcctaaaccaacattgccacctttgccttcacttccaacattgcctacgatcccatcactgcctcagggtaatgttcca

SEQ ID NO: 88488 - DNA, 241 bp, Glycine max
agagatatgcttggacaagctatcaatcagagaactgcatgaactgtttaaggtaacgtttggtcgggatactactgtgaaagccaaacagtggctgaaaaggcggcttgctctgagtttcagcagctcatgcgatggttcaactagccattacattcatatcgctaacaaggtcgttagcagctttgaagacgacagttctggcaatatgaatgctggatctttaatctcttcggaaaat

SEQ ID NO: 88489 - DNA, 223 bp, Glycine max
ggataagggcagccctcagtattaggatttaacgttgtgagtaaccggatcatgatgggtgagatccagagtgtagaagattaatttaattgaagttgttactgtagatgtacatataatttggtcgggactttgtaaatggttttttacgtttttaagcgttgtgttcttttgttcagacagaaacattagcagcgtttattggatctgcttaaccaatttg

SEQ ID NO: 88490 - DNA, 176 bp, Glycine max
acttctacaccaggtacttccacttccaaatttgtcacagccacaggagagactatatatgtaactgctgaagctgaacacagaaacagtggaactagctcttctaagagtagcaagacaatgatgcatcatcagccatcatttgttgaagcacctagggagataccatacaagga

SEQ ID NO: 88491 - DNA, 138 bp, Glycine max
agatcgcagagtggtttttgaacagaaagaagggttacaaggatggcaggtactgtgcgggttgtgtgtagtgctcttgatatgaagctcagcgagatgttgagagactcaggaagatcagaaaccagcgtggtttga

SEQ ID NO: 88492 - DNA, 265 bp, Glycine max
gagaggaaagtgatagaggaagcgagtgaaatgggtaaaaagtttgagggttgggagtgtagtttgcagtgcagtgggaacctttcgcctcaggcacactatccgatgaggaggttggaagaagaaggaagagattcagagggcaagaaagtggttttgagcgttatgggaatgagttgcgctgcttgtgccggatccattgagaaagccatcaaacgcttacctgggattcgagaggccgttgttgatgtcttgaaccataaag

SEQ ID NO: 88493 - DNA, 234 bp, Glycine max
gtgccaaagaaatcgaagaagtgagcagcatatcctggaattcaaaggaccttgaatctttaatagctctgcaaaatctttagtctgctaaagtagttgtgacgaatctctttttgttggtttagactttgtagtgtgcatgtataagaacttcatatcttgaatacttttaattatatattttgtttgtcggtgtttaaaaaaaaaaaaacaagaaaaaaaagggggcccccg

SEQ ID NO: 88494 - DNA, 251 bp, Glycine max
gtataaacgaatccaaaactcaaataagaaagtagacaacattagaagtgaaaggcaaaataagaatgatgagttccaaagaaaatgaggaggatgacacttacctctcagctttgacactatgtttcagccgaatttttccggcaatcttgaacgctgctgttgatctgaatttgtttgatatcatagacaaggcagagagttcaactttgtcaggcctctgagattgcttctttgcttccaaattcaca

SEQ ID NO: 88495 - DNA, 252 bp, Glycine max
gcctgatcaatctgtatcaagtaagattgttcgacgcatgacaattgcaaccgatgattttagtggaagtataggaagctcacccattcggtcaattcttatcatgacaggaaagtatgaaaaattatctcaagcacaatcagcttttgaacaccttaaggcagctctgtcatcagctccggtactcaccataccaaattttcagttccccattcacggtggagacggacgcctcgacgtcggaatgggtgc

SEQ ID NO: 88496 - DNA, 257 bp, Glycine max
gtcaaacccttcatcttcgccaagcgcttcccaattccgttgcttttttcttttccattttctccgcaacaacaacgttttctcttctccactcacaatcgcccgcgaaccgacgcgcgttaactcaacaaccggtaaattcggagtttacaccgtgcttaaggttccaaaatccaaccaatcaaatagctcctttttccggttgcttctgatgatgcggaacaatgtggcaaaacttgcttcggaacacttgaaat

SEQ ID NO: 88497 - DNA, 252 bp, Glycine max
gggtatacaaagaaagtagttttacagaatcaggttggatatttactctctatgtagtgttaagactagatgaacctttagtcttgctttagtcctcagtgtaacttcctttctagaaaatctgagggaaaaggggaggaggagtgtttgaaagagaagatatgcacacttggatatgatatgaaccatgaaggatggtgttttcatgagaaattcctctgttttggtgatgtgttcaggcaagatattgtt

SEQ ID NO: 88498 - DNA, 249 bp, Glycine max
  unsure (1)..(249): unsure at all n locations
ttcaataattactaaaaacggacaacgantattctttttgtttgggccacgctngagcangtaaggaatagacatgggacgcttgcggttgaacagaactgacttaagcggcgaaccagaacgcagaatcggccgcagaaattgccaccagaatcacntcnaagacgggtataagcaaacacaaaatgccatccagcacttctcttttcaatccccaactcaaatctgtgagaaaaatctcaatttcta

SEQ ID NO: 88499 - DNA, 206 bp, Glycine max
gagcgattcggctcgagtgagcgttgctttgttaataaattggaagataatactagttgtacagcttctgatgaggttagaaaagagatatcacttttcaaacatcgtggcaaccagaaaatacaagacaatggagagcctaggagaagaaagagaatcgatcatcatcaagaaaattgcatttcaatgcctagtaaatttccaaa

SEQ ID NO: 88500 - DNA, 249 bp, Glycine max
gtttcaacaccaagggaatcatggagtattggttggagagtgctaatttggatgagattcgccaggagactggggtgcaagacccttatattggtgaactgaaaatgcttaaaattgaaatggcccagatgaagaaagacatgcaagagctcattgccaagaagcaagaaaaaagtgaaatgtgcttgatggaggagacacagaaaagttttgtgaattggaaagctatgactgagcacgtgtaactga

SEQ ID NO: 88501 - DNA, 264 bp, Glycine max
gagtaccaaaaagtggttatccagattggagttctacttatggaccacatggatatgatcctagatttcctgttctatcaagtggatacacaccacctggcagaatgacttcttcggaatggctgcgttggtacagagaaaattacaaacctgaaaggactaacaattacatgcagcccactcatttgaatagtcctggtcctggtaatcatgtgaacgttccctatcatgatacttacaggtttggtcaatttgatagatgga

SEQ ID NO: 88502 - DNA, 266 bp, Glycine max
gtagaagcataaacctagcaagaagagatagaagccagaatctgatcttgggattttgaggaaagatcaaatacaatctgatcatatatcagctattaatgattcagagccaaagaagaagagaaagagaaagagaaagaagaaaatcgaggaatcaaacgagcagccccaggttgaggtatgccctaaatccttagtagactcggttatcccaattgttgcacaaaaggaaaatgctgaaaccaccacagagaattctaacccaa

SEQ ID NO: 88503 - DNA, 245 bp, Glycine max
gttggatagtaggttcatggcctttgatttggaatcttgtattgattacttcaatatggaccgcttattcagtcaatgtacccttcttgagatggaagaaaaacccaatactcgcggcaatgtgcatggtttcatcttgggcatttgtattgccaattacatgttgttcttcacatgcagacttttgtgttgatgaggccaattgtctttccaagatcacttattttggctattgtaatcatgaa

SEQ ID NO: 88504 - DNA, 248 bp, Glycine max
agaattgaatgggtggaaagtgaaagagtaagacacaaagtgtaacttgagtgattagatctgatgagtgcagaaagaagggaggattgttggtgatcgatcatcgatcatcgatcatcgatcatcgatggcgtctgctagccttggaagtggtggggtgggcagttccaggtctgttaatggtggcttcaggggttcagatgcttgagatgtctttgagagaccacgaggacgttagagatagtgag

SEQ ID NO: 88505 - DNA, 251 bp, Glycine max
gttattttcatatattttgatatttcttcttccgttagggttggagtttgcgtgcgtttttgtttatattgtattgaattgcattgtatcccttggacgctaagattggattgggattgggtgttgttgagtcaaaatctgttaacctcacccagacggtgacgcagatgcagactctgggtttgttggtcgctcctgttctcggtttctaccagaggttccttcgtttctctctccgcttccttcttctc

SEQ ID NO: 88506 - DNA, 251 bp, Glycine max
gtaaccttcatggactacttaataggaacattggaaagacaactaaagctacttcatagtttaggagcaagacaactggtggtttttgggttgggtccaatgggttgcattcctcttcaaagggtgctgactacaactgggaattgtcgagaaaaggcaaacaagctggctctttccttcaacaaagctgcaagcaagttaattgatgacttggcggagaattttcctgactcaagctataaatttggaga

SEQ ID NO: 88507 - DNA, 238 bp, Glycine max
cgtagaagcaagtttactttttcctgactattcatcaatctcaggacaattggctaaattctgagaatgatcacaacgaatccctggcaaactgcgacaacctggacaatactattctacttcaagaatctgtcctcttcactaaattacatttggataacatcggctgatgttcctcatccaacgaacctacactttgcaagaaaattggtgtacttggatacaatggacatagctc

SEQ ID NO: 88508 - DNA, 247 bp, Glycine max
gggcattgaaaactgattacagattcaccaaccaaagctatgaatgccattaaaagacaagggaagcacagagaacaaacacacttgtaactaggagaaagataagaacattattttattcaacaacaaagaagggacctccggacttacatgcgggtatcttaatcagacaagcacaaggactcggttgaatcaattaggacacaagtatgagcttctctcacagcaatttatggtccattttcca

SEQ ID NO: 88509 - DNA, 254 bp, Glycine max
ttccaacataactgatatttcacaggttggctgtgtaccttgtccttttataatactctaaccttattctaatgtttaagaagtggaaacttgttcagttatcaaatttatggcattgtcactgaaattttgtagtctttgtttgtggaatagttgatccgttgcatcatgcacatggttttatgcattttttatggacttgtacatgtcacttagaactggaaaaaaatgtgtttgttgagcctgacttatgc

SEQ ID NO: 88510 - DNA, 251 bp, Glycine max
ggaaggaggaggctgcggatgatttgttcagggaatacatgaatttggacaactttgataatctgaactttcctggcatggaagataaggacttggatagcaggaccagtggttccaagacagttgagagcagcgataatgaagttgagagtcatgtcaatgggaaggcgagtggggctcagggggcaagttcaagctgctcggaggaaaggagggaaggagtcaagaggagttcaaatggggaggttgca

SEQ ID NO: 88511 - DNA, 248 bp, Glycine max
ttgggataggacggttcttcttcggtacgagaggaggattttctcgcacccaaaaccagcatgtgacatcgacaagggctcttcgttgaatttgtttctgcggtaagttcctttcattgtgctgttcgtcgtcaatattatacgagggcggtgatgtgttctcgtcatgccaaatcgcttccagatccttcttttaattctctgaattttcaattatatttttacttaacaattcctctcaagtctca

SEQ ID NO: 88512 - DNA, 243 bp, Glycine max
gttaactcaataccctgacaaagtggtttttaaatgcagtatggtgttacaataatacccgtggtaggagtactgtccgacaaagatgcattttctccaattttaaattcaactgaagttgaagcaatatttgatgttccattggagatgttcctcaaggtttatgctagtgttcctcttctcacttaaaaatttgtaaacttattttttttccctggtggaaatgttggtgccctttttgac

SEQ ID NO: 88513 - DNA, 249 bp, Glycine max
tataaacactattatttatattggttgttcgtcaattccagttcaaaaatttctatagaaaaatttgttgctagtatttttatatgcgtatctacatatctatctatatctatctagatatagataggataagactcaatttattgatcattacgtacaattctattaagatattgtatagaagtgtgatttattcgatttttttatttcagaataaaaaaagattttgaactagataagttcaaatca

SEQ ID NO: 88514 - DNA, 126 bp, Glycine max
ccatacacaacacagatgatgcaaacaccacactgcgaagcgagatgcgagtccagaggctaaccctagacctaaaccccacggcgttggtcgcggcgaatcagtcggagatggcaacgtgcgctc

SEQ ID NO: 88515 - DNA, 262 bp, Glycine max
ctcaattactacatcgtattctgcaaattcaaactgggtcttggttttctgaaagatgggaggtggcaaggacaagcaccatgatgaatctgacaaaggaattttttcacagcttgctcatggggtagctggtgcagcacatggtggacatgggtacccacctggggcttacccaccaccacctggggcataccctccgcaccaagggtaccctccacaacatgggtatcctccggctgggtaccctccacatcaaggttac

SEQ ID NO: 88516 - DNA, 258 bp, Glycine max
ccctaatcttaatctcaaacaccaccatgcaatgcccccttcgctcgctcaaaaccatacatagatagcctttttgattcagaaagctacgatgtccgttgaagccagacgacttgccgttttgtgcgcccacctcaacccgacccgcttactaccggaccctccctctagtccacgggtttctcttacgggttcggcctgtgcttctgattctgatacccaaaaccacactttgcaaaacgattgcgttttctgcaa

SEQ ID NO: 88517 - DNA, 262 bp, Glycine max
tattaactcaatcctctgaggcgaatatatatcgtgtactcatcagagcctttcattcccaggggggaggaaaaagttaataaaaatgggttttcatgtccagaagtaatattaagcggcaaacagaagaagtagatcaacacgagaaaaacaaaggaagttaaagatgggttttctggaactattggaggtggcttctttgccagttattcaagtcctacttatcagtgcattaggagctttgatggcaactcagtatttc

SEQ ID NO: 88518 - DNA, 266 bp, Glycine max
gtaagttgtaataaacatacatttctctgtaagttcctaaacaagaatttcagaaaatggaaataaatgtctaaactgagagtttgattgaggaatatccctttgttatgaaaggggtggaagaatacttggaagattttgtatgtttattagggcatgccctatataactgcaaaattcaaaatggttgttgaaatgttttaggttgagaatatattagtcattggtcatagtagctgcgctggaattgaagctttgatgaatat

SEQ ID NO: 88519 - DNA, 264 bp, Glycine max
cctgttggttctttttctctccgtaccttgctcctctgttttttcccaactaattccaagccaaaaccgttcggatttttcttgaccatgttgaacaacaattgtagtagcagtttattgttcagaggacccggtttagccttttcccactccattgccaccacttgcaacaagaggaacacatgctggaaggctccacaagcagctgtaagaaatgatttttgcctcccaatgagcagctccgcggtaaaaaataggacatca

SEQ ID NO: 88520 - DNA, 259 bp, Glycine max
ctcttttgtgagatacctccccctgaagggggagagaccccttatgttccaagcttcaaagtgacagaaaagatgatggaggagttcccagaagaggtgaaggaaatacgaagagaaagggttaaagtatacatttacagctcctagtgctaataacgtctcctccatgagaggtagagggtgggaagatacctttgggaccgaagatcgcaaagaagccgagaaaagggcaaatgctctaggaatggacgtggagtgg

SEQ ID NO: 88521 - DNA, 262 bp, Glycine max
gtcttggttcatattgcatgctggattgttagtacatggcacagtatgtgacatcttgcagtggattttgtttccttcactttctccttgctagtacctggcacacagtatacagaagaggggtctcaattttaccccgctttgttgtacaataggctttttcacgagctcatattttctgtgtattttcgatacggattctatgttaattgttgaggtaatccgtatagattgaatttgtacgtgcattaagcttttgcct

SEQ ID NO: 88522 - DNA, 186 bp, Glycine max
gggaaactaacagcaatcaaatatgttcgccaggttatgtagactatgtgacaatgcagcattatttgaagtagccagaatatcgggcaaatccaaataatgctgcattgtcacatagtctacataacctgggaaactaacagcattatttggatttgcccgatattctggctatttcatttgctt

SEQ ID NO: 88523 - DNA, 267 bp, Glycine max
tgctgttttactggattgaagatctgaagaaattgattgtgtttcattggtttgcagcacgatgagatttccgtgtccgattgaaagattaaacggtggatttaaacggctaactgcataagatataactaatttctactttgagtttcctctattattttaatttccctggacttgatcacgaaacatacggatttaattgtgaacctatttttctacagcgtagtgttcggaatagtttcgcgtaataacgttctgtgtagagca

SEQ ID NO: 88524 - DNA, 279 bp, Glycine max
ttcggctcgagaattcatggctttttaggtttttggtgattctcaatccacgcactgtctgaaccatacgtatactctgttagtctttaactgtaactgaagctgctttgtgtgtgtatggttcgttgtgctgttttttttattcgaatttgacaatttgtgttttcccttaaaatccttaatgtagaaacctgatttgggtttttgttgagagacactatttgataatctcaattttttcatattctgataggtcttttgctacttgtttaattatag

SEQ ID NO: 88525 - DNA, 264 bp, Glycine max
atttaattcatgttcttggcattgatacataaagtaatttatcgcggacaaaaaaaaacaaaataatttaggctaaaatatacaaatagttaattaacttaattttggttctaacttgatccataactaatcattttgaaaaactgtttgttatgaatttttaggcacaattttgaatatttttttattgattcaagatgtgaaatttatcttattagattcatttatgaaagtcaattaatattcgaacaaaaagaaacataa

SEQ ID NO: 88526 - DNA, 257 bp, Glycine max
ttgttttgtaaaactagagagagatcaggtttgatttttttcactaacgaggtcaactgaacactcaaagtcttgcaacttgggagtatagttcaaatcacgcgatgttcaattaattgttgtgtttttctatctgtgtttgctctttctcttagactgaaataccagatcatttgttcttaagataagccactgacatctcctcaaccctatcttgctgatcctctattttcattttttttttccagttgggtacc

SEQ ID NO: 88527 - DNA, 266 bp, Glycine max
gctttgcttcatatctggtctcttactttctgcatactttcaagcatcttttcccatctctttctctctcactgatttgaaattttgagtaaccatggccttctgtggtggtactttcgttaagccaaactattctgcgtccccatgttacaaatatacagctctaagtccataccatggctgcagaaacaagttctgtgtgagagtttcagcaagtggctcagctgatgaggaaaggactattataaagaaagagaaagatgggt

SEQ ID NO: 88528 - DNA, 258 bp, Glycine max
gacgaagaacctgatgatggagctgtgcctttacaccatgaagacagtgttaaaaacagatatgttccatctgttgctgctctatcaataatccgtccatcaataggagggcagcagacaattgcagatagagccaaagtcgcaatgcagggttatttgaatcgattcttgggaaacctggatattgtgaattctcaagaggtctgcaggtttttggaagtctccaggctatcctttttacaggagtatggtcccaaa

SEQ ID NO: 88529 - DNA, 258 bp, Glycine max
ggaacacttaatatttttgtggtagagcagaaaagagaaaatacatgctactttttcacctccacagagattgattcacattccatataaagttttcgtcttgttcatgagcttgcttatctatggcggaaacacgctgcttaatgttaaattcgtggtgattttattgctgcttattagcactctgtatctgatcggttgaagggagaagaagaaaaggactttcttctgtagaattctttctcttctaatttgtag

SEQ ID NO: 88530 - DNA, 258 bp, Glycine max
tccatcaacaaaaatgatgcctctaagctcattatttcctgttcttgtaattgctcttgtatcttcatttacatcttcagcagttaacactaattatgaaaacttcattcaatgtctttacagttattcccacaactcctcttcaatctctaaggttgtgtacaccaaaaccaacgcctcgtactcatccatacttcacttttccattcaaaacctcagattctcatccaacacaactccaaaaccccttgtcattgt

SEQ ID NO: 88531 - DNA, 254 bp, Glycine max
taacttgcttacatcctcgagtaaaggaacatctgcaaacaatgattctatgctgatcaaagaaaacaaggagtcaagatctgatgaaattgttaaggatgcagatgaaaaaaatgagtctggaaaggtttcaggtgtttctaagcctgaaatttccagcagaaacaacttatcaattcctaagagaacagaagaagatgatttgcagggaacagtttttatatgtaatcttccctttgaatgtgataacgaag

SEQ ID NO: 88532 - DNA, 247 bp, Glycine max
gcgaaaacccattattcttgttattaacagagtcacaaagaatcaaacttttctgttctctatagtaacgttctggtaatgaccatttctgtttctctcatatgttgttttctacttttacttttgatcatacacatttcaagccctgctgatatatttaaataaaacaaagagcaaaaaacaaaattttcagttagaatggattgtgggttttctcctttctttttttttttttttgtttccattt

SEQ ID NO: 88533 - DNA, 257 bp, Glycine max
accgccacctcctcttcgttcgcagggaccatggcgaaaaacaggaacaacaagaagaagagaaacggtgtcgtttcaatggataccaccgacgcatccgtttcggaacaatctcaagcaatggatacatcagagtcaggagttctaaacacggcttctggtgctaccaatatgaagatgaagcagaaaggaaggcctatgaagagatcaaaaaatgtccgaaagatgaaagcaatagcaaaggctttatccgctaa

SEQ ID NO: 88534 - DNA, 257 bp, Glycine max
aatagccaatgcataaatcaaactaataattaagagaacttcaacaagcacaaacaagttttctgttttccccaccaggttctcatgggcacggcggcatgggagcaatgctcaccgggggtgctgccgcggctgctgctgcttatggtgctcaccatgtctctcatggctcccatggctcctatggccgatatgctgcacatggtgctcacatgccccatggaaaattcaagcagcatggaaagcacggcaagttc

SEQ ID NO: 88535 - DNA, 253 bp, Glycine max
atagttttctaattacaaatattacaatggaagaaacaacgaggtcgaccctgagttagtaataataataaaatgaggtcagtgttacttcagtatacatatctgcataacctaactaagctgaaatgtcaagcgctcaggatcgacctcgttgcttcttccattgtaatatttgtaattatatagttttctaatttttttaataataaatattgagagctttgctaaaaaaaaaaaaaaaaaagggggggcc

SEQ ID NO: 88536 - DNA, 248 bp, Glycine max
aaataatactctgctctacactatcaaaatgtgctaattggcaatattgttttgaataacttgtgagttggccttctagttgattgtatactgtgcatgaaatgttctttaactagtgtctttaaggtactcgttgctagaagaccttataaactattctcaagtgagaaatgctaataacactaatttgtccgataacagctcactttatgacagaatttaacactccgtttttaaatagcaggcaa

SEQ ID NO: 88537 - DNA, 244 bp, Glycine max
gtgcatagaggatgtaccttaatttggaggtcaaattttacgtataagataaacatatagtaattagtattaatttattatcaaacagtgcaactgtgcaagtggttacttcattgtattttttttttttcatttttctttttttaccttcttgctctttttccattatatctgttttttttttgggccaatgtgctcttgaattttctgtctttataatttggctgactgcgttttacaaaca

SEQ ID NO: 88538 - DNA, 245 bp, Glycine max
gcagcatccaaattggtaaaacctgggggagtattagtttacagtacatgctccatagatcctgaagagaatggcgacagggtagtggcatttcttgcaagacattcggatttccacattgatccagtagacagatatgttcctcctgattttgtgacaagcagtggtttctttttctccaacccagttaaacattcactagatggctcctttgcagctcgtttagtacgtgatttatagaatga

SEQ ID NO: 88539 - DNA, 247 bp, Glycine max
gagggcgtcgcacaccctggcgcggttcgaggagtttcgcaaggcaatgaaagcacgcgccaccgcggggctcgccgagggaaatgacgatgaggagaacacatggtgcatcgccgacgggaacgaggtcatgtggtttcattgcttgattcaatcaaatatctctgagaagtagttcttggagaggttaagggtttggaggaatgggaggttgttgttgtggtggtggtgatggtttatgacgagt

SEQ ID NO: 88540 - DNA, 234 bp, Glycine max
catcttgtctccatagcataatgctaatctgtcattctctatagtttcggtgggcgtttcagcatttggtgtgaggattatgttttttcacttatgcttacatattccgaaatatcatcctaacaacaaatgctgtgccatacccatcccattctggcaggttcttgaccgtggggcgaccattgcgctcttggcggataacacagagaaccttcgctctcaggctcaagattt

SEQ ID NO: 88541 - DNA, 239 bp, Glycine max
caaatgctaagaaagttccctttttatgatctctgagaaagaattggattcgaagttgtggtttttgcgcaaatgggtatcgatcaacgtcggtggcggtggtggaacgccgtcgtttttatcggaatggtcggcgttaccggttccaacagccaggagaagcagaaacaagtggtgtctcgaattgcctttggatcatgctccaaccagagcgatcctcagcccatttgggatgcagt

SEQ ID NO: 88542 - DNA, 238 bp, Glycine max
ccccaaaatcatgagcaacagaacctgaatcaattgggcttgctgcaaattgagttagaggaggtgaagaaggagaatcagaatttaaggtcaatgctaaatgagatctctgaacactacgctgctcttcagaatcagttattgttggcgatgcagcagaagaaactatcttcatcacctcgaaataatgaggacatgcagaaggacagccagcagaataacatggagaaaccagcgt

SEQ ID NO: 88543 - DNA, 124 bp, Glycine max
cgccgcgcagtgcactcgccaaatccctcaagggatccactcgctgcctgcgagatggggtcgacatccaccatgcgtcgcagccggcttttcgccaatcaggtcatgcgtattctgatggtgg

SEQ ID NO: 88544 - DNA, 232 bp, Glycine max
tgagctaggaaaaaaaattggcacattaaggtcagctgctaatattcaacagcatgttctaatagatcaatgactagttgtatgtttgtgatacttattagataaagtttttccccctaatgataatatggaaaatggcatttgtgaacatgaacattgtagagggaaatctaagtgaacatggctgttgaatattagcagctgcccttaatgtggagtatcttgagctagg

SEQ ID NO: 88545 - DNA, 259 bp, Glycine max
caggagcaacccctcttctctctttctttcttctttttcttcaacattgctaagttaaaataaaaataaaaagtcatcaaactaagcttctaacttctaagtcacagcaaagcagtggcgtgaattcccaggtgcccttcattctgtttggttttctctgttctttttgtttagcaagatacagttggtggtaggtgatgttcaactggaatgatcgtttcctacacaacatgcacttatgttatttgggcaaacacaa

SEQ ID NO: 88546 - DNA, 258 bp, Glycine max
ccaagttgaaatgcacaaccatttttgtgatccctattccccccttcctctctctcaaaaccccacaaaatgagcctcaaaaacatcaacttcctctaggcacattttttttagttcaagttgtattttattgttctcattctaacaaaagccctaatctcaaacccacaaaatgtgtctcaaaaacatgaactttctctagacactcaattttctttttcttttttggttcaagttgtgtttctattctcatagaaa

SEQ ID NO: 88547 - DNA, 259 bp, Glycine max
gggtgggttggtttgttcttgccaaggtttttgaaatgcagtcacaagatctatggtggacagttgatatcacacctaacataagtggtgttttagaataaccttgttttaatgtgaagtttgtacttctgataactgttttgtcctggagtctggatttgggcttactttcaaaatacactagcagggggtgagactccaattgctgcgtcaaagataagagtggtataacggactccttatcatactgaatgtggaa

SEQ ID NO: 88548 - DNA, 255 bp, Glycine max
gaattaaatgaaggttgttttaggaatgattgcattaaataggacaaaattagttagatttgcttatatttaagtctaaggtacaatacctcttttttgtttatatgagtccagagggagtacatgacataccatattcacattctctacctattgatattatataggccttgtacttatttaatgtctactatgagagacatacatatagtattatcatgttaaaatttgacatgagagttagaggacatattc

SEQ ID NO: 88549 - DNA, 253 bp, Glycine max
ttcttcttcgaaccccatcaagcaacacagtgggagacagcaccttcgccgcctcgccgacgcaattgaacattatcaaatccagcaaaaacaacacagaaaatctccagaaacaataacaaagacagaaaatcgccggcgcaacccagatctcggatccgctacccatcaccatcccaaaacccccaccacccacctcttaaaccaacaaccgcgccgccgcggccgtttcgatcttacaaggacgaagagg

SEQ ID NO: 88550 - DNA, 252 bp, Glycine max
ttttacttcccctatggctcgtcactccttgctcttagccctcctcctcttcgccgccgtgaccaccgccgcgatggcggtggccgcggtccgacgccgacgacatcctgaaccgtcaaggtgttcccgaagttttgtgaaccccaacagtgtccatcacattttcacagtcattccagcatagaagggtagaaattatacaagaagagaagttacgagcacaatggataatgaatgaatatgtggactcat

SEQ ID NO: 88551 - DNA, 252 bp, Glycine max
gaaggaatgcatgaccaccaagtttatgctgatccactgccaggcataacagagatgtcacaaaacagtcatctgttagatgaactttcctctgaaatgtacactgaagaggatagttgtgaccttaatggatcgcaatttccattcgtgcgaggtggttattcaacagagaatgaaagctcagagattcaattcatagatgattgtcctccttacacaacatgggagccagaaactggcattttatttggt

SEQ ID NO: 88552 - DNA, 246 bp, Glycine max
ttttttttttaattccgtaatttagttaacacttgctattttgtagttgtgaaatcaaatcgttgactatcttcttactgtggttaatggaaagtcgcttttgtttttgctttggccttaaacgtggatctgttgtttgcttaatcatgtatcttaatgagttaggtttgccattcttcctttttctcaaaggaatttgatggtttcctttggacaagttatatttgatcaaagtttatcaatgct

SEQ ID NO: 88553 - DNA, 258 bp, Glycine max
gtgtttgcactagtgtaattctgggcagaaatgatgacttaaccgaggaagagtccagtggtgacatgagctccagcacgtctcctgatgagggcaccattcctagtaaagaattcagaaaaagacagatcaaatttcagaccgtatcaatcagctgtctcttgaggacagtgtgagaaaatctacaaaaatgtgcttctattcatggagaatcatttgatgctgcaatgagcagtatgcatccatctgcatttgcac

SEQ ID NO: 88554 - DNA, 258 bp, Glycine max
tgcaatcaatcaattaagtcagctcgtattgtttgatccacaaaacgcatacacatcttttacctgttgttagatcttgtttgtatttattctctctatagctctagcggcgtaacatcttagaacaacttacataactaaactagcttgttttgcctttgcaatttgcaggtttctttcttttgttgaaatggtctatagtaattatagttctgccaatgaatctcattgtttaatcctgattatacctttcccgaa

SEQ ID NO: 88555 - DNA, 255 bp, Glycine max
gaagggtgcaacaatgaaaaggtggcagtaaatcctgttaaccagcaaggcctagcaacccaattgccattccataatcaaaaccaccttccactactccctcaatccagtccatggcctatgcaacctctgatagatcctccatgccccatcctcaaatgattggtatggctcaagctgattctgccatggtaaatggcctgtttcctcagcttgacattgatgaatggtgggcgtatggttcttcccaacctt

SEQ ID NO: 88556 - DNA, 250 bp, Glycine max
agcatccgtacatcaatggtgtgtgcatgagattcggaggaacccttctttggccttcgtatttgaataatccaaaaactgatagacccgacccgatccaaacttaactctatctggacctcgtcgaggaggggcaagttttgcaggaatatgttgaaatcaggctgattttatcttcggtagttattgtgctggactggacaggatgagaaggataaaagaatccgtgagctgtcacttgagttgtaca

SEQ ID NO: 88557 - DNA, 250 bp, Glycine max
ctcatagaagagaatctggtatccagcctggtcatcagtttgattacaacgcctccccacagactttagaagaattagagttggagtataagaacgaggcaacagagctaatgaaaattcgtgacaagaagaagatgaagaaaatttcaagcatcgtgaggctattagagatttgagggagaagtacatgagcaaagtttccttggtaagggtcacacatgcaaaacagttggaagaatttcttcagctt

SEQ ID NO: 88558 - DNA, 248 bp, Glycine max
gttgattggcttttgaatattaggcagaggcaaatcacataagggagtgccccaaacggtccaacgtcaactcaaaaagttagggctggctttggaggcccgtggcaaacgcgttccaatttcatgttattctcaaaagtgaaaagtatataaatatgaatgtgttctgaatagtcctttcttccttcctttcactctcaatccttttcgcctttgtctgcgaatggcgtcgttcgatcaggcacctc

SEQ ID NO: 88559 - DNA, 255 bp, Glycine max
atgccagaggctctcctatgaaaattgattctgttgttgctcctggcagtcttgcattagaaattttaccttcaggtcgtaagtactggtcagatcaccaaggggatttggtggaaactctccatctcgacatatgacttcaatcttgtctaatgaagcaggtgtgaactctgaggaagacaacccgactgcaaatggtggtatttcagctgatgattgtgttgacggtaccattgagcaggaatgtgatgagat

SEQ ID NO: 88560 - DNA, 256 bp, Glycine max
ttatgctgttgctgcttccattattagtatagagttgcagtgtttttcattccacttgctctattgattatccttgtgatatatatgctgtttatctctttagcagttaaagaacaatatttgagacaggtgactgaatccaatactttaacaactgaaggaccaggtgcctcttggagatgttcatggtttttgttttgcggtatgttcttttttgtatataggtggcggtggtggtgaaacttagtctgtaaaa

SEQ ID NO: 88561 - DNA, 258 bp, Glycine max
cgatttcttcgacggaaaactcgagaccgagaatgagaaaactgattctcatcatcttccagaggagtatactgaaactgagagggaagaggtcagtgtagtgagtggggggatcattacagtaccacgagttacctctgatgatgatggggtggagggggatgtggaatcgcgctccgagatcggaacccggtcgaatttcgggtcgtcggtgcgggcagagtcggtggttggcgttggcggtggcggtggcgcgaa

SEQ ID NO: 88562 - DNA, 255 bp, Glycine max
gggagacatcccgtcatcgtgctggactcgcatgcaacaccaagacaaagaggagtttcacggggagttgacaggagaagctacgatgttggggccaaaggagacagcgaggagatcgccggaaggaaacacacctcgcgacggcaactcaagcaaggtcgggccgttacccaaacaaggaagtgcgaagggggaggagagcgcgaaggagacgaacccacatgtcggagagacgcaggtgatggcggcaatccc

SEQ ID NO: 88563 - DNA, 251 bp, Glycine max
gcactgaatagttgaaggacatggctgagaggctacctgtaggagcatccaggaatgtcagatcgccaccctctcttgcttcctttgcttaaatcctggttccaatgaccttactaatgcttccttcgatcgattgaatatacaagcaacaagcccagaatcagactcaactggatccactaaccagatactttcaaatggatcaagcaccatcaccaaccggagtgcaggtcacattaaacacagtcaat

SEQ ID NO: 88564 - DNA, 236 bp, Glycine max
ctcttctctccctctttaaattctggatctggattttgagttctgatcctaactcttgaagctgaagaacctgaggctaattgaactctaacgtgccaaaaaaaattgagttgcatgttttgctgcttaaactttgttgaagacagaatttgcaatttctctttggaattttggtcttaatttttttaggccatctcggtcaccaaggtaattgtgaagataaaatgagtattgtg

SEQ ID NO: 88565 - DNA, 242 bp, Glycine max
atgatgaagagagagaagaaagcggtaaattttggctgctggcttatgcagctgaatgctgatgttggtggtgttcagttcagcgtattaaagggatcacggtctacccacttcagttcaacccttctgtccaactttccaacaacaacaacaactacaaagtactccaacttcgagctagaaaacagaagcttccaacctagatgccgggagcaacctaaggactaaggaggagttgaacg

SEQ ID NO: 88566 - DNA, 239 bp, Glycine max
aatcgggtgtgtctgaagcagaaagtaaaacaccacttaagatatgtgctgtcaaagctggaggaatgatgtctctagctattgataaccatgggaccctgtggatgtggggaaactgcccacgacaaacaaagaaggtgggttagcacttgtaagcagtttcactccaactccagtttgggattttcagggccacactgttgtcaaggttgcatgtggaaatgagcatgttgtagctc

SEQ ID NO: 88567 - DNA, 270 bp, Glycine max
cccgtagttaaatctgcgatccattagttaaagataaaaaaaaccctaagaagtttaaggcgggttcgaaaactcgctctgtccttggtcttttcctcacggtcaacattctcttctttgcccttgcctctgcctacgggacatgccctagccctaagccaaggcataatatgctcaagcctgtgaagccaagtccttcaggtggctcaggtggttcgggtggttcagcaggctctggtggttcaggtggctctggtggttcaggtggtt

SEQ ID NO: 88568 - DNA, 271 bp, Glycine max
ctcgagccgctcgagccgcagggacacgtgtacggttctgccggcttccatcaagtggcacgcggggcaccaaagggtgggcctgcttatcctgggcctggatccaatgccggtaggcccagataaatgagcctattattattagtagtaagttaaaaagaaaaatgtgatatagtggtgattagactgaactagtttcaacaaggtctaatttgattggtaaagaatgatgcatcacctcttcatctctattcgattattattgataaaa

SEQ ID NO: 88569 - DNA, 267 bp, Glycine max
taaaattaaaagaataaagcatcaagaaccattttcctaatcactgcaaaactacgtgcatgttagtaatatatatataccttccttttctctgcatcacagaaactaacccagtttcttcaccatggcagaagaagccattgatatgtcaccccgtctcaaaatctagaaagacggtcgcgtgattagactcagaggctgcgacgtcgttccgccgggtcacgatcccgcaacaaacgccatctccaaagacgtagtgatttccaa

SEQ ID NO: 88570 - DNA, 265 bp, Glycine max
cctgtttcaaggttaagggcagttgtttcaagtgtaagtgatgataaattctccataacaaactgcattaaggctctagatgagatagaaggcattgatcaacagctctatttttctgccctggatctctttgagaaccctagcttaagggagacattcatttccttgaaaagtgtcaagatacggttgacatggttacaaggaaaatgcagcaaaactcccttccattagaacagacttaaagccattttgaaatcaactgtaa

SEQ ID NO: 88571 - DNA, 267 bp, Glycine max
cctcgagccgattcggctcgaggtgaaaactcgcacgcctactcagaccgctagtcacgctcaccagtacttcctccgccgcaccaaccagaaccgccgtcgccggagatctagcctcttcgacatcaccgcggatacggtgatggaatcttctactataatggaagaagaacaagttccgcaagatacgatggcggcgcctatccccgccgcatatccgccttttcccggcgcgggttttccgatgagtctatctccggtggtgtt

SEQ ID NO: 88572 - DNA, 254 bp, Glycine max
gggagatatagatgcgcaggctaagttgttctcgagaatggtggatccggagaggcataggaaggttgttaacattgatgatccgaatgcacccttttttgtgtcgcaggggaaccgggaagttcctgttgtgacatttgcgatggagaataaggaggcagatgttcatcccttgaagtttgagctttctttgtttgagacgcaggtgttggttaatactcccacggggatactggagatttcgtccggtttgc

SEQ ID NO: 88573 - DNA, 255 bp, Glycine max
atttagaagaagaaaccttagatggagaaaacttagaagaagaatacttacaagaaggagaaaacaactcaggtggagaaaacttagatggagaaaacaacccagaaggagaaaatttagaagaagaaaccttagatggagaaaacttagaagaagaatacttacaagaaggagaaaacaactcaggtggagaaaacttagatggagaaaacaacccagaaggagaaaatttagaagaagaaaccttagatggag

SEQ ID NO: 88574 - DNA, 247 bp, Glycine max
caagaactcattggtgtgcaatgttcgcattgaattcagatgtattgttttatcaatcaatctgcagcagcagtctcaatggttggaatagttcatttcaattttaccttaacaacctttcttcagtaaaactaagcccccttgttttcctttttcttgtatatttttagtctttaggtgaagtcaaagcaattttattgcgaattggaagttcttgtaggagtaacattataaatatgttatatat

SEQ ID NO: 88575 - DNA, 246 bp, Glycine max
gagagatggcagcaactcttccttggaccttttgatgggattcttggcagcagcttgacatgtcaaagttgttcatctcagatctcgattaactttgaacattttgattgtttgcctctttcacctgtgcttagtgatacttccacaataagagttggttgtaccctggtggattgcctgaagcagttcattgttgctgaacatgttgaaaattatcactgcagccaatgttggcataatgccgca

SEQ ID NO: 88576 - DNA, 259 bp, Glycine max
attcaaggaagaggctgctatgcctgatggtgacattgcattactaaatcctgaagaagaatggccatcagacgatcctgaagatgatgattacaatccagagaggaaagaagacaaccacaactttgacacagaaggagctgatgaaaatgcatccaatgattcaaccagttgttccagtctgttgtctttgaatggcgaatgtcctccagtagatgaaggcatctgtcatgaatattattctgttaatagctgctta

SEQ ID NO: 88577 - DNA, 255 bp, Glycine max
aaaagtataagaagattgaaatcaaattgagccctaaagatctctcgtcggacgcggagagtttcactttcacccttcggttctcgttgaagggaaaagcactggatgtggctggtggagtgaagaagaagaaaaagaagaacaagagaaatcaggaacaacttctgcaagtcgccgaagatgaagtttcagcaggtggaaatacagaacaggccaaagatcctaatgatggagatataaatgatgtgagtgaat

SEQ ID NO: 88578 - DNA, 254 bp, Glycine max
aaggaagcgaaaatggaacaaatgggacgacacatattgctcaactccgtgctgtccctgcttacactcaattaattgaagaagtcaatccggtgaagatgaacagggctaataagtctataccagtagcacaggatactacttgttctggtagtcatggcaatgaggggaaaaaagaagctgcacattctactaaatcatttactggtgcttcacctgataattctaagaaacagtcttccaacaatggagtg

SEQ ID NO: 88579 - DNA, 248 bp, Glycine max
atttggtggcggactgttcttgaggttggagtattgatatggttagtggctacagctcttgttccttttcttgctggatatatgcctggcttattgttgtcaagggttttggttgggataggcgaaggtgtttcaccatctgctgctactgatctcattgccaggtcaataccattagaagagcgctcacgtgcagtagcattggtttttggtggtttgagtgttggaagtgttatggggcttctttt

SEQ ID NO: 88580 - DNA, 254 bp, Glycine max
atttttggttctattttcagattcctgaagacctccattttgtgcttagaatgcgacacacttttgaatcccttggctaccaatctggtttctacctctctcaactcttctcttcaacaaggaatacttcctcatcaacttctgttccttcaaaaccatccaccaatattccaattaggccacctcttccactcttcaactggggtcagagaccacttacttcagccacttccatgctatcctcacccaatttt

SEQ ID NO: 88581 - DNA, 254 bp, Glycine max
ccaccttaagcaggctgtcaaccatcggatatgatgtttgtgatctctgtggagccaaattttcagccgtgactgcgcctggatgcatcgtctgtggaatgggaagtatcaagagatcagatgcactagcaggagcaggaccagttccttctccgttcggttgagtctcaaagatgggtctctctctttacaacattagggtaacaaaggttatatatagcaaggattaagacccatctttgctatatataacc

SEQ ID NO: 88582 - DNA, 254 bp, Glycine max
aaaaagggtccctctttgttcactctctttgtgttttctttttctcagtttataactttttatccatcgacatcaaaacaaggactcttgggaaaacgcagagttatggacactgtcctttgaaactccaaacaaataaaacagctcatagtagtattatagtaaaagatagccttcaaagttcgctaacccatttcttcttttcgcataactcaattggaaattgcttcttccttattagttttgctttcatc

SEQ ID NO: 88583 - DNA, 127 bp, Glycine max
aacgcggtgtattgatcattttatgatatacataatggtgggatagctttctttgaacatttcccaactcttttaagtaattggaacacttttacacatgttcatatatatcatgtattcagtattc

SEQ ID NO: 88584 - DNA, 239 bp, Glycine max
aaagctttgtattctctgcgataattttccattgggtggaagatagtctcaacctttatgcgaaagagcaaggatctgagctgaggtgagtgatcatgtgtggtggtacgattatctccggcttcataccggcaggtcccgccagcggggcgcggtgcgtgactgccgacatcctgttgccgagttttaggaagcgcctctcgaagccgctgctggacgatgattacgaggctgggttc

SEQ ID NO: 88585 - DNA, 249 bp, Glycine max
gtcctccttggttttgcttcaattatggctttctcttctttcttttcccattctccattggcattgaagggttgtcaggatcacaacttgctagcagcgcctttacactgggaacaacagcagtgctaccattttacacactcatggttctagctccaaattctgagctaactaggaagtctatggaaagtagtgtaccatatgtagtgcttggcattctatatgcatatttgttgtaccactcttggg

SEQ ID NO: 88586 - DNA, 266 bp, Glycine max
ctgtaccaattgatactgtgaatgataaggagagaggtgacaccaaagatcatcctctaacccaatggttcatgaacttctctgaggctgatgagctcttaaaacttgcagcagctcgccagcaggtgcaagctcatattgttaagctgcgaagacaattaagtttggtggaaggactacctcagctgtctaaaccgccctctggttatgaatgcacatgatgcttatttttaaatcttttgggcttcccttttgggtcaaacttg

SEQ ID NO: 88587 - DNA, 263 bp, Glycine max
ctcgagccggaaaagaccatcaaagtttcacttcagccttatccggtttagggtttcggttattgaccctacctttgacgtatcgaaaccttaagtttcggatcaggtctgagcaatctggttggtagaacctttggtcttagagagtcaagttttatgtctgaattagacgatcaaattcctactgccttcgatccttttgctgatgcaaatgctgatgactcgggtgctgggtcaaaggagtatgtgcatattcgggtaca

SEQ ID NO: 88588 - DNA, 253 bp, Glycine max
ctggtggtattataactggcagccatagtgactagtacatagtggtagtacagatttggttgacagacctgacgaagcacgtcaaactctccgtcacctgactatacacagccactcctgtgcatgtatccgatgaagaagcgacagacatctcagctggcaaatgtcgtatactgataatctacggtgcagaactgtctctctactagaagaagatgtcagtgctcagcctttggaagcggcatgaccgtgt

SEQ ID NO: 88589 - DNA, 254 bp, Glycine max
cgaacaacagaaagacaatttattggaaagtgaagaagttggcaacaaggtggataagtctgttgaagaatcacaagttgagaaatctgaatctgttggtgacaggggtggtgttgatgaggcatcgaagtcaaaagcggatgatggtgtgagcaagaatgattcgacaagtgaatccgatgagaaggtggtaaaggatagggaggttggtgatgagaaaacttctggtaaaggtaatgagtctttcacggttg

SEQ ID NO: 88590 - DNA, 153 bp, Glycine max
ctgaagtattctcgtcctagcccaaagcatagagaaaggtagcaacagaactttgctgagtcagtgctgcggcgatgggaggaaaagtgatgtgtacctttatgtggtgttgttcttaattattcttagtaatggccattacttcgacccctt

SEQ ID NO: 88591 - DNA, 254 bp, Glycine max
cttgtttcttgttcttcttcttctctctgtcgtttgttctcttgatctttgatctctgtgttatatgttgtagcaaaagaagtaaacaacacacacatatataaatatttgtaagatatatatatatatatatatatgatcgtgggttctccacacgagctttgggacgacacgctggcgtgtccggcaccggacacgggtctggggaagctccgaatgtactatgcgctctccggcggaatctccgtcctgtc

SEQ ID NO: 88592 - DNA, 266 bp, Glycine max
  unsure (1)..(266): unsure at all n locations
cacaattatccaccccatcagacacaccccatccgctgccaccgccacgtcatcaccaccaccaccatcaccactttctgactcctctcctcgccgccaccgtctcaacatgctccctttctcctcctccttgctcctcttgctgccaccgcaccctgcacccnctaaacgcgctgaccacctgaccctgcctgtctccggaccaccagcctccccggccgctaccgcgctctccttgctcgcgtcctgccgccggtgccagccaa

SEQ ID NO: 88593 - DNA, 257 bp, Glycine max
atcggaaacagtgaaaataatacggtacttttgtaattaaaagtgaaaaaaaaaataaaacaaaaactattttcttaattcaaacggtacttttggaatgtagtatatacatttggttaagtcttatttggaggatttatctttcctcttggatgatatctttgaagtcgaatgctgttcagtttgatgttcaaatgaattatttgaactatttggcatatctttttattgcacccatttcctaggaatacctctgt

SEQ ID NO: 88594 - DNA, 258 bp, Glycine max
cgtgactctcttggaagttcattatgtacggaggatgcagtacattctgtcatctgatacaagtgggaagatcacggtgtttcaggagaatggttcgctacatggctctgccacgccctctagtaggccgctagtttctttgaagccacggcttatgctcttgacagaaactggggcatgttcattggatttaaggggcatgagaatccgggaatctgaatgtgaaggcttgacacactctgttgctcgaacttatgt

SEQ ID NO: 88595 - DNA, 252 bp, Glycine max
caagacaatatagcccagatagaagagagtgggctttttattcccttaatttgcccctttggtcacgcgttgtattcctccctcatccgcttctccaaccagctctgtgcttccttcttctaccgtctccatttccgtttgcaacattcagaactaatttcagtttccgtcactgatcaatgctgcataatctctgtttccaggttccaacctcgatcttgtcactccacgatttcatgtgattctgtaatg

SEQ ID NO: 88596 - DNA, 252 bp, Glycine max
ctgtccatcctggatgattttgatttctatgaagaccggcagaaggctatgcaagaacggaaggcaaggcagcaaagcagcatggtggctactggattggttggagaaaatgaacatcggagttctgctaacactaccggtgatttcatgaagcagatgtcgaagagctttgctctagttgtccgcttagatgagaataacaaggaagttgttgttgcagatagagatagtttagtctctcatggtcatggc

SEQ ID NO: 88597 - DNA, 254 bp, Glycine max
ctgaaacaacaccatacctgtgcctcaattcaatttctccttgctccttcccttcctcacaaagtgcatgttatcgtctgtctggattggatgatttggactcatttttctacgtctaacactgtactttgccagctaactgcacttggactttatgcttattcaagttttaactctccattaggtcaggcactgcattttgtgccaagctgatgcatcattacttttgaagaaagcccctcagttttgactat

SEQ ID NO: 88598 - DNA, 255 bp, Glycine max
caaacaaaagacaactcagtctcgcttttgcttgggataattgtaaagttagaagtattggtgcaattaaatcatacaaagatgtatcttattttcaaaacgaactagtaggaacttgggaagaacccgatactggaagtgacagtgagggtgatgatgaagaatatgaggaagttgaaaatgagaattttggatttgaaagtggttcaggagaggaagggatgaagacttcagttgttactgatgttaatataa

SEQ ID NO: 88599 - DNA, 256 bp, Glycine max
attgaatcaactgaagctgcttcaaacaaagctatccataatagaaagatatgccagtatacttcatagttccctatttggtgaaccttttgatgagcaagatgttcctgcttcattgaaaaattcaggtgcatttgacattgcaaaggaatgggagaacatgttagaggcagcagatggtacaaagctgattaatttggaaatgctctaccgaaacatgcatgctagtgtgaaagaaaagctaatgaaaagaagg

SEQ ID NO: 88600 - DNA, 250 bp, Glycine max
gccaatcattttctcacgttggcaattaattagtgcttattattaattgcacaatggcctcagaaaatggagagaaagtggagataggtttgaatgcagttcctcaagagacacataagccaaagaaggattgggttcttttgtccctcagaatggttgcattttttgccactgcttctgccacacttgtgatgacttttaacaaacaaaccaaaagcttcgtagttgccaccgtcggtagcactccaat

SEQ ID NO: 88601 - DNA, 154 bp, Glycine max
agaagaaaatatatggaggacatagttcgcaagcccagtatctaaattgtgtttggatggtgcatggcaaaagtagcaacttctttttcttaccaattttgaatgatttataacaattgtaatgcttaatttgatctgcagatcttcgagaaga

SEQ ID NO: 88602 - DNA, 128 bp, Glycine max
tagagattctgacgatgcaagtagaagtatacattgcccagtggatatcacccatgtgagtactggaccgtcttatttagacggaattcgaatttgatcttgtccgtatatgtgtcactacaggggca

SEQ ID NO: 88603 - DNA, 159 bp, Glycine max
tgatagaaagcaagtgtttgacgctcctatcaatcagtacccaagtgtgatcatggattcagattcttgggactatggcttgtattgattacaaaattatttttcctctccccactgcttacttgtaatgtgcttgtaagttgttgcaaagaataaagt

SEQ ID NO: 88604 - DNA, 157 bp, Glycine max
attctcattgccgtcacagagagagacaagaaacaatgaagtttaaccctagggtttcctcaagccgtcgcaagagccgcaaggctacttcaccgctccgtcgagcgtgcgccgcgtcctgatgagcgcgcctctctccaccgatctccggtcaaag

SEQ ID NO: 88605 - DNA, 154 bp, Glycine max
agaagctaaagctgctttattaggcagaattcaacggttgactaagttgattttggtctccacaacagcatcatcgtccacaagatttcctaacagacctggtcctcgtagaagacattccttcggggaagaggagctggcataccttccatac

SEQ ID NO: 88606 - DNA, 156 bp, Glycine max
gagaaactaagagaaagtttgagagtgtgtatgaagggggcacaatgaatactcctgactctggcaaagtttttcagtattggcattgctgtggttctgaagatccattcgatcctggttgcactgcttctcctcattcttcatatgatgattgat

SEQ ID NO: 88607 - DNA, 153 bp, Glycine max
ccaaacctgaaagtcaaccttaaactatcagtattgagttccatgaaaatttagaacccacagctcccccaagaggcgtgtaactaactgcaacaacaatcatggcattggagacagcatggtatgaccttgtgtgttatggcataattggca

SEQ ID NO: 88608 - DNA, 156 bp, Glycine max
gtaccagtcgattaagaaaacgcgaaaatcatcgctgaaaaacaaacatggtctgcctctgttagcagcaaatattaggttgtttgttccgaacccaaccatggaagagttcagatccaaatcgtacggtgacggaaggatgcagattgaggccta

SEQ ID NO: 88609 - DNA, 156 bp, Glycine max
gcagagtccaagtgcagggaggtgcaaggcaagtttgcttaatcccacgcacccgttgaggctccgctataggtgagccataaaaaaatcgcccttatcgtgcaccctcaattggttttcatgagagtaaagaacctgcgagaatgagaaggtaga

SEQ ID NO: 88610 - DNA, 246 bp, Glycine max
atctgcctcatatgggaaaagtaaggagcagaaaacatgccttacagtttctaagggtagctgatgaattgataagcacctctgacaacaggggaattatcacttttgcggatggggatgcttttgagaaagtgaaaaataacttgaatttcaggtcattttttgatgggcacttggtgcattaccaagccttgttagaatcaatggaatcacatttcccaaccagtttctcagaagcaagaattg

SEQ ID NO: 88611 - DNA, 250 bp, Glycine max
cccacttatttccttgtattccccaaccattcaggttctctctcaaatctctctgcaacttttttgagattaattaaattatgtctttttacatctttaaattatggttttaatctctataaatatgattaaattattttttcagtcaatcttttctaaaatcatctttataaaaaacatacatttatacatgttatgtaacatatactacttcaaaatggtcactaatatgttacacgcctcatcatta

SEQ ID NO: 88612 - DNA, 249 bp, Glycine max
gaggcaggtatggtatgctactgaaagcggaaacttggaagtgacatattctcacaatgaagaaaatgtatgcttttaatttatttactttttcccctggatacttggttttattttaatatgatatttcttgtccagtttgaaatgacgatctctcataattatgtgtaatcaattcttagctctgctatcaatgatccagatactactgttttgaactcatggtttagaaaatataggaaatgtgct

SEQ ID NO: 88613 - DNA, 243 bp, Glycine max
cacctatgttgcctaaaaaacctgaaatgtttttttttaaaccaataatctctgttacgtaaatggtgaattcaaatattggatcggttttttgtagttaggatgacgttaggttatataatctgaggtataaagatgcgaaatcatatgaaactcgttcattttgattagtgggtgattgggtaatcttcgattttctcactcattggtagaaatgactcaggttattttactattttgtgg

SEQ ID NO: 88614 - DNA, 238 bp, Glycine max
gtttctgcagccgccacactccctttctgaacgagatcttagatctctcgttgatgctttaaaagaaccctaatctcatctcatggctattgcttggtgcaccagcattattgcttccaaaataaataaatgaatgaatgaatgagcataccactccctctctctcattccatacatcgtctgacgaacgtatcgttgattggttctgcatggttgcattttctgtttgtttttagcc

SEQ ID NO: 88615 - DNA, 240 bp, Glycine max
gcttgcctcagctgccgaatacttcttcaaaattggagtggaaggaaaaagatttcgccctacagaggcactaaactactgttaacttatacttggaaagttgtgaatttgttgaccatcacttgcctttcaagttgctctttaaaattaatacaagcaagctaacacgtccttacatactgactcatctcctctgttctatcacgagctcaggttttattgttaatgtcaactgcatta

SEQ ID NO: 88616 - DNA, 245 bp, Glycine max
gccgttcctaaccctacaagcttcgtctcgtaaagaaaattccaaagctcaacagagaaaatgaggacagtgctttcgcgcttgatccattccacgccttccatttccaggctcaatgttgcgcataatatgctatgtggaggatagccggtgcaaattaagtgtgtcatgagtagggccactgttgtttattttaatgaagttagaccattggaagcagatagattcaaggcgctttgcatcca

SEQ ID NO: 88617 - DNA, 233 bp, Glycine max
cctaaaccctaaacctcacagcacacagagcttcgctctcgctcagtttctccgccgtcgcactcgcactcgcactcatagcttcgctagttaaatggcaatgcctgtgaatgatgatacaatgattgaggatgaaacagaagatcagagtgaaaaaatgtcgtcatctgaatcagaacaggaagaagatgtgagattagctgaaccatctaaaaatgcagtatataacagag

SEQ ID NO: 88618 - DNA, 231 bp, Glycine max
gaacttctttattaattggtattaagtagagaaaggattgtctgaagttgaattctgttgatgttttttaatgttagcttataacatatgacatagtttgaaaataaacattttaggcattactgaaatttgagtatcaaaaggttgaggttgggataattgatgtgctatatatgaatggtggctaaaaacttttacaataacaacacatgctgtatgctggtacgatga

SEQ ID NO: 88619 - DNA, 233 bp, Glycine max
atttatattaaaatttcgcaaattcacacaactcagttattaaaataaaaataaaaaccactttaattaatttttcccaaatccccaagagagaaaaaaaaatcacacaatttctgtgaagctaaagcttgtggtttctttctcattctctcaaccaaaggtgaaagaaagaagagagtgagagaagagaaggtcctgaggtaaagatacaagctttgctcttctgctcactg

SEQ ID NO: 88620 - DNA, 225 bp, Glycine max
gccgaactgagacatcgtgcaagggatgctcgcaataagcaggactagtgttttgttgtgggattttgatggcttaaactctgaaggagttcatgtcaatggcaacgtaatcatatgttttacaagagttttgtttttcctttttttttaattttttttttcagatttagtacttgttatttccagttatgtttgtgtacactattaacgggatttttttcctct

SEQ ID NO: 88621 - DNA, 227 bp, Glycine max
gtcagtgcaaacaagatcagaagcctcctcgtgatttttttatctgagaaaaagtgttttgggttttctgctctttggggatttcagtttttgagttgtgtgtgtgtagtttctgttcccttcttctttatttatttatttgttttctcgttggcaactcaaaggtacagcaaccaccatatatcaggtagtattatcagtgtgtgactcctaaggaatttgcagat

SEQ ID NO: 88622 - DNA, 256 bp, Glycine max
ttcaaaaccacttgtttcttcagttccacacaacatacgagcgtgcgaaagggggttgtgctgaatcaatcggaatggtgttgggctcggttgcatttctggattatctgtgtaggggttggtcatgaatgggaggcacgctgccaatgctctagactcaccagcagattacgtcaatgctgacgacgtctgcaagatcagtggtgggtgttcaaaacttggctttggatgtaacgggtgctgactatgcacagaa

SEQ ID NO: 88623 - DNA, 261 bp, Glycine max
tatctttgctgccccaagaagcatagcgacatgagcatcatgaccacatgcgtgcatctttctaggtggttaagtagctgacttcttgtgctttgctgacttacccagaaaattgtttatctttttggtaggcctccattgcatttgatggagagtatttttttgtgactccaatatgatgcaattataaggataatggtagaaataaatatagagaaaatttctttattttgagatatagatgatcctatcatgtaaata

SEQ ID NO: 88624 - DNA, 260 bp, Glycine max
atggccaccaagttttcccaaatctgtatcaatatgcacagattctttcaagtgatgatgcacagttaccttatttcacatcccatcttttcaatcaacaacaacaacagcaacagcaacaacctttcaattctcaattctctagcactttttcttcaacctcatcctacttctacaaccagcaacaacaatatgatcaacaaggacatgatcactcaaaccactagcatgatactattaatctctgtgatttccaaccg

SEQ ID NO: 88625 - DNA, 260 bp, Glycine max
tctcgagccgaatcggctcgagcttatcactcttcactcttcattagtcatcaacacttagacccaacaagtgtaaatgaagctagtggtggtgaagttggatttgcacgatgacaaagcaaagcagaaggcgatgaagtcggtttctagcatatcaggcatctattccatctccatggacatgaaggagaagaaactgactgtagagggtgacataaaccctgtcaatgtggtgagcaaattgagaaaaacctggcacc

SEQ ID NO: 88626 - DNA, 258 bp, Glycine max
cggctcgagctcgagcgaatcggctcgaggttttggtagtgagctgagctttagctatatatgttgagacactggtgttttttgtgttgcttggccagtctgggtgctttattacttgttctgatccaagaattcgcagtgatttgggtcagccttgtcgagaaatatgtctttgttgctgtcaacctggagtttgtgctgatcgtcatttgcatggtactccttatatgtacggtactccttatatgtcgactgatt

SEQ ID NO: 88627 - DNA, 257 bp, Glycine max
gagcctacggttactacacctacacttatcgaacctgagcaagataatgaatgcctagtacgatgctcaacatgcttcagtttactcattcaaaaaggcaaagagttttttactgggttggtatcacgagctccacaagagttagagtccggccagggagatcagcacgtagttcctataccagattcatctcctataatgccacaaggtccaccatttaccatcaccaggccagaaagtaccaagggttgggaaat

SEQ ID NO: 88628 - DNA, 171 bp, Glycine max
ttcggttttaggcaagatcgggggattcacccgtgaacctttgtcatctgttcgtaatgccaattgaaaggttcaactatggatggaaggtttggctccggaaggaccacagttgtacttggccccaaaaatgtggcaaggttgggggaatccccttcaactgttgggcaa

SEQ ID NO: 88629 - DNA, 253 bp, Glycine max
aagacaatgagggttcttggtctattggggttttctacggtgactcacctttctctcttaagcccatagaagctgcgaatgtatcaaacgatgagactgctgcttggcctgtcgcgaatcctgtggtgacgtgtgcttcagtttctgatgttggttaccccagtaattttgttgctgacccttttctttttattcagggaaatactttttacctgttctatgagacgaaaaattcaatcactatgcaaggtga

SEQ ID NO: 88630 - DNA, 250 bp, Glycine max
aaaagcttaatcctgatgccatgctctacgcctaccacctatatagtcattgccaattttttccgcacaccaactaaccttcatgaaattcaacttcaaatttcggttctgccatttaaaagaaaattcttaaaaacaataccatctataaagattaaaaattatatctcaacctaataaatttttaaaatctaacacgtgtttttcttcaaaaattagattaccaaaccatacacattctaattttgag

SEQ ID NO: 88631 - DNA, 226 bp, Glycine max
ctgttcgagtctcacagccgtgtgtgtcttaacaaaccaattcaacttccgcctccggtcgtttccgccgctgagagcgatgtcctccgtcgaaacggagattgagccaatcacgtcgggggcgagcaacgcataattccgcttcttaaagccccagagcctcctcacttcgtctacaccttttcctttcttcccctgtttatatcctcgcggcgacgcttcacgc

SEQ ID NO: 88632 - DNA, 240 bp, Glycine max
gcttctaatgtaacatggttggctgatatcaaggaagggaaactcaacgaggcttggatcagttacaactccagttcattgaatttgagtgctgtgttcacaggttttaacaatgataccgatcataccattcacagcaacatctatctgctatagttgatctgagacttcatttaccagaattggtttcttttggcttctcagctgccacgggaaatgcaactgctatacatagtctct

SEQ ID NO: 88633 - DNA, 251 bp, Glycine max
gaaatttggaattccttggcctgaatgcaacgacggtctgtcctacgacgacgtcgttcgagcctctgatgccggggcgacactcatagagttttactccaccaagtacaagagttctgctcccttacaagggtgacattggtaagaaacacccatgacctggccaaaaggttgttaattggagttttgaaatgttgtctaatagagctgaggggaaatgaagtacattatgctgacaattaatacaatag

SEQ ID NO: 88634 - DNA, 249 bp, Glycine max
atgcaccaacaaaacaaaagacaaatattcttcaagttttgctggggaaggtaaacaggtaaaacagccatacaactatacaagaaaaagatgtcaaaagagagaggctgttatttcctccttgttttgtttggttcacctgaaataataaacctcttaatatttcaacaccaacaacgttgttgtcaattgttcacaaagctagccggctgtgttatttagttaccattctatagttttagtgtgatc

SEQ ID NO: 88635 - DNA, 233 bp, Glycine max
tacagctcgaggtcaaatgctctgacggagccacacattagggttttccatttcgggtcagacatactcagacacgggaggtggcaatgcgcactcgtcgaagatggatcgcgatcagaggctcgcaagtcgttagtgtgcgctcggggctgccagttgagtccagactggagggggatgtgtattccgagcttgatgtgcctgcgggcacctttgtgccccagtccaggggt

SEQ ID NO: 88636 - DNA, 237 bp, Glycine max
cgaacaacaaaacctcggtcaagcgttgaccaacatcaacctcgtacaaccacaaccacaactacaaccacaaccaccggtacaacaacaagtgacaccacctaatatagtaccagctcctatgcaacaacactgcctgtgattgttacacagcctgtggtgttgccagtggtatcacaagtgaccaatatggagataatgaaagccgataataataacaacaataacaataataac

SEQ ID NO: 88637 - DNA, 257 bp, Glycine max
gcattttggcccacagctacgttttccgtggcaagctcaaagaggatatctcaacttatgttctgcagcctatattgagcgtaaaaaatagagactataaacagctaacaagaaaaaagttgaaagaattgcaggaatggatagtggagatgtatcttgattatgtggtatcgatctggccctactattgtcgaacaataagattggccctcttcagagatctgattgttcgacaatagtagggccagatcgattcc

SEQ ID NO: 88638 - DNA, 136 bp, Glycine max
tatttttgtttcaattatgccttatttctgtggtccacgcttattagagattaagcttgttttttattctaagttttgccccgtcctgtaagtgatttatgggttttcccacatttatcgaatttagtctgctctt

SEQ ID NO: 88639 - DNA, 150 bp, Glycine max
gaatattccattaaagtatgagaactcagattgcgtttgatttagaggttgcttgatcataacatctcttctgggtgcttgagaaagcatgagaatgttcctcatcatcttccttaaaagaataaaactctggttactttttttgcacac

SEQ ID NO: 88640 - DNA, 251 bp, Glycine max
cacttctgttcgcaaaaagtttgttaggcagcaggtggcagagaaagatccgaataaaggaaaagcttccaagagtcatccaacgaaacaccgtactgcatatctatcacagatgacttctcaaaatccaccatgtgcatcacgaccaactaattcaatggaaggggcacacctacctgctaggatatctgatgtatcacttccaccttcagtggaaggggtacactcaccatgtacatcacaaccaatga

SEQ ID NO: 88641 - DNA, 264 bp, Glycine max
ctaatcttgattccaaaatttagtcccacaaaattcttctcttctctccaaaaatatattataacccaaattcttgccaacaaactcgacgctttgacaaatatcaaaaccataatttagagtgtcaaatccaaaccaaaaccaaaaacacagaaacatcaagcaagttctttccgtctgggtgtctgtctgtctctatggacataaatcttcaacttgtgaaattcactgtacactgattaatatggcaaccacttttttcct

SEQ ID NO: 88642 - DNA, 261 bp, Glycine max
atgaatctcaaagccttcatttttagtacctaatctgtttgtatctctagatgagtcaaagggtattatgtttaactcctctatttctgttgcagatgatgccccatcttgctgctgatgatctgcttcatcagtttcaatactacttgttcatcagtctcatgtctatatgctgggacaaggcttattattcctatgcttgtggcataaccaggatctttcaaagaagatacactagactttttcacaaacaagcaccca

SEQ ID NO: 88643 - DNA, 260 bp, Glycine max
tgacaataggcaggcaaatagtgtgataccttttctgcttcaccttctagatgagcaggatggtacagctaaagctgttgttatgctgatagcagaatactgctcaatgagcgaaggtgatcagtgccttatggaagtctaaagcgccttgcttctggaaacatttcacagagaagaaatgctatggatgttatatcagaagtcttgcatatatcatcagagtcacaaaatttaatgccttcttctgcttggcaagatat

SEQ ID NO: 88644 - DNA, 262 bp, Glycine max
agcttgggttctcccaccaccacacacaccaaacccacctccacactccaccctcactcactctcgggtcaatgacccagtcccggaagcccagaaagcccaacccgcaagcccgcgaacccaagagagcccttcttctcattctccagcagcggcatgaaactcatcgtcgccctccagggcgtggtgcagggccgcggagggcttctcctcgggaccctcgtcccctgcacgctcttctacttcgtcgagctctacgtca

SEQ ID NO: 88645 - DNA, 262 bp, Glycine max
cataagctaatttagtttcttaccttggagtaatactgtttggtacaaaagaaattaaatcaaaagacatagaactcaatctcgtgatttccattaaacacgtgagtttacttttacttctttaactttcaaataataataaaaaagtgtacacataacctcttgtagaatttgcactattatttttcgttctaaatagacctatgattgtcaaattcagacactaaattggatgatttaaagaactaagttgaccaatgta

SEQ ID NO: 88646 - DNA, 254 bp, Glycine max
gaatgattcttgtcctgtctgcagacagaatgtataacttgttccttgggcaatttgagattatctttatgggcggatgtatatgttttattatttgtttctttacatacaaactgagattaccattaagtttttatagttgacattggcattttgtactattctgcgatgtaattgttaaataatactatttggtatgaaaaataaaaattaaaaaataaaataaaaaaaaaaagggggggcccccccttttt

SEQ ID NO: 88647 - DNA, 190 bp, Glycine max
gtgatggagaccacttgcataagcttctctcacttatacatagatttgattttgtagctgtagctgtcatgtttttaataccatcattctgttaaaaccattttatccgtcttagtttttaaatgattaattatagttattgtgtgtttgtttctacagtgatgtgtcgataatgagggatgtactgcag

SEQ ID NO: 88648 - DNA, 255 bp, Glycine max
cgggaaggtgggtgtcggggcggccattgcctttgtgtcgatttatattgtgtatgcattcattgttgctgccaacgagatattgcggaaacatgcacggaggttgaaattggatgctgtcacaccaatgctcctgtccagggaagtgtgttctctctaggttcggaagaggatacttcgatctatagctctttactggaagacactgagagcgacccccctcgcctccctccgtcgttgccacagtggatgtgg

SEQ ID NO: 88649 - DNA, 254 bp, Glycine max
catcaacacatgatcaagatgtctttagtttccattcagatgagaggttctgcaatggatttgaggaagttttgtcaagatatagagatattgttcctcgcctgcgtctagcaggacccacttcatttgccctattattgagatggccatgactatagttgagcaaagtggtggccaatatcatgtcctgctaataattgctgatggacaggtgaccagaagtgttgacacacaacatggccagctaagtccac

SEQ ID NO: 88650 - DNA, 183 bp, Glycine max
aataataatggtaacaaatgtgtttctgaaattgggggttcatttcagatggatcaagttgcggaagatgaagattggcttttggtggaatcttgttcgtgattgatgatgttgttgtttataattgatgtgtttattttacaattgcttgaaaggattaataaaggttatatttggattttg

SEQ ID NO: 88651 - DNA, 119 bp, Glycine max
ttagcacggaaattcctagctgtcattcatatattccaacagtgtcagcagaaggagagtctattaaaattgctgaccccagaatgcgtgaagattgcttgagaggatacacttttttg

SEQ ID NO: 88652 - DNA, 253 bp, Glycine max
aatggatctcctataggtttgaaaactccccatattagagacacatcattgagtgtagcattgatgaagtttcactctcatctcagatagatgcttaatttatggtgttattatcatcgacgctgcactcaatcatgtttttctggcaatatgggattgtgcgaagtgaaagacattcatataattagcaagtgaggatcatatttctccattacttttatgagtttatccttttcttttgcttagtaatttg

SEQ ID NO: 88653 - DNA, 254 bp, Glycine max
attttccgattcatcttcaatctcaatcgctcgatcgctctcgtgattttcgattcgtgtttctatcattagatttttgaagtacttgcttgatccgtgtttgattctgttttcagaaattttgaattggatgcttaggcctaccctccaccgtacgatcttgagcacttagccgcattgatccttctttgttcgttttatttaggattgtagctaattagctgtttgattttttctctctctctctctctagg

SEQ ID NO: 88654 - DNA, 262 bp, Glycine max
ggagaaatgaggaggagagtagcaagagccagaaaagaaagagaaagtggaggaagcaaaagaggaagagatgaagagtgatggcgaaggggaagaaaacaaagagaagaaggaaaaagaagaggcaaagggtgaagaagccaaagcagaggaaccaacaacaccaacaattactgaagacaccaacaaggttgttccagaggttaagattaatgaatacttctataacccaccaaggtatggcatggaggtgtatgcatat

SEQ ID NO: 88655 - DNA, 267 bp, Glycine max
cctcatttcactatcggtttcttcaaaaaccgatgttgaaagcaagagtttaacatcagttttaaaaaaccatctttgaaagggacaagttttgcattataattctcgtgtactctcacagtctcactccctctttctctggcgtcctctcattgtttctctatcgcaccctaatcactctctttccgtctttgttgttacaatcatctttcgcgctttccttttatctgttgttgttgtcaaatctgtgtcctacgtcgtcgacgt

SEQ ID NO: 88656 - DNA, 259 bp, Glycine max
attctgtgggaaaaactagtcttattatgagagtgttggagtccctcaaactcaatgcctctctcaagcttcctcttcctttctcacatataaatagcattcattactgcaaaatggttggttggttttgatggtcgacggtggcactgccccacttgcttccctcgacatttcaacgtacattttctttagctccacgccataaacatgccatttcttagtactcaggacccattatttggtaacttttatttcttag

SEQ ID NO: 88657 - DNA, 255 bp, Glycine max
aaccgctgttccatattctgccttcaaatcgccatttcttcctttctcaccaaccaattacaaaggctagagatatggggagcaagggaccaagttggtctgaccaatggggaagtggagggtttggcagtgatcactatgaggaggaggagaagatgaagatgaagaagagtgggagcagcaagaagatggcagatgcaaaggctgtggcatcagctggaatggacaaggccaaaactgcagcagttgtgggtg

SEQ ID NO: 88658 - DNA, 259 bp, Glycine max
gtgggaagcggaggaggaagaagaagttgttaacggaggagtgacggagataacggcgacggagatgatcgctgctttttaattaatgtagttaacttattagggggttcaagaatatgccacatgcgtgttatatttctaattggcgttacacgaatgaaaagtaactcatatactttttttagacaattttatttttcattagtttatttttttaacaaatatttcactactttttattagttacttccttttcctt

SEQ ID NO: 88659 - DNA, 129 bp, Glycine max
actcgctcgacctagttagaactgtgctagggttttacgaaaccaccgaagttgcagaaagaagaagaaaaatggtggctgacaggagcaagaagccgaaggtctccgacaagggcgaaaacctcgatg

SEQ ID NO: 88660 - DNA, 251 bp, Glycine max
acataatgctttcttctgcatgcctgttttttaaactcagatgatttatattctggcaagtagatacaattttgcatttattatgtacaactttattcaaagaattggatgtacagtaaaagaggaagttttgacatttgacacaggacatggaaacttgtttgtctctctatgctttgatgaaaatgtcacagatatataattccatgttttttatatcctatgatggcaaataaattatttgtctgaat

SEQ ID NO: 88661 - DNA, 251 bp, Glycine max
gttcatttctctgcttattggtgcatgccttcaattgctatgaatcatttctttcaacaactggcctccacctatcaaaatgttctctttctgaatgttgatgttgatgaggtcaaggtaatttatttgtataacctatggtggggaaggacatccttcttggtttggtgtttatataaaactatttagtccatataccaccacatctctgtgattttcaattcatctatttctatagtgcttctaattgg

SEQ ID NO: 88662 - DNA, 251 bp, Glycine max
aacttctttgacaaactaaaagaaggatccatccttataaagaaatcacaaagctttagtttcagcagagaaggtgtaatcattgatggagaagctaaggtcctagaaacagatgtagtaatttttgccactggatacaaaggtgatcaaaaaatcaaaaacatgttcaaatctccgatcttccaaaattatatcattgggccaacaatctcaacagttcctctctacagacaagtaattcaccctcggat

SEQ ID NO: 88663 - DNA, 254 bp, Glycine max
ggcactagaagcagtggtatttccacaatcacaagacccttttggtagtggttacggatcagtgaatactaaggacttctacaactacaccttgttggctgctacttatgaacaacaacacatcaacaaagaagaagaacaaggtggtgcttctatctctacttttcaaccagagactagtaattacccttatggagattggaccaccagttcctcctcatccatgttaccccacttgaataatgaacttcaag

SEQ ID NO: 88664 - DNA, 268 bp, Glycine max
gataaatttcttcttaatacggttttggatatgtattcaactcttcaggagcaagttagtgttgcttatgctttgccactgccggatacaaatggtagtatgggaacttctgagcttttgaaggagaagggaaatgcggcctttaaaggaaggctgtggaataaggctgttgattactacactgaggctattaacttgaatgggacaaatgcgacttactacagcaaccgggcagctgcttacctagagttaggatgctttcaggaag

SEQ ID NO: 88665 - DNA, 264 bp, Glycine max
tggtggaacctgttcatgctgctgaggatgtgaaagaattagatgctgtgtgtaaagccggggaagttcagtatgtaacatgtcaatctggtcaggatagcggttttatgcaggataacaaccaagagtctggtgctacactaccagagtatggaggttgcagttccttggctgaggaacgtggtgaaaagcgtgttgccgaagatgatgatgatgtgagggaggacaacaagaagctgagagaatgggtgccttcccttgttc

SEQ ID NO: 88666 - DNA, 261 bp, Glycine max
gagatttcggctatgccatccagatctttccatttccattattagctatggattctatgcctgatgccattctccaatgcatcttgtcccgaatcaccaatgctcgtgacgtgtcatcttgcaattgtgtttccaagagatggaaggactccactccctacatcagaaccctctactttcctcgcagctcatttgaaaccccttcttcttcttctgagggtgctgacaatatcatcaaaagaatggtgtcaagagtggtga

SEQ ID NO: 88667 - DNA, 267 bp, Glycine max
aaaagaaacacataatgctcttgaacatcccctgcactcttttgtcctccaatcatggctgcaacaacctcccaccgtttcaggtggttctcgtctaccacggctaaagcgagctcaaacaacttgttctccttccaactccacccacacaaacccttatgaaaatcatccatgtcactagttctggatgacatcttcagaggactatgaggatttaccataattcatttacattatggtacttttgaaaggctattcatatctcac

SEQ ID NO: 88668 - DNA, 142 bp, Glycine max
ccagcttctctttctctctgtatcgtccactctcttcatctgacactggctacattgatggcggtgatcaaagcacagtctccgccgctagctgccgtagtggtgccctctgaagatttatcactgagcgaatatgtgtctg

SEQ ID NO: 88669 - DNA, 258 bp, Glycine max
ctcgagccgatgaaatgcaacaggttagccatacacgtgcaacatctattaaacactccaataatgcttaaaaacaaaatagaggacacgccaatatggtcagaagaaatcaatgatggccgtttctttgaagcaatcaatgggaagaaattttaccatgtatgtacagcaccagtgaaatacgaccctagatggagctctgacaaagatgtggcctttattgtcacaggagcacaacttcatgtgaagaaacatgaa

SEQ ID NO: 88670 - DNA, 253 bp, Glycine max
tgtagatctaaaagataaagatgatccaagaactgttgggtggtgctagtgctagcctcatagcaggagaaagaaaaatctccattactaacggaggaggagcacttctactaacaccacccacttcatcttctccttctctatcaccttcttgcacaacaagcataaccacttccaccgccaccgccacctcgtcgaattcagagaaccaaaacttgaggtgccctcgttgtgattcatcaaacacaaagtt

SEQ ID NO: 88671 - DNA, 235 bp, Glycine max
ctttatgttgctttagctctcaatgcttctctgaaacccgcgttcccattgctctttgcgccaatggccgagtcgtctccgccggcaacgccggatactgaaacccgagctcggtatcggatccgggtcgggtcggaaaccgggaataaggagagtgggtttgacgagctgaaattgatacttcgccgccttttgggtctgtcaaggaagcggtgacccgtttcgaaacaaccgg

SEQ ID NO: 88672 - DNA, 255 bp, Glycine max
cgaaaagcagctttaagggtatgtctatctatgtaaaattgtctgcttttaaaaacctgatattgatggaaaagacattttgatgaactgtatgccctattatcctttgatatcatctctcttgatttttgctactacaactgtggtctccattggtctcatattcttcaattattaatagttatgagaagtgctatcaatacactatttgacaaactattttaaacactctaatattgctttataatttattga

SEQ ID NO: 88673 - DNA, 234 bp, Glycine max
gaggaaagggtggcagaggggggaggggtggacgaggaggaggtggacgtggtggtcatgggagagtatgaaaattgatgcagtcaatgatctcaagcgcggctgttctgcatcctattctgatatctaaaatgttttttgtatacttgtcctgcttatttcgtgtttcctgctgatttacatttcaagttttgttgttacagtttttttataagttatgaagctttttgggcc

SEQ ID NO: 88674 - DNA, 258 bp, Glycine max
cagccttgaaccaggttccgtgcccgatgaaacgacgacgccggaagaagcgaggaagcagcagaagcaagaggaggcgctccacgccagcagcctccgcgttcctcgccgcccgccgtggactcccgacatgtccgatcgacgagctgaacgccagcgaaacccaagctttcttgacctggcgccgcagcttggcgaggctcaaggaggataagaagcttgttcttactccgtatgagaagaatcttgacatctgga

SEQ ID NO: 88675 - DNA, 250 bp, Glycine max
ttatttcattgatttctccctcttcgctctctctcagtgaccagagacagatgatgatggagatggcgaacgaaacgctgtcgatgaggcactcgaggcgttggtgctactcgcagcgagtgtggaggtggatgctcaggagaactcagacgtaaaacagctggtgaagtacaagcacgagaagaaatactgcgacaaaggataggaatgtcaaggctggtccatttactgatgtaacctcgccattacc

SEQ ID NO: 88676 - DNA, 256 bp, Glycine max
tcttaaggttactataaatgatcaaattttaattgtaaatgaatatttttgtcttaataaaattaatatatatttatgatttttccattatagttttgatgaattttgattgtggaatttgtatcttgattaacacacgcacacacaaaaacactaacctggagatcaaagaggcgaaccaaggcacataatctgccaaaatgaaagccaccgaaacactcatatagtccttcaagtcaaacctacgatccttgtt

SEQ ID NO: 88677 - DNA, 255 bp, Glycine max
tcattttgtttgtgctactactattaaaataattatagatagtgacttttcgtaaacaagtgtatcatttgttttttgttcatatatcagatgccactgaagtcatgaactttgatattacaaataaaatttaccatattcaataaaatatgttgggtagctaatataaaatcatagaaaaaactgcatcaaaattgggtgaagaagggttatgatgtctcttagaacatttactttatcatagattcatagtaa

SEQ ID NO: 88678 - DNA, 100 bp, Glycine max
cgctcgctctcgtagtctcatggataggcttcctgaagcacgaattgcctttatcggagatggaccttacaggtgatttgttgtaatgtgtcttttcatt

SEQ ID NO: 88679 - DNA, 258 bp, Glycine max
cttacaattacacacctgtggtgcatctctacctttccaacatcatggcgcgattcgagcaaattacttgttttattatttccatgattctaatatgcctactagcaagttcagtatccgaaggttctgatgacatattcacctctacagaaaagacagaaaattggttaaaccatggtgggaatatatacaacagaagatatgccagcatggagcacaagatcagcgttgaaactgtttcgaacctaagtttgaagt

SEQ ID NO: 88680 - DNA, 260 bp, Glycine max
ttcgttatttgcttgttaaccaatgtgaggggttgctactacctgtagagaacgaagggaaagaacagatgagctcaatggtggttgaaaataccattggttatcttgatctttcacattgccacatatcagacaaattccttcaaagtggtctccctttgttttccaatgtgaaagaactatacctaaatgggaatgatttcacaattcttcctgcctgcattcaagaatttcagtttctgacagaactttatttggaa

SEQ ID NO: 88681 - DNA, 248 bp, Glycine max
cctcgagccgaatcggctcgaggggaattctgctaactgaattcggacgacttgctagtctaagagagattggactcatgcttccgggaatctcagtagtataccaggaatgccctattgagcgtcatgcctgaactcatgttccggagagtgcctgtcggatcacttatgcctatgcaaggagagagcaccgctaagggaaagttcaatcattgggaaggtcagacacaagaaacccgaactgcctg

SEQ ID NO: 88682 - DNA, 254 bp, Glycine max
gggctgctgtccagtgatacaaggcattgccataattaacttgaaatctatgtcttgatattttatttttgctcaagtttagaatgcccctgttctggataattaacttgctgagatttaagcacttacttgcttgttggttcctctcacctactgggtgttatttcatttttacttgggtgttattcattgggcagtctatctccttgccttacgctagtcttttaggtgaatattacttcaattctttgaat

SEQ ID NO: 88683 - DNA, 267 bp, Glycine max
ctcgagccgcatttctgttggtgcttctggtgcactttttggcttgctgggaggcatgcattcagaactcattactaactggtctatatatgataacaagctaacagcactcctcacccttgtgatcatcattgttatcaatctagcagttggaattctcccacatgtggacaattttgctcatattggaggctttcttactggatttcttctcggatttgtgtttttgatacgtccccagtttggatgggttaaccaacgatatgc

SEQ ID NO: 88684 - DNA, 140 bp, Glycine max
cttccaaatcagaagggggctggaggggaaatgattcattctctaatgatttcaaaacccattcaattgctccttctttgcacttttgctttattttcagacgttgtatttgccgatccaccgtataatatttgttccac

SEQ ID NO: 88685 - DNA, 152 bp, Glycine max
acacacacacacacacacacaacaacactctggaactaacaacaacaatcgtagaccatgtcggtgtaggcgtgcgagcaccacgaggggaagcagacgaggatctgccggccagtgttctagtactgagctgcagtccttatcatcgtgct

SEQ ID NO: 88686 - DNA, 258 bp, Glycine max
ctccttcaaaagttcatcgacttgtgccttgattcaaagataacggtaataacatacaggttaaggtggagattatgcttattgagggtgacaacattgccaaagctataacagaccatgttagagttcatagtataaggaaattggtgattggaattaccaaatctaatttaaggtacctttgcaatatctgaaattaaattaataacaatagcctttttactaatgtgtcacgtattttattattgggatgagtag

SEQ ID NO: 88687 - DNA, 256 bp, Glycine max
gtgataaatagaagacgcagagagagaagaccattgacaaaaatagaaaaattttgcagacagcagtgaaatcgataggaagaaaagagataggtaggttgttcttgattgtgcaaaaatggatgcagaagcagcaccgttaaagttggagtcccttgtgtgcatagactccactactctctctcattccgagctcctcgctctttctctctcatctctctccacattcgacctccgctccacccatgacctcgtc

SEQ ID NO: 88688 - DNA, 254 bp, Glycine max
tctctctctctctctctttcacactctcactttttctgtgcttctcttctctctcctttcaccctcttggaataatagagtagggagaaaaaaaagggtctcaaagatgagaccaaaagacgggtttttcatcaaaggtccctataagggagggttttttctcatgcatgtggctagcagcagcagcaagtgcaaggtggccatgagcatgaccatggtcaacgaccctttgaggagaattgggaggtgtgacc

SEQ ID NO: 88689 - DNA, 181 bp, Glycine max
gtccccatcttggtctactttatgaccctcttgctgggatcgaatccggtttggaaggaaaagacgagcagagatgagggggtcaccagagggtcataaagtccccatcttggtctactttcatggtggaggtttcttctttgaatctgccttcaaccaactccaccataactatttcaac

SEQ ID NO: 88690 - DNA, 254 bp, Glycine max
atccacacatgtcagccactgcattgctgcagaaagcagctcagatgggtgcaaccatgagcagaagtggttccacaccagccatgactgggccccaccatcatgctcacgtgtctcattttggcttgaacttgtcctcacgtgaagacaccaccaccaccaccccttcaacaacaactactaatgctaacactgctacagtgttcagccatggcttattatcatcatcaccattggggaataagctgctgctg

SEQ ID NO: 88691 - DNA, 251 bp, Glycine max
ggattatttgacttgtgttttctttattcctgtgtcttacgtcaacaattgcttccatgcttcctttggggcgctggtttgttggtatattctgcatttaagcaaacattttctagttatgtaaagggtgatttggttcttgagcctcccacctatgtatcacatatgcagtaaccctggtaagcgaagagccattttttcagcaaaatcgtgacctaggtcacattgacaaggcagcaaccttactggtg

SEQ ID NO: 88692 - DNA, 262 bp, Glycine max
ctcaacggtcatatttcattagagagagagagagatagagatgcggaatagaaagggtgcgtctgcagtggtagaagacgaagaagaaaacgaaaacgaggattgtgaaggaaatggtttctttgcttgctagctcttgacatccctcagcccccgctacaaaggccacacttatatcgggttcctctctcatctcatctctcttattttcacttctcaaagatccaattttgatgacacccttttactcaatccaaaaatc

SEQ ID NO: 88693 - DNA, 253 bp, Glycine max
atctagatcgcgatctagaactaggggaaccagtccacctgtggatgatggaatattgaacggtagggcagcatcaacatctataacaagcaacctcacacccgaccacgcacaaagataagaacattcattgtaccataccagcatattctttccacctgtagtttgatcaccttagatttttagattttgattccccccaatttgtccctaaacaaggtcttgtcagggtcagctcggacataaaaatggc

SEQ ID NO: 88694 - DNA, 219 bp, Glycine max
tctggagagtgctccgtgttgtgtaggaaaatggaacagttaatccctatggctcatcttaatcttattggatgatgccacctttattctgcatttatatctcatacactggcctcgttttctgttgtttcttagattttatttccttttctttattttaaatgggctgaattatttgttaatgaaatgctgaacacccctttggtttcccatttaggg

SEQ ID NO: 88695 - DNA, 253 bp, Glycine max
aataaattaatgacataaaaaggaaattaataattaacatgttttttatataaaggaaaaaaatgtacatatttattttgtgtaaaaagcactaaaggtggtaatagttaatgtaaagtaaatttttaaaagtttatttcttaaggtaaataaaacaattactcgatgtgtgtgtatatatatatatacacacacatcgtgtaattgttttatttcccttaagaaatagagttttaaatggaactcgtgcata

SEQ ID NO: 88696 - DNA, 256 bp, Glycine max
gagctcgagccgccgttttgccattctctccgcaccccgtgttccggcggagtcgccggcgagtcaccgtcgtgtccgccggacactcgcttcccccgtcgccgtcctccttcagtatctatttttgatataatcgttccgttattagagaagtttagaagatggacggccatatgtgaatgaggaaaatcagttctcactgctctatccctgatttggatgattccgatctcttacgtgtttttgagagaccaaa

SEQ ID NO: 88697 - DNA, 245 bp, Glycine max
cagattcttacttttggtgatagttaaatgcaataaagttttctgttccaagtcctttggctacagacaaagtctcaagataagggatgttgatagaatttattttcttgtgttcactctttttgtatacaatgtgtctcctgccttctgcatcagctttcaatatggtgtatcaatttactttagtttatctttgagtaaactcctaagtttgtcttccatcgattccagtttgacctcataag

SEQ ID NO: 88698 - DNA, 246 bp, Glycine max
gccaaaatgaaagtggcaaatacacaccaaatagtgctagcagggacttctttgggagttagaaacacctttcattctattgtagccatcttaaccactcttgtagttgtcaccaccgtttgtctaagacaggatggaggacatttacctccaaaaataaatgcttctggtagtaattcgtcgtcgtcatcatcatcaaagtgtgacttgttctatggtaagtgggtttttgataacgaatcttat

SEQ ID NO: 88699 - DNA, 249 bp, Glycine max
ttctcaaaagctggttgcatctatcaccactgaagattgcttgaagggaacaacactctttcactttcttttccaaccacttttttttctcgtaagggggaggagctagagattcaattcgtgcttcatcaatggaaagatatcaactatcccttcacatgaatgatggcaataaagaacagagttatgcaaacaactcgtcgatgcaaagaagagtaataagtaaaaccaaaaccatacttgaagaaa

SEQ ID NO: 88700 - DNA, 257 bp, Glycine max
gaagcttgctgaaatgcataaagctggaaaatctagtaaagggtttggtttcgatgttgataacaccattgggaggtttaatgcgccttcctcatgaaagttatcattgttgtaatttgtttttgttatcatttatcatgaatctttccattttaacaaggcacgtggtacttgtcaggatatatcagttatcaattatcatcttttgtttgtttgttctaattaattttctaattatgttatgtatattatgctgt

SEQ ID NO: 88701 - DNA, 254 bp, Glycine max
gaactctatatacatctcaatttccacgctctcatgttatggattaatagtcaaaaaacctctaccgtgcctgtgtgtgctatgggcgcacagtatgctcgattaccttcacgggctaatgtatgatgtgtctgaactttatatattttgtaatagcccaactcgcgtatgacttctgccgtgcattgttgtatccgtactatgatgatcgccactcaatctattataagttcccttagggttctggatcttgc

SEQ ID NO: 88702 - DNA, 138 bp, Glycine max
ggcaatttgattaaattaccaaagttgagacaaagttttcgaccagtgaaataaaatggcaggcccagctattttatttcagtggtcgaaaactttgtagcaactttggcaatttgattaaattacacgttttgaatt

SEQ ID NO: 88703 - DNA, 255 bp, Glycine max
gaaaaagaaaaaaaaagtttgcaatgtaaatcacttaataataatttaactgttgctcagttagagttttcaattgttttactgtttggataaatatcttcataagtacttatagaagaagaaagtaaaatgaatgaagcttctttcataaagtcaaatcatatatgcgcctcaacttttggagaagttagttgagagagctttcataaaaattaagtgcataggttgattttaacttctttttttttttttccg

SEQ ID NO: 88704 - DNA, 256 bp, Glycine max
cgagaacaaaaaaaaaaaaaaaaaaaattccgggatcggccctcctctgggaaaggggaaacccagaagtccgaccgaaagagaagagcgttttaaaggtgaaaaaaaagggggttgccgtccacaaagctgttcaccaggttttttccgaaaagggaattgaggttcctaatggaaggccccaatcctgcgggaagaccacccaccttgtacaacctcaactttgaaaaattggcccccatatcccccccctggg

SEQ ID NO: 88705 - DNA, 238 bp, Glycine max
gtgtaatggaaaattcatggaatagtgtacaatgttgggagactaattaatcaatgacactattagattgtgtgctgagtacttagagtttttgtgtttgtgtagtagtaatagtagtgatgtctccatttgttgctttaaataagcaatttgtgaagttgaaccaatcctattatccttgtttgacactaagaaaaaaaaaaaaaaaaaaaaaaaaaaaagggggggcccaccaatt

SEQ ID NO: 88706 - DNA, 243 bp, Glycine max
ctcaagtttgccgagcatacaaagatgtgcttgtaggaaaaggaggttctggccttgcttttactgttgcagttccttgggtctgtaatacgtctctgattgtgtgtagaggttttggtagggatagtaagtattttaaccgggactttgctattaacaccctcatttccaaatcccttgaactggaacatgtaatgggcttaccattctcatgtttggactacataaaaagaggttttattg

SEQ ID NO: 88707 - DNA, 244 bp, Glycine max
gtcatcagatatatggagattgtgccgtgtttctgtgggcttgtcgcttgattatggctaagggtggctttttgctttgttgccagaagctctttctagtttggcactgaatctcagcaaatttagtgtctttgattaggcttctggaaaattgatgctcgttgtagattataattgatatttgtttttctgccttaaagaaagtttagtgtttagatgtagctgtcaacatcattgcagcaat

SEQ ID NO: 88708 - DNA, 222 bp, Glycine max
ggaaaaaataaaggctgaagctactgctgcttattctcttcccatatcattaagtcatcagtttacttctcgcgatgatcctccaacattctccatggatgactttgaagctttgtgaagttgatttgagtgagatgttgccccctgaagcattggccccatttatagatgaaatcaagaagcgtgcaaatcagaggaagcaacttgcaaaaaaggaaaaga

SEQ ID NO: 88709 - DNA, 238 bp, Glycine max
ggctcgagggcagatggaggttctgcaggcggagaacgggttgcttaggaacgccgtggaagatctccggcgagaaattgtcggcggccgaagcggaggctcgattttggggaaaaaccctaaaaagaacgagaggaaaacgacgtcggattacggtaattttcccgggaaatcgacggaggctgaagcgagtgaggaattgaagaaagcattaatgggagcagctggtggtagtagt

SEQ ID NO: 88710 - DNA, 236 bp, Glycine max
ccgggaggcctgtaggcttctccatgcagctgggccttcaaaggtcataattacaagtataaatatagacgggattcttctcctcattggcagtcatcaaaaagaaaagggagagcctcccagacaatttaagattgttattccaaaaataccagcttattttacgggaacgggagatctcatgactgcacttcttcttggttggagcaataaatacccagacaaccttgagattg

SEQ ID NO: 88711 - DNA, 235 bp, Glycine max
ccttgatgtccaattgacctaacaacaactagttgaataccatctatctaacgccaaaagtaatgaattgaagtgactactttgtcctcatgaattattgatcaatgaaggaagtgtttgggtgtaagagtttgtttctttccccacctcccactagtaacattccaaactcaagaatcaatcgtgtcagctcaattggctggattaactgtttcttgttattatttcatctgtt

SEQ ID NO: 88712 - DNA, 242 bp, Glycine max
cttacacctacacctagactaaccctcccatcatatctagtctacattctacctattcctatctatctgtacatagcagtggataaatagagagatacacagtcacacacacaacacaaaacgcaattggactgtgtctgctcttctccacagacaagctttctccaccacctctctagggcacctcagctatcaatttgcgcttaagaatattaagtctacagttgttctgtagaaaacga

SEQ ID NO: 88713 - DNA, 231 bp, Glycine max
cagaaacagagtgacactgctacagtgcaccacctccggcggaaccgaagcctctctctctcctcctggtcttgcgcgatgcccagaggaatcggtcagaatgagattgtgaacaagttagagagggagacagaaggggcacggaatttggaattcaaacacaatggcgaatcacgaaacccaacaacaacaacaacaacatcaacgcccccgccaacaccgccggtccaa

SEQ ID NO: 88714 - DNA, 233 bp, Glycine max
atgaagttgagccatggaaagacttcaaatgcaagctcttcaaagcttcctcttgcccttccttcaccaaaagctccttcagagtcttggcttaagcgcacattaccaacagttccctcgaagagtatatctttacggtctaatcttgctacctacttccatgcacctgttaaaacttctgaagttaatcatgggcatcttcagtttgctcaggaactactcccacccattcc

SEQ ID NO: 88715 - DNA, 247 bp, Glycine max
gttttagagagagaaagaatcagagtttctgcttctgctttaggaggagagagagagagagagagagagacagcgagcgaaccatgataacacgatcgaatctggttgaacagctgcgagagtatcagattcgatccaagcatgattgggcctctgtctcgttcttctcctccacgtcttcaaacatcaccacttccagggtggatgtggtggtttatgtaatatgggaacttgttattttagcttt

SEQ ID NO: 88716 - DNA, 284 bp, Glycine max
tcgctctcgagcgttctaagccaaattgattttggatatctattcttttttgttgccgagtttctctctcttgcaatcaatggtgacaagcatccaggaatctagtgcttttgcttgctaaaatggttaagttaaggccttaggcatgaggatgctaaggccaatgagaaagttgtggggatctttgcagcacaagagcaaagctggttgagtgaaaggaggagacttcgccaacacattggggctctactgagtgagctgagagttttggagagaaacaagat

SEQ ID NO: 88717 - DNA, 280 bp, Glycine max
tgcagagtcgagcatagagagcgagttagagagacacaaaacgattgcgtggggctctatagtggttttgttcttatttccacagattgtcatttcttcattttaacaagttcataaaagaaactccactcgcctactcacacacagaccctatcaataatctgaacataaagtttcgttttttttttttgtgcgtgaagattttggaggaagagggtagttgagtttcaattcggggtcttgcaatggcacccagttttgactttgcttctagcctcct

SEQ ID NO: 88718 - DNA, 297 bp, Glycine max
cggctcgaatccggtcgagggaaccttgaactttttatgataattgtgctggattgtattaaattttatgctaattatttgctttttacagttgtacatgacaaatgttgcattctctcttcacacagcagttctttatcattcttttttttaaaatagattctggatccatgttcctgataatggtcttccattctcaggatccagtgttgtgcagtgtgacagttggtgtttcccactttgaaagatgtgccctttgggttcaagtattgtattacccattctatggtagtagtg

SEQ ID NO: 88719 - DNA, 264 bp, Glycine max
ctttctttgaagtgtgaaaaaaaccttatagaaaagatgatgcgatcagaggatctgcaattccaatggccattctttgaagacatgaactcaacttttgatcaaggtgttgagtcctatggcttcaccaccatgtatggccacgttggtgattgtggaccttatgacttcactatgaatgaccatgttggtgattgtggactcaatactctattgagcacaccagaggattctacttctgaaatttgttccatcccctttcct

SEQ ID NO: 88720 - DNA, 214 bp, Glycine max
gtcctccattccttgatcaaacaaagaaggttcgaaacgttcgtcgataaaaccgttcagaagaaggtgcacacaagccttcttccgatattggatcatgtacaacagcaaggggagattggtggatcttcaaggatgtcttaaaccggttcacgtttgataacatatgctccacaatcgtgggacatgatcctaagagtcttcccattgattt

SEQ ID NO: 88721 - DNA, 269 bp, Glycine max
gtggttaactaagcagaacattagtatcaaagcacctcaacttgaaaggttttccatagcaatatggaactccctatcaaatgaatcacataaatctgccatcaagatttttgctcctaatctaacagatttctcttatgagggtgatcttgagcaacatatcattctgttgaattcagcatcaattcgtagtgcgtctgttgtggttgttattgatgaggacaacaaagaaagaatggaaaatcttgggtttaaagtgcataatcttc

SEQ ID NO: 88722 - DNA, 275 bp, Glycine max
caatttgatagtttggtggtcctcctgggaatatagttgacagataatgctatcttcattatatcaaaactgttacacggtggcattcttgtctaccattacaataagaaaatacggaaacttgataagttatcttgcagcttgatcttagatgcaagaacgtattttgttaaggttctctatcggagggagggacttctagtatgacaaggttggtgctatagaagaatactccaagatgaatggggggatcccacgaaaatgactcattttaa

SEQ ID NO: 88723 - DNA, 259 bp, Glycine max
gtctcttagctttgattctctgttctctgttttgttctgtttcgcgtgaacttaaacaatgaagactgcaaagggcaagggagcagcgaggccctcaaaagaatcactgaagcctgttgatgaccgaaaggttggaaagcggaaggcttctggtaagcctgagaaaagcagagcaccaaagaaggagaagaaggccaagaaagaccccaacaagcctaaaagaccaccgagtgctttcttcgtgttccttgaggagttc

SEQ ID NO: 88724 - DNA, 141 bp, Glycine max
gaaaccaaaaaacaatggcagattcagaaaagtacaacaagaaaccctcttcatcgtctttcttcagttctccaaggttgttcaccaatttcactgcgaggggttcatgtgaccgcgaccatgttgtgccctatatctaca

SEQ ID NO: 88725 - DNA, 256 bp, Glycine max
cctcgagccgattcggctcgagttttcataagcacttataatagacagaaataagaaaaaaaaaattaagggaaaatcaattacgcttatctcaatttaagatcaacttatacatctcaacttaaccgctattataaaagttaaaattttagtttatggagaagttgaattcattttaccttttattttcttctacaactgagaagtttatcggaatagtctgttactggttcaatgttgtggaagctgaaatgtc

SEQ ID NO: 88726 - DNA, 241 bp, Glycine max
ccctcaacatggtaagaggctaagtgcacatctaaatgtgagatttctcaatttaatgtaaaggttcgtgattggaatatgaagttgatattacccattggcgagatgtatataaacttatatgtgaagctatttctcattaaaacaagcagtgatactcacaggtgagctattaggcaaaaaataaatggaattcagttgtaaattaaaaaaagaggaaaaaaatgtggatcaaaataga

SEQ ID NO: 88727 - DNA, 253 bp, Glycine max
cgagaacaaaaaaaaaaaaaaaaaaaaacccgcgatccgccctcccctgggaaaagggaaacccagaagtccgaccgaaagaaaagagcgttttaaaagtgaaaaaaaatggggtttccgtccacgaagctgttcaccgggttttttccgaaaaaggaaatggggtttccaatggaaggccccgatccggcgggaaaaacacccatctggaaaaagctcaaccttggagaaatcgtcccccttttccccccaa

SEQ ID NO: 88728 - DNA, 230 bp, Glycine max
ggcgagactgtccgatggtgtcatggcatcgatatctggtgtagtgacgccttaggatagtactcgcatctcgtcgtcgggtgaccgccattgctgtacctcgattggcgatccgcacttgtggactaggcatggtcgcgtatatcccatgccacgccactttgttgttaggatcctgaactggttggctgtcgcttcgcctagaagacacggccctccccactgctatt

SEQ ID NO: 88729 - DNA, 114 bp, Glycine max
gactgccctggtcagatagaactatattcacatgtcccagtgcttaagaattacgtggaacatttgaaacggagaaattttagcgtttgtgctgttgacttacttgattcacag

SEQ ID NO: 88730 - DNA, 183 bp, Glycine max
tggatgaagaagcatattataggctgattgtgataactggttcagtagggtgtctcctcttgttgctgtacgttttgaaatcgatattactaaagagtaaaaacctgccaccaagctcaccttatgctgtgccacgcataggtcaactccatgttataagaggatcccttcagctaagtctcc

SEQ ID NO: 88731 - DNA, 253 bp, Glycine max
attcaaagatagtaggctgccaggcaccgcacaccgccaccgcactttctccgatcctcacaattttgcctccggcatgtctccggccgccggagtcagcgtccccctcctgggggattccaaaggaacgccgccgccggcttccgtccccggcgcggtgttcaacgtggccaccagcatagtcggcgccggaatcatgtcgattccggcgatcatgaacgttctcggcgtagttcccgctttcgcgatgatt

SEQ ID NO: 88732 - DNA, 258 bp, Glycine max
  unsure (1)..(258): unsure at all n locations
ccacaaacacaaaacaaaaccatatagctagagacagaccgagacaaaacaggtgttcttccgcaatcaatgcgcgtcaaagacgagctttctcacaaacccgaaccgatacatctatccgaaaacctcacacacacatcttacacaaacccaagagtgcatactccagttatacgaagcttaacaatgttgctgccacactcactcttcctcgccatgcaatgcaatcncatgatgagtccgaccagctgctcaact

SEQ ID NO: 88733 - DNA, 254 bp, Glycine max
cttttggaactttccatgggaaattcaaacatacccaagtcattcaacccaaaagacttttacaccatcgcttgatgaactcatcgtcgaaccctatttcaccaggttttcttctgaatgatgaatcaaagtgaggtaaccaggtaagtgaccaccatcaacaaagacacttatagatgggttcctctatgcactgatgcttttgaaaaactcgtttacaatgcagtcataaatttctagtttaactagttttt

SEQ ID NO: 88734 - DNA, 251 bp, Glycine max
aggaaatcctataagaagagaagtggaagagggagaaggagggaaggtgatatgaagggcgatgtagaggagcagagatatggagaagagactcagagataaattctgcaatggaagagtggtctatgctggatatagtcaaacctgaaggatatcataagattgcacacatcaccacaaaggctttcctaactctatgtgacttggctctacaagttattgacaagataggccagccatggctgatttga

SEQ ID NO: 88735 - DNA, 258 bp, Glycine max
cgcatcgagccgaatcggctcgagctctgtttctactttgaggcctccaccgttggtgggtgggtacttcttctctcaaaatggcaaccggagtgaacagaaaaatttctgctgcatcagctcgggcccacaccagaagggcaaagaaaaccaattccctttccctcccatcgggaattcttggaacagcactagcagtgttgtttattgggtttttagcatgggcttatcaggttattcaacctcccgctcccaaga

SEQ ID NO: 88736 - DNA, 254 bp, Glycine max
taagaacgtgtgcaaataaaggagattgatatggacggaagaaacactgaagcaccatatatatacatatatatcagttaatttggtgtcacttttttatatattttataaagttttaaggcactgttcagatctgatcatatgtactctttgtcctctgcatgcattatggttttcgtactgctgggcatgcatgggtttgttatgccaagttatatatattatataatacataatgaataaataccctgaat

SEQ ID NO: 88737 - DNA, 258 bp, Glycine max
aaaaaatattagtaatttttaactgctatgttaacttaattattctaaaaattatgagaatactaaagtttcttaacaaaaaattgaaaaaaagaccataatgatatatgattagaatttttttaaaaaaaaagaataaaggcatgaaatttgtataacttcttaaaatcgtgagaattcttagagttactcctatttgaaaattattacaaaagttatatccatttaataaattctagtaaaattgttcccttttca

SEQ ID NO: 88738 - DNA, 250 bp, Glycine max
aaaaccaggaaaaccaatcctttggctcaaatctttgtctggacacagcagcagttaaatctgctagtcctagctctcaaggtagaattttaaagtccttagatgatagtgtagaaactgaaagctacctggagatcagggaaacattcaaatgcaccagaaatctgaaacaagctctggagaaaacatgacacctagcaaggaggaattccatctatggaacttgaaaggggagtccaatccacttttg

SEQ ID NO: 88739 - DNA, 200 bp, Glycine max
tgtttggacaactatggcatccgctttttgtcaagttaagtgggtactgttatgaggttgaactgtggcttttgatgtttgtagtcttgccatgaggctgcttggtgaatcttctattctgaaaagactcgccgccttgccatggtcaacttggatgtaaattgcatttggagctgccatgggtctgaccttcctctcaa

SEQ ID NO: 88740 - DNA, 243 bp, Glycine max
aaaaccctgaagaaagacacagccattgtttgtttactttccattgattgagcgaaagctttgttttttctgcgatcattttccattgggtggaagaaagtctcaacctttagtcgaaagagcaagatctgagtgagtgagcgatcatgtgtggtggtgcgattatctccgacttcattcctgcgggtcccgccggcggggcgcacgcgtgaccgccgacatcctgtggccgaatttgaggaa

SEQ ID NO: 88741 - DNA, 265 bp, Glycine max
ctgctgtacagcaatggcatcggtcaagccgagcgtggctgctacagtgaccgcagtgagagatagtatccacaaggaacactgccccagtatacaaccctacacgtccacaaagtggaagtgtcaccccatgttgatgttccctatcgacatgcattcagaaactaatgatttttacttagctacttgcgccacctgcaatctcatctgaatctggatatgatgctagttggtgagtatccagatataatatggtagtttaacg

SEQ ID NO: 88742 - DNA, 263 bp, Glycine max
attctatattattttcatttaattaaacaaataaaaaggaaaactttcttatgataatttcttttttctttatttaattaaagaaacaaaagaaatgttgaatgtcattattaattttgtttcctactattggcctgcattgtagcctctacccaatttgaggcgtttggatctctctggctccaaaaatctaataaaaatgccatatattggagatgccctatatcttgagagttttaatctcgaaggatgtatacaactcg

SEQ ID NO: 88743 - DNA, 264 bp, Glycine max
aaaatcggagccctaaattgagagtgctacagctccgacccggatcgaaacaaaacacctgaacgacgcacacgatgtaatagcgaaacgaaaaaaccgagcaagatccaggaacgaggaagccagaatcgaaacctcatcatcattaccatggtgatgatgacgaggaagcgccggcgcatgacggcggtgacggcggcctgccggagggtctgatgatcgagatccttgtttggattagggtcagcaatccgctgcaattga

SEQ ID NO: 88744 - DNA, 266 bp, Glycine max
caaaaccaaagccaatagctactactgcaactacttctatgcctatggatagacatccccttgaagtttcttccacctccaagatcagcagtggcaacaacaacagcaccctagacaggtttgacagctccatcactgttctgatatgatgggaatgggatattttcctttccagcacctcaactatggaccaaacatgggactcactactactcccaacaacaccccactttgcttcataccaagttccacttcttctcaaatga

SEQ ID NO: 88745 - DNA, 256 bp, Glycine max
catgaatattgttagtcaagaatgtttagatttagaaacagattgtccttataaggttgtattggtaaattttgtcatatctagttcaaatgaaggtggtgttatcgttcaaaaaaaaaaaaaaaaaaaaaaaggggggccccccgataatggaccccgtcgcccggggattaattccgggccgggaccctgggggggaacaagtttccccaaaatgaggccttttaaaacctgggggaaaccagggccaaagttt

SEQ ID NO: 88746 - DNA, 262 bp, Glycine max
ggaagaaagtcgaaagctcaagcaagctccccgctgattcaaagatgaaatctgtttcaactgtgacaaagtctgaggtcaaatccaaatcgacatcgtcatcttcaaaaacagtaacaaagacaactacaaaatgagagagaagaaagtctacagtctgcctgggcagaaacatgatcctccagaacagaaagaacccctgagggttttctatgagtcattgtcaaaacagataccaactagtgaaatggcagaattttgg

SEQ ID NO: 88747 - DNA, 263 bp, Glycine max
atagcatacatggtacagcaaagttgtatatcatttatttgaagctttttgtcttatgttctattcagaactataagatgcatgatttacattgagttctttattccttgagcaaatttgctactgctgtcagatcttctaacttttgcagaggtactaatgcaaagacagtttgtactgtatcgtctgaagacttgaaatgcacattatcttttctgtgaattgctgccagaatatggagttggtttatgtctagcccatct

SEQ ID NO: 88748 - DNA, 221 bp, Glycine max
acactccatgatccagaagccttcttcttctcatcttcatgtgaatggctttggaggctcttatgcacatcatcatggttggtcaagaccaatcattgatcaacaacccggaatagcaaagcttgctgcgcagattttcatcacagaacaaaatcagcattatcatcatcacaaagcagcgttggtaggtttgaaatggttaatagtagtaataccatgtt

SEQ ID NO: 88749 - DNA, 256 bp, Glycine max
tcagcatttcagctaatgacacgaagtgagcgttgatcaccattttgatacattaatgatttcgtttctccgttcattcgacgattattgcatcaagcgatatcaaatcaccaatcaatcattaaagaaaaattaagtaaagacaaatcactaattagccacaagtcttctttacctgcggtgtgagttcgggagttgcggtgctgccggcgacggaactctcgtaccttacgtctctttcgcttgagcttcggtt

SEQ ID NO: 88750 - DNA, 252 bp, Glycine max
tgtgtttctgtataaaagtgtttaggcagtgaaatcatgaatgaagacgccttaagatagtagccacatataatggctgtgtgactgacaatgttatacaacaattttctttcaccacttttgtttagtcaaggtcacatataacccatgccacacaacatagaagttaggagactgaagtgattggctttctcttcccctactacacaagacactccattcagaaattaagtatctagcaattccacccat

SEQ ID NO: 88751 - DNA, 256 bp, Glycine max
ctcgagccgaatcggctcgagatttattttaaaatgtcagctagacgctaattgagacgttagtaaaggtgtgcaattcaatggagaagtatgcaaataaggtaagaaaaatctaataaattcctccatttcctcaattcgtactcaatcatatgaggtttcatttttttaacttttatcctatcgaccaaattataaattatcatccttggaaccccagaaatttccttgcaatgataatttcatggacttggcc

SEQ ID NO: 88752 - DNA, 237 bp, Glycine max
cctgggagaagttcacccccatgcactatattcctatactacctgcaactccacttgcgagcacgcgacgtttaccctatggatccaatctctggtactgaacggttcaggatgcaccgtgtttggttcctatggcccaattgcctatcgcgttgattgctacaactgcctgcatagagatggagtccatcgcacggctcagtatggcgatattctgtgcactatgttggtaaagca

SEQ ID NO: 88753 - DNA, 242 bp, Glycine max
agggcattgttcaaataagcatttggcttagaaagaagtcaacaacatttttcatcctgctatatatgtacatgtttattgtattcattttatcttatatctattagaagctttgtttgtcctagcaatctggctttgacctttgccacaatttacctatatgacaaagtttttgtgtagcagtttaggttgagtgactccatgttcaataatctaatcgatcgaatacatgtttttagttc

SEQ ID NO: 88754 - DNA, 250 bp, Glycine max
tgcatgtgtgtataataagttgttaaacgagagttttgatttcatttctatgttgtcactttgtgtgctaccagttaagtgtacgtgcattgttctatttcgttaatttaatttgcttctatgtgctgatgttgaagttgagggcctttgatgtacaagttcccttgtgactttccttttacaattataattaatatttattattccaaaaaaaaaaaaaaaaaaaaaaggaaaaaaaaaaaaaaaggaa

SEQ ID NO: 88755 - DNA, 250 bp, Glycine max
ttattctgcatcctgggatcattctattaggaaatgggatgttgagacaggaaaaaacttgacagatttagtaagttgaaaatttcatgctttctctcctctaccccaatttgtttaaaattgtactcatttgaagtgttaattttgtctttaggtcaagctgtgacatcttactctttgatgctctgccattgattaactatttgtgggtagtcaggcagctaaattaaaactggattagggcaagctt

SEQ ID NO: 88756 - DNA, 245 bp, Glycine max
gtactgacaactagtgtgtatatcttatttattaattataaatttcatggctgggtcaagtaacacataggctgaactatattattgttgccattatctctttagtttgtattaacagctgactaattttattggaagcatgcagatacttgtgggtatgatatacagaaggtacaaaaagacttcttatgcggggttcatatcagtatctacatatttatatatttttttgcattcataatttc

SEQ ID NO: 88757 - DNA, 248 bp, Glycine max
catgaaagaaataaaagaccgtctatcattagatcactctgcctaacatgggagggagatttgtgttcaccccaattgtgggtttggatccatctgatagaggtccaacattagaaggggaattgctaggggcacccaacaacattgctggtgcacccaacaatttttcaaaaaccccaaaatacccctgaacgtttttcaaatgaaaaacaattttgttttggtgtgatatttgtcaactaaggtac

SEQ ID NO: 88758 - DNA, 169 bp, Glycine max
aaaggttacagcgtgtatagctgcattcatattggtatatagtcatgattgtacaaaagatgaaattattgtttctcaatgcgtagtttaataagatgaaggaaaggcaattaaaactgtatttgcttcaagcaaagatcaccattctatactcaaaataatacatacc

SEQ ID NO: 88759 - DNA, 243 bp, Glycine max
tgttgagagagaaattgctctccaggctagcaagaataaacgtctcaaggaagttgaggagcagcaaaagaaagccctggaggaagatccatctgtatttgattatgatggagtctatgaccaaatgaaagagaaagttgctcgtccattggtacaagatcgtgaagagagaaagccaaaatacatccaaaatctgattaaaaaagcaaaagagcgagagcagtatcgtgagattgtttatga

SEQ ID NO: 88760 - DNA, 245 bp, Glycine max
cttttctccttttcaacgcccttcactagaggagccactttgcacttgtggcaacaatttgaacaactttgtgtgtgtgtgaaatttgggggatctaggaaaaaaaaaagttcaaattttatgtggcttattctcaagccatgttctttgctggcagcaagagattcgttcacatctctctagtggtgcttttgggtgtcacaatattgcaaacgtgggtaagttggcactcatgtcaagttggg

SEQ ID NO: 88761 - DNA, 248 bp, Glycine max
gcctgagggcataactgaattatggcatcatgacaaattgtctgtgcccttgatcaagtgtgaaaatgtaataattcttagtgcaacaaatgttccagagctggaaaagcagtgggactgttggattgaattagcaaaatctagtgatctactagcattgctggaaccatatgtatcaaaggacgtgacaactaatctgtcagattacacagcatttgattttgctggcatgtaataaaaatgatcag

SEQ ID NO: 88762 - DNA, 252 bp, Glycine max
ctcgagccggtcttgtgagacatacttcaaagttccacttctctccctctttttttcctgcaatttcgtgctctcccccatctctctttctctccctctttcttttcctccattgaagcatccttccaagcttcttatccaaggctcatcttggtggtgaagctccttcttccatggcttattcccaagtggatggtgcctcctctcacctcttctcctttgtcttctgctgcatctccatggtggaaaatc

SEQ ID NO: 88763 - DNA, 116 bp, Glycine max
agtatgatgaatggatgccaattaggaggtcaagacattccaggtccagcttaagagggctaacaaacagggtagaccttactgctgaagctgagcaatggaattttgtacccttc

SEQ ID NO: 88764 - DNA, 242 bp, Glycine max
gaagcgtgaatggtcgcgatagtttcggagaatcggaggttacagccgttggtgacggttacgtgacggaagttagttcggttgcagaggcaacgtcagagatggtggaatcgttggagttaaagcgctgtcttggcacatgattcgattccggagaggtcacctgtgtcgtacgttttggagaagttgtaccatgggaattctgtgtggcgcacgacaactattggtgatgacaagggacg

SEQ ID NO: 88765 - DNA, 246 bp, Glycine max
tttattaattgcaacaatcttgtaaacttgtctacccattgtggaaagagtagacattgtaatttgtaacattatcttattccatcatcagttgctcatggggcatatattatctacttgaagaactccataacccataaatcacagacaaagcatgtgtatctaatgccactgatgaatccaactccttttgctaatgccatgaattccccttcacttctctctttccctcctggctcctgggtt

SEQ ID NO: 88766 - DNA, 245 bp, Glycine max
gtggttataagttgtaaaagctgaattacatttgttcttacactttcgctttatttacacaattattatcacacaatctttttcttctgagattcagcttactttggactttttacgggaccggctggctgaagcccacacagagcatcttgataaaggttgcagattgaaacccaaattttgtatgaggacaaagtttaatttaactgcactgtacatttcatgtgaaggttgtgatacatttg

SEQ ID NO: 88767 - DNA, 255 bp, Glycine max
tgataatatttataacattaggttatgaattattatctgttgataaccaaatataaaactgccaacataatgaaaaaaaaagttcgagtaagatggagacagattgtttgagaaaaatttagctgctaagatggtgtagaagtttattttagcgtgtcccaaaccaaatagtttcagttgtactctacgggaattgaagtttttaaagggatagaacatgaagaatattaagaaaaatatgcattataagttttt

SEQ ID NO: 88768 - DNA, 251 bp, Glycine max
ccatggtctatatctatgaattgttgtatcctatatgactgatcttgttattgggacttatgtagggttagtttgtattggaccattagtgacaccaacatggaatccctttgttggtgttctctcagcttgcgatggtatggttctaaacctcttttgatatttattagagggaaataagtctcctattaatgtgtataccttgtcaaattggactggatttgaattgtcacgttggtatccttttagac

SEQ ID NO: 88769 - DNA, 253 bp, Glycine max
gagacatgcaaacttgatggtgtacgacttcagtggggaacgatttcgagagcaatactctacgatttttagggaccggatagtttaacctgctgcacttctctgtgaaatggaagatccatcatttttcgatcggatgatcagtcatctgagagcaacttgcaagtactatactggttatccaaaggaccttggaccatcacgggtattcattttacctctgagcgtgagtttgttaaactccttcacgaag

SEQ ID NO: 88770 - DNA, 250 bp, Glycine max
atctgttggcctgtaactccccctttactttgtcatgttaactgtagaagtgtctttttttaagagccgtttcttgcaagttaataaggttaatcttatcaaattttaaatggaccctgagatgctctagctataattcagattcctgagcttttgtgttctgctcaaatatattaagtaatttgtctttcgtgaatctatattagtttcatcacctagtaggataagggttggtggttgttgttgtaga

SEQ ID NO: 88771 - DNA, 250 bp, Glycine max
ggtggtccaccttctgattggatcaagatatgcagtgcaaagatctggaaatgttctcatggcattcaataacaaggaagcaagttcagctgttcctttgttctctcctgtgatcgtcccaatggctcaaaccattggtccacttctatcagatattttttcttcaccaactctaagagctggggcagagatgactttgaagcactagaaaacgttagccctccaattatgaagcaggttcttcctttag

SEQ ID NO: 88772 - DNA, 246 bp, Glycine max
tggaatccctgaggacgaaatggctgctttagaaagacaattagccccagcagttgacaatacagtgacaaaagataggaaggttgggtttgtgagtgctggagtggaatctcagcttgatagaggggtaaaaactagtgcaaatcatgaggatattgagttacagaagaaagtgattctgatgatgatgatgataagattgaattgcacaaaaagatgttccttctgctgtgtttggtggtttga

SEQ ID NO: 88773 - DNA, 148 bp, Glycine max
cattgggaagactataactactgacacagtagatcgggctactgctgaacatgcagttgatcctagaactcgtatggttgcatataagcatgctggacagaggtgtcgttcatgatatcattggatgcatctcagctggaaaggaagc

SEQ ID NO: 88774 - DNA, 246 bp, Glycine max
agagggtattattggactggaaactgaatatggaactcttcatattaaacttttacctgactgtgccccacactctgttgcctacattctagaattgttagctttgcatcattgtgctggctgccgattttaccgtgcagagagtcgaggccaatcatgggattcagaaggaaaccatatagaaaatgctgcttttggtcccccttatgcattaattcaagggacactggaagcacaaggcacagc

SEQ ID NO: 88775 - DNA, 241 bp, Glycine max
gaaaatactaacagcatttcagcctgttcttgatgaacatcttaatgagaaagatgctttaaacaactgcagtgctgctgtgcgcgaagtgggtaaagttgtggaagatgttgaaaatacattggctcatggaaaccagttggaatctactttggtgaatgacttacaggagcaggaaaaaaagcttaaacaatatatggagcaacttgaaaatggggaggctgcaagggcttcattgctt

SEQ ID NO: 88776 - DNA, 234 bp, Glycine max
tagatagtgatggtggcaggaattggagttcccaagatttccaccctgattaaagcactctttgccaagcagctactgatgaaactgaagaacatactgattctaatagtggtgcttttggcttagaaactaaagagcttgcttacacagccaattcaacgggtcaaaactttggcttacaaactagccatggacatgtggacagtagcacttattttgaaggtctatcatctg

SEQ ID NO: 88777 - DNA, 262 bp, Glycine max
cgtctcctcgttattctgctcgagcgtgtgtgtactgtacaagttgattctggacaaggtttcaatgacgaggagttcatattgttgcttgttgggaggttaaactaagatgaaagggttttattttatttaaaacttgtggtattgtattgtgtttgcattgtgacttggaagtcccaagttcaaattattggaaccacctgtgtttgcgggataaggctgactatatcttcctcccccctccctaatacaccactttgtc

SEQ ID NO: 88778 - DNA, 255 bp, Glycine max
gtcatatctctttttttaatcaaaaccttccattcaacacttatagttgaataaaatgtctgctgcaacttttgcagctcatattgctggggctggctttgtaggcttgaagtccaactcatcaaatctttgccccagtactggatccataggatggaaaaggaagattgtttcaaatggttctaaaacttactgcatgaaggtgaagtgatcaaattcattgtccatatatatgatgtgtttaaactataacat

SEQ ID NO: 88779 - DNA, 233 bp, Glycine max
gtagtcggctcggtatgtggtttgtctgtgatgttgttagttgattctggttcttatatcattgcggtgttgtgtagtgttgaggtctgtttgccggtgttgatatgtattcggaggatttccgggccagtctatagactgctgtcgttgacgtttgggctctcatggacgcgtccatcgctgtggcctccacctatcacgctcacgagttggagctccggatagtgtgaatc

SEQ ID NO: 88780 - DNA, 239 bp, Glycine max
attttgaaataaattcacaaataatttgggtggatcctaattcctttcttatcctatcctattgactcaccaaacaacagattaaaaatttaaagtaggatatgatagcatatcttatcatatcttgtttatcctgaccatcaaggaagcccatggtgttaatacaaaaccattttgatgtctctacctggcatcttaagcttttaggatagttgattctttacatgatatcaaagtct

SEQ ID NO: 88781 - DNA, 272 bp, Glycine max
cggctctcttctccattgcctccttcgtcttaccatcctggttataggctgaaaagggaaggggggagagagagtgtttgcggcaatggaggaaccgagcaaactgaagcgtgccatgattgattccttggctggggcaatttctggtggaatatcacggactgttacatcgccccttgatgttattaagattcgattccaggtatgtattttgtttgtcacgttttttggttttaatccctctttaattatcagggttattcatgttgaaa

SEQ ID NO: 88782 - DNA, 263 bp, Glycine max
agcagtcagtggtgaataataaattttaaggaaaattacaaacacagtgcttcaagaaactaatctaatctatggtgtgagtggttttagcgtttaacgtttatgttaagcaaaaccgataaccaattcgacccacctccttgtaatacgaaattatgggacgttcaccaacttgtgttatttttcctacatgcaagggtgcaccatcaaagtggggtcctcattttttaggcgtggccattgagagaaaattgacagagttt

SEQ ID NO: 88783 - DNA, 270 bp, Glycine max
gtcgggatggttatgaaggaaatccatatcttggctgcatagacattgacgaatgtaagacaggccatcatacatgcgtaagtgaaaaatattgtctcaacaccaatggatcgcacaaatgtttctgtccaaaggggcaatccggaaatggaacaaaggaagaagggtgccacaaaaaagatgtagttaccaaggttgtcataggagtcgcagcaggaactattattttagttgtggggactaccttactgtacttgatataccagaaaa

SEQ ID NO: 88784 - DNA, 260 bp, Glycine max
cttggcttgtgaatcagcaccacattcacctgagctttttgtgaggattccaaagcatggcttcccttgcagcatccactgctgctgcttcccttggcatgtcagaaatgcttggaaaccccatcaacctcagtggtgccacaaggccagctccatctgcctctagccctgcctccttcaagactgtggctcttttctccaaaaagaaggctgcacctccaaaaaaaagctgcagctgctgctcctgccaatgatgagct

SEQ ID NO: 88785 - DNA, 262 bp, Glycine max
gtccaattagtcttattatacaacaaaattaaagctttatgttccttctctctctctagaagattataatgattagagcttagatatgatagttaacacctgtatgttccaaaggaatataaagaatgttgtaaaattagcatttaatttggatattgataattttttatcattatatccaagttcaagctgtagagtattttgatatttgtttttccttttcatattttacagtgtccacttttgaacataagttactgtc

SEQ ID NO: 88786 - DNA, 262 bp, Glycine max
gcagcatgcatttgtacatggtatgggacgtggtccaccaaacatggatcgagttccctatcctcgtggttatgaaggaccaaattctccaagatcgtggaatcctctggtcagtttcacttttcagatacaggggttaatgcctgggaatcttcatatctatggtctaaacattttctatttttctatttttcggtggaggaagcgggtgagggggtaaacgcctcccagcctgtcctttatatttaaaaatgatgtttat

SEQ ID NO: 88787 - DNA, 240 bp, Glycine max
atggtctttttctgtacaacacaacgagacctgtgaggagcagttctgaagatgactgaaacagttccagttcatgaaaaccaatgctgaggagaaactatcaactagggaccctgccaaaaaagaatgtcagccttgaggcactcttgattcactaccattgtgattattcttttgagcggaaaatttgttcagttttcacgtttaagggtcgctttgctgctttatgatgactgactt

SEQ ID NO: 88788 - DNA, 257 bp, Glycine max
tcttagcctcatccaaattaccctcattcaaaaacctttgatcacggcattgaagtggtttggagagattgcaaagtctgagtatgaccctgataagaacacctactctatcattgttcccttcctctgtgagaagggtgatctcaatagtgccattgagatgtgccaggagattgtcgacaagcggtgccgtgttgatgctacgctgctgcagggcgtcgtggatcagctggcgcagcgatggcatggttacagag

SEQ ID NO: 88789 - DNA, 266 bp, Glycine max
aataatatccctctaattaaagtaaagggactaaaaggtacaattaagcttactataatttgtgagaattaaactgtcatcctctttatcgttgacattgagagttgtaaagaaacacaaagacataacaatagaaacttttggtatccgtttggcacgtcaagttgcaattgtagtttaaaattgtaaattcaattccaatcttgtcataattgaaactggttcattgtcataattcttatgtttgggttatgcaaaaattagag

SEQ ID NO: 88790 - DNA, 266 bp, Glycine max
ccagcagtgatgcaatctaacaatcaattgtatagtcctggcactggcctttccatgagaaaatcgttgcaaaggttccttcagaagagaaagaatcgggtccaagaagcatcgccataccatcactagttgatcatgaaaaggaggaaccaaatgaaaattgttttgctgtatgaaaggagagtctatttagaattaattagttcttcaaattctttctttaatatatccttaattattaggtttactagttcacacctttttga

SEQ ID NO: 88791 - DNA, 256 bp, Glycine max
tctcgagccgaatcggctcgacaacggggactctggagcttctcacgctagtcagacacggatgatctggaagagttcatgaacttgtgtagctagtactagagaatggaagggcctgtagatattactgtgccatattccaaaatgggccagatgaaaatgatgcaatgcaatatatttttgcgacaagtctaaacaagggattgaactgtactccattcttgaaggcaggaaaggtaatcttcaagtacatgat

SEQ ID NO: 88792 - DNA, 251 bp, Glycine max
ctggagggttaactgtaatacagtgcagtctgcttatatttggcagatgcctgagattttgtttaattttactcttaacaattcgatatctgaagtattggaaagttttgatgacttcaaggatgaattaaagtttggattgcatctaaactctgacgagaatgtgtatgtgcaaataacaaatgcaaatggctcaacgataactcctccagtagtagtgcaggcttcagtcatggcaggctttgggacct

SEQ ID NO: 88793 - DNA, 131 bp, Glycine max
aacacgtcaaaaattcatctcatctatctgtagatcggagaaaccaaaaaaaaaaaattggggttcgccgagaggaaagcattgatccgcgacgtggcgttacaagtcgttttcatctggctcaggatttt

SEQ ID NO: 88794 - DNA, 262 bp, Glycine max
ctagaattcattgtttggatgttttttttgtgaagaatttaaaattttggaattttaaaacaaaattttaaacaactaaaaatctggaatttcaatttccttctaaaagatgagaaattaaaattctctttttacagtcttctccacaaaacaccgtctgagctcgtggaacatcgatcaagtgtgagcgtagaggaacacatagaactagcataccaatcatatcttctctttttttcattcattttttttcacctcataa

SEQ ID NO: 88795 - DNA, 254 bp, Glycine max
caatgatataattttccttgaaaaaatttacttcatgatttaaaattacttttgttggatatgcttgttttctttattctttgtaggtttcatgacattggtttattattagggtgctacaaggtccaacaataggcagttacttttcaaattagtcctgtgtaatacatttatatgtgtgaaagtgaaacagggatttaaaggcattatagatgccttgttgaagaggaaatggctacattgttgttatagcc

SEQ ID NO: 88796 - DNA, 308 bp, Glycine max
ttcaaattggtactttttgctgcatccatcatcatcttcttttcaattatacaccattgaattgaaataccatcatgtacatgcttttgctttagttcactttttgtgtgatcatggttccccaatgtggtgagatgagacaggcaacattgtttttactgtttctgcattttagggatccaacgttaatgataatttgactgctaccttctattccctaaaacctgtttgggattgggattgggaattttggattcaatttgaaatggaaaaagcttttcttcagggttttgcacttaacaacaaca

SEQ ID NO: 88797 - DNA, 295 bp, Glycine max
ggacactaccaagttgtacaaagctgctcttggaaattgcttcgaggctgaagagtggggtccgtttgagttctgcgtcatggccaagcacttcgagcgtcaagggaaatcgccgtatgcatatcatgcggtatgatgcatgatatatatatatagttctctgattttcgttcgacaacgtaatttgaaggctatcaaatttcattcgattatgaaatcatatgtttggattactaaaatctgcccgttccggtgtcaatgactcccatggggttcgtgatgacagggaggatga

SEQ ID NO: 88798 - DNA, 305 bp, Glycine max
ttcgagccgggaacaatcttgatgccttgaatgttgatttacaggacttctttctccatctttacaatcttgtacttgaatacaggccaggaaggtttgcattaaatttctgtctgaagtctccctttcatttttttttttcaatttttttttccaaatacaagtatgttcttgttctgaaaatctactagacgcatgcaggataggtcattgctgtggatatctggatatgatattaatgtacttgtttttgtgttgtcttacatgctagtttacacacataagtatgcctatacatttagtga

SEQ ID NO: 88799 - DNA, 293 bp, Glycine max
agatacccgaaacccttcttcactctgcaactttcacttcacacaacaatgatgatggcaggtgcagccaaaaccctaaccaatctttgcccctctttcccattcccaaccaaaccccaaaaccaactcaccactagccacgctttcccttccactcgcctccgccaccgcgccatttccgcggtggcgaacgcggcgcaacctccactcgccgccgccactgccaccgagggtcagtaccgagtcgatgtgctctcggagtcgctccccttcatccagaaattccgcggcaa

SEQ ID NO: 88800 - DNA, 204 bp, Glycine max
cacaactgcttggagatcagctgtgatggcgatgaatctgacggtgtaggattactagcacgtgattgactgactacagacaccatcatggctatcacaactgcttcgtgagcaaccaacttcaagctaaactgtaatttctagtgctatagtttcatattggtttaccgtgcgaactagctttcctgatagcaaagcctctct

SEQ ID NO: 88801 - DNA, 299 bp, Glycine max
atccaattgcttctaactaattaagaaatgttaatgcattctaattgcttaaaaaagtgttcaataaattttatattgttagcataataatgctttctttttaatgaaaatttcatatttttattttcttaactataatgtctttattccataaaaagctataatgtctttaagctaattagcatttgccaaagtattattcctgggtggtttattgaaaaaaaaaatgtagcactatgaaatagtgtagatggatgtaacactaagaaattaaggtacgtgtaatgaatcaatgtggg

SEQ ID NO: 88802 - DNA, 303 bp, Glycine max
atgtccagttaaggtgcatatgaatgagaaagggaaagagaaggttattgaagggagaccatcaccaaattcctctggagctcagacaggggatgttcccctagtgctctttttgaagctcttgaaccgacccctgtttctacgcagcaatgctcatcttgagcaggtcatgggtctgattcaagttgtagttgatactgcagcttcaaaattagaaagtcaatcacagtctgaaaaaggaatggcagatacccaaaatttgtcagccagtgaagccccaagtaatactgagaaggatgctcc

SEQ ID NO: 88803 - DNA, 237 bp, Glycine max
aatacataaaacttaatgtaatgatgtatttctaaagtcttaagacttaagaggaccttttttatgtgtcccgcttttctttttttctttttccaattctgtcattgtaaagcagtgaataccatatccatttataaaattaaggatacggtattcctgctttacaatgacagaattggaaagcagtgaataccgtatccttaattttataaatggatatgaattttattttgtact

SEQ ID NO: 88804 - DNA, 295 bp, Glycine max
agcattcagctgtcattggactgtagtcaaaagtcttcttcaagagacaccctcaagtgtttatgttatgcattttcaactagtcaatctcctacatcatcagaaaccagaaattgcaaactggacaaagactccctttataatcttgcggagcatataaaaaacaaattctggtgctaagaattatttgattctgagaaaggattgactgatattctacagaatcttagagcactttctaatgatttgttgagcatgtctactgacaatggtgctcttggtgtacatgaagaga

SEQ ID NO: 88805 - DNA, 295 bp, Glycine max
ggaaatttacttgtttagctttgtcattgtcagtaattcgttgtttggagtataacataagaacctttgctctttgtgcgactgtgtctctccattgagcagttgtgcattttttcctttttcttatataaaaattcaagtctcttttaattaaattctttttagatctgtactccatagaacttgattgaagatttgtaatttggaaaaataactaaagatttttttttattagatatactaaagttatcttacaataacaacaaaagccttaatcccactaggtgagattggc

SEQ ID NO: 88806 - DNA, 297 bp, Glycine max
agacaacgtatataatatcatatgtaaattccagccttaaaactatttgagtctctcgacttaatgctgttcgaatttcatgattgtcacttacaattatatgtaatgtgtgatctttgctaattaaattctcttttgcttcccagcaacatgaaagctgtatgaaacagagaatttgtagtttctttaaacatgaaaagagcctagtcaaatatgtttactattttttttatttatggtgtgactctctttaattggctccctattctccgacaagccaccaggttgagatcgttg

SEQ ID NO: 88807 - DNA, 288 bp, Glycine max
tcagcatcaacatcagcagcaacatccgcagcaacagatgcagcagcaagtttctatgatggtgcctcagtatggtggatatggtggtaatggttatgggatgcagcagcagcagcatcaggtgccaccgtataataaccaagttccggtgccggtggtggtgggtatggccatcgatatggcaattcgcagatggctgggccggtatctggtgactatggtgcgagggtgcctcccaattctggtgggggttacctgatggctcgcagtatggcttccctccttcgt

SEQ ID NO: 88808 - DNA, 292 bp, Glycine max
tgaagaagagtagttttcttaatcttcctcttttcatcacttcagagttgatctaggtgaaccacagtcacaagtctgaagtgctggaaagaggatgatgaagaagagtagttttcttaagtgtctttattatgtccttgcgaaaataagtcggttttccagacagtgattgtttttctttgagattttttcccttttatgttagaccattgttagggcgtttggaccttttattgttctactagtaccatttgaacatcgaatggattttaataaatcactttgtatgcgt

SEQ ID NO: 88809 - DNA, 323 bp, Glycine max
aggttgctcacataaagcacaaaaaaaaaaagctgtcttccttttgttcacccccctctgatatcacggcgacaagtcagttttctcaactttggtcctgcagacatcaccaccttgttaccttaatcctcacgaagtgtagttactagtgtcccattttcttccttttcattttggttaattctctggggttgctcatgagtattatggtgccttgaaggttttggcttcttggacatcctcagcttcatttgttttaagctacaaggttcttgctttttttggggttttggaggaattccattgcgtcctttgatgttggg

SEQ ID NO: 88810 - DNA, 315 bp, Glycine max
ctcgagccgtgacgttgttagagagagatagataaaaaatggtgaaaggaagaagcgaaatggatggcgtagaagtacctgaagccatgatagatactctcaaccgtactttggagagccttcaacaactcgagacacagttaccccaatttctctctctctccgacctgattttctcgctgaattaccactcgttgaacgcgctcactcactcttctccctcgccaaactcacctctaccctcttctcatgtctgcacctttcttccctctaaacaataataatcacacccttttttttaatacaatctttcca

SEQ ID NO: 88811 - DNA, 314 bp, Glycine max
ctataccaccatcatagcgcatcatcatcagaattccaaggggaattgttgatgtggtggtgagaatgatgtatggggagtagaactacctggagggttgttggtgttgaagatgacaagggagctgaaagaggaatgccgagcttcaattctgagttacccaatccaattcatggtaaattttgtctttccaatagttcttagtttagggtttgcatatgtggagaaatcttattcatttcttcaatcattttgtttactttctgctgaattttcgttgtcaatggtttgttttacttattagttgctcactc

SEQ ID NO: 88812 - DNA, 302 bp, Glycine max
actattaacatttgattaataatttccatccaaaggcacatatttggatgaaatgagttacataaatgtgctgcaaatcatttaaaagtgcaccaaatttattgcaagttacccatacaataatattactctttcgaattaacttccccattacagggtacacaagggttgaaatttgaaaatcttactgggtgcagctctttcctccaaaaatggtgcactctatccagatatcaccaccctatccaagatcatatctcctcattttcaaaatattacaagagaatcagatgcgctagatc

SEQ ID NO: 88813 - DNA, 305 bp, Glycine max
ctcgagccgttcaaagaatggtttgtttttttctgtagagttttatacatgagctctagtcctgttcaatccaattgatttcctactatattttttgtacaaaggtttggaatatgaatttaatttatatgcactatgtaaattttttttacacatgatccaataagaattcaccctatcaccacatcatcctattctttgatataatgtggtggaattcctgttaaatgtctgtaaaataatttacactgaccatgatataaataaactcttgaaatatattaccattaattccaactagtctt

SEQ ID NO: 88814 - DNA, 304 bp, Glycine max
atactaacaaaccctgatcagctggagttctgttcaactcttttctatgtgtctgcacagaaaatagtattttttacataatagcaaaatcagcatctaagacttactagctgagtcaggcaggagaaaagcataggagagacaggcagacagatttgtgtatcatttatattattctaaactataagagaacacaattttgataactttaagagacacaaatagtaaaacaaaatcaatagcagaccatgcatcatatattctatactgaaacaacttaaaccagcaaaataagtttttgcct

SEQ ID NO: 88815 - DNA, 304 bp, Glycine max
tgaaaatagacaatctagcgaattagttctatgttgatacggtttgcatgacacaataacccaacaagtcaaaacccttcataagttcatatgcttcaagatcagatgaggcctatatttaagatgtggcttaccaaaaaaaaaatatttaagactttgtgatctgtaggccaatatgttaaggaaggaatatttccacaaatttaaaacgtcatttaattatttttgtttttttattgtgtgtgtctttatgttaagaaattattgttttctgttaacagagcccaaaagcagctctctgctg

SEQ ID NO: 88816 - DNA, 300 bp, Glycine max
gagagagaggcatcatctcccaaaccctggaatggacgatatagaaaaacccgagaagagaagcagagatcgtcactcggaacgccatcgcgactccgatgagcaccgccaccatcgatctgacaggaatcacaagcgcgaccacaaatccaggacaccgaaggaagcaaggataaggatagggcttacgaaagagaaagtagcaggtcgaaggtgaaacgcgatgaggagagggaatattcgcattctcacaagcggaaggagagggagcacagcgaggacatggacttcctggataat

SEQ ID NO: 88817 - DNA, 301 bp, Glycine max
tctgacacattggccgctagagaagttgcagaatctatgggactttctaaccagaatttaccgtgactcttcaaaaatattccatctagggcatgtgtcaggtgttaataatatcttcctgactacatatattttcaagtgtacatttccaatgcgctgcttagggtggcttgataatggttttcagcaaattactcgtgcattgcaaaccaaaagaggaacttaggtacaggcatcttatgtctcaagttgatcttttgagaaactgttgcaagatggagttgggaaaattggaatttgc

SEQ ID NO: 88818 - DNA, 301 bp, Glycine max
gtcgggaaaggaaatacaaattctggtctaagattgctcactggtcaaagattgctcacatttctgcgatccagataaatgatgatgtgacaataagatgagcttttggatgagtaagaatcattgaaaagttggtagcatctaatgacaggctgcaatatttctcagctgtgatgtttcctgtttactctattggtcgtatgcatttcaatcttgcggtcaggttgctttcttcacactggaaggtttccattgaagcatccgaaccaaactctacaaatttcctctataacattggtaa

SEQ ID NO: 88819 - DNA, 199 bp, Glycine max
  unsure (1)..(199): unsure at all n locations
cgagactacctccggtccgggcagcgagtaaaccgcccggccggcgcgcgtcgttggatatatgatgagtggacgtgacagagtgtcncattatatcttaattgcgtcattttcctccttccttctaataagacttctctctcaccctcggccccaccttcacgtgtgattggaggtgtttgtcgcttttgtaataatt

SEQ ID NO: 88820 - DNA, 354 bp, Glycine max
cgcgcacccgccgccgcttgctgtctcctctctcgcgcgcaccggtgttcccatcgccgtctccttatctccctcgtgcagccgctgttgtctcctctccacccttgtacccgccgccgcctcctcttcagatttcctcttcttcaccctcgctgtctcctcttcaccctcgctacggcctcctcaaatcgttgagacaactagtacagttgagacaactggtgcgaggtcggacggcggggaccatgcgaacaagctcgtgctgccttctcggctcgtgcaccctcatctcaagaagtgaatcgcctcaggtgatacacaagggattttcatcaacaagttggtcgccagaag

SEQ ID NO: 88821 - DNA, 240 bp, Glycine max
tcaatttcctactcacacttaatgaattatagcaaaattctataccaaatgaaggagatggtaacacataattctagttcaacaaaaccagtatcgatcggaactcaacctttaccctgaactatgtatgtatgtaaaagattctatttcagtagttctgatctagaacagatatacaagattgacgacaacatatgagtaatcagatgcagcgcaacgaataactgccatacatttaca

SEQ ID NO: 88822 - DNA, 353 bp, Glycine max
cagttctaaaagtccagttaaattgaacttgctttattttatttttaaaaaataatatatggattctggatgtctttcacaaaccatcagttgtatactatccaacgtagagctgaatgacaaatttgtatagtttggtaatagtttattcctttttttctttgtgaaatgatcctcacatgcttacactttgcagcaatatggaggacattgctcgggatgctggcagtgtggatatcgaagatgttttgtatatcacctttgaaagaactacaaatggagctccaacaactctgctctattaatgcctgcaatttaccaaccactatatgaaatggcccagcactatgtcg

SEQ ID NO: 88823 - DNA, 241 bp, Glycine max
ctagcatgtcgcacatcacgctggaatcttgtgacaactgcaacaaatgcagacactcaagcaactcgcttcgtcaaacgcaacatcgcactacgaacaacccatcataggtggcgccatcccgtagatgactaatgagtaatagtgcactaatacgaggcggatgtctcatgtgcgtcgcttcgcagatctacggcagcacattcctactcatcctaaccgtgatcatcatcattggcat

SEQ ID NO: 88824 - DNA, 238 bp, Glycine max
ctcaacattaaccaagccttgtgtgggagaagtaatagatttgaacaccaaggtgagtgttcctgaagagaaagatctcttgcagcaacttcaaaaaccagtttcttccaacatcaatgtcataacacctcaaccagttcgccccattggttcttccataagtgttgtgtgcattagtgaagacttaactctgccacctctatctcaaacaccaaaaaggccaaatgaggttgaacaa

SEQ ID NO: 88825 - DNA, 264 bp, Glycine max
ctgctcgagtgctgtctcgcgtggggtgtcttggggcttggcaacgacgccgcgccgtggtcttcatacttctgtgctgctttatgggtatagacattgttggtttcctcatttgaccttgtgttgctcattttggctcagagttgctcgtcttttgtgttgagctcgacaacaatgaccttgtatgggctttgtgtgtggggctaccattgtctgggttgcttgtgcatcctgtgtagatttcagactcggttttccttaaaa

SEQ ID NO: 88826 - DNA, 154 bp, Glycine max
tacctaagcctaacgctagaaccgaatcttctcatgaaacctcccacgcgacactcgagcggatgagagtcaggttcgattcccgaaccctctacaaatcgctatcatcacggtgcagtttcagcatggagggctctgcagaggatttcggagc

SEQ ID NO: 88827 - DNA, 137 bp, Glycine max
gtgtagtcggctggggtgaggcgatgtgcgttgccagatacagttttgtcttgttgactctacgtatctgattatcatttgtaagcgatttgctcaagttatgtgtcgttgatgaataacttgcgttcctcagaaaa

SEQ ID NO: 88828 - DNA, 251 bp, Glycine max
tgttagtccgagactccctacccgaaggatgttgaccatcatgataattccaccatctttgaaccgtaaaactgagactggttcttcctatgcagatggttatacaactgggatatccacttctgactgttcatttcaggattcaagcaagcattccagttccagccacagcaaagactctagctcaagcaccgaaggttgccaaataaattccgagaatggtagcatgtttgagagtgacacaaagcttt

SEQ ID NO: 88829 - DNA, 178 bp, Glycine max
gtgtcctcgctgctgagtaggtaaacaagttgaagcaatctctgtccccaggtttgaccgtcgacgaggtctgagtggatacatggcaacgccgtgttgagctaggcaagcttctggatcagtagcagagcatgctactctatgcacttttggaggctgagctattagacctgtcagt

SEQ ID NO: 88830 - DNA, 195 bp, Glycine max
  unsure (1)..(195): unsure at all n locations
tattnaagtacctaaaaaacgacgtacacatatgtcataatgtagtgnattctgcagggtatgaattcagttcaaagcggagaaagaagaatcagaaaggatttcctcacaanagaattatgtatgctagtgagaagaagtcatcagatgttgctaggagnnttgaaaagaatgttgaatgcttatcttgtggtg

SEQ ID NO: 88831 - DNA, 173 bp, Glycine max
cgctaaacctagaagtagtcacctgacaagtgagagttctaaagtaaggcgatcagagatagcaacccaagtcaccttttacatgatcccagcgctgcttcttgcctccaagaacagcataagtacctcccttctggtcggcgccgtgttccatcaagtatacatgttccaca

SEQ ID NO: 88832 - DNA, 139 bp, Glycine max
ggcggaaatatgacggttgagctacattacctttcgcatggttttgtgctgtatcatatgcactcagttattgtttgcttagtgcaagcagatgaaagtaaaaggtaatgaagggcaaataaattaccagacacttgga

SEQ ID NO: 88833 - DNA, 134 bp, Glycine max
ctttatcggcatgcttaagaaatcccactatgtatctattaactgtagtagaccttgtcggtttgctacttcaggtgtgaccttgtgaataccacgttcaattgttatataaatatattatattatgatgttat

SEQ ID NO: 88834 - DNA, 157 bp, Glycine max
ccgtgtacgaccccaagcaggtgagcatctgcttcctggtcggggtgaagtacgaggagcagaacatggaggtggtgccgccggacgaccagtgaaggagtcgtctcgtggagtgtcctagggcacggcacggcaggccaggccatgatgtggtggg

SEQ ID NO: 88835 - DNA, 264 bp, Glycine max
tgactgctgaggctgaagaggaaggtagcatgcgagagataaagagatcaatgaattagaatgagtgttgatttgctttccttcttgtattgtaatccacagagcttttactaattatagtgagactattatcaggctatggaattaatctttccttaatccttattagaatctcctactctgatgaatgagtatgagattctggccagttatctttgtatatgtttatttattttcatgctgagagaccaggtatcattctgg

SEQ ID NO: 88836 - DNA, 264 bp, Glycine max
taccttgcaaataaatcaacaccaaacgcgcccacaacacacacacagagacatttttctttcttagaagcgtccaccacacggaacctcgcaattccttcacacccaccataataataatatcttcattgttcttttcttctttgttaccattaaaaacacacacacacacacaacaacactctgaaactaacaacaacaataaaagaccatgtcggtgaaggagtgcgagcaccacaaggggaagaagaggaagatcttccg

SEQ ID NO: 88837 - DNA, 262 bp, Glycine max
ttcaaccccaaggtggagattggtgaggttctcaaggtctgcactaatcatcaacatgaagttcaccattttttctcggctcgagttcaactctttctccttcagacttcttgggtttatgtgatgatggctctcaatatctcttctcctgctgaagtcaagtccatttttttcgctgattacttcaagtctaactgcatcactgcaaagttcacaggtggttttgcttttaagagaaaagagcgtggagctgcatctggag

SEQ ID NO: 88838 - DNA, 255 bp, Glycine max
ctcgtcttcaatcctttctttattctcttattcatccttctcttctgaataatccagatctctttctgcccttttctccgtcacgcttttcgtgaccggatctgtatggatttgatccagatctacacgccgatggtggttttggccgggtctttcatagatctggtgcgtagaggctcagatctacggtaccgaggtacaacagagaatcgatgacaagaacgcagatccgcacggtagatccagccgattccg

SEQ ID NO: 88839 - DNA, 253 bp, Glycine max
gtagaaatggcgcaagacttggcattggatttggaggagcttcgccgcctccacagcatcgccaaaagacctcgaaccctctctcttctctcctccgaaattcgtaacctcgaaaaggttctcatttatagcaaacttacaaatttcttcgcatttttgttaattatttccgtttatcgctccctgattccttcgtgtgaaaaaattgtgagacgattttgcagttatcgtcagaggaagcttctgcgcagat

SEQ ID NO: 88840 - DNA, 263 bp, Glycine max
catggcagctttttcataccaataccatccttttcttgttgaccctgcattctttcccaacaacttaaacactcctaactctcctcctcctcctcttccttctcagtttcaacaactccctcatgaaacatcatcttttaatgtcacaaaccaggagactagctgtgttgaccagagctccaagatcaccatcagtgacaatgagccttctgtcactaaaaaccttagccctcagtcctccatggtagtcgacaagcttgaaa

SEQ ID NO: 88841 - DNA, 236 bp, Glycine max
gttcaaaatctcatagagagatgcatgctctttcacatgagccaagaccagtgcataagggcactggcagaacatgcagggattaagccacttgttactgttacagtgtggaaagagttgcaaaaggagaacaaggagttctttcgagcatatttgcaagttgtcactcccaggccattattcatgagtagatgttttcagaggagaccaaattggcaagaaggaaacactggaaa

SEQ ID NO: 88842 - DNA, 251 bp, Glycine max
cggcatttctaacgtgttggatgctgatgctcaccacattgccaccatggtccgtgaaacgtttcataaggatggacccttgttggtgattgcatctgggcgagacaccatttctgttgccagctccattaaacggttagctccagacaatgtttttcttgttcagatacagcatccaagatttcaactgaataggtttgatcttgtgattactccgcgtcatgattattttccgctgactcctcatgccc

SEQ ID NO: 88843 - DNA, 245 bp, Glycine max
gtatcactgtgtatgaagagagagaaaggatgagcacagcactagacagctccgaaataggaggtggagaaattttgtatgcgttggatttcgtagatctgaaattgtttcagccatggtgagtcctgtgttggtgctctcttccttgtgtggagtgaggcaacgtcaattttgatggtgttacctgatattcagagcacatagattgtggtggcagcacaatggatcctggcagtggacgaaac

SEQ ID NO: 88844 - DNA, 115 bp, Glycine max
gttcaggggtaagaatccattggtatttgcactggtctatcgtaagagttgtataattactatacactatgtcaagacgttttgctatattgtagatatgagaatgcggcaagat

SEQ ID NO: 88845 - DNA, 244 bp, Glycine max
gttgaaactgcgccatctccattgctgttctctcttcttgctattataatccaattcaagaagttcgttcaacttttgtgctcaacaagtctaacataacagatattcaaattgagcataattgtgattcaaactttggtctttccctggaatgaatccattgtttgtcaagaaatttggaagtgatttttgcggttctatttaatgggctgctactgctcaacttcaaagaaaacggaagcac

SEQ ID NO: 88846 - DNA, 241 bp, Glycine max
gtccttgaagctctagatgcactgaggcatgccagagaaaggcttcaaagttcgatgagaacaaggcaaatgattcatgttggcccaatttaagctccaacatcgagatactaataatgctaaattattgctatatttatgtattataggctgtgagattatgatttagcatgaaaataggcgggaacatcataaaccataaacctagaggtcctcaaattaataagattggtagcagatg

SEQ ID NO: 88847 - DNA, 265 bp, Glycine max
tgtgtgtccaaacacacttttatccaacaccattctcactcagttcctcttcctcgtgctttgaaaagtaaaatccaatacaattcacctaaaaaaatccctctgcagagagcatgtctctcagtagcaaacgagcggctaagctggacagctggtgacaccagcattgcagtgtttgtcagggattagtcaagcaatcaatacactatgcaaaactaaatcataattttcattttttatttttttaaaagttgaatttcaaacc

SEQ ID NO: 88848 - DNA, 126 bp, Glycine max
ttgacaagcggattatgagttgtcatctgccccaccacaaaagatctttttgtagaaaggaactaattgttgtgccagcagagaaccttattttgttatgttataagaatattgttctgttcaaaa

SEQ ID NO: 88849 - DNA, 253 bp, Glycine max
gagaaagataagttgttcactgctgtaatggattacttggaagcagcaacacaagatggagaaaaatcagcgccaattttgtttcacccttttgggagctacttttttgtctcagaagaaggagcagtgtgtgtggatagtccatccgctattataaagatgatgcacttgatgcttgcaactagttctccagctagtagtattgaggaccatctgaagtacggagattatgttaataaaatgtctgcacaaa

SEQ ID NO: 88850 - DNA, 228 bp, Glycine max
ttcggctcgagaataaagatacgctggacgccatcaggacccaaagttcataaggattcatagtaaacagagattgtctaacctcagacatgaacactgcttcatcacgccttgataaagctcatcactaatacgcagaatagtattaatcaccatgctttggggacaacaataatcattcttctgaaacaatattttaaggaaagagagggcttccatctcaagaat

SEQ ID NO: 88851 - DNA, 251 bp, Glycine max
ctcaggaatcgccggcttcggtcgcggccaagagtctctcccctcacaaatgaatctcaaaagattctcttactgcttagtttcccaccgcttcgacgataccccgcaaagcagcgacctcgttttgcagattagttccactggcgacaccaaaactaacggcctcagctacacgccgtttcgctcgaacccgtccaacaactccgtgttccgtgagtactactacgtgactcttcgaagctcattgtcgg

SEQ ID NO: 88852 - DNA, 240 bp, Glycine max
atttacttgaaaagagtgacttcagggtcaattttaagttgttgactatgagttgttgtaatttatttaaaacaaacaccacaattgtctcttcacacaaagcaacatttcaaacagtgaggaaaacttggtctcattcacagaccccatcagaaagtcaaaataaatcacacaaaagaccttccaacccagtcaaaatctggaaacttgggctaaaaacaaataactcaccaagaaatt

SEQ ID NO: 88853 - DNA, 111 bp, Glycine max
cttaatggcgagtcttggctcagcttctaattattagttatcatgtagcaaattagaagctgtttgataaaaatttgctacatgataactaataattaatggcgagtcttg

SEQ ID NO: 88854 - DNA, 247 bp, Glycine max
ctgggtttgacgatgatgaagaggagtctcaaagaggtggtcggaaaattgctaatgctagaaggggcagagagtttgggaaagtgttagatgttgacaagcctttgagagattcttcaagggaaacatcgcctttgagaggatctggaagggaaagatcaattgggaaaagcggggagaagaattcgtttgaagtttctaaaagaagacaagtgcgaggtgcacataaaaatgttgagaatacaca

SEQ ID NO: 88855 - DNA, 239 bp, Glycine max
cctcgagccgattcggctcgaggaatatgtaagtcaccatagatacgagattcacttaggactctctctttctctctttaacactcactaccttttagcctcttctctctaacaccccaaatcctactttgtcacagcttccaatattaaaaactagttgcaccaaataatacacaatctctttaagaatgaataacaggcttggtttggttgttctgctacttgctcagatcttagta

SEQ ID NO: 88856 - DNA, 243 bp, Glycine max
gtttctagctcatttctttccgttatcagagcgatcagccttaaatatcaaaggagtttttaacacatcaaacgaaacaaaatatgaaaaagaacccttggaaggcatatgtattgatttcaatttttatcagactttttggggtctacaggaatatttttctaaccctacttccataagtcatgctccggcaaagtggcagaaatttaccttgagtttgtcggttgtactgaatacatttga

SEQ ID NO: 88857 - DNA, 252 bp, Glycine max
ttagctgtaaatctttctgtgacattggaagactctctatggctgctagctatttaaagtatactaagttatctgaatccctattaacatgttttaactgggttcactattttatacacaggaaattgctgaattgtacgagggtgaacagaatattgagcaggctcttgtttactatgaaaaatcagctgatttttttcaaaatgaagagtgacaacttctgcgaaccaatgcaaacaaaaagttgcccag

SEQ ID NO: 88858 - DNA, 120 bp, Glycine max
ccaccacacaattccgacacattgctactcgtgagttgctcgaattttgtggctcaattctcaacaatggccactacaacacaacttcacttaccccctgggattcagattccacacaac

SEQ ID NO: 88859 - DNA, 264 bp, Glycine max
  unsure (1)..(264): unsure at all n locations
aaggcacgaaacccatattctcacgcaaccaaacttgcacttagctccaacccattccactcggcatcggaactancaaccgccacgccgagaaatactggaggctccggcggtggatggcgatctgatgtggatccaattgacgttatcgtgccgctacttatttgggaacactaagcgaagcttgtagtacgaatacaattacttggccgaagcaaaagcgactttacttagcatagttttcaagttattccaggcttcatc

SEQ ID NO: 88860 - DNA, 261 bp, Glycine max
tagtctgaatccgttggcattcattcacatactgatagatatggcgcaagaacaagagttcagaacaagcaccccacttccaaagtgtgatgcctatttcgaaaccacacaatccagaaagaagctaccgctgtcactgcaggagacctggacagatgcatgtgcaaagattcctggttcttctattcctgcagtgcctagcggagaagtaattgaaattctagcagacacacccgttggtgaagcaggtaagattctatc

SEQ ID NO: 88861 - DNA, 260 bp, Glycine max
caaggtgcgtgtagagggaacttaatttgatttggtgcaatgggggatttggagaagaagcaagagagggcaatggaggaagaagtcaaagagaggttggtggagggtgtggcggttttggactttgacatgctttgttccacagtggctttgcgagctgcacatggaaaatggggaaagctgggagctgaagaggaagaagaagaagaagaagaagaagaagaaaaggaggagggtggtgagtttggtggtgttctgag

SEQ ID NO: 88862 - DNA, 237 bp, Glycine max
gagttggtcaccgatcagagctgattgtcgtgtcggtgatcagtcatcggagaggctatcgaaaatcgtgttccgatgactataaaagctgttaaaggcagtaacgtttccttgtgatgcaactgtacatgacagtaaggatggctgttcattggctggtgatagtgaatatgtgggaagtacagagccattatgaacgatcgcagattgcttttaggaccgtgtaagattcacagg

SEQ ID NO: 88863 - DNA, 255 bp, Glycine max
ggctttgtgatcggttggcgattccgtctcatcctattcgtggtgtcccgactgctatgaagtgcctagcgagactacttgaggaatctgtggctaggacttccacggtgcgagctgatggggtctcgttactggtacccttgatttcgccagcatctactcgacagtctatgcagattctttatgaaccatgtctgtgcatatggctctgatcctactatgcgccagcagtcgcatattctgcgacgtctaggg

SEQ ID NO: 88864 - DNA, 139 bp, Glycine max
gggtaactagccttaatctcaatttgatcgagtgtaatatgttctggtgcgaagaatgaacaatgaaaaagttgtatcttaaaactacatgatgagtactgttctcatgcattttatcaaagttaatggcaatttcttc

SEQ ID NO: 88865 - DNA, 270 bp, Glycine max
ttgccgactagcttaactggggtctggtaaagactagaagatgctagaagtttttgttagcgaatcgtttgctgtagctttcgtacatttaggttggagcataatttgttgcatttttagaggatttttttttttggattagtattgtctctgggataggttaggcacttggttccttttggatatgaaactgttcatgagtcttcgccgtaatagcttactgtgtgtttggattgaagttggaaatgcggtgcacatggttctatgcaa

SEQ ID NO: 88866 - DNA, 113 bp, Glycine max
attttggaatgctcagagatagctggaactattttgcgtgagtctttggacatacttgctcggatattagaccccagtaaagtgatgcaattagagttttatgatggaccagt

SEQ ID NO: 88867 - DNA, 245 bp, Glycine max
gaagtttcgttttcgaataggagtacttctttcttttctgtacgctagggtcgttcgggcggaaaaccgagttgcgtactgggtgaagcttagtcctttggacctttcgatctcgcaacttttttagattagctagggccgcccgcacgctttaagggttgttgaaggtattgcgctaagaaagactcctgcggttgctatgctaaaggtaagattttcttttaaagccgctcaggcaatttctt

SEQ ID NO: 88868 - DNA, 260 bp, Glycine max
ggaacgagcaagactgagagagagtggtaccaagaagagagcggagagagagggagagggtgcgagataggaaggacccatgtttgaatatcgtcggacaaaggataggagaccaacaacgctacatgcgagctaattggagagatcaccggaatatctcctcattttatttcactcgtttctctgaagacacaacggaggaggagctttggcagcatttcaagaaagcgggcaatgttagggagatttttatttcaaag

SEQ ID NO: 88869 - DNA, 221 bp, Glycine max
  unsure (1)..(221): unsure at all n locations
gaagagaaggaggagcacataataaccctaaaactccatttcactcacagtacaatagtccgatagagagatcaagtgctgcagaatacacatatacacaccaactgctcgagcgagagaggtgtctctaagaagataagaactgttagaaaaattgtantccaaaagcagatatgtgactttgcaaatttaacaactgagtacgaagatctgtgatgtct

SEQ ID NO: 88870 - DNA, 241 bp, Glycine max
aatctctgagcctaatacctagttgtttgtcattgcggacgtggaaaaatgaagaagattcagcaatgcttcttgtgataatgggactggctagaagggctaatcaacatgatggttgctggcttcatttccatcccataacacaagtatttgccaaaagaaaaggtggtttgcagtatgccaatgctgcaattcaaggagtgataaatatgggcagccaagtaaactgagatcacttatg

SEQ ID NO: 88871 - DNA, 237 bp, Glycine max
cttaagtagatcctgtacttgcaaacttgtggttgctgcgattgcagcctttgccttcagatagcaatcattgtaacaaggccttttctttctttttttttttaaatgtttagttgtttacataaattgtaagcaaattctattattgtaattataataacccaaaagtgaaagctgtaactctatgcaaaagaagtttggctttgtttaagcaaaaaacgagaaataacaataaaa

SEQ ID NO: 88872 - DNA, 239 bp, Glycine max
gcgagcacttttggggcatgaatatccggttggacgattagaggaagatgttattcttcgattggggagtgatatcactgctgggggtcttggcaggttttaaaatggaattgctgaaatgaagtcgggcaaatagctaccatattttctgtctgacttgaggagagatgcagatgataatggatctttccatcaagacaaaaatacggtggtggggtggtagtgcgcttgggtcaagg

SEQ ID NO: 88873 - DNA, 238 bp, Glycine max
tgcccctattgctgttttccaatttggtttctcctaccagtatcaggtggtttattcaaccaacagtggatcttcaatttgttggtttcagtgttcttgtatgtgtgttttcattttgatgagttcatggtgagcctaataatctgtattctgtattaatttgataattaaagttccaatttttagtgaattttcatacattggaaagatagttttagggaattttctcattgttttt

SEQ ID NO: 88874 - DNA, 239 bp, Glycine max
ctcccccaggtggtggaagctatgatccaaccccatcaccacccacagatggtggaagttataatccaactccatcaacaccctcaggtagcaactgtggaacaccaccacaagacccctctactccaacaccctcagtcccaacaacaccatcaaccccatcaaaccctcccttgggaggaggtgggtactataactcaccaccaacttatggaggtggtagccccccaacaccaatt

SEQ ID NO: 88875 - DNA, 228 bp, Glycine max
gcttgtttgatagggaagagaagaaagagagaaaacaaagggcggtggtgagtgcttctgcttcatcatcatcagagaatggcggctactgtgtcttctgcttggtcaaagcccggcgcgtgggccctagattccgaggaacacgaagccgagctccttcaacagaacaacaacaagcccaacgacaagccactcgccgacttacactcccttgccgccgccgccgcc

SEQ ID NO: 88876 - DNA, 224 bp, Glycine max
caaagatctgatctgggtcgtggatatttcaatgtgaaagttaaggttttttttgctgcatagtaataattgatagaaacaaaaaaaggtgggatttttaaagggggtataggagatggatcgttctgctatgactgttgggccaggaatggatatgccgatcatgcattacagtgactcgtatgagctggtccttgatcttgggtctgggaattttggggtgg

SEQ ID NO: 88877 - DNA, 230 bp, Glycine max
tgaaacaccatcatcttcatcatcattttctatctcttcactcatgtcactgtgattatggctcttgtacccacttgccacctccacccattcttcgattcatttcacgcttctcccagcttccactctcttctcttccgccactctcccaattccactttcctccgtcccaaaccacccttcatctttcgctgcaaccccgccaagagtttctccaccgataaacactg

SEQ ID NO: 88878 - DNA, 227 bp, Glycine max
gtgaattaataggtcgtgatcctattcccttcccagacgttcctcccaacaccccttggcctcacccctgtgacagcatgacatgttttcaaaggccgagaagacgtcgtctgttttcaatcctaaatgcgtcaccctcgtccagaagcttgcaattttcgtcgtcctaaacgctgccagcgacggttttctggaggtccactagcgttgtcggcgacggaagctgc

SEQ ID NO: 88879 - DNA, 218 bp, Glycine max
gccccgacaaggacttgcccttgctctctcctcagccaccgaagacgaacaagttcgtgccgccgcaccttcggcccgggttcgtgccgagagaggaggcccccccgcccgggaccgaacttcggcccaacgggaggcccaagtccggtggcgggcagttcaggatgagaaggggtggtccgggtggcgtgtcggattcggggctcttgggccgcggg

SEQ ID NO: 88880 - DNA, 236 bp, Glycine max
agaagacaaatgtgtgccagcaggatggagaagaggttctcatgaaagatgggttttatgcttcggctaatgttggtgtctcaccctactaattcaccccagtctgttttctctttcgaagaaattatgcaaagaggaaaaattttccaagttccaccaacctatgaagctcaggaactctgattccttaacttataaatgcatctatttgtggctcaagagcgattatgttgata

SEQ ID NO: 88881 - DNA, 229 bp, Glycine max
caacaagacgtctagaaattggactgatcctttctcgctctctttcttcccaactcaactcaggtcctcttcctgtcactttaatccaacaataataattattcgcaaaaaaaaaaaaaaaaaacacgttgaacagataccatcatcattcatcttcataacccacatcatcagattttcaaacctcagttttggactcactaggtaagtggccaaacaatttcgcggg

SEQ ID NO: 88882 - DNA, 229 bp, Glycine max
cgtattgttcagtacaattcagattgattctactcatccactacctgttgttttgaggctgggtcgggaaaatgaagcctcttttacacacttttttttgttgttgctcctaattggttttggcatttaaagatagtcatgtttgcaatgtttggaataatatcgatgcaaatcctacacattgcagacgactcgggatcatcatattttgttgatgtgttatcctcgt

SEQ ID NO: 88883 - DNA, 159 bp, Glycine max
cccgtacttccgtacgatgaggcacagcgggaattatgggccgttatcccatctcctactctggtcacggtcgcgaggttctcgggtatggttgccgtgactgtcaagccgtctgctccggcacccctgttcattgtgctagtgcctacctatggaggg

SEQ ID NO: 88884 - DNA, 251 bp, Glycine max
gcaatgcagaagacaaatagagaaaaaggaatagttatagaagaattagactctgatgatgaggggggtgataacggccctgaaattggagacaaagattttgataagaaaaaatctaaatcgaccatggaaccatcggttgagcatccagatgatgatgttgatgtcaaagccgctttttgaaattccattaacttgcttgtggattcatggccagttttcaacaaagagaggaagaacagtgatataac

SEQ ID NO: 88885 - DNA, 261 bp, Glycine max
ctcgagccgattcagctcgactgtgacatcttggttgctgccaagggatctaagttcatggatactcaagctaggttcatcaactcttaaattatttaattattagggtaattaggatagactctgatatcagtttagagtttggtttggtttggctctaataccagtagaattaagctataactaacaagatgagagtttctctacttatatacattgttttgtccatatcaccggatctcctacattatctgacataca

SEQ ID NO: 88886 - DNA, 262 bp, Glycine max
ctcagagtcagttggttcaaggatttcccaaagaaggagctgtgacagagtccaagttggatgctgctaaagatcctgcttattggtcaaagctttgcttgtataatattgccaaattggcaaaggaagctaccactgtgcggcgtgtcctcaaaccactttttcataattttgattctgaaaaccaatggtcttctgaaaagggagttgcttcatgtgttttgatgtatttgcaatcccttctagcagaatcaggagataa

SEQ ID NO: 88887 - DNA, 244 bp, Glycine max
cgggagacaaacatctatctatttggctaagtctgtacagcgttagctttgggggcgaaaaattcagccttttccgatttgcaccaaattcaacagagaacaacaccatttgcttgcgtgtcaaacagtggattgctgtaaactgcattatttggctgttagctaatggacaagggggagccacctagcctcttcgtcaatgacggttctttcatggagaggttcaagcaacttcagcaagagc

SEQ ID NO: 88888 - DNA, 254 bp, Glycine max
tggcaaaactaccaccacctgtttgattaaaagtttgtatgagtcgttggggctgagaaccgggatgttaaactcggttgcttcttatgtccatggggacaataagttggagttgggtaatgcaatgccggatgctgtattggttcagaatttgatggccaagatgattcacaatggaactgaggttctggttctagaggcgggtgctcatgggttgggggatgggcaatctgctgaggttgcactttgatctt

SEQ ID NO: 88889 - DNA, 257 bp, Glycine max
cctttttcttcgagcaggtcttcatttccttcgtccagccctacagcaagtgcagcttttccttctgggagttcgatgtttccttcttcgagtcctgccacaaatgttttcaattctggcacatcttttggacttgacacgtctgcttcctcttcagctgtcaactctgtgagctccaatagtggcccaagttctactttatttggatctagttggcagcccagcaagtctccatttggttctacatttacttcatc

SEQ ID NO: 88890 - DNA, 250 bp, Glycine max
cgtggagatacagatgtgctagtgaggttgacgctggctcagttacagcagcagcaacaacaacagtcaagtaccaatgcacagcagcagcaggttcaacagcagagcctttcaaaccagcaatctcagacttctgatcatagcatgcgccagcaagataaagtaggtggaggtggtggtggcagtgtcactgtggatggtagcatgtcagactcgattagaggcaatgaccaggtttcaaagaaccaga

SEQ ID NO: 88891 - DNA, 102 bp, Glycine max
gatcattctaacggataggatagaaaagagcaaaactgtttgagtgtgagagaacttgaaacaacaatggcttcactttacctgtctctctccgcacaaata

SEQ ID NO: 88892 - DNA, 243 bp, Glycine max
cttcatttggatcatggcaacccttgctccatcctctgacactgcaagtgttaaagcaagtgctgtgattggactttcccaaacaagaagggtgttggtgtaagtgtaataatccttatccttaagggagggtgttttgggagatagttgctcttatttgtaccatcaaggttatggttatacaccatatggagcacccatgcaacatgatgacaatctctatgggctgcaacagtaccagta

SEQ ID NO: 88893 - DNA, 180 bp, Glycine max
  unsure (1)..(180): unsure at all n locations
gggatccacagatcaggcaaaacagagacacatcttcatanatgataaagtgacgcagcaattgtgctgtagaattatagatcagacaatgtaagagtgcacttgtttgatgacttactatatgttcacttcatctcccctttctcttcatcttctcccttcactctccacacaacatag

SEQ ID NO: 88894 - DNA, 186 bp, Glycine max
tgagttcccaccagagaatctgaaggagcgacttgaccagttggagaaggtgaagacggttaagaccgagaaaaaggaaccggttgctgttcctggcaataagagaactcgagcaagcaacagcaatggaggtgcaatgccaccagccaaagctcggcgtttgactaatgcatatgtatcatcttt

SEQ ID NO: 88895 - DNA, 230 bp, Glycine max
tagggccttcccggtgggtacgcttcagtaagggctggctcactccgcttagatcagtctggtgccacctcgcgcgtgaacatgagtccaggaagggaccgctgaagatgccgatcgtcatgatcaaagtcctgggggctacaaaggcaacgtccttatcattgtccgagttgcctcgccatgtagcatgagttattcaagtttagctgtgctccaacagtcgtgcgggt

SEQ ID NO: 88896 - DNA, 225 bp, Glycine max
  unsure (1)..(225): unsure at all n locations
tcttatccgactcagtcaaccgtaataaacgattagatcttgttgttgtatccgtttaggatgattgttccacaatgcttcatatacatcaccactgatttgtgagcacgataatgtttcggattctggttctgattttcgactctcgtgaagatgttgggttcatgtgcactaattatgngggaaggaagtttgcacgtaggagtctgcggttgatggaagtcg

SEQ ID NO: 88897 - DNA, 244 bp, Glycine max
attagtaggttgatgaactgtacttgtctagagatgattgatggggtgtgtattaggggtaagtcttgtgttaagttgcagtggcagcatcaggaatgttctctcccaatcacataagagagcggcatggtggtatcaggagtgtttgagcagggcatcgtgttgtggtggtttaatacgatcatggtggccatcagagatccagtatctcaatatccccagagcggcgcacgcatcaccatga

SEQ ID NO: 88898 - DNA, 258 bp, Glycine max
  unsure (1)..(258): unsure at all n locations
gcggctcatgggtcaatagctggtacggattcgagtggaatcttctacgcggatcagcggtctgtcgtactcccagttcagatgtccgctgatggagccacggttgaggagagcgtcagcatatatggataagtctaacttggacgatagtgataggatatacgatgtcatcgtcatcgagctttacgcaacatacaatcctacactgnaagaagcttgctccggagtatgagaaagctgnttctatcttgagtagtc

SEQ ID NO: 88899 - DNA, 255 bp, Glycine max
tgaatcgcaaagcacatggccagctgctcagctagctggcactgtttcataatataatagtgatgcactataattttggtagatatacatttaaatcactcttcgaaagggttttcaattaaaaatcattaagattattgcatttaatatttgaacaactcacaacgtcaaaaataaaatattgaactactcaatagaaaaagaaaacattagtatttgcaactcttctctttaaaattatgcttgactgattaa

SEQ ID NO: 88900 - DNA, 242 bp, Glycine max
acgttatgcagcaggggagtatcttatgcagtctagatgcgtcaagtgcagggacggcgcccacaaggccgagaccctatcagatacggcggcgttgttgggcgtctaccgtgatcttgcagatatctggattgctccgggagcatgagtcgatcatcgtcagcgcggtcagtcgactagtcggccagagcctatgaggcggtgctagcttccggcatgcaagccgttgcgacgaggaatgc

SEQ ID NO: 88901 - DNA, 243 bp, Glycine max
acagttaattgttttctgttttatggtgattgaagatatgatttgtttgtgcatttttttcttgacagcactgccagtgctgtcactgtccggagcaccattcggaggctgagagagcagactgagagttgaaagcagtttacacttttcatttgttttcaaatcataaattttgctgctgtttattttgaaattagcatacttgccttggatagttgatggaattttggcaggtctttgtta

SEQ ID NO: 88902 - DNA, 253 bp, Glycine max
ccctgataaagcttcttaattctgcaaggaactaccactcgatcattatcttggaagggatactcaaggcggttattaagcttcaccgatcgtcaccaatggggaaaaggtgtatttaaaagaattaactaccttaataaaaatggatgagacaatttgcgtatctgaagaagatcatcataagagtggaagtagtagcaaaccctcttctccaactcttagaagaaaacgttcatttttcgatttgaatgaa

SEQ ID NO: 88903 - DNA, 248 bp, Glycine max
aaggaagcaataaaagtgagacaaggacaaagattacgagaaatggctgaggcaaagaggtcatctagaataaacgaattggaaaatgaattgcatggtttggaatttcttttaaaacagcttgaacaagttgaagacagtaatgttccgtctttcctagcagcaactggttatgtctctaggcaggagatagaatctgcccgcgctaaagttacacaatccttacggtaagcaaaaggtgaaccaaa

SEQ ID NO: 88904 - DNA, 235 bp, Glycine max
ttcagatctacttgaaattatttcagatcccccaaatggaagcgagaatcttctaatgcaggtattgcaaacacttacagatggtacggtcccttctaaggatttaatatgtaccgtgaaaaggttgcatgattcaaaactcaaggatgcagaggttcttattccgatattaccattcctatcgcatgatgaggtaatgcccatttttcctcacattgtgaatctcgccttggag

SEQ ID NO: 88905 - DNA, 156 bp, Glycine max
ctcaacatcatcattcaatagagagaagagcgtatcgaggaagagtagaagatatccgtgatctcgattgtgttccttagcacgtaacgaggcaaacattctaaattgcaagagaccctgcctctctctctatgtctcttcaatcccactgaactt

SEQ ID NO: 88906 - DNA, 211 bp, Glycine max
  unsure (1)..(211): unsure at all n locations
agctgatgaggtagttcaatccaatgggtggttcacttctcacgtgttgtttgtcgatggagaatcatcatccatccacacactatacgatttttacaantgctccttctcacagatcaggatctgcacttgatcggcaaagtcacactctcgtgtccacctgatatcaattttcccctccggctcgagcgcagtccacctccacagcctt

SEQ ID NO: 88907 - DNA, 263 bp, Glycine max
ctaattttgatgctttgaagtttgacccactttgtacaaccatgaattttagggaagcacggagggaagattgtaagaggtgttccaaatccaatgtttcccacgttccaatcatgtgatttattaacttttaattattatgtccattttagcattattaacaccaacacaatacgaagaagttgaaaatagtgttcctacaaagacagacaattttttacaacgggaaaactcaagattccctcaagttctttcttttacag

SEQ ID NO: 88908 - DNA, 130 bp, Glycine max
tgtttcaaatttaaatggttcatatcaagaacgttatagtttcagagcatatggtgatgatgattgatgaggagatgatgcttggtaaccacttaaagtaacatgcacatcttatctggatgttttatgt

SEQ ID NO: 88909 - DNA, 259 bp, Glycine max
ggaaggcaatgtggacttacaggatgtgttggctgccgcccatgctgctgctgaaactgctgaacgtgcagcagcggcagctcgcaacatggccagcctcgctcaagtccgaattaatgagctgacgaagaagaaaagtactgaacatgtgcccgacagcagcagctctgagaacccattttatgctggtggtggtaatgaatctccaacaatagaaaagcatttcactgatcaaattcctgcaggtaactctgatgcc

SEQ ID NO: 88910 - DNA, 257 bp, Glycine max
  unsure (1)..(257): unsure at all n locations
ctaccgcgctttcttttcaaccaggttccttctcttctctctcataaatctgattccttttccctattnattttcacttcttctatgttctctattttttttattccctttatctctgatttcccgatccctttgcgttagggtttttcgctcgcttctttttcaattagtgatttagctttacctttgattgatattgggattggattctgtatttctctagcacgattgtttcgctttctccgcgtggatttact

SEQ ID NO: 88911 - DNA, 141 bp, Glycine max
gccccccgaggctccgaagcgaggaggattcgctacgtaaggagtcccctgcgcgtcctttgaaaacggtttccaacgccgactcgccgagtcaactcgctcaccgccccaacagcagtgtcgtttccgcgctggtgctaa

SEQ ID NO: 88912 - DNA, 254 bp, Glycine max
gaggtaatattttgattgattcaatctttcattgtgattgcaaattttcctagctttgacatcaattattgtctttatgatgacttttgtttgttaatgcaggacaagcaaaacctggatgacattattcatatgcattaccaagcaagggcttggctactttctggacaatcagatgcaaatttgttgaccattaccctgataacatccttccatacctagttcatgcccttgctaacatatcctgctccaat

SEQ ID NO: 88913 - DNA, 132 bp, Glycine max
gttctaagtaaggagaaggctggtcgaggtggttgcgttcgaatatatcccagaagtggagatattgggctgtgtatccgaattggtcgccggattggaacagatctactccagatgaagtgaggcatcagt

SEQ ID NO: 88914 - DNA, 132 bp, Glycine max
aaagttggtgttactgtttattgttgttagtgtttgtgttgagtctctcaactctcataagaggtccctctttggagtcccatggttgctctctcttccgcggagttcaaccacagctccaacggcctcttt

SEQ ID NO: 88915 - DNA, 262 bp, Glycine max
attctgtgtgatttttagtcttaggctgcatttgatgtatattgatggacaacatgagcacatgcagaacaacatagtacaagaagttgattcagcactttttttttctggtctattgtttggtggttgatacacagcagaggtggagcagggggttgtgctgggtatgagttgaatatgagcccacttgggtttgctagttgtttcccattatgttgatggggtttggccaaattgatgtgtatttttacctttgagtggt

SEQ ID NO: 88916 - DNA, 228 bp, Glycine max
gagactatatgtttaattgtatcttcaagataaaaacccataggataaacccaaagtttaaaacatgatctagtatgtttatgctgtatgtctttttaaaattatgtcctctttttatagttatttctaaatttttttagaggtagcttgttacatttatgttttttcgataggcaggccaacatatgagttctcacacccttggcacgtgttcgtcgaagtgctggt

SEQ ID NO: 88917 - DNA, 255 bp, Glycine max
ggttccactgccaaaggcaaagggatctgacaccccggatggaggaggaggcagcccctcaagctcagtagtggtgccacctacatcatggcctccccctccttccggggtgtcaggttccactgccaaaggcaaagggatggacaattacaagcaggggcagtttgccgatgctattaagtggctttcgtgggccgtcatccttccacagaaagctggggatagtgcggccactgtcgaggttttgtcgtgcag

SEQ ID NO: 88918 - DNA, 254 bp, Glycine max
gttggggatgattcatcttctgggtattgcttggaccataattgggttgccagagaggctgttaggcaatttggtactgaccctactctttatgcacctgttttaaattgcagtcacgattgtggcttcgtcaccattgcgatcattgaatattgtggggaattgtggacaaatacggccacgactgtggttgtgttgaggtggcggagaccccaaaatccttgacgttgctgcggccaaaattgtggtggcag

SEQ ID NO: 88919 - DNA, 251 bp, Glycine max
gtttcacgtgtccctatcttcccttgctctgttctgtttgctctgtttgtttcctaggaaaagagaaaaacctcaattgggttcctttattttatttttttctttactcttattaaggctgttcttaggcggtatttggtgtttctttgtggggttggtaaaaattttagcttgtttgaagggttgaggcagagattgttaaagggtgtggtggtagtagaaaaatggaaggaaggaaaaaaatgggttct

SEQ ID NO: 88920 - DNA, 252 bp, Glycine max
gatgccaacaggaatatggtgagcatatcagctggaaagtataggactgcagcagttacagctacaggtgatgtttacatgtgggatgagaagaaaggtaaggataagccccttgttgcaactcggttgcatggtgtaaagaaggctacatcagtttcagttggtgaaacacatttacttattgtggcttcactgtatcatcctgtctaccctcccaacatgattgagaattctcagaaatccaagctgaat

SEQ ID NO: 88921 - DNA, 254 bp, Glycine max
ttttgtgtggcttttgcttttgaatggtaatgctgatggttcaaaagatgtttataaacttgctgagcttgaggaacaacatgtaaaagggtttcatcagaatgttagcaagagttttgtgaaggaaggtgagaatccagctgaaaaggtctccgaactgagtttcgaaaagggggaagaaatagctaaggcatctcatgaatctctggtttctgatgctgaatgggtatgtaaaagccccaaagctggcgtct

SEQ ID NO: 88922 - DNA, 248 bp, Glycine max
cgatgaagaaatcggttgagaacaaggacgccgcacaatcagttgccggaagccccatcctctacgtcggttatccgacaccacatccacaaaattttcctcatctgctcatacatttgtgcctcagttttgcagggatatgggaaaacagaaagaaaaaagaaacaagcaaaattcctaatttataaaaccagacaatgaggcaggcactctttcacattcatcccatcactccactcaatttgaat

SEQ ID NO: 88923 - DNA, 249 bp, Glycine max
cgacaccactcccgtccatctccgcaataaccctaatcttaatactaaccctaacttctaccgctgccgctacggctacccttcgttgctacttcaagtcgtgtccgatcataagaagatcttctgggatgtttgtgtcaagacccccggcggcactgatgactccacgcacttccgcgattgtctcctctaccaccgcctcacctccggcgacgtcgtgtgggacaaggtcatcagcgtccgcggcca

SEQ ID NO: 88924 - DNA, 249 bp, Glycine max
ctcaaagaaggtcaatgccaatgagagcaacagtgatctgtgtgaggaggagaggcaccagcaccagcaccggccacgccaccgccagtctccaagtccgaaccgaaggccctcttcttcttctcaggaaaggagaagaaggacaccaagcagggaaagagagcaacagcagcaaaggtcaagcagcagagaaaggagagttagtagatctcctggaagaagatcatcagagaacaccacaccttccaa

SEQ ID NO: 88925 - DNA, 252 bp, Glycine max
aaactaattggcttcaacttgtgactttcagagctccacatgagtacttgtctacttaaagatttgagcccgtctcttcaatatgctaattttaaagtactcaaaaacctttatcttttttatgatgaattttactctgagttgcataaatggctattcaatcttagttgcggacggctcaaatccccccttacccctaaaaccctctcatcaaacagtacagcgccgagtactggatcacaggcgacctca

SEQ ID NO: 88926 - DNA, 248 bp, Glycine max
  unsure (1)..(248): unsure at all n locations
gcgttcttcctccaaagcgattcatggagttcgtggcactgtctagcgctacccaacttgggagcttcaaccccgttagaaccaacgttcaaagttcgacacaacatacgagggacagctcaagggcgngagcanagataatggcgagtacttggccggtggcctgttcgtaacccttattcgacttccatacccatttgtgagatcaactactgtttcaaaagcggatgcagggagatagtctgagg

SEQ ID NO: 88927 - DNA, 247 bp, Glycine max
caacgacgccgtttggtgcaccgtcgtctgcttcattaacggcgtttgctggaacgtcatcttcatcgacactattcggattcagcggaacagcttctgcaacgacgccgtttggtggtagtagtagtagtagtagtactgcctctgcctctgactcaagttcagcttttcggagcatcttcttcagccgcaacgacgccgtttggagcgttgaatgcttcttcttcagctgcaaatagctctcctt

SEQ ID NO: 88928 - DNA, 136 bp, Glycine max
gtcacgtttcagtgaagaggaaaacatgagtactaatgtatcaagagctgtccagggtcaactcaacccgaggcatgtaactcaacttcgtatttccttcagaactcgtgatactggataaagccaaatcaatttt

SEQ ID NO: 88929 - DNA, 209 bp, Glycine max
caggaatgtatgggtgtaagaaaaaagagcaaaaaaagtgaaaaagagagaaaataaaataaatataaatataataataaaaataggagggcaaaaaccaagcaccgtggaaatcgctgtttgatttaaaaccaaaaaaatcaacggtccacattgcatctggtgcttcttatattgaattccaatttccatttccacttggtccttct

SEQ ID NO: 88930 - DNA, 243 bp, Glycine max
attcgctagcccgtcaaatctgttagcaatggagatcgcattaccttttttaaccgaatcagtgtcatttatcatttggcaatttttgctcgaaacaatcatggtgagtgttgttcacataaacgcaaccctaataattattctcgaagattttcgtaacttgacttgtaactacctcttccaatattacgacctacgttttttttttatttacaaaatttttggtttctgtttatagttatt

SEQ ID NO: 88931 - DNA, 257 bp, Glycine max
gaaaaagaagagacaaacacagagacaagagacaaaggaaacaagacaaaagatcaaagcttagatcaagaagggaattggccagtcataccaattcagatagtggaagtaggagtgacaacaactctgatggcaaaagtggtgctgctcaagcgaaagataagaagcataaaggtcattctcagagacatgctgaaggtcaaccttccgtagttgcggagaaagagttacatcacatgcaccttgaaaagagggag

SEQ ID NO: 88932 - DNA, 250 bp, Glycine max
ctcacaaggacgcaacggtaaattccccctcacatcaaaaccaccacctctaaccgtagcaaaaaaccaccaccggagacaaaaccaaatcccccttccttccccccactttccccctctctctccctcttcattttctctctctaaaccagatccgaacaaaccctaaccctaattcccaattccgcgcattcctctgatccgatcgtagcgaagatgggcgatttcaacctcgccctggtgatcgtgg

SEQ ID NO: 88933 - DNA, 247 bp, Glycine max
gcaaagactcagggcttctcacattctggacagagtaatctcaaaaggaatttgtgttctgaggaagatgttgatgctccattgcaaagtggaattatacgtgtgtttgagcaacctggaattgaagttcctagtgatgaagatgactttatagaagtaaggtcaaagaggcaaatgttaaatgatcgtcgagaacagagagagaaagaaatcaaggccaagtctcgggttgcaaaggcgcaacgga

SEQ ID NO: 88934 - DNA, 258 bp, Glycine max
gacagaggtgcacagcaactgcaacttccaaccttgtcaaggcacttcatcaatcaccaaatcaaacatttcgagcaaaaatagttttttcttcttccaacccaaacaaacaacactcaatctaccttgtactcgtgactcaactcttcatctaacactagctgagttcttagcttattgaagaaaatttgtgtcgacccaatttttgtttccttgcattttcaccacataacgagacactagaagctgaggtgatgg

SEQ ID NO: 88935 - DNA, 252 bp, Glycine max
cccattcttctcattgaaaaaactctcgttattcattgcaccacattcttatttttattttccattcattccttcaccaactcccatggcggccgtcggtggatcctccgccgccgccaccacctcctcctccctcttctcctccgcccgattccgccactccctccgcccaccgccttctcaactcttcttcccacgcgcgcgcttttccgtcaacgccacgtgtcccttcttctccgataacaacaattc

SEQ ID NO: 88936 - DNA, 183 bp, Glycine max
aaacaaggttgatgatgcttgttttgtgatttgattttgattttgtgttgaagcttagttataggtgtattaatttatatatgatggtttgaaaaataaaagttgttgttatgtatacatgagaatggtggctaaatgtattcaattctccgtttttgagttcatagaaaaaaattgtgtttc

SEQ ID NO: 88937 - DNA, 250 bp, Glycine max
ttcctctctctctctttctctctcatcactttctctctctacagacacacacgcctcgttttctctctctaaaaccccagtggaattttgcaatttggattaatgggttccgacatttgcgttgtgaatggttcgtgcactcacgaatggagaaaggggtggcctctgcgatctggtggattcgctcaactatgctgcaagtgcggatttatggaggagtggaagggtgacatccttgaccggttatctg

SEQ ID NO: 88938 - DNA, 250 bp, Glycine max
gtattttcaaactttgccgagctctccatatctctcactcacacagagaaagtaagatgagtctccttcgaattcatccctctttgtctttgcacaaccataccctctctctctctttctcatcttccctttcctattcctcttcagtcctcttcaagcactctactatcacccacggtcacacgcagagcctgtgcttctaccaccctcgcctctcggtggtcacgacgtgttccatctccaagataca

SEQ ID NO: 88939 - DNA, 251 bp, Glycine max
acagaattgaacagcttgtttcggtgcattgacaatgctctccaagtgtatgcaaataatgtagctaatgagttggcaagctaggaggaactgataccacctgtgcctattcttacacgatacaaaaaagaagctggaataaaggcttttgtaaagaaggaactgtttgatgctcgtgtgcctgaacctgatgaaacaaggcccagccaaattagtgtccttgcaactccaacactttgtgttcaattaaa

SEQ ID NO: 88940 - DNA, 162 bp, Glycine max
gagagagagagaaagaaattaagaaaaaatggcagcctgcactgtctactcaacacaatctctgagacaaagatgctcatctcaacccatcaaagacaagtgagtttctccaccaaagcagacatctgagacagaaagggcaaagagcagagaagcatgtgt

SEQ ID NO: 88941 - DNA, 239 bp, Glycine max
atggccttaaccccaaatgatgatgacgatgatactcgaaggttatatgcatttaagttgtttggagaaatatttccaattttttaatatacttacacactattggttatgcaccagtgagggttcgttgaaagtggcttctgagggaggagaaacagggagatccattccttatctttcatcaagcattgccaatacattttccttcaaaatacaagataagaagggcagaatgcaca

SEQ ID NO: 88942 - DNA, 241 bp, Glycine max
aatattttcagtaaaaaaagctatttataccataagatttataaaaaaatacctatatcaaattgatatgataaaagaaaatagtgtcaattaaaacatacgtgacaacacttttcattttgatccatgtctaaaaaattcttacaattttaatcttgttgacgagaaacacttacattttttgacgttataatgctattaaatttgattcacatacttaataacatttacttcattttgg

SEQ ID NO: 88943 - DNA, 225 bp, Glycine max
cacctttgttcactcttcttctcttgcggacagggttttagcgcagttacttctagatttaaggaagatgcgcctggcgtaagtgcataataccatcggcggcattgggccgccgtacgctgtgaaagggactaccactgattttgtagtggaacaagcaaggaggtgtcaccgaacgtgaggtacaggggagatatagatcatgctcggctttcagcaccacag

SEQ ID NO: 88944 - DNA, 238 bp, Glycine max
ctggggtgttggcacctgttgctgtttctgttcaccactttgatgcacatgatggctatgtttttggctatgacttggacagtggaatgcagttttctaggcctgggatcaatgagaatggcgtggtgctttcttctttgtccagtgctgaacccacgtgctctgaacagccctgtgaccaatcatctcccatctctcaagatgagaaacaaggagcgatgaatgaggaaaacgtagc

SEQ ID NO: 88945 - DNA, 234 bp, Glycine max
cttcttctcttcttcctctgcaactctctctttctcatcttacatgtttatcatcgtcactcaaacgacgccgtctcctctccgattcctaagccacgtttatcaggtttcttggtgctgtttgtgcattgtacattattatttctacatgttctgatggtgttgtaggtgctttccaatcttggattaatggggagacaatagaactgatgagtgacgactttgcatgttctg

SEQ ID NO: 88946 - DNA, 236 bp, Glycine max
gcctaaatttggaagccactgctgccactgaggaaatagatggacctgcatctgtatctgcatcagataagaaggtttcaaatacacagactcatcaaattgctgctaggaaggaaaagcagatggaagcattgaaggctgctcttggcatagtctcgtctgaagccaatgaaagaaatgcagatgggactgatgagcttggaaatgatgggggaaatggttctaatgtggagggt

SEQ ID NO: 88947 - DNA, 240 bp, Glycine max
gcacgaattcacctgaatgctgcaaggagatcctttcctattgcctccagatccaagctcagcatgatggagcgtggttgccatggtcttgaacgcgtaactgtagccaaatttccaacaaagaagtacagtgacaagttttttgctgcagcagaaaattctcaatgcacagtctgcctctcagaataccaaggtgaggatatgctgcgtatcctcccctattgcggacactccttccat

SEQ ID NO: 88948 - DNA, 239 bp, Glycine max
gaattatgcttctatgatgagggaagatgtcgtaatccctgaaatggatgaggaaaagttggttgtttaaagcaatggtttgattgacttcatatgcatggaagaggcatttgggcaatggaagagtctaaatatgaaaaatttaaggtttaatttctttcaaattataacaggttgtatttgtatatatgctaagatagaggacctgtctaatgttggtaattagacatataatagga

SEQ ID NO: 88949 - DNA, 242 bp, Glycine max
ggagaagtggggtttctgttatttatttatttatttattgggtttaggataggtgggtagggtaaaggcagagggggggaaatttaattgtgggtaaccaatactttacagggtgatggtgatggtggtgtgggtgggttatgaaaggtgtatatgtatagtttccttttctaaaacctataatcagtggatatgagacggaggttaatgcaaaatcaaaaaaaaaaaaaaaaaggggcggc

SEQ ID NO: 88950 - DNA, 234 bp, Glycine max
gcgaagctcattagtgagaatgcctcgcagaagaggacttacttggaagatgggaagcagggacgccttcattgtcttgtttgcggcactggcactggcaggtctgcaaaagattttccagatatgcatgctctcattatgcacacatacaacccagataatgccgattcacgtattgatcatttgggattacacaaagctctgtgtgttttaatgcgttggaactactcaaag

SEQ ID NO: 88951 - DNA, 247 bp, Glycine max
ggttcctaaatgcaaggaaggagaaactatgcaacacccatcagagttggaatttgaagtaagatcatcaaaagatggagcatggtatgatgttgaagcatttctagctcatagatttcttagcacaggggaagcttccatgtcagatttgttggatttggagctgatgaagatgagtggatcaatatcaaaacttcagtacgccaacgctccattcctttggaaagcacagagtgttccaacctga

SEQ ID NO: 88952 - DNA, 242 bp, Glycine max
tagatatcgaatctctggatcatctttgcttgcagcaatggaccagagttctcaagctccttattcagatgtattatctgctcagtctggggatttgtctgcgatgcataacaaagaagagaatgatggatcacattttagcaatgagacattgacaagagtggatgacagaactggaagagcccaccaaactgttgatgtagcagaggttatacggcgatggacccatgccttgcagcgta

SEQ ID NO: 88953 - DNA, 276 bp, Glycine max
atcttacgtgggaaaacccgtatagaatctgccaggaaaaaaaaatgaaggccgaaaatgaaattgtaggtttttgcatttacttttttttgcgctggttttaattttgtaaaaaaatttcagagagagtgaaagcaaaatttctggagcaagatgagaaaacccatctgaaacccacacagaatacaaaacagagagagagttagagagcgtttggttaaatgtaattctcgtgagaaaaaaaattccacttcagagatttattctttcgccgct

SEQ ID NO: 88954 - DNA, 271 bp, Glycine max
gtttatttactcagtgggagaatttctgatgctctgaatttttttaatggtgtacggcgccagggtttggcaactaagaagttatatgttgccttgattactggtctctgcaagttcaataagatagacatttcacgtgagtactttttcagcatgttaagagttggattgaatccaagccttgaatgctatgagctacttgtgcaaaagctttgctcattgcaaaaatatagtgaagcaatacatatcattaatgtatctcagaaaatgg

SEQ ID NO: 88955 - DNA, 269 bp, Glycine max
gtactatttcggtgattcattcagttaatggtgttgggttgcttcattgataaataataaaattgtggtgttgcttgcagattgatcgagtgaataatattggaaatgatggatctgaatgtgaatgagaaaaagaaatgttgcgctgattgcaaaaccaccaagacaccactctggagaggaggaccagctggacccaaggtataggaagagaagggcttgttcgaggaagcgagaggagcagaggtggaagatgttgggggaagagg

SEQ ID NO: 88956 - DNA, 167 bp, Glycine max
tggaccatctattaaatagttgtcagtagttatcattggcgataaactctaacttttaacacctgaaattgaactacatccattcactattgaatggaatgcactatttatctaatgttggaagtttgagcacatattatttgccataggttcaaagttgaaatgca

SEQ ID NO: 88957 - DNA, 263 bp, Glycine max
ctgaaaacatgttcaggaaaaagatttctcggccttctcatatttattaccataaatcaaatgccgaggccgaatcaaaaactttcgaaagtgctagttctctatctgtaacaacatttacatcgcttctaattgaatttgtagcaaggcttcaaaacctggtggattcattcgaggaattaagtgaagtagcaagctttgttgacccccttgagcaacaagcaccagtagcatctcattggttgtttaactgctccaaattc

SEQ ID NO: 88958 - DNA, 249 bp, Glycine max
ctagtgattgacttattctgaatatcattgaattttagttgcttagtcattgttgatatttatgaacttggtctctaatattctcataaatagaaccgcagaagatggctattttgcatttctatgggctcagctcagtgcttaagccatgaagactcgatctttgatgaagttcgagaaaactgagactatgttggtagataattcttggttttgtttggtaattaatactgtctttctgtatacaag

SEQ ID NO: 88959 - DNA, 259 bp, Glycine max
aggagaagaaaataaacaatccagcctggaagagatttttaagtacagagctgaagctcaacagaaagttaaggagagacacgagagagcaaaacaggcagcagaagctgccaaagagagaaacaagcaggcaaataaagggaatgaagaaggcagaagagatagagaaagtggtgggggtgtacatcatgaggctaagtttgaaactaaaggtgataaagagacggatttagtgggaaaagagcgggactaagaggag

SEQ ID NO: 88960 - DNA, 253 bp, Glycine max
gtatccttgatgtgataaaagacttgttggagactagactttgaagtgatttatttaggcatgacactctaatttatgtgtaaattagccttaatagtatgacactttgtagtatttttaatttattttcctctgttgcttagtatagaaattaaaatctgggattgctgtatgtagctttttactggaatccatggaaaaggtgcctttttgaatgggaatcccataaaaggtgtgtcatctgttctttatg

SEQ ID NO: 88961 - DNA, 256 bp, Glycine max
gtatttcttaatcatgcacgagttgtattgagtttactcggagtgcaggtataacaaaatgccgccacagttgccgcaatttgcggagagcaacagaaggttctcgtttgacaaagccgagtacagcaaattgctgcactcagaggataaaaacatccgccctttgccgcaacatcggtgactgctcccctttaacctcgtcatagtactccgtggcagtagacaaaactattctacgatgacggtgctagatcta

SEQ ID NO: 88962 - DNA, 252 bp, Glycine max
ctaggagctgctgtgagccagttcaagacaccaagatgtgtaggccctacaaacaccaaagtgttgcaaatattgaatgaaaatgttgtcaagagctatctcagcactgccttcaattgaataaagtttaggagaatagctatctctctctctttttctatatatatatatatatatagttttccttaatttctcagttgaataaaaagtttgccttgtttttctaaaaaaaaaaaaaaaagggcggccgcc

SEQ ID NO: 88963 - DNA, 249 bp, Glycine max
aattaatattagtaattaattatatcatatcaattcttctattgctttttatttttaatcaccgtaattgtgcagtagtaattaaacaacagtttcattatgaatcaaaaaaagagcaacagtttcttgtttaaattctggttgaatccgattatttcaatttttttattcaattcttatttgcatgcataagatttcaattctaattgtaaaaaatgtttgttttcattttcatatttatgtataaga

SEQ ID NO: 88964 - DNA, 250 bp, Glycine max
gtggaattatattgcactcaatctgaggaactatgatcacctactttatatgatagtagcagaagaccaagaacaaggtgttccgttgaagacgggggaagatatgaaggtggcgaatgaggctatcttatatgttaacggagttcgcagggtgttacctgatggattctgctctttcactcttctcgagtatctcagagatataggtctgaccgggacaaaactaggatgtggtgaaggtggttgtgga

SEQ ID NO: 88965 - DNA, 104 bp, Glycine max
  unsure (1)..(104): unsure at all n locations
cgcattggctacagctctgcaattaatgtgacttcacttacaatttgaaacactttcagcattctttnnntcttttcttagaaaatggtaatgaatgtgtatga

SEQ ID NO: 88966 - DNA, 162 bp, Glycine max
tggacatagtgttgcttcccgtgtgtccttcatctacttcttgctctgcaactcctatacccagcatccccattccgctatgctcttctttcacgactctattattacacaaccgtttcttctcccaaaacgtcccgttatacctttgaaactctctccgca

SEQ ID NO: 88967 - DNA, 253 bp, Glycine max
aaaaaaagcttcatcatcatcttcttcttctctgcatcatcacaatggcttagatacatacgatgcagcagggtatagaagatcgagatgataacagtattgtaacaagtcgacgtgaaaatattgggggactttggatttcatagaagtatgatgccaagtctttttggagacagggagccatttgatgatccctttttcactgatccatttgatagcctgtatggtccaagttctgcatcaagagcaatgc

SEQ ID NO: 88968 - DNA, 257 bp, Glycine max
gtttcctaatagttgtcaagatttggagggttcaaaatcattgcctgagaagactcagaaaaataaagatcttgcatttcattcaattgcaccagaggcactgcttccctacttccagattaactttggtttcagaagctagatatatggcctattattgttcgggtggattacagtccccatcatgtagatctagcggcattaagacatggaaagtatgtagaacttgtaaatcttgttccttggaagggggttga

SEQ ID NO: 88969 - DNA, 256 bp, Glycine max
tagatatttgcttgccaaggaattcgagagccgtcctgatgctgatgacatcgagcttctatttgctgatgaagatcagaagtcagagcaagggcaaggtttgcttgacaaagcagcaggcatattctcttcaattagccggatgatgaagtctatatgatgattgatgatgatctttcatacttgttctcatcattagtgcatcctgcccccattcatgtcaattatatgtttgctccttcaaaattaattttag

SEQ ID NO: 88970 - DNA, 251 bp, Glycine max
ctcaaacaaaccgaacactcgtcctccttctatcgcattccatttattaaacaaaaccatcttttcaacgtaattcggacaccctttatagcaatggaggcgttggacctctgctttctctaactctagctagcattgagaaacaagaacaacgagttgaggagagtgtttttaatggcggtggagtaccagtgttgtgaaactcagtttttcatacgcttattgataattttgctgcttgtgttgtttgc

SEQ ID NO: 88971 - DNA, 250 bp, Glycine max
atttgatctctcagatctgagcttaccgtcgccggaatctctcagatctgagcttaccgtcgccggaacccaactcaacctgggtcggattcttgggtatcatcgcatcgccattcgttttagcctctcaataagagattttagttcgcttcaaattcgaggtttgatttgaagttgaaagttggaataactgttgtgtaaaacaaccaacacacacgagcatgggaagccaagacaacaacgtagaatt

SEQ ID NO: 88972 - DNA, 245 bp, Glycine max
attgggatgagctcttctgagtgaagcaggtgactgcgagagagggtgcaaaaatgagcacggtgtctcttctcaagtgctacagaccctttttctctatgcttttccctcactctgccccacccagaccccacgcctccatcttcaggaggaaaaacttcccttctttttgcgccacctcatctccgccgccgttgacggcggagaagggttgcggcaaattcgactccgagggtctcgccttg

SEQ ID NO: 88973 - DNA, 196 bp, Glycine max
aacacagtaaagctaacttcaacacctttaattttctgaaagtgattcatcggctgaataccatgcggagaggatgcgtcaggagcagccacggcgtcccataggccaacaccccatcgaatacggcgacttacgtgtcgtctccggcgactcttgcagataagcacgtcgtaccgcaagtatgctgccatgatgc

SEQ ID NO: 88974 - DNA, 264 bp, Glycine max
tcgcgagatatactcctacacgtacctctcattccacgctcgttgcgacctccttaacgctgagttgctatcaggttgctcagtcggttgtgttcctcgaccacgacctcggcacccgtggtggtgtcgtcggccctgcggttcgttgcctgccttcgatgtcttggcgtccacgattgttcgcattctgtcgctgactctgcagtcatttggtgttcgatcaggagccgaaggccgagcacgatttccatctcactgtggttg

SEQ ID NO: 88975 - DNA, 232 bp, Glycine max
caaacaattcaattcaatctgcctcggtcatggagaggaaaacatttgggatatagcacttgctcctccttgtcttagcttcttatgatacggtgaacagagcagagtctaaatattgcttaattcggacgcacgggtttcaatgtagatgcttactcgacaggcgatgctcacatttgtgcatgtgcgacgtcttcatcggtggtcgatgccgatgaccccttcgcaaatg

SEQ ID NO: 88976 - DNA, 248 bp, Glycine max
ctgcaactacaggcagatgcaccgcctctgagtcaaacaccgcttctcatttctcttcagcagccactatagtccgtgagtttcggccatcctcatcctaatgctccgtattctgcgcctcttacggactatctcgttcaagctgatggagagattgtggcagagaccctggtactgtttgatcgcttgcttgcgctgttagggttccgccaggactcgcttttgagcttggtggtttcgtggagcgt

SEQ ID NO: 88977 - DNA, 169 bp, Glycine max
cgagcacggttagagggtattcatatctatgtagtcggacatgagttcctggtggactccggattgtattgctctttggtcctatctggtttatcacacatgatatagtagcatttgcttgcctctggtgatttattccttgacagtttctcacttctgatctggtggt

SEQ ID NO: 88978 - DNA, 222 bp, Glycine max
gtcattttggaaaatagggtttgtggtttattgattgtgtaatccgtttggttgtaagcagaaacttctctgtgttaaatcattgtttgtgatttagctctattttttatggttctgtttgtgattgaacatttgcagatcttcgtgaaaactttggccggtgaaacccaagatccttaacgtggagtcctccggggccttccattaccttgaggccttggt

SEQ ID NO: 88979 - DNA, 262 bp, Glycine max
caaagatgaccagtctgcaaatacaaacagaggaaccccctctgagtcaaacaccgcttctaatttcaattcagcagcaactagagagcgagaatgagggaaatcatcatcataatagtaactataatgagagtaagagggaccaagacgttcaagttgacggagagattgtggaggacagcctggtgcggttggagcgcttacttacgctgatagggttcaaccatgactcgctgtcgagcttggtggcttcgtggagcgt

SEQ ID NO: 88980 - DNA, 154 bp, Glycine max
ctgacaacaaagaaattgcgagaactcaagtcgcatctccaggagcttcagaatgagaagatcttgcgccacagaaagtgaagagtcatattagtactattagtgagcttacagtagtaatgtcaatggattttagggagacactaaatgaaat

SEQ ID NO: 88981 - DNA, 168 bp, Glycine max
gccacgagaagaggatgaaccatatgattcaaatttgaaactggaaggaagtatcgacacatgtgacaaatctgatgatgcagatgctcctatggaggttgcccaccaagatactgttgtggtggctgatgatgtttttgatcaagatgttgctggcacccttcctat

SEQ ID NO: 88982 - DNA, 266 bp, Glycine max
gcaaaacaggcagcagaagctgccaaagagagaaacaagcaggcaaataaagggaatgaagaaggcagaagagaaagaggaattggtgggggtgttcatcatgatgctaagtttgaaactaaaggtgaaaaggagaaggatttagtgggaacagagcggaacaaagaggagatacaaagaactattccaagaggaaaagtagaggcagatatagcatgaccgatggtagaaacaaaggtggatagctaaggaagatcaatggatgt

SEQ ID NO: 88983 - DNA, 226 bp, Glycine max
atttgccagaagacagcacctcgaagtaagccttcattggcaacaacggcaaatgaaagtcctcgaagcaggcatccacaggcagcaatgaccagtgacaattccaccctgccaccacaatcttgttctctagaaagccgagcaactcgtccactgaaattccgtgcagcaggagcagcaccttatgttcccattcgacaaatgagaccatctggccagcggattg

SEQ ID NO: 88984 - DNA, 252 bp, Glycine max
ctcgagcggtcttctaatcagcacatcatttcatgttatcaagtgtaattgtttgcaagtccatcctaatacattcctgaatgttttcagaaaagagagacacgtgcgaacacaaatggatacagtgtcggagacggcttgacagcgtcacgggggggaagtttgggggggagtaagagaacaggtgtacatacagcgccaacacgggggggatatgaagagggacggcaaaccagcatgtcgggtgtcagg

SEQ ID NO: 88985 - DNA, 254 bp, Glycine max
attgggaggactcaaaggctgcaaaaagtagtgataacagcaaagcaagatcagcaagcagtagagataaccagaagcggcaagagggttttgaggaagaagtagttcaggatccacaatcagcacatctgagtagcatcagacagcaccctgatgaaattgagccgggattttataaaagagagcatgatgcaaagtaagaacctgaaagaaatcgcatgatgcttataggcagagagagatcatacccttac

SEQ ID NO: 88986 - DNA, 140 bp, Glycine max
acaaaacccaaaattcaatagtcacaaccacaagcgcatcatcgaagtgtcgcttctcccttctttccctcactttcaggaagattatagagatatgagttctcaacttcggagagaaagaagggactggtccagggttc

SEQ ID NO: 88987 - DNA, 195 bp, Glycine max
gtgcagaaggatttgtccgtctaaatggaatcttattcactcgtacaagccttgagatcctcaccgaagttctctctcttgttagcgctggcctgcgtgagcttttatcatcagggcaagacgatagagcgaattttggcacagatactcttgagaacaaacttgccattgtcagaattgtttccattatcatat

SEQ ID NO: 88988 - DNA, 157 bp, Glycine max
cactcgggtggcgacgagcgacgatgaagacggagcaccgccgcgtccagaacgcacgcggaacaggatgaggcctatcgaggacgatgacgatgatgagcagaatgatgccggggaagagtaggaggtgccggagccgcctcagcttgcggaggac

SEQ ID NO: 88989 - DNA, 225 bp, Glycine max
aagcaagagaatcatccagtggtggataaccttgggcttgggcttccatgtgggagtgggagtgtgccagatgtgatgatggggccctattactccatttgtgggccagcccatgacccgtgatcttcttggtctgagcgtcggtggcggggcaacaagcaggggtggtctctctgctttactcacctcttttggaggaaactttgattcgcgattaaggaagga

SEQ ID NO: 88990 - DNA, 255 bp, Glycine max
gcaacaccaacactcgcattcgagaaagcctagggtttgcgtttgcggcatgagtcgccgtggcatggacgacgacgacgaggaggaatacgaggagcaggacgagcaggtcgccgacttcgacgaggaggaggacgagcaggtcgccgacttcgtcgaggaggaggaggagggcagccaccgaggacgcggcggcggtggcggcaggaaaggggaagatctggctttatcgatgacgacgccgaggaggtcgac

SEQ ID NO: 88991 - DNA, 133 bp, Glycine max
tcagtttctcctcgttgttcttcgctttcctgttttcaatttcgattctttcgttaatttaataagatgtttggacaggcaccggagaagaaccataatacgaggtactacaaaatcctgagtcgtctccaac

SEQ ID NO: 88992 - DNA, 224 bp, Glycine max
cggctcgagggaaaaagaagagaagaaacaggagaagaaaaacaatccagcctggaggagatttctaagcacagagctgaagctcaacaaaaagcaatgagttcaattgaaggtgctaaggagagatacgagagagcaaaacaagaagcaagtaaagcttccaaagagggaaacattcaagcaaataagacggctgaagcagccagaggaaaagccagaaagtg

SEQ ID NO: 88993 - DNA, 229 bp, Glycine max
ctcgagccggtcttatcgatgatgtttatgcattctttgttatcaatataatatttattactagatgttataactaacaaaagttcaatcatgagtattttatgcattaaatatttgagtttgattagctcttaactctccagtgaacagatcctttctttggactgtaaactgggttttagtttaacttataatcaagggcaaaataattccatattttaggataaat

SEQ ID NO: 88994 - DNA, 108 bp, Glycine max
aaaagatcatacatagtagttactagtgggttgcaaagatgcttgcggggtcttctccataggaggtcatgaagataaacagggcacagtgagtgtatgatgctgcaa

SEQ ID NO: 88995 - DNA, 184 bp, Glycine max
aagatgctaaggttcaaaaaaatagggttgatcctaataggagatcttctaggaaaaaacagcatgtttcatacacagaaactgataaagatgttgattttgggaattcttccaacatgccaaggcaccatgaatccagtaacaagaatccatcctctattactgacggtgtggttagtcagaa

SEQ ID NO: 88996 - DNA, 271 bp, Glycine max
tgattattatgaaaacattcttaagaatacatgctattaaaacaatgtggaggattataatgtaatttttaagtgctgtttattggtactaccctgcttcaacttttgagggagtggtttgaatttaaactgagttgcaggagatggcttttagtgtaaaatttatttttccaactattctcacctcccagaattttctttaaatgacagcaattgctggctttggaagagaggatgggtactgtgagcacagctctagcagaggaaacac

SEQ ID NO: 88997 - DNA, 267 bp, Glycine max
gattttgtttcatcagaaacttgataattctaacttctcaaaccaagtagtgaagatgcacaatggtgaaactgtacagaagaaatccacacagattttgctgttcaattgtatgtctgagcgaaaccctcagttgcttcttccccacttgatgaaaacatgtgctgatcatggtgtctacttcaagaaggcactctttgtacctggtttatcagtgtatcacaaagttggatcccatgctttaccagcgacagattctgatgttga

SEQ ID NO: 88998 - DNA, 144 bp, Glycine max
atgacgttgtgtggccgagtcatgtcgcagctcgaggcttttgcgaaccgcgctgagatagttcacgttgatgttgattcggcaccgattggagagaacaagcacgtcggatgtctcgcgctgcgctgattatgaaagctcgcg

SEQ ID NO: 88999 - DNA, 237 bp, Glycine max
cttgttccctgcaagataaagaaagaagggagagaagaagttgtagggttgagttggattggatttctaatctaatctatacctttcttttttcctatgcttttaaggcacaaacccttctttcttccctcttctttcttcttcttattgttattccttgcctttaccctttagggaaggaagaaggaacaactatactactattagccttattattgtcatgattgtaattagtct

SEQ ID NO: 89000 - DNA, 168 bp, Glycine max
tctcgagccgattcggctcgagctttcttgttattctctttctctaccatcatttggcttaacaacacacacacaaaaggtacccaaaatgagcagtgtctgtgccaagcagcacaagttttacccctctcaccaactcgtttctccaaagaaaaccctcggagaaat

SEQ ID NO: 89001 - DNA, 146 bp, Glycine max
tgccactggtgtttctagcccgaggccttgaaaacaagtccatgagttcaatggaaaactttgccatttccaaaggctctggacatgcatgtccatcgcattgcgagaacaggccgtgctgggtgacaaggacggggttgcataca

SEQ ID NO: 89002 - DNA, 237 bp, Glycine max
ctttcgccgaaaccctcgctcgcaacttctacagaatccctttcaccatggatattgaggaggacatccgttctttacagctcgattcagcagatccaaagcaggatgttgaggctgagccaaaggctgttgaggctgagccaaaagtgaaggataaggaggttccttctgtcaaagatgaggaagatcaacaagaggtgaaaaaaaccacctgaatgttgttttcatgggacatgt

SEQ ID NO: 89003 - DNA, 257 bp, Glycine max
gattttgaaggcgtaggctggttggaagtctcctcaacttggaacagaaagcaatagccaattcgcgaagaatgggaaggtctccatgacaatcaggcaaggattctaggtttctaagatattataaggataacgagtgcaggacagtcatatgttgtaaagcctcatccaaagcttttacatctctgcatccttcaatccttaaatacatgagagaaggactaaatatccattgtggaaaataatcacctttatat

SEQ ID NO: 89004 - DNA, 257 bp, Glycine max
tgctctatgatatttctttaaccgtcattgcatccaacaatgatattctcagttggatttacatctaacggagtatttttctagttgattaatctcgtacctgtaattggtctgcgaagaagctggacagaggggctcgcgagagagaaacatcgttactttaacgttagttcatgttgtactgttatttattttgcttcttactgtagttacttctcaaacgaattgaagaagggtagtggggtccacagtttagg

SEQ ID NO: 89005 - DNA, 261 bp, Glycine max
gttgctactcatggctgcggacaattgctctctgggttaaatcaggaaagtgttggtttgaatagctcaaaaaacgttgatgcccaacagctgtttaggaactggaccaccttggatgatagtgccatgtttgacattgggaattcatatattgagaacggtagtcttgataatgacaatacctttcaggaagctgttgattttttagagaaggccggtttccattctttaactctgcctagcttgcctcctgatgatgct

SEQ ID NO: 89006 - DNA, 252 bp, Glycine max
ctgtggcactgttgttgaatgtacaatcactgattcaaagcattttgcttctatagaatactcaaagcctgaagaggcaactgctgctctggcattaaacaacatagatgttggggggcgccctttaaatgctgaaatggcaaaatcacttccacacaacatacgaaccccgaattcttcacatgcatcatcatctcttcctctgatgatacatcacgctgttgcgaatctacatatgcaattccaccaagc

SEQ ID NO: 89007 - DNA, 265 bp, Glycine max
cacacacgcttccttaaaaaacaaaacaactttccctttttttcttcattcctagtacgtttattttccccatgtcggggattcacagattaagttttgcggttgcattctgaaaaaatataacagaggaactcgtgttaatcaatagaaatagaagatacaataataatttgtagtgatggtacagaaaaacgtattgttatcggcgttgagtgttggggtgggagtaggtgtgggaattggtttggctggaaaaggcgttacg

SEQ ID NO: 89008 - DNA, 118 bp, Glycine max
ggcagcatcatcgtgtcttacatgatcgtagcgcaaatgctctaaatgaaattggaaccaagaagcataagtttttgggcgcctaatactactgggcttgggcaacaattccacttat

SEQ ID NO: 89009 - DNA, 250 bp, Glycine max
cctccccccagttgacctgcctcaagaccttgacacagtttcccaaatccaactcacagtcaccctctccctccctctcatccaccaaaccctcaagtccctctcttccaccacaccctctcttgtggcacttgtggttgacacttttgctgctgaggtacttgactttgccaaagagttcaacctcttggcctatgtgtacttccccttggcagccaccactgtttccttgcacttccacatgctcaag

SEQ ID NO: 89010 - DNA, 118 bp, Glycine max
gttggttttagtcagcagccataactaccaaaacctagaacaaacattggtgtgcgttccccagttttactcagtcaccatgggccgcgcgcagcgaccatgccactggtgctcctct

SEQ ID NO: 89011 - DNA, 230 bp, Glycine max
gggattaggggtaggactgccatttttgctgtgattttggatgtggcaatttcggcagaagcagtagctacgtctcaattagcattgcaaggagaagctcgtggtggtgctgttggtgttatgggagcaggcttaaacattgttatgtatttctcacctccctctgccatgggttgtagcatgcgttgagatgcttgaaaggccaagttaactctgtcataagggaaagg

SEQ ID NO: 89012 - DNA, 231 bp, Glycine max
caatgagctgcaactaagcttcaagggatgtgcaaatctattagagtgaccctggatcaacatatttttagggaagagctcgagctctggccattgtttggaaaacatttcactgtggaagaacaagacaagatagtgggccggataattggaactacaggtgctgaagttctccaatcaatgttaccatgggtaacttctgcacttacacaggatgaacagagcaaaatg

SEQ ID NO: 89013 - DNA, 120 bp, Glycine max
  unsure (1)..(120): unsure at all n locations
ggaaaggggaaaacggtaacggagatgggacttctgtctaacaggtacgcttagtttcgattcctccaacgttggtctacactanaaaacacccgttttgtggtccttttaaaggttttt

SEQ ID NO: 89014 - DNA, 130 bp, Glycine max
caactttctttcccatttggaggaagcataagggttggtaactgaaatacaaactcacagcagcaagactttgccttaaaataaagaatcaagcgtttcgtgaattggattctctgcaaatcaagatctg

SEQ ID NO: 89015 - DNA, 131 bp, Glycine max
ggtgacagtgatcagttccttgtgaatcgtcaaatataatgctcaatacgtgggttgtaatatgagaaagttgtaagattttgttaataactaactctagcattcagcacccacttcattgttcattttat

SEQ ID NO: 89016 - DNA, 137 bp, Glycine max
aagaggttaaaggatcaagtgatgctgctggaagctccgatacggggtgtggctcctttgttcactgctcttcggaaacttcaggtctccacagaacacttgactccactacactcagagtttcttctgctgtgctt

SEQ ID NO: 89017 - DNA, 177 bp, Glycine max
cggagacgcggcggcggtggcggtggaggaggacgagggtgttttaactgtggggaggaagggcattttgtgagggaatgtccggatgttggggaaaggaaatgagtgagaatgtgttatgttatgatttcttctgttgaattgtgagtatgttacagtcatcagttggggttggtt

SEQ ID NO: 89018 - DNA, 233 bp, Glycine max
  unsure (1)..(233): unsure at all n locations
ctttgttagttattagactaggataacaaaacttgtttacaactcaaactctcttaccgttattatgtccaactctattacccatcttcaaaaccaatttgagaaccaagaccttgatacttatggctcttctatgaggcacaacaactgcatcattcctgaggcnatcatgggagcacttccgacgtgcanttgagnagntgcntagggcgcntagantagccacacaaggc

SEQ ID NO: 89019 - DNA, 238 bp, Glycine max
aaaggtgaagggcgcacaaaggtgctacagaggctgtgaagcaaacccttggcttgggcgagcatgatcaagacaaccgcagaaacccttggcttgggcgagcatgatcaagacaaccgcagaaattactaatactataatttgaagtgctttcttgtagtagtggtttacgcagcatggctttttaaataagctgctattccctacactcctacctaaggagtgtactattatccgc

SEQ ID NO: 89020 - DNA, 233 bp, Glycine max
ttgaatttgaatctctcttttctttgtattttcgtttattgtgggtgttcgctcatcatcacttgttgtaatgtcttaattttgtgtgcatgctgcgactattcaaggacgatccatttgtgttttaaaaaaaaaaaaaaaaaaaaaaaaaaaaaaaaaaaaaaaaaaggggggccccccaattagtgaccccgtcccccgggaatttttttcgggccggtaccctggggggg

SEQ ID NO: 89021 - DNA, 234 bp, Glycine max
attttccgctgactcctcatgcccaacggcaaataccttggtttcttcgaaggtgggtgactccatgggaacctcctggccacaatgtggtcctcactgtgggagcgcttcatcaagctgattccgctgctcttagggttgcagcttctgcctggcataacgagttagcaactctgccaaagcccttgcttgtggttaatgttgggggacctactggtaattgtccctatgatg

SEQ ID NO: 89022 - DNA, 110 bp, Glycine max
acaaatcggttggttcaacagagacaacattctggtacctttaatccgtgcagatgaacgcagcttgaatctgattggagtgcaatataatggactgccctcatacaaca

SEQ ID NO: 89023 - DNA, 123 bp, Glycine max
gcagaaaccacacacaactcaatcacgaaaatgtcgaatttgccccaatcgctgtcgatgggcgcaggcttcggcggcggtggcgctccaacgccgtcttccagtggaggcaccggagcacag

SEQ ID NO: 89024 - DNA, 128 bp, Glycine max
ataacatgccacaaatctagtcaagaaatacaaatccggaggcagagatttttaacaaacttcctctgtaacatattcttccctgttacagcagatgataacgttagtgaacattgaaaatgatccac

SEQ ID NO: 89025 - DNA, 265 bp, Glycine max
ggcaaggaatgtgagtgctgcgtggtattggtcacagggcgatcaagagaatgagtcagttaatcatgaagaatattctttctggactgaagccagaaagccaagcaggagaaagtaatcgatctggcattaacgaggcttcaggatcctggtcctgcatcttctaatgttaacagcacaggtagtaccagcagctgtgggactgtcagcagtagtgcagccaatattataggggatgttgactctgattgcttggattatgaaa

SEQ ID NO: 89026 - DNA, 261 bp, Glycine max
ggatgccacacaccaaggaaagatgatgattgtactgaggcgtgtagagagaggatttatccaattgaaactttgatactcacacctaccataataggatcaggctagggtttataataagctgctgattgaaacaaatgtagaaattgcagttgttgaatcatctgcaccagacaccgattcattcgaccaaaacataagccactccggatctgacatggcagggagggagcaattcacggttgggatgcactaacccca

SEQ ID NO: 89027 - DNA, 261 bp, Glycine max
gccatcagcaaaatccaccactgagagctttcaaagaggacaaggacaacaagaacagcatgagcaaggagaaaaatgggaacatggtgcacaaaggactaataagccacatgaaagcaacattgtggaaacctttgaggaaaacctaggtgggattggggaaaaaagggaacaaaaaccacttggaagcatcattggagagagctttcaaggagttcaagaaaaagggtgctgaatgccattggtgaaaccacagcagag

SEQ ID NO: 89028 - DNA, 253 bp, Glycine max
atacccagaagccacctgtatttgttgaacctgtctgtgtatgtagttctccaaagtcttcatgaagaagatgctcacagtcaaaaggttattctgcctcaaggttaatccagatggttttcaagggtgctccagcatatacctggcactagtgtccgagcctatgactaaatctttcatgtgttagtctatcttttaaaactttgcaaatttagtcgtgttgaactgatgttcattttgtttttcttatact

SEQ ID NO: 89029 - DNA, 270 bp, Glycine max
gcaaaagatggagatgataaaaaggttgagaacccacagcacaataagactgttaaaccagagatcaacaatgctaatcaagtatgagataaatggtgtgactttgaaatctcttttgcatctgttccgttgagtcttgaaataggactctgagtctggacaaaggatatgcttgttgttcagagttcagaagagggatatctaatttttttgaaatagaaattgaaaatttagggtgccttaactaaatggttctgctcttttttttct

SEQ ID NO: 89030 - DNA, 111 bp, Glycine max
caggacttatctttggatattgtccaggaagaaccatatggatgaggaaacctacaaccagcttgttgagagagctaaggatgaggggtatgatgtgagcaaactccacaa

SEQ ID NO: 89031 - DNA, 100 bp, Glycine max
cttatggagggagaggcgaatttgtccaagcttatgctcacttccccgaccgattgaaagagaatattcatccatggcctccaagcggattctaaaggaa

SEQ ID NO: 89032 - DNA, 250 bp, Glycine max
ggtcaatcaagctgccccttcagctgaatctgggagcatgaatgaaactgaaggtggagtggcaactaggacagaagcagatcagtcacagaaggctgagcatgcttcagatgacagggctaagattggaaacattactgttgttttggctagtgctgggaatacacttgaaggagctgatgcagagcttattttaaatcctctccgtctcgcgtttgagactaagaacttgaaaatccttgaatctgct

SEQ ID NO: 89033 - DNA, 139 bp, Glycine max
gtaatgacatggttaagaggcctagattgatgggaaatccgtgccatgtacccttccctaagacaatggaatcaacacctaattttgattatagacaccaacaaggtcataaacaatttgcaacattgcaatctgagct

SEQ ID NO: 89034 - DNA, 130 bp, Glycine max
cacagatgtagatcttttgcttcgtctccttcatcgcctaggcttgagttgcatcaagactccttcctcttcctctttctcgtccagtttagttcaatctgtgaattctcctccttatcaagtcttcctc

SEQ ID NO: 89035 - DNA, 248 bp, Glycine max
gcggtgtcgcctctttcaaccactttagtcacgcgctttctgtggattccgatgtatcaagcctggaagattcatctgcagaagacagtgatgctggatatgaagaagatcctgaatctccctcatctcaatgttctagaccctccaaacctaattggatgttggctcctattcacttcttgctggggattccatttcgccttgttcacttagcttattctggctctcggctgtcagaaccgccggtt

SEQ ID NO: 89036 - DNA, 138 bp, Glycine max
cacttatcatattactaacaaaaatggaactaacatgccctcatcaagacgaagctgattccgttgtttctgattgcgagagcggtgtttcgggcagtggagtcgtggtggcaccaccaccaccaccaccacaacaac

SEQ ID NO: 89037 - DNA, 253 bp, Glycine max
gagtatagcaacatgggattttgcatatgagagaaatcacatgtttaaattttcactctctccttagaactataaggtaaatataaatccaatcctattcctagctttattctattcattgtttgtgaagaagcatcagggtcttcctttctttatttctttcgctgatcgaataaaatttccccatttgaaaccccacaagagtgcaattgacaaatagccacacagaaagatagggttttgagatattgcg

SEQ ID NO: 89038 - DNA, 245 bp, Glycine max
gcgcactcctcagtccaaagcgtcttgtttctgtgtggaggaaaaggtttggagaagaagttgatcaagattttatttacattattgccgtggatcggatactccaattggaagacattcaggaggatggcatatgggtcacctcttcagattacaaaaagcatatgggtcacctcttcagattacaaaaagcatatgggtcacctcttcagattacaaaaatgctcaacccgatcttcttcggg

SEQ ID NO: 89039 - DNA, 240 bp, Glycine max
tgatatagaaagagaaatcagcacaagccaaagatgctacggtaggatcaatggagaaaactacaaaggatgctaaaggaagagaaaaagcaggaaccaaaggtcaaacaaagaagggtggtggtgaggaacaaggaaaaagaagagaagaaacaggagaagaaaaacaatccagcctggaggagatttctaagcacagagctgaagctcaacaaaaagcaatgagttcaattgaaggtg

SEQ ID NO: 89040 - DNA, 236 bp, Glycine max
tgagcagaatgatagcgaaaaccaaaaaacaagtgtcatcaccttcttcttcttctttccctgattctgttggttccatctcttcattcataccttgatccgtgatctcccaatttctcacttgaagaagcaccttagagggcacccatgtgctcatgttaataatgacaaaataaagacagcatcttatgactgggaagccaaatccagaagcttttccaatttgacaggtcata

SEQ ID NO: 89041 - DNA, 239 bp, Glycine max
gtaatctgagttcttgaactagagccaaaaaacttgatgatgctttaatttgcttggtagagtgaatgatacatggaagtgttggctggcgcattgcattcaataactagcaaatgtatggttttgcttgttactgttttgatccttagagcactgttgtttgcatccttccctggctttggtgggatcgaatggggcaaccttgtatatctccgcgctccgttgttgaatttcgactt

SEQ ID NO: 89042 - DNA, 204 bp, Glycine max
cctgaatgtaaaggcaaaggctagtgcttctgccccttttgccaaggctattgcagaaaaagtagctattgcagcagcaggtgaggcggactcctctgaagcacacatgactaaagagcaaaagcttaaggcagagagattgaaacgagcaaagatgttttcagccatgctaaaaagtggtgttggagcagttgacttgccacg

SEQ ID NO: 89043 - DNA, 262 bp, Glycine max
aatcttcagccgttgaagatcctataattgaatcggttagttgccttcaggctgtccaggaggcccttcaagaagaactccagaaattcagggagattgggattgaagctatttcaccagatgatgactcagctaagtgtagcagtgcatctgctggtactactattgatcttggacttaataaatcaagccaatctggtcagtctggtgcagaagaaattagacaaactgcttcaagttcctcagatcctcaggtattgag

SEQ ID NO: 89044 - DNA, 99 bp, Glycine max
ctaattgtgccttcactggtatcaggccgcattgatgtggttgacacaaaagcaagtccaaggtctccatctttgcacaaagttgttgagctagaagac

SEQ ID NO: 89045 - DNA, 209 bp, Glycine max
agaaagtggaaatatcagccgacatctagatgcagctatttttgttatctcttcatatcatttaattatcccatcatcgaaaaaggtggtgagttgggaaatttttgtccggggtttcattatttgcaggaccttggatcttatttctaacatttttagatggatatcctattttaattttactgatagaatacaagtcctttgtcctt

SEQ ID NO: 89046 - DNA, 246 bp, Glycine max
aaagaacaagggagaatctctagtagaatagaagattctgccatcgcttaatcaagcgctactgcttcattgacttgtgccgtctgagtcagaaaatctggtcttttatgcagcggagtcctctgtctaccggccttcttgtcttctatcatcagcctagggataagagatcatagatagtccagcataagcccagagatcggggatagaatctatccgtcaagctatttcaagcaagcggtttgg

SEQ ID NO: 89047 - DNA, 253 bp, Glycine max
ttgactactgcaatttcagcactgagcttttcaccagatggagaggggctggttgctttttctgaaaatgggctactgattagatggtggtcactgggatctttttggtgggagaaactaagccggaactttgttcctgtccagtgcaccaaactaatatttgttcctccttgggaaggattttcacctaattcatcaaggtcaagcataatggccaatattttggaaactgacaggcagatgaactttcagg

SEQ ID NO: 89048 - DNA, 167 bp, Glycine max
cttatattattattttctttggcggttctggatcatgttatgtgattaaattttgcaccttgattttttgtatgtgtgtctttgaatcaatgggttcgttgtcggattgcgactgggatggcgtgtatctaatactcaacataaatctttttgactgcagtatggaa

SEQ ID NO: 89049 - DNA, 256 bp, Glycine max
ggtgagatcactaccctcttcggtctagcagaatttaatccaaaagggttagctgttgatgcctttctcaagtctctctgtgctcaccctgggatagactgctatgacttgttgactgcactaactggtaaaaattgctgcctcaattcttcaactgttgatctattcttgatgaatgagcctcagtcaacatcaacaaagaacatggtgcacttggctcagactgtgagacttggggcttgacaaattccagtta

SEQ ID NO: 89050 - DNA, 255 bp, Glycine max
ggttaattgattctctcatgtttgtgtttcaatttgttgaaagttactttcacctttttcttttctttcattgctgcctttgctctttattttgttccttctgtagattattatgtccttgagccttcacgagtcacgcctgtgcctaatacaaagaataggaattcgacttttttgtggcaaaaaaaaaaaaaaaaaaaaaaaaaaaaaaaaagggggggccccccaattgggacctccgcccccgggaaattt

SEQ ID NO: 89051 - DNA, 231 bp, Glycine max
attgaataataattactgaagtttgaatgttcatttgatagtgggcccaggcccacttgaaggagcactgccacctgcaagtgggcctgggcctactttcaattgaataataattactgaagtttgaatgttcatttggttttttttaatttatgttctgttggatatttagtttagggtctgagcattacgatgtgacatatcttgtgtacttgtattgtctcttatatt

SEQ ID NO: 89052 - DNA, 136 bp, Glycine max
gatcccggtggccttttccctctctttctctggaaaatacccccgattttctcgagaaagtgaaacggaattatgagctttcaggacatcgaggctgggcggcccttcagttcaacgcgcgtgtttattaacggga

SEQ ID NO: 89053 - DNA, 160 bp, Glycine max
cggcactcgtcacaagcactctctctagtacctcctcctaatgctcattcttcttcttccctggcatcagatccagatccatatccagcttaacagagataatgcagtacaagaacctgggccgatcgggactgaaggtgagctagctctcctacggggc

SEQ ID NO: 89054 - DNA, 240 bp, Glycine max
caatagtagggcacccaattcaggttgaggctctcaaggacggttcatctgatattctatttcctgcaactgatgacttcggtaatgatgggattgctattgagggaagtagcgtgcttccaccagcatggaggactgcaaggagaaccgcaaattttcgtgtcccacgcccccatgtgccatcatccaatggtgctgaagttgctgcagagcttccctcttcagatcaagaacaaaact

SEQ ID NO: 89055 - DNA, 241 bp, Glycine max
  unsure (1)..(241): unsure at all n locations
tcagaatctgaatcagatgatgagtcagggagttctgattcatcagattctggatcagctagttcagagtcagacttggactcagcaagttctgatgaaactgaccatgcgagtgacagaagacaaagaaagcggaggagaaagtgaagcaattgtatgctattgtcgaaggcccttgcatccacaaatctgagtatcgttngtntctcaatctttaaatcactgaataaacttgcctttt

SEQ ID NO: 89056 - DNA, 210 bp, Glycine max
cgtgcctcaagtattttgaaatatgaacgatgaacaccaatcgtgttgttgctgtcgatgcagtttctctccggattccatcttgtcggaaaccgacgacgcaacagccgcgacattggcaaagatgccaagtcaaatcttaatgatcagaatgagcaaggtgcaggtttcaacagcaaaaacaaagaggagggtaattccaaggagaag

SEQ ID NO: 89057 - DNA, 100 bp, Glycine max
tgagttttcaagacatccaatgtgggcccaaccctccctctcgccggaaccagtccccgtcgcaggccgttgccgccggaattttccagatcaacaccga

SEQ ID NO: 89058 - DNA, 237 bp, Glycine max
ttttgttacaaaacttacaatttgataccaaggtagtccataagttgatgagctgcaagcctgcagcacaagtgatatcttttgaatgggaatctcttcataaaataaaagttatcaaatttcaaatttgtatgtcctaaaacatacaattttttgtttccccaatatgataacatgatatatgcaaattaagggattttctctctgtctctacacatgaattttatgccgagcatt

SEQ ID NO: 89059 - DNA, 220 bp, Glycine max
gggtgcacgaaatgttacggtagatattttaagattgagttatcgattagagatagagatatcttggaaaggagggcaggtgaagccggctattcaggaatcatggctagggttttggctcagtctattaatgtccctggtctattggctgagcataggcatggtcagcaaaaggaatcaggaaaattaaaaagatcgaccaaaatgatgagtgctttac

SEQ ID NO: 89060 - DNA, 218 bp, Glycine max
cttcttttcttttattaagggttgcaacatgagaggcatcaaaatagggccgatgatctcaactaggttgacaccaggagcactactcaacctctgcatacaatcactcaaactatgtttacaaaaaaagaaggccattcctacacatcacatgccatctctaaaaaattctcattcctatctgaataggaattattcaaatcttagtgcagtctcag

SEQ ID NO: 89061 - DNA, 220 bp, Glycine max
gcatttgttttgttgagcgagagtacccttgaaaatcagaagcgtgggtggatttcctccaagtcgttgctcgttctcacttgtctccaattgcaatcggcctttaatttgcaggtttggcccatgaacttctttgcttttgctaattagttgagaactgtgctccccaatttaacatggcatctatgagagaattttccagagtcatactatctcactt

SEQ ID NO: 89062 - DNA, 109 bp, Glycine max
gaaggacctctttctctatctctgccaaaaaccgctcctcatagacgatggtataaaggactaattgttgggtcttattcattgttatctctgttgtcggttgtaataa

SEQ ID NO: 89063 - DNA, 214 bp, Glycine max
agatgattggagacaggctacaacacaagacacggcaatgacactgccaactttttttaatttattttttaaaactatataataatttaccttgtattttagagtagaaattcattgagcggtttttttttctttcctgtttgatagttttctttttttttttccttaatttttttatgtggtatatttacagatgggtatatgatctttgttt

SEQ ID NO: 89064 - DNA, 208 bp, Glycine max
  unsure (1)..(208): unsure at all n locations
agctttgctactcaacattagttgggaattgggtgtgtcacagagagaaataaagaaaccgagaaaagacagcgatgcaaccaacgctccctctcctccttgtacgcttccacacaacatacgaaatgaaaagngnncaanangangnntnaggnannggaagatggaagagtaagagagagnaagggcagaacggtggatttcaaga

SEQ ID NO: 89065 - DNA, 222 bp, Glycine max
aaaacaggttggtttaacaggataacaattataagtttctcttttttggtggtggtgggaggggggatgacaaaaaatatagatacattaccttaggtgtttttagagttttagtactatatactgagaaaaaaaattaaaagttaaaccttaataacctacacaatggaggtcaatactcaatattaaagattagtactagttactaagataaaactgttt

SEQ ID NO: 89066 - DNA, 213 bp, Glycine max
gaacgttgtattgaacaagaagagagaggaatgatgatgaatgttttagggttgagtctggtgttaacttcactggcagcagcaggaatattctctcgcaatgccacgacagatacgcaataagacagcactcctgacgaaggcgggcatcgagttgtggtggttgaatacgaccaaggtggccatcagaacaccaagatgctcaatatcccc

SEQ ID NO: 89067 - DNA, 223 bp, Glycine max
ctgatccaagagaaaatgagaaagcctaaaaacgaacgaacgaacaggatcctccctcttctcttctcaggcacacatgaaacaccaaagaagcgacttcaagtcttcaacgatggctacgaatacgattacctcatcctccttccgattagtagcaacgagaatccctctctcccgcttccgaaaaacaccacatctcctttcattccccacaaaacccttt

SEQ ID NO: 89068 - DNA, 262 bp, Glycine max
cttatatgatggcctagctgaagtactcctcatcctccttaaaagtcaagatactcgtgaaaatgtactcaagtatcttgcggaggtgatcaatataaatgcatccagggctcatatacaggttgaccctattacttgtgcaagttcaggcatgtttgtaaatctcagtgctgtcgtgcttcgtctatgtgagccatttttagatgcaaatttaacaaaaagggataaaattgatgcaaaatatgtgcactactcaaaccgc

SEQ ID NO: 89069 - DNA, 258 bp, Glycine max
caaagtcgaagaatcacacagcacacaatcagtcctacaaggcccacaaaaacggcatcaagaaacccaagaggcatcgccacacttccaccaaaggggtagtctctctctctctctcttttatgtttttgggttctctttcacactgatacatatgcttatttattttcgggtaatttaattatgctttttttaacaaaaaaataaatttatgcgtttgtgttgttggcaatgggtgtagatggatcccaagtttct

SEQ ID NO: 89070 - DNA, 244 bp, Glycine max
  unsure (1)..(244): unsure at all n locations
acaaaaacaaaacaaaacagtgtctttgattacgagagagagaacaaaacaatcaacacaatgtgctctttctcaatgcctcgaagagacgaacaacagcaatagggtgatagagagtgaggttcacgttgagacacaccgataagagtccctccctgataagggaanggttgtgatagagagtgagaagtcggagccagagagaccgcttgcgtctgatagatccagggcttgaactatagtt

SEQ ID NO: 89071 - DNA, 252 bp, Glycine max
tgcagatcatcattttcctcttttttggtggaaccagtcactccatgtctagtttctggtgggttttcattcaagagtgcaggcgattcccctgatttggaattttgttctcccgttccctcaatgcttagcttttcattcctcagccccagttctgttgttgagcaaaagagttgtaaattagagtgctcagctaacatggcagatgtcaatgcaattgctggagaaacaaacttgggaaaattgcttatg

SEQ ID NO: 89072 - DNA, 236 bp, Glycine max
gacgtgggatcattgaggatctccatttggccacggagatatttatagaagctgtttttgatgttgttcacaaggcaatccatcttcttctttccccatcagaagcttttggaacattgtcaggttgttttcatctcatgaaagacgcattttagttgataatgatgttgttgaggaagcctctacttcttcagatacacttggagagaatgagccaacacctacagacaggaata

SEQ ID NO: 89073 - DNA, 99 bp, Glycine max
gacaaacagataacacgggttattggaaagataacaacaattgctgctgcagtttatcttagaatggcaggaaggccacccgtgcttccacacaacata

SEQ ID NO: 89074 - DNA, 200 bp, Glycine max
caggcaaagaacaatgtctcctcaacctctccaaagtccattacacttctaccactaccactctctaattcaaacacaaacactgccagattctgtttatataatacttgaagttgaagctttaacgccactctttctttttgcacaccccacatggcttatctccacaagctcgcacctttcacctctctccacacaac

SEQ ID NO: 89075 - DNA, 235 bp, Glycine max
gttgtgtactggacatccttgcttcatggtttctttccatcatctaaatatgactacagaatgctttggttttatttgttttgaacttaatttaacacattgattacatctattgtaccttattatctgagtgcaaccactactatttcgcaatattacagtgaatagaatagtcataggcttgacaagttatacatcttcacagtcaacttctcaactgcttgcctggggggag

SEQ ID NO: 89076 - DNA, 229 bp, Glycine max
atcgtgatgtccattctgataggaagtatacggtttgtacacggatcacgagagtgttcgtacttagttcatctgtcgcgctggtgaagtgcaccacaaacatgttcccttgtttatgaagcacgatcaattagtttccattagtcttataattcgtgaattaaccttataatccctatcgtgatgtccattctgatacttcgacttctgtttgtatattgtgcccgtt

SEQ ID NO: 89077 - DNA, 229 bp, Glycine max
ggaaaagaagaaaaaggagaagaaagacaaggatggcaaaactgatgctaaaaagcattcagcaaagaaattagatgaaaacaaaaagggtagtggtggaccctcttcaaggcgatggaggagaagaaaaaggttaggcagggcaaagctaactctgaaacagatgtagcaaagtcatctgctatggatgtggacaaggaaatggtttcttccctgcggtctggtacaa

SEQ ID NO: 89078 - DNA, 227 bp, Glycine max
aaaaaaaaatgatactcaatctccttagccagagttctagtgtattattaccccttagctggaaggttgaggagtgtggatgatcacactcacaagcttgaggtggattgcacggagaaggtgctgtttttgctgaggctttcatggccagagttctagtgtattattcctcctctcataatacaggaaatggtagttattactactaccatgggagaatttggatg

SEQ ID NO: 89079 - DNA, 279 bp, Glycine max
cacaagttttcttgaaccatgtgcagtttctttacctagtggactcatgtaattttaatgagcacaaggaccttcccgaagacaaaaatgacaaccaacatggacggacttttgccaaagatctttttgtgactcttctcaatctttcactggcatatctgtccttgatctttctgagaatagaatagcaggatggctttctgactttaacagaagatttttgagtggttcacatatgtcttttggaaatggaaagtcttgaaactgttgcgtgtactc

SEQ ID NO: 89080 - DNA, 264 bp, Glycine max
gtcatctccatccggggtgttgcagaaaacccttatttcattgtctgatagcagtaacaatagcagccctacggttgcatcatcaagggccaattctgagatggccttcctcaggtctggataacgtgttaatatatacaatgtgaaagtccaccaataatacttgttggcaacacttgctatgcctgatgttcgctgcataaattatcactgaaaattttgctacctaggtgatgatgaaggtttttcttctgacaatttgct

SEQ ID NO: 89081 - DNA, 121 bp, Glycine max
gtagatcttagttgtgagcagtagattctccaaatttggcggcaatgggtacggctcaccgctggagatctgtcgaccatcggcgtaatcacgtccgtgtcgcttctccattgcgtcattc

SEQ ID NO: 89082 - DNA, 174 bp, Glycine max
agctgcttgtttgatagggaagaggagatagagagaaaacaaagggcggtggtgagtgcttctgcttcatcatcatcagagaatggcggctactgtgtcttctgcttggtcaaagcccggcgcgtgggccctagattccgggaacacgaagccgagctcgttccacacaacata

SEQ ID NO: 89083 - DNA, 114 bp, Glycine max
gtttggtggagcttccaagacaatgtggatgcgggagcttatgcgcttgttcttgagattgcacttcatgattctgcgggtgaaaaagttgatgctactggaggccaaattcat

SEQ ID NO: 89084 - DNA, 235 bp, Glycine max
ctcgagcgaattaataagataaatgctaaccaatacttaacgaatatgttgtctaaaaaaaatagcattatttgacaccaagagaaatgaaaaaagaaagagagataaaaaaaaaatagtgaaaatgtaggaatatacaataatacaaatcgtaacgttgttctatttaactcaaagacccatctcttcctactttggctttcattctttccgattcacagaaacaactcctctc

SEQ ID NO: 89085 - DNA, 175 bp, Glycine max
gcgaggtgatttgacttttgggatgtgtattaagcatgatccttgccaatacgtgaaaaaggggggcaagggttcatgtgtagttaaatattgtgagttagcaggaaagtttttcccgtgatccatgttagaaacagttttcttaagaatttcatttcagactgtctgatatcgg

SEQ ID NO: 89086 - DNA, 235 bp, Glycine max
  unsure (1)..(235): unsure at all n locations
aagggtcttccgcacatcattcgagatacnggtcaagaaccgctacgagtacatcaacgccgcccncattcncancgtctccctcgtccttctgtcgggcctggcggcccagctttcttccgaagcccgatccggcctggtgcttatcatcgccgccttggccatcatcctcctcgtcaacctccatgacctcttcgcccacctcgtcggcatcgatttccggttgcccttgatc

SEQ ID NO: 89087 - DNA, 218 bp, Glycine max
  unsure (1)..(218): unsure at all n locations
caacaacttctgctacttcctactccaaccgcacttctgttcggcacttcttatgagttgaggccaagancnnaatcaacgganntngaanaattngccgcatggaagccagagtggctctgagagagacgatgttgaactcgttgccgttaagacctttcatcacactgattaatgacatacatgtttaaatagataggttcatggacatggaagca

SEQ ID NO: 89088 - DNA, 243 bp, Glycine max
ctgcattacatacaatatatattctccagcacaagagaaacattcatacatacatagctattagcagttcactttcaatctatgtagatttggtttgtgttcattgtccccactgaatagtgaggggtagcatagcagcccaccatcccatttcactctccacaccatgcctccacctgctaggaagagaaaagctgccaggaaaaagaaggcaaaggaaaacaacatcaacccatcaaccaa

SEQ ID NO: 89089 - DNA, 253 bp, Glycine max
ttcagctcgactcactctttgctacatatgccagtacttttccagccatagcaagtcattgtgaaattcatgagctctccatcttttggcaatgagttgcatgagtgataatcttcacacttttaccactctgctcataaatgacttagctatcattgtgctctgattacacgtggcatcacgttagctgacatggattacgtgctggctattgaatcctgtattccgtagcagtgatggtcacttcagctaa

SEQ ID NO: 89090 - DNA, 235 bp, Glycine max
cttcaggtgcatcacttcacatcatggtcttttctgatttttatcttccgcttcaatactgatttgagaaaaatggatggaaaatagcggggaagttggtcattctgttattctttatttttttggctattgcttggttagatgatacaaaactgtgcatatgagatcatggggatgcaagcaaaatttcaactatgatttcactttagagcagataaatactaaattgtggagc

SEQ ID NO: 89091 - DNA, 248 bp, Glycine max
ccacaatccaacgtagaaaataaaactgttaggttaagaggttacatgcggtgatgtggtcggagcagtgaataacactagcactagaatgcaacgttactaacattcggggctatggtcgttggttttggctagagttggaacctccgtcttctctcgatgaattcgaggacttaatcaacacttcataaacacacatatcatttcgtttcttctcttcattccattctcattccatcaaatgatgg

SEQ ID NO: 89092 - DNA, 253 bp, Glycine max
ggacaattggctatttatttgagattgaagctgctctcatggcactactattcaaagaagtagcagctgcctcatgctttgtataggaggtatatcctcataccgttcttggatagaatcaatgttaaaagatgaaaatggtcctctgcatgttttaacctttggattttatgcatcagatgcaccatttggacaaggcacaattcttgaagctaaagggggactgacatgatgcaatgtctttatttattta

SEQ ID NO: 89093 - DNA, 255 bp, Glycine max
tatatatatatatatgttaataatgttgttatataccagtatatggttttgatgcatggtatttacgactgtattaatctatcatatacgttgtccttccttttttaattagtgacttacagttgcgtaccaatgcatgttatgtgtaacgcttggattacgcagttgttcagttaatttgccttttaggtatgtatcacataataaacttgagcaatctttttttgcctctttttactttgataaacttatgga

SEQ ID NO: 89094 - DNA, 254 bp, Glycine max
cagaggatgaaaattgatccgtttttgtctttcttggtctattggcaaatatgtgcaaagagtatatacgtaactagaaggaacacggcaagaatttgtgggattcaatttagtggttactatgggtgctgggtttggcctagcaacaatatccaatactccagcagtagccacgggaacactggcttggatattgttgctaggccaaacccagcacccatatccaagccatttttcccgtggctactgctgga

SEQ ID NO: 89095 - DNA, 259 bp, Glycine max
tcagaaaccctaagcataatcactgattactctctttcggcgacatcaatactgagtgaagaagaagaagaaggagaatcatcgttccctcttttctcgatacaccaaattgctgaagcagaagttccgaattccgtctctctctctctcaaattgtcctcttaacttcgccatgtcgggtcgaggaggaggaagggatcggtttaggagggattatccttcaaggcatgaggataatagggggaatgggattagtgga

SEQ ID NO: 89096 - DNA, 262 bp, Glycine max
  unsure (1)..(262): unsure at all n locations
gtattgccatacttggctactaccaaattagtcatggatcttattcatgaggtactgnacatagtagcttctataaccaccttctttttcctttgcattttcttgccaccgtattggaccttcaagttcttcctttacatcacaaattacatcttcagtgaaaatgttgcggtaaagttgttcacatcactgttgcttcctctgttattggcgagcatttggcttacgagtatgctaagagaggtgcttgcttggcactttc

SEQ ID NO: 89097 - DNA, 257 bp, Glycine max
cgggggatgacgacgaagacgacgatgatgcggccggagcaggcaaagcggcacgtggcggacatggcagagtacgtggggaagaagacgatggatgttgggcaagacattcagacaagggcacatgcacagggaacaaccgggatggtatagtgcattcagttatcatcagagaagaaaatggtttcagtttatgtttatgtctatgacttgtgagataaacgtactagtatctatgtgttttgaattatggagag

SEQ ID NO: 89098 - DNA, 253 bp, Glycine max
  unsure (1)..(253): unsure at all n locations
ctttttcgacgtagcaactcgccttccttccttgctcgaaaacaaggccaattcacttcctaaattatgtggtgttgatttgggttttatcatgagcaagcagaacaccaattgtaacaatgttcctgtaagctcaaggcaagggagagattagtacaataaaattgatgcatgtttggaagtttctttcttcttgaaaagagcccatanaatggtttgttgaatatacaagcgtttcatgttggaaataata

SEQ ID NO: 89099 - DNA, 236 bp, Glycine max
ggtttgattctcaagagctgtaatgccatggtgacgatggaaactcaaatacaagaactctctccctccaaaacccgcaagatctcctcctatgtcacttctaaaaggtccattctgaagaaatccttctaccaagagcaagtcaccttcaccgctcctctctccgataaccccctcgtcgccctcatcggtaaaggcaggaatgctagagggtgttgaatctgcccttggattat

SEQ ID NO: 89100 - DNA, 258 bp, Glycine max
  unsure (1)..(258): unsure at all n locations
aaaacatatagactacgttataaatcgtcccntaaccgtcatttgttcattaaagagaattttagccagtgctgagacacatgagcatcctcgtcaaaagcaacaangcaacgagtatgatcgaaagagccaaggacaagagcgagaactgttagacccggagtggaactgagtggcaaagagcctagacgcgctcagcaacacctatactagaaggcaggagcaaggagcaggcacacaaggcaggaacagctgggt

SEQ ID NO: 89101 - DNA, 232 bp, Glycine max
gcttacaggtgaaggaaaagtagctgtattcaagaaattgacacatgcagagtatttcaggaagtttttcaacagagaccttgatgaatcgtttattgatagtctgagagtatgatcaatgatgtgttttgtgcatcattttcaatgtaccattcctatatcatttcctttttgtataacataattgcggcactgataggacgggcccaaagattatataggatggacttag

SEQ ID NO: 89102 - DNA, 236 bp, Glycine max
gggaaacaactttgaatctaatccttttgtgcatctatttttgaattccctgtctccgccgagtgtatactctttagacttgacatagaacttttggatagcactacaatttcatgtatagttctaatctcaaaggccttcttgggacagatttcactacataattttcagatctactaaatgtttaatggttggctgttgtgatcaaaaaaaaaaaaaaaaaaaaagggggggcc

SEQ ID NO: 89103 - DNA, 235 bp, Glycine max
cttgaacctgtttcaggagacaaattgctatttaaattcaagttttaattataaaggagaaggatgggatgatcttaagttcaggtatatggatgataacgacgatgatgatgacatattcccccttgcataagtgaattgcctgtgtatggagcatatactctctgcctaatcatatggaagttcagtttagatgtcttgtatattctttaggttttcatgctttatagtgaaa

SEQ ID NO: 89104 - DNA, 124 bp, Glycine max
cgagctcgcctttggcatcagttaccgtcgcactttgtgtggcgtttgttaacatagctactgtctgcaaagtccaagtacactcacaacaacattgcatcgggtcactgtccagaacactaat

SEQ ID NO: 89105 - DNA, 136 bp, Glycine max
  unsure (1)..(136): unsure at all n locations
ctggtgtctttncatggcatcacagctcccaatggcacattcgagcttgctcgcactaattgagaaaccaccactcctggtctcgatctgctcagtcggctctgtgccaagtactatgatgccggtgcacgttttg

SEQ ID NO: 89106 - DNA, 226 bp, Glycine max
  unsure (1)..(226): unsure at all n locations
tgttgaaatggtctgattatctgattctgatctagatgatgatgaggatgagtaagaccagctnctaccatttaagcttatcatgtggtctcaggtatctaagcttactgacgatcagcagaaagcatattttgattaatacgattatcgggtgtaacttctactgtcaaagctatgtagtgtagatttgagaaggatgcttgagatctagtctggggtatcacaa

SEQ ID NO: 89107 - DNA, 117 bp, Glycine max
aaggtttcaagccagcaacaagcccaggcagcacaataaccacacacgagagcagccacagatactcacgcaggaaaatcgacagataaaattgtaccagcgtccgagaaccaaaga

SEQ ID NO: 89108 - DNA, 227 bp, Glycine max
gccaaatggggggcagagtttcaggttgaattgggcattattgccccattatatgtttgaagaattctctcagctccagcacgactattaaactcaataaacccataatggggcaataatgccaaatggggggcagagtttcaggttgaattgggcaacttttagtgctggtgagaggtcgcgccacgacgattctccagattacaccatatttgttggtgccttgg

SEQ ID NO: 89109 - DNA, 269 bp, Glycine max
  unsure (1)..(269): unsure at all n locations
cgcatattcctattcattcaatcatcaattcaagaccagttcaaactcattcgcatgaacatcaccatacttctcacaatgttaggtcacacgcagtgccanatggtgaagaacaacaccaccatgaccatgagacgaagtcggttctgaagaaagtcaagcaaaaggctaagaaaattaaggacacaatcacaaagcatggccatcatgaccatgcacatggacatggtcatgagtatcaccttgatgatcgccatatccctgatgat

SEQ ID NO: 89110 - DNA, 273 bp, Glycine max
atttttaattactttattaattttcacttgtcactctgaatgagttcgtgcctttaatttactcttgactcggtggtgacctccgaagtttgtcgcaagctccgtcatgcccttcattctgcttcaatctgcactgctttgtttcactctcgtcccacataccgtcacagctagcccattccctccattgcttccaactgcctccatcgtgcaggtgcagtaagaccacagatttggacagtgaagagctattggagcatgtgcctgcattgt

SEQ ID NO: 89111 - DNA, 225 bp, Glycine max
aaaaaacattcattatgtgtatttaattcaaacaaaataacaagaagcagcactacaacaacttcttatcgtcaacatcatacagaagtaccagaaacctaataacaaacagaaagcactaaaatatggaaatcattattcgttaactaacaacacccttcaagttcattcaaccgggatcataacctcgttggtcctgaacgcaggaattgtccaaggaggatt

SEQ ID NO: 89112 - DNA, 254 bp, Glycine max
agagagtgcaagctgttttcttgtgtgttaagaaatgacaaattaaatcaagtccatatgttctctgtcaacactcttccctcccaattctctccgcctttcccatgccgtcgccattgccgcctcaccgtcgtgtgctcccccttccgccgccgcagtcgcagccgaagatgcgataacaaactctccctccccacctccacctcctcctcattcgaaccgaagctggaagccgttatagacctgactctcct

SEQ ID NO: 89113 - DNA, 154 bp, Glycine max
atgaaaatctcagcacaagagttggaccgggtaaagcaaaacaggaatggggtagtcggagtaccaaggaagtgtttggaggaaagggcaaaggccttggcaaatcaaggcgaatgggctttcttttatgacatcttgcgctttgagcgtttga

SEQ ID NO: 89114 - DNA, 246 bp, Glycine max
cgcaaccacaaacattgatctggccgtcaagccttcgcgataaagcttggtacatcgtggcggattttgtgctctttagtggtggttgggtgtgagttgagcaccacaagatgcactgagatttgaatgtgctcgagtcaaatttgctcgttagtgaggtgtcatggcgatgactgagagcccacgacagcgatgacggctcatgccttctctcaacccattttttttccttcaaatgagaaaatc

SEQ ID NO: 89115 - DNA, 200 bp, Glycine max
cgcttctgttgcgcctgctgctaggctcaatgaaaatgttaagtaaaaagtagtgttatgtatgttgataatcatacctgtgtttcatgatgtgtgaggagtggcctgttgatatatgtgttgtataactgtaagtggtgctgcaacatgttgtttctttcttttaagcttgtgagatatgttactacttttctggtaaa

SEQ ID NO: 89116 - DNA, 205 bp, Glycine max
cagacttcaagctgggcgaagcctgagagtctcttgaggcagcatatccaaggtgtgctgtggaatcccgagattgaaccatgcttctccgaagcggtggctccggcagttcggcttcaacccactccctcttcagccctagctccgaacctctccgttcggttcccgctacatggattggtgggtcgcgccgcgaaaggatcca

SEQ ID NO: 89117 - DNA, 128 bp, Glycine max
atccctctctcactctctctagagaatccctgctttcttagagaatctagggtttccaactccgaaactcagtcttcagcttctaaacaaacgcaggagtcaagatggcatgtcttgtttccacacaa

SEQ ID NO: 89118 - DNA, 254 bp, Glycine max
gtggagtgcaagatgcatttctcattgagcatggttctgaggtacattgcttttcagttttcacactccctcaccatcttaactgtgaacaagatgaagaattatttgctttctagattgcctttcttaaatcaaggagaggatttgtccgcatagcaatggagaagggaaaacccctggttccagttttctgctttggtcagatctccgatacccttgaaacatccaatgcatgtggtagtgggtagaccaat

SEQ ID NO: 89119 - DNA, 157 bp, Glycine max
gttccaactcttctctcacttgccgtctagcaattggcgagggactccgctcatggcttcagattccaaaaaggatttcccttctgatgacaaagctggaacagaagagaggaaaagagccaaagatgagacttcatctaaagattctccagcagaa

SEQ ID NO: 89120 - DNA, 237 bp, Glycine max
cccaggaagagtcatattcctgggtcttctgtagcttttaatctcatcaccaccaaacccaggaagaccgattacaagtgatactcacaaggagcgtctagcagttataaagaaatcaatggcttcatctgaggcagcacatgggaagggctctgctggccaggcatctggtagtgcaaagggtaatcaagggaagacacttgaatatcattggctcgccaaacctaaaaaattcat

SEQ ID NO: 89121 - DNA, 195 bp, Glycine max
cttaatttctctctgtctcgtttacacatctctccaacctttcactttcgtttctcagttttattcgaatccctctcttaatctcctttccaaatggccagcgttgtggttgcacagcaaacaccaactacagttccagaaaatgacacaaccgaggtaagctagacccaggaaacaaccccagtcactgtggct

SEQ ID NO: 89122 - DNA, 241 bp, Glycine max
ctctgttttcgccacccgtgagggcgttggtgccaatcatctacacaattcggaggatctttgtggatattgattggattcatgatgtctggctcaacaagactttgcctgtcaatgccaaatttcaggacttggcatggtattggttcggaaagggtctggcagtggccaatctggcttatttctccattaatctatttggttcttgatacccaggttccttccaagagcttttgagagg

SEQ ID NO: 89123 - DNA, 233 bp, Glycine max
gtagaaaggctgtgcgggacggcattgtacgcggatgatttcgccgcagagttgagggtttaacgcgaaggaagaaggcggaaaacggaagaccgtcggcgtcacgggaaccgcgccggagaggttgttggcggaggctcggaagattttgagagaggattggttaaacggggggattgaaccgttgaaggagttgaacttaaaaggaggctgtggaggcggtctatggtggt

SEQ ID NO: 89124 - DNA, 227 bp, Glycine max
aacaacaagggtcgtctttggtctaatttcttgcggtcgaggtgagagatgtagttcacagttcataccctagagggagttgatggattttgttgtttttcatataagggcaaagaaagatagaggagctagctagctagcgagcttcaaaactcaaaagcactgacacatacaaacaaaaagatctggcttcataaaattgagataaaagtgcaccgtctccgaat

SEQ ID NO: 89125 - DNA, 231 bp, Glycine max
ttagtcctcaaacatgaaagtgtctttgtatgttgctgattctccatatgttatccacttctctttctatgagtaaatccaattacccttccactccttgtcaaacctgtgtctatcctagtagtgtgagaggtttgagcttcaaggtcaacatttcttggccgatccatgcttcttgcattgtgcagcgacaatgaagaagaataacaatggttttgttgtggtggggtg

SEQ ID NO: 89126 - DNA, 252 bp, Glycine max
cagagtttctctggcctgcattacttcttcctgtagctagcaacaagatctacagggagcaagacagagtgaaaatgccacttgaacttgggactgcactctcgactaacgtgaaccagttaatgatccagagattcgtattcaggcattggaatccatatacttgatcacattacaggaggcaggtcgatgagccttttggtctgtgaatggacctagattagtccagatcggttacgagacgaggtagat

SEQ ID NO: 89127 - DNA, 252 bp, Glycine max
ctaatttcctcttttagaaaccatacaagacacgtttacatgcatcgttttgtctatttgtacgatgccatcttcgagtgccttgtgtatcatcacccaccaatccattctgccacctgcacccccaccttctagggtcgccacgttgttgttgcgtgccgccatcaatgggttttgttctttgttccccctactatataagggagccaatacaatttgcattcttgtttccataataacaactactccacc

SEQ ID NO: 89128 - DNA, 180 bp, Glycine max
gttgggtggcctcagagagctgaggcctttgcttcacttgctgctgccacttagcatccattgtgtagctgaggagatgacagtgtctgttcttgttgagtcacaacctctgctttgtgccctggagtatcaacttgctcagaagctgtttgcatccatggggtcgcagaaacgattgtt

SEQ ID NO: 89129 - DNA, 146 bp, Glycine max
gagccaagtgttggacttagccgacgctgtcgtcttcaccgtataagaactatcgtctggttctgaacagtgtgtgattcggattccgacgaggatgtcgtcgttgggttccccgaagaagcggctgagatcccgcacaacatacg

SEQ ID NO: 89130 - DNA, 241 bp, Glycine max
gtccagtccttccccttgggcctcggtccccccttcgttgatgggcccagtaatgtggggcccacgatggagatcgagtcgaggattgagatggcggggcgcgtgagggtgttgcacctcttcagtcgtcacgtggaggccaaagctcaatgcagggtcgccatcgccatcaccgatggatccgtattaggttttcggtgctaatttagcagtaattctttctttctttcacctttttcct

SEQ ID NO: 89131 - DNA, 257 bp, Glycine max
cgaagaacaaactcatagacaacctcaaacttcaaacccagaaaaagaaaataaaatcaactttcattccgtttctttctttctttccctttgccaaattttacattaattacatgacatggcataatacacatcacaccaccctctctctctatatataccgtacctctcagattcagacagaaactcaattgcttctactttcagcatcctgtaatccaggagatgaaattgctagcttaatattgatctgtaga

SEQ ID NO: 89132 - DNA, 255 bp, Glycine max
gaaatatataaagtattacctttattaaccaatataacatgcataccaattttgcgattaatgttattctctctatcatggttaattgtatagtctgcataaaacacatacaggcatgcacacaaaaagatttttcattagttctataatttattatgtctttatatcaaagactccttaaatcttggaagcaaaagtcagatttgagtttgatctctcacatgcatgtttcaatctgatctgaatgttttactg

SEQ ID NO: 89133 - DNA, 235 bp, Glycine max
cctgacgctactttgcttgcacatgaaaagaccatgcatcgtataagcagagatgtttggtcacttggctataccccagttacgggagatgaagacattgacattggtggtcagagattgagagttatttttgcaccgggacatacagatggtcatatggcactgcttcatgcaaatactcattccttgatagtaggtgatcactgtgtgggtcagggaagtgccaccttggaca

SEQ ID NO: 89134 - DNA, 231 bp, Glycine max
tttttatttgctgtaaattttttgattttgtaaaaatccctgtgggatttgttttttattatttaaagtagtgtaatttggctatcaatctgccttgaatcagtttattaattattaatgatgggtgaagccaccaaaatggactttaatttgataacctttttttgcactacaattaaggaacttcaaagaaaatagtagaataatgatggggaaattattaaagtttaa

SEQ ID NO: 89135 - DNA, 228 bp, Glycine max
cgctgttcttgatggcatggcgtgacgctattccaatgccaaatccagagtttggaaatagggtaacttgcagggccaaaagagtagctttttccaaactctggattttccattggaataacctcacaccatgctgttcttgatggcagaacttcaacatcgtttatgaaatcctgggcttatctttgtagagaatcacaatcacccacttctataccaccagaactt

SEQ ID NO: 89136 - DNA, 182 bp, Glycine max
tctacatttccttcagtacgtgtacctacattcccatctattccagaaatgtgtaattctggaatcagcaatctttcatttctgggaaataaatttgcagcagctccatcagtttctgattcagctcgtgctgtggctagcatgtccgagtttcatgaagccagaagtcacaactatcctac

SEQ ID NO: 89137 - DNA, 211 bp, Glycine max
cagaattatccgccccaacagaacttcgttcgagcatcccagaattatccaccccaacagaattacggcaggcatcaagaattatcctccccacaaatatggccaggcatcaaaatttccacacacagacttcggcagcatccaattatccaccacagactatgtcaggcacgcaattatcctcccacagacttgacagctcacgattatc

SEQ ID NO: 89138 - DNA, 247 bp, Glycine max
gcttgaggttttagcaggaaaccactctcttgtgactacagtagttgagaatggtattcactttcaggttgacttagcgacaggatattggagttctaggctaggaactgaaagacaaaggcttctcagtggttttacacggaacgatgtcgtctttgagtatctggaaagacattgtgttctaaacaaacttgacaggcagattaaggtctttaacatggatggcagaaggttcattaaatctatg

SEQ ID NO: 89139 - DNA, 193 bp, Glycine max
gattgttttaatgtaaaacaatcagattcactttactaaaagacaacgagctagtttccaattttttaagtgcaaccagtttttgctataaacaacattcaagcctatcaacggtagaaccacaggacaaaacctagaagaaaattggaaactagctcgttttcttttagtaaagtgaatctgattgttttaa

SEQ ID NO: 89140 - DNA, 260 bp, Glycine max
catttccggctcctcctctggttcctcttcccccttcgactcccattcctcctgtcgctctcggtcctgttctccctcgtgctccaaatcctcttcaccctcctactcctcttcctctcgaagctcccgtagcctcagctgtcccccggaactgaagataatacacatttctatcacttcatctactttgtttatgttcttctctgtcaagacctagttctattagaaatcaactaaaaaaagctctccctcccccccta

SEQ ID NO: 89141 - DNA, 250 bp, Glycine max
  unsure (1)..(250): unsure at all n locations
caagaagccagaggagtaccccccggcaggagcgcgagacaaaagcaccgaacacggacaagcagcaacgagacagccgggacacaaaaaacgagcacgggagngagcgaacagcgccaagagtagaaagacgggataaggtgccccagagaaagagggaaagggcatcgacaggacgggcagcgaagcgtcatgcaaggccgtcgtgccaggggccacagcagcataatataactacgcaagaggatgg

SEQ ID NO: 89142 - DNA, 238 bp, Glycine max
cggctcgaaccataatctgttggattatgagtctcgctcatgcgaccagtggtattgcgcggaagtcagatctagcggatgcactttggagaatgctagttctacaggatcgttgggttataccggttagtgttactaaaacaacggttgggtgatatcgagaaagaagagaaagaaaaagtgatgtcgaagagaccggtctttccttatagaaggtgcggtgacagttgcggtggac

SEQ ID NO: 89143 - DNA, 185 bp, Glycine max
tcagaagtactggagtgatccttgttgtgtgtacggaatgtcgcacagcgattccataccccttcatccatcttcccaatccgacatttaccagatcgagaacctcatcaatgccagcgttcaccagtcagtcccttcggcgagacctcccattcgcccacgcgcctccatccccgtctccgtct

SEQ ID NO: 89144 - DNA, 250 bp, Glycine max
ctctttttaaaacactcactaagagtgagaatgaacagaatcaatttaaaaatagtgtaattaattcattaaacttatttcgtaaatcaaataagttgaatttgagttttaaaaaaaacaagttcgataaataagagttgaacttgactagttaagaaattgagttcaatatgtactaaatggtatacttattatgaatttttataattggtcttttaattaattttatattaactttattttgctaaga

SEQ ID NO: 89145 - DNA, 153 bp, Glycine max
cagcatgggagttgcatgtgtggcatcgccagtcaacaatcaacaatcgcgcgtggaaactcactcttgcgaggaaaccagaatttgcatatgccgttagggtttgaggcacatagttgtaccacaacacttggacggcagagggtcgtgtta

SEQ ID NO: 89146 - DNA, 108 bp, Glycine max
ttcatgaatgagatgaagttttcgtgaagtgtgtggtcatgcgcagggtgtcctaggttccagaaagtgggccgcgtgagggcagtttggaattcaggctcagaagtg

SEQ ID NO: 89147 - DNA, 263 bp, Glycine max
atcttcattccatcagaagttagatgttatggagtccctcaccctttcaggtactgtagccgtagtggctttttctatcctcttgttcctcctgctactcactataagacatgcgggagtcggagccggattcggagccggatcacttcccccagtaccagcggttccaggattaccagtgatagggaatcttctgcaattgaaggagaagaaaccttacaagaccttcacacatatgactccttgacatgggctcatctatt

SEQ ID NO: 89148 - DNA, 191 bp, Glycine max
tctggcactaggatgttttgaggatgggatgcttggagaatcttgactcgatcttgtttcatctggtcatttatcggtacgagttagtggtactaacaatacttttatgtaacttgtgatgaaccatattgacttgccgtctggtcctttaccaatgctgcagtgcatgcgtatcataaaggtacatgctt

SEQ ID NO: 89149 - DNA, 165 bp, Glycine max
  unsure (1)..(165): unsure at all n locations
caatatcctctcatagtgtgcttcttctgcttcattttcattatcaggatgtctttgctttcggagctcatgaacctcaatctctcataatccacagaggatatcgggtgtgagtacanagtggggttggtggatgtggtatgcgaccgcagaagcaaagccagg

SEQ ID NO: 89150 - DNA, 119 bp, Glycine max
cccgaaacaactcgcgctcatctgccagcgcacggcgtgcgcccgcgcgcagatcgacaatggcggagacagagagcgtggccatccaggcagagatcaaccagcgcctcaggcgcagc

SEQ ID NO: 89151 - DNA, 208 bp, Glycine max
ctggcactaggatgttttgaggatgttatgtttgaagaaacttgagactttcttttttcatctaattaattatcagacgtaatttgtggtactaagaatacttttatataagttgttttgaaccatattgacttcccgtctgatcctttaacaattctgcagtgcatgcgtatcatacaggtacatgcttgtgcaatcttgcattcgc

SEQ ID NO: 89152 - DNA, 250 bp, Glycine max
ctgtatctatttctcacactcgcaactctttagcaaatcacacttgacgcggcatacaaagcgcacaggaagtaacaatcggagattaagcagcggtggtgacggtggtagtgaatagatacaagcagcaccataccatggggggagaacaagtagcaagagtcagagcagagttagttcgacgacgactatagcgatcgccacgacgacgacgtgttgagcgaaacaaggactcggcgagtgacgacgg

SEQ ID NO: 89153 - DNA, 99 bp, Glycine max
cccgaatccggaatgtgggcactcacactatccattctcatcatcgctccgctctcttcttcgccgctagtcgcctctcactagtcctcttccacacgg

SEQ ID NO: 89154 - DNA, 213 bp, Glycine max
  unsure (1)..(213): unsure at all n locations
actctccactcttatctcgttccctgtcacaactcaaacaattcccaaaatcccacccttgtcccctctggtcgtcctccttctccttctgcgtccacacaacgtacgatccccannatgatgggagggtgctatcaaacgatctagggaggaagaaaggggattctcattgctagagctagcactggtggattgaaggaggaaggagtcact

SEQ ID NO: 89155 - DNA, 234 bp, Glycine max
cggttgcattggctttgtccttgtcccaaatgcataggtttactctagtcaagaatcattatttttttcaaggcaatgtatagtaataagctaaaagcttagcaagctttagcttgaaggggagcattggaggccactagtcaaagtttatatcagaggaaactagtcaaaagtctatatttctggaatatgttattcaaaacataattgtgccttctttgtcagctcttcctt

SEQ ID NO: 89156 - DNA, 272 bp, Glycine max
gttctagatcgcgagagaccgccctttttttttttttttgaaactaatcagataacaatagaaattacgcaacaatatttgtctcagtatgaaagaaacctactctctaatacaaccaatggaaaggaagacaacacatgctagcacattacactcaacactgtacatctataaagacaactaagttaacaatcaattagattctcacataaccgtgcaactactatttacattctcagactaacataggacaaagattacaacacaataag

SEQ ID NO: 89157 - DNA, 273 bp, Glycine max
gtttcggcgctttcctcagagagctcaaggatggaggctacctgagatgccttccggatggaaatctcttgtaagttaattgctttgcttgatcttttcattttttttccctcaatatatatatatccttctttaaaagccaaatttttgctgtgctgatatatccttctttaaagtcactttcaaaaagacactttcattgtccctctcctcaccttttccccatacatgaagaaaaatgaacggttaattcattgagcatgaaagttgaca

SEQ ID NO: 89158 - DNA, 273 bp, Glycine max
gagctggtgaatttactgaaagatgataatgatacaattcaggaaggtgttctaaatgttttagcaaaggctggtggtactattcgtgaacaacttgcagtcacatcaagttctgtagaccttatattggagagactatgtttagaaggcagtcggaggcaggcaaagtatgctgtccatgcactggctgcaataactaaggatgatggcctcaagtctctctctgtcctatacaagaaacttgtagatatgctggaagataaaacacatctg

SEQ ID NO: 89159 - DNA, 273 bp, Glycine max
caaactaccgtatccccaaaggcttctcttcccatcagaagttaatcatggaacacatgttgcagaaggacacgccagcaagtgtttccaaccctttttgttgcctaaagatttgaagggcaggccagaggaacttaaaaataagttgctggtagattttgatccatcaaagtgctttatcagagatttaaagcaagaattctcaaccacattccaagtatggcatgattatctgggaggtgatgttatcggcctaacatggggagagtcata

SEQ ID NO: 89160 - DNA, 104 bp, Glycine max
gctccaggcccacagtaattggcaaaagcattttaaatgagaggctcataggttaaagcaatgaaaaattactgcgccaggcgtaagctccaagtatgtcttta

SEQ ID NO: 89161 - DNA, 267 bp, Glycine max
ggccagcgtaaaaaaaagaatgaaagaataatttagtatttggcacaataataaaaaaggtaaaaaataatgaaagtgaagaaaaaaacaggcagggcagcagtataaataatagaagtttgatgatttatatgcagaaccaacaactacacttgttttctatatattcttgcatgatcatgaattcttcctccatttatattcttgtctttgtccagctttggttgttgagcttaccatgcagagagagtgtgtgcatcccaagtg

SEQ ID NO: 89162 - DNA, 272 bp, Glycine max
ctccaagcacacacaaccgctttagatggaactttgagcttccataattccgtgaactcttccccctgggcctccgctggtacgtgctgtctaagcacactgtatgtgctcttaactgagtactgcccagttgggtcagcctcccacacccactagtcgccaatgagaggttgaattctgaacccctccacttcttgaataaatgaaactaccagctttatctcactgtcgaacagtggtctttgccatttgaaatctcatacccatcctgt

SEQ ID NO: 89163 - DNA, 272 bp, Glycine max
agccgccgcgatgatgtgcttagtggtttaaataggattgccgtgccgctcgttacgaggagtacacttgaagttgttataccagagtatgcagtaccaaagcttatagctaaatccaaaagcaaacttgctcaaataagtgagttgtcaggagccaatgtaacccttgtagaggatagaccagatgtgacacagaagattattcagatatctggtactccagagcaagcagagagagcccagagcttgctccaaggatttattttgagcac

SEQ ID NO: 89164 - DNA, 225 bp, Glycine max
ccgttctttcatgcttcttccccgtttctcccacctcctccggcacactcctcctcctctccacgccatggcgcgtgccgtcacgtgcgccactcagccccctcatttccaccgctcatccggcatcgctacctctcgctgcggcgttttctctgcctccaaatcctcgcttttcgggcgcactttcacgcctacgcgggtgcgcggcgaagagcagcgacgcgc

SEQ ID NO: 89165 - DNA, 265 bp, Glycine max
ataaatagcattaagcagtggagacggtcttttgtttaattcatccaattgacgccttgctttatagtaagttttaattcatccgaaatgatttaacctgaacaacaagtaggagtgccaatgaaaacaagagataaatagtacgtaaaagagagggaattaaaacttactataaaaactagagtgaaaaatgttttaggattggaatcttgagaacgataaagggaggtgtgcattatgtaatcaaggttttaagaaataaatt

SEQ ID NO: 89166 - DNA, 271 bp, Glycine max
tgtgcattgtcaccctgcaccccgccccccaaatttagtagtagtaatattttaatgatttactgatagtaatacagagttgttatgctgttggctttaaattgcttttgagctatgctaatgctcatttaacttgtctattctaattttaatgcttcacaatcaagccttgtgcatttcaatttgttaaacacttaagcgatcattcagtcctaattcagaattggcatcgatataggttatatgtgacagatatgagtagaccacaata

SEQ ID NO: 89167 - DNA, 265 bp, Glycine max
atagaataagaattcttggcgagaggagcattgtcatagtccttgtagccttggccagtcaaccacaattttctgttaaaggttaattatagttgctttcaactaatttgtcagtagagagaggagcattgtcatagttggtgaaaatagggggtctcctcctttagggtatcgtggcatcagcaccagccatgattcggatcatgaggtgcaaaataacacccacaggatatgtcattggatttaagcaagtgtattcatcagc

SEQ ID NO: 89168 - DNA, 265 bp, Glycine max
cgaggttcggcttgtttcccttcctcacccttaattgagtctaaatttgattcaggttctcccctttcaattcctgcgttctcgggacgacaatagtcatttaggatcttctggtccgggtgtctgcttggtaggacttcatttctggagagtttggtgtaatgtctgaatcagaagctcagcttcctactgcctttgttgctgatgttctattgtggaagaggtggcatgtttccttgggtatcattgttgttgcaacagttgc

SEQ ID NO: 89169 - DNA, 261 bp, Glycine max
atacaggtatcgctgtcctatatgcttgaagacaatagtcaatgatatgaactgggaatatttagatcgagaggtgtgtggaactattattaaattttgttttgaaatattttttgttggtctatgtatgaccatgttttatgtctttgaactctaaagtaatattccacatgactttcttggagacaaggaaaattcatggggataaaacaactaggaaatgagccttggaagacattttgtatcaaatttttgctatga

SEQ ID NO: 89170 - DNA, 256 bp, Glycine max
ataaaatgtcttataaaaaaagaatcatatcaattccttctaaactagtcttataataaggatcagagggagtaatataattgactgattccaataacacccaactaattaacaacgtaatcagacccaatctggaaaattcaaaagagtaaggtttcactttggcaagttaaagtgacctctacttggaccaagacagcttccagctatgtattatacatcacatggatggggtaaccgactaatcaactttgtc

SEQ ID NO: 89171 - DNA, 258 bp, Glycine max
ctcgagccgtgatattcatgatgataatcagctacagtatcttgttcagcaacgatgcttttaacttcaatagtaatctcttcagtaatcatattttccttaccagcatttaccacatgctcagataatagctttaatgcatctctttgttgcttctgttcctccaaagaaattggggtttggtctagttggttcagggaaaagaacatctgtccgttctgttttccatgaagaggatgataatgaggccaaaatgag

SEQ ID NO: 89172 - DNA, 131 bp, Glycine max
gtcgagacattgatgcacatcctccattatgtgagtgcaatgatgagctcgataaatgttggtatgacccgctacataatgttgaattcagccatgtgatatatcactcattggtggtcttcatgattaat

SEQ ID NO: 89173 - DNA, 255 bp, Glycine max
ggggggtatacatatacttttgagggtggcttccctggtggtggatttggagggggctttcctggcggtggcggcggtggatttgagttccatttttgattgagaaagccgcatgcactccccatatatatatatatatatttaattttctgaagggaccacaacaattatatttgactaatcacttgctaacggttgttgagataaatacgtaggccatccccggatgcttgtaagataagaaacgtgctctag

SEQ ID NO: 89174 - DNA, 252 bp, Glycine max
gtgatgagcctgaaaagcagcaagaggagaatgaggaatggtttcatgtgccactctgaggcatcaactgcagtgtgcattgctgggtctgtggttgtgcctaggacaaggagtaggaggcatcagagaagtgtttctcttgatggtacaaggttgatcaactatgccaagtactccaaacttgttgactccagcactagcagcaggttcaattcagctcacaagaaatgtgactctgactctgtctctgta

SEQ ID NO: 89175 - DNA, 218 bp, Glycine max
cacccttaagaagtttagttcactaatcaatcttggtccaatattcacattcacatcatacagagatatgggttttaggtacattgagtacttgtctcttctctagtgcactgtcgccaccaccaccactagaagaagaagccgctcctacaccgcgtggcgctagtggtgattgtgtattgtgattgttatgctcttgtggtaaaaggcgctctctc

SEQ ID NO: 89176 - DNA, 245 bp, Glycine max
ctagctccgattcggtgacagaacctccatcatcatcatcaactgaattccacgatctcgttgaaggaaagaaaactctcactttgccaccgaccaaacaatgtccaatggttacgaatttgcgatctttagcccctgaaaccatgtcactgagtatggaagaccaagctctgtcgccagctggcagcgatctgaagtgcgatgggtacggcatcttccttgtcatttcgtcgttttgtttgttt

SEQ ID NO: 89177 - DNA, 192 bp, Glycine max
ctacactgagccaactctagcaggaaatgcaggtttagtggctgcacttgtggcattgtccggtgataaaaccacaggaattgacaaaaacaccctcttctctgctgttcccccaatgtttcccacaccaccaccacctccagcaccatggaaaccatgattttgaagatggaggtagatcgaagaagtcaa

SEQ ID NO: 89178 - DNA, 159 bp, Glycine max
ggcgaagtaatcaatatcctgcagattaccactcatcacctatttgatccagatgatctattgacagtggcatttgataagataggttccatgacaacaaataccatatcaaagcaaaggaagaagcaagagcctgaagtgatgaaggagcttgatcag

SEQ ID NO: 89179 - DNA, 222 bp, Glycine max
tgtcattgaagccattcttgcctcatacttctctttcaacccaagtctcattctccaacatatggcttcctttggagaacaacactctacccaatatccaaccccagagaggcctaaacacaaactttcacaacatgagaaaaaaccactttctgcatacatctgtcatgatccaagaagctatggttcatctaagcacaaggcagagaaaggcacaacaca

SEQ ID NO: 89180 - DNA, 252 bp, Glycine max
ctcctggcacccgtaccgcacttgagattcaaacgctgtgttcttgaagtggttaagggcagggcactctctgcatcttcctgtactgtatcaagacgcaatcaacgcaatggattgggcttttgtgcataaaacctgggataagtgggcttctacgaacattggttattctggtcatccgttaaaagctgctttgcttattaattatgacccgactggaccatctcgattattatctaccattgctgagca

SEQ ID NO: 89181 - DNA, 281 bp, Glycine max
ctcgagccgctcgagccgattcggctcgagccactcctatcgtgctcccatcaatgacgctagctgacaaaccgttaccggtctcatcgaatgcggagatgactgggaattgatcgtccacgatgctcgctttggtaaaacgagactctccgaatcaattgcaaattatgttgctttaacccctaccgaaacaaaggagggagcatcgatatttggatccaaaaaagacactatgtttgaagtggatgctaaaactggagcgcttgttcgaacgcactatg

SEQ ID NO: 89182 - DNA, 281 bp, Glycine max
taacccctcaccttacgcgccggtgcgagacgcgtgagtgtgaagaagagacaaaggtgcagttctggggtttggcggtgaagaacagaacacacacgatggggaagaagagaggtacaagttatcaaaagaaagatgccaaaagctcgaaaagtaaaacaagttctcgccatggtgcttattccagtgatgacatggacgacgatattgatacttttcataagcagagggacattgtcgcccttgacataaatgatgatgctgaagaatcggaagatgag

SEQ ID NO: 89183 - DNA, 279 bp, Glycine max
cacggagttatatgcttctgaaactcgtaaactggttgaaagtttcattaattatgtcatttacaagctatcaagaagtggacttcaaaatgtggagggaaaacggattcatgatttctttctgacactggcaacctgcaacaccattgtgcctcttgttgttgagtgttgacacacctgaccctgatgtcaagctgatagattaccaaggagaatcaccagatgaacaagcactggcttattctgctgctgcctatggttttatgctcatagaacgaa

SEQ ID NO: 89184 - DNA, 197 bp, Glycine max
ctaacttctaagcattcagtaaaagaactaaacatggcagagaccattcgtttggctgttgctgttcttggtacttcttcgttcattaattccttcatcttagaacttaggattataaattatttattactccataatttgagtcttcaaaaaaagtgacttcatagagtcgctgttttttttttttttttttaaag

SEQ ID NO: 89185 - DNA, 281 bp, Glycine max
aaaatggaatctgctatttgcctacgctattgccccattccctatggtcccaaaggatttcatggtgcagatcctagcagatttcatctcaagattaaccatgccacccctctttctctccctcaaatttccaccaccagaagccctgttacacgtctcatttgggcatgcaaattgcatgcttgaaagattctcatcagtaccctccgagaatgagggaagtggcaacaaaattttgagaggagtgacactatcttctctggttctgacatgtgttcttg

SEQ ID NO: 89186 - DNA, 277 bp, Glycine max
gagtacacttgtcatgtgcctatacataatcataatgtttgctcctaaatttttgtttattcttatataattattgttattttaacagtactcgtcctttggtttctcatgtatttgtactacgactactacttatagtgcagttcttaaaggttgtttgttagtctcagttattgagagagttgagagacacgaagaagaatcatggagaggagcaagagggtaaaagggagagtggttttgatgaagaagggtgtgttggacttccatgacatca

SEQ ID NO: 89187 - DNA, 280 bp, Glycine max
cgacaagatctaacgttaacgttatctaaatctcttttgaaagcaatttgtgttatttctcgagttcttgtttttatggtctaaagcaattatgggaagtttttttggtctttgtcaatatgcgcttattctacatgctaatatgcgcgtgttggatgatgaatcacctcaccgagtcttgggattttttttgggggggtaagttatgcgatgtaaccttatccttgcgcatataggccacggcttccgtgcgccggtgatttttaagtaacttcttgag

SEQ ID NO: 89188 - DNA, 219 bp, Glycine max
atccaaacgaagtaacgaaccaaccaatcaccctgtctttctgacccaaaaacatagtcccaaatcgaacaaaatcaatcaactaactcctccaacgttgttgttattatgcagacaacaagttccaacactcgggcatcgatccgtcggagatctcacggcaggtcgctcgacacagaatatctgcgagagaagtcgcagaacgacgtctccagcatg

SEQ ID NO: 89189 - DNA, 280 bp, Glycine max
tggttattgtaatcaattctactatatgttgctctgtttaatttgttttagttggtgtagttgatatatctggtattagtttaactattattattattattataattaggttaagtttataaatggaaacattagtatagtatagttattatgtagctagggtggtttatttgcggcgctaactgtattatgtcgatggctctctaccttgttgaagagattttgtttatgaccattatgactagtgagcttgttgtttattttagatttaaaatttttg

SEQ ID NO: 89190 - DNA, 255 bp, Glycine max
tggtaactgatttggtaggtagagttttccttgcaagacaaaatttccctgtgttttcctgacaaccttggctaaattattgccttgtgattgtattatcctttcaatcaaaaatgctgttgaagttcaatcaactacttacttttgagttttgattcttttctttctgcaggatgctgagtgccttctcgttttttcttttgggagacactttcccccattttttattaataattcttgtgttatccttagttt

SEQ ID NO: 89191 - DNA, 233 bp, Glycine max
ggaagaagtctcaggtcttgagcagtttagagctgcaatttctttaccaggtgtatctgttgtccattttgaagttgcatctaacttgcaatgcaaacaaatatggccatttgtcaatacactatgtggtcgatatccatctattaacttcctcaaggtggacattcagcaaagcccaacagttgcaactgcagagaacgttccgattgtaccgaccctccagatataccaaa

SEQ ID NO: 89192 - DNA, 278 bp, Glycine max
  unsure (1)..(278): unsure at all n locations
tttcactttccatcactttctctcgtctccccttcgcaattccccctctcgaaagacacacgcatcgcagaccatcacatcacggccatggacgccccccccgccccattcatcgattccttacactttgaatcttacggcgncttctacggcgccgaccacggctggcagaaggtgacctacgctaagaaacagaagaacaagactgttaacgccgctaacggcggccccattcccgcgccaattccagcaagctcgttccgaacggcacgctgtcc

SEQ ID NO: 89193 - DNA, 275 bp, Glycine max
ctgttctgcatcatcatcattttcttcaataactatagttagttccctttgatatttgatctgggtcaccttctttttttcttctgggaccagttttcacccatcccattttgcactgcttgctttgtgtctgtgacttggtctcaccaaaacctcagaattcaagagaatttcgaaatttggtggtgcctagtttgttcattttggatgtaagtaaaacaaccactcatcgacactttgcttttggttaattggttttgaggtcatttgtattg

SEQ ID NO: 89194 - DNA, 275 bp, Glycine max
gacctataagaggattttctcacatatcaaattcatattaggctactaggtactagtagctcacaaaaccacgaccaacaaagtcgttataagaattttcagtttactgttataccaaggctagctatcagagccttgttcctttaggccttaggtgcttaatctagccaattttaagcataattagtttaggatcggaaaatgaaaataaatgttattaaatagtatagcattttttttataaagaatatcatatttaatattctcaatatatt

SEQ ID NO: 89195 - DNA, 267 bp, Glycine max
tgctgctctatctatcgggtaatcagtctcttggtcaaaagccggtacctaattcccctgctggtgggccgatcctcgtctagcggtgggaaccggctggtatggatcaattgcttgccctgtctctcttctgttcaaccatcggaactccgcagttctctttttgggtggaataataggcgaaggaatccgcagctattgaatcagctgttagaaatggacgaatggcttagttgaacatagtgggacggaaggttcagaggcttc

SEQ ID NO: 89196 - DNA, 270 bp, Glycine max
cagagctttcagtgccagagctcgtctccaaagaaggaggtcctgaaacatttcgtggaatttttattcgtgcccctgcaattcttgaagcagggccagaagttcaagtgctggctgattatcttgtaccttctagcagattgttgagttccgattcctctattgaagacaaaatggagaatgctgaggaagaaagtaaagttatagttgctgtgagacaagggcacatattagcgactgctttccatcctgaattgacagctgatactc

SEQ ID NO: 89197 - DNA, 256 bp, Glycine max
gtgcaatctcctttaatacccttttgttctcaaaacttgctggtgaaaatggaggcatacagaaagagccacagagggtccatgagaggaaaatcgttgcctttttatagaaatgcaccaaaaccagcttcctcaaccgccgtgcaatacacagctacagatattaagccaaatcactattcttcttctcctgcctctgtagggttcgtggtccacgaggactatgcaaccacaaagcgaaatctgaaggttcgca

SEQ ID NO: 89198 - DNA, 251 bp, Glycine max
cgttgcctccctcgttctctcccttttgatatccaatttcatcatcattcgtcggtaagccctaacaatctatctcttcttcttcgcctgatcctaattttctcgggtttcgtttctaatcccctattttattccccttcgtattttctcgattttatcttgttctttcatctccaatctccgtcagatctctcgcgcgttcttcaattttgaattctcggggattcgttttgttttgggtttagggctct

SEQ ID NO: 89199 - DNA, 251 bp, Glycine max
ttagattcctctcatctcactctcaacacataccagtagcagaaactagatctagcctaagatggagaagttgcaggaaattgcagcatccttggctgttgattatttgcttccacccttgatgaaagctgtgacctcagtcatggaggttccaaaagatgttgcagagatgaaagacaaacttgatgggattcaagccatcatttctgatgtagataagatggcagcagctgaagaatgcaacttacatg

SEQ ID NO: 89200 - DNA, 249 bp, Glycine max
ctgtgttttcctttcgtttattaaggttgtttctttcgtgcccacatgttctcttctccaaaatcctctcttttatatttcccctttgataatttagggtttggtattgtgatagagacacaataatttttgggaattcttgtgacacgggatagttggagaattttgttttgtattttgcttgtgaattagggttggttgattcttttttacagcattgaagttatctactctctcattaatattttt

SEQ ID NO: 89201 - DNA, 257 bp, Glycine max
gatttatttaagctccttgattgatcagtcagattctaaaaattaacaccacctccttccaccttaaaagaaatctcatttccatatgagagtgagtttgcatctcatgactctggagaaggtgtatagctctcaggattcgtactaatcaaatatttttaattacatggattcatgcgagaatctcttcagtagccttttgttttcctttgatagacatttgaagtttgaattcacttttgtttagctcatctaaa

SEQ ID NO: 89202 - DNA, 229 bp, Glycine max
attagaccttgatcggcttcactaacgcagacaatgtcagacaagcctcgtagtggaacccgtttcggtgccgattcggatgccagtgacctgtatgctggtggagacaatgaatatgtgactgagctgaagaagagggcgatgatgatgacaccaagtccaagggcaaagcttcatcatcagaaggcggtgtacgacagaagccgcgtaccttcactgtccaggatgc

SEQ ID NO: 89203 - DNA, 271 bp, Glycine max
ggtgaatagccttcatttttatgaactttattctcactctcatcaacaccatcaataaaaatttccttttaagatctgccctttccccttcttcacagtttttatcttattctccaaaatctacaatggtcttacactatcctgattaaagttgattttttttctatctgggtacatgtaaagttgatgtttttattctcaaattgaaccaaacatcaggttttctggaccactttgctgctgaatatagatgtcagctactatactttgc

SEQ ID NO: 89204 - DNA, 285 bp, Glycine max
cggctcgagataaattccaagaccaagagtggagagaaggtaggaaaagaagccatggaccataaggtgcagaaactgcaaaagaaactatatgaacctgctgggacgagtaattccaaatttctgtgtgaagtctgtaatgtctattcccttgcgagattgctttggcctcacacaaaaatgggaagaagcatttggctaaaattagaacttcaatctgaagtgtatatttgtaacaggtatacgagtttacattgaaatttggtaggaagtttggacatagag

SEQ ID NO: 89205 - DNA, 268 bp, Glycine max
agaactcttggattcagcccttactgggaaatctagaaaccttggaagtaatagattgttctagtttaaaagacttggtaccatctacagtgtctttttccaatctgacacatttgcaagtacaagattgcgacagcctgccatattgttcacatcctccacagcaagaagtttgggtcaactcaaaacaatggagataagttactggtattcattgaagaggtagtagtctctaaaggaggggatgatcacatgaggaggagatata

SEQ ID NO: 89206 - DNA, 250 bp, Glycine max
ttttaatcctgcaaagatggaatcttgtgcgcaattcgggttgtgggtggtcttgatcttgtgcttggcgtttcaaattcaacccaattatgggttctaccttccgggcagttacccccacaactatatgtcacggatgagttgtgggtgaaggtgaattccctcacttccattgacacagaaatgccctttagctattacagcctgcccttttgcaagcccgacggtggcatcaaggacagtgccgaga

SEQ ID NO: 89207 - DNA, 255 bp, Glycine max
cgagggccatagggatgccagtcatagctccagtattggtagagaatcattgagaagcttggatgatgactgggatgatgaaaaggcaagtcccatgactcccatccacatgggggctgctaacagtaatacagcattgaagaggttgaatctgatgacaatgtcgaagcaatggaatctgatgacaatgttcaagcaatggagtctgatgacaaagtccaagcaatggaatccgatgacaatgtccaagcagca

SEQ ID NO: 89208 - DNA, 250 bp, Glycine max
tgaagattccgcaacagagagtagaaaagatggcgcggttgatcacagtggtgtggtgcgcggtggcggtgctactgtgcgccgcggcgggcgcgtcgtgggtggaggaggcggcgaacccgatacaatggtggcgggggtggaggcggaggtggttcgggtgatagggcagtgcttgcgcgcgctgaagtttgctaggttcatgagcaggttcgggaagagttaccgaagcgaggaagagatgagggag

SEQ ID NO: 89209 - DNA, 253 bp, Glycine max
gagatcctttggctcctatgctatttaatatagtggcagagggccttaccggcatgatgagagaggctgtcaataaaaacctttacagaagtttcttgagtgggaagcaaaatgagcctataaacatttgcaatatgctgacgacacggtcttcgttggagaggcctcttgggataatattcttgtgttgaaatccatgcttagaggatttgaaatggtctcgggtttgagaatcaactatgcaaaaagccaa

SEQ ID NO: 89210 - DNA, 266 bp, Glycine max
cgagcgaagcacgtgtacttcccttctaattctcaagaacctggtgtggtcttcaatgctgtgggacaagtgacaggactgctttctgaatgcgagtatgtcacagtagaaaagctgactgaaactgaaaaggcattatccctcatcacctattactttccttactctttccttccttctcttctctttaataattagcaatatgattttccaccatcaggctgatgctcaaaactcagttactgctgcattaagacaaggggaga

SEQ ID NO: 89211 - DNA, 109 bp, Glycine max
cagctcgagccgctctattgcttcaatttctaactcaggggcttctagttttacttgcctgaagcgttttacaacttcaattttgctcaagttcatccaaacacgactt

SEQ ID NO: 89212 - DNA, 262 bp, Glycine max
caatagcttttgcttctttctgtatatggaaggcacttaaactttctttctatctctctctctgcttcactttctcacttatgcatgttcttgtgaaatcctaattcctcagaaccaaaatcggattcctactgactctgatccctcaaagcttcaaattcaccttgtttggtttgtctgtgtgtttggagtatgatgtcgccgccggcggtggtacacgtgagagaaggggcggagaaacgtgtcgtcgcacgtggcgtcc

SEQ ID NO: 89213 - DNA, 267 bp, Glycine max
gggtatgggtctggttggggtgggggaggaaattatgagtccccttaaactaagatatggtttttgtttttaggcatataatagacagcattcaatcttgttgttgtcatattatatatgatttccaaaaataaaattgcagtgtggctttcgtggtcgttctgcttcattcatgcatgcatgggggtgctacactagcctagtgtcactaggtatcatggttatagttgggctgttacatataaatattactgtgtatcatgtaga

SEQ ID NO: 89214 - DNA, 273 bp, Glycine max
gagcctgcacttgttccacccttcaagataccactcctcctcttccccaattctcttatgcgtaatctggcactcttcatagaagactttgtaagatccaaagagaaatggccttagaccagtattttgatgaggctgtgccccagttggattccttggaagataaatcgtctctcgaaacatggaaatgtggcagtgacgatattgcagattcggatagaaatgcctctggtggctttgattgcaacatatgcctggagtgtgtgcagatcc

SEQ ID NO: 89215 - DNA, 265 bp, Glycine max
gcttgttgtggtacatttatagtgactgaatagcactggcttgtctttgcagggaaaagttagcgtgtctttaggtcacaggattttgagagatttactttttaatctgcctctgaatcaattctgcaagaagatatataatgtttggttcaaagaaatctcctttgaacgttgctaaacctagctccgttgagtcttggacgaatccatttgattctaatgatgagggaatggataccaaaaagtatagttcctctagaaaact

SEQ ID NO: 89216 - DNA, 177 bp, Glycine max
ttcacgatgaaataaatgggcatatcattcaaagattagtcggtgatgatgttaattttgggcatgatgttgctagggataaggtgaaagtagtaaatgcaatattgtcataattgtactggtgctatcacatcaatgtagtgtgggaaataacgttgcttaattattgagatgaac

SEQ ID NO: 89217 - DNA, 103 bp, Glycine max
cgaagagaatggctccaagggtttaatcgtttagcttgtaagcttctcagcatgcacgagtcgtgtcttcggagatatgacttgtatgaatctaagaatcatg

SEQ ID NO: 89218 - DNA, 171 bp, Glycine max
gtgcaaccttgtgctgagagactaatccattctcatgcactgccactatattctattgttggctctcactgcaccactcgttcattaccttaatgtactcagagagagaggatacatgatatagcttcaccatgtatattctgatgatcaatggcaccatgacgattccat

SEQ ID NO: 89219 - DNA, 259 bp, Glycine max
aacaaattaagcgtgaagaagccttctgttatctcaggatacaacaaacaagcatgtctgccctgaattccactcatttcacttcattgagggaccaagtgctgaatgtattcaaggaattgcaggagatcctcattaaattcttaacactgtccattgctttgatttcactaacaaacactgagtcagggaagcttttgtctacagaacagcacaagctaatgatgattctgattttaaccattgtcttatacttctt

SEQ ID NO: 89220 - DNA, 265 bp, Glycine max
attgattcagctttacataatcatagacaatcttgcagcacaaatctttcatccaaatccaaggagcagtctcttcctaattcagatattgtgcatgttctggagggagcagaggagatagttgaagttgagttgaggaaagaggggaaagttgaacttggagtgtataagagttatgctgtcttcactggttggtttatgacagtcattatatgcctatcagccattctgatgcaagcttctcgtaatgggaatgatttatgct

SEQ ID NO: 89221 - DNA, 237 bp, Glycine max
ctcgagccgaaagaattgaaaattgagaacgaacctggttctggaaagaattgaaaagtgagacgaagagattgagcatgccggcgtgaaccatgaccggctcctccccttcctttgttcggcgggacggaaaccgagggacaacggcggttgttttcaacgggattcaaacttctccaattggggccgaattggcgggccatttggacgccgaagaaggcgcgttaaacgccgggg

SEQ ID NO: 89222 - DNA, 230 bp, Glycine max
gttactttccaatttgaattgatccattttcatttctttcgcaaaagttgcaactacttcctcagaaaaaaagtttctaagttaaagaaatccagagagacaataatcccaggaaacggtttaggtaaatgcaaagaaattcttcttggtgataattgtccaccttattgaagtttttttaaattatgattacaagttgaattacggaattttttagggattaaccattt

SEQ ID NO: 89223 - DNA, 253 bp, Glycine max
ctaaattagagacgacccactttccttgcagatctttttccagggaaaagtttggattttttgatcgttttgtgataagagttagatgttgagtgatagacgggaaagttgaagttggggtggattatatggataagccttgttgcctcaagtccttcaatcaagtgggttgaaggcggtcctccaggaactcctggcaaaggcaggaccatcaattcctcatccaataatggcaaaagctaagtaaaaggga

SEQ ID NO: 89224 - DNA, 247 bp, Glycine max
aaacacaaacacttgaagtactaagttagtgtttttgagcaaactatggcttcgttttgttctagattgaccatttgtttggctctggttgtcctcaatattggggagttgcaatgcccaactttctaccaacttctaataacaatccgggtcaaaacttctcttcaatggggaattccccggtgcatttggcaatttcaagggaaaccggattgggggcttttttcttcggctggtccttcaagga

SEQ ID NO: 89225 - DNA, 252 bp, Glycine max
aatcttcagttagcttcttttgaagtaaactttactttttctttttgaataatgtctttttcttgcacagagttctgatcaaacctcctcagcgtactcgatagttgatactccggactaaggatttacagcacaacaataatgaattatgaaatgcctttacggttccaggaagcctggtttgtggtggggatttgccttgaataaagtttgggccgggaattggtgccttgggtaaaaaattggtaatgg

SEQ ID NO: 89226 - DNA, 256 bp, Glycine max
ggctcgagaagagttcgactacagtatcttgctccatcggaatctttcctcgtttttcagtcgccaatattactgtcactaaatcaattgacaaagcactatcattcccttttacgagtattacttttgatatatgcatgaaattgaaataaaaatcacctaaatcggatttcaatttagataagaccaaaacggatgtgtatggcggatattaggggtggaatcggaactttccggttgaatcgaattttccccg

SEQ ID NO: 89227 - DNA, 264 bp, Glycine max
cggctcgaggcagattgacctccattatagtttgttatcatccttgtcttcagcttcttctattggtgaacctttataacctaattactacatatagcaattgtatagctcaattgctaaccttgtgagttctgagcaattgttacaattagaaaaccccaaaacatgggttccttggtcggagactaaaaaggtttggtgaagtgggaatcctagagggctaataagggccagggaaggctaagggtccaaggggctttatta

SEQ ID NO: 89228 - DNA, 255 bp, Glycine max
agctagcaagggtgttgtagtatagttagagatatcactactacaccaccctgcatagtttgttcagctataatactacttgagcttctttaactacttttccaacctaaattggacaccaaatgggaacctcctgggccaggtaaccaattggcatgcctccttttaaggccaccaatggaaccaaggagtgaattggcagggaaggacttgggcctggacctggttgggttgggggttgaccttgacctgggt

SEQ ID NO: 89229 - DNA, 258 bp, Glycine max
ctgaaactgcagaacactttacgaacgttctgccactgggaattgggcattcttcaacaaatgagaatgaacaggtattcctatttgaagaatcctaactacaccactgtacaagggggttcaaccggggttaaattagcccaacttaaccaatgaaaccttaaattggggccacctttattgggtatgacccccgggccaagcttcctaatcctccggatccggtaatggttatcccaggaaccttggataggaggg

SEQ ID NO: 89230 - DNA, 244 bp, Glycine max
attttctcctaactttgagagcatgggtaacttctatttttttggcgctgtccccttctccatcatctttacttcaacctttaaacttcctttttcaactattaaaattcctgactatgttgagggaattaagaaaatggggttggtggcggtggcaaccggattggaagtccccaaggtcttaacggtaagcggaaaccgggtgtaaccgggttaggacggcaaggaacaatccccagttttg

SEQ ID NO: 89231 - DNA, 251 bp, Glycine max
gttctagatcgcgagccgccgcccttttttttttttttaaaccaaagtttaatctttcaaaggctcaaacctaccatgttataaaaaaatccggggcgaaatcaaaattttttttccttttgggctaaaaacatttcgggttaaaaacctgggggccaaggcttgaataatttcaactgcctaaacccccgaaaaaaatggcttaacctttcaaatcctcgggtttggccccatgaaagcgggctggaatc

SEQ ID NO: 89232 - DNA, 209 bp, Glycine max
ttttgtgattgagttagacacaaattcaaatcctaagagtaatgctactacttataatatggtttagtgtgtgaaaatgatgattccaagtggttaaacgtttcaatcaatgcgttatggacgttgatctggggtgtggttgatgatctaagccagagtgattggggttaatttgaaataatgataataattttggaaggaaggtattt

SEQ ID NO: 89233 - DNA, 262 bp, Glycine max
cggagcaacttttccaaagaagagcaacaagctctgcagacatggaaccaattgaaccacttaattgataatgttcagggtttacccaatgcagcagaagctatcaaggaggctgccagtgcatggaatagctttatttcctcaattgaagagcaaaaacaaggtcatggaaatgatagttcaagagctaaagagaagcagtgtccccattttcttaataaaatgaattccactgacttggtaatagtagttataaactgcc

SEQ ID NO: 89234 - DNA, 247 bp, Glycine max
aactcggaattgagctcaagagacaattatccagttcaatgatcgattcccctactcacaaaaattaagatgcaatccatttctttgttcaattcctcaccaatatcattccatccattttctacatctaaggcaatgtctaatggcagcaaatgaattcgttgtacaactaggcttcatgagagatcgcgatcgaactcatggaaggtgtgatgaagctgatatctgagagaggtcatagtgacat

SEQ ID NO: 89235 - DNA, 236 bp, Glycine max
  unsure (1)..(236): unsure at all n locations
taggcactgctaaaacttgtccttttcctttccccccgcaaataataacataaaataaaatccaacacatttaaaatatagcacgncancaanggtgtcnncgnaacggatatagcataaccgtttgaacagtctttangaaaatcaatctgcaaactggatcatcttgtaattctcagatcatagatctatatgtatgagttttgaagagaaaaaaaggagaaatttgatctttg

SEQ ID NO: 89236 - DNA, 254 bp, Glycine max
gcttgagcaatgctttgagacgatatggtgtatgactactgggaaaagttatgctgtcactaccctgtgccaatttaatttgaacctctgggatacctttggtcaacgactcaatgtttgtatgtggaagcatggtttttcggggacatagatttaaagtctagtttgtggggctaagaatgttgaggatagctaatggtgtgtttctagtaacgaggtggtaaacgctggctgtcggtacatgataatagctg

SEQ ID NO: 89237 - DNA, 200 bp, Glycine max
ccttcgagccgaatcggctcgagcggctcgagctcttcagatctctctcccttccttccatcacaaccacaaggttgctgagcagacataaccatggtgagatttgctgcattgagctgctatgtggtagccaacatggctgattgccttgatgtctgagacgaagtgtcgcgtgacattgctgcacgcgaatcacgcgt

SEQ ID NO: 89238 - DNA, 100 bp, Glycine max
gaaatagtcagaaagatgacttccattgtttcaggtttgcaaggccagcctccacaaggacatgaacatggatacccttttgtagctggaaggaaaatgt

SEQ ID NO: 89239 - DNA, 224 bp, Glycine max
cccttacagagttctgtactcctgagaattgtcggacgatgtctgcaggacccaagtatggcatatttaactgtctgatttccttgtttacatttcctttggaggggaaaagcatttgtatgcttttagaaattcagtcggatgataatccttcaaatatccttgcagttgaattgaatgaggaaattaatcagcttcttgaaacatgtggggtgtggaatgaa

SEQ ID NO: 89240 - DNA, 257 bp, Glycine max
atcaggaccctactggtcttgcatgcagccaaggaaggtacttacagttagttttactgaacctaacaaattgctgtatcgtatatatgctaggcacacagattttgaaaccaggttttacaataatagctgatcacgagatgaaatgccttttgttattcaatcgtggcacacatagtatccaggatactctaacagctggtacaggaaatgtgatatcaggctgaagctggtggcaggatctgctgaaggatatt

SEQ ID NO: 89241 - DNA, 244 bp, Glycine max
ggaaaagcaagattttcagggaaggacttagtatctcccaattctcaggcaaggacactccggccacttataaatagcaaagcaacctttccaaaaccatggcaaccccacctccaatttctcctccctttgtggtttcaaatcctttccttggtataataatctccttcaattttgtccaaaccctgggatcggacttgccattcttaatgaggcaaccggtcaattttggggttgaggtaaa

SEQ ID NO: 89242 - DNA, 183 bp, Glycine max
ttcgaattcagatttcgcattcaatctttgtaactgacagataaaggcgacaatatctcatctttcctctcacaccatcaacaaaaccaaataatgatgatgcagaacgccacactagcaacaacccctttcggcggtttgctccttaatccctcctcaactggcttccaaggaagaccaacc

SEQ ID NO: 89243 - DNA, 228 bp, Glycine max
aatcgagccgattcggctcgagctcagctaacctcaattttatgtataatcgtccctggtaaataggctttttagatattaacatacagcatcgttttctatgatgatcacacagtgccataatttggatttctagcgacagcctatcgtattacgaggttaaagttcatgttttgtttcctcgttttgatgcactgattttataattactttatcaactgttcatgc

SEQ ID NO: 89244 - DNA, 262 bp, Glycine max
gcttaattaccccctttgtctctctctctctctctctctccacaacgacgccgtatagatcttcttcttcttcgacgtagtaacagagcgcgcgcgttgattcaaaccatagcatggatgagacttcagctctcatcgatgccattctcagagagcaagagggagaagtagaaggagctcacagaagatgaaggaagcacaccacgtattacaccacaatcagaagtatgagccattggcagacggtgtcatatcacaagag

SEQ ID NO: 89245 - DNA, 233 bp, Glycine max
gaaaaatgtgagtgacgctgcaacgtttaactataacactagagacttattgagccatcttgctcagagagcttatgtgaataataaattgtattcaactggagaggcgaagcttgagaattcggagacacgttatggtttgactcagtgcactagagatctttctagcagtgattggaagaagtgtcttgatggtgcactcaatggactgcccaaatggttgtgatggcaaa

SEQ ID NO: 89246 - DNA, 267 bp, Glycine max
ctgcaatcgaagctcgatacagcagcaactagaattggaataaaccctatgtctcttttcaagggtgtttggtctctgttctgctccaaaaccgtagaacaaaaagcagaggagcatgagattgagcagaccctgagtttgtttttgcatgatataggcaggacaatgtcttcagatctcagtgagtataaaatcatcaaggaaagagtagctgagattcttatggacgcaaaggatgaagtcttctataacaaaactcagggcaat

SEQ ID NO: 89247 - DNA, 254 bp, Glycine max
cttagacgaagtcacaattcgcaatcgtcgtcttcgaattcctctccttcgtcgtcgtcgtcgcaatcgtcgtcgtcgtcgtcttcctcctcttcgtggatccatttgcggtcggttctaatcgttgtcactttctccttcacaagctcttggatggcctctgatcgggggtcgtcttaaatcaccatgtcaacccaggaaaagaaaccattcctttcaactcaagcaagggaaagcgtggtttacccaggttg

SEQ ID NO: 89248 - DNA, 258 bp, Glycine max
catcgagccgattcggctcgagcggctcgagaaaaaacttcgtataccaaatccgacgccgtatttagatggattttgccagacatgatgaaccacctacctcgaatattcggccatagaaagaagcaagcctccgacaacatggacccgacgacaaagcacaagaagaagagtaagaagaagcagcagcccaaactcgagcggcgcaacggcttccatcacttcgaatacgacgccggatcgtcgtgctcctggcgc

SEQ ID NO: 89249 - DNA, 105 bp, Glycine max
cgttttcactgatgtgtgcattgggtggcctggttcaatgggtgatgatcaggttttggataagtcagcgctttttcatagggctaataatgcggggcttaatct

SEQ ID NO: 89250 - DNA, 239 bp, Glycine max
tgcaacttctcactcttgtgatgcaaaccaacctattgcagcttctaactctggcgatccaaaccaaggacgctacgctttagaaattaagtattatgcctttccgaaattccaatatgatagtacacgaaaagctatggagaaatggtggatttttgtcaagtgtgattgggctaatctgttaagcgttgaggtcctccttcaaacaactaatttgaaagtgggaactcctgaagatc

SEQ ID NO: 89251 - DNA, 242 bp, Glycine max
acaacctctagataaatggggaacaaaagctcatcaacttcaaaggcacaatatagtagtaatagccagggagaaaaggttgcttcaacacaactacaatatgttgctgctccacacccgaggaaaatctccacaaataatccaaaggatgtgagtcaaacacaacaacatggtaagaagccactaggtaatgatgaagctttcacacttacattaaagatgctagggttaaaatgaagagc

SEQ ID NO: 89252 - DNA, 131 bp, Glycine max
tctagaatacttctcctcttgtctctgttcaagctttaatattgcatcccatgcattttaagatggagctgtctctaataccagtaactatagctccccgggggcaagtgcaatgcccacttgaggtcatt

SEQ ID NO: 89253 - DNA, 258 bp, Glycine max
tggttggggtcgcttagctcaccatcctcaacttacgtaaaacatggtaattcaaatattaggctggaacattttaaattgtctttggagaaaatttagttgaacctgggttatttgtaaaagttcattttgactctagggtttttttagtccataaacttttccaattgcttgagatgatataatattataaggggtttctggcatagtaaggttaaaagatgtttgatatgtcaacgtctcaaacaggcaaagtaa

SEQ ID NO: 89254 - DNA, 268 bp, Glycine max
cttttcaaggttgagaacaaccaagaaccagagcgacacaagcacatgactgtctctcttcctaaaccgaatgaactgcgacctttaaaccaatcttcttacataatggtcgtttgaaaatctcgtattttcatctgggtttccttcaaaatcatttttttttgtttccctttcttcacttcctctgcccttcttgtcttggttcttctgttttaagcagctttctcttgttgatcattaatcatgtcaatatttaaggctttgaagc

SEQ ID NO: 89255 - DNA, 145 bp, Glycine max
ctgactcgtcaaggaagacatcctaatttcattcgctttaactcagtctgcctcgccggaagttgtataacgcctcagagaccggaaaacttaaaattcgacgcctcgtcggaaaaccggctgctatagcgcgcgaccaccgaat

SEQ ID NO: 89256 - DNA, 151 bp, Glycine max
ccagcttcaatctcagatgcagcaacaacaacaaaaccttctgcaaccaaatcagttgcaatcttctcagcaatccattatgcaaacttcatctgttatgcagccatccatgatgcaaacatcttctctatctagcattccacacaacata

SEQ ID NO: 89257 - DNA, 155 bp, Glycine max
ctaagagattaatctatggaagagaagaaccatggcaccacctaggcctcttcagttgaatcccgtgcttacggccaaatgattcttttactcattcaaatttctagattttccctcttttattcatttcctcgattcgaacaactgcagataat

SEQ ID NO: 89258 - DNA, 153 bp, Glycine max
  unsure (1)..(153): unsure at all n locations
ctcattctagctttcctctccgaaccctcgatcactctcacgcgctcctatattcgatcctccaccgtcgctctatcgaaggaaaanaanannatcttcatcacatggcgaaagaagcatctggtgtggcagtccatgatgactgcaagttga

SEQ ID NO: 89259 - DNA, 132 bp, Glycine max
aaggaaacgtattaaaccagaccctagaactagcatcagatcaaaaccaacgcgattgcgcgatcaaaaggtctgtgttctctctcgatcctcgcgaaacgcgctttttcgctcaccctttcttcatcttcc

SEQ ID NO: 89260 - DNA, 159 bp, Glycine max
cggctcgagagaagaagaagatggagaagtatcagatctggagcaggagaatagcgttggcagcgcttgcctttgctctgctgttccaatcggcctcagcagaccgacgtcgttgtggtctctgaagataacttcgagaaggcagttggtcaggacaga

SEQ ID NO: 89261 - DNA, 136 bp, Glycine max
ctcaaatctcaagtaagtatcgctctcgccccatggcagacgcaataggcgcgcaacactgcaacagctgacttcgtttcaatttcaacgacgcccttaaccagtttcagggccaaccagctgcagctccagcatc

SEQ ID NO: 89262 - DNA, 140 bp, Glycine max
gcagctcccacaagaaccagacagggacgagggggaagtagcaggtcagaggtaccgtgtgggctatgtccgcgaaggcaagacagtcgaaagcttgcattcaaccctcacgccgcgatcacgccaaacaagacaggcat

SEQ ID NO: 89263 - DNA, 163 bp, Glycine max
tagctggttataacccgctaaaatcgccgtcggaacactgttcatcggagagaggatcctctgcgaccacgttttcgctgaggatcggggacaaaaatagcggaatcacatttaccacatacccaattgagcttcagagtcacgtcacacaaggatcctgaaa

SEQ ID NO: 89264 - DNA, 168 bp, Glycine max
gtaatgaagcgtgaaacaaaggctcctacctgcttaaaataatatggcattcattaattgttagacactgctatatatattttgcgcagaactgcaatatcaaaggctccacctgccacatgatcgacgaaatctccaggagatcattgtacgctaaccaccgcgttg

SEQ ID NO: 89265 - DNA, 193 bp, Glycine max
tctcgtttcgcaaatccaaggaggagaatggaggtttttttgtgtatgtcacccttgtgctgtgcggttgctctgctggtaaggtgtgcacaaacattcctactcgatcaccatcctaaggtaccagcttttgacatccatgaatgaacggttggaggaagaggccatgtctcaccttcatttgacgccaacg

SEQ ID NO: 89266 - DNA, 117 bp, Glycine max
tgatcgtgatgaaaggaagctagtttctggactgatacagatgcgggtacatcggtgtaatggagagcagactgcaaattctgtcattgatatatgaatcagcaacatatgtgtata

SEQ ID NO: 89267 - DNA, 193 bp, Glycine max
gttggcaaaagtggagatgggactctgtctgtttgcaatcttcgaagaaataaagtgcaagctcaatctgaattttctgaagatgagctactgtctgtggttttactgagcgctcgatttactgatctctcttctacttctattgatgctacgttgaagcttgatgaagacaggattattaccggatcagagc

SEQ ID NO: 89268 - DNA, 137 bp, Glycine max
aaggtttttgcatctcagaccatcttacaggcgatggtcccagtccggttcacccaatcgaagcctcatccatgactgagcatgcatttcagaatagaagcccacattaactctgatggatacgcagggcatgcccg

SEQ ID NO: 89269 - DNA, 256 bp, Glycine max
tcggctcgagagatgatattcttgccaactttcagtattatgccatcttatatcttggttcaatatgaattaagctattttgatgatatgtgcactgccatgtcctttgttgagttattcctgatttagtagaatggaatctgcatacagggcatggttgagagagaagagagaaaggtcaactcctgaggaattaaatgaactatgcagagagctgcaaactgctttaggtaccgcaaaatggcagttggaagaa

SEQ ID NO: 89270 - DNA, 126 bp, Glycine max
  unsure (1)..(126): unsure at all n locations
gttatcaataaattcttgggaagatggacatcgtattaccatgtatctaaaactgtttccttcatacaatgatcccggccagttgntcaatgcaagcgaggtttaccgcatcaaaactatatttac

SEQ ID NO: 89271 - DNA, 107 bp, Glycine max
tacgtgaagtcggaattgggttcggcttgagaacgagtccaatttcgtttccattcgtttctgtcgattggacactgcctcttgtctctctcaattggcttttcttc

SEQ ID NO: 89272 - DNA, 134 bp, Glycine max
cccgctcgagctcgagccggtgagatttcaattgatgattagtatacaagtttctgtggtaactgataaccgtttgcttttgagctccctcaggtttcaattaaggatgtaaaattttcacatttaatctatag

SEQ ID NO: 89273 - DNA, 177 bp, Glycine max
  unsure (1)..(177): unsure at all n locations
gtttctttaaccagagaaacttcattacagttgaccacaaataatttgtcagctgcacctgtcaagagtggagtcatccccaagaaatcaattacctgtgatccggatccaaggaagcatccatctcagactggggntagcctagtcagtctggtagacctaccacattagatctct

SEQ ID NO: 89274 - DNA, 270 bp, Glycine max
aagtttccatttaatactggatcataagctgttaaattttctgcatggctggaggatagaggcaactacctcacagaagtgggcgctaatcttgctgaagatctacaatgtggggacatttttcatttgcttgctttagtctcatcgggtgaactttcaatttctccattcctaccagacaatggccctggagagtctgaggacttgagaagtgcaaagcataaatatcatactaccaagtcttcatatagtgataaagccaaaaagtca

SEQ ID NO: 89275 - DNA, 165 bp, Glycine max
cgaacatgctatgagcttgctgttgcgctactgagtcattagcgtaggccatcatggaggacgatgaccctatcgttcgcgagatggacgtctatgtatgcaacgagtttatgggctccagcacgcaactagcactgctacagcaccctctgcggcctccacaca

SEQ ID NO: 89276 - DNA, 254 bp, Glycine max
ccagctgaatgtttttgataaagcacaaagtaactaaatttgctgctttcaaagacatcaagacttaagattttaagtttagggattcaatatttgtgagagcaccaacaacatcctcacatagtgcggcttatgttttatatatgagagacgtacatgacatgacaagggcagactacagctctttgttcagcagacaaaagagtgtaataaagtaaaacataagacaagacaaagcgatacaagcaaagaga

SEQ ID NO: 89277 - DNA, 232 bp, Glycine max
ctctcatcaccaaacaagttaattaactcaagaaagattgtttcagcataatctcatatgttttggattgaaattttaagtacaatttgttaaatatttgaaaggcgacaaagagtttttagaaaaaatttaaaatagtaaaataaaaattggtcttggtctaatcctgagtgtgcaccaggctgcaccagcatatataccccttctctttcactctcttccagacaacata

SEQ ID NO: 89278 - DNA, 249 bp, Glycine max
caggatatgaaaattgggcagagtgcattaagatcctaaatgaaaacgaaagtggaacaggctcagctcccttaacacggagcggaattgtataaaataattacatcgagtaatgagattctttttctaagttatttcttctttgagaggtaactatttgctaacttgtatctttactttctttcatttggaagtccatattggctttatttgtagcaaagggaccattaaagctctggtagaaatgca

SEQ ID NO: 89279 - DNA, 252 bp, Glycine max
cgcggagtattcaaaggtctaaaagtcttgatacagaaccatcgtccaaatcagaaaaatactcccttttagacctttgaatactccgctcaaccattttactctgtctagttcttctaatataggaagtttcagaatcatcctcgttactatcgaactaattcgagtttcattgagtgatcctaccaatgcctttctgaatatttttcagagaaagatgaatcacacaaaaacgtagtttggctttgacag

SEQ ID NO: 89280 - DNA, 130 bp, Glycine max
ccgggggattcggtaccgagggcagtaccggcaagggttacggcacgggttcggggtgtaccggttctacaccggggatgtttttgccggggagtgggtgagtcgacagagtcatgggtgtggggttcac

SEQ ID NO: 89281 - DNA, 255 bp, Glycine max
cgatcaaaaggttggaatttgtggggcaatgatgttgtccaatgggagccttttgagaaggaatctgtaccatttgggactaatcaaatcatgttcttgaatcagacggtagagcacatgaatttaggagtgagtttgttctatgcaacatgtgtagtataatattctttgcttcagatttggggtttgtgtacataaaaatttaaaggtggaatttggtgatagttgttgttctagttggttgggttgggtttg

SEQ ID NO: 89282 - DNA, 229 bp, Glycine max
cgcctcaccggccgtggcttgatcaaccatttgatccccaacgtggagcacctaagacgtgtaggggtgccgcagggccccattgcccacctggtgtgcaaccacctcggtgtggtgtgtgtggagcacacgaaattcgtggaggctgtggagaaggtggtgacattcgggtttgatccgatgaaaaccatgtttgtggaggcgcgtgaagtggtggttgggactagca

SEQ ID NO: 89283 - DNA, 265 bp, Glycine max
ctggagttcggctgttgactgtttgattacagggtattgctttgccttaagcgtgctttaaggattgcaaatgctgctcaacaaatggccaatgcagcaaggggtagcagtggtccagtgacgctctttgttgaaatactgaacaagttggtcaccttttgctataaaactacttgttatactatcttcatgattttcttacttacggatgagagtgagtctcaggcactctactatgttgagacaggatacctcagatcactag

SEQ ID NO: 89284 - DNA, 262 bp, Glycine max
agaacatatcctgttctctggttttggaatccagacaggttgttctctttgtttgcaattctctcacttctttcttcctcattatctagttaagcatggcaacagttatggacatgtacaatactagtagcatcatgataccagatttcttagaccagtgtagtgatcaagagctgatgaaagcacttgagccttttatgacaagtgattcatctagcattacatacccttcattctcttccttttgcttcttctcccaatt

SEQ ID NO: 89285 - DNA, 276 bp, Glycine max
ctcgagcaagttagagcatgctgaactaagttggtatccattgaatggcttctggactatattattcaagagccggtattaatggatgaaatgcatgttatctggatgtgcaatttgggctgcagcaacatttgcagtattattatgtatggactgtttagaatgtttcttacatgcgctacgattgcattgggttgaattcaggataaattctattatgcagatggaaaagcatttgaaccattcacatttgtgcaagaagaggactaccagtaa

SEQ ID NO: 89286 - DNA, 270 bp, Glycine max
gcaatagaccactctaatctcccttgacatctatcaagatgagtcattatagagagaatatgctgctctatcaatatgtttagttgcttttcatgcataggtgtattcaggacttcgaaaatagcctttcagctgtagaaaggagaaaaaatatctaaaagaattgatatcaacgttccctattacaaagttggagtgtcaaagcaattgtcagctggatattgtttgagtgtttagggaatgaaaatgtctcaattgtaaccgaaaaag

SEQ ID NO: 89287 - DNA, 142 bp, Glycine max
gtaatgtcagaattcggttggatgaagaagaaggactagctagtggaagtggagtctctttagtggtgcggtcgagattctcggcggcgtagtcgtgcggatcgtcgtcgggaatgttatcttcggtaaggatgatccattc

SEQ ID NO: 89288 - DNA, 129 bp, Glycine max
ctcttttctccggcagcaccaaaaccagtcaacacttgaaaacaatatccattgttaccagaataagcagagatcagaacaggcttgacgtcattatactcagttccctctttccctatcaaaagcctt

SEQ ID NO: 89289 - DNA, 265 bp, Glycine max
cttctccctctctctgtttttgtcatgcctgcaacagcagtgaaaacagcaccagcgaaggcggctgccaagaaggcagaaaccacaaaagctcaaaaaactgagaaaaagcctgcacctgccgccaaacaaccagccaaacctgctgctgtaaaaaaaattcccaccaaggttgcgaaaccttccaaggcaatctcaaaatccaataaacaaaaaggaaaagctggactgaaggccaagaagaaacctttgaaattcaccatcg

SEQ ID NO: 89290 - DNA, 259 bp, Glycine max
cccaaatctctcttatctggttaaccccaatgtcatatgtcatgcacatgttttttattgaaattttgatccaaaatatcctcatcttcttccttggaacactttcatgtgttcttgctttcaataataaattgaagaacataaaaaagacctcaagacaacttcaaaaatttcataaaaaaattctttcatgatctcttcaaaacaactaaacaagcacaaattgtagaaacacgaaggaatttgtacattatttcat

SEQ ID NO: 89291 - DNA, 256 bp, Glycine max
ctcgagccgcaagtaacaactgcatgcttggactctcttgaagagcttcctgccctgtcaaacttgaatcttagtagatgtaatctttctaacgatggatgtgaaaagttttcacgactggaaaatttgaaagtattaaacttgggatttaatgacataacagatgcatgtttagcacacttgaaaggattgacaaagttgaagagcttgaacctggattcatgtaggattgaagatgaagggttggtccacctgg

SEQ ID NO: 89292 - DNA, 260 bp, Glycine max
cccgatgctgcgaggtccacaactcaatccgcttttctttcaaatcattcggtttctgagatcaaaatgtccccacatccaagcaataatcgcctcaatgagattagtataaatcatagagtttcctttgagttatcagcccaaaaagtgctaaaatctctggaaaacaagccagcagcatcagtgtggactaatgtggtgtcaaaattgcaaaatgatgctccaacaactgacaaagaagaaaaatccgtagaagctgt

SEQ ID NO: 89293 - DNA, 261 bp, Glycine max
cacggcacctgatgagtgtaaggcgttttatgcacatcctgttcattgtagtgcctttcgttgtgcatcgccgccgccacgacccccttcacctccacctccccctccgcctcggcgctggagcaccgcgagcgccagcaggaggatcttagcaggactatccctgaggagccatgagacacataagtttgtaatagttaatggagtttttgctgatgagtttgtttctttattttttggggatgtgaagattagcttggt

SEQ ID NO: 89294 - DNA, 257 bp, Glycine max
ccagaggtcagagattttggagatcacctatttagtgacttaagacgcccctcaaaggcaggctggcgtacagcagcaatcatccatgcacgagagaagaactagagaaatagaaaatgaagatacctaccgctctgagcaggcaaacttgcatagtatacaggaactacttggtaaattgcatgcaactgcatctagtagttcaagaactagagcgttcaattcacttcttgaagaactgcgtgaggagagacaaa

SEQ ID NO: 89295 - DNA, 255 bp, Glycine max
ccgccagctccaagacctgttgagcattacaattcagcgcgggcaccgtcatttccaccacctagagctggcgatgaagggcctttgccacctgtcatcggagtctcatatgcatctcctcctcgagcagccttttattgattcttttgagaacttttctcctctaacccttcccctctagccgagcaaagacgaaaaaagaaaaacacccattcaagttcagttcatacttggattatgattggtggccatttc

SEQ ID NO: 89296 - DNA, 274 bp, Glycine max
gttactcatttcttctcatcttctttttcttccctttaaaattattattccgtgcaaacacaacaacaacttcatcaccaacacgaagaacaagattagcgttatgggtctcttcctttctaggaatttggcttgcaaattcatatacccttttcttttttccaataaggtttcaaaggatttgttccccaagcagttggagaacatgatgtctctggtctctcctcgtactggcaggcatttgcagcgctatgacaaaggctgtcgccaagtt

SEQ ID NO: 89297 - DNA, 268 bp, Glycine max
cgaccagattgtgggtgcggtcttggtggagaaggaggatgccgtcgttaaacaggagagcacggcgaggttgttgatgaactccatttcgcccaattgccaattcgacacatgcctttgcctctgcaaccctaatcacattggttaattctaagttgattcggttaatatgaattgttctcgagtttttcttccctgtcaattaattgaattgggtagatgaatacaagcaccaaccaaacgtctaggggagcgaccattctgtact

SEQ ID NO: 89298 - DNA, 271 bp, Glycine max
cgggtctgccacaactagacctcttgcgaactggtttcacatatggcatgcgctcatgatcctaacgtgagagcaacacagttgcatgaggatccatctacacatgcatgagtgtcactatcctttataacgagggctccggaaacgagagctataagctgattatctggcgttgagaatggaatacctcgtgcccgtttgaggttacaatcgaaaacctccaaaatccagtatttgtaacataatactgttatattaataatattatata

SEQ ID NO: 89299 - DNA, 258 bp, Glycine max
cctcgagcgaattcggctcgaggggaaaccataaattgggaacacgtcaccaaatccacctccaccgtccaagccatcggatcctcgccggaaaacatgttcgtgagcttcgaatcttcccgcagaaactcgaattcgataatggtttacgatttgcataccctaacacccgtcacggagatcagtcacaacgagatcttcggcgcgaacatcgattcggcgattccggcgacgaagttgcaatggattgagggatat

SEQ ID NO: 89300 - DNA, 273 bp, Glycine max
tggaatcggctcgcctcgagcgaatcggctcagtcatatgcacaacaacacacactcaacaaaaatgatgcgtctaagctcgtattttgtcgtagccattgctcttctcttttcatttacaccttcttcgtcagcaaatactcatgaaaactttgttcaatgtctttacaattatccccataataacaatgtcacctcaatctccaacgtcgtttacacccaagccaactcttcatactcctctatacttgacttttccattcaaaaccttag

SEQ ID NO: 89301 - DNA, 134 bp, Glycine max
ctaatgcattgcatttatattacatcaaaaaccaatatagaaatacaatgaataagtattatctaatacactatatcttgatgtgttggggagtcgtaatccttaattagtttttcaaggcttccacacaacat

SEQ ID NO: 89302 - DNA, 261 bp, Glycine max
tcgagccggattcggctcgagctcgagccgttctaatctatcctatggttttatatttaacatcaggcaacaaagttcaacacagcatgaattcttggtttgaaatgatttgtcctgttgagaaatgaaacttctagtggaaatatatttgctctgtggcatgttgttcttgcacttaaagcctcacttttgaattgagtctctttgtagtaattgatgccttcaatgtttgagagatggctttgacattgatccttagtt

SEQ ID NO: 89303 - DNA, 265 bp, Glycine max
ctttcttctcattcttcatttcccatgttttctcactctgatctgcaaaaatataaatgcattaattgtctctttatataaaaatgttctatttaattacaatgacaaacaacgctctattgaccacgtcgtctttttcttctgctaaattctctttgtttcgaaaacccaatactttcactgtcaattccaatattttatgttcggaatcaaaacttgcccacaagcttaccaacctgacttcagaattcacctctctgacgca

SEQ ID NO: 89304 - DNA, 264 bp, Glycine max
accattttgagattcatattcatcagtctgtgtacaaaatggcagggtacgcagactgctatggtctatgtgcttctttttggtttctaattgcacagattttatagcattatactggctaataagtcaaggttttgataagcttcaaattcagcgtgaagcaagtaacaggaaaatcatgtcattagttaggtctgctgatctagctccaacatcatatgaaaatgctaagctcttctcactgaaggagcataatgttcgacc

SEQ ID NO: 89305 - DNA, 275 bp, Glycine max
tcctgtagatcacaacaatatgtttctggatatgggttctttgcaagccgcactgccagacgccctgtttccagccaccttccatggtggtatagctgaatcttggcttcctcaaaacccggtgacctcatgtatatcctacgtggagaaggtggtttgtcattcatggctatgcaatcaccaagttcacaaatacagaacatccagaaaccggaaccagttgcttcgatagggggaaatccttttgcataggattatgctgtagaatgtactat

SEQ ID NO: 89306 - DNA, 265 bp, Glycine max
tagaaaagcatttcactgagcaaaatactgcaggtaactctgatgtccataatggaaacgatgttgaacatcaccaggatcattatgcttccccagactctcattcatcaagttttccctcctttgagacacttaaggaggttttgcttcttccctacccaatgatcatcgtgtattggatgacaagtcctcgagtcaccagcctaagagattaccttcaatggacgacgactcgtatttctcataccccaacttatttacctct

SEQ ID NO: 89307 - DNA, 271 bp, Glycine max
cggctcgaggtgatgtgatgctcctcctatcataattttcactcctgtcaattcagcatttttagtaacatttcagcaagaatgagctataacatgtaaaactgatgtgagctttaagccttatacttgatgtcacaaggttgacatggatgcagcagttaagcttttagtctagttgaaagatgattttgttggcctgacatgctgccaggaggctgaaatgtaaatttgcttggtattgggtattaatgatttgtggtttgccacttta

SEQ ID NO: 89308 - DNA, 264 bp, Glycine max
attttgacagtgcaaccatgaccaacttcaaacttgttttttgctgcagtgtcaaaagttcaggtggagttgacacatgcggccttcagccaggatcctttccttagcagtttgtttttgcctttgcacaagaacttgaccaatattggagagaaagctgcctcatcttggcaattgctgtagctatggacccaaggcataaaatgaaacttgtcgaattcacctttgctaagatatttggtgagaatgctgaggaatggataa

SEQ ID NO: 89309 - DNA, 274 bp, Glycine max
tggcctcacaaaaacaaaggtaccaaaggaaacttgcaataattctaaatattaaggtagtattacaatacatgttggaatctgttcttgcacgggtgaatttgaagaagaagctgagagctgttagatatggttgtaattggaagaatatcttatttctttagcttctttttctgtctctcttttttggtagtaaaacataattgggtagtgtttgactcttggattttagagcctatttgattcaagaagactggtggcaagaaaggttacc

SEQ ID NO: 89310 - DNA, 220 bp, Glycine max
ccccctcactcggaatccctccgattccactcgccttccttctctccgccaaaccctaatttccccttcgctcttccccatcaccacgacgcacccatttccgccactccgacaatgtcgctccagggcagcgccacgcacaacggcagcgtggcggcggcgtcgacggcgagcctgaggctgcggctgcagcctaacaacgagcacacagccgcatggc

SEQ ID NO: 89311 - DNA, 199 bp, Glycine max
actcttgatcaccataaccatgtcaatcgcaacaacatcccctcacaccgccctcttcccaaaccgcaccaaccctttcactctctcctcctctcaaacccacatccatcaaatgctccatccaactccatacccaagccccgcacctcacccactcccaagatcgcgtcttcaacttcgccgctggtcccgcaacctc

SEQ ID NO: 89312 - DNA, 269 bp, Glycine max
gtgaagaagctgaaaattcttgctaagcgctgcaaactacagcatctcctgcaaatgctttatagacaacgtccaaagtggggcacacctttccccagctttaatcgtactccatctcttggttcagccggaagttgtttttcggatgctatattggaagctaaatcaaataaacttgttgggtggacatgcaacatttgttctgacacagtgccccatatgcatgttcacaaagttatattgcagtctggttgtgattatttacaagg

SEQ ID NO: 89313 - DNA, 259 bp, Glycine max
  unsure (1)..(259): unsure at all n locations
gtccaagccaacaagaaaaacgggatattgtcctacttggggacatcgttgtgaccattttgcatttcctcctcctccacaagctgatagaagccnggctggaccacgcccatgccctgtgtgttatattccagtggagcaagctatagctagtatgccaagttccccatcagaatctcccatacttcgcactttgacatatgtgcatgatgaaaatccaattgacagtcagccacatggtggctctgattttggtgga

SEQ ID NO: 89314 - DNA, 111 bp, Glycine max
ctttccgattctctttctgagatccaaaagccttactttttgtccctctcaattctccttgcaatctctagaatccgcttcttcaattcccagttttctccacacaacata

SEQ ID NO: 89315 - DNA, 270 bp, Glycine max
catcaggcatgcaacaggcttatcaagtccaattggtgctactttccttgagtgtctatttcctttgtatccacctaagtcttgctcccttgaaagtgatgagaatttggaaaaagtaacttcaagtgcacaagaactaagaaagacagagcttgatcttgaagattgtgccggtgactcggtaaggaggccaccaacacttggagagctgattatgatgagccgaagaagaagctgcagaaggaaagcagtacaaatgaacaaatggga

SEQ ID NO: 89316 - DNA, 266 bp, Glycine max
cacccacctccaccacttctcctactgacgtcataatctgtttaatatgctccaaatcccaggcatgcagaggtataccccaacacaacaactagactaggcgatagccaattctcagctgaggcgtccatttttctagtgaggatgagccttgctcatttgcttccttagccattggtgtagctctggtctctctaagtcccattagcaatatcatgtcatcgccaatatattttggcgtgatgtcttcacctccattccacaca

SEQ ID NO: 89317 - DNA, 257 bp, Glycine max
gaatcattgtacggactgaggtcgaaatcgcgattttcgtgtttcgcgccgccgaggccgaagccagtgatgacgtcagcgagcaatgaggagggtctaagaacatcaaaatcgagggcgttaaagatttacaacaatctgaagaaggtgaagcaacccatctcaccggggggtaagttaagtaattttcttaactctctgttggcgacaggggggagcgtaaagaaaaccaaaacctacgacgacacgaaagctcc

SEQ ID NO: 89318 - DNA, 122 bp, Glycine max
aaacaatgtaatacgtatacaaatataattgatccaatgcatcagttatatttgtatacatattacatttgttttgaatttatgcatgtattgcatcattatcttaaaacaaaaaagagggg

SEQ ID NO: 89319 - DNA, 257 bp, Glycine max
tgttgtgccctttaatttcgggaggtcattctttcattcttgttagttttagtttcagtcttgagactttcagatccataggccaaatcttaggggtcatgagtttggtgttgatgagtcttggatatctcatatgattgtccaaccaaaccaaacatgaacgaaaagacagcacccttgtaactcaaaggtagcaacttgagacagttttctcaagttcgaacatctaagataacacaaggtccaattggaatccg

SEQ ID NO: 89320 - DNA, 232 bp, Glycine max
agccacgagcctcttctctaggataactctgctggagagactccgccaagtccaaggacaacattgcagaattcacgggagaagaaacaagtatctgataaggaagcagaatatgaagcagaagaagcaaaagcagatgcttgattggatctaaatgcccctggtggtgattctgctattgggtgcagtccaatgctggatctgatcacgtgttctgacacagatatgtcaa

SEQ ID NO: 89321 - DNA, 248 bp, Glycine max
ctcgtcttcaatcctttcgttattctcttattcatccttctcttctgaataatccagatctctttctgcccttttctccgtcacgcttttcgtgaccggatctgtatggatttgatccagatctacacgccgatggtggttttggccggatctggtgcgtagaggctcagatctacggtaccgaggtgtgtgattcatgttcgtcttgcttttggaatctgtttcgtagaaagtcgtttggtcttgca

SEQ ID NO: 89322 - DNA, 254 bp, Glycine max
ctaaatcataacttgaacttatgtgatgaattagttgttccaggccttgctggaacaatgaatcgaaggagtgcagaaggaaggatttggaagtaccgaaatggtaccttttggatttggattcctttcggacaattttgtcatagacatgaaacatattgtccacaatggttgtattgtggatactgtaaattcttctgctaattgattccctcctgcatttttaatccatggataactcatatagccagatg

SEQ ID NO: 89323 - DNA, 203 bp, Glycine max
ttgaactctttcaactaatgtgtcgatttagccaatttcaacgtttgaatttttcaggcattcattcattagtttcataatctcggacattcaacaagggtttgattcgtagtgtgagtatggtgggttttgctggaagatttgtatcacagtatatctgtacatgcaaataattctgcggtgtacctctactatcagtcact

SEQ ID NO: 89324 - DNA, 257 bp, Glycine max
gttccctgttatttgcaggtgtctaaggagggaacttcaccatttacatatattattgtggacaaccaaacgaagacccgcacttgtatacataccgcaggatatcctccaatgataccagacgaactgtcaaaatcaagtttattatctgccttggatggagcaaaatttgcttattttgatgggaggttgcctgatactgctctagttgttgcccaagagtgcaggcagttagaaagaatatacccatcttaata

SEQ ID NO: 89325 - DNA, 254 bp, Glycine max
ccaccatttttctatccccttacttttctccaccgtggtctagcccctctttctcttcaccgctccagttctgagatggaaagagaagtaaaatagaaaatcacaaccattacttaacaagataataatatgtttgacggtgtacatttttgtgggatacctaattgactctcctaccctaaccagagtcacctttcctcgttacttcttctatctgccctagtctctgttctcacatacatctgattagcctt

SEQ ID NO: 89326 - DNA, 154 bp, Glycine max
ttcaattgagatgggtacttaaaggggattaatttcttcttttgcttctacattaagatcaacagtcgtttgactcaattggaatcttgtatatttggggtcatggataactcaaatgattcatcatcatccttgagttttgtatcatctcgac

SEQ ID NO: 89327 - DNA, 252 bp, Glycine max
tagaaaccgatgctgccacactcattcttcttcttcttcagcttttaccactctctatgagaactcttctttcttgatgctatgttgatgactggataaaatctgagacagaagggtagtttctagaaacttgacagagctaattaagagaatcttggtatttatagctgtttttcaatctttgcttacaggaagtagattactttattaactgggtaataagtcgttgtttggaggctatagatggcgatg

SEQ ID NO: 89328 - DNA, 254 bp, Glycine max
tctatatccaatctgcatcatccagaatctagtttctttctttctttgtcatctcaggttattcaccagtttgagttttccaatctcctccactgtttcttctcctgatcctgttcagaatccaaggagcttgggaacaaactcctgctccttcttcaccctgttaccagaggcaccacttctggtttattgataggcaatgggacgtgcaatgggaaagattgaatcacccaaaaagggatcagtgccagaaa

SEQ ID NO: 89329 - DNA, 173 bp, Glycine max
aaaaatgtttggtttgcagtattttttacattacgttcttcctatcagcccaaaagaacgtaatgtaaaaattacaattttataaatatttaggtaaagaaaccacttgcaagtaggtttgttgtgctaatgataaccaagtaatgattgacgagcgtacagctgttgtcctt

SEQ ID NO: 89330 - DNA, 274 bp, Glycine max
cagaagttgaagcagcgtttaaggttgtcgggccggcattgatttttgggttttgaaacatccttatctgtgttggactcagtccagtttgagagagaaagagagaacttgacacttgacagcgtcagacacgcgcctaattgattgttgtcctttgagctggtttctgcagtgtggtgtggttcattgcattgacatggcttctaaattcaagagtgtgtcctccattcggaagatcacgcatctgagcggtgatatggatcaggaggatgcg

SEQ ID NO: 89331 - DNA, 263 bp, Glycine max
tgaacatgtgcagaaagaatctttgaagtttgaacatgtgtaggatcaatgctttaaaacttgggggtatcgaattatgtgtcctgtcgcaatcttaggtagatatgctggaacagagaaaaattgcctctccgcatcaaattggtgccaggaatgttttctgctggttgaccttgagcaattgttacaaccagaaaatgctaattcacaagaaattcagttttttgcggctgtgcccgttatttggtgacaacttctgacca

SEQ ID NO: 89332 - DNA, 147 bp, Glycine max
cggcacacttagatttttcactccaattccgattttcccaccaccgttctccgacattttccgggaaaattctgtgcccttctcctcactcgctccaacagaccccctctttcgattctctttcggttctttcttttctttcttttc

SEQ ID NO: 89333 - DNA, 267 bp, Glycine max
gcataactgactcgagtataagttacatgttttgcgtgtgtgtctggcattctgtcttggtttttaagggctactaccatctttttcaaaagtatcatgttcttatccaaaaatgggtatgtactttggggatttgaggattactgttgtagtaattttttatggttattggtaatgactattatttacttgttaattctgtgtatcatttgaatatcaattatttcttctggatcccttttgcaaaccatttttccttccatttaa

SEQ ID NO: 89334 - DNA, 264 bp, Glycine max
ctcaccttctttctttcttccttctcatcacaaagacacaagctttcttcctcaactatcctacccaacttcttattccactcatcacttcctttcaaattgaaaccaccaaaattgtttttttttagctcctttacccgtgtaatattttgaaaagtgttgtaccttgggttgataattgtggtagggcctaatgggtacgtgcctatcttcttgtgcctaggttgatgcacctctgatactcgaatccattgctgcatcagg

SEQ ID NO: 89335 - DNA, 272 bp, Glycine max
atcgagacgctataaccaaaggacattctttgcgaaacccttgatctgagaaaaagtaccaatggggacgccctctaagacgtaagttctcaacgaattttcctccgaagaggaacacgacgaggcctccgccgccgcgccaaccacgacatcgaagatgacgacgaggagctcgaagcggtggctcgctacgttagctccgatgacgacgataattcgccggatgaagccgctgaagacgacgacgaggataaacaggatgagagtaatgt

SEQ ID NO: 89336 - DNA, 272 bp, Glycine max
aaccagccccagactctcatgataagtgtgtatttttaatcaagcacggaactttcattgtcgtgaattcaaaattcacacttatcatgagaatgtgacgcaaggtatacatgaagattttgcatctgcccatgtagaaattaagattttgcattccagggaatgttcttctaaaacttataccaagcatgaaaatgacattcctaagctcacatcctcggaaatctttacatactttgaaacaaacatctcctaaagatttgtagatgttg

SEQ ID NO: 89337 - DNA, 258 bp, Glycine max
cattaccataacctccgacacccgacccctaatcctcttcgagaaattcgggttcacctacccaggccgtgtggcgatcgcggcgtcgtcggtggccgtggtggcgccgtcatcgcaaccgaacctctcgcggctagggttcttcctaataagcgaaaaatcccttccccaatttataatagaaatggaacaaaaccctaccttctgcatcctcaattccccttacacctctcaactcttgcacttcctcgatcttcc

SEQ ID NO: 89338 - DNA, 145 bp, Glycine max
cgggttgtttcgttgttgtggatctatgttgtatcctctttctcccacaaaatttagtgacatactgaatttggtctgatatgacatgattttgattttgctgagtctctgattggtactgttgcatggacagacgccaactgct

SEQ ID NO: 89339 - DNA, 268 bp, Glycine max
actcgagccgattcggctcgagcacacatcaccaagctgtatcaagaccatcaatccctcaacaactccaccactagcagcaacactcgatcctccagacaagagcaaaactatccacacccacaagaacacgacgaagaatgcttcaactttttcatggcagatgaagacttatcctcgtcttcttccaagcactactatccctatcaaccccaccctccctccactaccgaccattccttctcccccactccggcgtcgacgttgt

SEQ ID NO: 89340 - DNA, 263 bp, Glycine max
cagagatatttttttattataaattcaaactaataataataatgccttcttctcttcactttgataggttcaatcctatcacccacgccgccaccactgtcgccatcgccaacggcgtaaactgtccgaagcagcctcaagcgccgccctcttccacggcggcgcgtcgcctcgtggttccctctctctcttccggcagagcaatcgcggcccccgacacggtggcgctccaccacgcgcacgtggtggccccaaccagtgct

SEQ ID NO: 89341 - DNA, 264 bp, Glycine max
ccagttctggttcctgtcaacgccacaagtaccgggctagaaagtgctggtctggacaacataacttcgagtgacattgataaactctcaatttcaaatgtccatagtacatctgaaaggtttctaaaccatcatgctgtgctgttacagttttgctgctgaatctttgtgttatttagtgcattagtttctaatccaatattgtagctcagttggcaacatgtgctgagtttgtggagaaggacctggttcgatactcgcaaa

SEQ ID NO: 89342 - DNA, 116 bp, Glycine max
ctagatcgcgaggttcgccctttattattttgatgagtactgtaccttgtttagacggtaagaagactctgagatatttcgaattccacaagcagctaaagggttttagtccattc

SEQ ID NO: 89343 - DNA, 251 bp, Glycine max
tctaaatctcgtccagtactgttgaattaataatattatcattcttacaatatgaaggtatagtctgtgtaccaatttgattagaacctctcttccttctttagataaatgttttccaaaccaatgatgatttttgctccaaattctatctctcaagtagacaaaaatagattttttttcttcttaccaatcatagaaggaatgccaagttattttcttgtccctaggcactctgttactcaatttagttg

SEQ ID NO: 89344 - DNA, 256 bp, Glycine max
aatcgagccgaatcggctcgagcggctcgagaaggcatatcttgcactgagctcctattggaatctgttttggtgacggaaaaactgagcatgaaaaccagaaaggaacttctactggatttaaattaatgctttctaagctcttcccaaagctagtagaggcattttctgacaagggaattgattgcagccagtttgctgagatgcataagtaactgtctgttctaccttgttgtgaataacatccagcttcctg

SEQ ID NO: 89345 - DNA, 221 bp, Glycine max
tgataaatgaaaatatggatcggttgacattcacatcacttgtccataaatgggttgtatccccaattccccattgagcgcatcggaatcaaagtgtctctctaacctctcgtaaagtccaagggtggacgggtttaactggctagggttttgtcctcaaaattaaaactgtggaactttggttgcaaagtcatagggggtaagttgtgtttgcatggaag

SEQ ID NO: 89346 - DNA, 254 bp, Glycine max
aaagaaagaaaggaaaagaaaagctctcttctttgaatatggagtttggttcagaaagatctggtcatgaagtcaaggatgagaagagaagtgaatctagtgttggagatgaagaagatcgtcgtgaacaagagattgttacgcaggagccacccctgtctactaccgaaagatccacactggatgctgggccaaatgcttcttccctaaccaaaaaggaagaggctgttgatgaacttaagttgccaaagccg

SEQ ID NO: 89347 - DNA, 259 bp, Glycine max
aaacgtgtgaaaatgggtcacatatatggcacggaatttaacggccgattgagcactcatgacagtggtaatggtaatgccaccaggattgaggactctaatgctgttactggcttataaacatcctttttttaactagataacatggaagaactagatttccatggtgcagatgaatacataaagttataaagttatagaaaccatttttcttattcatttgtctgataaacttcagctctacaaactataggctcta

SEQ ID NO: 89348 - DNA, 103 bp, Glycine max
cctgcgtcctcaaaacgcctcaaggtgaatccagaggctcagccaatgaagggaaatctgaacaccgtgaagccgaaaatcccccagatggtcaattttggtc

SEQ ID NO: 89349 - DNA, 223 bp, Glycine max
  unsure (1)..(223): unsure at all n locations
ctcttccattcacaacctttaacctttctttcttgtaaactttatctgattgattctgagaatagaactaagagggtatagacatggctagcgcaattgcagcttcttttttggttctgcttctggctttcccatgtattggagctgacatgagttgtgaacagtggtggcctcgggttattacacactggcctggganactcacagtgggcacttgggtcag

SEQ ID NO: 89350 - DNA, 233 bp, Glycine max
  unsure (1)..(233): unsure at all n locations
ctcgagccgattcggctcgaggcatggtggaagctagagtaataactgcngaacatggtcaccgtttctgtgggggctctacccaggttctcatgatgttcgatttctcttattcttacccatcttcttataataaatatttatgatgacgtgtttcaggttctgtctcagacggagtcagtatataagacacctgctttctaacggtggtggagcagaggggtgtaggttca

SEQ ID NO: 89351 - DNA, 251 bp, Glycine max
cctcgagccgattcggctcgagatttactcatgaagttgtgctgtaaccaaattctgttattacctttcctgcatctggaaacttggattacaagttgtgttccaactaaaccggttttgctgtgccaattaatagacaaaaggaaccaggaaatatggaaatgacaagggaaatattataagaaaatgacgatgtaataactacaattcttagttaaactttatgtttaaggtatgtgcataatatgtaa

SEQ ID NO: 89352 - DNA, 280 bp, Glycine max
cttactcaaacagataaaggaattgaaatcgaggctggtgcaagaagagaacaacaacaacactgaaagcgatgtttcggtgaaggaagagatgatagccactctgcaggatagtaacccgctctgtgaatccgccattcctggatcggactcgaaggagttgagttacgagtgtttcaacaagagtgatgaggtgggagggggttctgtgttccctgtggatttcaaagatgggtcttctgatagcgactcaagtgcgatcttgaacgaggagaacaac

SEQ ID NO: 89353 - DNA, 280 bp, Glycine max
gagattagagaaacaactatggaaggagaaaatggaaagaagctgaaaatattgtgcctccatggattcagaacaagtgggagttttcttaaaaagcaaatcagcaaatgggatccttctatattcactcaatttgatatggtaattaatgtttttttttaatgttcaagtttgtgcatgcatgaagcatttttaaccttaagcctgttgttcttagacatttcaaattcttccttttattagtgttagtgctgattagcccttgttcttaataattgct

SEQ ID NO: 89354 - DNA, 278 bp, Glycine max
gggatctccgtcaggttagaaacgccgttttgcgccaaaccggttttctcgattgatttaatataatttaatttaatttacctttttttttctctttctattttgaggtggggaagttaaattttgatagcttctctgcatcctgtgatagcttctctctatgtaacttcgctttcggatgatctttttgttctctttgatttatagaatctgtaaaacgatgtaagttgttggaccaaacttggataaagttctctattttttttttttcattttct

SEQ ID NO: 89355 - DNA, 280 bp, Glycine max
ccacttggcgatcttcaaattctgagagagatggatctggtccctttggttatggacttggtggcgcacttcagatgtttctgccaagagttctcctggttatgttggtggttacactgttaataagaggcagccaaataggggaatcgctacataggaagatcgttttgatgacacgaacttgtaggtgaagataatccagtgaagcaggtgaattgtgaattttgcacaccactattgttactgaatttcggttttaagacgcaagatgtttggtttt

SEQ ID NO: 89356 - DNA, 278 bp, Glycine max
ggaatctcaaaacgacgtcgttgacggttgacgcggtttcgtgtttttatttttctcagatttatatatatagagaagaaggaaaaattgttgttgatgaagagttttctggagagacaactgaggtattggatgagaagaaaatggagaaaatgagattgtattaccaagagctgagtaactcaaaggaagaaccatggacagcttcatctacttctgtagcagatctttatcctgtgggcctagattcttcttacttggagaagagagattaaaga

SEQ ID NO: 89357 - DNA, 267 bp, Glycine max
tttttacttgaaaaaatcattatctgtgtatttaagaccaatccaaaacaaaaaaggtaaacttgtattttaactaattaaaaaaaactattttctctttcacaagttctgatccccgcagagcctcttttctctttcccatcaaaacccttttctctttcacacactttgatccccgttgatgcttgtttcagatctccaatcagaattagcgagacctccgatcagcgatgacacaacaacccacccttccttgcgaaccctcgt

SEQ ID NO: 89358 - DNA, 278 bp, Glycine max
tccctcgagctcgagccgctcgagccgcccaagcccaagttgtctttcctgattgtcatcctcagtctctctgcctccgtcggcgcccgccccttcgtccttatcctctcccaggaagactacaaggacgacccccccgccgatcccgactcgcccgccgagtgggatgagttcgcccacggagacgcccacaaatccgaggaggacctcgaccccggctcatggcgccccatcttcgagcctcccgccggagatccccaacccctccccgaatccga

SEQ ID NO: 89359 - DNA, 261 bp, Glycine max
cgggctatttaagccctttgattcggttttgacaaatctgttggtcttcagtatctggcatatcattgaactccttttgggattggaacttgatatgatcatttgtattggggagtaagaccttgttacttttgcaaatgctaaattttaataggatcagaagtcagcccaggacaaccagatctatgtctttgggaggcatggattacgtggatccaaaaaggaaaggcaattttgttggaaaagtttttcttgctgcag

SEQ ID NO: 89360 - DNA, 228 bp, Glycine max
ggagtttcctgttaatgttactgacaatgagttgatcaataaactttcttcagaaaatgaacatcttaaggaactgattaattcactggaaaagaaaactatacaggagtttcctgttaatgttactgacaatgaggtgagcagtaagctcattacagaaaatgaacatcttaaggatcaggttaattcattggacagcacaattgatgacgctgagaggaaatatga

SEQ ID NO: 89361 - DNA, 286 bp, Glycine max
ctttgttgctcgtctagggactaggatggagtatttacgtttaagcctgtttctgtgcatgctgtcactgtcagcgacttcgccttcttccttcgcatcgccaaattcgatccgtgccgattatgccgttaatctgaacgcaacgaacttcgatgctgttctcaacgatacccccgctactttcgcccttgttcaattctatgcccattggtgccctgcatgcaggaattataagcctcactacgaaaaggttgcaagattatttaatgaacctgatgcagtgcat

SEQ ID NO: 89362 - DNA, 283 bp, Glycine max
agttgatatagacaccagaagacggggaaaacggagaatttagtgttttccttgtgcaggcaaatccattattgtgaattacttgctatctattgctccaaggtccaagtgggatgaagagtttagcagatagggtacccagcttcctagcaagatccgtagtgcactcgcatctcttcctcagattttgacgatgtgcgtatgtcgaacaccaagtgagcatcaagaccagatccgtggcgcactctcaacactttgcggcgaagtcaaaaccgtttggaga

SEQ ID NO: 89363 - DNA, 260 bp, Glycine max
aaaagacttctgcatacccgttgatggaggaatggatgtattagcatttgaagatttcttgcttgaggagaaacgtaaagaattagaagaacttgcttgggcacaacctgaaagggaaagacaagctgaagatcaaaggcgagtggaggcagacagagctgcaaaggaagaggacagggcacgggcgaaggcggaggttggaagaatgcgagacacattgccacaattgttgaaaaatgctgtaaagtccattgataatg

SEQ ID NO: 89364 - DNA, 267 bp, Glycine max
ctactcactcactcatcagagctatatattaattttcttctaccaaaaaaacgcaaatcaggtgacgttgcactactctgctcactcgctccattgtctatcgattccttcaaatcaggtttttgcattgtgatcatgacattcgttgctgcacactgttctggtcatcaccacagggaattggaaaggagcattggtgtcatcccttgaagaatttgagtcaagaagcaaggggccaacaaccttaagagatattggactaagaag

SEQ ID NO: 89365 - DNA, 266 bp, Glycine max
ctgagatcgacctcgcatcatgtttatggaatggctgctatcttatctcggaaatcactccttgctcttcgttcgcgccaattgtgaagaaaatttgtcttacataaatgccttctgtagatctgcatacccattcaattgatcaactgggttactaatcaaaattgcatagacagaaagatcagcagaccaaatgtttccactcccatatctcttccaagatttccatggattcctaaacgacttgcaggattgggaattttcta

SEQ ID NO: 89366 - DNA, 262 bp, Glycine max
cccgagcgaatcggctcaggattgcttccctccttccctacttcatctatgcttcactccaaatgcgtttcttcacctatgtctcacttaatgattcagtggatgagaaacgacaggcaaacaagtgatccagaatactgtaatgtggtaaggcagcgatcgattagacacacaacagttggattcacagctcgtttggaagcatccaaacgttttgaagcatccagaagagttgaagcattcaatccttttgaagcttcca

SEQ ID NO: 89367 - DNA, 139 bp, Glycine max
atacggtccaaaaccaaatattgaacgactcgtcgtaaagaagcacacctttccctttcccttcatttcatcgtattcgtgttcgcagtgtctaaactaacccaatgctctctcgctctctcacagctcgtcacatact

SEQ ID NO: 89368 - DNA, 139 bp, Glycine max
cagaagatgaagaattgggttcaggctgttaaggttgttgttggagtccttctcagtggtgagaagaggctctgtgatggtttgtttggcgatttggatgatttgaaggagatttgtttcaatgagacttctaagggct

SEQ ID NO: 89369 - DNA, 103 bp, Glycine max
ctaagatacgtgtacacatagcaacagaacttggaagagttttgacctaattaaactgcgtgaagaataagactagactagatagaatattgtacttctgatg

SEQ ID NO: 89370 - DNA, 274 bp, Glycine max
cgagttcgtgttcttctccggtggatttctggaaccatgccttgtgggaaggtccacgcctgtgagctttgctaatcctaagaggccactctatggacatctctcgagcatagattccactggaacatcaatgcgattgacatgggttagtggagacaaggagcctcagcaaatccaatatggaaatggaaaaacagttgcttcagcagtcactacattttcacaagatgatatgtgtagttcagcgctgcctagtcctgctaaggatttcgga

SEQ ID NO: 89371 - DNA, 270 bp, Glycine max
agcagaagttggacaacatttccaatgatatgttatttaggatatacattcacatttaataagaaatgttacagttaaatcacaaacgtggaagatgttttcagtgacactgtgttaggtacatagaatatgtgcacttgtcctaaagctaggttgttttctatgtgcgagtacagtgttgaatcagtatatctagagatgaattcccattttttatgtatatttatcttatccggtgagcgagcgactatttccaagaaccggttgatg

SEQ ID NO: 89372 - DNA, 273 bp, Glycine max
ttcagcttcagagccatactttctcttccctctatgtccattcagcttctcacttcaaccaaaaataaaaacggcaactttgatccaaacctcaccttccctttcttaattgaagaaccttttaaatcccttcttctttaacactaccctttactcttcttaaatctctatcttgataataacattcacccatttcctcacttgtttcatttcttcacattggaggcttagggttctactcattttgatgcttgagttctgtggtttctaagg

SEQ ID NO: 89373 - DNA, 271 bp, Glycine max
ctcatctcctccaaacccaccttccgctcctcccctacccttatctccgccactcgccgcctcctcgcctccgctctcctcgacgacccttccaacgcctacttcgccctcctctcccagcactgcatccctctccactccttcaaatacacctacaactccctcttcctctccccaaccttcgattccgtaaaccccgaatcctcgttccgcttcggcctccgcctcatatacaaatccctcgtcgagatcctctcccacgcgcccaagc

SEQ ID NO: 89374 - DNA, 274 bp, Glycine max
actcgagccgattcggctcgaggaactgctagcatgggctaccaaacttctgtaaatatgtaccctagattactgattttcacttatacagattaccaccaaagtaatcaatgtcttatgttaacttttctgcccatttcacttgcctgtatagaatggtacacgaggaagacaaaaataggtctgaggaaaatatttctcttatttcctgaattcctgttctatatgtaccgtctttctacatcttttgctctttattgtttgatgcaactta

SEQ ID NO: 89375 - DNA, 270 bp, Glycine max
tattttgcagcaagagaaaaagaatgtgccggaaatcacccaacctgtggttggcagaatgaaggagaggttatggtcaaagcaagcaaggtcgaagaagaaaaaggaggaacaatatataactgcagaggagttgttggccagcaagcaacaacaagagttggaggttgttcagaaggtttatgatatgaggggtgcacaggttgaggtattaacaaattggccggatttaaatgccgaggagaaagcaaaagaaaatgatgtcccgat

SEQ ID NO: 89376 - DNA, 119 bp, Glycine max
atccagtaatcatgtctagtggagatggtaaacaaagtaacgatgatgattcaggtgttttctcatcagaataccgtcgcaagataattatagtatcaaattctcttcctctcaatgca

SEQ ID NO: 89377 - DNA, 270 bp, Glycine max
ggatatttcagtcgccgctgtgacttgcctcagatctaggtcacctctttcattttctttgctattcttgtcatcttcactgaccccatttttcccttatctccgttttctagatagagccaaggcatttaccttgtcaattatttggtgctggttagtttcttgaataatcttttgtctgtttttccatggatcgatcataacgaggaagaaatacaaggttttgggacctcttctcttggcttataaaaagtccaaaacaggagcctt

SEQ ID NO: 89378 - DNA, 264 bp, Glycine max
aagcaagggagcaataatataagttggtgtttgcctgtattaaagaagcgtgacattcttacggctggtggtatacttggagctttggcagctgttgctgtagctttcagattttacagaagggcaagttgaaattcactttattctcaagatttagatctcaagggatctgatttagttggttgaaaatgatgtatgattattttaaattttctcgattcctgcgtattaaaaaaaattctcaagttttagattcatggggga

SEQ ID NO: 89379 - DNA, 252 bp, Glycine max
gtaccggtcaccgaatgctaaaggacacaaaaacaattggatctgcttatgaccgctaccttcagagtgggcaactttcttcatttacttctggggaagccagtacagttgggggtcttgggttggctaggggtggtggtggattatcagaccattcactagctgatccgcctgtcatggggcgtcatgggggtggtggtccagatctagcaccaaatggacggggtgttaactatggtggtcagctacctg

SEQ ID NO: 89380 - DNA, 224 bp, Glycine max
cgatgttattgaatttgtgacactatctggagtattaactgccaaaaagattccagccatccatatcaccagtgcctcagactcacaaaacggtgaagctcaggatggattttatattgaattggattttccggttgatcctgttacagaattcagctttgatgagagtacttcactactttctgaggcattgaacggtgcatccataattgttttaaaggggc

SEQ ID NO: 89381 - DNA, 206 bp, Glycine max
cggctcgaggtttcatcaactggaacatttgtagaactaagcctcttctctcccagccgcagtgcaacccctccaggatcgcctcctcttctaggttggcctatgcgatccccaacacaagttattggaccatagaggcaggcgggaaactgaatatgttgggtgaatatcaattttgtggaaaaaagggaaaaaaactgattggt

SEQ ID NO: 89382 - DNA, 178 bp, Glycine max
aaatccttcaaacatcgttttatttttcttctctctaaactaaaaaaaatgaagggcaccatagttctacaccctgccatgggcaggggacacctagtccccatggtagaacttggcaagttcatatacactcaccaccaccaaaacctccccatcaaaatcctcctcccttcgccgc

SEQ ID NO: 89383 - DNA, 265 bp, Glycine max
caagtcttcagatccttctgttactggtgttgagcttgtgcagctaagaaatggtcaatccacaaatgcagagtcatctgcagaaaataatggccgtgataatattactaaagatccattgctttcaattgatgctcgaccttcccgtacatggaactcaatgcctgcaaactccctaactaatgataacctaggtcttcaacgacatcgctcaggaggagagtggggagatattttagatgtcatctcctcacagaaagaccca

SEQ ID NO: 89384 - DNA, 267 bp, Glycine max
aactctctctctcaatctccttaccttgcaagcacgccacccacacactgtccaacgttaaccgatcaaaaacccatctctgtctacctttgtttgatctcaaagttggctctcacaaaaacgtgaaaaaatttcattcccgtgagattctcctccaccgatgcagattgaatttcaggaatcctgggtgtctacgatacaacagtttagatcttttcttctgcaaattttgggcactgcataaggtttggcagtgcccatgatggt

SEQ ID NO: 89385 - DNA, 136 bp, Glycine max
gcgcatttctagagggagaaacaaagccagaatcgattttagagagagaaacagcggagggcgcatgcgcgatggttcagatcgcgaggaggaatacgggacggccgtcgaaggcggatctggcgcgccgtctccg

SEQ ID NO: 89386 - DNA, 241 bp, Glycine max
cggctcgagcaaaaaaagattaatagaagatgcttttgacaaaaaatagggatgatgaatgcctttcttgttcaatatgttttttgagagaaggaggatgagtgttcatgtattaaccagcttgtaattgcccatgtatgaattttgattgaagaatgatacatatggggtgtgatttctttatgttgtttatacacatgaggtttagttaggaggcatttatcgtagactcgtagttaac

SEQ ID NO: 89387 - DNA, 275 bp, Glycine max
caaaggcacactcgcactcgagacaatcacgttcggaagaaccctaatccgaaacgtggccatcgggtgcggccaccacaaccagggaatgttcgttggcgccgccgggctttcgggcctcggaggtgggcccatgtccttcgtgggccaactcggaggtcagaccggcggtgcctttagttattgtttggtcagcaggggaatcgagtcgtccggattactcgaattcggacgagaagcaatgcccgtacgcgctgcatgggttcccctgatcc

SEQ ID NO: 89388 - DNA, 217 bp, Glycine max
tctctgaccttctttcttctcccagctccaatcaccacaatctcggaggcttcgaaagacctcatcatgagtcctactcgtcggatcaaacaggttcttcaggcggtgtgccaaaattcaagtccacaccccctccttctctccctcttagccataatcatcctcaaacaccaatattttctccttcttcttactttaacatccctcatgggttaag

SEQ ID NO: 89389 - DNA, 241 bp, Glycine max
cagaaagagagtgaataaatccagcattgttctgttctctgcaacattctccactctcaaccatggcttcaaagcttttactcatcagtgtcttcgtatttgatttgagtgctcattggactatgccgaggctgatagagcagacaagaatcacagctcagtgttgtcacggaccatgtcaagcgttacaattactgtgtctataactctggtatagcaactggctatggtagtggagcat

SEQ ID NO: 89390 - DNA, 252 bp, Glycine max
caaaactcttgacgccacaaaggaacaacaacatagtactgtaccgtttatgccatccttgcaagatgttaatgttaccatcgataaaacaaaaccccataaagaagtcgtcgctaacctcgtccaaggggaaaagaggaataggaatagcagtttagtgagaattgaagaagacttggctgaagcaagagtagctattcgcagagcgatactaaagagaaacttcacatcagataagaaagagatctttgt

SEQ ID NO: 89391 - DNA, 273 bp, Glycine max
ccgtgatggaagagtggacaaagtggaagccttgaagcactacaaatttagcttagcatttgagaattctagcgatgtagattaagtaactgtgaaatgtctgtacaatgccattgttactggatctaaaggtgtgggtgtgattacagctgttgtcagagataactaagaaagtcttgcacggatactgatatgtagctgggatcaaggaactatgacttgtatcagagctgcagggtcgctccgtatgtatttttaaaatccgaggattga

SEQ ID NO: 89392 - DNA, 267 bp, Glycine max
gttgattattgtggttaggttttcactattcatacggggcgaagaggttaaaaaggcaagagttatttcccacaaccattgtatttttttggttgagggcgatgcgtctagctagctagggaaaattaagctgtaattagctaatactgttgagaatagtaactgctgattgaaattatcttttgcttttttcttcatctattgtatgtttatataaaccgttacagaaggtgttcatctatgaaggaattagaattttttttcaaa

SEQ ID NO: 89393 - DNA, 270 bp, Glycine max
gtggattggggctcagacccattggttgatgtggggctacctgcttgagttcaagggtaaaaatgtcttcttacagctttgggcggcaggcttactgtttctagcagccaacatatttatcctcgtcatgattattcgtcaccataaatatgcttcagttttcaaagctttagaatatgctaactccaagaatgcagctaagcttgaatgatggagagggacatagaagaggaggttaccgtacaggcattctgctctaatgaaataatg

SEQ ID NO: 89394 - DNA, 185 bp, Glycine max
ctcagaatttctaaaggaaaattatgtgcactacttgtttgacattgagttgttgctgttaggatttcgtttcaaaaggatatgcttgtaagttgtaatccaggatttctccatgtcaaagaaatccaaggttgttcctgacatttcgctgtttcgataaataaattatgtggcatctttctatt

SEQ ID NO: 89395 - DNA, 267 bp, Glycine max
taaaatctgtattttcagtatgcacaacagggataggcaatggttcatgcaaatgtaaaaaattgtcttcactcacattatcattctccccctgaagggaatttttttgaaaaaaaggttgatgttctagaaaggtaacatccatgctaacacaaagcttttttgtaataggattaaatactctgtatcccttgtggttggagaatatccaacaaagatgtacttttctgcccttgggtccagtttagaccgagatatggagggtgt

SEQ ID NO: 89396 - DNA, 267 bp, Glycine max
agaacagaggcgtcccacgccgtcttacgtcgctttcaccgattccgagcctttgatcggtgatgtcgccatgaatcccactaacatcgtcttcgtgaggcaattccagctccaatctcttccaatcccttccacgcgtaatcacttgcgtgcaaactgaatttgttgatattggacagttccctcacgtagcaattttgaagatgtaagtgtagctctgactgatatcttgaagctacctctgatggataaaagcaatggctgcag

SEQ ID NO: 89397 - DNA, 256 bp, Glycine max
gccaaggctgctcagagtttaaatggaaaattggagattgctggcaggactatcaaggtttcatgtgtaacagatcatgttgcaagccaagatgcaactgcaaaatctgcagacttggatgacgatgaaggtggattgactttaaatgctcactcaagagcattgcttatgcagaggctggctggcgcagaccctgcaagcataggtttgcctgttgtgaatggctcagttcctgctcagcaggctatcagcttgc

SEQ ID NO: 89398 - DNA, 259 bp, Glycine max
atttggactttttgattgcccttggaattgtgtccatttgtctctgctttggtcacatacacattaatccttctttgaattgaactttctgagctacacgtaagacatcaggttcaagtctaggtcatggggatcaaacataagtgccacaaccataatgtttgctttattttgtggcagtgtttttgtttgataatcctttgatctgggtttaatttcaattttctcgtttgagtttttgtccaccatgtgatgagta

SEQ ID NO: 89399 - DNA, 256 bp, Glycine max
cttactctctttctctctctaaagggtttcctttgttctcttccaacttccaaggtaaccattttaatttttgagcctcattttgttgatgagaaaattaaaaatgaatatcatctggggtacttaaagtttgagactttgaacaatcttctattctgggtgttccacaatttgctgattttttttttggggtccgaaaatgaaaagaaataattgaaagatttttagccttttcgacgttatccatttgtgctaa

SEQ ID NO: 89400 - DNA, 209 bp, Glycine max
ccgctcgagaatcttcagtctcatcgagcgagcacaatactgttacaatgaagacacctgaaacacagggctgctgttgacttggacacccattactctcaagaatatcttgaagaatatgttggaacagataagaggagagccatcttatatcagcaatatgttaaaggtatatcaacaactgggatgcaatctaactagggttccga

SEQ ID NO: 89401 - DNA, 267 bp, Glycine max
cttttgtaagacagccaatgttaaaagctagcctatgtataatttctgatgagggtaagcactttgaattaaaatgtttcagccacacttaaaaggaaccgctcactcaccaaggatgaaattgatgcttactggaaatcaaagaagaagatagaggaagaacaccttagagctatttccaacttgtcagagactattcaggctagcaaaagcacagaacctgagaagaagttgcagaagtcaatgaccatgcctgtgacccgtgca

SEQ ID NO: 89402 - DNA, 262 bp, Glycine max
cctctctctatgcctcaccacaacaacaacaacactcctgcaacgttaccggcttcaacaagggacgaggcatctattccaccaccaacaccagcctttcctcctaccatcctactaaccttaacaacaccgcttttcgaggcctcaacaacggaatccattccaacaccacatcctcaccctatcttaacaacaaccaccaccacctcgacgacaacaacaacctcaacagacctaatctcaagggctacaagacatattt

SEQ ID NO: 89403 - DNA, 260 bp, Glycine max
ccacgcctctcgtaatcctcttcctcttcctcttcatgttctcggagctccggctccactagcggagccccggctcagttcaaacccattttccaacacaacaaaaaaatgataactccattttctctcttccctttcgagatctcgaaaatgtccaaaccctgggccaaggctggcgttggatccgcctcgaggcgatggtttgggtgaatgagtctccggtgaaggcgatggataaggcgaatccgtttggcgcggcg

SEQ ID NO: 89404 - DNA, 289 bp, Glycine max
gaagaacccaacccccaatccaacccatttatgtcttgaatgtagaaacttgatttaggacaagctcaagagcattccatcagtatcttgagccccaaatggagaacacctggatcctgagttttcaccttctcctcctcctgctccatccatatgcagcacaggggccatcagtgttggtgttggtgttggtgtgggtgttggtgttggtgttggcattggcattggcaacagcccaggcccctctggctccactggatccaacctgaagaatgccttcacagcactc

SEQ ID NO: 89405 - DNA, 285 bp, Glycine max
gccaaattcgatttcagagttcggccatggcgctccgacacgactgcagaaaaatttccttcgcagctctcagcgtcgagggccaatcggatccaacggaacgcaatcacaagaagcgcaggcaccgcgcttcgaagaagaagaagaaacttctcgatcgcgccggcgattcctttgatccgcattcggtgccgttggagaacggaggatcatgtaacggattcgagctcgacgctagcatgtatcctgcggcggcggcggatgaagcttcgtcgtgtgcgagga

SEQ ID NO: 89406 - DNA, 276 bp, Glycine max
ctcgagccgctcgagccgctcgagccgattcggctcgagtcgagccgattcggctcgagacccaaatcacgctaccttctctacctggggctcacctgctggaaaattagatacggccataaatggagaagagctgaataagctgaggaatctgcttcctttggatttcgaagcagcagtagtcctctaacaaaggcttcaaacaaaatttcagcaaatgttgatgatgagccagatgtgtcttgggttaactcacttgtgaaggatgctccacca

SEQ ID NO: 89407 - DNA, 281 bp, Glycine max
caaaaagggccagaaacttctcggtcgcatcatcgcgttcagcttcagccatggcggcctagcctaattaattcaaaagtcaaaaccctaaatcccaacccatcaattttcctctctcttcactttaccaatccaaatggcctctagactcccctccgcttcagatcccatctcctccgcaccgcctccctccttcaaaccttgccgccggcgcccctctccctccaccgcctcctctccacttcccgccgcgcgcctccgcgctccaaaaaatcagtcga

SEQ ID NO: 89408 - DNA, 226 bp, Glycine max
ctcgagcagcggctgtagtactttcacaattcatagggtcgaatcagcgttatcgacggacagtgttccgcacgtaaaggggctgcagagcaccgtgccgtcgatgtcagttgaatgcgtcagcagacttccaactcgatatcggatcgccgagagtcagtagtacggcgtaatgcgaagtactcgattctgcttccatgcagatgttgcactgtgtgcggcggca

SEQ ID NO: 89409 - DNA, 282 bp, Glycine max
tgagattttgcattatcttttatcatgttcaattaattgtatgtactttccactttattattcatcacaatgttaacacttttttatcgttcaaccaggtgaccttgaaagtgatttcattggaagcaattgataccagttgacatttgaagcagcttgtacttcattcagttatgacttgttttcctttattattcagtaagtcgtcgtcttcttctgcgagacacgaaccagaaattgatgaaggcattcataatgttaaactctactcctacaaagagc

SEQ ID NO: 89410 - DNA, 235 bp, Glycine max
  unsure (1)..(235): unsure at all n locations
aaatggaagacgtgataacagaagcagcacccccatcaaggttcctggaagaagacctaaacatcttcacacccccatccccagctctccccaaacctttcctcatcttcccacacaacatacgagggggcnngnncngtcnnctcatcancgnccnggccccctcctccctcgctcgctgcaacgagaccctaaccgctaacgctgaggccactcgcctccggatgtctcccgg

SEQ ID NO: 89411 - DNA, 275 bp, Glycine max
ctcgagccggttttggatcctcctttttattccttttttctttacccttttcgtgaggtaaccaacaactcatggcttttacggttccaagaagttaatctgaatgcactcaagaaagaaatgaaggcaaaatttatatagatagcaatggcataaagtgggtggaagttgacatgaggatgggtggccatgttgtagttgacacatgaaaagaccataagaggaattaatcgaagattggtgagagggtagagaaattaaagattttagaacaa

SEQ ID NO: 89412 - DNA, 275 bp, Glycine max
acttgatgtgtcaacatcatcaaggtctcaagaggatgcctagaagactattaggctatatctacattatgatgctgttagccactcccctgacaggtaatgtcgagcaattggcgatattgtcaaacttggggagactcccatgacttctcctggttttccttcttgcaatcctcatgctattcctccaatctttagtgcttgatggtataactgcacttctgaagatatctcagaagatgacaaaaaatgtcgccttcgtaaggcattaggtt

SEQ ID NO: 89413 - DNA, 273 bp, Glycine max
cggctcgaggagaatagagagggtcgtgctgcagctttcggtgatgatattgcaattgaatgccttgctacagagttcaagcgagagatatatgtggttggtgcggtgctggagctgaccactatgagcccctcattgctcatccttccgcctttgtttcccaagaaaaggttgctgtggtactgtgaggtttcgcggcctgcaattttgtggagtagagatcgagtagaattagaattttcttcaccctattttatgggccactctcaactg

SEQ ID NO: 89414 - DNA, 270 bp, Glycine max
gtccatctgacttgcaaactatttacctagattgttgcactagtgggtgactcaaaattggcttccttcaaattctgtcatagaaaaaagtccagcattcttcaacaaaggagatatatatattttagagacaattcctggcctcccaatgcttaccaaggcaagttacatgtttgatgtttctttcacttgttctattatgtgaatatatacataggctctttttggataaattttccagtacttacagaaaaagaaaattaagaaggt

SEQ ID NO: 89415 - DNA, 271 bp, Glycine max
gttgaacatgattgggataaaaaaaaactcaacaaccactgttgctgtgaacctagcaagtagataacttgtaccaatttatctgtgtgtgtgtttaggtgggcaattttgaaatccaggcgatagagaaagtcccgtagttcttaatttgtgtagtattttatgttccagtttagggtaacagtattttgtgcgtgttgctcattggttgtctaaagtagtagaataaggatttattgtttcttgtcatgagttggggaatatacctatg

SEQ ID NO: 89416 - DNA, 273 bp, Glycine max
ctttgttggttgtgaagtgtgtgtgtgattctgggttgtctgaaattgtggggtgtgtgtgattcaatcgaggagtgtaattgtgatgtgctgggaacagttttcgattgaattggtttttgggcactagatagcaatggccacggtggagaggatcctgttggcgctgcaaaatgagggtgcaggaggagaataccttgttggggtcaatcaaaattgctgtgatgcccatagttaaagtgttcaccatgtgctccttgggactccttatgg

SEQ ID NO: 89417 - DNA, 274 bp, Glycine max
gccataacgcataagccatatctccttttcccttctctttgattatctttcttttaaattcctgtttggttcaaatatagaaaccagaagaggattagtaataatcattgacaattgtagtgaagtgatgtcaatttcaaggtctcaagtggggtgtctattgctgatactactaagtatttcggttttgaaccatcaagtattgggtgctcggtatgtaaaagaagaagtggaacatttgctcaacaagtctgcagtatggaggaaaagcttt

SEQ ID NO: 89418 - DNA, 274 bp, Glycine max
gacagatcttgctctttcatcttttcaaatctgtcgccttgacttccctttgctaaaacacaccatccgctatggctgagcaaaataacaatcgggtgagttcggtcggttgatcgggttacattgggcgggctcggtttggacatttgtttccgtcgaaaaccaaacccgcctgtaataaaatattaaaaagttcaagtgaacgtcagaatttcagaaagtgagttgtagcagtcccgtcccctcatgtctccatttttgtactattataata

SEQ ID NO: 89419 - DNA, 269 bp, Glycine max
gctgctattgaggctgcgacatttgcccaacagtatgattctgtgggatgggctccatgagactacaatccagatgccaaacaatctactggtccagaagttggtgctccacaatcaggctttgtttgggatgaagcatcgggctattactatgatgctgcttctgggttttactatgatggaaatactggtctttactatgatggtaataatgggatttggtattcatatgaccaccaaactcagcagtacacaccttgcactgatca

SEQ ID NO: 89420 - DNA, 272 bp, Glycine max
cgccaaccttttctcttgtcactctctacaaccttttctagcattgaaaattcttttcagaatcccccctgcttgtatcaaaatgttaaacaagtatgtccacacgaacaaaagcaatgcctagcatctggttacccataattatcaataagcttgtaagatgtaaccattttctatgtgcttatactgtgataaagaaaaagaggcaaataaattcaattgtttgccccattaaagaattaggcttgtttgcaatatttgatggccactta

SEQ ID NO: 89421 - DNA, 293 bp, Glycine max
gtggagaagaagaagctcggagtcgaagaagacacgtcacaagagtgtaagtaagcaatagcatgaattcggtggcgatgacggtggcgtcaatgttgttcgccggcggctgtcgtatcctcgccgtgcctgcgcgggcgcgcgccatccgcatcccgcgagcagctctcagcagtcaccacaacaagcacgctccgagttggggctgtcggagttcacacaacagtaacactgcactcgccggtgaagccgaattctcaacaaccgacgccggaaacttaaccgctacctct

SEQ ID NO: 89422 - DNA, 290 bp, Glycine max
cttctctgcagaaaatcgaatcaatcgatggatgctttaatttcgtgtggttattgaggaaatttcatatccgcaagggcagagagtagaaggaagaagagagaaagagggaaggtaataacaaatccctcgctagagcctagaactagaattagattctgcctgtgatcatatattatattacgaaattcaattgcagctgctgctgaatcgtaatcgatcttatatctacactctaccatggacattgatgatgatttcacattttgtcaggtcagtgcacctgttga

SEQ ID NO: 89423 - DNA, 293 bp, Glycine max
ctcgagccgctcgagccgaatcggctcgagttcaaacaaatctcacttaattaccttttttacaaacaaaaataaggtagatctaaaaagtagccagtgcaagattttagaattgacagtattttcttataattttgctttaatgttctgtaggtgggaataatgacttgacctttcaatctagaaaaaaaatggggatactttctctgcaaaagtggtagctggaaaatttctctaaaggttctttatgtgcttgcgaggggcatgcatgtcctcttgagcctaaaccaaat

SEQ ID NO: 89424 - DNA, 286 bp, Glycine max
cggtggcgggaccggtggaggagatgttggagtggctgtcgccggtggcgcaggacacgatgcggtggcaggtggagaggagcatggagacggggaggtttgaggcgaagacgacggcgttgctgctgcagacgctgcattactccgacttggagaaggcggaggcggccattgtggaggtgttggtggggttgagttgcatatattggtgtgagagaaggtgaatttagaatggagaaattttattacatggattaagaacacacatgtttatgatcaggactaa

SEQ ID NO: 89425 - DNA, 298 bp, Glycine max
  unsure (1)..(298): unsure at all n locations
gaataggctctagcacacattgcagaacttactttcgcaatattaatatgttctacaaattggactaaccatcattaaggcctctccatctccaagtcattcttacaccacgtctttctggtcatatttatgatgaaatttaaaacctanaaaaataagataacatgtcatgcatggataaattaggaatgcttggcttttatcgttttgaataaattacgaatgctaagattttattatttaaataaaataggaatataaaacctgggattaaggaaaagattagtcaaatcctgag

SEQ ID NO: 89426 - DNA, 284 bp, Glycine max
aacacagtttgcttatctggctaccttttgcactatgtcctgactcatactcaaattcaaggtgcctatgttacttatcttggagtttctcttgcctgcatgctggtgtttttcattggtttgggaagaatttatcttggcatgcatagtgtggttgatgttcttgctggccttcttattggactcgttgtccttgcattttggcttacggttgatgaatacatggacagttttgtgatctcaggacaaaatgttacgtccttttgggctgccttgagctttct

SEQ ID NO: 89427 - DNA, 283 bp, Glycine max
cggaatgttgtttcaggtgatgaagtttgaggatctaaaggcacttggtagtgagtcagctgtgaaggtatgaatttattcttttgatgcaacgtattgctgttgcttcctaaaatgttgtcacagtgaccagcatcagattgataactgggtgataaaacggagaaaaatagcccatatttttctagaatttgctggaaaagtgaggaaagatcctcactcacctgggtaagtcgagatagaaattcaggtctaataccttaggttaatttggctaaaatat

SEQ ID NO: 89428 - DNA, 286 bp, Glycine max
acaaatattaggttggttgcaccagagtctggtaattatgatcataaactcccaataggcaaggccatagaaacaaagcgattcgatatctgtcagcctacgtcacatatgggatttgagaaattctcttttgttccctccgatgctcattcggtttcaggtcaagcacacggaagaaatccagttgtggagtctcttccccaaagcaaagatctaaaggatgtcaatgaattgggtttatgttgctcaagaagtacagatgatcagtcagtgatgcctgggataa

SEQ ID NO: 89429 - DNA, 285 bp, Glycine max
ctcgagccgctcgagccgaatcggctctagtccgggtgatccctccgagaatgttcctcaatacccatccgtacacaacatcgcaacaaagccactcataaccactcactcatccctctctcctgtcaccgctaccgcatcactcgtcaagaagccgtcgtctcctgctacggatgcttgggcatcatttgcccacgcatccgtaacaacggagacggcggccctgaatttggaggacgcggacagctgttcgcgtcggtgtcgacgcgaaaattgctccagtcc

SEQ ID NO: 89430 - DNA, 265 bp, Glycine max
ggaggatgctgaagagaagaaagaaaagaagaaaaaggaaaagaaagacaaggatgacaaaactgatgtagagaaggtcaaggggaaagaagacaaagagaagaagaaaaaggaaaagaaagtcaaggatgacaaaactgatgctgagaaggtcaaggggaaagaagatgatggggaggacaatgaagagaaggaggaaaagacaaaaaagaaaaagaaggaaaaggatgacaaaattgatgtagagaaggtcaaggggaaagaa

SEQ ID NO: 89431 - DNA, 247 bp, Glycine max
ctcagctttgctgagtactaggctcagcaaggacttgcagtcaccagatcagcagccaaatacggtggatataaactcggcaatttataatgttggaccacctgtgccaacaagagttccaaaaatgcttagttttgtggacacaccggccatggttaggggtcctgaggacctaccagggtattgggtggtgactggggcacactgtgtgtcgagggtggtagaatctcaatcacggcaaagtctt

SEQ ID NO: 89432 - DNA, 253 bp, Glycine max
tatcaaagagagagagagagagatgactgagttgcaaaggttcgtaacatcattcagaagacaagggtcttcgggattggtgtgggatgacaaattcatcgctgggattgagaatgaaaacaaacaagagagtggtgatggatcaagagccacgttgcagcgaccttatcggacggtcaacgttgcaccacaagccatggaccctccttctcccaagctagcaacttgtggcttctgtgctctctttcggaaa

SEQ ID NO: 89433 - DNA, 257 bp, Glycine max
cttaaggcgaagaagaacaatggttctaaacaaatttgtgggaacataattctgagttcaaaagaagtggtgtgcaatgctgaaagttgtcacagtgcagatgagaaacaaatttcagacaatagtgagctgaagaaaactaatgatgcgccacctaaagggaagagtgaggaggctgaaaataaaatgaaagacagccaaaatatgagcactggtgacaaaagtcctaatgaagagtcagacggtaaccagctgaa

SEQ ID NO: 89434 - DNA, 156 bp, Glycine max
tgcatttcacgctttggctgaaggacttgcattgggagtggctgcaccaaaagcatacggacttggtcgtcatatggtccttccagtctctctacacgggcttccccgaggtgcagccgtggatagctgcatatttggagccactgatagctggct

SEQ ID NO: 89435 - DNA, 155 bp, Glycine max
acagctttcttctattgagagacagatggaagttccctatgtttgcagtgtgatatgattgatcatgttggaggaaaagaaagcatggaagatctcttctgatcaggcaaagagttgagtttccaggagatcaatctcgtcatgatgaaaatccg

SEQ ID NO: 89436 - DNA, 143 bp, Glycine max
agctcgagccgtgaagaccgacgtgtgcgccatcatcgacgatctgctcgacacctttgacggcccactcgacgaagagatcgaggattagccagccagatatcgcgaaacgatgaagcaagatgcgttggcacgattgaagc

SEQ ID NO: 89437 - DNA, 158 bp, Glycine max
agcgatgaaggaggaagaagtagtggagatacaagttcagtctcatagatggatacgacatcggaccaatacgttactccccagactcagccatcgaactgctcgaggaccgcatttttgaagactggaccaaagacaagaagattatacaaaaagca

SEQ ID NO: 89438 - DNA, 157 bp, Glycine max
gcagaagcttgtgtgtattatacccaataactacaccaccattgtcaatctctatttcgattaaaaaggttgtggccaatggagcggtattgtgttttcatgttaagaacgatatgttacacaggaagtcacggtcagagtttgtaatggagaaagt

SEQ ID NO: 89439 - DNA, 158 bp, Glycine max
atctagcatgagaactccagggccatcttcagtcaccaaggatgctagattatctcaacagggttcccatgcacaagggtgggctggacaaccatctcaacaaccaaatggatctcgcgggccagttgcctgggcaaaccctgtaaagaggctaaaaa

SEQ ID NO: 89440 - DNA, 128 bp, Glycine max
tcggaacgcgccgctcgaggtctcactggtgaccggttccacattgctacatgtggtgggtggggtgcatcatggcggaggtgactattcagggaaggaccctaccggggttgacagtcgtggtgcct

SEQ ID NO: 89441 - DNA, 131 bp, Glycine max
cttcacaatcgcaaatcttctatgccaaatcgtagatctacggaaaaatacgttatacatcggagcttacatgtcaaatacgaggattcccagatctgaatatacatctttcggcacacccgagtatgtcc

SEQ ID NO: 89442 - DNA, 152 bp, Glycine max
ggctgctggtggttccattcccacacaatagagtagacgagtgataaaaactcgtgaagcttctgatcggagctgctgatttcgccctctgtttatctttccctggattactcgttgagaattacgtccaaggtctgaacgatggattatgg

SEQ ID NO: 89443 - DNA, 152 bp, Glycine max
atgagcttgaagaactgggtagatttctgatcagagactgatttgtttggatggcaagtgcttgtggttgaagtcgaccattggaaataagttggtcagcaggagtgatcttgattggattgacagcagaattcaagtttgctttagtgctg

SEQ ID NO: 89444 - DNA, 151 bp, Glycine max
aagagctcaagtgaaatcattggaagaacttgtcagcaaacttcaggctgatttggttggtggtgctaacaaaaatatgttaggtctagtcattgaagcagaacctgaacttgcaccgaaaaacgtggaaaatgaggagataaaccagctc

SEQ ID NO: 89445 - DNA, 131 bp, Glycine max
attatggcgtagagcgacgagcgacacgggtaaacacgcttaactcattcagcaatgcacgaggatccactaagtggtgaagatgaaaaggatcctaagcacaaccacacagagggagcaccacaaacaac

SEQ ID NO: 89446 - DNA, 151 bp, Glycine max
attaaatccactttgaacctgtaccatgtctctcgttaaacaaggcatttcaattatcgtgtcttcttggctctctgtttagggttgagtatgaagttgaatattgcagcactggccaaaagaatggtaatggctgtcttgatgggaagag

SEQ ID NO: 89447 - DNA, 150 bp, Glycine max
cgatgatggtatggtgttggatgaaggggaagatggatttcctgttcaagaggaaaataaatattcagaatttgatggtgatggagcttctcttagattgggagattctgacgaagaaactgacaatgattcagtgatgatggaagtaga

SEQ ID NO: 89448 - DNA, 149 bp, Glycine max
gttgtacgttccgacaataataacaaggtaaatagtgcataccctgatgaattccatggaagtaaaggtaaaattgtcaattgggtgcctcagaggaagatattgaaccaccctgccatagcttgcttcattagtcactgtggttggaa

SEQ ID NO: 89449 - DNA, 152 bp, Glycine max
gtagattttgcttataactggctttcaggttatgagggtggtgtcatccaagcttctgagttccgtacttatcacacaccagttaatagacaagtatgcagtgtgataagtgatgatcttattttcattgctttggcatatttctcttcata

SEQ ID NO: 89450 - DNA, 106 bp, Glycine max
atgacgatttcatggctctggtatatgttacaatcaatgtgtatgctgaactcgcctctagtgctctgtgcatcaatggaattagctttgcactaggagaagttag

SEQ ID NO: 89451 - DNA, 203 bp, Glycine max
gccccagctcgagcgattcggttcactcacgctcgagccggaataatcggttacctccccacgaaaatactaaatgcaaaccctatttgcaaccatgtgaaggctcttcaatccagatcctcacacaagggaagctaagtgccccacgtatattaagagttcacaaagttattaattatgtaatagagaagatggtgcttgac

SEQ ID NO: 89452 - DNA, 202 bp, Glycine max
tgaaatggtactgtagctcagtcgactttcaaaaggcagaagattaattaattttctgcaagtgaggcatgtggggattggggaccgtactttttccaatcaaattacacgtaacttgacattgacgccaaatccaagactccttggaagcgtagttttcttgccactagcaattggaatgatataaacatctctccatttt

SEQ ID NO: 89453 - DNA, 204 bp, Glycine max
aaaaagtcttaatttgtttcttgttttctctgtcgtttcgttcccttaatctttgatctctgagttacaagttataacaaaagaaataaacaacacatataaatatttgtaagaaaatatatatatgatcatgggttttcttcacaaactatgggacgaaacgtagtcgggtccagcaccggaaacgggtctggggaagctccg

SEQ ID NO: 89454 - DNA, 203 bp, Glycine max
caacagaatctactctctttttttctaccttagattccttctccaacaatggctctcgccgtttccactacttcttcctcttaagcagctgctgcagcttctagctccttcttctctcgtctcggatcttcctccgacgcaaaagcttctcaaatcggttcgtttcggtttccggagaggtcgcttgtttcgtctgttgttgt

SEQ ID NO: 89455 - DNA, 127 bp, Glycine max
tgagtaaaaacctcaaactaagctccaaacgcttctttcgtaaaaaggaaccatttttagtctaacgctccgagccgccttctttcggatacggatcctcttccgttgactattcgacataacataa

SEQ ID NO: 89456 - DNA, 201 bp, Glycine max
cagatttcggtcttgctagggagggcccaacgggtgatcagacccatgtatctactgcggtaagttgaagtcctataataaattttcactactattcaattatatgacttttcacatatgctattattcgtcaccattccaattactacatttggtccctttgtttgatgcatgaccaatccctaaagccgtaatttaagc

SEQ ID NO: 89457 - DNA, 228 bp, Glycine max
  unsure (1)..(228): unsure at all n locations
ggtcaggacagtagcacataatcttcttctataacatcgaccggacacgtnctctcgaaaaatgctacctctgcgtccacaatcacaggttggagcaccaaaaacatcactgtctcttgtttcctcagaccccctcctatctcctgatgaacctaggcaaaactctgaccaatctccgtgaatctcaggccgaaagtcgaagtccagaaacagcttggccaagcactt

SEQ ID NO: 89458 - DNA, 258 bp, Glycine max
cgagtaccagagcaactttattcaattggtgtgcatggtggagctatcgatctctctggaaacaaaggtttgtgtggtgtaccatctctgccagattgtcctatgttttgggagaatggaaaactatctactcagggtaaaattgcaataggcttgtcctgtctctttgttttctgtgtgatactgctgctggtctatatttacattaggagaagaaggaatgactatgactttgctctacctcatgaattaacatca

SEQ ID NO: 89459 - DNA, 267 bp, Glycine max
caagacggtccagtgatcaatagattgccagtcgtcgtgtacgcggaactctccaattctgtttgagcctctctcgcgcactctctctctctctctctcatacacataaaacacacacatatcatccatatactttcctcatcatgtctggttccatcaatccatttgatgctcctgatgaagaatatgcaaatccctacgaacctcctggaggatctcataaacttaactctatatcgacatatggtcgtgtagcatctgatgcta

SEQ ID NO: 89460 - DNA, 261 bp, Glycine max
cctcgagccgaatcggatcgagatttgagtttgctataatcacacgctcaaccacttagtcaaaagccttatctgagtttacctctgtgtctctcggcgcatcaaccctatctgtctgccgttgcatcagtaaagtcatcttagatggttgaacaagacttcctcagcgagcacatgaacgcctcactctcaagactgacattttgtatgagctaagctgttatacggagaacgatctcacgagttacatcgacagagtcg

SEQ ID NO: 89461 - DNA, 252 bp, Glycine max
atccagttgacattagtattcgtgttcaaaggcgcagttcaaaaatccttctacaattcggtgatcatggctgaggtcaaggttctgcaacactgcttttgtcgcagtgggcagcctatgcctttagaggaactttatgtctgccgtgaatgcgatacttttgttgctccttttgtgtaaatcaagagatcgaatcgtacttctgcacgaactgtctggaaaatgttcttcagtctgaggcagcactattat

SEQ ID NO: 89462 - DNA, 255 bp, Glycine max
aaagccatagtttgtcacttctcttcgccttttgctttgcaattgtcaccaaacaattcttgcttagctctcacaagcaagcattatcaacaatgaagaaaattgtgttaaaggtggacttacatgatgacaggatcaagcgaaaagctatgaagacagcatctggcctttcgggtaaatcaaaattttcaaccctactacaactttgctttgtttcaagaagccaaatagccagtcagctgcagcatcaaggaa

SEQ ID NO: 89463 - DNA, 235 bp, Glycine max
tgctgttccccaactccatggtaatagaagggtattgccattgagagcatctgccatagtgtaaagtatatgtagaccagtgtcgttgataaacacggtgcacaattgattgctgtcgctattcgtgctgatgcaagaacatgggactcacatcgtattgcatccctaaatcgtaccactgctaaaggtgttgtgcaacatgatataccgtcctttgttcagttaattcgtttaa

SEQ ID NO: 89464 - DNA, 225 bp, Glycine max
ctagctactagcatcttcttgcatcagcacattcatgttaatgaggattctctaggggtggtttccaatcaatatcccgtaattttgtctccagtgctttccggttcaatcaccaatgcatgagtgaatttgttaatttcgtaatccaataacagcatgatgacacatgacacatcctccgtttccggcgggggaatcgtgtgtgtgaacggtgccggcgggttc

SEQ ID NO: 89465 - DNA, 235 bp, Glycine max
acccaacacatcaatagtatagcatgtgttttacaaaaaatctccccatcaacctagcattaacaaaatctcctccacggttttgtttctgtcaagactacctcctctaaaaatacatgcacctagcttgtgttgtttgctttgatcccccaataagactatgttgctagaaatgagcttgtggattttctggtagcactgtcgtgcgttgcagccaggaataacaatcaaacca

SEQ ID NO: 89466 - DNA, 236 bp, Glycine max
gcatgggcctcctcacactcttgagcgacggcaccgttttgcgttccaacatcaacttccaagaacaacctcaacccacccaacacgacaacctcgtacaattcaaagacttcctcttccacaaaaaattcaacctccacctccgtctctacaaacctaaatttgacgacaacattaatcatgatgacgacaagaacaacaacaataagtcgttgcccgtggtgatgttcctccac

SEQ ID NO: 89467 - DNA, 113 bp, Glycine max
cgagcttctgcaacaaggcacaaaagttatacacaacgtcaaaggaattatgggttaaagtgcaagttaatggagggcattcttgtagcggactgcatggagagtcgcagtgc

SEQ ID NO: 89468 - DNA, 225 bp, Glycine max
caaaaaccattcaattcaaagatagtaggctgccaggcaccgcacaccgccaccgcactttctccgatcctcacaattttgcctccggcatgtctccggccgccggagtcagcgtccccctcctgggggattccaaaggaacgccgccgccggcttccgtccccggcgcggtgttcaacgtggccaccagcatagtcggcgccggaatcatgtcgattccggcga

SEQ ID NO: 89469 - DNA, 224 bp, Glycine max
atatgcccatctgtctaatcttatccaaaccacccctacttactagaaatcgccactcttgcattgtttcctccttgtactgttgttgtcatcattcttagttttatcagagggctaaaaggggttttcagtgggtctcagtataagtagtggtgctttgtacttgagtggtggtattattggcatgtgtctgttttttttttatctcctaggttatgggtggt

SEQ ID NO: 89470 - DNA, 265 bp, Glycine max
ggccagttggggtccttatgtgatactttaggtaataatgagcattatagaatttttatggaaatgcattttaaggaaacaagttgagaaaggcttggctgttatacttggtatcatgtctgtagcaattcttttagctgaggcaactcttctgcctagcattgatctatcgcttttttccattcttataaaatcggttggaacacaggaggtccttgtgcaggtgtttgcttttgttcctctcatgtacatgtgcatctgcaca

SEQ ID NO: 89471 - DNA, 109 bp, Glycine max
caaactgttaagtgttaacaaacattgctaaaactaaatgttatagttctgattctgatttctcactagtaaaattgaggatcggcattcagcaatgatgaattccaca

SEQ ID NO: 89472 - DNA, 267 bp, Glycine max
attcaaatcagtttcctcaaaatcgcacccactttgcttcgcatcacaattcgaaagaaactggtttcgatggtgcgagctccggatccgcagcatcgggaatcgaacacgcccttagttcttgaagcccacagaatggggaatcaagcaccccattggtggtaaatcaggtacagggagagggtttgacaaatgatgggcttattcctcagatattttcatctatgccagctctcaatgaagctgcttcttatcttgcacaaacaa

SEQ ID NO: 89473 - DNA, 272 bp, Glycine max
tgttgcagcaacacgaactctccagatgagttttgttttaggagttggattgtcttttgcagttggatttggattgtactttggagctggaatcttctccaaaagtgttcttgttgtgcacttaatcagaataggcctcccgtttgttgctgccacacaaccaatcaattcattagcctttgtctttgatggtgtgaactatggggcatctgattttgcatattctgcatactccttggtcaccgtgtcattggcaagtgttgcttcattgt

SEQ ID NO: 89474 - DNA, 274 bp, Glycine max
cacttccggtattgttctctattttggtgacatgttgttgcttactattaaaaagttacatgaattattgatgtcatcagagttagttactgcagaatatgaaataagtagaagtgagataagcattataattcaggggcttgtgcttggtcttctgctatatccaatagctttgaaatatattctccaaatatgggagtggtctataaatacaacttctgctgaagcaagaagatactatgagattgggaaatctcttatgtttgttgcttct

SEQ ID NO: 89475 - DNA, 273 bp, Glycine max
gcaactttccacttcatccaacacatctcataagatagtgaatatttctgttaatgtaaatgcatggaagccaccacaacatcaggaaccacgagaggttacagaattagatggtaatagaactttttacaatgaaagagctcccagatctagtacacggccagtgaaggagaatgccaacactctaaaagttagtaatgggaatgcaaacctgctcttgatgttcagaagagtttagcaaggctcacttaaccgcttctggttctaatgctg

SEQ ID NO: 89476 - DNA, 271 bp, Glycine max
ctcatcctgactctgaaacacaaattggagcacatagtgtcttctccatggtgcttatgccatccatgtgttctccttggttagaccccaaaacaaagattgctcagaatgacaacttctccactcagcatgaaactctttctggagctgaaaactcgaatgggaaattggaagaaggaaaggcaatagccagtgtcaatgggaagaaatatgtgattcatccatatcgtggctacagctttactccgaagctaactgatggagaagatga

SEQ ID NO: 89477 - DNA, 271 bp, Glycine max
gaacaattcaatggagcttgtatcccccagaataaattcagaaaatcataatctgcctcagtcaaactggcactttcctggttctagggagatgtcagatgttggagcaagaaaacctgatggttatgataatttgtcacaggatcctcatcaaggaggtattgttccgcattcacactctggagcacatggaccttcgattccagcaccacaacaaattcactcttctccgtttggtcggcctgtttatgttcctcctaatggtccatgg

SEQ ID NO: 89478 - DNA, 202 bp, Glycine max
cttaaataaatgtcttcctagcaagattagttttagatgcagtgatctaaatgcaattcttctcattgaaattaactgtgtttgccggtgtactgttgcatagttgtttaataccagtttttggagggagaggagaggggagtacaattgaattttgctctcggaaagatgctaaaatttcataatggaactgaatatcatt

SEQ ID NO: 89479 - DNA, 209 bp, Glycine max
tctgggaatagatctaaatgagacacaatggaaatgcttctatactgtgtgaaactgccaggttgctacaagacttgctcagtcagatcgagtccctcaagacagagcatgtcactctgttgtctgaatctaattatatgaccatggagaaaaatgagctgaaggaggagaattgtagcctagacacccaaattgagaaatttcaaggt

SEQ ID NO: 89480 - DNA, 178 bp, Glycine max
tagaaaattaaaagaaactagaggaaattgaaagagacaggaagacaggttgatgatggtggagctgaaacatctctatgttctactgtggacaaccggctgtggatctattacactgttgttgatcttttcattcattatgtatgaaattatgattataaaaatgtttggtttgcag

SEQ ID NO: 89481 - DNA, 278 bp, Glycine max
gtccaagttttttgagctgggtctgaacaaatccccagaagaaaagaatggggggaaagaatctatacctagtattaagctatcacctcctccagcaccactttcacctgttttcggcacgcagaagtctccaacaaactcacctacaaatctcagccttgagaaaactaatatagttgagactcctaaaacagttaaagacacagaacctgaggattctcctgaaaaacaaagcacagaggatgtactagatgatgattttggcgatttccaagcag

SEQ ID NO: 89482 - DNA, 204 bp, Glycine max
ctctgaggatctttttgctttgaggatcataacacccgaaatttgtagttttcttcttaaacatgataaatttattttacttttcctagcactgtccaatgcagcacaagctttgcaaggaatatcaacacacacacacatcaaacagtttttatgcatttattacaagtaacaacatctgcatatgtagattatcttttgttt

SEQ ID NO: 89483 - DNA, 280 bp, Glycine max
  unsure (1)..(280): unsure at all n locations
tcggaatcggctcggaagccttcttctgcgtgtccgggagaagaagaaaacacctccgagtcaactcggacgagttgcctcatcgtacggtatcgtcctcngactctgtactcttctttcacttccgaaatcaccgttcgcggggttttgctctctctccgttttttgttcagatctcgcattggtttcagctgaaacgacgccgttcaatttccttcgcttaattagggatttatatcttaggtcgaaacttgaagtgatgatggtgtggttgttgtga

SEQ ID NO: 89484 - DNA, 251 bp, Glycine max
ctcctttaagcacgtaatcttagataaaaccccaagattcatatatatgggggccaatatgcgcttgacagggttttagcttacttctgacaatacttcttggaaaaaaaacagttcgataaaacccttcacatgggcagcaagtcctcgatcgcgttcttcctttgcatttgaaagttgaaacatctaatcgctgaaacatggcacctatctgtctttttgtcgtatacaactaattaagaggcctatgg

SEQ ID NO: 89485 - DNA, 257 bp, Glycine max
cggtggtgttgccgttgcaaattgcaacactcagcacaacactgcaccacttttgtttctgcattgtgtttcccagcttagctacaactacaaacaagcccacgtcgctttcataaaaccacacccacctgccaccatcactttccccaaaacccaactcatcaaaacttaaactcagcgcgcgcgcgcgcgcgcgcgcgcgtaacgacatgcgtgaagacgctaaaaagcaacttcgtcggcgctctaacggcgag

SEQ ID NO: 89486 - DNA, 249 bp, Glycine max
gcattatatatattttgaatataagacattaagaacatgcttgagaagcaaaaggtggttggttgtaaagtgtccattgtcattgtcttttccttttatgaaaagaaaaaaaaaaaactttactagacatgaaaaatttgttatatataaatagttactgatgaatcttctagttttgcaaagcctgaagaatttaaatattagacgtgcaattggcgtcagaaacgctgcattcttgtccattactct

SEQ ID NO: 89487 - DNA, 247 bp, Glycine max
tagagtttaagcagtgaataatgcaccctccttgatttgtaaggattatatgttatagactagagaataaattactatgtagagatcttaatctatctggttcagagaaagcagcgatttgactaaaaatcttgagcattgttgcttattctagaatctagatttagttgttagattttgtttttgtagctcctccgtgaatgatgagaaaataagagttttgatgtgataatcttaaacaggtgtg

SEQ ID NO: 89488 - DNA, 143 bp, Glycine max
ggttctagcaatcctcgtgcatagttatctatcagttatatatgggtaagaactttcattattcttaaacaacgccaccgaacttacaatcataaacgttagtttaattaggcgtgcatgatcacatttgtgtattttaaata

SEQ ID NO: 89489 - DNA, 142 bp, Glycine max
gctgagcgtgcacattcttcttcttcttcttgttctctttctctctctgaagcaaatgcagagcaattaataactcaagttttgggtcactgtgaccgtgatgatcgtaaagttattgtcttttgagtgatgggtttgtgct

SEQ ID NO: 89490 - DNA, 140 bp, Glycine max
ggttcatcgccctcaatccactttcaattacctatgcaggttaaagcctccatctgaatcccttggtgctgcttctttagccctgcactatgcaaatgttatcatcatgatcgagaagttagcagcatctccatacttga

SEQ ID NO: 89491 - DNA, 264 bp, Glycine max
ctcgagccgctcgagccgctcgagccgattcggctgagtgacttggctgattctgtacgcttcccactgacggaagcggaccgaacgagaggttagacagatagtgcaacaggtttcacaagtctgtgatgctttgaaaggtggactagaccctttggagcgccaagtgagggatgtcttccatagaattgtgcgcaccgaacagaagggcttgactcacttggcaggccaagcaatgctgagtaacttgttgcccccatcatt

SEQ ID NO: 89492 - DNA, 263 bp, Glycine max
ctcgagccgatcgcatttcaaagctacaacttgtcattttatgccaaatgatacaaatgcgataggctacagtatagggtgtggaatgtccttttagatagaaaggaaggtaggttgtattgtacttcggtaattcttgctgctctcatttttgttcacaacctacaagttggtataacgttaggtaaggccaatggactagcttctgttcatgagggagatagagttagttagtgatggttatttaggattctaacagattg

SEQ ID NO: 89493 - DNA, 240 bp, Glycine max
cctgtaaagatctggcatctcgtggatatcctctaggcggttataatattatttagggttttcttttgggtaattagtaaaccgaaattgttttgtgagacctagaaaaagggtttcggttttcataaggattttataatgcatgcagttcttccaaatcactaacaattgtttttaataattggtgggtgtctttcacctatgttgcctaaaaaacctgaaatgtttttttttaaacca

SEQ ID NO: 89494 - DNA, 244 bp, Glycine max
ggggagagagaaaaagagagacgtagacaaaaccgaagagtctctctcttcctatctctctctttcaatgtcagggcacaaatcttccacctcgacttcttcggcttcttcattctaacctatatcagaaggaaacgcggtaaaagaaaaaaaagaaactggcagacgatcttataagccgcaaaattttacaccatttaatttggctgagtcagatccgtccgggatggtatccatggattct

SEQ ID NO: 89495 - DNA, 251 bp, Glycine max
gggaaaaaacatgttcttcttccaagtgtgaacaatattataagcgatgtggaagggatagagattagtataggtgatggtgtacttgagagctcacaacaaaatatgtttcaagggattctgtccccgggtccagcttcgctatctcccattccttcgaattttttctctccaccgtcttcttcggatccaagcatgattagcttccttcgtgatttgagtcctatgtttcaaagcggaagaaattttac

SEQ ID NO: 89496 - DNA, 243 bp, Glycine max
cgacaactctatctttctttctcattcggccaaaatggccaagaaggtttaccctcaggatcccacttcctctccctgcatgtcccatggaccagaaacatataccctttggatgaaatcacttattctccactctaacggttgcaccgtctatgattcaaatggtgtcatcgtttatcgcgttgataactatgacacaaagggtagaagacacgttaaccttttggatctgcgaggcagagt

SEQ ID NO: 89497 - DNA, 224 bp, Glycine max
tgacaatgcaggcaacagaccttattctgctgggcctgggattgatcatcgtcgcgtgggggtggccgagcaagtgcagaaccatatgaggggatgcgttcgaccatttcagagtgtgcaaacggtgggtagcttttcaagtcctcagcatgcgtctagcgcactgaagctgagacagcatattccgcgaatgacgtccaacacattgctcaataggcctgcag

SEQ ID NO: 89498 - DNA, 228 bp, Glycine max
agttctagcaagcagaatggggttgtccagccatatgtatgctaaggttgttgccttcagcaaggtcccacttccaaattacagatatgatctggatgatcggcggcctcagagggagtgagcttgtctatcaccatgtatacccagttaatgttttttgaggaatatcttggccaaaaatccagatgaacaaaagcttttcagatttgtcatctgcagatccagcag

SEQ ID NO: 89499 - DNA, 209 bp, Glycine max
gggacagccacctaataaagccacctgcatgtcgaaatttccgttaacggttgcagggagcggcacttcacagaaggtctcgcttgtgaggtcgaaggcgaagatgagatcccgctcgtcaggttggagttttcgggtgacgtgacaatggagggagccggagacgaaaaacagcatggtaggagtgtgcacagaggcgctcggcatcg

SEQ ID NO: 89500 - DNA, 238 bp, Glycine max
ttagcgctcaggttcttcctttaacccttctcttcttatgccttattaatgtttgttttattgcgacgggactctctgttagggttagggttagggttaaattcgattcggattcatcttgtcgaatttgggtacgatttccttcagtttccctcattttccgatatcgatgcttggggtttcgtttcgccttgattccctgtggtgcttaccgttatcggctcttcttagggttccg

SEQ ID NO: 89501 - DNA, 244 bp, Glycine max
cttcaaatcccccctgcaattgctcatcatccttctggttttttcatttgttctctcttctgctgctctccaaacaacaatttcagggtgttgaggaattgaaaaatggagaagaaatgtttgatatggcagaagagttcatggtagagagaaggattgatttggagagtaatgattatccagggacaggagcaaacaaccggcatgatccaaagacaccaggaggaccttgagacattaatgc

SEQ ID NO: 89502 - DNA, 255 bp, Glycine max
ctggagatgtactactctctgaaaaacaagcccgtgtctagcttcacgaactggactaccattgcctctatgtagcggaatgacacatactcccgactcagaacactaggaccttatgctccctttcaagtggaatctgatgaagaagttgggcatttctcttttagatagattgaaaaacaaaaccaactaatgtatcgaaaactacttttctatgcacaataaatatgtatttagattatcttatttttaaaa

SEQ ID NO: 89503 - DNA, 271 bp, Glycine max
gaaagcttgaagcaagtgatgccatctagtattcaacccaactcgtttaagactgtgagttaatgtttgtccctggctcttaaccatcattttttttgtctcattgcaatgaatgtaactaggatgattttacaaatttctgtaggtagtgtgtggaggattagctggatctacggctgctttattcacgactccttttgatgtgatcaagactagattacagacacagattcctgggtctgcaaatcaatatgatagtgtgctccatgcc

SEQ ID NO: 89504 - DNA, 266 bp, Glycine max
ggaagagagaaagaaggaaaatattgaagctcttgcaattctcatgaactgtggagtcgtgttgggtttctattgttggggttgggagttcttaactgcccttcttctcttctcttctcatcaaccttattgatcattctcttcatcctcctcttcttcttcaaaaaccaatttctttttatatatatacaaataaggaagacatcaaagaaaaaaatagcaaaatatttttttaaaaatatggaaggaacaagtgcaaaggggtt

SEQ ID NO: 89505 - DNA, 273 bp, Glycine max
acaaaagttggtagcttccttccttcttcaaacgcaacgaagtttctttccactttcaaaattcccaaccgcccctttgttctctccgtacaacatcatcacccctgattctgggtcatttaaatccccgaatttcatcattcgttattttcatcgtttttttgcctcttatttcatccaattctcgctttttcaacgatcacagtgttgacccttgatgggtttttctcgtcgatcataagcatacccgggtttgtgaaaaaggtttctcct

SEQ ID NO: 89506 - DNA, 266 bp, Glycine max
ggattccttgtcatgacaaagaaattacgtttgggttgttctttgcagggggaggaggatggaaagaaagtgaataaccttctggaaatgaatagaggggaaggagcgaatgatggtttttctggacctggaccaaatgattcgcttcttcctggtcttattgatgatgttgccttgaattgtcttgcttggcttagtggatccgattatgccgcactatcgtgtatcaataaaaagttcaataaactgatcaatagtgggtatct

SEQ ID NO: 89507 - DNA, 264 bp, Glycine max
atagggccctaaaaagaacaaaagtagttatacactatgtcttcatttgtattatatgtgatgatatggattgttcatggaacttgtttagctgactgaattattttaatttagaatagctgaccgattttctttttctcacaggataatgtgcgaaatcagcttattcagtttgagcttttactcacaactgcaacatttgtggttgccatctttggagtggtagcaggaatatttgggatgaattttgaaattcaattattc

SEQ ID NO: 89508 - DNA, 266 bp, Glycine max
cgtcatttcatttccaccaaacaccacacccccacgtgaagtcaaatggtccttagttctgggagtgttgatgactcagtcttgccggaacgaacggaaaaggggatctcaatggacaacaccaagccccttatcgaactggaactcgacgatgatggcagaatcacaggtgcaggacatgcacgggaagatagcatgcacatcaggacaggggttttaggggcgggggtgctgtcttttgcattcgttatggccacactaggatg

SEQ ID NO: 89509 - DNA, 262 bp, Glycine max
gaaaaagagggagagtataataagtactgctcttgttacctctcgtagctctctggatcaaacatggatgctgacagccttcttgcaaggtgaatccatggcacaaagaacccaactagcacccgatcaagtgaatgaaattaaggcagaatacagatttcccctcttgtggagctcattcaaagaacggagcatcttgaaaaaggatttcagacagctcttttccctcttgtagaggactcagaaaggaaatcctggccga

SEQ ID NO: 89510 - DNA, 261 bp, Glycine max
gactcgagcgaatcggctgacggctcgaggaagaaattcgcattcttcagtcttcgatttcaagatgattaggtctactgttgagaagattgaaaagggtctctcactaattgtgcccaaaaagcctgaactcagctacttcaatgaaaatcaagtggaaaccacaacaaatgttgtgccagatgatgttagtaagggatattttgcagttgttgcaatcaaagatggagaaatcaaaaggtttgttgttgagttagacta

SEQ ID NO: 89511 - DNA, 261 bp, Glycine max
gcactctccttccaagcaatactttctcttttagctaagtctagttcattgatcctcgttgccgagttactttaaaagaagtggaagaatattgtttcttggagtataaaacccgaacaatatatgcatatattagtggcgtgcttgtagttacgaacggaattgttatttatctgttctttctattcgttcctacagtgcgtttgctcaacacttttgttctcagcacctatctctttaagagtttacacttgaataaac

SEQ ID NO: 89512 - DNA, 257 bp, Glycine max
ctcgagccgctttgagaagtccaatgtggtatctccatttgcaatgcatcaacagcagctggccatgctggcacagcaacagtctcttctaatggctgccgctaaatctgctggtggggatcccaagacctggccagcttacaacaacaacagtctcttctaatggctgctgctgctgctaaatctggtggcacggattccaagtacctggccagcatacaagaacctgggtccaacattcctctccaaagttggct

SEQ ID NO: 89513 - DNA, 159 bp, Glycine max
cgtcattttgaagcagccaataagttagaaggaagtggatgagaaagaaaaacaaactaattggctgcttcaaaatgacttattcatgtctagtttatgtttcagtgatggttttgttactagaattctgagagtaaaaaatacatattttgaatattt

SEQ ID NO: 89514 - DNA, 258 bp, Glycine max
ctccatttcgccattctctccgcgcaccgttttccggcgcagtccccggcgagtcaccgtcgtttccgccggcaagtctctctcaccgttgccatcctccttcagatagtatatatttctcatataatgttccgttattagagaagttgagaaaatggacggccatatgggactgaggaaaatcagctctcactgctctatccctgatttggatgattctgctatcttacgtttgcttgacaagccaaagttgaacat

SEQ ID NO: 89515 - DNA, 222 bp, Glycine max
cttaggagtctttcttcctttgtaatagaaagcacgcgtttctctctctcgctatctcaacgaatatctgtgtagttcaagccccaatccgcaacatccatttacaaaatatagttcatcggaatactctcaattttccggccagaaaccggcgaggtcgccggagaaatcgagcttctctcagacttgtagcctgttgagtcaatacatcaaggagaaggg

SEQ ID NO: 89516 - DNA, 159 bp, Glycine max
ctgaaaagggttcttttctttcctttaaaaatttatacttcctctcttctgcacaattaaatttactatttctaaaatttacaaatttgttgaaatgaagctgtgcgcaaggtaaatatgtgtgcaaattgcccaatcttttcaaaggttggaccgtaa

SEQ ID NO: 89517 - DNA, 257 bp, Glycine max
cttgttcggtggtggcagtggtgcatggagaggttacaaaaaagagaaagaagagcttgcaaaaatgatgtcatttttaattatttttttaaaaaaattttcttatgtaatctcatttaggcaaaaaatacacatgatattacacttcacatgcctcggagtctaagccacgcaagtagataatcgactaataaagtttttaaaatattagacatccgattaaaaataaatttattaggacttaagtgacaaaatat

SEQ ID NO: 89518 - DNA, 260 bp, Glycine max
gcaacagtagtagtagggagactgactcttttatgaaactaggatctaaccatattaatgatatagactctggtgtattatgtagaaagccagggaaaagaacggattaaaaattttattaacagggagttccgcgacagtaaataatgagggatgctctctactaatgtactctttggaggcggcgttctttttacaaaaattggccacatcagtttgccaataacttaactagatgtagataatatagattgctgtta

SEQ ID NO: 89519 - DNA, 257 bp, Glycine max
cagaaactctccttccaagccggtgaacgccactcccttgtatgcaattcccctttccattccatctacttcctggactcctcatcattcttaaaattaataaaaagctattaactttctattattattattactattttttaaataattgttcttgaatgaatggaattgagctctggcaggagtccttgtgtttagggttaattggtgtgagctgtgtgtctgatttcaggaaaaactctatcagtgggtctgga

SEQ ID NO: 89520 - DNA, 268 bp, Glycine max
acggaagttgcgttatctgggattttgaaacccggggcattgctaaagagctacgagataatgaatgttcatctccaataaccagtgtctgttggtcaaagtgtggtcatcgaattcttgtatctgctgctgacaagtcattgtgctgtgggatgttatgagtggaaacacaacttcgcttaaagtttctatcttggagatatccaataatggaccaacccctacctcacgtaacaagtgtgccgatggaattacctccttctcacca

SEQ ID NO: 89521 - DNA, 273 bp, Glycine max
cctcgagccgaatcggctcgaggtcaactctcgttcaatcaccagcgcttaagcgtgtctctgctaataccaaaacgctaccgttttgctcttttatttctctatggattgcaagaagcgagttcgggatgactcggacgagtcattctggaatcgcccgaggcgaagcgactcagggcacgatttactcgagttcttcgacgacgccgacgacgcaccttcctctcaggaccttgactccgtcatgaagagcctgcaggaggagatttccgg

SEQ ID NO: 89522 - DNA, 108 bp, Glycine max
tctttttccccttttattgcatggtttgttaatcaatgtagaccaaagatagggacacaagtttaaagagagtcattgaaaagaaatccctacttccacggatgatat

SEQ ID NO: 89523 - DNA, 264 bp, Glycine max
catcgagccgaatcggctcgaggcgaaagctacgagactcgtccaatctcgaaacccgcttcagcatgcagcaccccaacacgtccctgctcactgtaaccgcttccgtaaatctcaagctgctgtgagggagagagagacaggaagggtgaaggggaaaaccaggatccaagttttgcacgataggttctaaaggtcgtccgctagatgctcagatgggatcgactcaacgaacacttccaagagttgggaaacgcgttagat

SEQ ID NO: 89524 - DNA, 265 bp, Glycine max
acatctgcagagcctgcttggttttaccgtcatgttacatgccaaacctctgcctacatagttggtgttgctgggtggggaactggtctcaaactcggaagtgactcggttggtattaagtataacacccatagagcattgggatcaccctcttctgacttggacaccttcaggtttttgctctgctcttgaggcccaacaaagaccaaaaatcagaatctactggaacatttaccataagccgttggatatcccacataatcat

SEQ ID NO: 89525 - DNA, 180 bp, Glycine max
gcaattgcaataaaccaacgtttaatagtggctgtctcgtttgcttggtcttatgtgtctctcatagttgtcgctcttttgctttctcgtattgttctctcatagtgtctctcttgttcttcaatcaagagaagatagaatacaccctgaagccatggaaggtggtgtgctagaagctga

SEQ ID NO: 89526 - DNA, 174 bp, Glycine max
ctggtccttgatgatgatgggaatctcaggatctatagcttctaccctgaacagaaaaaccaatgggttgaggtttggaaagggatatgggagatgtgcagaatcaaaggcaaatgtgggcctaatgcaatttgtgtgcccaaagaggatttgagcacttccacttatggggtt

SEQ ID NO: 89527 - DNA, 175 bp, Glycine max
gttggtggggatgatcctcctcttccaagttacccccaagcagagattgagaatggtggcacacacaaaacaagtgaacacagttcaagcagctcctagtagtgaatctggctcttcatccagtgattcagatagtgagtcagatagtgaaccaggcattgctaaagcatcagac

SEQ ID NO: 89528 - DNA, 175 bp, Glycine max
gaaagaagtggagtccaacactattgatatgatgatagaagaggacttctctagagagcaatgcaggtggaagaaaaatgctgagcacacaagtgagctagctgtggaacttgaacttgctatcttttgctttctagtggaggagctttcagaggaactagtgtgttaatgtggg

SEQ ID NO: 89529 - DNA, 169 bp, Glycine max
gggatttgttataataccatcaaacagaagtacaaaagcgatgtgcagctgattccattgtgaagaagagagcagaaagaaataagctttataataatgtatcccaaccaagccttttcttcaggttcttatgcggagatgatgtctgggacttctctgttacctcatg

SEQ ID NO: 89530 - DNA, 170 bp, Glycine max
ggcgaatcatgggtccatgtgagataaatctgacaattgcaatttaatactggaaaccacttggccccatcacagatcatgcgatctcattgctaatctggatgttgatatatatgaagcattaaagctgcatagtttggcggtttgctgttctggtatacctaacagcc

SEQ ID NO: 89531 - DNA, 171 bp, Glycine max
ctcatatttttcgaccttttgttggctacaaagaagtcagacttgttagcaaggaatcgagacaacctgggggtgatccactagtactttgttttgtcgattttttgagtcctgctcatgcagcaactgccatggaagcattgcagggttacaaatttgatgagcttgacc

SEQ ID NO: 89532 - DNA, 168 bp, Glycine max
ggaaaaaataatggctgaagctactgctgcttattctcttcccatatcattaagtcatcagtttacttctcgcaatgatcctccaacattctccatggatgactttgaagctcttggaaattcaaccatatcatcaagtcctcccttagctggggagagaaaatcgtt

SEQ ID NO: 89533 - DNA, 134 bp, Glycine max
tggcagaggtgcatcaccggaagaagacgcaggcaggtggcgcagtacgtggagagaggacgctatataaatagatgttgtccccgatgctctcgatgtcaggcactcgtatatgcttcctccgcacaacatac

SEQ ID NO: 89534 - DNA, 163 bp, Glycine max
caagagtggtttttacagttgatcctgaggataaacatacagaaatgtcttcagctgtcatcagtttgataagagcatcatttacaaccctggttatacgcccatcaattcttcaccttacttcttcatccttgtttggagatccctactcttttgaagtgct

SEQ ID NO: 89535 - DNA, 163 bp, Glycine max
tgctgtttgttttcccaggttttagagctccaaaccttcagatccacctcattcgtctccagatcttccttcctggataacgttttcgggttcgagaaggcacttgtgttgtttttcgtacgaaatggagactaaacagagttcggtgacggttacgctcagt

SEQ ID NO: 89536 - DNA, 170 bp, Glycine max
gtgactggcaatctaagcaattgtgtgatgtcaaaacgtgatgtttgtgaagatggctaagctttgagcatctttggaatagtttactgctttctggtcacgtaagcacctgtttttagaatatacttggtagcattggttgtatgcaaaaagagttacaataaatggag

SEQ ID NO: 89537 - DNA, 163 bp, Glycine max
tttttaaattaagtataatatattatcagatatcgagagagagataggattcatcgtattgttatcatcccttgcaatccatgtttctgtttctaccaccaaagcatgaagttctgcaagacctaccagcagtacatgcaaggacatggccacaacaagctcc

SEQ ID NO: 89538 - DNA, 159 bp, Glycine max
ggagagtctagagagagaaagcaaagcccaaacaccccttttcaccattgcaatcttcgttcggtttcagagaaccccttttgaatttgtttgaattttctgggaaactgggcattttgtgatcatcatctgggttctctcgatctccatctttttttt

SEQ ID NO: 89539 - DNA, 160 bp, Glycine max
cacaatttcaacgccacaccaaaaattccactgcaccaccaccctccccatttgtacttttcttctcattctctttccactcccctgcattctgcacacaatctagctttacgtgcttctgggcaaccgcataaggttaaactgttaagcatatcattga

SEQ ID NO: 89540 - DNA, 198 bp, Glycine max
actctcattccccattccctcagctacttcagcccctactcgattcggatgttccgcgatgaacgctcactcggaggtcacgacgacgtccagaacaatctcgggcgcgtcgctgagcgcaaacacgtctacgccgttatcgacggcgtgtcgtcgatttgtactcgtacggtttcatcgacatttccgcggcgtttg

SEQ ID NO: 89541 - DNA, 208 bp, Glycine max
atgtgtacttcgcattagaagggacataacagaggatcaacgccaagcttttctcgtagttgctgctcttattgcaaccgcaacttatcaatcagcactaagtccccctggtggagtttttcaggctaatgctggaaacaacgataataataatgttaatatcacttcccccaattctacgactattgctacgcaaggacttaatgct

SEQ ID NO: 89542 - DNA, 143 bp, Glycine max
ctcaaagatataataatatatagatatagctgatgagagagacagtgtttgtggataattggtcattgtagccatatcaaagaaagacagcataatctattattcttgtcttgtgctttcatgtgtaacaaattgcgcgttac

SEQ ID NO: 89543 - DNA, 196 bp, Glycine max
  unsure (1)..(196): unsure at all n locations
gtagtaagtcggaatgggtcgagtcgagtgctcgagcggctggtagggctcgagttgaggtgtgtcgcttacagtttcttagtgccgagggataacagatacacgcattactgncatgggtaaaggttgtgtcaactaaagcagatgtttctgcgcagatgctgctttgtagtcgacaatggtttggtagcattta

SEQ ID NO: 89544 - DNA, 158 bp, Glycine max
tctggttctgacttccaagttcagtccgtgtatgacatcagtctctgggggagtgtttggttactgtttcttgttgtagctgtgtatgtgatctgaatctattccagtccttttgtgcgtctctatctctctctcgtctggattactggcaactagat

SEQ ID NO: 89545 - DNA, 203 bp, Glycine max
ctcgaaccgcagaggaagcaatcaaggttaaggcctctgttatcatttgcttcacttcatctggaagagctgcaaggtttcattttatctccttctatgattcccctttattaaaaagacttcttattgctgggattgttgatgccagatttcgcatttgtcaaattctttctctcaataatttagttccatgttagatttac

SEQ ID NO: 89546 - DNA, 163 bp, Glycine max
  unsure (1)..(163): unsure at all n locations
caaggacaaagtttgatgttgcggaatgagaaaaagctaattatcatatacgtagaatcccgcggaaattcatgtatgttaggtaacatcaactttccacctgacagnacacataatgaaatgaaatcaaatgagaaaataatacacgtccaaaatgaagaaa

SEQ ID NO: 89547 - DNA, 204 bp, Glycine max
ccaatatcttgtacacgccccctttggtagttgccctttggaagttgccttatggtaaagaacacaatgaatccctgtcgtttataattttataatattttttgttctttaatattgggctgtagaactagtcgtcctgtccaaatacatgatgtagaaaatcgcctgtttagcatatgctgttgttaaattcccatcgttgtg

SEQ ID NO: 89548 - DNA, 109 bp, Glycine max
ccttgtcacaagctggtagtctaacgttgtcttcggagcctcatctgtacataggttgttctgttatgttcggtgcgtgttgtcgttcttggcatccaccatatctggg

SEQ ID NO: 89549 - DNA, 207 bp, Glycine max
gggttatttaagcctttctcgtgaaaaccgtcgcaagttgctccttgtccttgctagagagtatgatctcaataggtcacaagtgcgtgaactgataaagcagtaccttggacttgaacttcctgctgacaaagctcaagtgagtggctctgaagacgaaggcttgttctcttctttctatcgcgttgagaggaatttgaggcatgc

SEQ ID NO: 89550 - DNA, 201 bp, Glycine max
cgaaatgattatcaattatcaatttgaaaattaaatatccactggaagcacggcaagaggaaaatggaagcatgcgtcgtttgggtggcttggcagggtatgggtgagtgagaaaagccgcgccgtcgcggcacggcaatagcaggtatagttctggttacgaacaccgtcatcgttggacaagcaaaagagaagtgcgag

SEQ ID NO: 89551 - DNA, 195 bp, Glycine max
aaaaagctcaaatatctttaccaataggcgacataactttgtgtaacgataacaaaatagcaccgtttgtttgtgtttttgccatggttcccaaaactgtagcgaaaaccatcacaacctggtggtggattggttcgatctgcgtcttcctctgctaaactgcgtacttcataaccccccaaaagagaatttttt

SEQ ID NO: 89552 - DNA, 202 bp, Glycine max
aaagaggatgtgatggatgatgaggaagaagatgaatttggcttgtctgatatggtgctttcagatgacttctttgaaagtttggatgaactgagccaacttacggctccttctgttgtcactggagactgtttcagtgaccccttttcagcaattgcaatcccttcttgggtggctagtggtgctgctactgctagtgggt

SEQ ID NO: 89553 - DNA, 179 bp, Glycine max
tcgcaattcgactcaagcttcattttgttgttcgaacccaaaaccctagcagccggctagaatcgcagacgttcacgttgatgccgcagcacgggcacaggcagcacaccgaagaagagaacgttcaagaggttcagcttcatgcgcgtggatctcgacgcgcttctggacatgtccac

SEQ ID NO: 89554 - DNA, 278 bp, Glycine max
gttaattctctgtctgatagatttgtattttgagtgatatttgggtacgtgtaggagtgaaccttcctttaggaaacaaatgagtgttagagatgtcatgttaactagtgatatgagatgaattgtaagatggtatcacagcctatcataatgatagttgttgggctcattgtgctatccaccatcactaaatgtctagtcttgcaaactttatgcccaagatgttctgactctgcatgatgggtgatctgaccaacatagagcatagaagttggtgg

SEQ ID NO: 89555 - DNA, 279 bp, Glycine max
ctcagataaaagctttgtatgatgcaaaattcaattttaaaacaacaaggctttccaagaaaaagagttatcttgttcaaattgaaattattgcaactctttccaatcctcacaatagaaagaaagagtttcttattagttataacatttattgattattgactataaaaaaaatatgtaaagtttttttttggaaggcaaaattaagaatattattaataaactaaacagtaccaggggtactgaagatagcaattacaaggcactaggtgccacctt

SEQ ID NO: 89556 - DNA, 279 bp, Glycine max
tgtgctctggaatggagttgcgcagatcagttagacaaatgtgttgttgcgtagaaaggaagctgtttcttttactttttcgatataacgtcaagtgacccaagtgccaccactttcgatccaagttcacattacatccaactccatctaggttcattggattctcaaaacccagcaaccactactgcatattcagattgttcgtttaaaaggaagcattggtcggtacttggtcgctacaaaaaatgccaattgttcagaaattgtatgatacctgca

SEQ ID NO: 89557 - DNA, 272 bp, Glycine max
tttgttttgtgtgagttttttttaccctccccgtacatcaagagagaaaaagatgacgactaatttagaatttaacaagaagataaactcaaaaactactaaaataatttaattttaactttaacgtagtaatcatgttttgtttgtgtttagaaaattggaagtggggaagggctaagaaggttgttggcattattagtgcattgtgattgtgcacgttggtgtttatgacatttatttagaggataggtttggtcggtgaatcttttggg

SEQ ID NO: 89558 - DNA, 205 bp, Glycine max
cattgttgtaactttttgattcctaaattctctaaaattcgaaattctaatttcgttatgggaaagacattgtttgtctctgagtgagtctggctggcaaaggcgacggtcgtgctatcggtgtcgatttgggcgactacgtagtcctgcgtcggggttccgcaacatgggcgccgtgaagtcattgccagcgatcatggtcgtc

SEQ ID NO: 89559 - DNA, 104 bp, Glycine max
catcttccggttatgcaatgtttccattgcatcaaaacggtaacattgcataaccaaaacataaattgtgagtaacaggagaaaaggaaattttatcagaattt

SEQ ID NO: 89560 - DNA, 283 bp, Glycine max
ggctcgagattgctttctcttttcagttctcttcttttctctcttggcgacaccactgcaacactttccttttctattctcagagcgtttttagtgtttttcaagcaagcgagtacggtaccattctattctactccctcacgtacgtgcacattctctctctctctctctctctctctctctttttctgtgttttgtggtggcttataattaggaaactactgcaaaaggaaacttttttgctgaattttcacagtcccaacagttttttaaaaggtttttc

SEQ ID NO: 89561 - DNA, 277 bp, Glycine max
ccggaaatatcgaggttgtatttgttgcatgggggagaatataactcaacatttcgatccgggaaagatagattacatacacacacttaaatgtttctggttagatctcctgaaccttaagaacaatccataccaaaacgttaacatgttcgctttttttccttacacttctattgtcaaggcctgcaagtattaatgttaatatttaaagcctttttaagttttttttttgaataaattttaaccatggagttcctctatctccataatgcatgca

SEQ ID NO: 89562 - DNA, 210 bp, Glycine max
tcgtacttcacagtagcattcctgtgcttattgtctgcaatgctagtttgtttacatgataaaatgagaatagttgcattgctagtttgttttatggttcacacatccagtcccatgtggcttttgcatattcagtatcacttgcgagcagaactttcttcctttggctatttatggtgtgaaaaatatggtagcttcttaacgggcttg

SEQ ID NO: 89563 - DNA, 283 bp, Glycine max
ctcgagccgttcaaattcccacacattcttataaacataacatactctctcttccaaagacgtttcactttaccaaaaaagctttccctttgagaaataaaacccaaaaccagtcttttgataattttgagcagttgcattccttgttttcctcctttttgggtcccctcaaaagtagtttcaaagagttcctcttcctccacagatatcatggcagatcaaaccccgggttcaggaaccgtttctgttgaagcttcttcacaagaaagaaggaaacttccca

SEQ ID NO: 89564 - DNA, 274 bp, Glycine max
atcgagcgaatcggttcgagaataattcctttctaattaatattatttgttttcaataccttattacaaattctttcacattgtgcaatttggaattgaaatttgaacagatctggtgaattgaattgaattcgaaattgttgtcgtggttgctgctgctgcagctgcaaggaatgccgctgatattagcgaaaagcgattcgatccagattcgcgaggtgtggtacgataacctggaagaggagttcgcgttgattcgcgaaattgtggacaa

SEQ ID NO: 89565 - DNA, 242 bp, Glycine max
ctcgagcgaagacatagagaacaacaatgttgcaccttctgtacgcggtgatattcggggtaatgctcgtgatcgcgagctctcctcttcaaaactccggcgaagaagctcggtcatcatcacattggatcgggtcaaccacggtcgcgagcaccgtcgtcgtcaagaccgtcgccgccactctgctgatggttctcgcttcctcgctctacagcatcgccaagatccggcgttggaacctc

SEQ ID NO: 89566 - DNA, 206 bp, Glycine max
atgatatcaattctccatcaacaatgaagtgatggatttatgttcactatgtaagggctcatacacatgacatcagggccctagctgttgctgtaccgctaagtcacgaatatattaagccagaaaagaggattaactgagctctacgtgcagaaactcccattagtttccgttaccataagtaggctctttgggaggttcctatg

SEQ ID NO: 89567 - DNA, 276 bp, Glycine max
ggtgagttttataccattagacttaaggacggaaaaaaggtacactcttatgtcttttccttgaattttctagctacctgttcatttattgaataatcttatactgcgggcatataagggatataattttgctcctggctgtgattcttattgggtatgtgacagtgatgatgctgatatattaaaatcgaatggtatgaactgaagcaagcgaaaattatttttaccaaaaatgaaaaatataatatggaataaattaaactgttaaagttgatg

SEQ ID NO: 89568 - DNA, 274 bp, Glycine max
ataattatgatccagtggtgattaatgttacacgccctctcttcctttctctcgctctcattgtctgtccttgccacagaaaccctgatggaaaccccaacaaacgggatttgtattgcatttgagctctgttgtagtacctgaaaaccttaatcatcttatggagacctacaacaatcaacagcagcagaagaagaagtggtttatgccactggttctgtctctactactgtccaccctgctcatacttttgtccatcttcgtctcctccgat

SEQ ID NO: 89569 - DNA, 271 bp, Glycine max
ggatacgaaacccacatcacaatccaattccatgaccctttgtatggctgcagaaaatatgagcgaggtggaagaggagcatggatatgtcttcaaagaagagatccatctcacggtgttcaaaacttctctgttcttcgcgggcgatggcttcaccgtctacgattgcaaaggtcaacttgtgttcagagttgactcttatgggcccgacacccgcgacagagacgaactcgttctcatggatcctaacggacgttgtctcctcaccgtt

SEQ ID NO: 89570 - DNA, 293 bp, Glycine max
gtggtcgtcgcatgtgcttagtatgttttgaagattttgattgtatgtgtcatcagttattccattatgcttgaatccttgattcctattgaagttgatagctctctaacttgaaatctacttttttctttgcctagttgagcagtagtcaattgccaatacttgtgttgacagatgttttcactaaaattgtgttttcttaatgttgtaataataactagtattgtcactaaaaatgattttgactatctgactatgttagttgattcttagtgttagtaattaatttattg

SEQ ID NO: 89571 - DNA, 267 bp, Glycine max
acgctttacaaccctacgatgatgagtcagcattcccgtaggaggctgccacgtggcaatccaagaaaggccaagcgtgacgaagttgacaagcaggctgcgcccaaagccgccgagccggcaccatcctcgaatcggcttctagccggctatcttgcgcacgagttcttaaccagaggaactctgttgggtcagaagtttgagctggacttggaccgagccggcttggctgggtccagctcagcagaagctcaccgtggagcgaga

SEQ ID NO: 89572 - DNA, 263 bp, Glycine max
atttgcaatcaattcaatcatatatcagaggatgaagattgttgtgatgctattgctaccgcccttgatgtttgcactgtttttttcatgcacgagttcattggcagtatccacaaatacaagtaccacatgccccatggacttgaattacgttctgagaatcccatggaacacttctgcctgccataacttccaacaaactctggcggctaaaaacggaaccgacgctaacacatgttgcatctctctcttgtccctcttcg

SEQ ID NO: 89573 - DNA, 188 bp, Glycine max
gtttcttcttctgcaggaccaaattgatatacaagatcattgttttagagagagagagagagatagagagagagagagagtatactgtttgggtcacagactacttctctgagcagatctagatatatctcggctgcttatgcgcataaccccttgagacgcagatcgagagacacatgagcaccagt

SEQ ID NO: 89574 - DNA, 256 bp, Glycine max
gtagagctgaggcacaccagctctattccagaaaagccatatttgatgcacttggggttcaactttttgcagttcttcatgagcaaatagactcagaggtaaaagatttctggcctcgatactggggcggtgtcgtgcttcttgatcgaggtagggacttcttcaaagctcttggagggggaaaactgctcaaggagaagttcctatcaggatttttgctgaatcctcgatcactctccaactacaagcgtgcaaa

SEQ ID NO: 89575 - DNA, 255 bp, Glycine max
ggaaagcatcctggagaactcttgactatgctgtcttcaaacaagtatttgtcatcaatggaggaacctcagatgctactgaaggatgtgcttgaccaacggcttcgactaccaacggaccaattagcagaagcagtagtgttcacaatgaccatagctttggcatgcacacgtgcggctccagagtccagacccatgatgcgtgctgtggcacaagaactatcggctactacacaggcttgtcttgcagagcca

SEQ ID NO: 89576 - DNA, 235 bp, Glycine max
cacaatctaaaactcccgttttctctctctgtttttccatgggcatctgatcaaacttttcttaattctctctctcagtgtttgctattctgagtgatgggtatgcccttccgctgttcccacacctcgcatatcagtgacatcatcatcaccagcttcttgcggcacaagtctgaaattacaacaatttccctcaattattgatccagcggccatcttaatagccttgtccaat

SEQ ID NO: 89577 - DNA, 252 bp, Glycine max
agccacgtctgcatcacgatttgactcaagtctcaattgaagccaattgcttattttcgacgtggatcatctcggatggacttggatctcttctgtcacttcacgacaccgactttcctcacgacactcgtcaccctcgcgcgcatctcctcgcgctacttcatttcatacttttaatcggcacagatttctatcgcgcatttctgggtcagcatcattagcgcgcgtcaatttctttcatctgttcttgcg

SEQ ID NO: 89578 - DNA, 248 bp, Glycine max
aagaaatggagagaaaggagtgaaaaaattatatgtgcaaaaatggcaagaaatagccaagaaatgcataacaattctacctataatcaattttgcatgatgccttaagcaattttgaacaactctgtgttaccagctaacactcacctgcatctagagttgacaaaatggacatgttagtcaggtccatcaggtcggcatttgtttccagcattctcactgttgaatctatcacctcccattgtaat

SEQ ID NO: 89579 - DNA, 252 bp, Glycine max
ccggaacgcagaggtcatcagaaaaatggccatcggagagattccggctaccaatatcagggacggtattggggtcggagccagagaaggaggaggagttgcagctgtggacggtggtggtgacgaatttgctcacccagaatgtgtccatgtccaagacacaagtagttcaccctccacccaaccccttttacttgtaatttgtggaaaggaaaagggattgactgaactctaccgagaggattcgtaaca

SEQ ID NO: 89580 - DNA, 250 bp, Glycine max
tgattctgtttttaacattctagtaagcttcatttgtcttgtagtaaattattcttacgcctgctgcatttttttataggccttgcgtctgctgcattgtgtcatcattactcaaacctccttatagactgtttacttggaacttctttaagatattggtttaagcatgtgaatgatttctatatgcagactagttgccaatgaacaaagatagtgggttaaaagactttacactacaatttaagtagca

SEQ ID NO: 89581 - DNA, 258 bp, Glycine max
ccgcatagatcataacaagagagggcttcctctctttaatgtggttccttcttcctgcctgccaatccttttccttatgttttagtcgttttagtcagtaaggccgagtttcataatatggtgtcaactgcatagttaaccttattcatgcaacacacctggacttaaattacagaggtacttacatttacctcattccaacgagatgagtaagggttcaaatccacgacatgttacacgcgagatcctatcttgttt

SEQ ID NO: 89582 - DNA, 265 bp, Glycine max
gtgaacacaaagctggagagtaccatggtgagcacaagccagagcacaaagaggggttcctagacaaagtcaaggacaagatccatggtgagggcggcgccgccgagggcgagaagaagaagaaggagaagaagaagaaggagcatggccatgagcatggccatgacagcagccgcagcagtgacagtgcttaaactgctgcatcacctatatatttaacaggtttatgggcccatagtagcgagggctgtgccttaatttctct

SEQ ID NO: 89583 - DNA, 268 bp, Glycine max
taggtgaagtgaagaagtgaatacttttcatattgcacttgtgtagttaagcttgatcacactacttaggcttagttgtattcctctctcttttatctgttaattgggtttttaagattcttcagatttcttcactttttctgtggtatttatattaaattaaaggagcgaatgagcgttttgtgtcttcttctgaattatgaagtcagaaaccgtttctgggtgtttgtgattccgaggaaactgtatctggttagcagtattagta

SEQ ID NO: 89584 - DNA, 237 bp, Glycine max
cggagatgggagtcaggtttgggaactggtttgagcaccggaaacctcagtgacactttcaagaaccaccaccacgcccaacccatcgacttcggctgaattccatttccctaattcccgcaaatgggtgctagggttcccgtgcagcactacactctcaactccccctcttccttcatcgacagccgtctccacgtcttcaacgccgtcgacgcccgagaccgcgcctccgccatc

SEQ ID NO: 89585 - DNA, 271 bp, Glycine max
ttctgttataacatctcttgtcattgcattgaggtttgagtattgagagcatttcaaaacgccatggctaacccaattccaattcgtccatggtctcgcttggcctctctaagatcttctcctgctccagagtcacatcctaaacctcacactgcagaaccttctctcaaaacaacaaacattttttctaatgacaacaatgaaagtgccaccaaatctctatcaccaacaccaccagatgttcacatcccaattcaacaaaacctcaaac

SEQ ID NO: 89586 - DNA, 258 bp, Glycine max
gatctgctaacctggcttcagtctacattatcgaagacaattctatcgctggtgcttccatgcactcattcctaccaagtctgggagaaaattcttgagtacttccatttgcaaacacgagctcgagctcagcaattgcgcagagaactgcgtcgcacaatgcttgatgataagacgatgaaagagtttcttctgagaatcaaagcgatctgtgattcgcttaatggtgtcagagatccggtgtcacatcacgaacac

SEQ ID NO: 89587 - DNA, 255 bp, Glycine max
agcggcttttcttaggcgcaaagtatgaagtgttgttgaaggtcgaatgcagtttatgcagggtagtcacaatgcacttcatgcaatgaagttcactgatagctcatatattggatcgggtctcgtataaaatcgttattcaatgtcggaatgagtagtttatggtgtatgactaatgagatttcgggttcaacagtagggggaatattatgtgaggaataagtatgcatgatagactgctgctgaataaatcaa

SEQ ID NO: 89588 - DNA, 258 bp, Glycine max
tactcgagccgaatcggctcgaggccttctttaactaacatggttaactgtaggtgactccatcattcatatcttagtttccgagttatttagctctctcactcctttgattttaagtacatcgatttagcccctaaacttagtgcatcttttcgatgactgtcttgtccagatattcacgtgcagtcactattctcttcgtccatttcctttgatcacagagcaatttatcctaggctagtcttttgctttcccacc

SEQ ID NO: 89589 - DNA, 264 bp, Glycine max
agaaatgattgcaatgaaaagcttatgaatctcccagttattcgagttcttttctccagtgagaagatccaagatatcatttccctgtgtgcaaattccattgtcattcttggacaaggaagcttatatcgctatgcaatttcctgaagctgctttgattatctttgtatcttttctgtggaaatcaatattcctggctcccttgatgttctaaagtgtacttgtgtggttcatcgataaattctatctttccatagtgctctg

SEQ ID NO: 89590 - DNA, 115 bp, Glycine max
aatgggctcgagtagcgacaagtaccgttagttcgcagttgacttatgtgcaatacgtgatttgaaagagacgacggatgcgctcagggaggtgctgaatggggaagtttggtta

SEQ ID NO: 89591 - DNA, 109 bp, Glycine max
ggaggagtacaaattcgagtatggacccttggtttttgaacatgcagagcaaatcctagagacgacagatatatgcactataatacgtgactcgcagtcttcagatgta

SEQ ID NO: 89592 - DNA, 102 bp, Glycine max
atcattcacaaagcttcattcttcatagttcagagttcagatccattcttgtcctatgtgctggttcgtcttgccagaggtctctttaaaattgtctatcga

SEQ ID NO: 89593 - DNA, 251 bp, Glycine max
ctctagccgctcgagccgtttcaggcgtcgttgatctttttctttcgaagagatcctcgcatacacatctcacacttctcccacaagcagtcagatttgcattcgagttagcgcttcatatatacgcgagaatctagtagaccagtatatgtatctctactgataatcctatgcatggcttctaccgcaactcccgttatgcgatactgctcgcttttcgatcatctccacgaagagatgaaaatggagtg

SEQ ID NO: 89594 - DNA, 253 bp, Glycine max
gattgagacagattatacagaagattatgtagcaatttcggggtaccctctaagtgctgcttattgtattacaaggattactggcgcccttgagagaaagtggaagattttgtgatttaacaccaccttcagttcatgcctgagacgatttagtaattcgagttccatagtcaatttatgtaatatcagggataggggcctagcagtgatttagaaaatacaatatatgttgatttttttgaggcattgatgt

SEQ ID NO: 89595 - DNA, 140 bp, Glycine max
gttatttttgttttgcttaggttatatctggatgagaaatgccagtcaaatacactttcttcccccacacatttttgtattcggtgacactcacgtagattttactaaatatctgagtattatatgaatttcaattaaat

SEQ ID NO: 89596 - DNA, 174 bp, Glycine max
gtgacatttaaaggtgcttggtcaatttccacttagatctataacatggtttagttggacatacttaatttgaagatatattttatttttattttcataaataattattaaaattttgcatttgttattcaaatattttctttcttaaaggaacaaattgtatattgcagaaac

SEQ ID NO: 89597 - DNA, 247 bp, Glycine max
gttatggaaggacaactacttgtatatggagcaagtaggtgcaacggcgggagccaagcacatcactattttgatgtggccagtgaataagcctctgctttgggaatatgtactggacgagatgtaccatgctgccttaaatttgagcctaagaatcgcttttgagcaggccaaacgctgacgagcttttaaaggctcctacagaccagcttagggcgccacggccactgcagaagcaatacaaacg

SEQ ID NO: 89598 - DNA, 149 bp, Glycine max
ctagcttgttaagctttttggcatggttttgttcatatatatttctcctcatatcgtgattctaccattttcaatattaagctactaccgcttgcaaacatcctgcggactaaagtgccgaaatgtatggtggcaccgtggcactactt

SEQ ID NO: 89599 - DNA, 156 bp, Glycine max
ctagctattagctatagctagaagtacatccactccctctctgtcattgtgcttttctagttacttccaaaataacaccagaagtagagacaatgcgttgccaagcatggcccgaccccatcgttcgagtccaatccttagctgaaagtggcctaa

SEQ ID NO: 89600 - DNA, 118 bp, Glycine max
gtcatcaccaattccatttcgatttttggctcagccaaccatcacaaatagacactcgatgacgcgaaacaagcaaagtacgaacccagatacgggaacaaggttgttatctctgtta

SEQ ID NO: 89601 - DNA, 264 bp, Glycine max
ggaagatatagaataaacagcattctggacacacaaggggcattatgaattccttgttataccctttggcttgaccaatgccagcctcacctttttatgaatgatgtggtaaaaccatttttaggtgtgtgcttgtcttgtctaaatgaaggctcatgagtgctttatgtctaacaaatgtaatatatggattcagtggaactttaacagaaccagttgagaaaacaggtgatcaaattaaagaaatggaactgaaggttcatc

SEQ ID NO: 89602 - DNA, 258 bp, Glycine max
cttcatcacgcttctgcttctttcatttcgctcttagtttccttttcatactcaccgcctcaccaatacatagttttaacttccttttattgagaaaaagaaaagtctagagtacaattcaatggtatggatgacaccatggagaagagcaccaccatcttagccattgctgcttcccagaggtactccttgaagatctccttcaatttccttttcgggtttatttcaataaattaaggattaatatttgtgaaaaag

SEQ ID NO: 89603 - DNA, 256 bp, Glycine max
cggtcactgggttgctgaacctgaacctcaaccatgtccatggcgtcttcagtttcattttctgaggaaagtagttggggcaaaagggtatctgaaaaggttctttctttctacgcttctcttcccaaaaagggcaaacctcaaggccgtgaagtcaccgttttggccgctttccttctctcttctccttccaatgatttgaaggttgttgcaatgggaacggggacaaagtgcattggacgttctctcttgcgca

SEQ ID NO: 89604 - DNA, 182 bp, Glycine max
tttggctccaaatgttgttgacagagtagacaaatgctccacattgaagtgtgtattcggttctcatactgaattaatgcaatggtttcacttcaaaagattctcaagtggatatattcttttaatgaaaatctatatgtgaaaatttctcccattgcaagaaggaaatggccgcatacttt

SEQ ID NO: 89605 - DNA, 251 bp, Glycine max
  unsure (1)..(251): unsure at all n locations
cagtatcccccttaccctttaccctacgatccctattctgtcggagtaccctcttcctcgcctcctcctcagcagcgccttcccgtttccaagcctcncccgcctccgccctctcctcctcgctcctcaccttgggactttctcaatttcttcgataacagcgacgacaagtactattcccaaactccttactctgccaccgccaccgccacccccagccgcgattccagggaggtcagagaggaggaggg

SEQ ID NO: 89606 - DNA, 265 bp, Glycine max
ctcaggtcaatatggcatactctccacttcaacagctggaatctacacgcgagtctcgctgccacagctgtctagctctctgagggcctacgcgacaagactcaccatggtcccagaatcttccctgttcacgtactgaccggtgaaattctggcacgcgcatagggtatcgaaggatctctcagctcctgggctcgttgcttccatggagcaggatgcgtagctcaaggtgtgatgtgaggcctggaccaggaccaccatggtg

SEQ ID NO: 89607 - DNA, 269 bp, Glycine max
tatcactcgatgatcatgcgtgattccagaacatgtgttgagcatttcgagagagttcgagtccggagtgctcagacatgagctgccctcgatgccgtcgccgacgacttgaacgtcaactcttcttccactcgccagcacgacgatgacgaggacaacttctctggctacggcggctactcctccttcaccggaggattctccgccgacggagatgtcgccgtcgatcactccgccgccgcgtcgccggagatctacggcttcactga

SEQ ID NO: 89608 - DNA, 238 bp, Glycine max
ctttctctcttcgcctggtcttggcatctccgcagcaccaccacccaccaccctgcttagaccaggtcctctctctctctagagagaaagagaaaaaaagaaaaaaaaaaacaactaacattaagcttttaatagtaagacatggctcaacccagtcccaacggggatctgaataataaccagcaatagggtcaggttcaacaataataccagcacggacatttggcggcggcggcgc

SEQ ID NO: 89609 - DNA, 261 bp, Glycine max
cgaacccgaaccaactaccaccacggtcaacgacatctcaaaccacaatgaacaagatcgtcctcttcgccgctcttttcgccttcttcttcatcctcattgaggccgctcccatgaagatcgtccctcagcctgctgcccctgcccccaaggccagcgtttgcgatgcctgcactgaggtcattggtctcctcgagtccgctggacttttgaccaactccaccgccactcagatcgagaccgccctcaaccaagtctgca

SEQ ID NO: 89610 - DNA, 252 bp, Glycine max
atcccaacctgcataagcggaggtcacgcttggggtcaacaagaaggaggacctgaaatgtaatcgaataatatggaaactagaaggaagttgaacgatcagagatgacaatagcaagcttcgacactagcccagacgcgcgaacataaatataaaaaaaaaacaaaaaaaaagacaaaaaataataaaaaacaaacaaaaaaagaaaccatagtaactcaaaagcaaagaaagccctagacttaggcaacc

SEQ ID NO: 89611 - DNA, 258 bp, Glycine max
agaacgttgaaggcattagaaagttggcgagctatatctgataaagaggattgtgatgctgaaattgctggttcagagtgcatggattattcagaagttgtaccatatgtccaccaggcgtttctggcagattggaggccacacacatctactcttacttatcctgaatgcatttccactacatctagagatcaaaatgttgctcacaatgcattttctcaaaaagatattcaattttataggggtactcatgattat

SEQ ID NO: 89612 - DNA, 260 bp, Glycine max
cataagcaaaagcaacggtgaactgaagatgccggttctcaccctttctactaacgttagccttaatgatttagacgcctcttcgatactctcccaagtaatctccaccgtcgccagcatcatgcgcacacctgagcctgtatcactactttcccccctctctctatgatatctatatatgaccatgatttatagcgttgatgttttatatatagaattaagttgaaagttaattcatgaaaattatttcaccccatcct

SEQ ID NO: 89613 - DNA, 251 bp, Glycine max
gtcttggaatattgtttagaggacatttctgatgtgtacccttataatgaaggcttggttatgagtaacaaagtgaaggacaagtataagaagggctcaactaatgaaggacatgctttatttgtataagtacattcttatagattaaaaccaattatgaggtcagaatttctttcagctataccattggcagctaggataattcttggcactaagtattttattaaagattactttggagatattcctca

SEQ ID NO: 89614 - DNA, 239 bp, Glycine max
agagcgacgaaataagtgtggcaaagcccacgcccgaggcgaataaaatgttttaatcgcgaataatgaaagcaaaataatagcagcagagagattattattgttaataataaaataaaatgataagatcagtgagacaattataaatgacatgttaaatatttaatgaagattaaaaaggaaagaaggaggtgggttccttacgcccaacgcatctttgttggttcggggtcggagct

SEQ ID NO: 89615 - DNA, 249 bp, Glycine max
ctcgagccgctcgagccgttaagattgattactgtgtctatcacgttaacatccattttttacaaatcaaacttgtggatgtcatgtttctaatatccattttgcattccctcgaatctcggaacccctcacgtttctaatatccgttctgcaacttcccaaatgttgcaacgtcgtcgctgtcgtcattgtggccaccgcgtctgccattcactgcttccctctctgcaacggcgcttcgcagtctca

SEQ ID NO: 89616 - DNA, 227 bp, Glycine max
aggaataataatgttttcttctctatgcttttacttcatgagaatgatccggggacatggaggaaatgccagtgctgtgaccacgtgagggctcggaaaagttggatttcctccatgtccccggactattctcatgaaggaaaagcaaagagaagattatataaggaataataatgtttcctatacttggcgttggcctatttatggtgcaatatttagaggttaca

SEQ ID NO: 89617 - DNA, 245 bp, Glycine max
tctcgagccgaatcggctcgagattcctagttcttagaagttacttgccttcagcaatcagcacagtatgaaaagataaataactgggaatacactgaagaacacagctacagatatttatcttttcatactatgctgattgctgattcctagttcttagaagttacttggattccttaccagaaaagaaagtagaagcaaataggcgaaataaaagtgggggcctcaccaccacagctggcgct

SEQ ID NO: 89618 - DNA, 256 bp, Glycine max
attttccacaatgtaactgtgatgcaatcaaataggttaagatgtacaaacaacagaatgatacttgtaaatatgggaagaagtgcgacaacagaaaatcgctctcgcccctccctcttcgtccttccgcctccgcagccgcagcctcaactccctccgcctccgccgcatcttcgacatgttcgacaagaacggcgacggcaccatcaccgtcacggagatcagccaggcgctgagcctcctcggcctggacacc

SEQ ID NO: 89619 - DNA, 199 bp, Glycine max
ggagccagcgcgtgaccaggaaggcgattttgagttggtataggctatagtgtctgactgattgcatgtgctctgtctttttattctactctatgatccgggtgcctgagtggctggaacatttttattattccgcattagtataatggcttgtagtttgcattgtgacacgaaatgatataaactgcactttacgcac

SEQ ID NO: 89620 - DNA, 247 bp, Glycine max
tcctggttcttggaaaatttggaatattggcacaatattcacgatacttgtatcctttacgaggggcaaatggggacccttgctacaattgaaagagaaagttgaaacaacaatagacgaagcacaacgagtagtagacattatagaggacgtggctgagggggtagataaggtcgcggtgtcagctgtgaagcatcttcccgatggaaaatttcgtgatgctgttgaatttgttgaaaaagtagct

SEQ ID NO: 89621 - DNA, 240 bp, Glycine max
atagtcccatgcaacttggtgatattagggccaatcactgtggtgctgaaggaatggtcctcaagtcgtcacttcctgtgaaggatactggttcaacttcaactgctggcgtgtgttattgatctataaagattggaaagaaatccattcaggttctatttgaacatattgatgaactggaattgtaataaaattgattaatataaataagatccttatgagctatgtataacttgaaca

SEQ ID NO: 89622 - DNA, 230 bp, Glycine max
tgagattttagcaagtcaacagtcgtcgactacgtctgtggactaatcaaaaccaatgcggactgaagaactgtcgcctgaacgtacgtatcttgaaacgctaattcgatatcctcatcgtcagctgagaaagagttcgatactactgcttttgaaagttctcaatcgcatagtgggtcctattatggtgccgataattccaattataatagtaatcagccgccgttccg

SEQ ID NO: 89623 - DNA, 243 bp, Glycine max
caagaacaagatcaatggaaaaagttcgcaggatcgccttgtatctggatcaagatgttgataggttcttcccttcacacttgaaaagacaccaccatttaaggtctcttctttgctaccatgaaaaggcagttaggctaagtgaatgggggctgatgaagtctttttttaacaaatgtaggttacttagagtgttgaatttggaaggaatacagtgtcagggagggaagttgccaaaagaaa

SEQ ID NO: 89624 - DNA, 240 bp, Glycine max
tgatctatcagaagtcactggaaaagagcaaatggatgctcagccaaccaagaaaggaagaggaaggaagcaataacttggccttttgctagacaagatggttttatgaatcacaggaccaactaaggttgagtagttacattttcccgacctaatgattacttcgtcagattcttatgatgagaggtttatatattgaagttttgaagtctcaatttctgatctctggcagtcttgagt

SEQ ID NO: 89625 - DNA, 236 bp, Glycine max
cggctcgagctcgagcgaatcggctcgagacctttttggatggcattccattgcactgagaagccagaactggcagaaatcatataaccttcttgaacgaacacagaaaagtaggaaaaaagaactgagactagttctttataaattgactgcagctatgagttccactaaaactgctatactcattaaatcgagcattatgacagttaacaatgaagctaggtctttataagttg

SEQ ID NO: 89626 - DNA, 116 bp, Glycine max
gcacaagcacaagcagcaatgttgtataactccatctcatcgtcattgtcattgtcactgtatgtagatcactcagccacttgagataatcttagatattcctgtacgtcatcgta

SEQ ID NO: 89627 - DNA, 239 bp, Glycine max
gtgaatgggaatgtcctcagtgtgatttctataactatgggaggaatatgacttgcttaaggtgtgattgcaagcgacctggacaaatatctctgggtgccaccaataccatgccaaatatggggtacgaaaatggaaacaatcctaatacttcagacattgatgctaggttagctgctaatgaagaaaaagcacaacgttggtttagcaaggtttctcaactagacagcagtgctgat

SEQ ID NO: 89628 - DNA, 239 bp, Glycine max
aaaaaattgccagattccggccacaaattttctcgtttctctctgtctcctatcatatcgtcttcactctagcgtgccccatccgttccgtgtcaatttaccaatttacccctatatttttccaatttacttttttcacccgaagatataagataattaccgtttcgtgtaattttatcttttaaaagaaaagaggaagtatagtagtgacgtggcatgcggatagagagccatgaata

SEQ ID NO: 89629 - DNA, 238 bp, Glycine max
ctgaatctgtgatatatcattcgagctttgaatgcttctccctccataacaacaacaacgctctcttaatctttcttttttcatttccaatgctgcaacaacttgcaaggttcatatgcagcactacgacagacccaattgaattcccacaaaagaattaaagaaaaaacggtcaagttagaatcttttgaacctttcgatcgcgtgggaaggaagagaggaagatgggtgcgtacag

SEQ ID NO: 89630 - DNA, 267 bp, Glycine max
actgcattccgcttcagctcgtcgggctcgagggcaagaaggcctacattgttgtctctggaggcaattactgcccttgtgaagatgctgcaagagctctcaaatggcctgcattggtctgcaaagaacgccggtttaagattttgacttggccattgaagcactttctggggtgtcagattctgaggcaccagtgatacatgcagtgtacaccagcttgaagggtttgatcaaaattcacaatcccagtgtagtgatcagtctggc

SEQ ID NO: 89631 - DNA, 254 bp, Glycine max
gattacttgagtgaagaagaactcaatcactctgaattatggtgcataaagctgactgcgtttatgatattatctgctactatgtctggcattgtttgaactttcactcgcagcggcttattcgtgtgatcttagttctctactctcattccaagcgtgggtgtatatcaaggtggcgtgatatgccatggtcgctagacctgttacagagctgatatctataccggcgacactaatggtgtcaaactcggaga

SEQ ID NO: 89632 - DNA, 127 bp, Glycine max
ttaattggctgaatatgatgtcgacctcgacgaacgtggtagtcctggacaacggccgcaggctgatcaatgcggcatcggcggtctgagcgacccctccgtcatagtcccgaagtgactctaacgc

SEQ ID NO: 89633 - DNA, 253 bp, Glycine max
cacaagcctggaaaccgcccacaaactcgccatatgggtgttggacgtcgcatgaagattcaggggctccctgagccgctttcagaagagcactttgccaatctcaagcggtaaaagggcctgcccgtcgacgaactccgtccgaggtgcgctctagcaagaagcgtcgcacgtctgcgaagccgagaatcccgccagaaagctccgtgaggactcgggcaagactgctgtcgcatcgaagtcagcggggaaa

SEQ ID NO: 89634 - DNA, 245 bp, Glycine max
gtacccaggccttcgtatgacaatgaaagaacaaaaaccttagtgatagttagttggctggtcatgtgtgttctgatttgcaatttatgcctgattagtgatccttcatatcacaaaatgtggcttctaattccacatattacccttgtccatagtacgaatggtcttttgttttttatgaggtcaatggcttgatcaagtcaagtagttttagacttaaagccataaagagaaataaaagagtt

SEQ ID NO: 89635 - DNA, 254 bp, Glycine max
ctgcattctccttcttcagtaactttctccaatttgaaagaattgttcatattcaactcgtcaaagactgaagtatttattcacatcctcggcagcaaaaaagttaagtcaacttgaggagatcatcgtctatattgtaaatcaataaaagaaatagtggcaaaagaggaagatgaaacagctttaggagatgtcatattaccgcagctacaccgcatatctctagcagacttgtcaagcttggaatgttttta

SEQ ID NO: 89636 - DNA, 253 bp, Glycine max
gtgtttttgttgctcatatttggacaagagattgcgtgttttatggagattgtcgagataaggaaatgaagtgctagagggggatggcatgaagggacaagttgaattaaaagtagggaagggtgactgagacgaagcatcacattcactggtggttgttggcttgtccttgtgtggttctgctttatcttaatttcatgtcatgtgctgttcctcttcactcctcctttggtccttcatcactcatggaccc

SEQ ID NO: 89637 - DNA, 253 bp, Glycine max
gtgaaggctgagtccctctggagagaagggtataggctccatgattccatgcttcctttgtttatactcacttcggttgcacagaggatattgaggaccgggaaatccattaattttcttcgcgtttgttgtaggatcatggttgggctgatgctgcgaccgaggttgttgctgatcatggagcaacggcgagaacaggtggttttggatatggagaaacggatacccttgagtttttggtggatgaagcttc

SEQ ID NO: 89638 - DNA, 244 bp, Glycine max
cagagaaacccattattttctcaagctcgggagatctgccaccatggagttgtccacaaagacgaggaagaagttcggtgatgatggaggattttgggaagattggtatgtcacatacaccgtacatggccaaacttgttccctctgcttagtaagagattatgacaaacacgataatctcaataaggtatccttcattctcctagaccttggacttggatttaggactttatgcttgcacata

SEQ ID NO: 89639 - DNA, 212 bp, Glycine max
atttgtttattcgggttgcttagttcctcctaacttacctccggtcttagttctttggaagctttaaagcttaaagtcttgtttgatatctttttcttcccttgccagatctatatttattagattttagatggtgtgcatatcaattcccaagtaccttattgttcatttatttttttgtttatctgatttgttgctattccaccaatctg

SEQ ID NO: 89640 - DNA, 252 bp, Glycine max
atgatgcgaacgttttaggtttagggattgatgtttcacctaactctgattgtctactgagtcatgacactgacctgccctgccatacacagagatgaattgatatataagtatatgatttttttttgggtgtgatcctttttactctttttctttctctggatgcctatgactccatgagcatgtttgattttattattgttaactgacaaaaagtaatttttgctaacggatcaatattattgttattgt

SEQ ID NO: 89641 - DNA, 258 bp, Glycine max
aaaatatacttcccattctttaatttcaagtatttaaatctctgctggtttggtggaagttggtgttgttggcattgttaggcatctctgtattagtacctgtcataatggtatgtgcaatttacagatgatttcaaggtcaatcatgtccttggataattggacatgtggttagattgtaaattgtagatgtggactttagtgatgctcgtttagattcatttacgtacatgatcaaaagttcttctataaagctat

SEQ ID NO: 89642 - DNA, 230 bp, Glycine max
attctattatcccaagaattaatcttatgctactctactctagatcaaagtgtcactcgtcagcatcttctagaaaactgcggaatacatctgcatgatctggaattcgtgttctatttcgattgttcgactgtttaattcaacacaggcaattaggcatgacactcttgttgagtatgctctgcctatctgaaaatttccacacctcttttaattgtcgtaatgatgtg

SEQ ID NO: 89643 - DNA, 223 bp, Glycine max
ctggttcaatagaattttacgattaggatcatgcaatcgaggtattacttggaagaagggttcaggagtgggagttcttgagcgaagtgatggatcatgtgggtgatgttaatcgtactgtagtgttttaggattagagccttggactggatgtgtatggtacaggagatgattatgattagatgacgttcagagcagttgttgggtatggtactgaagatgc

SEQ ID NO: 89644 - DNA, 238 bp, Glycine max
atttggtgaagagaaaagcaagcaatagtgttaagactattcatacagaaaattataaaagaaaagaccaactgcgaatgatctttattgttgtacccacaattgtttcggtgtcactcttcttcattggctactatttgctgaattgaaaagcaaggaaaagtgctaagactattcttagaggaaactttggtcatgaaagtgtcactttagaacccttgcaattcaatttggttgt

SEQ ID NO: 89645 - DNA, 225 bp, Glycine max
ggtgtatccaaaatcctgtactactatattggtgtctgatgagaatcaaggcatgtagatctttagggcttcgatagtggaatcgctacagcatttccgataatactaacttgcagtagcgtatgcactgagatgcctcacaaatgtagatgtgattccctattgtcgctcggctatagctcaaagcatgtgtacatcatccttcgtaaatatagcggcttagtg

SEQ ID NO: 89646 - DNA, 166 bp, Glycine max
  unsure (1)..(166): unsure at all n locations
cgttcaatagaattttacgattaagatcanccactcgaggcattacttagcagaagggttcaagagtaggacctcttctgcgaaataatgcgtcatgtgggtgatcttaatcgttctatacaatagtacgattaggcatttggtatcacagctacatctacacgag

SEQ ID NO: 89647 - DNA, 221 bp, Glycine max
ataatgttcaacaacttatggaattgagcaattcatggaatcttagtgcatatagcatgaaggaacgaatctaagtggattttagtgttatgatagatagcagctcggcaggaacgcaggagaaacttgtagctgatgtctaatatattataggtgactgctgaagacaacgtgagttctatagtcactacttcattataactcgtgctataatctggaaa

SEQ ID NO: 89648 - DNA, 246 bp, Glycine max
gcttccgttcatttccgtttcgttttcctacttttttttctcgctcccgttttctccaattcttcctagcaacattcgccacagatagaggtgcttacagaggccgtggccgtaacggtaatggtggccgtaacagttacggtggtggtcgcggtagttacggtggtggccgtgacggtaacggtgaccataacagttacggtggtggccgcggtggtcgtagcagttacggtgatagacgttctc

SEQ ID NO: 89649 - DNA, 250 bp, Glycine max
aagtaattaaagttgaataatatctgctgagcattaaaagttccccaaccatgaaggcaatccttgttttctttttactcttggcctctatttttttccttcccagttcaactcttgctcgacaactggagggcggggtgacacctggtaccaacgatcctaatattagatgttcccccggcggcagttataggtcttgcctccccccatcgccaccaaaaccaccatgtgatccgtatattaggaaaga

SEQ ID NO: 89650 - DNA, 234 bp, Glycine max
  unsure (1)..(234): unsure at all n locations
cgtctttttgttcaaattcacgcaacaatcaggctaatcgacttgttaccaaacacgccctagctcctatttncncannctcgaanccaaatatgacccatgcaacgcatgccaanatttagtttccaaacttaataaatacaaacaatatctctataagtgtgtgggtgtttgtgtctacattttctttgccagaacgcaacattaacactttacatttttgcattagaaaat

SEQ ID NO: 89651 - DNA, 182 bp, Glycine max
gtaaaaaaaaaaaaaaaaaaaaaaaaaaaaaagggaagccaatgacaagaaaagcagcagcctcaggcaataaattcgtcccaactgcatccggacagagaattttatgattacttgtgacgttgaagaagataagtttccgttcattagaaagtaataccagctaaaatttgctaatgctg

SEQ ID NO: 89652 - DNA, 269 bp, Glycine max
aagtagtattccaagacaaggacaagataaagttgttctttacctgtatcaagaccggcaactatcacatggccttagaaatggcaagagagtgggaagagctagcttatgcacgggatgaaaataaggacacagctttgcatctcttggctctaaatcaaaaccctttggattcttgttgtcattgttcaacaattaaagatcccatccagatcaaccctgacatgaaaaaacatgtgatgtttcaattggttaattttctgtggaaa

SEQ ID NO: 89653 - DNA, 266 bp, Glycine max
cgtgtgcaccagattaaacacgatttagttttatatatatattatctagcactgtgctgattgttgtagactgcatcttggatacgggaacagtgtgccaatatgagctctcgggcaggcaagggacctgctatcagaagttaccggcggagaaagacagctttggaccttgaccttaaccgtttaccggctggtgagaatcgtgagcaggagggaccttcaactcaggcggtgcctcaagaaattcaacttgaacagcagccaca

SEQ ID NO: 89654 - DNA, 189 bp, Glycine max
ctcctaaaggttctatgttggatcttaaggagtttcaacctcatcttgctcctctcaatacgaattttataccagcttttgactgtggatagaccttcgatacaatgatgtgcagggtcagattgagacaaagtggttctcatcacctcagtcagatcttgaaactcctaaatgttctatgcacgacat

SEQ ID NO: 89655 - DNA, 147 bp, Glycine max
gtcgtagtatcagatgtgtgatgtggacatctgcagagatgtactgtccaacgcgacacggctatcatgggaggcacaaggtgtgtgaggctcgcagcaaggcctcataagacgcttctcgccgatcacatgcaacgattctgccag

SEQ ID NO: 89656 - DNA, 260 bp, Glycine max
tgctaaggttatactacctctggcgtcttggtgctacaactgtagatttctcaatggagtagttatggtacctcgactttacatctggtgatacacttcttctcgccagatgtgatgtaattttgtcttgtaatttggcaacttagagtcttagactaatgggaatggaccattttgttatgcctttctcttattgcttacgttcagataagggatagcattataacagaacaaccatgcacagtacgtattttgcatta

SEQ ID NO: 89657 - DNA, 214 bp, Glycine max
  unsure (1)..(214): unsure at all n locations
aacaaagcttccgatgctgctgtccnacaggcccagtccagacatcgagacgattgctccaccgaactctgttcctgcatctccgaatgagggaactgaagcatgacgagttcgtgtccatgtgttacctctggacgagttgcagatattgttgacaagggatcgacatcacgtggtgcaagtggggctcatgatacgctgatctgctgtgtca

SEQ ID NO: 89658 - DNA, 248 bp, Glycine max
cttccaggcaggcttcaacaaatctcctaaaagaaacagtggttgtttatgttgatcatctagcctcatccgttcaatagtttcttccttaatgtaattttactgtgttaaaagatgatcaacataaacaaccactgtttctgttgatcatcttttaacacagaaaaattacactaaggaagaaactattgaacggatgaagctagatgaggaggttatcatggacttctttagggagcatatcagtg

SEQ ID NO: 89659 - DNA, 268 bp, Glycine max
  unsure (1)..(268): unsure at all n locations
gcgagtggctcggctcgcgcgccatccgttgcaactgggcgaaccagaagggccagccgtccatctcacagcagcaggccatggcctcgatgggaatgacgcctactaccccgtacggccaccaccatttccccacgcacggcgtgtcgntctacgagatggtcgtcaaccagaccccccagtggcagactacatgctacgttggcaatctgacgccctacaccacccagtcggacctgtgncctctcttccagaacttcggttacgt

SEQ ID NO: 89660 - DNA, 267 bp, Glycine max
taaaagagtccaaagttattggtttgtgggcatttaattcttttgttcatttattcttttatgatgaatattgtattatatttatgagtggaatattaatcttgacattagtttacttttacctctgcttttaattagttaagaactcaatggttgtcgcacatgcttgtttgttagaatatgcaattgcaatgttgcaagtaaaaaagatgtaacttcatttttatacataacagacgcatttggtggagtgtgtttgattaaaaa

SEQ ID NO: 89661 - DNA, 258 bp, Glycine max
cttggagaagatgacactggtgaagaatcaccaagacatctcaagcttccctctcggcgaccttctgttgtatgtgagaattgcctgtactctctagagagagatatgcgagcaagagcctttcacattttggagccaaaaggcactgtagatatgcttatcctcttcctagaggaaagaagtgatggggctcctcctctacttgatagttatagggatgcgaagagtaggattataccttttcttggtaaatggaaa

SEQ ID NO: 89662 - DNA, 254 bp, Glycine max
  unsure (1)..(254): unsure at all n locations
ctttcagagaacaaactctcgggtgaaatcccaaagagtttagctttcctcagattgagcctctttgacttatcgtataaccggttaaccggtccaattccacacgacatacgatcccaagnttanaanggaagnctgtngggaaagactgggttatgnagggtcgaggggattaactcgttcccgcgttgccctgcttcctctgaaaagcccgaaggacatgcgcgcgctcataatatgcttcgcggtggctt

SEQ ID NO: 89663 - DNA, 256 bp, Glycine max
tacatagataggtagatagatatatgcgatggcgttgaatttctcgcatcgaccgattttgtctgaggataatttggtttcgccgatgaggatgggaattctggagaagagtgttgttgacaattgctttgattatgggagagagatgggtggtggtggtgcgaaccacgatgacattctcgatctttggccttcggatcccttcggcatggacatcaggatcaccgtcacagccatcatcgggtggctcgaggat

SEQ ID NO: 89664 - DNA, 253 bp, Glycine max
tttgagagggcgagtaaatcgaaagacaagagtcacagcgcacgccgaaacagaaacagagttattgggagcacgaaacactaactgattcgattcgattgaggttacaaaagactaaactgaagtgattcgattcgattgaggtttcggtttggtcttgatggtgtcggtgaacccaagctgtgctcaaggcttctacttcttcgatccctccaagatggtccttcccggcgtcaacaatcttccacagaac

SEQ ID NO: 89665 - DNA, 252 bp, Glycine max
ggtggaatgcctttccaaccatttctagctgttgccgctcaacctattcatacaggtgctgtttcactgtttccaaaccagcctatggttcctcagttagcatcttttgaccaatctagatttcaaattcagtccccttggcgaggtcttagtccttgtagcctgtcaaggcagagagaggaagcccttccacctgacttgaatattggttttcaatctccagggtctcctgcaaaacaaacttctggtgtc

SEQ ID NO: 89666 - DNA, 204 bp, Glycine max
attacatatgtatgcatgtaaccaaaaaaaaaaaaaaaaaagggcgcccgccaacaattgaccccgtcgccccggaatttattcccgacccggaacctccaggcgtaccatcttgcgccaatagacagccttataaaaccttggcgaaatcatggccaaaccggttccctgggtaaaattgtaacccgcccaaaatcccacaca

SEQ ID NO: 89667 - DNA, 250 bp, Glycine max
atttgataacacagtttcagcatttgaaacactgccgcagaaaggttcttaaacgagtagtctagttgtagactgccagcaatcttctgtgccttgttcctatacggtgtacatgtaactaagcggtgttgtattgtatgtaatagatactaagtacggtacgtatatgttcatgagccgagtttctatacagaggtagcaacaattttgtatttgataaaaaaaaaaatgtttgacataggtgttcgat

SEQ ID NO: 89668 - DNA, 260 bp, Glycine max
  unsure (1)..(260): unsure at all n locations
aaaagatctaagcatacagaaatgtaggaaagcgatactttgtttgaaaatccagaagcgtttgacgacagttcagaatttacggcatcagagttatgtgatatttcagcatttgcaaccgaaaacaagagattaacacgtgtttcaaattcgacaaagcctaatgttcattctcgcactcctcaaacttgttgtcacgtatcaacgcaatcatgtcatccgggtgtctgggtaacaataanatcaaagagagcaaaatt

SEQ ID NO: 89669 - DNA, 248 bp, Glycine max
cagacgcgtaagatgtggctgtttccttgtttgttctatcgtcggcatatgacaatagatcatgagcaataattattattattttgtatttttaatggctggcatagtggcatcacttaatcatcccaaattgtagccctcgtccaggattatggccaaataatgggttttggtgtattagggattaaatggccctttttggctatacctatcaaaaagtaattagaggtagcatctacttattctgt

SEQ ID NO: 89670 - DNA, 244 bp, Glycine max
cgtgattcatggatgaatcaccacgtcattaggaccatacatggttttgaagtgcgattccaaccggcgtgagttatcaaatctttatatcgcggttggaattacggtgaatcaaaatatctctaagctgcggtaataattattacatagaatcatataataaattttcgtacgttagaaaataaggtagagtaacctttttttttttgtcctgttccattgcagtttgttatcttgttccgag

SEQ ID NO: 89671 - DNA, 251 bp, Glycine max
cgaagagctgggaacgggagattggagcaatcagaatttgtcggaatcggctgattgggaagcaatgtgtgctggtgcaatgcatttaatttcttcccaattccgcccattcctatgatttctgatgattctttcctttccttttgctttttgcaatacgcaatatgcatgtaccttatttttcattccatcctcattattctatgctaatggatagtacttccttcttctccatgtttcttttattgtta

SEQ ID NO: 89672 - DNA, 260 bp, Glycine max
gatttcttcttaaaggctcaaagggttttctgggtttgatcgaacaagcaaaaaaaaagagtcttctgttatcctttcaacgctaccagatgccggaaaacaggcaggttctgaggaatgctgattctagtgacaacattgaaggtggtgcagatttttctggttattggttttccattgttgtttgtcatgattcatggtttaaatggctccgatcatcgtttaatgatgatggctttgtgttgttttgctagggaatg

SEQ ID NO: 89673 - DNA, 268 bp, Glycine max
cgattcattgttgttgtattgaagcgtgcgccgcctccccctcaacctgaaccaactccggaaccaaaaaaagaagaagctgcagctaatacttcatcaagtttagctcccacacctcccaaagaagctgctgacatccctgcgactccggccaatcgtgctccacctatttcgacacctcaagcacccattcgaaacacgattgctccgttgtcagaagaaaatcaagaaaagcttaacaccatcgtcgcaatggggtacctgaaag

SEQ ID NO: 89674 - DNA, 266 bp, Glycine max
tgatgacgatgatcagaatgatctagcagagaagggtacattcaatgaaacaatttcggattatgatgctctgaacttcgaggatcccgagttggaggaaattatatcagattagtgaaggtgctttatttgtgctgatgtacctgttgacttattatggttctttgccagctccatttgacagctgcttataaagctcaaaaacaggaacagagaaggcacgtctttctcgatactggccgaactatagtaaaaagacatctcaa

SEQ ID NO: 89675 - DNA, 262 bp, Glycine max
tggcaaccaagttaatatttgatattgcttttgcggatggcatggttggttgtcgggtagacagaggaaaaggacaagacatatggaatctttactttttccgtccattcaattcaactctttgaaaggctgaattctagcaaaaacacaaaatagcggaaaaaggataatatagtccaccacgcccccctgtcctgtcgcctaacacattgcacatacccatttcctatttctatcttgctttactattttcaagggtccc

SEQ ID NO: 89676 - DNA, 259 bp, Glycine max
gtttcttcaaccactactgtggaactacgtggccgcaacaatgatgacgatgatgatgacaaagccacttcatttctgttccctttctttccgaaatttggtgttttggggcagaaggatttgaagctccaactggggaagctttctcaaaaagagaagtttttgacacacagagacgatggtgatggttctggagttgtggccgttgactcttcatccgtttttccagtcagtggcaatgtttatccagatgggttgt

SEQ ID NO: 89677 - DNA, 261 bp, Glycine max
atccggcgagactcgccggattccgttccccgatggctcgttcgacttcgtgttcgccggcgacggcgctttagaaaaaagcgccgcggccggcggagttcgccgccgaaatctctcggacgctcaaacccgaacgttatgccgcgttccatgtaaaggccaatgacacttacagttacaattcattcgttgatttgttgaatttttgttgcaacgtggtgaaaataaacgacatgttagggtttgattcatccatacctc

SEQ ID NO: 89678 - DNA, 250 bp, Glycine max
ctcgagccgaatcggctcgagccattcgtcatttgagcttttgatgggtaaatgggatcatgctccgtcgcgaaggttcttccgccgtcgaagatctccggtgcgtcccccgaccttctacgacatcaatacccctcttcctgagtattggcaggacggaatacccttatgggagaagaaatactgcactatagttggatcggtaccgtggcagaaaattgttgattcaaagatgtttgtatactgccac

SEQ ID NO: 89679 - DNA, 242 bp, Glycine max
tgcaacttataataatattaagctagtccatgattccttagtattattataagttgcattgtgagcctatagtatagtattaataaaattaaggaatcatggactagcttaataaatttgaacagcattcttatttgtaaaccactctccacttcgttactttatattctttctcattgtaagttgtaaccaagctaaataatatattcttcctttttggagtaaaaaaaaggaaaaacaaa

SEQ ID NO: 89680 - DNA, 249 bp, Glycine max
cacacgcacactcatgccatgatttctcaaattagcatgctttcccttgtcatcttcctcttctcctctttactaatcgttttatgcttccgcagaacgtctgaaatacaaatgcgcactcagtggcacatttccttgagaaccgtgtcacacttcagcagtgcttgaaaatcactcggtataatctgcactcgctgggcgagagcctctaccggaaaatcctcacttagctcgacactcgtgcctgcg

SEQ ID NO: 89681 - DNA, 251 bp, Glycine max
gtcttatgggtggctcccgtggacaacgcgagtctatggtcacagctgcattatgtgtcgcgcgatgatctggacatgctagaagctcctccagtgaatcgcgtaaatctgcaacgagcaatcgatcctcagattcagcagaaggacgcgcactgcacttggagagatgtctctcgaatgtaatgcctactagaatcggtcctgttccacttgcttatagatgctggacttccatgcgatgcggatgatgt

SEQ ID NO: 89682 - DNA, 244 bp, Glycine max
  unsure (1)..(244): unsure at all n locations
aagagagagacttngttggaagggaaatttgtcctttgatattagatctcgctctagatgcggaaaacgtttcgtctacgaaagctcactttgttagtggatcaaccttccaatatgatatagttcgtgctggggacattcttcagaagatttccctgacaaggaagatctggaagaacccaaaaagattggtgtcacattgagtcgaagaatggatcctccatgcaatgaggttcatggtcag

SEQ ID NO: 89683 - DNA, 249 bp, Glycine max
agcggtaatgtgggagaatactgataggagcttgcaggaggcttttcaagacttgcatgctctcatgcacaaggctctagaggttgagaagctagcgcagataatgacgctaaaacctttgtgtggctcaattctcaaaggagtgcgactaatgatgaggagatgggttcgtaggcagatatgcgagattgggtagtcagtgatcgtattatgtcccctgttacgaaagagtctgcgggtgctttgtat

SEQ ID NO: 89684 - DNA, 237 bp, Glycine max
caactctaattcttactagaattaatagcaactttgttaagcttttcaattgtgtaattttttcctttctccttttggacagttaattgttgctgaagagagttaaataaagaccatgaatttcactgtcagaacgttcaatattatggagattgaagccgacgcaagagatagttctctcgttctgctcaagcaaggagctgaagctagggtttttgagtcttcttttgtgggaag

SEQ ID NO: 89685 - DNA, 244 bp, Glycine max
cttttaggccatctggttctgacttcccaagttcactacatatgtgacatcagtctccggggggttgctttagttgctgtctgaggttgtagctggtgatgtgctctgcatctattccaatccctatgtcctctcgctcctcagcgagttctggtggcaactacatgtttcaactgtcggatgcctggatccctttctcaaaactcatgcttggacgaggtcctctgcgctcccaggagatggg

SEQ ID NO: 89686 - DNA, 274 bp, Glycine max
cgcgtgcgcaagattcggctcgggctccagacttcatccgccgctacttggctcgctgcggtagctctagccccgaggcgtatcgcgtacctcgacctgggtaggggtgcttgcgtccgggctgtccctccttatgtggctgcactttgcttcctcttcttacggggctcaattgcactccccaagtttgcgctgtaccttgggcatctggcgtgagtgggcgacgagatcgtagacactctagcgattattgcgagggcgcactctcgtggcc

SEQ ID NO: 89687 - DNA, 255 bp, Glycine max
  unsure (1)..(255): unsure at all n locations
gtgtgattacgacaacggagaacgaagccctgcaaagccttcttcgcctcccagacttggctacatcgaacaccatgtttccaaattcgataccttgtccggtgtcgctatcaagtacggtgttgaggtggcagcataagaaagatgaatagccttgttacagaccatcaaatgtttgcacttaaaactctccacattccgctacctgaanagcatcctccatctccttatttgtcaaatggttccagtactcca

SEQ ID NO: 89688 - DNA, 261 bp, Glycine max
  unsure (1)..(261): unsure at all n locations
tgaaattttaataaaccgcgatcacaggttgccgcaccttaaaaccggaaacgaaagcaatcgtgtattgatttcaaggatttctcaatttcttcctacttctctgtgtacgatttcttaagggaaagaaaatcactctctgtgctggtcacagacttcgtgaatcattttcttttccactcctagttgaaccgctnaacactctcctatttgatataggacttcgtgtcagatttaaactttttctgtttctttctcagg

SEQ ID NO: 89689 - DNA, 186 bp, Glycine max
ttttaataaaccgcgatcagcggttgccgcaccttaagaaccggaaacaaaagcaatcgaaaaatgatttcaagaagttgacgaagtcagagcagccaggagaaagaggagggttagaaggcgaagaagcatggcttcactcaagaagaagaaaccctattacccgcttccgttaattcctatcta

SEQ ID NO: 89690 - DNA, 248 bp, Glycine max
ttctagatcgcgagcggccgccctttcttcattccttacaaatgccaactcggccgaggaggtacaagcagtgcagggctggccgtgcccagaagcgcctccgacgtgtcgtaacttcattttgacgaacgagcgcgacgactgtttgacgcaaactccctgggaacggcgggcgcgctattgcttgcctacgctcccgagccctttacaacgtggctcaccacggctgatgtcactccactcgttgg

SEQ ID NO: 89691 - DNA, 248 bp, Glycine max
gagctcctcaattctgtatgaatattcaatcaaagaatacacagagactgaacaatttgatttaggcctaacgtggaagcatccaattgtttggaatagcccacatgcacctttatatgccagtagattttcgatgggaagtgggaatgaaaggggtgctattgcaatatccttgaaattgatccagggacttgttgcaatcaataacgttaaagagaggtgtaaatttcaagctaatgttctccaaa

SEQ ID NO: 89692 - DNA, 232 bp, Glycine max
  unsure (1)..(232): unsure at all n locations
cgtctcttctccttctccccctctctatttctgtttctctaacgattttcgcttcccaatgtcatccctctcatataatcttagctagacattaagatagtctatcttgatcatgggattcaattctgtctatagaaacttgcaggagatatatccgcaggatgatcccatcctactgagggcagaagatccangaanannnaaaggatgntgatntagaagntggaatagt

SEQ ID NO: 89693 - DNA, 212 bp, Glycine max
  unsure (1)..(212): unsure at all n locations
gggattaatcactttcgacaagccaaaagaggtagatggtccatatcacttgtggggagatgattctggttcaacagaaagagcaaatcatttggcttacattcctgccccaaagcagaaattacctggccatgatgagtcatataatcctcctctagagtacattccacacaacatacgagactgngataaggcggtgaggtgagaggaag

SEQ ID NO: 89694 - DNA, 144 bp, Glycine max
aggtgctaaaattgttgaagttttacatggagatgaagctgccattatactgcaaactactcggggaaacctagaatgtatatgccctagaaagttggttttggtttccatcattaatgcattatttcaaaagcgctttaaaga

SEQ ID NO: 89695 - DNA, 218 bp, Glycine max
ccgtagtagactcgaattgttgttgttgtggtgagtgtttgggcacgatggcggaggctcctccgtctctattatctgtgtgcatcgacgctctcacacaacaacttctctgtccatgcgatgatgatcttcttccttgtatctacgatcttccttctcacttactcgataccttaatcacgcgtttgccccctctcgcactccgcacattccacaca

SEQ ID NO: 89696 - DNA, 263 bp, Glycine max
gcgtggatttttctattggttgaaaaatttatcacatgaaggggcattcccgccatggagagatccatcgtgtttgaatgtactgccacaacaattggaaggatagttgtttgcttttaattttctgtcatgatgcaactttttatttttgttttgagtgatgcaattgatttaaactttactgaacattgcttaggaggagtgctgccacatgtgatacctcgtgggatataaacaagtttgtctctttgatgtgtttcttt

SEQ ID NO: 89697 - DNA, 262 bp, Glycine max
gattttatcaattatctgcatgttttgtttttcatgtctctttgcagatcaagagtggttcctgttcctccacttagtttctccatagtatccaaaatagttcttcttggggtgatagggtaaagccacttgcttcactttactttcaaattcacacttgtcaaggcctttcaaagttcatctcaggtactgggttatgcaggcattagctacagttctccagcacttgcttcatcaattggcaatctggtacctgctttca

SEQ ID NO: 89698 - DNA, 260 bp, Glycine max
agtgatgcaaattctgagacccactgaggtacaaagacaatcatcatcaaaagcatggaaacacaccccatgagccatcatcatcatccattagtttcttcccttttttgcttttctttctttctttttttctgattctaattctaattccttctactttacaaattaaagaggttgcaactgtgtgctgcactgtggctagaactacatgttctgtggttcccttcatgctttgcactgtggctggctcctgttctgtc

SEQ ID NO: 89699 - DNA, 227 bp, Glycine max
cacagagagaaaaacacagcatgaagaaaatccgcaactcgatcctactcttatcaatctttctggcagtttcagcagcggaaccgattccttccgccgcctacgaccggctgctgttcccggaccgccgatgccagaagtcggtgtcggagaacaagacgcgaggaggatcctcggcggcggcggcggcggcggatctgatggacgttagttatcggtatcctctc

SEQ ID NO: 89700 - DNA, 227 bp, Glycine max
gtcaatgtatcgactatgaagatccgtggacaactgcattgttgctcttcaaaagtacaagactcctaattccaactgttaagcacggctattcatgccagcaaggattccactccagtttcttctctgtttttgttttgcaattaagtttttcttttatttctgcaaatgcttgaacttttatccttaaatatttccaatcttcaatcatcatcatgtgtacgttt

SEQ ID NO: 89701 - DNA, 223 bp, Glycine max
ttggcatcaaggacttacctcaggagcttctttcccagcctgttgagcccagcccagctattagagcccagcccatctgccaaggcctgtgaaccacatgctgttattgctggctttactgactgaggaacaatgaggatcgacatttttcttttgtttcttttttaaggcagaaactcggatacagtttcttaggtgttcttcgtgttgttttctggttaga

SEQ ID NO: 89702 - DNA, 228 bp, Glycine max
tcaatttttgcgaaccccaagttgaatgacgctgcgttgggaaactcgcatgctaaaaagcgtgacactcaattttccagaaacgttgttgaagggagagttccctctccgaaaaacaaaaccttgtcgccgtcaccgtcgctagaaccaccactaccacgagaaccaccaccaccagcagctatgtctttgaataagggttcggggaaactgtctgccaaagagaaa

SEQ ID NO: 89703 - DNA, 223 bp, Glycine max
cataaccctcctcatgatctattctcgattcctcgcgattcccgttcctttccctcatctcgtttgatttccccaatttcctcaccgtaggggttccattcgatgactctcttctgttcaatcggaaccaccatccaatgagacggcgccccgtggcgggcgttctccccgaccaaatggagaaatcaaacaccaaaaaccctcattccagactctgctttct

SEQ ID NO: 89704 - DNA, 307 bp, Glycine max
cttgaacgagcagatagcgtatcatagaaaacaagtgcagcagtacaaggaagtttcgctatggagccaaacattggacaaaaccgttgggatcatggctaagcttgtttgcattgtatacgctagaatatgttctgtttttggaggctacatttctaattgcaactgctatgaaatcaatgatgttgacaacaacaacaacaattgttgttgcctcttggaacaccgcgagttgtacaagaaaaattattgtctttatgaagaatcacttcagaagcgtgtcacaagatcaggtcctattcccaag

SEQ ID NO: 89705 - DNA, 305 bp, Glycine max
aaaccgcgatcacaggttgccggaccttaaaaccggaaacaaaagcaatcgttacttgatttcaagaatttctcaatttcttcctacttctttgtgtacgatttcttaagggaaagaaaatcactctctgtgctggtcacagacttcgtgaatcattttcttttccactcctagtttatctactgaacactctcctatttgatataggacttcgtgtcagatttaaactttttctgtgtctttctcagttctctgtttaatttcaagttcaagctggtgaaattttggattagtgctcccactct

SEQ ID NO: 89706 - DNA, 296 bp, Glycine max
tggtgagaggtgttgtgcccgcgtaagacaagagccttgtgaaaagtgtcgtagtagaagaacaagaagaagagcgtagttagtcaagttaataatcacttgaaagactcgtgctccgtaattggtttttcatgacttcttgcactcttcttatgttgaggagagagtgagggagagatagttggatcattggttcatcactgggtgtgaggaatggagaatgattaatggggatgatgagtgtgagcattgcggtgttggattcccaggtggctgcagggagagctgtggatgtg

SEQ ID NO: 89707 - DNA, 286 bp, Glycine max
atcaaactctagatctaaacgcacaaggatagatgatgagagggttggcgcggataagaaagctagaggccttacaccatcatggtccactcctgattctggtgttggcagcattcacatgccaggaatgggtaatcctgctttcaacacgaacacgtttggttatccatctgcacaaagtcttgggaatgctgatgggagtgccatgagtgacagtctatttgcgaatctgaagaagtcttcaacaccttacattcctcaaaactcaaccccatgtgcaacttta

SEQ ID NO: 89708 - DNA, 200 bp, Glycine max
ggcaacggacctcgatttatttctccttttgtctctccatcagcaattcagaatcagcagtatatagaagccacgcgccataacgcagtaacagtaccatttctcatgatcaaatccatcgcttccctcagtttcactttccgtctcctcccgtgctcgaaccacgatctagggtttacttcagattccatacgacagac

SEQ ID NO: 89709 - DNA, 238 bp, Glycine max
atgttattggattggtctccgtatagctctacacatggttttataaattgcatgacagccaacagtggccaatcatgtataaggcgtcacttgtctctagttaaaaactcgactacttccctcattattaatgttactttcatcccacattttcaaaaaaaaaaaaaaaaaaaaaaaaaaaaaaaaaaaaaaaaaaaaaaaaaaaaacaaaaaaaaaaaggagacagagagaacacag

SEQ ID NO: 89710 - DNA, 262 bp, Glycine max
tctagattcgcgacctgccgccctttttgtttttttgttggttatcattatttttgggggaaagtaatgctcaattaagtgtgctgagagtacgcgcttcctttgaagaagggttacaagtccacgattgttatgttttggggccgcgaagttgtttaattgggggatatcgtgaaagtttcggaaggcctgcaaatttttccagcgaacccttggacaattgtggttcttagaaaaaaggaagaagattctgtgatctagg

SEQ ID NO: 89711 - DNA, 280 bp, Glycine max
  unsure (1)..(280): unsure at all n locations
ctcgagccgctctccaccacctctggcctctgccacacactccatcagctctcncgctctgctcctccagtcactgcactggcagctctgtctccccactaagcccattcatcactccactctcagcgtcgctcgcccgcggcctgcccacaaacaaccgccacctccgcccttggggtcccaccacgcagcaatccaccacagagtcgcttcgacaactgcggtatatgtattcgcgccaaagtcacgcttttcgactcgagcctcctcccgagcaatc

SEQ ID NO: 89712 - DNA, 256 bp, Glycine max
attattgtacatggctttcatcttttttcaatttgctgacagagggacaaacaaaacgcatatgataaccgctaaataagaattattcgtttctgaaaaaaaaaaaaaaaaaaaaaaaaaaaaaaaaaaaaaaaaaaaaaaaaaaaaaaaaaaaggggccccacaaaaaaaggaactctgaacccggagaaattatcgagggggaaaataaagggggagaacactttcccaaaaagaggaccctaaaaaaaggaga

SEQ ID NO: 89713 - DNA, 255 bp, Glycine max
ctactactcacctttggcctttggttggatgctcctcaaggtactctagttctgtttatgttctatgaaaacctggctaatagtattgcagaactttctatggcaaggagtggtgtgaacattttaataattaattggcatcctaggttatttgagtaggcagagttttgcatgctgatacgagtacagtgttgatattgggttggtgatttgaaatgagttatgctttctgatagggtggttgactgtaggcat

SEQ ID NO: 89714 - DNA, 160 bp, Glycine max
  unsure (1)..(160): unsure at all n locations
gaagaagaagggtgagctaaagtcaattttccttcctttcctttccacacgacatatcgatttgnnagaggacatgagcagactcatcgctgagggcgagggcgacgccaccatcatcgtcagcgcagatgacgccgccgggttgcaagagtcgatcggt

SEQ ID NO: 89715 - DNA, 273 bp, Glycine max
ctcgagccgattcggtcgagagaccaagttgtgtaccagtcatgttcataaagattggtggctgagcgtaagatgaaaggatttggaccttcacgtcctaacttggacctgaactctggcttcatgattgagggtgggaatagagacacattagctgcaaggcaatttttctttcctggtcagggcagggctgtggaggagcaagtaagtcccatgccacaaccctcaagttcaggggttagtgggaaacgaaaggaaccagacagtggtttg

SEQ ID NO: 89716 - DNA, 176 bp, Glycine max
tgagccccagatcagatgctctctcttcaattcaacgtcaagccaagccaagattttccatttctcgataactccattgtcgcaacatggctcaacaacaggaggacgaactcgagtatgttgctgatgataatgaaatggcggaagtagaagatgacatgtatttccgtggtaga

SEQ ID NO: 89717 - DNA, 262 bp, Glycine max
ggaacatgggttcgagttgtatagctggcttcaatacacattggacatccataagcccagcgggagatttggtggatcagccgctgggcttatggatgtccaatgtgtggtggaacatgggttcgagttgtatagctggcttcaatacaaaattgtcatttgagtttctcttttggtgagggaagaattgcttgcattttacctgcagaaactgaaggtggatggaattgtacaggagaggagacatgtagattacctgaca

SEQ ID NO: 89718 - DNA, 235 bp, Glycine max
cactcttctattttccaactgtacaatttcatttcagatagcttcttgactcgtttctgactccctctataggagaccgcgttcaatcctctgactctgctaccggcttcgctgattcatctccgccatcggctcaggactactctcgtcgcaccgtccagacgtcgctcccgattcggaggaacactctctctcgtattgaattgctgcatcaagtgatgtgcctaccatagca

SEQ ID NO: 89719 - DNA, 190 bp, Glycine max
ttcggctcatgattttgataaccgcgatcacatgttgccgcaccgtaaaaccggatacaaaagctatcattacttgatttcaagaatttctcaatttcttactacttctttatatacgatttcttaagggaaagaaaatcactctctatgctggccacagacttcgtgaatcattttgctttccacacaa

SEQ ID NO: 89720 - DNA, 237 bp, Glycine max
tctgcttttgctagtggtactgtcttagctttgattctctgttctctgttttgttctatttcgcgtgtaagttcccctgttcctcttttcctctttctaaggtattcttgttcttcaataatatcccccttttttgcattttcctttttctttagggggttatatttcttggcttcaatttctatttggacgatgagaaatgccgacgtttgatttctttttatacttttctttgtg

SEQ ID NO: 89721 - DNA, 201 bp, Glycine max
cgattggcagctgaggcttagattgatttcgtagatcacggcgggaagtagaatgggtcattgcccatgcttcgattcgcgggcggtcgagcagctgtatcccaatcctcagccaggtcaccaccaacatgactatgcatctgaccgacgatctaagccccctgttccttctcgtatatccagattgccgccctactgcct

SEQ ID NO: 89722 - DNA, 237 bp, Glycine max
gtcagaaaatggtgggtgtaggagtgagtgtatccgcagcaatggttacaactacttttcttagaactgggattgaacactctaatcaccgcagcaaacaccaatggactgcgtacttttgtgttcattatcgtatcaaacttcttagctctcttcttccttataccctccaccttcctactaccacaggcaatgagccgcccccccaattccaagctcaattctctggagaatttc

SEQ ID NO: 89723 - DNA, 193 bp, Glycine max
gaacagttgacatgagagatagagcaacgtcagagtttaccgtagggttgtccttagttcatggtttctgatacagatagaagggaatccttcttatctctctctctctctctactctctctctttttctgaatttgaacttggatcaactgggtctatatttgtgttcatattagagtggccatcacgggat

SEQ ID NO: 89724 - DNA, 219 bp, Glycine max
ctcacatcatcaccatttcacctattttgctctctctctatctctctctatcgcatcacaatttgctcaaaaccttttaaggcttcataattttccttctttctatctttgtgaacacacacaaagtccaaaccatggctcagaataccgagaacgacgaaaccgacttcaacgctcccgaaacgattacgctttgcgttaacctctgcggcatcaccg

SEQ ID NO: 89725 - DNA, 195 bp, Glycine max
tggaaaagtcacttacaataaccagcctttttcaggtgccatgaaatggagaacaggctttatggcgcaggataatatgctataccctcatctcacagtctttaaaacccttcttttcactacacttctaaggctccccaactccttgacaacggaagagaaagtgcaccatgtagagcatatgatcagtgagct

SEQ ID NO: 89726 - DNA, 278 bp, Glycine max
cgacggggaagagaatcgcgaagtgacggagttcaacctctccggcgtcaaggtcaccgtgacgcccaagccggagaaggaaacctccatcaaaggacgcatcagcttcttctcgaaatcaaattgcagagactgcaccgcggtgcggagattcttcaaggagacaggaatcaaaatacgtcgagataaacgtcgacgttttcggcgagagagaaagagagctgcgcgagagaaccgggagtggttcggtgccgcagattttcttcaacgagaagctg

SEQ ID NO: 89727 - DNA, 149 bp, Glycine max
cctcgttctcgtcaatccgccagcgacgtgagatactggtcggcatcgcctaagatgaagcagccgcgagtcggtccctagctggctgctcaacagccaacggccaacaagccatcctccctcctcctctactctctacccatcgtccc

SEQ ID NO: 89728 - DNA, 258 bp, Glycine max
  unsure (1)..(258): unsure at all n locations
ctcgagccgaatcggctcgagtctctccacactgtttccatagngggcagcaacctactatcacaaaaactacttcagaaacatacaagaatatcccccaaggcaaacatcaactcccatcccaacagtgtagcatgccagctagaccaactattgatctaaataccaacccatagcaccaacagggaaagagtgatcacttaaatgatcctgttgcttccattgatgcaaaactactgcaggcacaatctcaatttg

SEQ ID NO: 89729 - DNA, 257 bp, Glycine max
gcagtatgcatccatctgcatttgcacaattggagcaggcgttgaagatcacatttaatttgagcaggcattgaagatggtggtgctatgtgcaggctcagtttttgtgttcatacattgatacttcttatagggtcatggttttcctcccgttataatcatttgtctatgcctgttggcagcgtgaaactctgtaaataggatgctgctcctttattataatatataaaggggcagtattgagtctataatgttca

SEQ ID NO: 89730 - DNA, 257 bp, Glycine max
caaattttgtttcatttaaactactttcttctttcattttatttaaaccatgatagtttgtttctacaataatatgcttaatttctttccaacagatttaggaagtttttcaagagattctacttgctgtaaaatcatccttatttccgttccatgacaacactaatacatatctcccatttcgcatattgatttttatttttattttttgctgaacacttcacatattgatacacatagcatacatgccatattat

SEQ ID NO: 89731 - DNA, 258 bp, Glycine max
gatgactctgaagatgatgaccaagaggagaatgacgctgggagtgaggatggcaatcacagttgaaaaatgcattatggtgctgttccctgtttatttgtctggttgagtatgtaaggcttttaggcgtggtgagcgtttccattttttcgaggtgttaactcaaggtggagctatatagaaagtggttctttgaccatataatttattaattaccctgtgaagttgtttcgctggtttcagccttcatgcactttt

SEQ ID NO: 89732 - DNA, 253 bp, Glycine max
aaggccttcactttttggagcattggttaaggagtactccaatagatcagcttaaccagaggcttagatctaataaggacacagttgatgtactcaatttccatccaacacacagcaccaaagtcaaaagacattggtcgacgggtctactaagatcaatattttttagcattaattttgatgttttactctttcagtagtttattaattagactaggataataggtaagaaaaatttaaattttttactaat

SEQ ID NO: 89733 - DNA, 247 bp, Glycine max
tgcagtagcattgaaagactaaagatgttgatgggcttatgataatgggtgttgggtttaaacagagaaaattttgaaatgggcttacccatttgtgagtttatttcgcaaggccttgctgcttccctccaagaaattttataggtctcaatcaatcctttgctataacataaagagcctgtttggttgcagcctggaagaacttctaagagcttctctactggttctccaattctcaacttttcgg

SEQ ID NO: 89734 - DNA, 250 bp, Glycine max
aggtagtgtagaacatggaggagggttgtctcgtgggaaattcggagctgaggggaatgggaaagttattgggcctgagcaagcggcgaaattgtcgcagaaggcagtggcacgtattttgttgggtgttgggtttgaaggtgccatggaaggttctgttgaggacttctctgaagtattgagcggacggatatgtaaaataggaacaaatttgagggtgcttgctgatagttacaagaaacagtgctcg

SEQ ID NO: 89735 - DNA, 136 bp, Glycine max
ttatgttctggggccaaatttttgtctggaaggcaaaagcatatatagagagaataaattctaggtccaaaatttgtatactttttggaattgagtaggtcttatttttggtcagctttgtgttagcttaaattga

SEQ ID NO: 89736 - DNA, 248 bp, Glycine max
tgggcactcgcttggtggtggtactgctgtgctgttgacatatatgcttagagaaataaagcagttctcttcatgcacttgtgtcacgtttggcccaggcatgtggttatactaattagtacttcttaaatttacatctaaagttttaattttttcgagattattgggtaactgatttaattggtttatattatgattgaattgatcatcaaatgatttttggtattaaccagatgtagaattactag

SEQ ID NO: 89737 - DNA, 240 bp, Glycine max
agcgacgagagcgaaaatacccccaaatcctccctttgaattcgaagtcaccttcttctgatttcgattccgtgtcaataataatagataacaatggcttcccaacacgaaaacgggtcgattatcgatccgaatccttttggggtggagacagtactggcttcccagcacgaaaacgggtcggaaattgacccgaaccctactgtggtggagacagcaatggcttgccttcacgaaaaa

SEQ ID NO: 89738 - DNA, 222 bp, Glycine max
ctaatattgttaaccaacaaattttagatcaacaactttcttccatattctctcaagatgatttgaattcttatcttctcggttacgttaataataacaataacgatggtaacgatagtaataataacaatattaataacaatggttatgatcaattaaatcttataaatttattgacagcggcagcttcaaataatttgtcattagactttaatcaattga

SEQ ID NO: 89739 - DNA, 233 bp, Glycine max
agaaatcttcctacaaaaagttatcaaagtggttacaagcaaaatccacctctggcttgatatcagtgaaagaagataagcacaaagaggaagtaatgctattttcagtaaaccgaaaacatgctgattattcatcctttaagcctgaaaaaaggcgagtggagaaaagtgagcaacacagtgttcagtctgccaatgaaattcgttcatccaaaactcttgaagtggctgaa

SEQ ID NO: 89740 - DNA, 238 bp, Glycine max
agcctgttccccaagaacttttggacagggtcctaactgcccacgcatattggtcccagcagcagactaagcaacagctcaagcaccactctacaaaaccttgccttctcctttaataaggacttgacaccaccacgtgcctttgttaaaagtgtcatttatcattttttcttcttcctgtatttatgacaaagtgtgtttatcactttgatttttagtacaatgtcacacttaatct

SEQ ID NO: 89741 - DNA, 186 bp, Glycine max
aattttaataaaccgcgatcacaggttgccgcaccttaaaacctgaaacataagcaatcgttacttgatttcaagaatttctcaatttcttcctacttctttgtgtactatttcttaagggaaagataatcactctctgtgctggtcacagacttcgtgaatcattttcttttccacacaacatac

SEQ ID NO: 89742 - DNA, 227 bp, Glycine max
caaagattctatatatttcccctacactacgattattaggagaaagagagaaacaatggagtctggatcaatgatcaattagatcttgagcagatgatcacaagactaattcaggaacttattggaggatgatggcgaggtgtccactttctatttgagattttttttcatttttacaagatagctaaaaacaagtatttttacaacctatccaagataaagacata

SEQ ID NO: 89743 - DNA, 205 bp, Glycine max
aaaccaaaccccaaaattaaaattaaaaaagaaaaaaaaaaactctttgtttgtgttctcaacttgttaagcttcgtaccagccagccacactgcaatcgccgaaattttccacttccgcgaaacggcgtgtcgttttggaatcagagagttttggtttttgctttcgtaggttttgattggggttacagaatgaacaagtgttt

SEQ ID NO: 89744 - DNA, 225 bp, Glycine max
cttcaatacaatctctcctttatctgtctctggtaatccattgtactgtggttcagttgttaatcactcttgcccttctgttcatccaaagcctattgtcctaaaccccaagtcttcttactccaactctggctcttccttacaaaacaatcatcataagatgatgctcagcatctctgtcattattgccattggtgctgctatttttattgtcattggtgtggt

SEQ ID NO: 89745 - DNA, 250 bp, Glycine max
ggttcttgatgctcttttatgtgaatatgaaaaatccattcaagctccagagaagtggcaaaaacttgctgtcttcttacaacaaagttttgaaggcccggtactagacctaaccaggagactgataaataaagttgaatctgacaagagttctctcagtttaaactatcgattgactgaagataagattgccctgcttaataagagactggaaaccagtgatagtgaaaagtctgagtatattaaacgc

SEQ ID NO: 89746 - DNA, 246 bp, Glycine max
tgatgataaactcatgccttctatacatgttccttgaatttcttagttaactttattttatatccttatttgtatttttttaacttcatcttttagttgagatgtatgcttgttatgcatgtgaaattcttatattatcagcagtagaactaaaatgtgagagtaagttcctttgaattatcctggagattttatttattattggcctatttgtctagcatcccaaacaaatttattcataagtgc

SEQ ID NO: 89747 - DNA, 249 bp, Glycine max
gtcccaatcccgcatcctcctgtttaatttggtgcccaaaactgtcatgccaacttctttccatattccatgcttcagttcaaagttaagcagaattaaaaacacacatcacatagtaatcaactttttaacacagattcttcatattcttggatctcactctgctcaaagcaacgttctttggtgctaagttcaatgtacaatggcggttgccacgagaggagccaggggtggatctagttttcgtag

SEQ ID NO: 89748 - DNA, 225 bp, Glycine max
ggaactaatatggttgatgaactacaagatccaactcaacagtacaacgcatttatggtacgagattatctatcaagaagcatttaattgctgttaaggatcagacataatgactgccgttgtaaattttgtgcaataaaaacataacacaagtgagtctggtgttgttttaaaaaaaaaaaaaaaaaaaaaaaaaaaaaaagagggtgtggaaaagagagaggg

SEQ ID NO: 89749 - DNA, 198 bp, Glycine max
aattttctagttattataaaatggcatacacaagtttcggataaatatcacacgacaaacatgggcttactgcgcaaatcctctatgccatcacgggaatgaaatcccggcctatacctcgactttccggcataacccacctccaaatgatggcatagacgatgcgtgcattaggtcaaacctgttcccgtgataaaa

SEQ ID NO: 89750 - DNA, 160 bp, Glycine max
aattgtttatcgtcaaacagatgatggccttgtagctttcttgacagaagaggtcattgtaaaagagcttcttgaagacctaagttgcatacacattggggttcttatgcagaaacatatggaaattgcagtgcttcaggttcttcaaattatccattgg

SEQ ID NO: 89751 - DNA, 250 bp, Glycine max
agcagtttcaactaaacccctctatctctcccaataaactaaagaaaaaaagaaaactgtaagtaacagatccatttctctctccacctcactttcaaaaatctcgcttctcttcaattttcggccaatatccttcaaaaccctaatcctctatcccctttgatccgccccgttttccatttctgggatgatgtatttacatttgggtctctttctgtgcattctttctgtgtgctgctctgcgactttg

SEQ ID NO: 89752 - DNA, 249 bp, Glycine max
ccaaagcagagcaagaggtagctgttaatagattccgtaaatgggccactaggtattgtcctgatgcccagtatatgaatgtgggaagtgattcgcagttgcgccagtgctttttggtggcattgtgaacagaaaggactccaatcaaacgcttccaactgaacgaatattcaaaattcccaatgttaataatgtgattgaagaaggcaagaaggctccaaaaagattttgtgatataaagttgacgag

SEQ ID NO: 89753 - DNA, 241 bp, Glycine max
aaattttatgccttaaaatagggtgtactacactggaaagtcctaactgatgtcatattgaaaaagataagttgcttgaggttgtgaatactttcatgtaaactaaaccttatgcagcaatagtcatttctcttaagctgtctataattgtgtgttatgtggtaatgcctcattatgtcatattgttgtcatcagagatgtgaacattattttgctaggagactggagttggaaccaaatg

SEQ ID NO: 89754 - DNA, 244 bp, Glycine max
agttggctcaatctctatgttagattaatgttttaagagtttggctaattgagctaagaatccaaaatgaaacagtgaactttgttatagcaatgaagtgtgttccctctaccgtgtttcatttgctcttgttcatcttccccctagtactctctgttcacttgatttcagctttatctccaactgggtcagccaaacattccataaagtttatcctagggggtcagaatttgggtccatggaa

SEQ ID NO: 89755 - DNA, 246 bp, Glycine max
aaccgactttgttgctcatagaagatccaccggtcaaagacatcatgaacctaataaggagtatgaaagactgcatcagcatcagagaagagaacaacccagaaagcaaactaataaacttattgagtctggtgttgccaatggtgaagggcttcatcttaataagggcaaggtggttggtagagaggggaggagagtcacacgtcgtgatgataagaagttggaaaacaagtgttgctttgagga

SEQ ID NO: 89756 - DNA, 107 bp, Glycine max
ctttcaaatcaaaaccctagcgagggttccttccatcgatccatcgatcgtggcagacgaggttccgtctcctccagcagcgtctgcttcgactgctcctcttggtt

SEQ ID NO: 89757 - DNA, 242 bp, Glycine max
aatcatccaaaaccactttattaaacaaaaccctaaccctaaccctaaccctaaccaagtccatctctacctcctcaacctccctcccgattcctccaattctaattctaatcccaattccaaaccctatgcttactcctactcccccggcgactcttctgctgctgtaacaaagtgctccgggacgttcttcacctcctcccaccgcttcttctggatcgacctccgcgccggccccgtcg

SEQ ID NO: 89758 - DNA, 235 bp, Glycine max
agcgcgggttgttcctggaaggataaccagtttgcgattttttccgtccagtagtgtcaaaatggtcgcggtgggtaacaagtttgggaatgtcgggttctggaatgtgggagaaagtgaagttcatttataccgaccccatcgagctcccatttctgggatcctgattcaaccacattgcttctccaagatatacacaagttgctatgatggaattctccggctaatggatgtt

SEQ ID NO: 89759 - DNA, 145 bp, Glycine max
tttaaacctctcgttttcattctagggctttgaattttaattgtgttgatctcttttagtgttatgcttgctcgtttttcaatcgtgtgtgttctttgcttcgtttcaccaatctttgtgttcaattcagctcattatgatgctg

SEQ ID NO: 89760 - DNA, 251 bp, Glycine max
gaatagtttcattatttttatggactgcgtttctagttgcgggaataaattttttgcttatatttggcacatgtatttctgtttctatatatagaaaattgagttgaagcataattttatattacttgatttcttaaaataaaaaggatagcatggtaatttggaagtatttcagtgtgattcgtatttgatatttatgctctacaaagtaaaattgttaatattttgcaacaattgccctctggttgcag

SEQ ID NO: 89761 - DNA, 248 bp, Glycine max
gccctagctgaagttctattcgaggcatattctggtgctgttacagctataaatgagtgcggagaagaacacaaaggtctgttaaatgaatattgggagaggcgtgatagccttcttgaatctctctatcaaaaagttaaagattttgaagatactcacaaggattcgattgaaggagcttgagagcagaatgaagaggccataatgaagttacttcacatctgttatcaattgctaaacgacatgga

SEQ ID NO: 89762 - DNA, 254 bp, Glycine max
gtggaactgctagagaagtactactttgttataaggaggctctaaaagatttccagcatgctctcgttcttgaaccacagaacaagactgctagtcttgcatagaaaagactcagaatatcaacgagttgatacaagctgttctttcaacactactgaccttccttctcctcctggagaatgttaatggctgtggaaatatgatttcggtcctttcttgcactttataccttggatgtgattgtgaaggtaagt

SEQ ID NO: 89763 - DNA, 249 bp, Glycine max
gcattgttgaggatcagttgggaccttatttgtgtaggaaactgcattgcattggttggtctgtgtttcaacattctgttgtgcacaacaatatagattctgtggccgaagaagttgagagacaaaaatctaaaagtgatatggtatttatatatggaggtgtaggtccactgcattcagatgttagcatagcaggcattgcaaaagctttggtgttcgtttggctccagatgaagaatttgaagaata

SEQ ID NO: 89764 - DNA, 243 bp, Glycine max
  unsure (1)..(243): unsure at all n locations
ctcccgccgctcgcgccgcatccgctcgcaatttgctgtgcgagttggcttgctccccctaagcatgnanatctttatggtggtaatggctctgaagacccttatccattgacagggcaatattcccagttcacattactaacaatgacctacgatgctcgactttggaatttgaaaatgtatgtgaaacattactcaagatgtcttctgtgcgggagatagtggtggtgtggaacaagggag

SEQ ID NO: 89765 - DNA, 181 bp, Glycine max
tctcgagccatttcggctcgaggacattttgataaaccgcgatcacatgttcacgaaccttaaaaccggaaacaatatcaatcgttacttgatttcaccaatctctcaatttattcctacttctatgtgtacgtattcttaagggatagtaaatcactctctatgctggccacagacttcg

SEQ ID NO: 89766 - DNA, 257 bp, Glycine max
gtagtatttaaatatagcatttccattgtcgacttaactacttggggtagtagactcgtagagaccacttgtaatcatagatctgatctgccaggagatcgtgggaatggaatcggatctcaaattacaagtggttgttatactctactacacgaagtagttaaattgacaatggacatgtactacttccgtagagcacgaatgacgtggtttcctgcgaaggccacaaggagccttgatggggattcccctaggcc

SEQ ID NO: 89767 - DNA, 270 bp, Glycine max
caccaatgatttaatgggtattccatttcgtctcctcaaactcacaactacaattgtttcgacgcagagtgagaggcgttaatctgaatgggttacatccaccatggaagaaccggtctcaggcacttattcagattcagaccgccaccggcgtggtaaaaaactccgcgagatcgcaattacgcactgcatttctctcccattcttcccctatcctcggcaacaacgtggtttttttctccacaggcgacaaattcctgcacgaaatta

SEQ ID NO: 89768 - DNA, 273 bp, Glycine max
cgctcgagccgaatcggctcgacctgaagatcagctgcctcaacgtgaatcgctgcccaactctggtccactgccgagtactgaaccaatgcaagacattcatctcacagacattaaaccgttacctcataatcatctggccagtatgatacacttcccagcaatcatcatatcgaccattctgaggcagtttccaaccatcaactaactgactctgagacactgtcccatgaacagctagccaattctcatttgttgcctcactatgggctg

SEQ ID NO: 89769 - DNA, 269 bp, Glycine max
catttcctcaagatgcatcctctagtgttcatggtgttcatgttattagccttatactctccttcttctatatccactagagaagccggtgaaggcctaaggggtttcagcatcgaccttatccatcgtgactcacattgtcacccttttacaacccttcactcactccatcagaacgcatcacaaacgctgccttacgctccggttctcgattaaaccgagtatcacacttcctagatgaaaacaatctacccgaatctcttctaatc

SEQ ID NO: 89770 - DNA, 271 bp, Glycine max
taatgaccaagaaatcaagcccctcagaaaaagaaactgcttttgctctggctgctcttatggagatacctttccaatataaagcagccattgaacttgaactacttggtcgtgcaacagggagatcaaataaaatagtccaagacctcctccagctccatattcccggcttgtgccaccagctcgcgttctgagcaatatgccaactttcatggatgatgagagaaaccaaatggcttgtgctatttgtctgaccaataaaaaggatttg

SEQ ID NO: 89771 - DNA, 259 bp, Glycine max
cccactcagtaaagtttaattattctgatgaggactgattgacgatattgttttattttgtgggggactgcgcagtattgtactattgttgtccttatttcgttaccatcagacacaaagcgaatcatctgcggatatgaaatttgtgatgggggagaatgttacatccaaaagacattgctaggttctggtaaacaagttgactttcacctgtatgttttctttgtgatttttgctgtccgttcccaaaggaacgaga

SEQ ID NO: 89772 - DNA, 258 bp, Glycine max
atcaggaggggtctcagtggacagactgtgaaataagagatgctatcaattcagtttatcaaaatttagacaagttggattcatacatatcttttcttgtcatcaaacataaaaagccaaggaaaatactcaatattggatccgctatacatgtggtgcagttggtttgtcagtatgctccatttggctcttgcggcatagtagattggtggggagttctgatcttgataattgggttgaggaagctaggaactcaac

SEQ ID NO: 89773 - DNA, 260 bp, Glycine max
cggctcgagtagagaacaaggacatggttttctcttcacttcgcaggtactttagtatgaggcaccaaagctccaaggttcaggctttgtatgaacattgcaaaaccatcttatcgccctctggatcaccccctccttcgtcccaagctttgcagaagctttcttcgattctgggtttgatttgttctgaaaatgaacttctgttttatctctgcacattgttaagacactattcaacctgctgatgttggccttaaaga

SEQ ID NO: 89774 - DNA, 255 bp, Glycine max
aaagaagttgcatagccctcatgatagtgatcataacggtttcttgttgaatgtagaaaaacaagaggctccaaaagccagagttaagcgtagcctttctgaaaacatgccggtcattagtagatttaaaagtttccgtcaaatatctcacaggacctcgtcattgaaaataaatttgatccgtaatgattctgctcaagattgtgtatgtcatgattcttctcttccattatccaatgccgtggatgatgacca

SEQ ID NO: 89775 - DNA, 173 bp, Glycine max
gacgggacagactgaagactgtcaccgagcaatgcgttcagatggcgggtttactcaacgagctaagaagtcgcgtcaacgaggaggacaatgcgagaatatctgatctgctggaaagggtcgaagaaaacatttccgacatcagacagacgtcagcgccttctattccagac

SEQ ID NO: 89776 - DNA, 263 bp, Glycine max
  unsure (1)..(263): unsure at all n locations
atggcggtcaacgtccaagtaaaagctgtgacacgtgggcagtgcaaggttgtgaaantgattgtgctcactgtaggagaagtcacactgcttcatcagcattgaacttgttcgccagtactttttgccgtttgtcttctggttgtgtggcagaagcaatcatatccacaaccagcatctctccctgttctccgatgcttcatcctctcgcaaacccaaacacccacaacacttgatctgccttcttcccagagacccttctc

SEQ ID NO: 89777 - DNA, 250 bp, Glycine max
taaaaaatgtcatcttctaagctcacactgtacggaatcggaaccgcactcttccgcacccgtagaactccacccgtaactgtaactccccactctccctttctcttcttcaaacccattcccttcccgccgtgcttcctccgccccgattcctcttcctcctcctccttctccgccgccgcgccgccgccgcagaaaccctaccctccgtcgaccacccctggccggaatgggtctccttcgtcgaccg

SEQ ID NO: 89778 - DNA, 251 bp, Glycine max
cctcacaagaagcctacaaaactatggttttattgcaacagaagacaatgaagaggtatctgaggtgcaaagacaattgcgatggtcttattctcacatagttgaagagttcattgttggcttagataaggacatagacaaagtggtggaatggctattaaatgaaaatcatcattgtcatttgtttatatttgtggaatgggtggtcttggtaaaactacacttgccaaaagcatgtaccattacaatgc

SEQ ID NO: 89779 - DNA, 252 bp, Glycine max
atcatctctcagcaaagaaagaatccaatgcctattctactgaacctcagagccatgaaacattaaaagattctgaacagatgaaatttttaagttcatatattggtacttgctcaaactttaggtcgattattggtgtttttctttaatgtctttgcttcaatataacagggattgctaacccctggagactttataagtgctccacctcttgtaattggcgaatgtagaaggtcccaccaattattctat

SEQ ID NO: 89780 - DNA, 113 bp, Glycine max
ctcaaaagaagtttgatagttttttgcattagttccattgtgatttcactgtaaagcatgtagtggatttggtgatacttcaattaaagaaagttcaactttttgttatcgtt

SEQ ID NO: 89781 - DNA, 249 bp, Glycine max
ctgagaggaacagtctagacccagctgcagctccgtttgctaaaaatccaagagacatagaagggcttactgagggtgctagtataattgaagtggtaaatgttataggattcatcaaggaaaattcgtttggctcaatgatctactttatgacattgaaaagaattactttgatataaaagactacaccctctttactttattgaagctaattttaaagattatgcacacttttatagccatccttta

SEQ ID NO: 89782 - DNA, 250 bp, Glycine max
ccctcgcccgctgcacgacacttcttcgccagactcgtcgacctcgagctcttgccctttcctttctttccccccaccagacaacatcaacaacatcaacaacaacatctccaccactccacctcctcactcgacacacataccctcacctcctccaacagtgtgcaaccatggccactggcgaatgccccatcaagcacgccaacattggcggcggcggcaccaggaaccgcgactggtggcccaacga

SEQ ID NO: 89783 - DNA, 243 bp, Glycine max
cggtttttctttatttatttgggttgaaagaaagaagaaaaagcgacgtaatgaacaagaattttacactgaatccattccaaagctaaaaccctacttcactatttctctctctgtctctctaacgggaaccaaacatggcttccttccctcctcctggttcactcactctctgcgcagtcaatcgtgacctaatcaccgtcgacgccatgaaagacgatcgagaccaacaaactacggaaa

SEQ ID NO: 89784 - DNA, 175 bp, Glycine max
gcatatgtctcaaaggcccacggttcctcactcctcttccatagcctgcggccttcactctcatctcctggtctccagtgagatgaaccctagctccaattggtccctttaatcaattacctcttaattagtaattacttaatctcaattagcctttcactctcccacacaacaa

SEQ ID NO: 89785 - DNA, 237 bp, Glycine max
gagaccaaaaagggagagattgcttgcgctacagctggggatgccaggggatggatggaagcatttgatcaggccaagcaacaggcttagtatgagctgtcaagaggagttagtgccagagaaaaactaaacatggaagccgagatcaatcttgaaggacatcgacctagagtgaggcgatatgcccatgggctgaggaagctcataagaattggccaaggcccagagaaatgttac

SEQ ID NO: 89786 - DNA, 247 bp, Glycine max
tggtcaggcggggctacccgctgagtttaagcatatcaagaaagcggaggagaaagtgaagcaattttatgctattgtcgaatcgaatgcccatgcatctacaaaactgattgaatatccatggtttctccatctttaaatcactgaattaacttgcctttttatgtactgtgaaagggatatgtgggctgtgctggttgagatgttgagcttgctttatcgatctgtttaattttgttcttaagat

SEQ ID NO: 89787 - DNA, 130 bp, Glycine max
cgatgaaggcccaagcgtctaattcatcccaaattcaaggccagacaagtgagaatggccatttcaatacctttcaacaacttatggatttggcagtctcatagaatctcactacaaatctcataacgga

SEQ ID NO: 89788 - DNA, 241 bp, Glycine max
gttgttatttcatgtgtttctatctaatgattttacctgtgtaacttaatataatgtgttcactttggatggcagagcacagcactttgtggtgcattgctattttttatagagatgaagtactcgattaccagaagacaaatcaggaagaagaccccaaaagcaaagacaatttagagattagaaagaattgtgtatctgttttcagtgcaaaggttcattaaatttctttgttgttgtg

SEQ ID NO: 89789 - DNA, 168 bp, Glycine max
tgaaattttagtaaaccgctatcacaggttgctgcaccttaaaaccggaaacataagcaatcgttacttgatttcaagcgtttctcaatttcttcctacttctttgtgtacgatttcttaagggaaagaaaatcactctctgtgctggtcacagacttcgtgaatcat

SEQ ID NO: 89790 - DNA, 162 bp, Glycine max
gtaataaagccctatctactcgtagctccattttatgcaacaatcacatataaatgccactccttatctttggtgtgaacaaggatgtccaaatcttcagttagcttcttttgaattttggtctgtgatttgttgctttggtgagagagtggatatggacga

SEQ ID NO: 89791 - DNA, 240 bp, Glycine max
ggaaagagccactgaaggcaaagcaccaaggtggatcaagacacgaagtagaagttaaactaccacaaggaaagtattactacaagttcattgttaatggacaatggaagcattcaactgcttcaccagcagaaagggatgacaggggaaatgttaacaatataattgtgattggtgaaactgccagcgttcggccttctgttcagcaccagcagaaagatgccaagttgtcaagtgatt

SEQ ID NO: 89792 - DNA, 245 bp, Glycine max
tttgccttcaagttctgaactttattactggggtttctccttcacttgcttgatctgagtctttctgtttgtgtccaatgttttgttgttttttttcttcttttttgtatttttttttgtattttttgtttggtgtcatggttggtctcaatttatctgcaccaaactttctttaagtgaagataaattttagtgtcttaaatagtttaacggtcttgtccttacattgtgtcctcagtgttgga

SEQ ID NO: 89793 - DNA, 105 bp, Glycine max
  unsure (1)..(105): unsure at all n locations
gtaacagtggcaggaccgaagccatagcccaagacagcatnanactcatcaggaatctctggttctgcgtctgtgtgttcagtgtcttaatgttcaccgtcatag

SEQ ID NO: 89794 - DNA, 226 bp, Glycine max
cgtgacttcactatccattccattccgattccctttccctaccttcattccctttgcttttcacttttcgctaaatcactacaagagagatgcatcgccgccaacctaaaacaacctccacgcccaccgaagccctgaaggcgcaaccaccagacggtgccgccgccgtcgcacccaacgcctgcgaaggaggagacaagacaaccataaacgctgagctatcgca

SEQ ID NO: 89795 - DNA, 160 bp, Glycine max
cgctgctcgagctcgagccgcgtcgctgaaactctcttacctgaaccttacctcctcctccaacaaccttaactcccgcatcgacatcaccgtctccgccacgaaccccaacaagacgatcctcttcgcctacgaccccacctccatcaccatcctctcc

SEQ ID NO: 89796 - DNA, 260 bp, Glycine max
ggttgaaggcttaactgctgcgaccaaacatcccattcctccatcatctgtcctcaagcagttggctatagctattgaggctggaaggcaaacaaactcaatgaaagattttgtagcttcatcacctgccagagagaaggcaggcttaagtatctcttcagtgaaggctttagtgttgcgtgaaaaggaggacaaactcacctctgagtttagtagcgatgagaaagttgtgtatttgattaattcattgtttgaccaag

SEQ ID NO: 89797 - DNA, 261 bp, Glycine max
caacttctccttttattatatttccctccaaacgagtgtgaccgaactgtgtggtggcgaaggttgtggcggtgatcggcgacgaagcacataaagtattgctgtatcatggaagaagtcaccttcgagtgtgatctgattcattccattttgaagcgcttttggacactgcaagcccttgagcgcgaaaatgttgaagctaacgaccctccggactccgaggtaggagttggaacatccaagaagaatcggtcaacttct

SEQ ID NO: 89798 - DNA, 260 bp, Glycine max
cctctcttctcagtttccgattttcctctttacttccctttcactttaaccctttctttctccgctccaaaccctaaagtcccttccttttcaatttccccaatcttttgaaatcattcttcgaaccctaaaaacatctttcaccgattttcattttccctttgcaaattcaccgtttaaatttaattaatttgcttgattttcaggttcttctgaaaagatgtctcgcgtgtatgttggtaacttggattcacgagtca

SEQ ID NO: 89799 - DNA, 221 bp, Glycine max
gagagctataagtcaccagcttctagtttcactactcgattggagaatctctacctcacgatccctatgttctcttagagccatcatgtcacaatctgatcatacctctgcttttaccagacgcagtgcgatcctctataaagtcgaagctccctttgatcatgcagattatggagcagacgttggaggaggcgaaggaaggagagcgtagaaggtgttgg

SEQ ID NO: 89800 - DNA, 254 bp, Glycine max
ctgcagcgattcggctcacgccacgatatccccaagccaaccgaacacttcgacctcattgccggcaccggcacacgcggcttgatcgccatcatgcttggccgcctgcgcctggacctcgagacgtgcaaggatgtctacgtgcgcatgacgaagcgtgtcttcgaaaccgacaagaccatcgccggcattccctaccggtcgaccctgttcaaggcctcgaagcttgaggaggccatccgcgaatgtgtgcg

SEQ ID NO: 89801 - DNA, 232 bp, Glycine max
cgtcgactttcctcgagcgtcccgcctacctctcgggcgtcacttactttggacagggcttgggcctcgtgccatccttctattatcgcgtcgcaacttcccgttaatcctcctatgagaagtcacatattcccgtgatggccgagaaggatctgtactcggtcggcgtgggtggccatgagtcgcccacccacgatgctcgcgacatcaaggatattgtcaactccaaggg

SEQ ID NO: 89802 - DNA, 252 bp, Glycine max
ctcgagccgctcgagccgtttcatgcttttcctcctcagccgacggatggaggatgtgaccagtgatactgatcctgacttgtcgattcccgggttcccggatccggttcctccgagtgttctgcctgatgctgctttcaacaaagacggtggatacgccacgtattacaagcttgctaagaggttcatggataccaaagggatcattgtcaactctttttcagagctggagcagtatgctattgatgcatt

SEQ ID NO: 89803 - DNA, 251 bp, Glycine max
tatttacattgttaccttcagacccttattattcgattgatgtcgttgtcatcactagtgctactgtgcttggctttttgtctcgttcgttttgggtttagatcattattactcttttgggggacttaaaaaaaaaaaaaaaaaaaaaaaaaaaaaaagggggccccccgaaaattgaccccttcaaccggggaataaattcgggacgggaacctgaaggggaacaagtttccccaaaagggggccgtaaa

SEQ ID NO: 89804 - DNA, 245 bp, Glycine max
aatcccaaaccccatttcaatgatccccctccctccaacaatgttcccacacccttaaaaaaccacaaaaaccaaaaaaaaaaaaacccccaaaccatgtttcccttccctcacaccataatcttcatccttgtctttccaatcattatttcttgctcctgggcctcgtcgttgggcctgagtagcaatgcgacgaccatctacgaggtcctgagcgagcacgggctgcccatgggcctgttccc

SEQ ID NO: 89805 - DNA, 244 bp, Glycine max
gtttatttgctgagtactctcctattttatatatgatttcgggtcagatttaaacttattctggttctttgctcatttctctgtcatatagtgctgttcaagctggtgatattttggattagtgcgcccattctcctatctgtgtataggacttcgtgggtagacttgtcgacttcactccgtgctttgactctcgtcgtctcactgatccggattgccgggcaaagtggtcttatgtgagaaa

SEQ ID NO: 89806 - DNA, 237 bp, Glycine max
atccatttcaaaagatgaaaggtggattgtttggattttcaaagggatgtttacagatgattcaactcatcccaccttttcatctgtaaacatccctttgaaaaggtgggatgagctgaatcattttttcgacgagacaggtgcccttgtgacatttggtttgaatgcactccatgggaggcaccagattatacatactgattagggaggagactgggatccttccaatgccaaaga

SEQ ID NO: 89807 - DNA, 192 bp, Glycine max
tcgatagatctagacaatatagaaatgtcttcaactaaaccatccagcgagacttcagtttcatgtgtatttgaagatgaagatagtccatctcatgaagaaattgataatgaccaaaataacagctcatcaacttcatatctagttgacaaattacatcacttgtccaacattacctttccacacaacata

SEQ ID NO: 89808 - DNA, 234 bp, Glycine max
ccctgagttgatggatcttcaagatgaccttggagagtacttatttgcttattcaatccgcttgtcccttgaacctcaaggatgcattattactggaatgtccttcagctcttgccagctctattggaggcactggatcatccgtgctaatgatattgtcatatctgatgtcagtggaaaagctgttataggacagtttccactcttgcgtccgggtgctcaagcatttgttta

SEQ ID NO: 89809 - DNA, 245 bp, Glycine max
atctgctccatttctgagcgtactgaaagttacaagcacacacagagaagaagagaagaagagaagaagcaagatggcgtcatctcgtccccctccttcgaaatccgtggatctggacctaacaatcgtgtcggcgaacacctgaagaacgtgaactggaagaacggcgatctgaaaccctatgttcttttctgggtggaccccgagcggcgcctggccacgaaatccgacgactccggcaacac

SEQ ID NO: 89810 - DNA, 243 bp, Glycine max
aaaatacctgatgctattgggaacttacattctttggaagacttaaatttgaggggaaacaaatttgtgacactgcctaataccatcaagcaactttccaaacttaaatatttcttctacttgctgtgctccaagttcaaatatttaagtttggaaagttgcttgaacgtattaggcagtgtcacaaacttaaatatttgaacttggagcactgctagcagctgaaatacttgcccgagcttc

SEQ ID NO: 89811 - DNA, 264 bp, Glycine max
gcgttatgctattagcttcttgtaatgtacattggaagttgcttttgtcttataaatttctgagactcgcagatcgttgatttgtagttagttagtcatgcgtgctttagtggtatttatgctaatattttgaaatgattattattgaatttatgtaattgtttcaaatctaaaacaaccctggcattcccactaggtgggattggataaatgcaagatagatcatttacctcttaatccctcttagtggtttaaccttataat

SEQ ID NO: 89812 - DNA, 261 bp, Glycine max
gtctatccaggctcaagttcaggccggatccctggtggaccccggtcttccgattagcccgacttccagcttctccagcatctcctcggccgtgcagtcattcagcggcttcacgagccctcagtaccacgacaacatgtcgtatccgccgcccgagcactaccaattgaaccctgcaactccttcgaccttcggcctcgagacccttgctctcgcagcaggaggacagcgcaagttcgaggcataggtcgcctgagggac

SEQ ID NO: 89813 - DNA, 253 bp, Glycine max
aatacaactagtagtagaattttcatagctatagagagagaggttattgggttttagtagttcttacttgagggcttggtgattggttcttttccatgttcccctttccggggattcttctcttttccatgaattttcaaaatatctttttgggctttgggctttgggctttgctttctcttgtggtctctctctctctctctgaagcatgtgggtgtgatgcttttccctctggaggaatgtaaaacatcac

SEQ ID NO: 89814 - DNA, 250 bp, Glycine max
ttgagatctctgacattggagtcctgtaaggtgacagcaaatgacatcaagaaactgaaatcgatatacctccctaatttggtaagctttcggccagggtagttattgcggtattctgatatgtgtatatgtatatattatatgtcagtggtactgaagtatcttacagaagaatggaaagacaacctcaaattgtacataggctataataatatgactttatggaaggggtaattctgcttgtggtgcg

SEQ ID NO: 89815 - DNA, 265 bp, Glycine max
gtacagaacagaggaccatgaccctgcatgatgtttaaactctattaagatcttgcttggttgtgcttttgctataaacccaaaccatagagagagggaagaagattccacccttcatttattgtttcatacacgtgtctctgccgctgaaaaattctgtcttttctcgctctataacttcattgtttgtgttcgatcaacatcatcaaactcctcgcacttaggctgtttttttctcagctgttcaccagaaaaagctccattt

SEQ ID NO: 89816 - DNA, 190 bp, Glycine max
aaaagaaggaagtactagtagctagaaaatatatatgttggatatgttacaacttttggtagctatatgtaacacttatttttaacacaaactctttatacaaaaaagataaagtttttaattcagttatatatgtaaaaattaaaaaaagggcggccgccgacaaaggggccccgtcgacccgggaatt

SEQ ID NO: 89817 - DNA, 197 bp, Glycine max
aattttccatgtagtagcaaactagcaatcttttgcattcttttaagaaatctgttatcaggatgagttgggacagtggttaggatgtaattgatttgatgcatttggattatatatgtatattgtttggatccttgtcaaaaaaaaaaaaaaaaaaaaaaaaaaaggggggccccccaaaaattgacctcgcccca

SEQ ID NO: 89818 - DNA, 238 bp, Glycine max
aatttgggaatttttcgaaaccctaaaaagatgatcccctacgtcagcagatattctgacgcctcttcttttagcggccgtcgtagtgatttcgttggacctattccgccgttgtctatagtcggaagggcggcgcggtttcatacggcgtacctggaccaaaccggttgcgcttcaaaacgttttaaactggtccaacgctctgaacctccttccggaggatttaatgtaggaagat

SEQ ID NO: 89819 - DNA, 236 bp, Glycine max
gtgaaattatttggccatgcatcacatcaataaacaatagacaatcatcagagtctaatttatctctcacatgcaggctgttgaaatttccaagactgactatgagacatctgatacggacatcttgtacgctgagggtatatagtattccaacagcctccacttcactggaattttggcatgcccaagtcaaacagtgaggattctttgtttcctgagtatcaacatgaatcttc

SEQ ID NO: 89820 - DNA, 235 bp, Glycine max
caccattcttcttctgaatcatcctctctcattgcaatggccgcagcgttggagtgctggtcgcgccgcgccaccaccaccgtccacgaggaccacgcgcttctcatgcagcgacccgaacaggaccaacacccagagactcttcttcatcttcttcttcttccctcgtccacaagaagcttcaaaaactcacgctcaacgtctccgaagccattgcttccctcaaaaactccct

SEQ ID NO: 89821 - DNA, 232 bp, Glycine max
gaaagagaagatccagcaacaagaatcatttccaaagaatactgacccaatattatggtcaagtgatatcaagagcaagacagaggagttaaacttaaaatgccaacagatattgggatctaacgcttctccatctccagaagacaaagacaagccggatactttcaatgatccatgaatacattgatgtgattataccacatggaactgaagacccaagttttcatcactg

SEQ ID NO: 89822 - DNA, 130 bp, Glycine max
aagaaggaaaaaaatgcaactgttttcagcggaagccaaccggtcaagcaactcattcagctcccttatcgtcgggggagtcgcgggagatgccgagggcgtcgatgagggaggtgccaggacggacccc

SEQ ID NO: 89823 - DNA, 225 bp, Glycine max
gggatgtctttgaatgagtatgaaattgggtcaaggccaaacgattcatctcctaaaggagttgattctgtgtttgttgatcaccaacaacagaaacaaagagtgcacccttataattattttcgtagcaattcttctttgaaggttgccaagaatcaaggcaaaccaaaagattctacattgaaatcagatggctctagagttgagttagactctgtttcgaca

SEQ ID NO: 89824 - DNA, 195 bp, Glycine max
ggaaatttgacacctaccccacaccatcatggcctgcatcgacaaattttgggttttcgccctcgctcttctcctcctcgcttcccctctcctccaagttgctaggtgccagtcagctctgatgatgtagtggaggctgctgaagaatcaggtgatattggcattgttggtgatgatgtccaagactttggtgat

SEQ ID NO: 89825 - DNA, 255 bp, Glycine max
cgcagttatcaactcgacaacgtcctgatccctcagttcaattctccatatccacgatgttgtctcgagctctccgtctccccagggctgtgcctatgcgcaccaagctcgccgctcccacttacactgccattcgctctgtcaccaccgatgctgcttcggcgtccctgagccactcagtccccaagtccgatgaccagcctttctctgttaacctcagcgatgagagcttcgagacctacgagctggaccccc

SEQ ID NO: 89826 - DNA, 258 bp, Glycine max
ggattctgctcgatgcctttagcagaagcaagtgatgtgaaggtattgatatgcttattgtaatgattttctaggctgcagcatattattatcacggattgattcttgatgagggaaacacggagaaatctcatgggatggctgtagcttctttacaagcagctgatgagtatttcaaagaaagtaagaagttgtgtgaagcattcaatgcagtacctccattgtcaagaaatccaccactttgggggactatgaaat

SEQ ID NO: 89827 - DNA, 154 bp, Glycine max
ctcaggctccggctcgagctggtgttccgttcatggcactttcgtacggcattgtgggtggccggatggacaaggtgcaggctatctttgacaacttgcgcggtacagtagctagcgatgtcatggacctggtgctggtggctcaacacttaga

SEQ ID NO: 89828 - DNA, 268 bp, Glycine max
gttgtggacgagtgcttttgacccttcgttatctagagaacagctaattgctaaagttccttatggcattccggaagatcagtggttgtcatttattgacaatcatttgaagccagagtatcaggagttatgtcggaagaatgctgtagtcagacaaaagcaaactgttccacacactggtggggctaaactgttgtcgaggaaacaacatgagatggaagtagagcttggacgtcccattagtcgagttgaattgtacattgcaact

SEQ ID NO: 89829 - DNA, 246 bp, Glycine max
gggaagcatgacttcttgatggtgttttcaaaacgtgcttatctgtctcatgtacatgtagtgttggttgataatgattatcctgaaattgcctaaggttagaattttcctttacacaatcctagattgatgtcccatctcttagatggaagttagtttctgctttctctatacagtaagtctatgtcaatgtgttctctatattttattctttttttcagtagtttgtgttaataaaacctagtc

SEQ ID NO: 89830 - DNA, 237 bp, Glycine max
ctcgagccgaatcggctcgaggcaagttcaggaaccttgatttgagcaaaccttataaaaactatataggaaccttattaccatactaaagacgatggaggtatgtaataaggttcctatatacctccatcgtctttagtatggtaatacgccaacttgtatgatgatcatttctaagctcttctagtactttaagcctttaaggactgaataatatgttcattgtttcccatacaa

SEQ ID NO: 89831 - DNA, 245 bp, Glycine max
ctcgagccactcgagccgcactctaatcctcccaaccaatcctcctacgtcgtagaccccaaaacagagcaacagaaagactccaattaacaaatccccaaaaccaaaaccattattcatttcgctttgttccatgtctttggtccaaaaccatcaggattcaatgggtctgttggatctggagaagcacttcgcgttctacggcgcgtaccacaacaacgccttcaacgtggccatccacatgc

SEQ ID NO: 89832 - DNA, 157 bp, Glycine max
ccctctacattcaactccaacgaaatgaaacgggccaaaactgacctatagtatgtgtctacattgagaatcatagcatatttgatgtcagttcctgcatgttaattctgcaaagcagctacaggaaaacttcactaaaagatgggaagaaaaacgg

SEQ ID NO: 89833 - DNA, 235 bp, Glycine max
agcacatacttctacttgttgatcgcagttccttctcaaaccttgattcattcagttatgatcagagccttgttccttcatctggtagttcagacaaaaggtatttctcatctttatttgctaaccttcctatccatcaattggattcttcatcttctgtaccatgttcagaaatttctcaggctagagcagaatttggaggccaagttgatactagagaaaatgatgaacgttg

SEQ ID NO: 89834 - DNA, 100 bp, Glycine max
aattgacctagaagaggcagctatggagctttatctgaactgttggagtcaatatgtacccatttacgagcaaagttagctttaaataaagattttcctt

SEQ ID NO: 89835 - DNA, 236 bp, Glycine max
tataatagctgtttaagaaattgaattggacaaagagcgccgagtaattaatgtgataggaatgaatgatttttgtattgcaaaataaattagtgtacttcacataacataaaaaataaaaaaagaataagtctagagataaatttggcattgcagtgcatcatcgcattgattgagttggaagatgggtagcaaaggcaaacgcaaagagtcaagaatcaataataacgagggtt

SEQ ID NO: 89836 - DNA, 235 bp, Glycine max
agatgtgttgttcgggtgcaggtgatgaaacttctaccttctttgacgaaggtgctcaatgaaagctctgatttacttggagatattattggagtaaagtcgaggcagagaccgagtattcttgaaaacgataacccagttgaggtgctaaaaaaacgcatattggatgcagtggggggtgatattttgagcaggaatgaaaatgacaaggaccatgctgagaaatgtaaattga

SEQ ID NO: 89837 - DNA, 234 bp, Glycine max
caatttgcttcgaatgatccgtcccaaggtcagatggttgccgctcgacgagtcaatgtggttccaccgacaggtcgccttagctatgctcatcttcaccgtcatccacactgcagcgcattttgtcaacttcttcaacgtcgaacgagttcaagtgcgcccacagattgctcttcaaattcactatactgaagctggtggcatcacgggtcacatcatgttgctctgcatgtt

SEQ ID NO: 89838 - DNA, 230 bp, Glycine max
caattttcagaaattgtctcttctaattctattgactttggtgtttcagcctgtgaatgtgataggcaagaaccactactgcatgcagaaatgtggtcgcgttcatattcaatttccattttatctcagaaacagcaataagttcaatcacaccacagactatcccactgggttcggtctgttatgcactgaaaaagatgatactttgctggagctaccttctgttccaa

SEQ ID NO: 89839 - DNA, 214 bp, Glycine max
attatgcgttccccgaatggataatctgttctgatagatttgctgtaaattctcatcacattctcaccttgaaagggcaaatagcactttagaagagcaaagaggatgagaatttacagcaagtctttcagagccgattatgcgttccccgaatggatttcccctgtcgctaaaaacttgatctccaatttactcgttgtggacccgcaaaaga

SEQ ID NO: 89840 - DNA, 230 bp, Glycine max
taacaactgctcagtgagtttttgaaataaattatttgtcagcggcaatactaatgaactctggaagccacaaataagcgcgattgagaatagtaccaataggaattgcattatttttatattttattagccgggtgaagacaatgtgtgacatttattatgccaatacttcaaaatgggttaattggccttttgaaaggagttgaggatgatttgttcatcctataata

SEQ ID NO: 89841 - DNA, 281 bp, Glycine max
acgggtgggaggtgacacgtgtacggcgagtcaaaccagattcgttcactcacccgtatacggcgagtcaaaccagattcgttcactcaccgtatacgggtgggaggtgacacgtgtacaggaatggcatccatgagcagcgggtgatggtaataataacaaggtaaatttggctttggactttccactgagtggattgatattgtccgtagattgggtcccattcacgattattaagcaatcgggaccgtaggtttgtcagtttccttggggaatcctaa

SEQ ID NO: 89842 - DNA, 282 bp, Glycine max
gcaaataccaacactgccaccaccaccactctcaccaccgccaatgtgaatccaagtcctgcccctccaaaatttatgaaagtgaaaagtcgatctctactggatcagatgctagctgatgatactaaagcaaaggttcccaaagcaagcgacggcaacgccaaccccatcaccattcctggcgtaatagagcccctggaaaagattctagttttgaaccgtgtaaacgatcatgaagacagaaccactgataaatctttggccattgtacctgctaagaaa

SEQ ID NO: 89843 - DNA, 268 bp, Glycine max
tgctaattaagatggagtaggattgttagtgtcaacatttaagaggtaattgacaacagatcttccaaaggtctttcttttagaggcatcttgtgtagtggacatgtaataaatttcctgctttgttgttgctgccattagagaatgtttatgtaacttcctcctcacatcaacagtcttctgttttcacatgattctgcggatttgaatttatgatgagtttttttagtttttactgtagagaaaaggaaaagaaaattcagttccc

SEQ ID NO: 89844 - DNA, 272 bp, Glycine max
  unsure (1)..(272): unsure at all n locations
tggatccactcgaatctcattctttcagactttgtctctcttacaggctgtgcctattacaactactcttaattaattcgtgctgtgcactaccacctgtttgttcgttttctttcaacgaaaataaaaattaacccctacaaaaacgaagtcaaccccaccctctaattatccccattttcgccgatatgcgttccactctcatcattaacatctnngcanttactgtgctcgctgctccagtgccgactccagttccggtagctgagcaa

SEQ ID NO: 89845 - DNA, 155 bp, Glycine max
acgcacgcatgcggctcgaggacagagagataattagaggggttttctctttgagagaatcgtatcttacaacttttcgtgaccacttttagtgagggaagagaagctaagagagagactccaattagattcaagagagatggccatcagccatg

SEQ ID NO: 89846 - DNA, 241 bp, Glycine max
cgtcgttttcatcagtcaatctctcttctctgctcaaaagctgcttcttcgttttctgatcagcgatcatgtggtcctttttttttgttgttctgtcccacttttttctcgaaccactccgatgttttgtcgttttagaaaacaaaccacctttttcctttttttcttttccatctgccgacaccgaaaattaataatatagaaactttctattttcatcagttcaacgatttttaatttt

SEQ ID NO: 89847 - DNA, 237 bp, Glycine max
gtgcatagttagaacaacgactgcatcgtttcttggatttttgaatggcatggttcagctatcagggttatcggacattgcttttgacataacggagaaggaatacccaacttctagtgctgatgaaaacagtacagatgctggaaggttcacattcaacgaatctccagtttttgttataggcacgaccattttgctggtttatttgacagcaatattgatcaagttttgggggtt

SEQ ID NO: 89848 - DNA, 236 bp, Glycine max
gttctataatactgtactactttcttttgcagcatatgagaaagggttggaggtattgggttccgcaatgctttgctcagggccaccttccaaggggccgtggagaagagaaggaccatattcgaaaggtgtcttctggatatcttgatcatagctttgagaggttccaccgcactcagactcagaggccacgcaaaagtaaatggctggcaattttggaaatgtgactgctaaag

SEQ ID NO: 89849 - DNA, 138 bp, Glycine max
ttagaatattaggtctctagaattgatctattttggtgttatcatgcacatcagtcgtgttagaacaattatataaacttttagtaagtgtaatatgtgtgtatttaatgctattaatttcatattcatatgcatatt

SEQ ID NO: 89850 - DNA, 181 bp, Glycine max
tgttatcccaatttacagatggctttgaatcggcccagtcattgaatatcttgtcattgcaaatgctccatttctttagattgtgaccatcgctgggccgattcaaagccatctgttatcccaatttacaagaggcttatttcagcgggatttaggtttggggttaatagtggagatacag

SEQ ID NO: 89851 - DNA, 173 bp, Glycine max
aaaaggtcacgccaccggaaaacgacgccgagagctggaatggattcgtcaagtcgacatacggcgatgagcgggaccaggccggaaagacttaacgagcatggtgccgaagtgcgaggatgcccttgggcgggcggaaagcagttgggcaagcctttttcaataccttcttc

SEQ ID NO: 89852 - DNA, 252 bp, Glycine max
tcaccatccatctttgttctttctcgtgcatggtgcaaccttctccatggccaaaaaatcacagctgcgtacccagaaaaacaatgttaccaccaatgacgataataatcttaacgtaaccaacactgtgaccaccaaggtgaaacgaacaaggagaagtgtccctagagactccccacctcaacgcagctcaatataccgaggagtcactaggcaccgatggacaggccgatacgaagctcatttgtggga

SEQ ID NO: 89853 - DNA, 243 bp, Glycine max
ttttcacctaatggtttaaatttaagtgtgtctgtatttcagttcaaatgcttagaatagtgtttgaggactctgagctgggttattctgtttgcatgttgttagttttcacatatgcaattttggttcttgctcgcattcttggttgggttgtctgcaatcatatccctttatgcatctgttttactgcctatatagtgcttctaacatggcgtcttgtgttgtgcagtatccatgggcaat

SEQ ID NO: 89854 - DNA, 240 bp, Glycine max
atctgatgcactatgctctgaaaagatggaaagcaactagctaggaagggtaaattaaggaaaagcagtcattgggtcagtaataagtgttgtcatgacttaaaggaagcctctagaggcatcatttactcatcacgttataatttgaacagaaagtgataatatactaattaaatatgggttatttgatgcagaacctcctcacaaatcagaggtgaaggagataacgaaggaacccca

SEQ ID NO: 89855 - DNA, 130 bp, Glycine max
ggagacgtcgaggatccgtcctatatcattggccagaagccagggccctacgtcgaggagaccagtcgaaatatctactgtcagctctgtgctcgcatcgccttctgcggcatcgacgcacgatccgatc

SEQ ID NO: 89856 - DNA, 245 bp, Glycine max
agagtagactggtctatagtcaaactgctggcaggcacgtaagactatcatatattgatcattgttattatattattgacacgtaagataaggaattaaggaggagtagatatatgtttgtgtttgttttgttgtggttggtggtgatatgaatatgatggagggtgctgtgttgccgaatcccatagagtgtctgggtaaagggtttgatctgacaagtgattttcgattgaagtttgcaaagg

SEQ ID NO: 89857 - DNA, 244 bp, Glycine max
attctctttccaaagccatggaagagttcagactttggtacgacgagaacaaggcaaagggcaataagccatttcttgaggggatggtgaccaccggatggtataagaaaatgggagagaggatttggacaccttggttcataaagtttattcaatcccgtggttattttaatatctacacaaatcttctgcatgagagagcattaagtgtttctcacagagatgctggagttaactacgggaa

SEQ ID NO: 89858 - DNA, 246 bp, Glycine max
gatcattagaggttgttgatattgagtattgtcagggggatttgcaaatagcatatttctttgcaatcaacagaattacttggcctagaagttcactgaaagtaagtggaaatcattagaggttgttgatattgagtactgtcaggggggtttgcaataaaccattgaacaaaatgctgcatgctcaacttatattcaattgtaacagttttcagccaaaagggcaagcaccaattagttgaacct

SEQ ID NO: 89859 - DNA, 241 bp, Glycine max
gtcgggtgtcatttgggccgacgttgtttcagaaatctataaagacgggtggaagatgcacccgttgttgcttttaaaaatttcaacatcgggcttacgcacacccgtcattgttgaaggaaggtataaagacgggtcttggaacgaccgtcgttgttggagaacgctataaagacgagtcgactaacgaccgtcgttgttttataaggctataaagacgggtcgactaacgaccgtcgtt

SEQ ID NO: 89860 - DNA, 231 bp, Glycine max
ctcgagccgcatcaatcatcatatcatagctaaaaaaaaacaggagagagaaagtgaaaaaataccttttttttagagagagaaagagaaggtagccctagaaaaatatgcaaccagataaggacttttgcagctgagacactgcaaaaagagttattatattgagagagaacagaaagattatctttcttttttcttttcccctttccaattttgaagctttctttttta

SEQ ID NO: 89861 - DNA, 235 bp, Glycine max
attggaaatgttctgatcttccatatgacaaaattacatgtgatgatgaagaagaaagagcaagccgtagagtttacaggggatgcactcgttctccaacatgcaaaggttgcacttcttgtgtgtgctttggctgtgatatctgccgcttttcagattgcagctgccagacttgtgctgactttacaaacaatgccaaagcttgactcccttcatatcatattctctgccattt

SEQ ID NO: 89862 - DNA, 236 bp, Glycine max
ggttcagcgtcgcctgaatcagttaccatttgactgttgtttgtatcgaatcggacggcgaagattgcatcgcgacgtattatgcagcagagtgatcaaacggtgttgagcctgctgcctcgattcgactcctcctcttcgtcctctgcttcccctgcttttggctccttttccgctgatcttcctctcatgcgtccccaagctggagctccctctcccttctctatcaaagctgg

SEQ ID NO: 89863 - DNA, 225 bp, Glycine max
gactaaactaacactctggcgttttggcagggatgcacaggaatttaaattgagtgcttcggtagaaatggtctcattagttagtacaattcaacaaaaccagatgatagcatagcactaactaatgagaccatctggttttgttgaattgtaattttttgttttggtggtatgttgaacagtaattttactggatatattcaagtctatttgaattccaattcc

SEQ ID NO: 89864 - DNA, 251 bp, Glycine max
caatatcacgacactggtctcttaccactaatgaatgattatccaaatccaaagggagccatgtctctcaaaaatgatgagggcaataacctacatagggagtttagaagtgctgaatgcatggcatctgtgtcttctggaggctttcttgacatggtaaaaaaggagtgtctttacaacccccatgactcctcaatgtctcttatagaagatccctctgatctaccacgttactcatacactctattcgc

SEQ ID NO: 89865 - DNA, 259 bp, Glycine max
atcttttacatcattatttatttattttccttgcctgctaggtaaaataaataaataatgatgtaaaagatgtgcaccatacgtatatacgacattatttatttattttccctgacaggcaaggaagagcttgctcagctacttcaattgttgtgtgaaagcctaacatttaagggcaagtgcaatctttcgctagttttctgaagattatggatacgtgtagctatgcttctctgttcatttggtgataaatattaaa

SEQ ID NO: 89866 - DNA, 254 bp, Glycine max
gaaggattaaaaaggaagctttcttcagatgtgattttccatttgctctactttgaatccaatctaacttttaagtatattctgaaatcggattggtgatttaactgaatttccaggcaatgattcaatcagtttaattggttaaatcaaattattcaacaagatatattgataattaatgtaaaatattaataaatttaatgacagattataatgcatcgaatgttatcctctaaaaaaaaaaaagagggggg

SEQ ID NO: 89867 - DNA, 202 bp, Glycine max
ggatatatgatgcacataactcttttgcttaagtatatatccagtttccagttcctataatgtccagcagaataagatgttaattagagagagagaaaataattaatacttgggttcaatactgttgtgttgtcatttgtcataatgatgtatcctcaaatacaatgttattgtcaataacaataatttttcaattgttact

SEQ ID NO: 89868 - DNA, 236 bp, Glycine max
agagagtgggcacacgcgcctcgggtggtcgactgagaagggtgatttgcaggcgccggttgggtacgacgggaatagctttgggtatagggatattgatgggagtaagattcataaggctcttagggagaagtatggagaggaagggtacaaggaaggggatgttattggtttctatatcaatttgcctggtggggaacagtatgcccctaaatcatctcaattggtttggtata

SEQ ID NO: 89869 - DNA, 232 bp, Glycine max
cgtgaacgttataaatgtaaatattattgcacacacatgtataactactcttggacctcctgccacaatatttacatgtgtgtgccatagcaattttgtttttcttttgtggaggggggggggaattacttaattttccccctaatataatttcttacacggtattttacatagttaattttgaagtttcaagacaaaaaaaaaaaaaaaaggggcggccgccgattattga

SEQ ID NO: 89870 - DNA, 237 bp, Glycine max
ctgaaaaaaatccaaaagatagtaaaaccccaaaaaaaaataggcggctcaacccaattcaccttactcaagttgcttcggattcccaggagtagaatgacagttctaaattaacacagatcgccttatgtgctgttgtgttggaggaaggtagggaaaggtgccttgaatgccctgaaaattttgtgctcatgatcttgtcaaagacaaagtaaattactctgaatttcgaaattg

SEQ ID NO: 89871 - DNA, 102 bp, Glycine max
caaaattgtgtataattttctgtaatattagttattgtgagagaattgagactctaattgcaatttaaaatcttgatcttgatgaaattccaaacatgatgg

SEQ ID NO: 89872 - DNA, 155 bp, Glycine max
attttaataaaccgcgatcacaggtttccgcaccttaaaaccggaatcataagcaatcgttacttgattgcaagaatttctcaatttcttccgattgctttgtgtacgatttcttaagggaaagaaaatcactctctgtgctggtcacagacttc

SEQ ID NO: 89873 - DNA, 240 bp, Glycine max
ctcgagccgcaatttgtttgcaatggtagttgggataaaacagatagatcttgtgaacaagatggttaaaaagtttatagacagtaatttcgtcgtgatgctcttccactatgatggtattgttgacgaatggaaggatctcgagtggagtagtcgtgtcattcatgtgtcggcaattgatcaaagcaaatggtggtttgccaaacgattcttacaccccgacatagttgcagaatatga

SEQ ID NO: 89874 - DNA, 232 bp, Glycine max
acttagtttcctagattaatttttgtaatctgattaattgatcgcatgtcttagaatttagattggagcataatccaacatcaaaaattagctcgtagaataagaattgtctctcacaaattttttgttaatatactagttaacgtggcatctccaacatgctatcctctgattatttatttattgatttttgcgattttccctttacagcaatcaatgctaaccaataatg

SEQ ID NO: 89875 - DNA, 232 bp, Glycine max
ttcactgcagacatggcggcaaatatctttggagaggatctgttttcaaatgaagagtaccttataacaccgtggggtttgcgtcaagagttgaataaattcaagctcctttatgggaatcctcctatatttattcatgaaaatggtcaacggacagcaagtaattcgtcactgcaagacgtgacaagggtgaaatacttgcatggatatattggtagcgtgcttgatgcct

SEQ ID NO: 89876 - DNA, 267 bp, Glycine max
ctccctatagagggttaacgcccgtaatccatgaggaattagaaagtggaagtgctgccaaacacatgtcctagtcatttttaatagctttagtctaatatttttatgaatgtggaaaatggaagtgcagttgtgagttctaatgtcggacaaagacaaatgttccctgtatggagcaagagcaaagactagtatgtttaatgggctttgttttagcattgtcaagaacagttttatagtccctatagagggttaacgcccgtaatc

SEQ ID NO: 89877 - DNA, 244 bp, Glycine max
ggtacttgagagtgtgtctctttatcaattcttaatgctaatcttgagtggagcttggccactgaatatagctgcctggggccaatgatcgactcaagattagcattaagaattgataaagtggtacttgagagtgtgtctctttaaatttttgtgatactcatatagtatatatgtatctaaatcaaatcttgtattctttaaatctgataaactgaacagcttgtaattgtttgacagtttc

SEQ ID NO: 89878 - DNA, 253 bp, Glycine max
cctcgatgtctgatggtacgtatcgttacggatgtagcgtcagggagagatggatctgatgggggctatatgagcgtccccatatctgtcgggccgtacggtagtggcattcaattgaaatgcattcgagctggttagattggctccggtactggtctgagtagtggtacgactgcccgttcgtgcagtggggagttccctggttgagactccccgaggagttacttgaagcagtttgcaaattttggggggg

SEQ ID NO: 89879 - DNA, 99 bp, Glycine max
cataaataatgctttacaatagattattgtagtgtcaaagttacatttatttgtaatgaccctcgattgtaacagtgaattttctatttactacgtttg

SEQ ID NO: 89880 - DNA, 226 bp, Glycine max
agatctgagctcgtatcaagtcgcgagcttctgttgatgcactttaaaaccgtgggctttgacgatttgtacatggaattcctgaatctctcaactccttcctactgccgcgcgcatgatctagtcatggctagtgtatctcactctgtgctggttatatactgcgagaatcagtatctttccaactccagttatagattgggtatacgcatcgatcttctaaaca

SEQ ID NO: 89881 - DNA, 259 bp, Glycine max
cagagtttaaaattttaattccagtctcttccaaggcactggcattagagatttaaacgctgaagaaaccttctcacttgacgcctaagaactccaaaccaattgctttcggtgtcaaaccatggtgagacaagtattcagcatcatagaattttaatgccactgccttggaagagagtggccacctagaagttagaactgagggtgttgtagttattgatatagaagatattacacttactaatacagtgttttgggg

SEQ ID NO: 89882 - DNA, 178 bp, Glycine max
aatcgcgatcacagcttggcttaccttaaaagctgtttacgaaagcaagcgttacggtatttcaagaatttctcaatttcttccgacgtctttgtgtacgattgcttaacggatagaagatcactctctgttctggacacagacggcgggaatcattttctcttccacacaatatacg

SEQ ID NO: 89883 - DNA, 259 bp, Glycine max
tgatatctaattaagttttcctattgcctcaaactttcagcctcatagataattacaatcatgtctccccccatctttaaagtactcacattgatcatatctgtttttgccatcatgcaaatatcaacagctggtgacccagatattcttactgacttcatagtcccacccaacaccatacctgatggcaacttcttcaccttcactggcttccgtgtcatttttttcacccaacaacactgtctcagatttcaaagtg

SEQ ID NO: 89884 - DNA, 255 bp, Glycine max
ctgacttctgaggtttgtttcattcatgttcctttctttctttctttctttctgttgtattgtgttttgggtaccctttgatctcgggtttgtggtatgttttgtttctcctatgtccttgggaaagttgcaatctttcttccttttaggtttgtgggaagtggtagttctgaacatttttttaagaagttcttttggttttattgggttgagttctggtttcttaatgttgtttctgccactggtgaatttagt

SEQ ID NO: 89885 - DNA, 257 bp, Glycine max
catatgagaaataacagcaacgtattctttaatctacttttttttagcatacttttcactcttggctaaaatttgttgagactcaggaaattacgagtgatagtagttaaataaaaatcgagacccatgtcattttgtgaaaaaaaaaaaaaaaaaaaaaaaaaaaaaaaaaaaaaaagaaaaaaaaaaaaaaaaagaaaaaaaaaaaagaggggggggcaagaggggtagggtgtggttcccgggtgggttttggg

SEQ ID NO: 89886 - DNA, 154 bp, Glycine max
taacatgtgatgaaccgcgatcacaggttgccggatcttattacctgttaatgaagcttcggtacttgatttcaagaagtactcgattgcttcctacttcttggggttagatttcttaagggttatagtatcactctctgtactgtccagagac

SEQ ID NO: 89887 - DNA, 250 bp, Glycine max
ataacccttggagtcacttggtatcagataatatctcttgtttactcctttaatgacaaaatgtcactttattcttactgtgtttcttgtttttaaaagcttgagtaagtaagaagttgtggaaatggaaaatgaaaccaaaaaacaatagaaagttgctttgttttaaaacaggagacaaaatgaaaacaacgtgagagttttgtagttacttgtgaatttttttgatgagatttagatacattttctc

SEQ ID NO: 89888 - DNA, 144 bp, Glycine max
atcgtgtacaagtctgcaaatcatctaaacttcaaacatacagttttctggatgacgttgtgggtgtcttgtactaccctattcgtgtgattggaaacaggttgcctcgtgtgattgatggatgtattcggtcctcttgtgagg

SEQ ID NO: 89889 - DNA, 277 bp, Glycine max
gaaaactacagggggaccatgcattttacttgcacatgatggtcagtctcaagcaagagttcaagaactgaaggacattcttgggaaagaggcaaagtcagttttgaggtcaattggctggactgataaggtctacgaatttatgcgttcaaagaagttacgtgcacaagaagctggaaatttgacaaatggagatgaaataaggaagttgttaataggagatgcgcagggagctttcatatccaagattcgcgagtcattgaaacaggatatgatt

SEQ ID NO: 89890 - DNA, 283 bp, Glycine max
catgcggactcagcacaaacagcttcacatttagaaataggtacggcttctgttcgaatagcgtgaagacagggcagggaacggccatttacactgctgagtgcggtcacgcgattcacttcccctgcgtcgtttcccatgcacacatccacgtctgacccgtataagtcgtcacgtggaacgacgtgccgcttctacaaaacgacgccgtcgttcacaccgagaaacaacatcaaccgagtcatcatcatcatcatcgttccgattccgtcacctcctacga

SEQ ID NO: 89891 - DNA, 267 bp, Glycine max
agctcagaatgtttattggaaggagtcagttgagaggatggacaaagatctgcatgaagccaaatctgaaaataaccatttaaattgtcaggttgacagttcagagcatcttcttgtgaagaagaatgcagaactgttagaaatggaggaaaggctaaaggctgcagaaatgttgagtgcagagttttgcagagatattgagaaattgaagatgggaaaacaacaatcaagattgatcaatgaaaatcttgaaaggcagattcttga

SEQ ID NO: 89892 - DNA, 257 bp, Glycine max
ttcggctcgtcgtttgtgggagcgtacgctattcatcattcatcgtgatcaatcaacgatccctggctgtgctcgtcgtctctgaagcgattttaatcaagcgtgagagggcagcatagcaaagcgaacatgtctatgtccgattccgattcctcttcttacgccggctccgactacaaaagtttcaagcaaattagccgcgaacgattattaggtgaaatgctgatgtcatcaaaaacaggggattccaaatcaac

SEQ ID NO: 89893 - DNA, 263 bp, Glycine max
taaaagtctcagcagtcagcacaaaagggaggagaagaaagaaagaaagggaatcagttatgttctttctgaaatcagacttcaaacttctgcttctgcctatgatggtccacgttgaaaatcgaagtatttaggttcttaagtcttgataaggattcagtgtaacaacaaacttgtgaactacctctttttgttatatgttatgttttcccaacagaaaagagtgtcaaaatcagtgccagagctggaccaccaaaaggatc

SEQ ID NO: 89894 - DNA, 272 bp, Glycine max
gtccttgaagcttcccaatatcattagatgtaaagagctacatacttgagagttgtggttgctgaggttcttcaatcaccttgctagctactgcatctactgttagggcaagtgaagcattcaattgaataacagagttggctggatccatttttcttttgctaatagagtaccttgaagcatagcaaggattgtttcatgatgggcaagtgggggattttgtggttaactataccgtctgactattcacctgttaaatatgaagaaaagaa

SEQ ID NO: 89895 - DNA, 264 bp, Glycine max
ttctgatatggatattatctctgaattggggatcgtagaagagtgcaacaagagattattattatggctgggttcttctctttaggagcaggaaggcagaacaaggcggaacaagaagaagatcaaagagaagagaacgttaacaacgccggtggtaataataacagtcaattcttgttcagaaacaacgttagcgaagagagttacaacaagggattcgagatatggccacaatcctcgtaccaccaccaccagaacttgacc

SEQ ID NO: 89896 - DNA, 268 bp, Glycine max
aatttcatctccataatcaatgttatgaaagtttacattaaatattaacataataaaattctaattgtgattagagaacatttgcattaaaacacttaaaaaaaactacatgttcacatcaatttgaggggaagagagggatgcagaaggaaaattgaaatgacctttggtagaagagctgcaagaagatgaaggaaggagtgaactgaggtgaacaagatgagtatattgatgaagattgttgctttctgtgtcctcctttcttgct

SEQ ID NO: 89897 - DNA, 263 bp, Glycine max
aaaaaataaaaggatcgtggtcttcgtctcctcttagttttatccgttaccggaaaataccaatatccggcagtacacttcccaattcgaatttcgagcgcagggaacagaacaaagcaatcatcattcatcaccttccaacgccaaccagccattagtagaacgcattatggtgttttgcgtggccgagagcgaaggagagcagatcgcattggggaaggaacagctttagatcgtgaaggcgcgcatcgagaagagggatt

SEQ ID NO: 89898 - DNA, 184 bp, Glycine max
gacagaaggagacctacaatggtggcggttactagtaaacacctacgggacatcctcattgcatgggcaacagccatatcatagactgatccgctaacggcacaatggctgatggatgaatacacgcatatcgagtcagagtcaggcgatacggaacaacggttggagaaatacatggttgacg

SEQ ID NO: 89899 - DNA, 268 bp, Glycine max
cgattttaacactgcccaagagtacgttaatctatccagctcatgactacaaaggattcactgtaaggacaagctcacgctttggcttgccagatttgttgggtgttgcttatacaaattactgattttaggtgagcactgttggagaggagctgcaaaacaatccacgcataacaaaggatgaggtaatgttggatgatatccatatttatatgaaagttaaagtggttaatcatgagaaaagactcttttggatatcctaatggaa

SEQ ID NO: 89900 - DNA, 219 bp, Glycine max
ctcgagccgaagagtctcaaatatctggttgatgagtgtccttttgcatttgtgaactaatatgtaatattttattcacttaaataaagcgcattactatgtgcaatgagtgtgtttaaatatagaaagataagtaatgcgtgattaggtgagggagagaaaaaaaagggggggcccgcggatgtgagctgcggcgcccgggggtttattggcggggtg

SEQ ID NO: 89901 - DNA, 262 bp, Glycine max
atggctcttccttcactatcctttctcttcatcttcacttccttcatcgtctccgtctcacactcaataccctttattgttattcatgcctgttgtaatccgtaatttccatccacttaatattttgggaatttttggaactctcattgcctggttgtacttgaattctgtctttggtttgccatacttgatggcaggaattggggatcagtgctctaatcgtggagtgaaaaaattcacacagcaattgagcagcttctct

SEQ ID NO: 89902 - DNA, 151 bp, Glycine max
tgttcccaatattgttatttatatatctacagtttcgtctctggcacgacatagtgtattctcactacatgtgtggttctttgtttagaccaaagaaacgcatgattcactagaaacattgagtacaagctcaataattattttttttttc

SEQ ID NO: 89903 - DNA, 250 bp, Glycine max
atgagatatagaagacatctgatcacatctactgcatctaaggagtttgcaaatcctgttattcggcaacggccgttggctgcaagggcggctgctagtacttctaatgcccctgctcttccctgggctaatgggtcaccatcttcatctcaggcgtttcctaagaagcaagtggatggggagagtcaaccattgttgcaacaacagcagcagcagcaggaggtagttccattgcaagacagttacatgc

SEQ ID NO: 89904 - DNA, 258 bp, Glycine max
tagtcttatagtgcttgtagagagggatagtgaaatgttgaagaatgttttctcattgtcatttctctactgttaataaaagttggcaagtgctaaattgctaaaaaggttccatgctcctactcctcaccccttttgttataaatggtgcattgtttatcttgttgtaccatttattctatctatataagtatggtatgctccttcttttataaatataattatgtatactgcttttcatgtttctagattggatgg

SEQ ID NO: 89905 - DNA, 246 bp, Glycine max
attttaataaaccgcgatcacaggttgccgcaccttaaaaccggaaacaaaagcaattgttacttgatttcaagaatttctcaatttcttcctacttctttgtgtacgatttcttaagggaaagaaaatcactctctgtgctggtcacagacttcgtgaatcattttcttttccattcctagtttatttgctgaacactctcctatttgatataggacttcgtgtcagatttaaacgttttctgtt

SEQ ID NO: 89906 - DNA, 131 bp, Glycine max
  unsure (1)..(131): unsure at all n locations
ctcgaagtgttaagagnatagcattcttaacaaaaactanttccccctatggaaagaggcattctcttagcacttcgggaagtgccctgagggaatgcctacttctatagggggaagagctggtgcaaaga

SEQ ID NO: 89907 - DNA, 286 bp, Glycine max
  unsure (1)..(286): unsure at all n locations
tgaaattttaataaaccgcgatcacaggttgccgcaccttaaaaccggaaacaaaagcaatcgttacttgatttcaagaatttctcaatttcttcctacttctttgtgtacgatttcttaagggaaagacaatcactctctgtgctggtcacagacttcgtgaatcattttcttttccacacaacatacgagcctangnaacggggatgtgctgnaaaagagatgaataatgaaaccaggctcggcggatcatatagaataaaaataaaaaaaacccccccccccc

SEQ ID NO: 89908 - DNA, 258 bp, Glycine max
  unsure (1)..(258): unsure at all n locations
cccacttctaatgcaggattcatagaattagggatttgtggtttttganntangggagtacaaaccaatatggttccagagcattcaactataatttgtccatttcatcatttactcccctagttgcattccccccaatccccacttctaatgcaggattcatagaattttgctccgataatcggtgataagcagttttttatgttgcttatctgtcacaattatttgtatacatagatatacacatcttttggaagt

SEQ ID NO: 89909 - DNA, 233 bp, Glycine max
gcaaggtccgaagggagctctagaagttgttcagaattttgagccggtactgaagttgttttctcagcacttggatgcatcccgctcataaagttgcacaggctgctctttcaacacttgcagatattcttccagcatgccgaaagccctttgagggttatatggcaagaatattaccccatgtgttttctcggttaattgaccctaaagaacttgtcaggcagccgtgttca

SEQ ID NO: 89910 - DNA, 282 bp, Glycine max
acgggtacatgtatcggtgtatgacacatctgacacacatctctaagtgtccagtttaaaaatcattttattcagttcagatccaggatggacacattctcttcaaaaaataagtgttgtatttgtacatatctagttttaccatgaaaagttcgtttaggagaaaattttaaaatgtaaatcttgaatatgaattatgaggctaatatatagtgagatcaaagtgacaatgtgaaaggcaagaagaagagttaatctttgattatatgaccatgtatggat

SEQ ID NO: 89911 - DNA, 177 bp, Glycine max
  unsure (1)..(177): unsure at all n locations
agatccactcttacaagtcaactaagtctcactctccacattcatttcacacaacatatgagcatgngataaggggatgtgctgtcactcgaagcagcaatgtactgcattatagagtcaagaagccccgctatatctcaaagagggacgctttccatctcaacgccgtaatggacg

SEQ ID NO: 89912 - DNA, 283 bp, Glycine max
gcgacagtaccctgtgcaggattcaaaaacccgttttactcctgaaagtctgaaacaatgttgtttagagggtttttttgggtaaaattgtgatagttttctaatgcatttttttttttaaattcagaaacataataggatttgagaccctttttattccacaaaaaagctagtcatcttttgacctttgtttcttcacactttacagggttttttttcttgtgttcccagttcgcagtctactaatttttatctaatttgttaagttctttttctactaatt

SEQ ID NO: 89913 - DNA, 280 bp, Glycine max
taacggcttatgaagcaaagtgtttctcgcattcttcgaatacttaaggtagcagaattccttggcttcagctcgtgtatccaatcatgtttggagtacttggaggcagtcccttgggttggagaagaagaggaagaaaaggtggtctcaactgtactacaactccaagcagaaggaattggagtcaaccctgtgctgaaacgcatttcatccgacatttctaatgtcccaaaagacactctttcccacatcatcgaccttgttctcaagagcaatgagg

SEQ ID NO: 89914 - DNA, 283 bp, Glycine max
aacatggaaaatggtgcagctgtttccaggcagaggcgtaattgatgtcttttctcaacaacagaaccgcaacctcaaatctcagccagcagtgtaccatgagattaggctgccacaggagtggacatactgataatgatgataaatcttttgcttgttagggtggggaatagtgtttttataatctctattttggggtgggggtgatttaggaaaaatggtagggggttgaaggaagggggggtagaaatgaaaatgtagtagtagtcttctacaggagggg

SEQ ID NO: 89915 - DNA, 271 bp, Glycine max
caacaaatgaacctgatacatctttctttgaccctctgaaagataagtataccactcattttcttgatgagtacacggagctttgggatgaaaatagtgaatggtactctgagacaacaaaactcaataatggcattccagttgaattcgatggttacatgagagtgtccattgatacagaagtgttctttagaggtaaaaagcagcttgaaactttcaatgatttgaccagtgattgcaaggatggtattaatacctgtaatgttgcagc

SEQ ID NO: 89916 - DNA, 269 bp, Glycine max
attgaagaattgatcaaaattaaatagctagcttagaacaaaataattttttttatagatttttttaaccagaattatctttaaagtaaactcttttcctataattgatttattcatcaattatattttttttccttgctttacttaactcgcaacatttgtttgatatgaaagtaatgcagtgatctatggttcaagttgaagaagtcagaccttaacatcatggctggactttgtggagtgtccaaaggttcaagcatgaaaaatgg

SEQ ID NO: 89917 - DNA, 263 bp, Glycine max
agtctatttgcactgttatatagataacaagagataagttttctttctttgtgtttatagaaatggtaggagaaaaactatatttttggaggcataacatggaacattatattttcacatagcactgcaagtcagttaatcaatgtttgatcagttgcgagcttgcttgtttgtttttggattcctcgtgttctcctatttatgtgcccaaagtagcttgaacgatgttgcctgttgaggtctgggaagttccagaaaaggat

SEQ ID NO: 89918 - DNA, 259 bp, Glycine max
tgctcaagttctcccttaacacatgacatctatacatacgctcctccacccgcgttcagctcatagtgtgtcactatgctctactgtgcgcatccatctgcgtacgttgcaaattcgaggtatctccgtaccagtggtcatactgccgatctgtaacattattactctagatgggtaggatcgttagctcgacaggtatccgtatgaatcgcttggaggaacaactcttgtgcttaccaggtagccacctagtcagtac

SEQ ID NO: 89919 - DNA, 257 bp, Glycine max
gtaacagttaaaaccgagagtgatgcatcttccacaatttctagtgaacctggatccattggttgcgttaataatgctactctggcaaagagaacgactactcaaaataatagttctggttcctcgcagtggactttgctagacttgtattctggttgtggagccatgtccacagggctttgtttggggccatccttggctggaataaaacttgtacaatgtgggctgtggacattaatgcacatgcatgcaaaagt

SEQ ID NO: 89920 - DNA, 188 bp, Glycine max
  unsure (1)..(188): unsure at all n locations
ctatctgcattaaacccaactggactctctctctctctctactttgtttgtagtactaaaaccctattcatctcttttgtgcttatacttcctactttctcatcatcatgatggctccttctcagccacctccttgggccccatctanctctctaacaacaacaccaatcctccacaagtctttcttt

SEQ ID NO: 89921 - DNA, 253 bp, Glycine max
cgctcgagccgaatcggctcgagcagagacagggcttggcattctcaacggtggaaggacctcagctagttagttaagcagcctagttttagccctattacccagcacatggaatggaaggtaggggatgggagtttaattaacttctggaaggacaaatggttggggactggttctaacctggatcagcagtttaaccagatgttcctcatagtagacagcagaatagtaagatttgtgatatgggtagctt

SEQ ID NO: 89922 - DNA, 274 bp, Glycine max
atggaatccttcaaacaagtggaaagcagatcttcgaagaaaaacaagaaattggaattcaacagcagccgtgtctcccctgttccaaatgggggttcacaatggggagcattgaatatttctaaatcttttaatcctgtttttggatcgtcgaagaaatttttctctgcttctgttcctggatctagaattgtttcccgagcaacatccccaatatctagacggcctagtccacctcgttcaactacaccaaccccaacacttggaggtcttg

SEQ ID NO: 89923 - DNA, 269 bp, Glycine max
tttatctccatgtcagtgttaatttcatttaatctcagtttttaaagtttatatgaagtaatggaattttagatactttttaattttttaaatgataaaatgttttggacgacaggacaatatggatgttttatatagataaatccatgtcaaagttaatttcttttaatcacagttttaaattttatatgaagtaatggaattttaaatatttaaaaaaaattatgttttttggttgtttttttgcatctgataaagctatacatatt

SEQ ID NO: 89924 - DNA, 257 bp, Glycine max
agatttcattcttagtgttcagaatacatcaaataagttgaaggcttcctctgaagatgacaatgaaaagacaaatagtaaaagaatggagttcatgcttgacatcatatgtgacatcaagaataacaaaaggaagccaaatgaggactctgcacatcacactcggctgaagaagtggttacggaagttaagagttgatgacattttgattagagggcttaaatggagcaaattacttgatcctgacaagaagggcc

SEQ ID NO: 89925 - DNA, 255 bp, Glycine max
tgtgatacatgattcataggatattagtggaatgtgtaacagcattttactctgtcattgcctttccatttcttgtgtcactgttggctgtttataagattgagaattgttttctaatgtagggacaaatgtttaccatatatctttttatctgcactaagttcagtttgcaattgcattatagtgctgatattttcttttaagcagaatttgtattatgtttaagtttgaccccctaaaaaatatgctaacaat

SEQ ID NO: 89926 - DNA, 240 bp, Glycine max
ctcgagccgctctgattccgatataatcgatccatagagagcctatgattagtccaacacgcaaacgttcagaatatactggcggatgggatataggcatgcgatctggttagggaatggatgtctggaaaagctttatcgatgctaatgctagggctggtggtacatattatgaagttaatatatgactctgggatcgacatagtattcattttgtgatggggataaggtgttttccag

SEQ ID NO: 89927 - DNA, 256 bp, Glycine max
atctaaactaatctcccatacaacaaatcaaggctcctactttaataactgttacattccacatgatcgcgcaaggtcctacggatcaagacatgtacaaagcaggttaggacggcaactactgtggcgccatatcagcaaccgcagacgcttcaagccgcctctccgctgctctccaaggcggcgaggctgcacaaacatacaatgctgccgacgccctccactggatctggaaccaacagcactacaccacatt

SEQ ID NO: 89928 - DNA, 243 bp, Glycine max
cgagatatttctctcactagggatggctatagctctctggaaacctctgcgcttcgtcctttgactggtattgtcctttttctgctggcacccttgatacaatacgtatcacattgtgaattcactcagttttgaaagtagtcagtgacttcaacattagacaagagcgctacctagtaatggacctactggtgcttcaatgaagcacttgattctcttgctggcccaaatatgtaatactta

SEQ ID NO: 89929 - DNA, 250 bp, Glycine max
gagagagagagaagcattggttgttaatgatggcggaggggaaggaagagagtgaaatttagcgaggaaagcgtgcagctgttcgtgggtcaagtgccgaagcgcataggcggaagatgaagtgcttgcaatgttcaaggagttcgctttagttgacgaggtcaacatcagcagagacaaagctagtcgtgcctcccgaggtagtaactagtaaccgttctcaaattcaaattctgtgttctctaatgtg

SEQ ID NO: 89930 - DNA, 262 bp, Glycine max
aagactggtcttggaatcgccctgcacttgattatctggagctttaccatgctgcacgtaagtcagcatgagatttaatagacatgaattaagtttcatcctctttgtacacatttttgtggtaagcttcagtttgaacacacttgattgcatctggtgaatccttcaaaaagagaacaactacgaggtgaaaagccataaaagatgatgagcttcaaatagttcatttttttagcaagcaatagtgtaggctatttcatga

SEQ ID NO: 89931 - DNA, 257 bp, Glycine max
  unsure (1)..(257): unsure at all n locations
actgcatgcagcatatgagcaactcaaggctcctactttcttcactgttacgttccacgcacccgagcaatacacccacggaacaagacatgtacaaagcagtttgggacggcaactactggggcgccatatcagcaaccgcagacgcttcaagccgcctctccgcanggctctccaaggcggcgaggctgcacaaacatacaatgctgccgacgccctccactggatctggaaccaacagcactacaccacatttt

SEQ ID NO: 89932 - DNA, 258 bp, Glycine max
ggctttcgttagagactcctgaaaaccgctagatttgaatcaaagggtcaccaggatacgggcatccatatctcgtatcactccttatctcctctgtagccttagaatgaagaccatgagaagcatcaatctttgtaagcgagcttctgcttttgccctgtctcttgtcttagacacacatacacgacgacccagctgctggagctgcaggatcacaactcatacatgattcgcatggatacaaattaagcgtgttgg

SEQ ID NO: 89933 - DNA, 244 bp, Glycine max
ctcttttcttttcccatttgcttagctttttcatttaccagataataataaatttcccttttcacaccctccccttcttcaattgatcactccattccaccctctaatgtaatccattcttaaccaatttttattttaggccttcataacttacataacatcattcttcattatccaacttttggcttcaccaatctgttcctccatggaaaaccaattctttctcaatgctggtgtgccccct

SEQ ID NO: 89934 - DNA, 127 bp, Glycine max
atcggggtgtcttggttctcgaatcccgagccctgcactgctgcttggaccatcatcaccttagcatggctatagctataatctagaggcaatgaatccttctctcacttcttcttcctcaaccttg

SEQ ID NO: 89935 - DNA, 225 bp, Glycine max
ctgagcaggtcgaggagctggagtcgattgtgcagcaacacccggtcgtggctgagcaggtcgaggcgctggagtcgattgtgcagcaacgaccgggtgtgaggggggttcgtcaacaggcacctgcaaaaccagctgctgcagcagaaccacaagttgaggaacctccatctcctacctctagcacatcttcaagtcagctccagagggaggtagaagaggaat

SEQ ID NO: 89936 - DNA, 233 bp, Glycine max
caaatgcatcttctggggacattaagggatacaagctctggtattacaagagtagggaggagtcgcacactaaagatcccgtttctgtgtttcccaaagctcagagaaggattttgatatccaacctccagccttgcacagaatatacatttcgggttgtatcttttacagatatgggtgacctgggtcattctgaggccaagtgtttcaccaagagcattgagatattggaa

SEQ ID NO: 89937 - DNA, 229 bp, Glycine max
gattcaaacacgatggaaacagtactgctagaagatgacaatgctgcagaagcacttcttagctttatttcggagtccgggtcccaaatattagtgctgggttctgactcctcaaatttcataacaaggaagctataaggacctgggataccaactaccattctaagatgtgctcctgacagttgtgatgtatatattgtagctagagatagaattatatccaagttgg

SEQ ID NO: 89938 - DNA, 103 bp, Glycine max
tctacccaatttcgaggcatcctggatctgctctgcgctccacaaaactctaatgaaaaatggccactatattgcgagatagcgcctaatatgctctgagtgc

SEQ ID NO: 89939 - DNA, 221 bp, Glycine max
tgacaattttggttcaaacttcaacatattgctttttttcaattttaaagtatttgtttttcatttaacaattagcatagaaatatattaggttgaaattaagatacataataaaatataaaagagtaagatacattgtggagtcatttaagaagcttcgataaatttattttctaaaaggtaaattactgagttgtttaatgcaagaagaatcatacatt

SEQ ID NO: 89940 - DNA, 201 bp, Glycine max
aacttagcggtggcgttgagagttgagagtgaggggtttaggtttaaagttgaagaaggagcgagcatggggaaggaaggagatctatgggacgattcatctctcatcaatgccttcgaccaagctatttctactttcaacaaaatgcatagcagcggcaaacactaaggcgccgccacggctcgagaggcggacacaatc

SEQ ID NO: 89941 - DNA, 262 bp, Glycine max
ccaagacattactttaccgctgcatacaagtagtaatattgaataattacttttggcaaaatttcaggggtcgtcttaaatcaccatggtcacgcaggaaaagaatacatgtccttacacctcagcaattgtaaagcgtgtttacccaggaatggagtatactggatggtggtattaagttcttgaaaatagttctcagtggaggctgtgatcctagtatcagagctgaagtgtggccattcctacttggagtctatgactt

SEQ ID NO: 89942 - DNA, 270 bp, Glycine max
ggctcgaatcgagcgaatcggctcgagggttgactcatgctttcaaacaagctttgtgtgtgatcataagattctcgaagttattgatctttgttgatcatcaattgaattctactaggccactccaccgaagtttgaaatcatggtggaagcaactcaagctaataaagataaagatgcggctgcatttgaagcccgttccacagaagactggtttctgcatgcacaggaacttgttcctgttgctcttgctaatgcaagggaggttaa

SEQ ID NO: 89943 - DNA, 259 bp, Glycine max
attggacaaaagctattcactttgcaaatgtatacatagataatttatgtgttaagcttaattgcattaataacatgacatgttcttatttactggtatacaaaatgaagcaaaagagaaggaatacatttttcaaacagaacttacaagacatgagaaagaatataattagacagtgacactgcgtacacaacagtctcaacagtgagtccagggccaaaaccaaataacacaccccattcaagtccttcaccagttg

SEQ ID NO: 89944 - DNA, 228 bp, Glycine max
tgtgaatagtgaagcgttgagttgtttgcaagttgttcttttgatacaattaagattgtttttggttgtcttgattgtatacaaatcacacaaaaacaatcttaattgtatcaaaagaacaacttgcaaacaactcagattgtttttgtgtgatttgtatacaatcaagacaaccaaaattttcaatctcaaactacatggagttaatacatattatagcgtgagaat

SEQ ID NO: 89945 - DNA, 181 bp, Glycine max
aagatttgaaattttaataaaccgcgatcacaggttgtcgcaccttagaaccggatactgtagctatcgttacttgatttcgagattttctcaatttcgtcctactgctttgtgtacgatttcttaagggaaaggaaatcactctctgtgctggtcacagacttcgtgaatcattttcttt

SEQ ID NO: 89946 - DNA, 271 bp, Glycine max
ggctcgaggctcctatctaaggagaccaagaagaagctgcacagtcaggaagcgttgatggcatcatcgaacctccatccccggtcagacgccacgtgaagtggaagatggcccgcacgaacaagacaggggagatgacgactgaggccgcaaaggatatcgctgagaagattgtaagtcattttcaactatccattacaattatgtgcgaatattttgagaatgccatgtaccactgtgtgttttctgtgcaggattcgtatgaggagca

SEQ ID NO: 89947 - DNA, 103 bp, Glycine max
tatggattggctcagtgctgggagtttgtgaatggcagtgcttgtgagagatgtttagcggatgctgtcacgaggattggttcgtgttccacgcaagatgcga

SEQ ID NO: 89948 - DNA, 246 bp, Glycine max
atgatcattttgagaagaaccgtatttcaactcaatcaattgtgtcttaatttttgttattgatggtccgtgaagatgatggtgtagtcgagttcatttgtatagtagcataaagtttaaatatgcatttggagtttgagattagagaagaagagttttaaattcagaaccaagaggtaaggattgcattaactctttcacagtgcacaaaaaaagagaaaagaggggtaaaaagtggtctgagga

SEQ ID NO: 89949 - DNA, 244 bp, Glycine max
agagtattggtggaaacagtgtcgaagagtctggaagcaataattctcgaaggaaacataaagtttttcacaagcaaccatcgtcccttaagcagcggtttttctcaagtaattttaaaaatcacggaactggtcgaaactctaacggaatcatatctgaaagcccgcctagtaattcggttgggtttttctttgcttctacgcctcctgaaaatcatggtttcaagccttccaaattgagcag

SEQ ID NO: 89950 - DNA, 245 bp, Glycine max
aaacaaattcattcttgacctattaattttccaatattgtagaaaaatcaacagctttgatggaagtgaatgatgaaagtgagatctcacgcctgcaatccacaaaaaaagatgattcattactgcaagtcaaaaaacaaatatattcatactctgacgtccttaaaatcaccaacaatttcaatacaattattggtaaaggaggatttggaacagtttacctgggctatatcgatgacagtcca

SEQ ID NO: 89951 - DNA, 166 bp, Glycine max
atcaacgaagcagtgtcagggctctctctctctctctgggttttgggagacatccaactaccgtgtcggagagggagcgttgcgtggccatcaccacctcgaaccaacaccaacaactcactccctcgttgaagattcttcattcgccattattccattccacaca

SEQ ID NO: 89952 - DNA, 150 bp, Glycine max
ctcgagccggccttagaatgattcaaacatgtatacaaaatcaaaatatgcaatcagtttgcatgcaaactgattgcataactagtattaagtttaagacatttcttgattatgcagtacaagaaaaatgaaacaaaacaacatatatgg

SEQ ID NO: 89953 - DNA, 213 bp, Glycine max
ttctactttttctcataatacacgtaacattattattaattactgcttcatttgttacctctcacataatttcttgctgcccaggttattataatatagcacatggcaaacaaagatcttccacttcattaaagttcttcacttaactccctggctccagtttcatcccttttccatcttcacatttgttttctctttttcgcataaaactgc

SEQ ID NO: 89954 - DNA, 107 bp, Glycine max
caatgacttcttctctcattcgaacgctccaaagagcttctgcatcgctcattcgaacctcgagaccgttaagcccacacgctgccaccacgcgtgtcggagccaga

SEQ ID NO: 89955 - DNA, 130 bp, Glycine max
tacaataccaggtgattttgtagacactgaactatcatgccccatagcatacacacatggtgcatcatactgcactggctacaataccaggtgactttgccatcggtgttcagccgcatcccataagcac

SEQ ID NO: 89956 - DNA, 147 bp, Glycine max
tctcgagccgaatcggctcgagaaagagaaggttcagatctaaggtaacatggcctctcttacgttttcctgcaggtttgatttcccaatgctaattcatcggattcgtggtctgtatattcattgtaggttccattatttatcagg

SEQ ID NO: 89957 - DNA, 107 bp, Glycine max
gcctcattaagttttttgtcctatattattcattgactctccaaaagcccgttaaacctctctattcgtctctcacgtaccctgttccttccattcactccagttgg

SEQ ID NO: 89958 - DNA, 108 bp, Glycine max
cttaattatttattgcatgtatggccttatatcaaagtatgacgtaatattgatatttgcagtcgctctgtctcttacatttatgcacgcatgaaaaggttggtccaa

SEQ ID NO: 89959 - DNA, 108 bp, Glycine max
agatatcaaggagatgcatcagtcaggggactgaaccatcagcagctctagcacggaccctggaatattcagatgtaccagttgcatgtttccatcttgatctacctg

SEQ ID NO: 89960 - DNA, 104 bp, Glycine max
caacactggacatggattcttaatgatgttttcgctgggaattctcttgtgaatgatactgatttgaaccctttggagtttttagcttctctattccctggttt

SEQ ID NO: 89961 - DNA, 105 bp, Glycine max
caccactgcttggattagtctgcagttgacggtcgctcctcagacatcagcaaaaggattcgctcagcacttgggaatggtaagacaattgcttgccttactagg

SEQ ID NO: 89962 - DNA, 101 bp, Glycine max
aaatttgcaaatgctttcaaatatagtctgccatttcactattgaatacggaatgaaaccctttcaatgctaaaagacgtaaaacttgacaagaaatctct

SEQ ID NO: 89963 - DNA, 101 bp, Glycine max
ctcgagccgcaaatattggggtgagataataggaggctatgtacgtgttttacgctggaagacgatgagattaagacatgttatggacatgagagctggtt

SEQ ID NO: 89964 - DNA, 100 bp, Glycine max
ctcgagccgatcttatgcccataaaatcacagttagatagtctaattagagaaggctcctcagaatggaggaacttatgtgaaaatgatgcctacagaga

SEQ ID NO: 89965 - DNA, 250 bp, Glycine max
gaagaaaagaacctgttcttcaccagaacagagtttggttttataggaaccctcccattcatccaatttatcgatccacgtacatccccgtctttcttctcctattctctctctctctcttgttcttctataattcccccaaaaaagtgagagaagaacaaagggaattgaaggaagagattgaaaaaaaaggggggatacacagataattaattcggtgaaatttcggattttgattagtgggtgtttc

SEQ ID NO: 89966 - DNA, 252 bp, Glycine max
  unsure (1)..(252): unsure at all n locations
tgaaattttaatataccgcgatcacatgttgccgcaccttaaaaccggaaacaaaagcaatcgttacgtgatttcaagaatttctcaatttcttcctacttctttgtgtacgatttcttaagggaaagaaaatcactctctgtgctggtcacagacttcgtgaatcagtttcttttccacacgacatacgagcaatcgncacaggaatgagcagcctcaaccccactaccatcaaacccactctccaactgt

SEQ ID NO: 89967 - DNA, 223 bp, Glycine max
ctcgagccgctcgagccgattcggctcgtagctcagtgtaagataacacatgacagctgatacttccagcacctgttgaagatcgagaatgcagcttgtggtgattgcactactagtgttgatgctggcaagctattctatggctacaaataggatgaacattggtgccaaaattggacgagagatcagaactgggtaatgaatctgatgataatgatcacca

SEQ ID NO: 89968 - DNA, 249 bp, Glycine max
gcgccgttatgcgaaaaccccaaacttcctttaatgagccctcaaataaaaaccacaattcatcctcttctctatcgataactgtaatggttacgatgattgattgagtagtagtgaaaaaaatttggaaaatttcttttgggattaaggtcttgagattttagaagacacgcttcatcgtgttggcttgcttgaaattagtccaagatttgaggttcaaaaagagtggaggaggtgttggaaggaagc

SEQ ID NO: 89969 - DNA, 237 bp, Glycine max
caacaaccaaatggatctggtgggtcagttggctgggcaaaccctgtaaaaaggctaagaacagattctgggaagagaagaccaagccatacatagggtttcccttcctgagactagtagcaatatgtccattatttaccatccttatatcccgagaaagggaaaccctattatagcttgtggcttctcttcctcgggatataaggatggtaaatatggacatatgctactagtctc

SEQ ID NO: 89970 - DNA, 241 bp, Glycine max
cagttccactctggaggttgtgatgaatagtgatgaggtgctgatgttggtggcttagagagagttgaaattgcattttcttgacaggtggagaagattacaggctacaacttctgaagcaagaggcttgtagaagaagtcctcattcattcctccttcatcgatgaactcaaggcacttgcaagaaacgccctcgatgaaggaggagtgaaggcttcttccagaagtcacttgattcgga

SEQ ID NO: 89971 - DNA, 241 bp, Glycine max
caccttaccaatcttttttactttataatttttcttggattaagtttcgctttgtttaatgatttggtgttaaaatttaaagatattgccatatgcaagttaccctgcagtcgtatttctacaactgagttgaccaacttattgatggtaaatttaatgagtaaattttcctcatcttgtaaattaataaattcactttacagttattcatttacttgtttctttcttctgttttatttta

SEQ ID NO: 89972 - DNA, 268 bp, Glycine max
gtcttataagattaggttagaaattttatttgaaaatgaactccgataatcaacaacaatcggaggaaccaggaaatgcacaaaaatcactggagcattcggcagatattgctcaaccacaatccccaaatcaaacaactgctggaacatccactttgacggcagaggacacagaaaagccaaaatgtgcggtttgggtgaggaaaatgccaaaatgcattacggtgttttggcatgcttgggttgcaagggcttcttccgtcgtgca

SEQ ID NO: 89973 - DNA, 269 bp, Glycine max
  unsure (1)..(269): unsure at all n locations
cgaagacgcgagatagggaataggcgacagtgcgtttggctgcccccagcaatcgaactccttgtgctcctcgcacctcattctctctctctctcgtatctgcaacttcaactaactaacttttatgaagccgaaggcgncagtgaatcgacccccaacaccagatgtggtcgaaaatgtccctgaaagagaaccacgcttcaagagctcatcaacatcaaggtttcatcttttcttttttagttagtttcaagtttcacactttcact

SEQ ID NO: 89974 - DNA, 266 bp, Glycine max
gtttttacaagatactttccttttattaaagtcatattttaatgcatggagtttcacatccgacagcaaaagcttttgttactttatgccccatggaagggtacaacaaaattgggtgctttcggttaaactgtgatgtctccgccagtgctgagcataggggaggaggagggtaaaagcaatgtcactttgttggtttcctcatcaaccaccatggaaagtgtgtgtctcaagagcttagaatttaaagagcgcaactacatggg

SEQ ID NO: 89975 - DNA, 128 bp, Glycine max
gattcgcacgcattgcttcgcctcataacagcagctgcagcagcaatggctcgcaaacgaggtggaaaggctccggctcttgccgctaagaagaagcctgagaaggtcacgaatccgttgttcgagaa

SEQ ID NO: 89976 - DNA, 149 bp, Glycine max
tgaaattttgataaaccgcgatcaaagagtgccgcattttaaacccggcagctttagcaatagttacttgatttcaagaatttctcaatttcttcatacttctgtatgtacgatttgttaagggatcgcaaatcactctctgtgctggc

SEQ ID NO: 89977 - DNA, 261 bp, Glycine max
ggttggtgctagaagctcggtgaagggcaaagaagttgttgtttatgggaattctgatcaggatgagaaatgcctaactgggttgggtatgcctatctggcgtgacgaattaaggttaaaatcgtcgatggtagaggtgtccacatttagtgcgcaacagtacctcgaacaagattgtcttcgaaggaaatatccatcggaaagcaaaagcaagatcaagatgagaaatgggtagagagggatttctgagtttgagtgaga

SEQ ID NO: 89978 - DNA, 258 bp, Glycine max
aacagctagatactgatagttgatggtcctagacttagtcttacagatatccatcctcaatgagttttttgtcatgcgtttactcaggtaacaccgaaggcagtatatgaagccattgccaagtataaagtgagtcatttttgtgcagcaccagtggttcttaacacaatagttaatgccccagccgaggacaccattcttcctctaccccatgttgtgcatgtgaatacagctggggctgctcctcctccttctgtt

SEQ ID NO: 89979 - DNA, 256 bp, Glycine max
aattcactagtatttttcctttgttaagccatgtgttttccggcgacccactaatgctgttggtttggttccaacaaatcttattctttgtgcccatttctgtgatatgtctgatttatgcacatcactgtttcagtgtttctgtttctctttttttgctgtgttatgtactgcacttcacagtcacaagctcacattgcatgagtctggtcttattgttccattttgtttttctattaatttccatcaactttgt

SEQ ID NO: 89980 - DNA, 274 bp, Glycine max
gaaggaatctctggagatgggagttcaaagtgtagatgttggtaagtttatcaacattgtaagggatgatttagaaatgagaaatgtgagcactcctttgactctgaaatcttcaaattgctctgaagctattggcttgaagtcaaatatttctgataatatggaaatcagaaacttaagtaatcctcctaacttaaaatcttcaagttgcaccgacttgatgaacatcaaatcaagtttttctgatcatcctgttgttaggcaacaagatgtg

SEQ ID NO: 89981 - DNA, 259 bp, Glycine max
ctcctgcagaagcagagtataaatcccatgtttcttccaaatctgatgatttacttctcaaatggtttaaacaaatggaagaagtggaagatggtgtagcagaagaatccatgggtgctggagcagaaataatggaaggtgttgacgtaagccccagcgaagaggaatccgatctagagccttcccatgaggaacttgagcgtctgcaggaacagctttcagacagtatagtgtaagatctaggcgccaaacagaaaga

SEQ ID NO: 89982 - DNA, 256 bp, Glycine max
gtggttgatgagaaaagagaaaaattgatgaaaggtgcaccatatcactatggaattgagatgaatcttgtggtgtataataattgtgcatggtggaccacttgtaacagtgatccatcctatacaccatctattttagcctagtatgtatgttgtatttatatttaatctaaataattttcaatttgacaaagatcttataattttgattcattgcttaatattctctctcttttacgccggggttttggttgct

SEQ ID NO: 89983 - DNA, 261 bp, Glycine max
caataacaactctaccactctcaaaacttctttcaaaactccaatcttaattaaacaatcctacaaaatgtcttcccagtccgagcagcttaccgccatcgcccagtccttcaagggcgtgcccggctctgagcccatcactgccgccattgaggactttgttcagttcttcaagccccagaacgctatccaagttggcgacaaattcccctcgttccgcctgagcgatgccaccggcaaggaggtgtcgagcgacgacct

SEQ ID NO: 89984 - DNA, 264 bp, Glycine max
ctcgagccgattcggctcgaggcgcatccaaagcctccagtgcagcctcggattcccctacacggaaatccaaacaatctagtactgccaggaacattgtctgggcaggctaatttaatgcttccttctgcacgttctccaggtttgggaagtttgcctgttaggcctccaattcaactggcaacttcgactgctctaaaccagcaaatgcatgcctctttgctacagcattctgtacatgttggaaactcaactgtaggacat

SEQ ID NO: 89985 - DNA, 257 bp, Glycine max
caactataaacccttcaccatctccattcttattttcagtaactcctaatttctctggctcaacgaggaggaaaaacaggcagaagatcacaaatggagtcacagaattgtacaaccaacagtccatttgtgcttcagttcgttgaatagagttaggaaataaataaccgatattgtctctccatctgagtgtttgtctagccaaagctctggacaatggacatcatattgttaatagtttataacttcattgccta

SEQ ID NO: 89986 - DNA, 175 bp, Glycine max
ctgaaactggatttactactgccgcgctaggtttgagatgcggctggcatcatcataaggcttttccaatatttcaatcatgatggacatcggaagctcatcttctcttcatggaaggggctgcatggtgtaatcaaaaaaagtggacagaacaggcaatgtacgagaccttcgc

SEQ ID NO: 89987 - DNA, 244 bp, Glycine max
cggaagcagagcaaagcacatcgagcagaagagcaagcaacggagaagaaggccaaatccaaagtctgtttcttcttcttcttcttcagttgacttaatctctctccagggcatacgtcagcgcgtgttcttaatcgagagttgacgaagaagatggagaataatccgaaggagcttccagagcagcaaagggtcaatttcaacggagaccctcacattcacgacaatggcaacagcttcaacc

SEQ ID NO: 89988 - DNA, 102 bp, Glycine max
cgccttccggtctaactcataactcagatgagagccctctctaagtagtctagtagtagccacggcaattcctgcctccagatgcaccccatcaagtttacc

SEQ ID NO: 89989 - DNA, 125 bp, Glycine max
gctgatgctggtttgaggaccttgatacttgcgtatcgtgaacttgatgaagaagagtacaatctattcaatgaagagtttatggaggccaagaacttagtgagtgcagatcgggaccaaattgg

SEQ ID NO: 89990 - DNA, 244 bp, Glycine max
  unsure (1)..(244): unsure at all n locations
ccccatccccgatatggtttcgtttgcgtcgtcgtcgagtcggtcgtcttcgtctgcttcgatgctctcgtacacccctccctttgaggccgcgttcatcgaggacaggaccattgttgacggacaggtcgtctctggtggcggcgagttctccaaaatctggaggatgcgcaacactnggaactgtcgcttggcccacggcaacaactgtctcgtttaccggcggacactacatgactactgc

SEQ ID NO: 89991 - DNA, 246 bp, Glycine max
ggctattcaaaagtataggtgtattatgaatttttgtgcacaaataacacttaatattgttatgtgttgagattgtttaatatattatgtactatttgtgtagtgtgtacacacatattatctcttttccttcacctaaatcttgtaagtttaacatatctcgccttctgtttgtgctttgttacagttaaacatgagaatgagccgttcacaggatccacacccttcccgatctttcttcccttt

SEQ ID NO: 89992 - DNA, 271 bp, Glycine max
  unsure (1)..(271): unsure at all n locations
tctcgagccgaatacggctcgagcggactcgagtgctccaccgatcaagctcttgtattctcttacacaatgcccgtgcatcccatactcgttaccgtatccacttcaatgctcagatgtgccgatgaatacagctaacccaatacacgtaggaggcaagtcctcttctcncatcagntcccaaccccaaattccggaaccactcaacggccaccttgagacttcccgagtttcttctcggtatggaccgcttgattgggctcccgctggg

SEQ ID NO: 89993 - DNA, 136 bp, Glycine max
attttctcccttatttgtattctatatggatatgtatgttataaaggttacagttcagacacactcacatacaatcacatttataacatacatatccatatggaatataaatgtgattgtatgtgagtgtttctga

SEQ ID NO: 89994 - DNA, 242 bp, Glycine max
caaaactgtttattctccgttttgcaaattgaagtgtggggttcatctcccctccatctgtatcatctggatcattttctgcaagacatagtgactcacctccctccttctcaagcacaaaatctgaaggcaatgtggacttacaggatgtgttggctgctgcccatgctgtggctgaactgctgaacgtgcagcagggcagctcgcagcgggccagccttgctcaactccgaattaatgag

SEQ ID NO: 89995 - DNA, 238 bp, Glycine max
gggttttcactttatctcttctcgtatttctgtgtagtgggaaaccagactttttttgtagttgtactgattttcttgctttatacccacttttttttttctttctccctctgaattgtccaagtttatgctttgtggttgcagaggttaactaggaaaagggcatgggaaatcatattttggtaactaattgctttcgttcttgtgtctaatttcattcacttccagatttgtgggt

SEQ ID NO: 89996 - DNA, 113 bp, Glycine max
gctatttttgagacaagctgagaaaatattgattcagaaactcatcagtttgggctataccaagtcaagattgggaggaacatccttgtagtacaggcctgggagcccttata

SEQ ID NO: 89997 - DNA, 207 bp, Glycine max
gtctttagagcatcagtgaataataatagtccaagatctccaattctctatcattcattttttacgcacacaaagttgggtacgtgtgttgtattatcagaagcaattctttccttacaagaaagacgctgaaaattatgttttagggtgttgcttgtaaggaaactcgtattcagttatccttttatatatatatattttttaatc

SEQ ID NO: 89998 - DNA, 283 bp, Glycine max
gctacccgaccttacaccaaatccagttttagagaaggatttgaagtttcatttttgacttgggattgtttaacttgagttatgatcatgacttgaggtttgaatctgcatttagcatgtcttgttggctagagttaagatgtggagaggtatgcttaatccttgctacctagtatattttaaaagatatcaggttatttaccccactgaaaatattagcattgatctctaataaactatcctctaactccccaaataaggtaatcttaagataaagttatca

SEQ ID NO: 89999 - DNA, 281 bp, Glycine max
aacttaagaatattgtccaaagtttagacaaatatcacataaacacacacttccttgctctttgatttccaaacataccagctaaggtgtgtgtgtgtgaaactctcgacttctcaacttagcaacgcttgaaattttagttcacaaaagtcactgcctcatagcaagccttgaatccatatttgagagacacccatcctcccattttttattttcttttcatgttgattgattgatcatgaacaaaatataactcataacttaatcctactaggcagtgt

SEQ ID NO: 90000 - DNA, 276 bp, Glycine max
ctagatgatttaaaactggaactgcagcgagaatcacttttgaggcaccaggagcaggaacaattagcaaaagagcaagcctgcattgcctcactgatatctgaaaagcaggagttggaagagaaactcatgtccatatctagagagcctgcagaagcctcagataaagctgctcacaaagcattttctttggaagacaagcagaaacttgataggcagttgtatgatatggctttagccattgagaggttggaaagcagtaggcagaaacttcta

SEQ ID NO: 90001 - DNA, 255 bp, Glycine max
tggttttatttgtgtactgttagagatttgaataatctgagatgtggaagttgtaatcaagtcaagagggcttttggagaattattatagatgaaaaatagatgaattttgattttggtcgctttgattggagaacaatactaaaagcacctacggtactgtaccttaattttttctttccaatatatgtatatgtattttacaagtgaaaatcacatgtatatatatggggatataaatggggacaaaatgttt

SEQ ID NO: 90002 - DNA, 178 bp, Glycine max
gaaagaaaaaaataaaaaaattcaatgccttcttttattttcaagagaaaccaaaaaggcatggaaagagtcgttgttgttgatgtctgccaagaaagatcacgcaaccgcaaggagtcagtagttaaggcaatttcctcactcctccccgaattaggaaacccaaactgaaatgaac

SEQ ID NO: 90003 - DNA, 276 bp, Glycine max
tctcgagccgattcggctcgagaacaaggttagttgctcctagctattcctggttctcttctagcttatcccttattatatcctctctgtcgtttgcaatatccaatattccaacaaaacacatggatctagctacactgctgctaactgttctcttcatcgcaggcctcataaatgttttcttttacatacccaccaccaagattagtgcgtggcttcaaactttcttccccaacaataattcttgcaacaaaaccaaaaccaacttggctcctt

SEQ ID NO: 90004 - DNA, 154 bp, Glycine max
atgaagctcttaactatccaccaacagattatcagttttgctaggaactctattttctttgggagggaagggtttatgggtgtaaacatgaccgagaacttttatttgtttacttatagtgagtcctgtttaaattgattatttccaccattac

SEQ ID NO: 90005 - DNA, 281 bp, Glycine max
ggagggctcaaaggaaaaccgtgtgcctccgcttccgctcataccctcttcgaatcttcaacaaggcggtggtccaagaatgaagcgcctactccatcaccatcaccggctgcctctcggcaacatcagtcagaatgttatgcctcattctcatgtcaacaaactagatcttgcccgcaagtttacgccacacacagttcagcaccacttccctcagccacatccacagcctcaagaaaataagaaacagaaccttttggccccgaccccgagttaccagt

SEQ ID NO: 90006 - DNA, 188 bp, Glycine max
aaagaataggacaacatcataatagacgaccatcaaaccttgttgcctcagtttaacaacacaagaataaagataatagacaagtgtccaagactatttaaagcacaactgcacaatagcattatgaagctatctattattgagagtcagagatgcaaaccgataaagaaggttatcatccattccac

SEQ ID NO: 90007 - DNA, 231 bp, Glycine max
ctcttttaattgtcgtaatgatgtgtgaagtgtgtgttattttaaaaaaaaaagaaaaagaagaaaaaaagggggggccgccgacaaggaggctggtgaacccgggaataaatccgggaccggtaccggagggggacaaagtttccccaaaggggagccgaataagagcttggggaaaacagggaaaaagcgtttcccgggggaaaatgggtcccggcccaaatttccaaa

SEQ ID NO: 90008 - DNA, 272 bp, Glycine max
gaaggtggacagtctgcagaaactttgttcatcactggagcctattcttcgtagagttgtaagagaattaagttcattgtggtattgatttgcttctgggaggactatattgattatttgaaattatcacttgtaccgatcaatcaattgattatcccttgaaacagaaaccatgggttacaggcccatttgagaaaaccttttgcccttggctagatatgtcagtcacgtcactgctgtgaggcttaagataaaattgggtagaggactag

SEQ ID NO: 90009 - DNA, 242 bp, Glycine max
cacaggtgtccggtttaatatacttaatttttattctctctttgttgttgtcgtttgacacaatgcgtctctcgttcacctctgcagcaatcgctgctgtgctcggcggaagcaattagcctctgctgccgccgtcctccaccttgcgcccgcggtcaggccctggaaattcgcagatttctcaggtcccaagccgctcacgctcgatgaagctctgcggggcgttaagaatgtcaagattg

SEQ ID NO: 90010 - DNA, 255 bp, Glycine max
attttgtggccgtatgtggtcaacagattaggtcatttgaagcactgcatagacttttgagtagtttcctagagcttttatggacacacttcatgttcctctacccaataggtgctgcttgttaaatgttctttttcctgttttatgattttcattctgtatttggaagatagttgtatgtgtatgtgtcctatctctgttgtagctctctgagaatatatgctctctactttcatattttccccttaaatagta

SEQ ID NO: 90011 - DNA, 243 bp, Glycine max
tctcgagccgattcggctcgaggtgatattttgagcaggaatgaacgtgacaaggaccatgctgagaaatgtaaattgaagtggctaaagattttgaggaggatatgggcacttggaccaaggcaaattggtccgaaccttctctttactcctgatattaaagcacaaagcaccgatagctctgtcttaatacgtggttctcctggcatatcagagaggtttggctttgtggccgattctagt

SEQ ID NO: 90012 - DNA, 173 bp, Glycine max
ctctggaagagagactgccaggaaatggaagaataatgtctgggtaattgttaatggtgagaaggttccattgtgtaaaacagtgctgctcaaatactacaatcaggtgtcaaaagctgcaaatggctcccatagatcccataatggtcgggcttgtcaccgtgataagtttg

SEQ ID NO: 90013 - DNA, 177 bp, Glycine max
caatgaaggattcccttagctgaatgttctagagttctagttgcaaatttcaaattctctttgtgatatcgaagtcattagcctttaggttagtgtttacctactaaactttgattcccttaacctttgactgaacagctttatgtttgattgttctggaagtctaaatctttgact

SEQ ID NO: 90014 - DNA, 250 bp, Glycine max
tgcaaattcacaagagactcttgctaaaactaatgaacctcacattcagaacagagcaaagtgaagtaaaaaagaaatcaagctcaagggcctcttttacttacttaaattctgataatagtgattctgaagaagaacttactaaacaaaattcacctagtcttgcccgtcctgttagtggaatatctcgaaggacatcagcttcttctaaagctgctacaggtttaagctcaagagatgctcctttatc

SEQ ID NO: 90015 - DNA, 186 bp, Glycine max
ctccaattgcattcgactttgcattattgcattcatatgaatcgttaaactattgagttcgatgtcttaagttccttgtcaatgtcatgcttagtgtcatgcatattgtttgagttttttataataaaaaaacactggtgagtaacatcattaagcgtgtggtttggtaacatcggcaaattgatt

SEQ ID NO: 90016 - DNA, 174 bp, Glycine max
ttacacgttccttaatttcatgcgcatttgatcgttctctaaccaccgctgtctcactcatagtcctcttgattatctcaatcctctgcaaccttaaaggactcgaacattcttcactggtagagggagagggaatggatttcagcgagctgagaaaagcagtggaggaggttg

SEQ ID NO: 90017 - DNA, 255 bp, Glycine max
aacttctgcagcagcttccatgcttcagtctccttcattgagctcacaactaggaccagccaattcagatacggtccctctcatcaattctagcgttgcttataaccttaatgccctaaacttcacatcatcaagctatgatcagcagtttcaaaattatcacaacacttgtacttccacacctcatacgagtccgcgtctagttctcatgctacaatcactcttgacctcacctcagctcaaacttcacctcat

SEQ ID NO: 90018 - DNA, 256 bp, Glycine max
actagttctagatcgcgagctgccgccctttttttttttttttaaataaaattataatgaaattcttatttctaccattaatggtgggctatgaaatagcaattattacaatcccaaagtatgacaacactacagttgacacttggcttttgagtaataaagaactaaaaaaaaatcaccagtcctcctcctatgattatgaatgaaagacttaataaaatgaacaaattgtaatttgaaaaaattaattaatttt

SEQ ID NO: 90019 - DNA, 252 bp, Glycine max
attctgatcgcgaagcatcccaaactggatgccctttatttcttctgttaagatattgccagacaaacctgacctgtcacggtggtccttgaagtataaagcatttggtcgtgatattgaattctcttggcttgctcgtaatatgcaggaaagatccccaacctaatactatacttgtttttctcaataaattctctttacttacaattgttatttgttattcatgttatatcaccttcttgcagcccattc

SEQ ID NO: 90020 - DNA, 255 bp, Glycine max
ctaagcagtttgattcaatccatattgccaatgctttctgctagtgttagttgataatcgtttcaatttgattaccctcgctaccccttttatccatttcagcaaattgtatgttttagggtagcatttgtatcaattaggatccaagggttttgttgattacatttacatggatattttataaattgcttggtcaaaggaaaggctagttagagattttaaaaatcattcatatatgtatgtatatgtatattc

SEQ ID NO: 90021 - DNA, 252 bp, Glycine max
gattaaatccttcccactgtgcccatcaacagaactatggcactctagcctgatacttattgttttaaatacaaaataaaatatttcatttactttatatttgtgctttttatgtctcctaggatgttgtagtcctttaatgaagaaaaatagtagaagaatgatgatagaatctaggtttctggtgatttatttgtttttgttgattcagagaacactgtttttgtgaaagaggagcattacagttttgac

SEQ ID NO: 90022 - DNA, 248 bp, Glycine max
gttttctttcgcttgttcgtttgtgtaattcaataaaggaaattaggcatgaccctcttgttgagtatgctctgcctatctgacaatttccacacctcttgcaattgtcgtaatgatgtgtgaagtgtgtgttatgttagcagagcgtgatcattatcgcagagttgactttcctgggggggtccgcccgtggttcaggcacctctgcctatcaggtggccggagcttctaacgaagatgggagaact

SEQ ID NO: 90023 - DNA, 245 bp, Glycine max
cactacttaagatcttgcgactaaatttcaaaaatagttagaaagtgtatcattatgccaaggtcgtctagttaagtgtctaggtttagtatatcatgtaaatatattaattgagaaaattgtattttggtatttattggatcatgaaatggatattgagtccacggtgtagagctgaaacacagttttcagcgtatgcgtcttattataatgttttttttgtcttgatatccttgttacgttgt

SEQ ID NO: 90024 - DNA, 246 bp, Glycine max
ctaatacaagcatcttctgcaactcccaaagcaaaaccttgtgcgacacagcatcagcgcaatgcatcaacaaccatgaatccacgtttcaccactgcacaattacaatcccatgagcctctcgtgcatcctcaaacacaggtcttccctccacccccttcccccatcaccctcttcatccaacggcgatggaagaaacccaccgtctccgcccaaacccgcttagaggacagcgtccgagacccc

SEQ ID NO: 90025 - DNA, 240 bp, Glycine max
gggcaggattccaaatgtaatagccaaattaatggggctggacatccttcctgacaaagtggaaaaggaatcaaaacgggcaatgctccagaaaagagaaggaacatctcccaagcatgctgctaaaggaagcactaagaagactgaactgaagagcaaagaaacagataatttgatgcctatgaaaaaccaaaaagtgatagaagccttcaaagtgcctgcaactcagggtaaagagat

SEQ ID NO: 90026 - DNA, 238 bp, Glycine max
atcaaattccctaccatttctttctgttattgttcttcttcttcatgtctctaactctctaactaccccaacaagagagtccattcacgacacttttcttcattgtcttcaaagccacacaacaaaccaactagatcatgtttcaaacatagtctatgcgcaaaccaacacatcctacacctcagttcttcgagcctttgctagaaatgccaggttcagcgccccctccacgcaaaag

SEQ ID NO: 90027 - DNA, 236 bp, Glycine max
ctcgagccgaatcggctcaactcttctctcttcttctgctgtacgtctgtcgttgaagccaaaacgaaacaacgaagaacgaagaagaagcatggtttcaacgagacgcaacagtgggtctttctccaacagtaacaagaggtcctcttcttcttccgaagacaagactccttcccctcgccctaagcgccaaaaggtcgacaatggtgccgccgcgtcggagaaaccgatgccgg

SEQ ID NO: 90028 - DNA, 236 bp, Glycine max
aaagaatccaagataaagaaatactaaagcagagagccttagaataaagacaaggtaaaccaatctcattatgagaaaaatagtaaataatggacactatagcatcacttttcaatttttatagccaaattggaaagttgaaagccaaatagtcaaactgaggtggtccacagtacccacatcattgattattgccattaatattctgctattgaaatgtgtgtcaaagcagtggg

SEQ ID NO: 90029 - DNA, 240 bp, Glycine max
ctctgttcttctcttcttctgcttcttctacccttcaatattaatattccgtgcaaaaaccaccatcaacaacatcaccatcaacaagaagaacaagattgggcgttatgggtctcttcctcatctaggaatttggcttgcaaactcatgtaaccttttctcatctccaagaaggtttccacggatttgtttcccaagcagttggcgaacatgatgtctctgatctctcctcgtactggc

SEQ ID NO: 90030 - DNA, 252 bp, Glycine max
acaatttttcctgatagaatattaagattcttattgttttaggaggtatgactcttattatgtgtgtagaactatagaagtagtcctattggacttcacatgttcaagttgtaacttgacctatattatggttagtgtttctaattccattctttatgattagtcttacaagggaaagatttctgagtatcatttagtcaaacattcttatgcaagtagggaaaagaaaattgtaaatagaaaccacaatgg

SEQ ID NO: 90031 - DNA, 251 bp, Glycine max
ctcgagccgtgaaagcaatggggaggttcagcgttggagaagttacaagagtgaaagacaagaggatgagaaaaaagtacaaccaaacaagccgctaagtgtagccactactgatgtggaatctgagttggagaaagccattaaggctgctacctctacctcttagcaaagtaaaggtccttagtcgttaccacttaccactttttgaatgctttctgagtttgtctgccttgccttgccttgcaaatgtg

SEQ ID NO: 90032 - DNA, 248 bp, Glycine max
atctcgaggattgatgtgaagatttattccatttaattctcttgcacacttatctcgttggaaaagaaattcagatattggaattgtaaatcaaaccttagttatattgaaaaagtagtagtactagtacaatattactactattgtttattgcatgtatcattttcagttttcagttaacactgaggctttgagcttgttttgaagtacgtgcctggctggatcagagtggaacgccaatttattag

SEQ ID NO: 90033 - DNA, 258 bp, Glycine max
caagttgctaaacttagttctgaggattgtatttcactggtttagtagttaataaatagtatagaagcttttaggtgattggaaaaccttcaatttaactgttacgtaaaattgcattctccctctcccgtttttgagtgttttaatggttgtttccgatttgttaattcaaattctttcagatttatcttctagatatttatgtgttttacacacttgtattggctgtctatggattcttacagggggcaagagatc

SEQ ID NO: 90034 - DNA, 264 bp, Glycine max
tcttctcagggctttaacaggttccacatcggttgagctttgtgtcagatatgccaatagtgttatccttattcttgtggtcagtatttctcttctttctttcttctttttcaatgagcttggatttgtataacaatatgtaattcaatatttctccatattttgctttttaatttcacttgtgacttctctgatttctattattatcatgttttagatttattttgaagaactctgtgtttagattggattggaaaacatacc

SEQ ID NO: 90035 - DNA, 263 bp, Glycine max
tcttgatctatggtagaacaagaacataaaaggatgtttctgttgagagctggtgttcttggatgatggaaccactatcctgacattacttgagccaaaaacaccagctctcaacagaaacatccttttatgttcttgatctatggtagaacagggtggattgggggtttgctggggaaattgtgtgaaaagcaaggaattccgtatgaatatggcaacggtcgcctagaggaccgctcctcactcttggctgatcttcagaa

SEQ ID NO: 90036 - DNA, 273 bp, Glycine max
aactgaaccaaatcatcacacacacatactaagttgcaacaattcttctactatggatctcctccttctggtatagaccctcataggtctcttcttcgctgtggtggtcgccatcgtcgtctccaccctccgcggccggtaattctagctctcaccgggcccacctcgagccgctcgagccgcaaagtggtcttatttgttaaacacttgggcgttggagcaaatgtttgcttcatacattttctctggtatcaacatgctcactgtagaaaa

SEQ ID NO: 90037 - DNA, 139 bp, Glycine max
gggaatagaatagatatttgatatgagactactgcagatggatctaatccgtgggatcagctagggtccactaactgtgtatctgtctccgtatttttctgtgttctaattttagctgcgatatttttccacacagcat

SEQ ID NO: 90038 - DNA, 149 bp, Glycine max
atttttcttatatttaagtattttgaatttttgggaggatggttttgctctcatccttccacttgctgaaaactctgtaggttgggatgatttgattctgcgtgtgaggttctctacatgccaattcgtccacgggaagacatcagcaa

SEQ ID NO: 90039 - DNA, 100 bp, Glycine max
gcgctaatcatgaagttgggcatcttgactattacaagtttggtgtcactcaaatgtaatttcccaagttgtcgaataaaattggtactatatttggatg

SEQ ID NO: 90040 - DNA, 262 bp, Glycine max
tctgaatctgcggatccggtctgttaacccattaatatgaattaccttagtatctagaaagtgtgtctctcaaacatagatgagatctttggtgttggatttttgacgaatgaaataatagtattatggagaagaagaaggaagaaggagggaaagtggggctgagaaagaagccatgtgggtgtgtgtgatttttttagttctctctgacaccaccccatctaatcttaacacacaatgagagcacaacatggaagaaaag

SEQ ID NO: 90041 - DNA, 259 bp, Glycine max
ctcgagccgctcgagccgtgtgtattctggacattaagtagcctaatagttgcggattagtaaaattgctctacaattttgcttccaataatccatgataatgtctgtaccagaaagaactaaagcgataatttttcataacagcatggaattgcttgttaatttctatttatcttcatgaaaataagatcttttcaaatgctactctattgttaactattctgccttgcagtgctctgaatgaactgaccaataatca

SEQ ID NO: 90042 - DNA, 168 bp, Glycine max
tattaatttgcactctaccgagttattttctctgttgtaggagcgctttcaaggccttgattgcttccttgctggtacatatccttttattggccatgtaacatttgagacatatgtttcctgctcaagtattgtggaacaaaacttacacctgctgcagcgcctgct

SEQ ID NO: 90043 - DNA, 164 bp, Glycine max
attttgagattagccaatcaaagtggtgccacaactaaccctcacagcctcatcttgcagaggcttctatgagagcttgctgcaaccctttttacgcaatcatccaaatagattgacccgtgtcaacaatagtcgtgtagataataagtgctatattgaactta

SEQ ID NO: 90044 - DNA, 260 bp, Glycine max
ataccttccaccgctctctctcttccaatcacaggcactccactaccactgcctccgcttacgtgtctcctcgtgccaattccataaccgctgctaactccccttacttcctaggcttgcacaagcttgcagatgatccctatcacgaactcataatcctgatggtgctattcagctttctttgcatcaaagcaccgtgagttgagtttcttctctcttcactcttctcttcacaaccatacgttagattgacttggttc

SEQ ID NO: 90045 - DNA, 126 bp, Glycine max
attgatggtatgagtgatactatcattaagtcacttttaagtgggaaataattaactttcaatctaggacattgattgctattgttagtccatgcagattgaattaaaatcttgatttgcgggaag

SEQ ID NO: 90046 - DNA, 261 bp, Glycine max
tacacaagaactctccaaggatcctccttcccacgtatactcacttttttctcattttctcctcatatacatatacatatacaactacatacatatacttatatgtattgtgttttgtgtgtgttttaagttggttctttcaattgatttatttaataattatctcctactcatgctttgtgtcattctcttcactataaaattggctttggaagtggtaaaatcaagtgaaggtgatagtaagcactaaattttttcagg

SEQ ID NO: 90047 - DNA, 264 bp, Glycine max
tatgaaaatggaagagttttcagatgaggttgatgatgggtttgatgatgatggtgtagaagaagatgatgatgaaatggggtttttgaatggaagtgaaagtacgcttggagaagaaagtgaggggttaacagatgagttagattgggagaagagtattgggtgaagatgatgatgagaagttggaattggatgggtttacacctgctggagttgggtatggtaacataactgaggagtatttagagagggtgaagaagaaga

SEQ ID NO: 90048 - DNA, 260 bp, Glycine max
aacgaaacaattcaggactgtaaattatggcttttgttaaaaggtaactttcaatttgaccatactattgtgttgaatgttatcctgaaaagaaagagaaagacagctaacacaagcttagaaaaaatgaaaagcattacatgtgatctatgcagtgaacattgaacttgaatttgcaatttgactctgtatctttgcttacattaccaatgtttgttacaacatgtcactttcttttgtgcaggttgaatcaattaaga

SEQ ID NO: 90049 - DNA, 256 bp, Glycine max
atcacttttgaagcatacaatgagaagtaactccacatgtttaattgctattagttgaagttcatgcagatgtggtaaaccccaatagatgtagaatgagatccacttcatttgatgggatctacatgcatattcaactaatagtaagtagcaacaaattaagagagcccgagtgagcgaccttgctaaaagcttttcagcagtcaagagtgtgattggttcagaatcgtgttagaatatccaataaactaatttt

SEQ ID NO: 90050 - DNA, 254 bp, Glycine max
atttacacctttcaacctctttttaccatgtcagacctcaaagcttccgttgtcgagaccaagaacggcttccatgtcgagggatacgagaagatcgaatatgacttcaccttccttgacggcgtcttcaaccctgccaaaacaacctagccaagtgctatgagcgttggggccgttgcttggccgtcatggacttgaacatctacaacgtctatggcgatgagatgcaaaagtactttgaccactacaaccta

SEQ ID NO: 90051 - DNA, 252 bp, Glycine max
atctcgcttcacatcctcgtttttctcttcaccggttggtccgttgatttcaaatgctttgcccattatagcaaggttaagaatattgatcaggcagattcgtgcaagattactccggcgaagttctccggtgcaaaagagttgtgccgcttcattcacggaaaagttctgcaggttcttcatcagcggtggatttggaagagaactacttcgattttagaaagcaatgttttgtgtactcaaaggagaagg

SEQ ID NO: 90052 - DNA, 255 bp, Glycine max
cattttatctgtaaatatattaactttaagaaaatggcaaatcaacgaatcactccaaatgcattctggtaaaaactagccttttatccaaacatccctctcctacagaatctattactgagacaattagaatagagagtaattcaaacaagcacttattttacatgacttacttttggttgcatctatctccctcagttctttggtttccccctggttttggatacttcatccacagatgaagcaggttagttg

SEQ ID NO: 90053 - DNA, 249 bp, Glycine max
atcttatttgccttgaagcatggaaaatgaaagacccttatatctttgctaaaagtatggttgccaaattcttcacttttgactgccatgaacttttgagcatcatcctattctcttatttaacctttaaccactataattgattcaaaccctaaataacctgatgttcctcaagataaaattgtaataaggtatatttttcaaccatgtgttaaccctgttgaagtcgaaaccatggctgccttaatt

SEQ ID NO: 90054 - DNA, 249 bp, Glycine max
aatcggaactatttgactttttgttacaagacaagtagttttgaccgggactttaatggctacaggacaggtagtattgtccaaaattaagtacacattaattacacacagacggttttttgaccgaaaatagattaatctaaacagataccaaaacaatcatcttcgttttggtaaaagggatcttcttcttcttctacttcagcagaacttgtttcttccttctttaaggatgaaccttcttcttcc

SEQ ID NO: 90055 - DNA, 246 bp, Glycine max
atagctatatattagtaagcaggatccatgagctgaagagatcagatccattcattccctatctcgtattatccttttcagtgtttggtggtggaagaaaatatgtccaatttgacgtctgcatccagtgaaatagtgcttcttcaggaatcaggaatgacaacggttcttctctctatgctcaatattcctctacttcaataagtcaagaaccacaacctaaaaagaagcgaagtcttccaggtc

SEQ ID NO: 90056 - DNA, 273 bp, Glycine max
ctcctttaggtatttgcgaattcaagatttataacttgatttcgagattcttaaattgaaatcaagctcccgatacccgacttggaagcctataacctaattgcggcgcctaagggtaaaggttgctttggattgaacgtccgttttggaagaatgacattcagctaaatccccgttcgcaatttccaaacatcaaggtacctcgtttgatgcagtctcagtagacgtttggatatggttcccttcaagtagatgtttatagtcgacccacag

SEQ ID NO: 90057 - DNA, 277 bp, Glycine max
ctcgagccgttagagtacaaagcacggtaaaaccgatcactggcaatctgaactccttaaagccagaccactttatggaacctggtgttgcagaacgagtctgttgatgaggaacttgaacactttgaagatgtgatagaaactgatatgagcctaacagtctatcaaataatcagaacaatgatattggagttgttcagaatggtgaggatgccaattctgacaccagttcttctgaaagtgaagatgatcttccagcatcttctgaagatgatga

SEQ ID NO: 90058 - DNA, 282 bp, Glycine max
gaaagcaaagcacagaagaggagctgcggaattcttcacttcatctcagcgagacagatagaaaaagcattaacgatgaggtttcgcggaacctttgttattattttccgttatctttatcggctgcgaaaccatttcaattcaaaccctgaatttccggcatcgagcttcattcttcctccgttcttactctgccgaggtgcaagctcaactgtccccggagctcttaaacataatggaacaaagactctccgctattgagtacatgactgcttcttttaa

SEQ ID NO: 90059 - DNA, 159 bp, Glycine max
cgaacacatgtaccaaatgcttggctaaggagtttgtgtgagtttcgtgtcagaaaagtgtgtctttttctggtttcattcaaagcagtgtcatcaacgggaacataacatagcatacaattagcaaatgatcttcacaagacatggatcactgtgtct

SEQ ID NO: 90060 - DNA, 277 bp, Glycine max
ctttgacttcgatttatgaagtcaaatttctcataaggaaacagtagcaatttgaagttttcctctctttaaattttaattctgttagacataatttaaacatgttctcacatgatacaatctattggtctctatacttaaaggaataatcaatctcaacagttcaaattttcttcacacggtttcttatttcaaacaaaacccaatgagtcattttggtttaatttttttctcccccccccacaattttccatgttttgcacaatatggaggaatc

SEQ ID NO: 90061 - DNA, 161 bp, Glycine max
  unsure (1)..(161): unsure at all n locations
tagtcgggtctcttccaactcggaactcagtccattccgcatttctcttcaaaccanatttcttctgaagaaggagatttgaattcagaattgagtgagaagaagagaatagaaatgggctccgaattgattttcagaggccacgggctcagcccgtggac

SEQ ID NO: 90062 - DNA, 238 bp, Glycine max
ttcttgcagccatcaccacattgaacttgttcgtgtttgtgttatttgctcgcagatataactacaagaatgtgcaaaaggtggcagtggctgattgctatgaaggcaaaagtgatgatgtggaccagagactaaggtttgaattaatgaagttcagttttattcagcatagagggccaaggtatcatcatctggtgatcaattagaatccttcaatttcatcattagcatagtgtcg

SEQ ID NO: 90063 - DNA, 171 bp, Glycine max
cacacacacacacacactctccacgaggtttgagagggtactggcatccaaaaaatgggttctaaaactagtgcttcgggccatagagcacgaaggccgctgtcaatatttgctgtgcttgtctttgctgtttcatttgtcttttgggagcatggcaaacaagtggatctg

SEQ ID NO: 90064 - DNA, 112 bp, Glycine max
gtaaaaagcaagaactgctgacaattgttggtgcagtgtgttagttctacatttgagtattgaatttgaggattggtcgttgtaccaagacagaaagagggcaacttaggta

SEQ ID NO: 90065 - DNA, 134 bp, Glycine max
atcagtttatgcttcaatgtcttctgcagactgggagagattagaagaaaacttccttcaacatgttcattctttagttcacaattcagattcagattttaggagaaatggaaggatcaggttcattcaggcag

SEQ ID NO: 90066 - DNA, 237 bp, Glycine max
atgcttcttctgtatctctaaactaaactaacattaacatcacatccggattgctctgttactgtggattaaaaggccgtctttcctcatttatgacgtacgctccccatccatccagtctacttctgcaaaatcccgagatgtttgtattgttggtgttgcgcggacgccaataggtggtttacttggcaccctatcatctctttcagccacagagttaggctcaattgctattaa

SEQ ID NO: 90067 - DNA, 231 bp, Glycine max
acagctcgtatcatcgagccgaaatcgcgctcgagcggactcgagccagaacttcaactctccagacccacatgcaggaacagatttatcaaattcactatgttcatactgctctccagatcatggcacaggagtggtgggcacggaagatcaccacaccaatctcaacatggaacaccctatcatcatggatctacatcacatggaggaggtggaagtcacaatccaacc

SEQ ID NO: 90068 - DNA, 227 bp, Glycine max
aggagtggaatcatgtaacaagaaaagacaaatgcgttggtactagttcccaaagcatttgtcctccatatgttgaactggagatgatgcaagttcaaggtctttgtcatcatcagaggagtggaatcatgtaacaaacgtaaacatgacaaattgggaatcatcagatcaagactattcttcccttgaagaggaggactagtgaagaaagacagtttcatggaaag

SEQ ID NO: 90069 - DNA, 232 bp, Glycine max
atccttttctcttattttatgcgctgtacctttactattctatcatctcagcatttttcccccttaacactccaaaatccaatcccttttcattcatttctgctaaaacattaccccaaaaaagaaacattccccatttcctttcatttcacttcacacctttgaattagggatcatcacccactcttttcgccaccattgttgaaacctcacaacattctccatagtttca

SEQ ID NO: 90070 - DNA, 215 bp, Glycine max
ctcgaccgctcgagccgtgcagatcaaaacatctcttcagtttttggcattgagacgagagggtaatgcagtaagtggacatagtcatattttttgcagatttccattcattcagactatattcgttattaaaactactcatattccaggtagatgccaagaaacagagatcagcatttccaccaaacttcgtacattcacaggatggttcacac

SEQ ID NO: 90071 - DNA, 217 bp, Glycine max
gtaagattcaggattgaggacacgacctcagttggtagtcgcaattcggaacacagcctaaacacaaattcactgttcacagtgttcatatctctcatgcgcccttcctttgactaacgagggaaccgaacaaacacaacttttatttatggctgtggactaatttccttccttttccccaatcagaattcaaaaccctaactatatccttcgattg

SEQ ID NO: 90072 - DNA, 241 bp, Glycine max
  unsure (1)..(241): unsure at all n locations
tctcgagcgaatcggctcgggtattttcacatttgccccgactttgtctcttggagttccaggtcccaccatcacataagaactcctcttccccacatctaacacacccgnagttctctctctttctctttttctttttcattactcacgcaactcaactattgagagcttttctgcatggaatttgattcaagctttcaaggggccacaatacctttcaagccctttcccacctacgact

SEQ ID NO: 90073 - DNA, 239 bp, Glycine max
ctggttcagttgaatccacctgttgactaccattctgtgttgcctgaggagggtgaatttgttcctcctccaccagatgatgaatggattcctcctccaccccctgataatgagcatgtgcctccaccaccaccgccagacaatgatcaggtgccccctccacctggtgatccactagcaccttcttatagtgttctcccatcttacacagagacagggcaaccctttcttatgctcaa

SEQ ID NO: 90074 - DNA, 161 bp, Glycine max
ctaggcttaagattgagcactttgaatggtacagtatgccatgtcttcactgaggggaatcttctttggcttccaaattagattaattaccatatacttatttaaggatagaacaaggacaaatatgtatatggtaattaatctatccttaaataagtgga

SEQ ID NO: 90075 - DNA, 236 bp, Glycine max
tctttccattctccgtgatctcaggcgctagcttatcagttattatcgttgtcgttgaatgttgtgatcacttgtcctttgtacattcccgtgcatacatcatatggaccctattaccttccaacctaccgaatcttacatctctgttctcacgggactttcctctcactcacaccctcttacttgtttccatcatttcctgcttcataattcatgtgtagccaactttgtggttc

SEQ ID NO: 90076 - DNA, 238 bp, Glycine max
ggagaaaggtttgatggaagacgaaaagtgtatgtgtcgagtggagaagaggaaggcaatgatgaaaatgaagtgcctcaacgacccggaggatgagagaatgcagagagagaaagcttggatggtgatgattatgattatccaaaaacagcagcagcagcagcatgaagtagaagtagaatacgaatatctggcaaggaaacgagatcatcttaaagaaggtacaattcagagttag

SEQ ID NO: 90077 - DNA, 234 bp, Glycine max
gagaaatcgtagatcaaagagggtttcaaagctgtgtctctgaaagttgaaggtaggtagacatggatcaactacaacatcaagagatggtagacattgagtcacaaaccgtggaaatccctgacataatccataaaggcaaacgtcaagtgattcttaagtttgataacgttgtgtataaaattaagaccaagaaaggtggagtatttgtgaagaacaaagagacagatgaga

SEQ ID NO: 90078 - DNA, 241 bp, Glycine max
ctctgaacctccaaagcacattgttttcttcacttgtttcatacctcagaaaccactttgttacacttggtttttgcgtttgttcacaagaacagcatgcatgttctttttaatgtgaagagagtagcgttctctgagtcctttctgtcacacagaagaaggcttttcacttggttcagtttaagtgtttcagcttctcttgttctggtgtccctctttcttctcagtaactccctcaggg

SEQ ID NO: 90079 - DNA, 234 bp, Glycine max
ctcgagccgctcgagccgctcgagccgattcggctcgagtcatcttcccttccaagaaccttttgcactcaaccgacggaacttcagtttcttcccagattctaccttcacgtttccttatccattctgttccttgcaccctttcacgctcaagctaaaattaaagtgacttactgcgataagaaggcagactatgctgtgaaggtgtctggagttgaaatatcaccaaaccct

SEQ ID NO: 90080 - DNA, 235 bp, Glycine max
ttttgatttccgaacacacattctttcagcaaataaaaatacggaaatatatatatgtataaaaaatgaacaaaaaagctttgtccattttgatgcgcgccagaatgaagcccaacgatcgtacaaacctttctctctctcctattcctctaacaaacgcgaggagtcaaatgcagcagcagcagcagaattccctcccaaacggatcgccaggtgatggaaattcagcgcctaa

SEQ ID NO: 90081 - DNA, 138 bp, Glycine max
  unsure (1)..(138): unsure at all n locations
gtcggcaaaatctttcaccaccgacacacagggggggcaggctctcancttctttctcactcaccctccctgcccaaaagctataactagtccttaaaccaaaaccctttatcccaaaatcttttttttccacaccac

SEQ ID NO: 90082 - DNA, 290 bp, Glycine max
cgatggtcctttgtcactggacgaggttatagaagagtcagagaacttgactgatttcctgatggactttgaagaagaataatggcatgcctccttgtgaagcattccatgtcaagtggtgtattgcattgtgtagacagaatagaaggtttggttgttagtcttcattgtcaatttcctgaactatcagtaacttcttttaggcattgctacagtggatcgggtggtcaaggcaataaacattggagtgagattctgaatactacttcaagggttctagaaacattatc

SEQ ID NO: 90083 - DNA, 289 bp, Glycine max
cctcgagccgaatcggctcgaggttcatgttgccctgaagggaacaactgtcttgaagggctacttcctacgtatttccttatctattgctttctattgtcttaattctagttctaaacatttagctctagttgtaggcatttactatgtattattttaggatttattacttgaaaacagctgatagaatggaggaaaacctttctttatatggctctcccaatatcccgaaagcaataattgtttgtaatataaggggaaattacactgtaataacttgacaagtctt

SEQ ID NO: 90084 - DNA, 285 bp, Glycine max
gttttctccttctattgattaattttatcaagatatgatgcctctttgtctgttatccaaatgatattaaaaaattcccatactgatagtctagactcttcatttaagctcaacccaacttatgctttttctaaagtgtctgcttgagtctcctccattggaaactgatatttcctttgcagataaggcttggccttctctgggaggatggtagagttgacactacaatgttggggaagcaccatggttgtgtatacaagcttgctgtggagcctggaagtgccc

SEQ ID NO: 90085 - DNA, 282 bp, Glycine max
gcctaagaagatgtcacaaaacaatcttggtttgtgctttggagggtctgataagttgaccttggactttttgggtgttgggggaatggtgaggaatatgaacaatggtggcgggttttcacaaagagagcaacaacaacaacactccatgggaattactatgagccccttggatcctaaattggaatcagcacaagcaaaccaacactatggaacctcaacactctaataataagttgttggataataagaggtaaaaacacacgtgattcatgtctatgc

SEQ ID NO: 90086 - DNA, 281 bp, Glycine max
ctcgagccgtgcgagctgacatggtcagtgggaaagattctgtccatccaaaatcaaatgctcctgccggtgatgcaacacctctccctgccaactatgcagttttgcctcatgaactgagtatgcgtttgcatgaagttatacaatcccaacttgagcaacgcgtgacagaacttgagattgcccttgaaaatagccagaggaaagtacggcttttcgaatcaaagcaagagagttatcttcaaaaggcatcttcctttagtaaagaaaatgctgattgt

SEQ ID NO: 90087 - DNA, 279 bp, Glycine max
ccgcggtcctagttttgttgcctgcatcacttatcatggagcctaatgtcgtagatgtcatattgacgcttgcaaaggaccataaatctgtgtggctacttcttttcctaaactcagtcacagcatatgcagctaactcaacaaacttcttggtgactaaacataccagtgctctcacactccaggtgttaggcaatgcgaaaggtgctgtagctgttgtaatctcaatactcctattcagaaaccctgtcactgttcttggcatgggtggctatacaa

SEQ ID NO: 90088 - DNA, 281 bp, Glycine max
cttttgaagttcaatgaaggcgcacttttgaatttggaccctgagcagcctgccttacgtttttttgttggaggatatgtatttgctgttagtgtccacagagttcagcttcttcttcaggtattaagtgtaaaacgctttcaccaacagcaacagccacagcagcaaaattcaaatcccgcaccagtggaattaagtcaatctgaaataagtgaaatatgcgactacttcagccgtcgagtggcatcagaaccctatgatgcttctcgtgttgcatcatt

SEQ ID NO: 90089 - DNA, 250 bp, Glycine max
ctctttttatcttgttccctttgggtaggagcctaggaggtaattgtgagtgaatcctgttacacatgggaaaaatatgtttcttcaactcactgctcttagttcacaaggaaatcatatgttgtgtataaatttgttgggtcttaaaacattttccaaacttcaccttgccttaacaaactgtaaaatttggaaaagtttctgatgctaagctacagcctgctaggagcacttctgtgatcagttgcaa

SEQ ID NO: 90090 - DNA, 140 bp, Glycine max
caacacaaaccctgttcaatttcaggatgtttgtaggtcataaagtgtaaatttggatatggacacatcataaactattaatttaatgttataatgtgtatcaacatcaaatttcactgctgtggtacttcaatgcccaa

SEQ ID NO: 90091 - DNA, 259 bp, Glycine max
ctcgaacaagttatgagctcctatgtcatagaggtcaactccaaactcagagaggaaagtactggaacagcagacattgatgaggcaatagcatgggctaaggagaagtttcaatcacgaaattctgatgaagaatcaagctcgagaaatgaaggcaatgagcaaactactacaagggtggaaggtgattgtcttaaccagactaatagaattttgtgcattctttcagcagcttacctgtaagagaatggttgcattt

SEQ ID NO: 90092 - DNA, 272 bp, Glycine max
aattttaatgaaaatttggtttgggcttagttttccttgttggggtgaaataaaagtttttttagttggttctcgtgacttcttttgtttctttgccttttctaaattgcaaccaaaatattgatttttttttctacagagtgaacttagcaccaaacacatcctaaattaaaaaaaaaatagttataggcatagtatgtacacgatacataatacaaagtattttaaaatttaaatataaaattacaaatataaatcaacataaataatta

SEQ ID NO: 90093 - DNA, 267 bp, Glycine max
taggagaggtgagcaagttcacgcacctacatatgttgatggcggttagggtttccgttgatctcgggtgacatacgtccctttgctgaaattgtttttttctctctcattctccttctcatcaaaaacctaattcgaagcccccaagattgagtgtgcccgttgttgcttcaatttcgagaagttgcgatgggagcgccggagaaatcacagcctaacactaattcgatgcagcgtgtcaaggtatatcgtctgaatgatgatggg

SEQ ID NO: 90094 - DNA, 254 bp, Glycine max
  unsure (1)..(254): unsure at all n locations
aaacccaaagaacacggagttggcggcgaccctttctctctctgatttcgatcatggcagctgttgctccttcttctgacaaaactgcagatttattgcagatnttgactctggattctgagtcaaaagcaattggagttgctgagcctgcgaagaaggaacttaactgcttttaatttcattgcttcgggcctttttttggttggtttgtgaactatataaaacactggggaattggccgttgggcaattggg

SEQ ID NO: 90095 - DNA, 272 bp, Glycine max
gctcttccctgtcctaaagtgttggcctaaggccttcttctaactccttctgtgacactctcctacccctttctttctttccactttttataaactcaagagagagagtgtgtgagaaagcaacttgttagagaaaaccagaaacacaagctttgtttctctctcttctcacttctgcatttggtgcaagaacctgacttgaacaatattaatatcttatagatatgtctggtcactggggcattcttgtgtcagatccatggcttcagaac

SEQ ID NO: 90096 - DNA, 244 bp, Glycine max
  unsure (1)..(244): unsure at all n locations
ctttgttcccaagtagaaacacaacatgatcctgacgcaggacacctcagacaggaacagttcctgtctgccacttcctgcctcaggatcatgttgtctttgttcccaagtagaaacacacacgagtcccattatctgatgttggtgaataatttggcagttttaatagcatgaaatgagccttttaaaatgaatgggtagtatttgnattatgttatnntangttgtnagnatgtttgntttt

SEQ ID NO: 90097 - DNA, 228 bp, Glycine max
cagtaagtaattctttgattcagaaaccttttttgttaagcctgtggaatggaataaagttgatgctactatttaaccaaggcatcaagatttgatttttgctttgcttttttaggtgtcatactttggtcttgcaattttgtaagtatgtataagaattatttactgtaagttgtgtgtcaatgtggaccgcacctcatgctatttgtaatatggaaaagggaatca

SEQ ID NO: 90098 - DNA, 217 bp, Glycine max
gatgctttccatgtgccagaatttgccagacgcttttgccctccaatatatcctttgcaagaacaggagtggcaattgatcgagggaacccctctaatatgcctccatgctcttaagatcatgccttctccacttccaccatcctttgcttccgaaactgttattgactgtcagcctcttgtgattcatctccaggaagaatcatgcctgaggatat

SEQ ID NO: 90099 - DNA, 222 bp, Glycine max
aaaatctttcaaggaaacatggacgaacaaaaaagaaagatggacctataaaagaaggggctgctgaggatgcttcaaaggtgtccggaggagctagtgattcagatgccaaacctgtcaggcagtcagtgaaaaaggcacttggtctgaagtctgatgtgaaaaaagctagtgtggtggattctgttaaaaaaggaagtggggcagttaatgatgcagatg

SEQ ID NO: 90100 - DNA, 218 bp, Glycine max
ttctctctctatggtgttgttgtgttttttcctttcctttcttttcctttctctcttctatgtcctgtgaatttttctatactctagttcgcgtcgtaagggctcaacaacatgacaaagaattggcaactcggcaaggtacatattacatagtgctgaacgtacgctttaatttattttaatttcgttgtttacaatttaattcaatttttcaatat

SEQ ID NO: 90101 - DNA, 289 bp, Glycine max
gtttcatttgaattatccgctcaaaaagtgttgaaatctctggaaaacaagccagcagcatcagcgtggactaatgtcctgccaaaattgaaaaatgatgctccaacaacagacaaagaagaaaaatcagaagaaagtgcgcttgatgacaaacaagtagtttctgaagctcacaatgatcaaccactggaaaccactttgggtggagataaggcaacaacagttcatgagaaggatcagtccttaactctttcttccgctaaagaattcaattttgataatgcagatg

SEQ ID NO: 90102 - DNA, 136 bp, Glycine max
gtgagtaacagcgaacgaagaagaagaagaagaagaagaagaagaacgcatacgccacgatgagtggcagagccatgatctcctgtttgtctcctgcttcaacaactccatgctctgtccccattccactctggcg

SEQ ID NO: 90103 - DNA, 283 bp, Glycine max
ttttgtctttcagttacattcattcattcactccttaacatagcattttctaccatttaccaaagcaaagagaaaaacaagagatggagtggtgtgtgtcaatgccaaagattgaactgcatgctcaccttaatggatccatccgagactccacacttctgtaacttcctcttcttcaatttctatttctttttcctctgtcttcctcatctttattattgatattattattattattgttgttgtggtttttctttctttcagtgaactcactaaggctttg

SEQ ID NO: 90104 - DNA, 274 bp, Glycine max
caaacacaaatggctcatagaatttgcattagtcattttggttatgctgctattgtttctgggctgattttgggaaactcaatgcgtcgtcgtattacaccgtggttgtggattgtggaggcactggaacacgtgtgaatgtgtatgagtggatggtaggggtaaagggaataagcaaagggaatttgccagtgttgcttcactcctatcctgataatgcaaccaggagtagttcactttggaaaagttattgtgaatatcactgtatgcaaac

SEQ ID NO: 90105 - DNA, 268 bp, Glycine max
gttaggtaagaattgagtgcatctggaacgtttgggtttggcggtgctctggtatttgggatcctattattaagcttttctggttcctttgtgaacttgttgtcagttttctgtattttcggaggtcttcctctgtgttcaggagctaggataatttgttccgtagatagtagctgtttacttaacacacttttcctggaatgggtgcatgcttgacacggcagacatctttatagctgctagactagagaattctgttataaaattg

SEQ ID NO: 90106 - DNA, 273 bp, Glycine max
cgcgacgggtttatcaccgttccaaagtgtcataatgctttcaggtttctcattttactcatttcatgttaaatggtactctctgttcagtgtttgtaacctggcatcccacatgtttgatgaatttcctacctgaattgattttgtgataaatctctctttgtcaaatctcaattcttaaattaggaaagttattttgtaccattagatatattaatatttaacggtcataaatctctcactgtgggctgtggaagggattcatggagttgc

SEQ ID NO: 90107 - DNA, 279 bp, Glycine max
aataccatcaccatcccttcccttagttgtctcctttttattgtaatctatctccaaaaaagccctttttaatttcctaagatcatcatcacttcacttggcacttgctcctaacattcacttgagttaaatctatcctcgcagtataatggacgaacaattgaggatactaaaagtcattgttgtgcaaggcaaaaaattagtgatccgggattcaagagcagtgacccttatgttgttgtcaagctggggaatcagaccgcaaagaccagggtcatt

SEQ ID NO: 90108 - DNA, 280 bp, Glycine max
actcgagccgaatcggctcgagttcttagagtgaggaagagcctcactgagagagaagaaaaatcagttgggaagtctctatcctcaagcttgagtgagccactatagagtaagtcaattttgtaaacacatccttataaccctactatcactttgtatagtggaagaatctccatattagagaattataatcgtgttcccaatactatctttgattactaagtgtctatcttaacttcacgaaacgggaaagtccgagttttcccaacacatccaaacg

SEQ ID NO: 90109 - DNA, 279 bp, Glycine max
cctcgagcctattcggctcgaggcgccgcagcacatggatcacaggccgaaatccaaggactcactctcttactccactctcttcactctccagcctttgatgaactttcaacttccaaaacaagatgatgactttgattattacgggagtagtagtcaggatgagagcagagacagcgaaggtggggggattacaaatcacggtaatgggaatgtgcatgacaaggaagtgaatttgttcaagaagaggagatggtctctaaacagtgacaacgagga

SEQ ID NO: 90110 - DNA, 275 bp, Glycine max
cctcgagccgaatcggctcgaggtcgagtcaagcaacaaagtcaagtcgttgctgaagaaacaacatttgtggcttttgtggtgaaccttccggaactaaacttcccaattcttctcattcaatcttccacttcaaggatttagcgttccgtcttcttcgcgcaggaactgaaggttcataatattcataaatcgaatcatttgcgcgcgaaaatagttgaagatggttgaacggaagcagttcaagacgaagctatgcgttctgtatcagagag

SEQ ID NO: 90111 - DNA, 270 bp, Glycine max
ggctgatctaagatgtttgtctcagatgctaggcattggaagtgatgcactggatagacttacacatacggaaagccctctgtcacaaagttatatctctagagcaagagagagaagcattgtaaatcaaactgattccaaggagatatcctcaatggatgacatggttggtcaacatctggatgttagtattttgtgccaacaaatggattcagaaggaaacaaacttgtgcctttgtatcaaagagtattgacagctctgatcattga

SEQ ID NO: 90112 - DNA, 281 bp, Glycine max
actcgagccgaatcggctcgaggtcagatgagtattctcatatatacgtgtttaaaatttatacccctacatttagcctggaacagaaagaatccccatgaccaatcttataaagcggaaattatgagggactgcgaaactcttactcgcatcgcttctgttcatccaaagaaaaggaaacaagttagctcatttagtttttaactttcatgagatgtactgggttcaggatgctcccacccagattttgactcttattgagttcaacgtaattgtcttgt

SEQ ID NO: 90113 - DNA, 102 bp, Glycine max
ctcgacgctatcaccggccggtaacgtcacacaaacccaaaatcacgatggcgttctcatcgtccctatggtcttccctcttcgttgcaaacccaaacagaa

SEQ ID NO: 90114 - DNA, 278 bp, Glycine max
gcattgacgaaaaaaaaccaaatgtaaagaattactacctaacaacattgtcaaccaacatggtttggttatgattagcatatatattcctgtctttaaaatatgttgttgatactcatgtttgtgtaaatgaaaagtatttgtagaaaaaataaaactcttaaatgggtcttatccggtcaaaggacaccctcgtgagctcaccaattaatgtaatcaagcaaataaattaccattaacgtaagcttacaagtcgtaagctcagtgttattatctac

SEQ ID NO: 90115 - DNA, 148 bp, Glycine max
gtctagatcgcgagcggcgccctttttctgttctctaaacacaatgcttcaatggtacttaaaaagcaatccgacaacaagaatcaccagtgaagtcattgtttcattttggacacttgaactttaaataaacttgtaagaaatggaa

SEQ ID NO: 90116 - DNA, 108 bp, Glycine max
cgtgactgagatggctggaggtgttattcacagatattgaggaggaactcacccggtatactccctgtgcccacgacaaaaatgtgtgtatgatatctaagatgatat

SEQ ID NO: 90117 - DNA, 252 bp, Glycine max
ctggagcgtacggtcaacacggcggcggttccgggccaccgtcctcatggatccagcggcggatacagttccgtcggtggttacggtgctactggtggtggtggtgccggcgggggtgacagttatggtggcggaggctatggaggaggaggaggcggtgccggatacggtggtagtgatggcggtggaggttatggaaccaaaggcagcggaaacggcggtggatatggcggtaacgatagtggaggttat

SEQ ID NO: 90118 - DNA, 254 bp, Glycine max
  unsure (1)..(254): unsure at all n locations
ctctctcttccgctttctcttgagtacgtctgtctttgttcactaaatactgctatcattcattcttcctttttcttcttagctttctctctcttgtacaatcttcttcaattctcttataataattactattattcttcttagtgttgtggttcattcaaaagcacaaagttttcttctctgatagcttagagttttagctttccagattctgtcncggggaaagcctaaaaagagcaaaggacaaactagag

SEQ ID NO: 90119 - DNA, 246 bp, Glycine max
attgtagcctctacccaatttgaggcgttttgatctctctggctccaagaatctgattgtaatgccatatattgaagatgcgctatatcttgagagtcttaatctcgaaggatgtatacaactcgaagagatcggccatgtcattgttctgtcaccatagctatcttctctgaatctgagagattgcaagagtcttatcaagttgccacggtttggagagggcctaattcttagatatctatgtct

SEQ ID NO: 90120 - DNA, 255 bp, Glycine max
tgtctacccaaccaagacgccctaagtttgagaattagatgatgtcttcatctgacaattgctgtgtggtgttgatggtgtgcatgttttgttgggaaggggttcgatctccatttgtttgtttttcttccttttagttcatgttaccttgatttgtggttgtttgtttgtaaactgatgagtccatttcgttctgtttgtctgattttcttggagtttcaattaagactaggccctggcctgagttatgcttat

SEQ ID NO: 90121 - DNA, 114 bp, Glycine max
attgaactttgactatatttttcagagttcagattattcttctcttttgaagtttgattttgggggtttaagtttctgagagatgaagaaaaatgacaaaggccgttctttgtt

SEQ ID NO: 90122 - DNA, 251 bp, Glycine max
ctcgagccgatccagcagtcaagactgccggtgtttgagttcctgactctgcttgaggaactagcttaaggagtctggctgaactctgattgaaagtgtatttcaatttgctgtgaatcaagcagttggagaattaaggggcgagcctttttttggaagagctactctcaagtttcataaggtcttttttaaaaaatcattttttgatattggtggtcttgtttaaggtagttttacaatttctgttcatt

SEQ ID NO: 90123 - DNA, 263 bp, Glycine max
ctatgctattgcaatatctttgattttcaatttcatacatagcttcactccaaaactgaactctcattgttcataaaccgagtcattcattcattcatttcatttgttcattctctctagctatcagctacaagggtttttcttgttctgtgccacacgatgaaggaagaaaacccatcagagaacaggtccaaagcttcaaaattttcagaccaaaaccaagccccaaagcctcaaaacaccaaaggagccaacctcaacaa

SEQ ID NO: 90124 - DNA, 264 bp, Glycine max
ctgctccatcatccgtcaacccataatgttggcgctcaagcctctcccctcagatctctccctccgcccatctccggcgaccctcgccatcaaccgccgccggaggatccagttcccagcctccgtgcggcgaacgtaggatgttacaccggcggtcagcggcggagacaagagccagacgacatcgacgacgacgacgtctccttcgttggacagcaaagagaggaaagggaagagttcagtggcatcatctggctctggcat

SEQ ID NO: 90125 - DNA, 132 bp, Glycine max
cggctcgagttgagaagttggttgcacaacttccagaaggtggtgttttgactctagagaatgtcaggttcatataaggaggaagagaagaattgaccctcgagtttagcaaagatagttcggcttgctctt

SEQ ID NO: 90126 - DNA, 270 bp, Glycine max
cgcacgcaaacacaactcttctctagatccatatcctcgttgcggccagcgaacaaagagagaaactggagcgagaaagagaaacaaagagagagagagcatcgcaccgttgtcgtcgtggccgagaggttcgtcgcaatggtggacctgtacgtgctcggatggatcatatgcgccgtgctcagcctcgctgcgcttcgtaatttcgctttcacgcggaagaattgttgcgcttcgtcggagaccggtgccactcgccgcgcggtaaat

SEQ ID NO: 90127 - DNA, 231 bp, Glycine max
ctttagttctgtattttcatgcctattttctgtttagccactcatcaaggttgacttattttaatatagttggtctgtgtcctgatcagctatccctctgcataccttgggcaaagccttcttcatccacccctgcgctcggctttttgtggtagttttaaccaaaacatgagactcaaactgcctttttcggagtccattgatcatactgcttgttcagatctgttcaca

SEQ ID NO: 90128 - DNA, 264 bp, Glycine max
agtgggcatccggtgtgtcgaaaacgataccatttcataataagggctgcgagtgatgccgtcgaagcatatcaaagaccaagaccatgttcaagatgtggaaatcttctccaattatctgaaacaaggtgtagatcgtgtaactttgccatcaccgttgatgaccttgaggattgggtgtatcttcagattgaagataacacccatcttctgcatggtgtcgtgcatgccaatggttatgggcacctgctcactctcaatgga

SEQ ID NO: 90129 - DNA, 216 bp, Glycine max
tcacttagaagaaggtctgctcaaatagtgtggaaggattggaacatcggcagtcatggtggagctatgtcagaggaaacgactataccgagattcttagaaggggtaattctgctcaactaattgagaatgtcatcaatacgactgatgatgacttatcagtcaggccatttgctcatcaacttgctaaacgggagctcatgtacgtcacggact

SEQ ID NO: 90130 - DNA, 261 bp, Glycine max
gctcaaacacgatacacttacatgtcaggatcatgacataaaatccagaacaaaggcctaattgccctccaagactttgggaagatagatatccttactcttctgccacactatctcctgttacaaatttttcaaatgatgaagagatatcaaacctgctactattatgattgaaaaataacaaaccatgcaagcttgaacatttcttttgcttgacaattcccaacataggtgttaagctgctacccatgtgtgggacaa

SEQ ID NO: 90131 - DNA, 198 bp, Glycine max
ctggtataaagtatcatatacacaactaatccaggtgaataaattagaaatgtaacaaaattatgtcatatagaagtaattttgttacatttctaatttattcacctggtataaagtagaaatgtaacaaaattacttctatatgacatagaaaaaaaaaaaaagggcggcctccgacaattgaccccgtcgacccgg

SEQ ID NO: 90132 - DNA, 255 bp, Glycine max
ctctctctctctctctctctctctctctctctctcttcgcgatctacgcttccagagagaacaagttgaagagcgcacactcgtcgcatagctcttaataattgcagaatgaagaaggcagacacaacgagattaaggtagctggcagactagagggtttcatggcaggcagtggcctgccatctttgggtcgtgtgaagcttactgatttagtcccttcagacgggttgccatctgattcctataaaatatcag

SEQ ID NO: 90133 - DNA, 112 bp, Glycine max
tctgggaagaaacgaattagaagagagtgttgttttgcgttgaagtatgactcactctcgcatgtctggcatcttaggaggcaataagggtctcctgatcatgggtactgtg

SEQ ID NO: 90134 - DNA, 257 bp, Glycine max
tctcgagccgattcggctcgagcttgcggagagaatgaaagtaatactatgtcgtgaaaagattgtggaaatattggaagaggttcaggcccgagctgaagtagccttgtgttttgtaggtgtaaaacattgagtataataattgttacaaaatgaactgatgttaattttgttagcatgtagtgagtacccacaatttgatcgtgaacgttataaatgtaaatattgtggtagaggtcagtagttatacatgtgtg

SEQ ID NO: 90135 - DNA, 124 bp, Glycine max
gcatccatcactatcatcttcttcttcttcagtgagtgagatgagtaatcccagcgaggaaccgttatccaaagttgcaagagcagcagaagatctttaccatcttcgagacacttatttccca

SEQ ID NO: 90136 - DNA, 252 bp, Glycine max
gtttatgaatagtcattggaaggcatctctattgtatccatgccattgagttgttcatgttgccctgaagggaacaactgtcttgaagggctataataatattcgggcgggcgtgcatgtgtgtaaaaaacaaattagttacaaattattaacttttttttattataaattatcttgcgataaaaaaacaaaaaaaaaaaaaaagggggggcccccgattagtgaccccgtcgccccgggatttatttccgg

SEQ ID NO: 90137 - DNA, 148 bp, Glycine max
caaccatgggtcattactcaattcatcatcagcttgtggccatagtctcattatttatccttttgcttccaaatatccatgggtggggagacgatgggcatgtcattgtttgcaagatctgcacagggctcgctactcagtgtaagca

SEQ ID NO: 90138 - DNA, 319 bp, Glycine max
cggacggaagctcggaaggcggcgcgagctcgagccgctgatatttctcgtctctctctctgtctctgccgaatatacgcgccgcctgcaccagagttgaaggcggccaggcgccgcaagggcggcagcaacaaccggaaggagggtttggcctctccggaatcatacgcatggcagttttctggtacttcgcctccaaattctggtcccccaaaaaacctaccgaaccttccgctctcagctccaatctctagcagaaggcacagcctctggatatgtggctttatcttgccgagtacgagaagttcaatgactgtgg

SEQ ID NO: 90139 - DNA, 239 bp, Glycine max
tgaaaacccaaagtgcttctctcctctgtctttgtctctctcttgctatccttatggctagtagcatgctgcaagtgcaattccaagaagcgcagtgccaagcaaccatgttgcaccattcaccggaagcctttttccttcaactttcccctttggaattggtccttctgcttaccaggctgatggagcagcaagtgtagatgggagaggaccaagcatatgggacaccgacactagac

SEQ ID NO: 90140 - DNA, 278 bp, Glycine max
cccgcatccagatttagctgttggtttgtaaaggaagtattctcaaggccacctatgatcctactgatgcagtatggtggggtccttttctcgcaactgttgaactactgctataaggccttatttgtgataacaaactaatgtaaaatatttggtagaatgtgatgatagattcaagattcttgctgttatacaaagataatctgtaattcaagttcttgacgccattattggttcacatgaaatatcattacatatggaaatggtagcatgagttt

SEQ ID NO: 90141 - DNA, 281 bp, Glycine max
cagcttttagtgttccctaattgtttaacctcatcattagttaccaccttcaccatctctatactctatggccaaatccaataacctcacatatattttcaccatcgttctcaccctcctcttctcattcgccacagcaaaatcccatagtttccatcgaagcatatctccaacagcttcgggtctccagacggcgaagctcagccaccttcacttcttcttccacgacatagtgtgcggtccaaagccctccgctgtgtgagtggtccaggcccatatga

SEQ ID NO: 90142 - DNA, 279 bp, Glycine max
aggaagtaggagtaagaaacgcgttgctttgtgccaccattgatgaccttaccaagctcttgataccatagaagagttctaacagatcataatagaggatcttttgagagagaaaaactctagaaagaggaagtaaaatttattattggcccccaaactgagttacaactcagtatatataggcttatatagttagttatgactaactaactcagaacataaaactaaatcctaactaactgacttaactgagggtgaagttgaatactgcaactctct

SEQ ID NO: 90143 - DNA, 225 bp, Glycine max
ctagtgctggttaagacactgtagcaccgatgacttcgtgtggttactaacggcaatacggtctacggttcggagctcaataacggtctctagctagctaacctgagagatcttcgggccaacgatgaggagggagtcacaacgcggcggtgggaggggccggaaacctcaggtgacaaagcattggatatgttgggacctcttcccctagaggagggtagctag

SEQ ID NO: 90144 - DNA, 240 bp, Glycine max
ggactgacaccatggtgaggctcttgataatggcggtttattacattggtgatgaggctggctctgaagggactgataagaagaagtcatctggtttgatgcagaagaaagggaagtggaaatcggtttcaagggctatgatggagaaggggttctatgtttctcctcagcagtgtgaggacaagttcaatgacttgaacaagaggtccaagagggtgaatgacattcttggcaaaggaa

SEQ ID NO: 90145 - DNA, 268 bp, Glycine max
tgatctgactggtgcattaatgcgaaggtgcgtttgtggaaacccatggtggtagacatggaccagcaagaacgcaaagaggccgtaggggcagtagatgagagggaggggaaccaaagcagtagcaacaacagtggccaccaattggcacaaactccaagaccctcaaccaccgcatcgacggcaacagcgccaccaccagcaacaacgacaccaccaactggaaaaagatccgattctgaaagcgacccttcacttgcaccattaa

SEQ ID NO: 90146 - DNA, 288 bp, Glycine max
gcatttctctctcttttctcacactttttctctgctaaactcgcaaacacgaacactgtttctctctctctgaagtgaagtaatgaagcttcatcttcagatctcgagctgaatcaccgatctctgtgtgtgagagaggagttggattattgattcatggaaacgcggagatgaagttctacatatcaacgaaggggataaagagagtgacgatatcgaacggcgagggaaagggatcggcgaagacgacggcggtggcggccggcgccggtcgccggatatcggctc

SEQ ID NO: 90147 - DNA, 179 bp, Glycine max
agagctaacctcagaagaaggtcttctctgctctatttccctcacgctcaacatctcacggtgctaagctcctagttcttgcttataatttgtctttttaattttaattactagtgaaagtcattacatggaagattttacaaattaaatattgttttaaagactgatgtcaagtggag

SEQ ID NO: 90148 - DNA, 280 bp, Glycine max
gcttcttctcccctttcttcctcccaccaaggcataggactgtccaattccaccacacacgacgcctgttcgttaactacaaacggaaaacggcacggtgcggcgtcaccagcgccgacgcgtctactccgctgtcaacgtcgttggcgaaggaacctcacaaatacttcgaccacgtcatcatcaccgttcgttccggcgacggaggccacggcgcggtgctgaatcagcagcagcaggagcaggagcagcaaggaaaaacgaattgacgaaagggaaa

SEQ ID NO: 90149 - DNA, 282 bp, Glycine max
ttttgctgtgccagggaaagcaaggagcaagagaaagagaaagaggctttcagcccctagaacaacaaaacacaccctaagcacatggtcgcaacatttcagcacacagaatgatggggtgagttctgaccctcctcttttgaaacaagcttattggttggctgatagtgaactcattgtgcctaagaagaaggatgttgagcaagaagaggaggaaggggttgttgtggttgtgaagaaggagaaattgggggattattgtgatcatgatgagggtgatga

SEQ ID NO: 90150 - DNA, 283 bp, Glycine max
catatatccaaccaaaaagggacattttgcgggtatttgtgagtgtgtgagagagagagcgagcagtttcagacacagagagaggggtttgggattggagggattgacgctgcgtctcttcctcttctctttcgatccatccctcattcctactcctccaatccaaccacctcagcctcacactcacatatacacatgtctctctctatttcccttttcactttcacgttcatttctagggttccgttctgatcgctctttccctttcagatctgaacgcgta

SEQ ID NO: 90151 - DNA, 278 bp, Glycine max
cgctttggctgtactctatttccctttgttttacggttctcactttcgatttatctttcttatttcttgtaaattatcaacttttggtttgatttgattcgatgcagattcatccgtaccgctagttatattactggattcggggcagattgctgttaccgtgtttctccgctttcatttataagatgcacttctggtcatcattttaccaacatgcaggttttgagttgttggtttttgaatataaatggacgccaaacggttcatccagctggttg

SEQ ID NO: 90152 - DNA, 280 bp, Glycine max
aaaatggggtaaggtgttcagtgttctgtttctaccacatcttcatacgaggttctcactcccattgccagattccatgtttttggggtgtgagggatgtgaaatggattaaagttcggtgctttttgtagttttctgggtgcccatttgcatagttttgtgttttcgtctcatttgtgtggtcggtggagttggggtagttcatcaagttcgtttcacttggcaagttcttgatctcttgacgtgattttgaattgtgggcgttgctggagcaagaaat

SEQ ID NO: 90153 - DNA, 281 bp, Glycine max
tgagtatatctgcttgaaggagcagaaagtgatgttggatcaggaacgggctgttgtagaacaagagaagaaccgggttcagatgctgttgcaaggcatgcataatgtaatgactgcttacaatgctagtggaaatctccctgcaccagcacctgctgtaaaatctgcagttgtagcagttcctaaaccaacacttggttacaaatctcaaccaggcaatcctacttctgtgcaaaataaatcaaatgcaccgccattgcctcaatctagcaattcaaacg

SEQ ID NO: 90154 - DNA, 261 bp, Glycine max
agagaaaggaaacaaagggttcaaacctcacttacagtatctgaatcaggacaaaggatatatatacttctatgtggcttctctttctcaccttatatttgtgattggccagatatttcagaacttatggatggcttctaatgttgacaatccttatgtcagcacattgcaattgatttttgtgtacttgttgatagggtttatttctgcatgtctcttgttcatcagatgtcttgttgtagtttctatgagtattcgatc

SEQ ID NO: 90155 - DNA, 283 bp, Glycine max
ttagaacagcaccaatagcaaagtatgattacggtgaccaaagacaaaatatgcaacactatggacaacgggttcctcctctttatgacatgaccaaaatttcaaatgaatttcctcttttcctcacctatggaagacaagatgcgctatccaatgtaaaggatgtgcaacttttgctcaatgaccttagagatcatgatggaaacaagttagtagtattgtttacggaagattattctcactatgattttattatgggtgtcaatgttaaccaaattatcta

SEQ ID NO: 90156 - DNA, 282 bp, Glycine max
tgccaatgctatcatcacccatcaccgatacaacaaactcatcagagcctccaatatctctcaacaacaactcaggtggttgcctcttaacaatgggggtgcaggttctcgcgagcacaatcccttctgcaaagctcaacctctcgagcgtcaccgccatcaacaaccacctttgcaacaccttgcaccagattgaagctgctctttcttctactaactcccatgagaacggcttcttcctttgcactgaacccaccaagcagtgaaagaaaaaagtagtca

SEQ ID NO: 90157 - DNA, 166 bp, Glycine max
aaggatctacttgtccacattatccttttatacatgtaagagtgggactgtaacatctaaacaagtataaaaggatctacttgtccacattatccttcaattttgggtttgggcagtgtgtttctagtgaataaaaagagagaatgatagttatgatagttatgat

SEQ ID NO: 90158 - DNA, 267 bp, Glycine max
  unsure (1)..(267): unsure at all n locations
ctaacaccaacttcacaaaaaaaagaagacttaaccatggattttgcacttgaaaaccctcttggaaacttccacgaccttccctatatagatgncgcttncctcttcctcatggaatccgacgggatnnctcctgggatctactgtgagagtctcaaagctagcgacttcgacatctctgttagaagagatgttgtctctttgatctcgcagttgtcctgcaccttcgatccggttctcccttacttagctatcaactgattggat

SEQ ID NO: 90159 - DNA, 273 bp, Glycine max
ctcgagagctcgagccgattcggctcgacttgaaggtctcagctacgtagaacggaaaacttaaatgaccataagaatattataatttataaataacgaataggattacatatgcctatctgatgagagaatgaaaggtgggtaagtgaaaattgaaaaagaaattggttcgacatttcattcctttacaaagcaaaccctctagataaaattagatgaactagccgttaaaatttattataaattataaatgatttcacttgttcattgttg

SEQ ID NO: 90160 - DNA, 167 bp, Glycine max
ttaaatgcaattaatcttgtgggaatgcttgggtgacattgaggcccttccttggtctggtcacaaggcttttggccggaattcattccctatgggggcaattgtaattttgttaaacaaggtgttgcttaattgtggaaggcttcaattggttctgaaggtgattg

SEQ ID NO: 90161 - DNA, 265 bp, Glycine max
agaatgtgaaggctaaatgcaagttgatagttcatccgaagagcaaatatgacttggtgatgggtgcatgggatagtgtgatgaattctcgcaacgagggtgagcatattcaacggttgacattacttgaaaaggtttgctcagattttcctacttttggcgattatgtgaaaaatacatggctgattcctcacaaggaaaaatttgttatggcataggtagatcgagtgatgcatttcggtaacagtacaatcgacaggtttga

SEQ ID NO: 90162 - DNA, 238 bp, Glycine max
attttacttcgtttccgtacatataatatcaaagttttagactaaagatcattcctgaactaccatgttttacattgatggtttaaactttgatattttacttcgtttccgtacatataataatttaagaataatgtgtattttgaaacaaaaaaaaaaaaaaaagaaacaaaaataaaaaaaaaaaaaggggcccccaccgtttaggaactcccccccccgggaaatatttccgggc

SEQ ID NO: 90163 - DNA, 241 bp, Glycine max
cttcctcgttgtgttctgttctgtgtcgtgtgtacagctctttctgctctctctttcttctccaagcgattcattcaattttcaattcggttcgatcgcattcttcttctgcattctcgattcctccctgtctcaacaactattctattctgcatcttggactacctctctcaccagccagctagggtttctctccgacgttaggttttattgttcgatgctcggcgggatattgggggca

SEQ ID NO: 90164 - DNA, 264 bp, Glycine max
gaaaaatcaaaaatcagtttttttgagtggataacatcatttgtaatgtcatcacgaaacattagcttcattttgggtgagggatctaatccagtgtattgattactctgttcttgtgctgttctatacattttatgtcatatcctccctattcctgtgaactatgcattcatagttgtcataaaaatacaatgagcataatcctaagttcagcctttttggtcaaaattgcagctgctttgtgcagctgtctacttcctgaaa

SEQ ID NO: 90165 - DNA, 274 bp, Glycine max
gttcgatcgagacgcaactctctgaatttcaggatgcgcacgtccagaagagcagagccctcgaataacgacgtcgtctcttcgggacgcagaaactggagcaagatcttacaaatcgctggttcagatggtgtgcacccagcagggccagccacactccctcgcgagccgccactagtttctcggcgaccgccatcgaatgcatcaagaagggtgggactccgatgttcgatgtcacaaggagcaaatttctcagattgatgggatgttgacg

SEQ ID NO: 90166 - DNA, 287 bp, Glycine max
cgattcggctcgagtatgcccttcccttaaaattatgtactggcagccaaggaaaattaccatcacagctagcaacccccactcaagatacactgatcccaaggttttggtctcaagaacctaccagggaacatgttttgctgggcctcgattggaaaatggacagaactgtagctggtggatggtggatcttggccaagatcatcaggtacgcaatatgccgattgtttgtgtttccaagattttatattagtactcgcttttgatcatgcactttgagcatgtgg

SEQ ID NO: 90167 - DNA, 240 bp, Glycine max
ggctgcttcagttggcttcaagatcgctggatctctaataacaacgggtggttctaaggcgcttattgagacgtctcgcttattaggtttgtatggctatgtttgtaacctgagcaatgacttccctctatgcttgcgaggccgcagcatgtttggtgctggagaaactgcatgatgatgattgtgggctatggggatgtgactgaatgattgcagttgtgtcctctatgatgtcatgta

SEQ ID NO: 90168 - DNA, 284 bp, Glycine max
taatggctgaaaagcctgaaatcctttatttaaagtcagttgccatttactaagtgatcattcatgcttttcttaaaatgaccatccaagtattttactaattcagtaactccaaaatggaggtttgtgtatcttgattgagcatggtatgcaccaaacccagttgtttcagggtacatcatgtcaacaaatatagctgaatgtgcatgcatcattacaacctctttgagaatttagaagaagcctagagtgaccctagaaccacatgttaatggcacctagtt

SEQ ID NO: 90169 - DNA, 278 bp, Glycine max
cttacatctatcactacaatacttcaataaaaatggaaactatcagccaagaaagcggtatgatcaagggtgttgaagtcctcttcttcgaagaagccgagatccaaaagatgagaggcaacacccccatcttcgctgccatgggtcccctcagcgtcctctacttcaaggactacaacagatttgtcctcagactcaacgattggagatatcccctcctcagaagactcaacattctggctctgacaagaactttgttctccccggtgccaacggtg

SEQ ID NO: 90170 - DNA, 270 bp, Glycine max
ccaaaactcatttataccatcctttgatgatatctcctatagtatttcaaatgccagtactagcttgcatgctcacaaacatgacaatatctatattattccgactgtgaaaaactacagtaattatgaaacattacttctatttactataccgtgtccttaaaatgctgacatcttttttagatttgacttttttatgtaacttctcagggaagaaaccttcaatactttccaactaagctccatccacggactgtagtgcataactgg

SEQ ID NO: 90171 - DNA, 268 bp, Glycine max
ccagaagtcattcttcgttgcatgcaagtttctgtttctcttatgggatcgggagtcctgcctgattgtcatgatactttgatagaactggttggcagtcctgaaaccgactttcttcatttgtttagtcaacagcaattacaggagtttttattgtttgagagggaatactcaatctgcaaaatggagattacagaggagtgattattgccccttgagctgagcttgttcggtgttcttctggagctttaaattttgaaaggatgta

SEQ ID NO: 90172 - DNA, 273 bp, Glycine max
cttttataattcgatgtgtgaattttttttaatgattggtattcacgaagttgaatcaactgcagagaaccctgatcactggggaagattggattactttgaataattgtagttttttagatatgttttggcaagtcacgtaggtatttattgagtaactgtacatcacatgacataacttaaattttgatgagtttcagtcggtcttgttgaaataaggtaacagaacacacttcctgtaacttataagtaatgatttgtataagctcttgc

SEQ ID NO: 90173 - DNA, 273 bp, Glycine max
ccggcactcacactgttctcaattcaatcggtcatgctcgcattgcattttcgcccttgctttcctcttcccttccatcgctccctaacagttagggtttcctctctcctctcttttcctctttctctctcctccgccgtccctctccgcgccatgtcgaagcccccctccgccttcgatgccctcatgtccggcgcacgcgccgccgccgccgccaagaaaaaatcccaaccctttcccaatcatcaccctcatcccccaagaaacgcaaaa

SEQ ID NO: 90174 - DNA, 285 bp, Glycine max
agagattcctttatttaaggtccagaaagtaacattgttattggtgcaattctttgccaaaatgggcaatgggccctacggtcatagtggaatcgaagaaaaaatattgaaatggttctgatttcttcttaggaagttgcaaaactttgtttatttctcaatttcataccttttctccctttcaagtatcatgtcctaaaggttgactacaaacattaaagggagaaaaggtactatattatttggtgtaatctagattattacatgttttgggtggaaaattga

SEQ ID NO: 90175 - DNA, 288 bp, Glycine max
caaaaaccaacttcgtaggttcaagaattaatttcttgaagcacccagaaaagacagaacgccatgctctcgttacttcctgatatgatggaggactcatgggaaaactggctctctcacctggaaatgaatgatgattttggctgcaccaacgctgtatcctttgatgagatggtaaggttcaacaatgatagctcaaatgttgtggcagctattgggccaaaagtggaatacactgtcttatttgaagagcagcgaagaggaatttggaacaagttgttattggcc

SEQ ID NO: 90176 - DNA, 287 bp, Glycine max
taaatacataagcaacgtgtacaatgctcttccgtttagaatggccataggtccaaagcattctccaacgattgtactttgcaacacctttaaagttcctatgaccaccaatttggaatatttgctgtagcttcattcaccatttttacgagagtcacctgtaaaaggtttacaagttgatgttagagaaaaccgccacaaacaagaatgcaactcaacaaaatcacattatctagtgggaggtgaaaacataccacactttctggaacaccaggtggtggcaatgt

SEQ ID NO: 90177 - DNA, 281 bp, Glycine max
cccaccctagattttcaaatctagggttttgttttcttaacttgttacggttctggttctggttctcgttcaggaactgaactcccaccctacgctaatttcacttttctcttctcaatcttagcctctggtttttctacattttccctccctcgctaacctctgccatgggattttcaatgctgattttgtttcacctctaaagccactccctctcttattttcttcaaccttggcattcgcaactcatcttctttgtggtgtttctaggtaaacgagac

SEQ ID NO: 90178 - DNA, 287 bp, Glycine max
cggctcgagctaaccttcatcacactgtggactgtttgttctgttgcatttgcatgtggtgccaatttccatttccagaacctttttttttcctgaattgttttccttttctatcattttctctttctctcgatcatcactctctctgaaaaatcatgaatataattgcgggagctttcaagcccccatgcaagatctcaatctgtcatgctgatggaagtactcccaagcaggttcgcataaagaaggagaatggccagatggtcatggttcctctctttcaaagt

SEQ ID NO: 90179 - DNA, 291 bp, Glycine max
ctaacgggaaaaaaatgagtgtgtgagagtcatttattttctccctacttttccattggttgaattattctctgtattttttttattagcacatgattttgcaacttaaaagcatgattgtgggaaagcaggagaaaatagatcgactaacactttaattaatttcttattcacaatgcataaaaataatactctttttatgttaaattaagtatataagatctgatagagtaaatatggttgtgcgtgtggtccttccaatgtaacacgtacggtgcggctggtgttgtt

SEQ ID NO: 90180 - DNA, 282 bp, Glycine max
atgggatgggattgttgactggtgttggaattgagagagagaacggaaggatggcaagaagaccaagatgaatgtgattcaacttgcgaatgaaagacaaaatccatattcagaattgcatgatatgcacaaagtcgatttttaattcacaatatgagctagccatggaactaacatagaggatgattgcaagtatggattcaccatcacaaggcttgacttagctgactgagtcaaccaaaatggatgcatccgaagaatttttgaaagccaaatgttaat

SEQ ID NO: 90181 - DNA, 280 bp, Glycine max
atgcacggacagaaagaagcaaagggggaagaaaggtggtgtgtgttgtcgcaatggacatcactgacttcaaatccctcaacattccatttccaacctttccatcaaaattttctccttttcgtccattcagtttctttcacttcaaaccttttcgcactccttcctcacctcgcttcatctcccattgctctctcagtaatttcattttttttttgcctctctctctattttttatttatgggtattttctttttcttgttccaaagttgtttttgtt

SEQ ID NO: 90182 - DNA, 284 bp, Glycine max
cggctcgaggaaaggggttgtattgttaaatgtgagcttgtcaagggaagtagttccttcctttgctagaatccttctgcatacttcacttggaaagaaacatttggttcgtccactactaagaacagaaatcacccatgtggtgaatcggcgctcgtggtatgacgctaccaaactgacaacagaagttttgactctatataaggctccactatatgtagaaggatgggatgaagcacttcatgagattggtaaattgtcatcggaaactatcctttctgcaa

SEQ ID NO: 90183 - DNA, 275 bp, Glycine max
gtgcgtgcaattttcaatagagagaaaaagcgaacatgcactgtgtctttgtcagaattggctagactaacacatgtgaattttctgtttaggttgttgcagaaaatgataacaaagacaagaggatcaaattcggctctgatgatggagaatccaaaatcaccaagagtaacacaacaaacacaaataccaacaacaacaaagaaacttgcgcagagacttcaaattccaaggcctccgaaaagcctgattacattcatgtccgagcacgtcgt

SEQ ID NO: 90184 - DNA, 268 bp, Glycine max
agctagcaccacattcacctgaggcttccaaagcaatggcttcccttgcagcatccactgctgctgcttcccttggcatgtcagaaatgcttggaaaccccatcaacttcagtggtgccacaaggccagctccatctgcttctagtcctgcctccttcaagactgtggctcttttctccaaaaagaaggctacaccaacacctccaaaaaaagctgctgctgctgctcctgccaatgatgagcttgccaagtggtatggtcctgacag

SEQ ID NO: 90185 - DNA, 268 bp, Glycine max
caacaacacatgcttcttcgtcttcttcttttcactcttctctgacttcgatcaccatccattcatgtacgcggcagaggttttccgcgtcttcgccgtgcgcggcggcaacgcttctccggcggtggctcccaccaccaactgcttaaaaatcgcagctttcagcacacccactttccgccacagcgtgaatgcgaggttggcgaaggctttgacgctctgtcgctgcagtggtgactcagagtcctccgtcggcgacgaagttttc

SEQ ID NO: 90186 - DNA, 241 bp, Glycine max
cttgtactaacttattgaggcctgaattctctaaaattctcaattctaagtacgttagggtgactagcttgtttctgctcgagacgatatggctggtaaatgtcacgggcctggtatcggaatccagttgggaacgacttactctagcgtcggctgagttgaaacacgatcgtgttgaaattcatagcacacgatcagggtaacagtactaacccatcctacatgcgtttcaccgtcacag

SEQ ID NO: 90187 - DNA, 263 bp, Glycine max
attggcaggccaatttctcaactcgcacctgttcagcctattcacatatcttctctggacctgtcaatggggacttttggcaagccaagggttcggtggcccttcacttgatcttgatcttctccctgggagttcttcatcacccatgctgaatgtgcctcctttccaaccagcatgtctctcggacatggataagtccctcatgtcagacattgcctcaaatgccatggaggaaatgatcaggctattgcaaacgaatgagc

SEQ ID NO: 90188 - DNA, 266 bp, Glycine max
tcgacaagcaaggacaaaaaggaatcttcaagtgacgcgacgaggaatccgtgggccagctcacgatagaatgacagtggcagggtgtagggagtaagattctggtgaggagccgccgtcccgacgtgatgacgttggcgttattttgagagagagttgtgttttgtaatcaactcctccgtagttggttgttaagttttattatgttgagccaaagatgtaaaactgagattttaattatatatatatgaacatatttaattttc

SEQ ID NO: 90189 - DNA, 107 bp, Glycine max
cgaagtaagccaaaacgcaacaccggtagttgaatttttggacgtggaattctagcgttcgggaattcgacggcgaagagcagagggttattagcacaacagcagca

SEQ ID NO: 90190 - DNA, 266 bp, Glycine max
ctcgagccgcttctggtaagctgctggagggctgtaccaaggctaatgatcaaccaggcattactgtacaggacagtggtcgtcgtaactggcttattcaagttctttttgagtatgcactgggcatgaaattatccactgactatcaaactgaaggaatttgcctttctgcagtgcatcaatcaagcggttactccttcagtttatcgtggattagcaaatcccctgatgaggaagcagaactgctgtaccatgttttatctcta

SEQ ID NO: 90191 - DNA, 263 bp, Glycine max
agctcctgctcactctcactaggctctagttaatcatgtcctttagatttctactgtttctgaaagaacggacagattagatgctgcaggttttccctaagaaactgggaacaccaagaagaagtgagattgtattcattgctccaagtggggaggagatcagtaccaaaaaacaatttgagcagtacctaaaggcacatcctggcaatcctgtcatttcacagtttgactggggaactggtgagacccctaggcgatcagca

SEQ ID NO: 90192 - DNA, 289 bp, Glycine max
ttcttaaattgtgctattattgtggccattgctttcacttcattgcctaaagagagtccccagctcaactctctagttgttgttgctgcatttttcattttctaggcttagtcattagatagaaagagaaggaaaaaaaggctattatggcaggaggaggagctccagctaaagcagatgagccacagccacatccaccaaaggatcagttaccaaatatttcttactgtattactagtcctcctccatggcaatgagaaggcaagagttatcgaaaccctgctttttg

SEQ ID NO: 90193 - DNA, 253 bp, Glycine max
tgcctagatgtttcagccaaagtataagctggtcagagttctagaaggccttctggtactttttcttttgttttgtcagtaaatcgtcacttgtcaatgaaacaatattgtttctaagattgtaaattgtggtcgcggtcgcactctcatggtgacccttaaatcacaactgtggttgaaatgcggtcgcgactgaaatcatggttgctaataattttttaaaacacagtgtcactatgtttttgaaggggtg

SEQ ID NO: 90194 - DNA, 282 bp, Glycine max
gtaaccctgaactgcacaagggtaggcttcaggtgcctaaattaatcaaggagtacattgatgaagtaacgactcaattgagaatggtctgtgattctgcttcagaggagctatcattggaagaacagcttgctttcatgcatgaaacaaggcatgcatttgggaggacagctttgctgttaagcgggggtgcctctcttggagcttctcatgtgggtgtagttaaaacaatggtagaacataaactcatgcctaggataattgctggttcaagtgtgggat

SEQ ID NO: 90195 - DNA, 120 bp, Glycine max
ctcgccacgtacgtacggaggtctctcctcttcctccgccatgaactcacggtaagcctctccgtcgccctgcgacatctgcggcgccacccaaaccctatctttgaccatccacaacat

SEQ ID NO: 90196 - DNA, 273 bp, Glycine max
actcgagccgaatcggctcgaggtgaaagggaacttctacaggctactaaccaacttggtgatcgtaatgaggttctgaatgaacgtgctgtggttgtcatggctcgcatgagtaataagcttacaggacgggatttttcaacttgttcttcagtatcaaacaactcccctcagcatgctgtggggagttgtttgatactgaagaacaactcccctcagcatgctgtggaccatagcagtttaatttctggagacactcgtgaagttgatcat

SEQ ID NO: 90197 - DNA, 144 bp, Glycine max
tggctcgagcagctggtagtaaatgtaatgtagccctctccaaatgggagagagagcgtgttagtttagtatcctttaatttcttatggggttgaatatgtgtaatggtcccaatggctatttaatggatattttctctggacc

SEQ ID NO: 90198 - DNA, 264 bp, Glycine max
ttgatttgaggtgcgtttagacagaaaacactaggtcacctttagttctcttctctcgcgcaatttccatctggttcacgacacctaaacattgcatcagccttcaatctttctcgtgattccatctccattcctttgatttgaccatcttctcttcggatcatcatccattgaaggctgtctcaggtttgttaacttttcttccaccatggctaacaaatctcaagaagagcccaagactgctcctgagcctgatcggtggta

SEQ ID NO: 90199 - DNA, 258 bp, Glycine max
ctcgagccggctggatggtgcatgggtatagcccgtggacttgaatttacagctactcgacactgccacgcttactatcactgtgttagtagttgcattaatgatgcaggtaggaacctcggattgttctaaatggttgatgcttatactacgctatctactagttgctgccagtttactcgtacatgtcgaccctaaaagtggtgatgactagatatttagtgtaggtgatggcattgtcaatgctgcatttctttc

SEQ ID NO: 90200 - DNA, 261 bp, Glycine max
tcattatctacctttctttcattcccctgttctctctgtttctctgttccccagttcccgtcaaatcgcacactttcccatttcccatttcccatttctggttcaacccatggactcccaaccgggtctctctcttgggttaagcgtccctctctcttcacccgctgctccactctgtgatactacctctgttctgtggcgtttatttaacataagataccccataaaggaggaagaagaagaagacgaagactatggtga

SEQ ID NO: 90201 - DNA, 255 bp, Glycine max
  unsure (1)..(255): unsure at all n locations
gttctttttgccattaacagaaggaaattacctttgggattggactgttcaacttttcaaatcccaaacctttcctttatcctttgccttcaccaccgtcgtcgagacaaaatagaaaacagcggttcagattgagaaccacacgcacggtgcacctggctcatncgaacatcgaggagttggagtaattgatgtttggtgagggaatgcgttcttgggcttaatcttgttgaagcgcgtaagtagtcctgttgc

SEQ ID NO: 90202 - DNA, 252 bp, Glycine max
  unsure (1)..(252): unsure at all n locations
atcgagccgattcggctcgaggtttctttttatatatataacaaacactanaatttcanccgccctcccctcacacttgcaacctgcatgcttttagaaaatgagtattccggcatcctgctaatacttggctaattaaatagagctttgcaatctattgacccctctatctctgacttatttcaaagatatatcaatatcgatacaagaataagaatctgcttgggtggtggtagcgaagtgccaaaagaa

SEQ ID NO: 90203 - DNA, 257 bp, Glycine max
ccatttcattccaatacttgcctcaaatagaactttacctgctacttcttgttgttctgttcttgctacattttggcgcattttggcatcaaaccaccaagccctaaaaaaagcattatcctccttctttgttctttgcttttctcttttctcttttcctctgaaaacacaccctctttacagatcctgttatttctctctctctctctccacaatttcttattcgcagagatttgtagctaccaaaacaatttgct

SEQ ID NO: 90204 - DNA, 278 bp, Glycine max
ccaaatatctttcaaaacctcaaaacttaaatcaaaccaaaatcattagtaaatcttgtctggtgtttgtgtttgtgtcagagtttgtgcttcataggtattgacaaaaagtgttagtgtaatgtgtttggtgtttgtgtgcgacgaggaagaaagggtgttggggagacagacagcaccgggggcatgcccttattgtggagggatggttcaggccattgatgtagagagccaatggagattctgttttctacccttatgctttaagaccaaacgca

SEQ ID NO: 90205 - DNA, 278 bp, Glycine max
ctcacttcttaatgctttatctttctctgtttctaacgtttgtcattcttaactaaaaactaactttataatcattgaaatttcagaacttttttgcttatcctttatccttttttagcaataccaagggatgaatcatgtttggggtaaaattttctttcttgattaatatattgtgcttactatccatatccatgtccatttacactttgacttttatcaaaattgtaatttgtgtttcatctcatcagtttatgaaggggagaaatccttttaca

SEQ ID NO: 90206 - DNA, 275 bp, Glycine max
  unsure (1)..(275): unsure at all n locations
ctcgnacgattcggctcaggcataatgcacggcatgcaaggctgcagacctgtacaccatttattcggatagcaacaactgctgacaaaagcatcttgcctcatatgaagggtattgctgatacaatgggatgtttgcaaagggagggtcgtttgcttcagggagagcataatcttttaggtgaagcttttcttgttatggcgcattctgctgggatccaacagcaacaagatgttttaaggtggttactagaacctttgagcattcagtggaca

SEQ ID NO: 90207 - DNA, 277 bp, Glycine max
gctactgatacagtcaaagaacatgttagcaaaggcaccacaaatgctgaaagcaaagtggttgcacccagcggaggcggcagcagagaggtgtctgatcttgagtacgaagaatttcattctctgccgaggtcatccttgtgaagaaagatcacgatttcggactgccaaagactagaatagaagcatccaaatgatgcatgtggaagacccagcagcaagatgcccttcactgtgagaacggaacacattcaaattggcaggtatcacttgcatt

SEQ ID NO: 90208 - DNA, 201 bp, Glycine max
ctcgaattcgatgcggttaggattataaatagtaaaacgacgacaatgcgatcaagaagcgtggttaggtcacgtagacatatgagagacgtctctgataagactttcacgctcacacctctcacacacaacgcgatccatatttaccttgcatcttttcttccatggatttggattggtcgtgatcttccaccaccaaca

SEQ ID NO: 90209 - DNA, 192 bp, Glycine max
gtttaaagattatattttctgtcttgcaccctctagaacaaagaaatatgggtgctcctattaaatcatttgcattgccagcaatgcttctcttctcaatgatcatcataccccagcttgcactagggggcattaccaggcactaccattttgatataaaataccaaaatgtatcacgattatgccacacaa

SEQ ID NO: 90210 - DNA, 274 bp, Glycine max
cggctcgagcgctcttcctcttcctttttcccatcctccttcttcttccttcacttaaaacttccaccccactggaattgaaggcaacaattctaacccataacttaaaacattcccatcatcaaaaccttcttcctctgaatgggtggctttttcggttgttttggttcctcaaaacatagaaaccacaagcacaaggttcaaagaaatgatagtagcaatagcaagctagagcaacatagtgtctctttgggttcatgggtgctccacaaat

SEQ ID NO: 90211 - DNA, 267 bp, Glycine max
tccatcttcacttctctctccatctatgtccatgctacacatctgtatcggtttctcgctcgctgcccctttattttattaatactatttttcgattaactttgtttttatttttttaatttcgggaccttgtccctttgacgtgaattcatctctttcttcgtgattaaattaactgcctgcccgaaatgatgggaattgcccaaattgatgcattatttctctccagatttttcatttttcgataactccattgtcgcaggtatg

SEQ ID NO: 90212 - DNA, 157 bp, Glycine max
atattgtccaattataaggcaccaccaccaactcatttcaatattctctcttgtctaaaaaaacaagtatgaaattcaagtcaagaagattagacgcagaagcaggtgcactggacttataattgctcattttgtcatagtcatcttgttccaatta

SEQ ID NO: 90213 - DNA, 311 bp, Glycine max
  unsure (1)..(311): unsure at all n locations
tacgtaagatgtaaataaggtcggaattaggatcgagatagggttttactttacatctgtagcgggaaacatcactgtatcagacacaaccttcaaaacaaaacaataccatccacaccaacaacgttatagnnagattaagattaaaactaacataattattatagaaagtaaccaccaagtaggcgcaaacatgacagagaagaagcggaaggagagggacgaaggcaaccgtcaaagactgaagccgaagaagaagccaaacactcaatggaagaagagaggccctcgtttgcactcatctcttcaga

SEQ ID NO: 90214 - DNA, 276 bp, Glycine max
gtagcagatcgcgtctctcgaaggtctcatgagatttgtggacatcaagtacgatgatttaaatttgctgctaacttttttttactaccctactttcatcgattataagttttctgtttgtccatttttctgtaattaagatttaaatgtatagatgtggtggtggacggggatctgtgtgggtatgaggtggagattaactcccccttatttaaaaagcccattcctggttcgagcatatgttattattcaaatagcctcactagattttagcag

SEQ ID NO: 90215 - DNA, 271 bp, Glycine max
cgtcatttccaaggccagctatctcatcatcatcaatcgcctctatgagtgcatttgggatcgagcagttcatctagctgactagcttctttgtggtgttctgctaggaggtgtctttttcagatcttcaggtagattgacatgtgtcacatgtatcttgttcttaattcttgtattttcccttttattccttgaggatttcttatcctttttgtacctctcttttctctcttaataaacctttatttataataaaaaatatagtcaaaca

SEQ ID NO: 90216 - DNA, 273 bp, Glycine max
acacaagaaacactcaactgcacacatagagagacgttggaagatatgagagggctgcttcaggctgctgaaaataaaaggcaatcggcactagctgagctctcagctaaacatcaaaagaatatacagagtttggaggctcaacataatgatgcattgttcgacaaaagtaaggcattttttatccataacagtgatgattatgtgtaggtcaattggtcctacacctacaccaggcccagttataccagaaaacagcatcattcaatccca

SEQ ID NO: 90217 - DNA, 272 bp, Glycine max
cacaatcttaagcagtgcatccagtctttttaccttcctggtatccctagcattcttgggcgagaggtttacttggttaaagcttttcagtgttcttctttgtatggcaggaacaataattgtaagtctaggtgattcgcaatctggtttagcaacagttgcatcgaatcctcttcttggagacatttttgcacttgcttccgcagattatatgcagtttatataactcttattcgcaagaaattacctgatgatgatggaaaaagtggtga

SEQ ID NO: 90218 - DNA, 288 bp, Glycine max
atttgcttcacatatctttgccctactgtttcacaaatggttatttgaagttcatcttgataatccagaagtgcttctccggtattcatctgctctggttcaaggtgccacaaatgttttctggattgacattcaaacaaatacaaggcgattccagtctttattccggtaccttttggaagatgttgcattagaccacactcgattgaacaaaattcctttccaggctcagcgggatacatatcttatgctctcaaggttcattctattttacaacaaagctgacaa

SEQ ID NO: 90219 - DNA, 287 bp, Glycine max
gcttctcccaaaactccagcgtaaggcagtcttttcaccaaattgtcaactatccatcttcgttatttgcaaattccgtttcctttgaattacaatttacattttacaagaccggaaagacagcctccgatgttgctgtcgtcgtgttcgtaggttttattcggagacacagtttttcattcttccaatggcccagtctttacggccagaccgagatcaactgggacaagcgtgataaaactaggttctatgtcgtaggagctggactctttacaggtgtttcggtg

SEQ ID NO: 90220 - DNA, 205 bp, Glycine max
cgcaacagaagcagccacctcgtccttcatggggacgcgcctactgtcggcccattccggggcggtgcgggtgcaagcccgattcgagtttcgcaagaagaaagccgacgggccgtagaaactgtacacggggtcgggctctagctccgataggcccctgtggtatcccggcgccaaggcgtcgcgtacctacgatgggagcctt

SEQ ID NO: 90221 - DNA, 181 bp, Glycine max
tcgagccgtcttcggctcgagttttagggttcactttgtaattctactaccattacctcactgcgcactgcccggcgacaccggcgccgtcagtgctgaaaccaatggcagacgcatcatctctgccgacgggtcaacttggcgacatcagcctcgacgaggttccgtaagctagtttctc

SEQ ID NO: 90222 - DNA, 285 bp, Glycine max
cggctcgagattcatggctgaacacaacgacccaccccaagaatatgatttggtgaatagaagaaattagggttttggggagaagaagaagaaggaggaggaggaggagaattaataccggcggcaacagtctctcgagtctcagggactgtcacaccgaatgaatggcttgccttagtacaaaaccctaatttctgctattcaccaaatcatattcatggctgaacacaacgacccaccccaagaacccacattgccctccaagcgcatgtccgatcccgacct

SEQ ID NO: 90223 - DNA, 235 bp, Glycine max
aagaggagaggaaggagagaagacgaggcggtgcgcaccttagactggattcctctccgtcagcatctctctcctctctgcgcttcgtccccacggcaccatcgtcctctctccacttgagctacgcaccgattcccatgctcatcgtcactctggctgccataaaggcaacccttgccactctctcttccatcgatttgaatttctgaggctacaggcataccatgaagaagat

SEQ ID NO: 90224 - DNA, 279 bp, Glycine max
gtcctcttctggtggtctactcgtggggtacacacccctttcattcttctgttctacaaaagtcttcaagtaccccacttgactttctcccttgtctcctcccaatttcgattccctcaatcctaccaggtggagggccctgaagaaacttcggtgtgaggttttctctttacatgaagtgaggtccattagggtttctctcgattaaagccatctttataggctaataggaatggagaaagatcacaactattcggcaccaccaccatccatgcctcg

SEQ ID NO: 90225 - DNA, 278 bp, Glycine max
cgagtatctttctcttctcttactgcaaattcaaaacgcaatctcaatcttgtcctttcgatccatgtgcttcatgctgcattgagcacacgcacgcagataccagatttcccactcgtagattatccgccttttgtcacattcagaggacagcagccaatccacgaccgatacaatgccgctttgaatcgcgtgccgtcctgcttccctgagcacatctgtatgcttgatgacatcgatatatggagcagtagggtcgatgagtaacacgtgacact

SEQ ID NO: 90226 - DNA, 245 bp, Glycine max
ttcttattgaagtagccaaagcacgtctataagcgaaaaggggtttccagtgtttgcgtgtcagaatcgaatggtcggtcactccaactatagtgtttgctcatggctatggaacggagcagtccatatgggacaagatgcatcctttggttcttgctttaaattagcgtcttgtgacgtatgattgggcttttgctggaactgtgaaggtatcagagcctctatgaccctcaaaagtattcctc

SEQ ID NO: 90227 - DNA, 280 bp, Glycine max
agaaatttatataatattttctatgagtgattctaaatttataatttgttgaaacatccttcaaaactgaataattactcactactcatctttttgctaattgataactgcacactccccttggctttcttccccctcttcttcctgcttctccttcttgcccccacccctttctattccggcttctcctttacgcacacgagaaacctttgttgtggacaattgcatcgaagtgagaagattattgtggtgaacttagattattatggtatagtgtcta

SEQ ID NO: 90228 - DNA, 279 bp, Glycine max
accggctaataagccggtgaagtagaaagttgagtgagtgcttactctcaactcgaatgctgaaacatattgagtgagctagcagctgcttaaccacttctctcttcccaaaccaccttattcagatccatagttggcttattagtaacatacgcagaaggtggtttgcactttgcaacacttgtagcaaaagcatgacctacattaattatctactttcaagtatgaaatggaagattgacttaggtccattttttcccatcgtagtttgcaaaatgc

SEQ ID NO: 90229 - DNA, 280 bp, Glycine max
ctctttctctttctcttccttttctatacacagttcgtgacactcttttttcatgtttggaaacttttttctggctttcttcggtttaagccttagaagacggagattattaaaaacatgggttgctttcgttgcaccggcaaatcaagcaaaaaaaccaacaacattaatcacgccgagaagcacactcctgctgataaggtcaaagttaattcgaatttgaatggtaaaaaagaagataataatcctaagcctgatcagctatctctggacgtgaagt

SEQ ID NO: 90230 - DNA, 169 bp, Glycine max
gaacccttcagtgagagataacacaagtcatagtccattggtaatggtatggttagatagatagtgtgtggaaaatgaagtttggtttggagtttggacacactatgtagcttgattggtggaagtatcataacttgtgcctgcgagccccatggagttattctattgg

SEQ ID NO: 90231 - DNA, 285 bp, Glycine max
attacttttctcaaaagggtgtagagcaagcaattcaaagtggaagcataacacttcctggtggtgaatctgttcctctcatggatgccattgtcattttcagttgcgaaagcttcttctcttcaccaaagctgagaaaatcaccatgtgctgaaaacaaagggaaagagactgtggaagatgaaagttctagcctctctttggatctgaacatagccattgaagatgaaagtggaggtgtggcattcggtggagacaatggtatcctagagttagttgataaac

SEQ ID NO: 90232 - DNA, 282 bp, Glycine max
caattttctctcttttccatttctcatttccaaaaatgccaccggcgaacgcaaagcggagggagctgcggcggcggcggcgcctatgagagtcactcgtgcggcggcagcgcgagccgccgaggtggctccgccggcgtcggaggagaagaggaaggcgaagaaggccaaagttgcttctaagcagcagaaaaagaaagaaaaagaaagcgaaactgtcgttgagagtgagaacaaagtcgaagaaggagacgcctctgagaacgttctagacgcttcgaa

SEQ ID NO: 90233 - DNA, 288 bp, Glycine max
acaggctacaatagtcatgcagttgcggataaaagagttgttatttagttaggataaatttgtataatgaagagcaaaaggagaagaaagagaatgtagtggaaaaagataaagaaaaaggtaaacatgcagaaattatggaaaaattattgtatgaatacattattcttttcaaaaatacaatttattcaatatcatgatttcacttattaagatcctcttgttgatttcttttacttttttatttattcctttgatttcgatgaatcaatgttaattttaactcaa

SEQ ID NO: 90234 - DNA, 292 bp, Glycine max
gtagagtagagcagcaccaccaagccacacaacacaaccacaatggttcccatggccggcaccaccgccaccggcagtagaaaaatcgaaacatacgaagagtttgtcaaagttcacgcgctgctcctcgcggcgtcggggctaccggagcggctacaccggcgcctcttcgagaagctctcctgcgagcactttgacggaggcgatcacttccagatcgagccgtgcgaggacggccgccagatggcctcgtcctcacgtcggcgtccatgccgcgggactccgacgtctt

SEQ ID NO: 90235 - DNA, 214 bp, Glycine max
ctcttttctctattaaccctcttttcgaagaagctaacgccaaaacgatgtcgtatgtgcctccgcacctcagaaacccgagttccacaaaagacgcgagtctgagaaagggcgacgtaacgctagacaaccagcaccaccactaccagaagctcggattcgcctccaacaccaccaccaattgctctccatctctctcctccttccacaacaa

SEQ ID NO: 90236 - DNA, 273 bp, Glycine max
gcttagtattgtttagatataggatacatttttctagttcatccacaatgtcattgaaacactgccatagagttccatgatttctgtgttccccaaaaccctaatcgccactcgtttcctttcccgaacccgacctcgaatacatactcccaaactaaccgccattagaaccatgagctcgtccacccagcgcatgttccagctcaagcttgacccaataacgggtaactctgaatgggtcgtcatcgaagacaacgacgacggagacgaaag

SEQ ID NO: 90237 - DNA, 271 bp, Glycine max
catgatcgttgccaaaatattttttgaattaaatgaatggacgagtcttcctcctaatttgttggagacatttctagaattttttgaaaatgctttgcttgggaagttctgcagggctacacagtctggtaaggctgtctgggaagagtgtttagttcagctcctttcatttattcctaaatttctttcacgtggggcaagctcttggacatcacgtcttcttcaggcttttacccagacatttagggaaagcaagccaggttccttgctg

SEQ ID NO: 90238 - DNA, 272 bp, Glycine max
tcccaattcgcttctccacctcttcctcttgtcgttctatctgttcgcttttcagtttctagggcttattattattaacgtttcatcttccgccatgtttctcgcgccctaacagtttctccccgaaatctcgcgccgacgcccgataaactcgccaatcgatggcggcggaggagatggctcctctcgttggcggcggcgattcctcgtcggcgacggcgagggctcagtcgtcgttcgtgaggaaaggcgaccggcaaatgttcacggtg

SEQ ID NO: 90239 - DNA, 270 bp, Glycine max
tggttcccaaaactgtagcgaaaaccatcacaacctggtggtggatcggttcgatctgcgtcttcctctgctaaactgcgttcttcataaccccccaaaagagaattttttttaaaaaatttggagagagaaaaacaaagaggtgaagatctgaaggctttgttgtacccgcttataacactgaaaaatgcaaggtagatccccagaccaggaatcagtagggtctgggacaaagaggtccagtgtatcatcggggggtaggcctcgaaa

SEQ ID NO: 90240 - DNA, 266 bp, Glycine max
taaagtgtagttcctctgatcgtgtggtctctgagatctaggcgctcaccgcgagcgtcacacgtgtgttcgcttgctctggtcagcttcggcgctcgacttcgtctactcttgtgcagcttccttcggtcttgccttcggttgcactgcctgatcgtccgctctcgcatgccctagctgtcgtggtcgttgccaaagtcgggctccgtaggacattgctgtccgcgcgtgacagtcgggtcacccctgacgtcggagggccagtc

SEQ ID NO: 90241 - DNA, 248 bp, Glycine max
tgaggccatctcgactacaacaacggcagccacactactgactgaagccatcatcatgataaccacaactgtgtgcatagcgatacgcaatctctcttctacacacatgcatttcttacgccactagattcgtaaccgttgcgcgtacactcatctaggcgcattcgttcggtcagatacacactgctcaaagatgcgacgacggcatcgtaatctcaagattcgaccttgacacttctgatctcgtc

SEQ ID NO: 90242 - DNA, 271 bp, Glycine max
tagagcattaatgaaccagaggaatgaaaaatcgtctcgatgacctgcatataaaatggttcaggaaactgctctaaaccatatattcagctgtgggggaagtcagaacgattttggagctactcaggaaatggaccttcgcaatctcgatcatttgggttgttattcgttttcaggttcaagtaaagagatataataaatggtaaacatgtatctatccatttatatacaagatgcttatgcttaccactttcccaacctcttatactac

SEQ ID NO: 90243 - DNA, 255 bp, Glycine max
  unsure (1)..(255): unsure at all n locations
tatttataaagatatatatcatactatgatctgcgtgtatacagaacttcatcaccatatggtagctataaagatatatatgaaactacgaggtgcgtatttgcgaacgggaacttaaaggggtaccaccttcccaaaaagcgcgccgaattggggcttggcttaatcagggtaatggctgttccctgggagaaatcgtaaccggcccaaaattccaccaaaaaaaaantttaaaaaaaaaaaatccctgggaaa

SEQ ID NO: 90244 - DNA, 264 bp, Glycine max
ctcctttccactatcttgtgccccattcaccttactataccaataacttgcagataaccagatctctcccttccttaaatgttagctcctatctctgtcggtgctcgtttgtgccactgctcatatctccttctctattatcgttggtatcgttgccaacggcctctttcagctggggcttgagacgactgctgctattcgaacatttgtgattgtctcgaatctgtctgtgtcagcatagcagaattctgggtctttggaatc

SEQ ID NO: 90245 - DNA, 268 bp, Glycine max
ctagattttgataagtaccctttatcaaagaagcgaattccactagataccttaagagattactcccaatttcgacctcgaacaaccacggtggcaactgtggtgcggatccgtagttctctttcttttgcaacccacacatttttcaatgagcatgcatttattgatgtgcaagtacctattataactagcacagactctgaagggtttagcaacatgttgaaggttaacaccctggaacagaaagcagagaaggagaaactagacc

SEQ ID NO: 90246 - DNA, 174 bp, Glycine max
cttcacaccattctcacaaaacaactttcaaactctgagtaagaatggctgccaacacattgatgagtactgctatctcatccttcgcatctctcctgacttcctacaaaatccagatttgccaacgcagttcctcgatcataatgaggctgcgaccaatgcgtcttcttctcg

SEQ ID NO: 90247 - DNA, 262 bp, Glycine max
gtgaagaaagacagaacgaatctcttatcgccatctttatctttctagcagtgctctcaactattatcttattatatataatacatatctttcttctcttctgctctttgctatcatagccacttctacataaaactgtgctccaaccttaatcctaagaagacggggtaggactggagtctgagggatctctttcgaatgtggtgtgcccttggccggggcaaaaagaccaaaatgattctctaaagtggtagctctacga

SEQ ID NO: 90248 - DNA, 265 bp, Glycine max
gcccaacagtccctttaatttatccccgtcagcacaccaagtcaccaacaatcacacagagccagtcccatcacttgacacaacaaactctactaagaaataagacatagcatcaactaaaccttatatcccaatcccctcatggcttcaatctcaggcatatgctcatcctcgccaactctcaaccactccacaccaaaacgacgccgcgcaccactcctcccttactcctcattcccctctaaaccctaaccgcctcgctacc

SEQ ID NO: 90249 - DNA, 271 bp, Glycine max
gttccgccttacccaaattcctcaaccaggacaccgattgtcgtaattcgggtaattgctagctacttcatggctattgtgttcacattgtggtggtaatagccacaagtttttcacatctcttcacacagagaaccaaaacaggtttcatcttttcaccacccttatcccaaagctttttcatttttggtgggtttttttctcgttcttatttgtagcatattttaaggtttgtttgaaggggttttagcagctattaatatctgtgttg

SEQ ID NO: 90250 - DNA, 275 bp, Glycine max
tctcgatacgattcggctcgacctacaacttgctcactgtcatttactcgatctggtgagaaacctccaactctctaaatcaatcatcttcatgtatctctccaatctgacttaatgtacactacatatcactgagatattaaggcatattggctttgttcctttggaccatagtaaaaaagttgacacacatttgactggtgccgcagcactgggactcaattctggcccggatccacgagccgttcatgcatctccgaatcggcttcgtatat

SEQ ID NO: 90251 - DNA, 216 bp, Glycine max
ctcgagcaatatcggctccctgaagaatcatacttggagggacagcatgcactctagtagacttcaaccagtcatagcgatggggtgactactctaggtagcagcgatatcctctgtttccggcgagcacacggtgaagcaccagcagctaatccctgatattgtcgctcaggattgtaaatcatacgtcgatctcgaagtagaggaagatgaggt

SEQ ID NO: 90252 - DNA, 261 bp, Glycine max
ttctgcttgaagcaaagtttttggctagaaatttagtgtatgtgatctgtcactatccttcttagaagacattgtgaatccgggattgtcttctgcgaataagtctactaattcggtgaaagtaagctttcggataccgtatttcacccaatggggtgagctgctgctggtgtgtggctctgacccaatgcttagctcctggaatgtagagcaaggtgtggtgctcagccccgttgatcaaagggctgagctcgtatgggg

SEQ ID NO: 90253 - DNA, 265 bp, Glycine max
cctcccgcgaccccatgctcctagcaatctcgctccttattttcgcccaattggctcattacatcgcccaaaccctactccctcaaatctccactctccactccgtcttcctccgctcccttcactcctccagcctctccgccgtctgcctcgccgtcctcgccgccgccatcaccttcatccaatggctcccggattcctctgacactgatcgcctgcaatatctgctccctctcatcgcatgcctatcctcaccgtggcgctg

SEQ ID NO: 90254 - DNA, 271 bp, Glycine max
gcgacgttcttcttgcgtttgatgaggaagcaagcgacaataagggagaccaaaacgacaccggatactgcacctgcgacggcggcaagagttcttgtggtgtcgctgcttttcttttttgagttttcaacaggagccttgggggtttgtaaaggaaggtctgggttcggtccggcaagattacctgttgattcgttaattttgaagagttcaagggcgtttagttgtgcgtccttgatgttgctttgagggtgaggatgcagtttcagtg

SEQ ID NO: 90255 - DNA, 272 bp, Glycine max
caacaacacaaaaattctcaaaggctcaaactcaaacggtacttacaaaaaaaaaaaaaaaaacgaaacgaaccccactctcaccatgatagggtccctaaaaccttttgtcccgggaattgccacaaattcgatgccaaaggccgaggtttcagcccccgagggagtttttcacttgggcgcaaccgccgccgcgggaaaggttttcggggggaaaaaccccgttaagccgggggcggtttttcgccccgctttggcgggcaacgtggaag

SEQ ID NO: 90256 - DNA, 239 bp, Glycine max
cctcgagccgattcggctcgaggatggagtctctggtaatcatgctactaaggaactgattcactttgctctccagaactctccattaaggaattaggattgcttcttatagagaaatgcttacgaagattgaactcgctcagtttgtacataggagagttctgaagaggaaaatgatggagtctctggtaatcatgctcataaggacatgattcatttagcatctaatggggcaaaat

SEQ ID NO: 90257 - DNA, 269 bp, Glycine max
cctcgaaccgaatcggctgattaaccctccaaaatacaacaccataacgaaacactacagtgcacttagcagctttacaactctcatagtagcagtagtactactacttcacacactctctctctgagtgcctcacacgaccgattctagtgacatatataccaatggaggatcccaaagctgctggcttgacggctctatctatgctctgtaatgcacaaacaacaagaagtcaacatccttctagatctgtatgcgaagtgtcaaac

SEQ ID NO: 90258 - DNA, 241 bp, Glycine max
attttaggtgggattcaggagtcaatgacagaaatagaatgcgggatggaggatcgacacaaccatgtagagattttgctgctggtaaatgcagaaaacgcagccaatgccattttcgtcatgataatcataatcatgaggatagctgggaaaataagtacacggaatatggaactcacagatattctgctccacacgatggtacagacgatgctcttaagagtggtagatctcatgaagc

SEQ ID NO: 90259 - DNA, 248 bp, Glycine max
gttaacaataatgtctcctatttcgcttatgtcaatttctgtgatcttagggtttacaagaattgaggttatagaatctttaatttgtaattgtggttgtttgtaggtttattttactctgtgttttcccgtggttgctgcggctgtcggggcttaccttcatgtcctcttgaacattgggggttttcttactacagtggcatgcatgggaagcagcttttggttactctccacaccccttttgaagg

SEQ ID NO: 90260 - DNA, 239 bp, Glycine max
agctaatctagaggtacctagacctcaaacgctaggattcatagagcagaacaactgctcataacagtcaaggacgtgctatatcaccacattacttggggcctttttagcttattcaaatatgggaagatactggaaaattgctagtttctcaactatctatgtccttgaatgttatcactgattcactggcctagtgccagctaaccaccagagaaaaactcccaaattctacaact

SEQ ID NO: 90261 - DNA, 251 bp, Glycine max
tcggctcgagctcaattcccgaaaatttttccgtttagcttcttcatcttctatgtgactgtgattaccaattcaattgcttcaactaagcctctgtctttcacagtgtaaaaacaaaagtgcttttttcggttggttcttgattcttccctttcactctactcaaatgcttagctgaacctgacccaactcgttatttcaacatttgcgtttgaatttgggccactttcattttcccctctattggtata

SEQ ID NO: 90262 - DNA, 246 bp, Glycine max
catcgagccgaatcggctcgagctgatttgctggggaacacgtgttcagattatgaggaattgacgccattatctccgtcttcgacggtcgtgaagcctacctgcagaaaagggtcagtttaattattatttgggaattaatcgaccattctccttatgtttgtttcttttctgttgcttcaattatataacacatttggcggtgcggcgttaaaagatttctactatctaaaacggagtattttg

SEQ ID NO: 90263 - DNA, 183 bp, Glycine max
tattcttttagattcaggtactgcgtttcggaagcatgtatcaaagtactccttcgaggtttagtgatctgtcttgcgctttagaaaatttgaatatgtgattctgcgtctagtacgaaacttgacggaaccatggtttagggttagagcatagtgtaggctatgctaatgaggtgatccagt

SEQ ID NO: 90264 - DNA, 130 bp, Glycine max
ctaggagctcttctccattggttcttcatctgcatgcacactcttgcatagtcatggctaccatctcttccagtcaggtagcatcactcagttgtccctctcatggagacaatccatgacagcggtcgat

SEQ ID NO: 90265 - DNA, 235 bp, Glycine max
accaccggtaagctccatacctgtctaattctctactctctctcacttctctctatcacatttctctcacaagatggcaggatcatcagcacgccttgtagggaatgctttatctacacggggtaatagactaactcttgagaaggacttcaatggaatgggatatctctactcatcttggcgattttcatctattgaactacaataaggcatcgtaagcagtttccatcaaagg

SEQ ID NO: 90266 - DNA, 133 bp, Glycine max
atctgtaagaagttatggcttcaagaatgagtggacagacaaataaaaggaaatgctagaggatgagagtggttatggatttatatctatcaattcattctatgtgaggtgctgattatagttggcttgtaga

SEQ ID NO: 90267 - DNA, 220 bp, Glycine max
tgcgccataaacatcaacatgagcatgatcacagtggctgtaaattgcagcatctcatcttttccctcttctctaggttttcgccgcggggaatttcaaaaccttccccttccccctccttcggttttttgcttttcgggttgttaaaggataattgaaagtggggttggtggaattggtggtacaggaacctttcaattgaaccgttgaaaaaacattc

SEQ ID NO: 90268 - DNA, 282 bp, Glycine max
ctcgagccgctcgagcggctcgacggctcgacggccatgcctacgcagatggcaccgcaccctgccaaccaaccaggattccatatgcagactcctcaagctgctgcagcagcaatggctcagcagcagcaaggaatgtttccccagaaaatgccattgcaatttggcaatccacatcaaatgcaggaacaacaacagcagctacaccagcatgccatccaaggtcaaatgggacttagacctggagatataaataatggcatgcatccaatgcacagtgag

SEQ ID NO: 90269 - DNA, 275 bp, Glycine max
ttaacaaacccaaaacatgtttctcctttgatcttgttcttctctagtacgcctcatgcagttccacaactacgtgtacttcgaacataggaaacttgtttgtggagtcgagagttcttacttatctgctgagtcatgggttcagaaggtgatgatagctctcccagtgactatgattggaacactgatgatgagcttgaggtgtttggaatacctccctcggatccaaccatttctagtcaagagagctgtgaagatagtgtgggggagagtat

SEQ ID NO: 90270 - DNA, 285 bp, Glycine max
tgcagatctaatagctatgaagcaccataccggacatgacacggtcaggtggacacatgtaatgtctaaaatattaaaatatagaacgtagtacgagtgtcgtgtcggtgttagacactgatagggacgcgtgtcggacaccggacacgtgtcggacaccggacacgacaaaggacttgaagtgcttagaattgtttatgtttgagatctagttgatgagaggcagatagaggtcaacttgccaagataacctacagttctatattagatgctttgtgcaaaaac

SEQ ID NO: 90271 - DNA, 274 bp, Glycine max
ccggtctttctgactctcttcacaataaaatccaatctcagcgcacacttcacatcaaagcgcgtggtcgagggcagaaatggcggcggctacggcaatttctcagcttggctgcttctccgccgtccaccgcagctcacacctccggcggcgctcgcttctattcccttgccctcgctccaagttatcagttgttatgagtctggagaggcatgacacagatactgctgggtctgataccaaaaatacactaagttatgcagctgatgtgtca

SEQ ID NO: 90272 - DNA, 280 bp, Glycine max
cttattagtattattacactctctctccgcgttaacaaaactatctctgaactttcctagttattacaatttattacacaacccatctctctttctggtttcgcttagatttagaaacacagacttttccaaagtgctcgttcgtttacctcaaacctcaaagaaaagaaaaaaacattgcgttatcacttgttttcttttttgggaagacaaaaacattgagttcagcttctcacttccatggctgaggccagactctacgtgcccccctctcacttgg

SEQ ID NO: 90273 - DNA, 281 bp, Glycine max
accgaacctcccaattccttcacacccaccataataatatctttattgttcttttcttctctggtaccataaaaaacacacacacacacaacaacaacaacaaaagaccatgtcggagtgcgagcaccacaaggggaagaagaggaagatcttccggcaagtgttctggtgcatagtggtgttcctcttcctcgtgctgctcacaattcttttgatatgggcaatccttagacccaccaaacccaccttcaccctccaagacgtcacggtctacgccttca

SEQ ID NO: 90274 - DNA, 263 bp, Glycine max
cgcgctcgtctctatattctcatcactcgcgctcttcttcttcttcttctccctccattagggttttcttaaggctgaatgccgcttccctcgccgcacattgacccttgacacaccacaatgtccggccctctcgaccgtttcgcaagaccctgtaacttcctcttctctctctctcagggttttagctttcttctatcttcgcttatccatttcgttttggttattttggcaggttttgaaggtttctccgggagtgatga

SEQ ID NO: 90275 - DNA, 264 bp, Glycine max
gttgcgtgatgaaaataatttgcacaaatcttcagtaatggttacatcaggtgccaatcaggcatttgtgaatctagttcttactctctgtgatccgggtgattctgtggttatgtttgctccttactacttcaatgcgtacatgtccttccagatgactggcattaccaatattctagttggtcctggtagctcagacacactccatcctgatgcagggggttcacatattggttaaatgttggatggattgggtctgtatac

SEQ ID NO: 90276 - DNA, 273 bp, Glycine max
aaataagatgctatattttcaggcttgtcatataggcgggtgtttctattttgtataacaggtacaattagatgttgctaatgttttagatttctttctttttttgggttagacgacaccagattgtgggtgaactcgtgaactcgagtacgtttggatagagaattttaagtgaggaaagtaatttataagaaaatttaaaaaaagtaaaaataaataacatttaaaaagaaaataattttaaaaaaaaaaggggggccgcccccttttttt

SEQ ID NO: 90277 - DNA, 279 bp, Glycine max
atgatagtgaaaatgctaatgcaaagatttgaagatggcaagtcacaagtagctcttaacaaagagaacgaaattatatctaccatcacttctatcttttggagtattaagcaatctgaagatgtggttgattcatcaaaatcgaagaattcgatgccatatgtgaccttgggttagcaatcactaagcgactagtgcagaaggatgttgatttgcaaggattgtctcctttagtttctctacctccaatgctatacaaagcatgtgagaaggaaagtg

SEQ ID NO: 90278 - DNA, 282 bp, Glycine max
attcacgagaagaaacttcattcagacctcctttgaatgtggatgatgcaaattaattggctccttccctataacaaaatagtatcaaggctccttcctttttcctacgattatgtcctatttatttttattttagatagagttgatttaataaagtaattctaagtcatgtagcatgattaaatgtatgtctaaattaatctcagtcattcagtcgcaaatatatattaaaatgtgtatttgcgactgaatgactgagattaatttagacatacatttaat

SEQ ID NO: 90279 - DNA, 281 bp, Glycine max
ctatgccggagattttagacggtgcaattcggcgagccgttgtcatcggaaacggcttcgcggcgctgagaatcagtgcattggtttggtccgtgctctcggtttctccaaccgccactccttatatcgcgtgacgaggcctcgaggaggatcaatcggtggcttaaatggcttccggtttctatccacaaaaggttagactccgttatcagaatgatctgtggcaaatcgcgttttcaaacgcctcataaaatcggcatttctaacgtgttggatgctga

SEQ ID NO: 90280 - DNA, 291 bp, Glycine max
tcattttcatgtaggcgtgtagagtaccttccatttgaaaacaacccccattcattcattcactcactcaccatcaccaccgaacaaagctctgatggttggcggacactcccgagggagctctctctcctctccctcttcacaatataacccaaaaattcacacaagccgccctaaaacacaagtgcaaaagcgcactgctcgctcgtgttctgtttctctctgtctctccgttctctgttttgtggtgttcagtatctcggaaattgcagatggcggctgtaactttct

SEQ ID NO: 90281 - DNA, 280 bp, Glycine max
ctcgagccggaagttgtttgactgtttggccccaaaagaggtcaaattggatgctcttatgattatttctgatcttgctcgcatggacaagggattctatgagtacattaaaggtgcttctattttggagttcttgaaagattttctttacacgaggatcccaatatgcgtgccaaagcttgcagtgctcttggaaacatgtgtcgtcatagtgcctatttttatagttcacttgcaagacatcaaattgttggtatccttattgaaagatgttctgatc

SEQ ID NO: 90282 - DNA, 266 bp, Glycine max
gagagaaccccttccatgagtgagttgaatgaaattctttatgggcaggaacaccttaaacaaagggatctgtcatttgtattcaggttacagggtgctgacaactcaacactttatgggtgttgtgtcttagttgaagaactagtgcaaagcctctggattgcttctctgattctgataagagcttctactcgcttgagacggattattaccactagaatgttactgatacttcaaggtccagtgttgattgctcttggtgtatg

SEQ ID NO: 90283 - DNA, 111 bp, Glycine max
gcaaacgcaggaaaggggtttttgtttcgcagtgagctgagcctattatcaacacaagcaataattccagtaaatcaagacaattctcccctgttttttggtccccgggat

SEQ ID NO: 90284 - DNA, 294 bp, Glycine max
tctcgagccgctagtattttatctaatctctgttaatcaaacatgttgtaaataaaaattaaagccaacaatttggccaaaatgtttttttcttgggtattctcgataaaccagtcttaacaatatacatattgttagctcttgctgttttcacagtcaaactcttgcctattagttttgattcgatcaaaccataaaccctagctagctaagtagcgttcgagatggagatggagatggagatggagatggaggagaataatggattattgaatttacaggcagtggcaccgg

SEQ ID NO: 90285 - DNA, 294 bp, Glycine max
caaaatcttcttagaagtgaatggttgccatttcggtcttcaagtcctttttccttttgttctcacaaaacccaacagtgcccacactcacacaccctaaccacggcaccaccacattctcttgcttcccccttcctttagccatgcttgaatcatgtggccatcgcctccttagctcgttgttgcatctcatttatctacaacgatgctccgaatctccgtacccctccaagaatcgccgccctcgaccacggaagagctcacgcttctcctgactcctagaacatactacca

SEQ ID NO: 90286 - DNA, 297 bp, Glycine max
atttaattttgccccgcccgataggacatatccgtcgacctacgcgacatctctatacgccacgtggaggaagtcgcaaattttccaccacgttggcgatactggtgtatgggttgaattctagcttcaggatttgtgaggggagagtacgagactctgaccatatccagtatcaatggacttggccgcgaacttgcgatacttagcattgatcggcgtggacattttgggcgcacgaaagtgctccgtgactacggcagcttgcggcacgcgtgctgagcagagcagctaccagga

SEQ ID NO: 90287 - DNA, 289 bp, Glycine max
ctcaagtaccacaacataaaagagcctcccattcgggtccgctggctcaccgaactgcatgggctaaatctgggaagaaccaggatgatgctccaaagatttcagttgggggcgacctatcaacaatctcaggcttagttgctgcaaggagtatgttgtcagatgatcgcagagaaagatctggatcgtcacaaacggaggcttcaaaattaacgaacagattcccaggatcattcaaggacttctctgaatcgtcaataaaacaagatcaaaggcatcatgtacaggg

SEQ ID NO: 90288 - DNA, 282 bp, Glycine max
cgggtctcgtggtgttctctatttcttcacaaattaaagagtgtccaaactaaactcattattcctccctgcaactctgtgttcactggttcccttgatggtaaactcttcagctcctcttcaatcatttttaaagctctgagcttaaacaaaacattggatacgacatgggttttcagaggtttctcataatatgaccaatgtttgtggcaccggttcttttgggggaagtagatcagcttcaaagattgcagcttttcattttgcttattttccatattt

SEQ ID NO: 90289 - DNA, 287 bp, Glycine max
ccacgaaaccgcgatagctctttccttatcttctccgaatccgaggagtggtagtaatttgtggtttttcacaatcactacctcgtttcatcttaattctgttaattgggtactaattaagctatctcaaacctcaatttttttgaggcttccattcattaaagtataaagtttgtggctttcaaacaattatatggggagttgtgtgtctaagaataaagctagggataatgattctgatcataatgtggattttgctgctgggaatgtgaaactcattaccacca

SEQ ID NO: 90290 - DNA, 147 bp, Glycine max
ctcgagccgattcggctcgagctcactccacaataagtgtcgattgcggtcctacaataagtggcggtgtagttacacctttacgtgtgtgtttaccacttttgagtgccaaagagttctgagtttcataggagaaaaaaaaatgac

SEQ ID NO: 90291 - DNA, 283 bp, Glycine max
ctgacctatcttggaagagttttgaagtttaaaccttcaaacccttttgcctttagattctgattctgagtctctgctgctatatatggcgccacgcgtatttcttgtgtaggggatgtagctgatggtgtgccttgttaaggtttcgtctgatccaaagagagaagaagaaatactggaagaagaactacattttcccgataacgagccagtatgtttttaaaaataaattatagcatcctagtctattttatgttttgtactcttcaacatgtttttcccc

SEQ ID NO: 90292 - DNA, 280 bp, Glycine max
ctaaaacaaaaattccttcctctactaaagggccttgatctatgtgttaaagcattacccttttgtttttgttaatagcttttgcttgaacatgctaatcatgatcaccatcgtgttataacactttattttattgtcctcgtgaaaaccctttaaagatattgccacttgcatatacatatatacatttcaataatcacatttctgatctgtatttggaaactttggtggtggtggtggttgcttgtgcagatggaatcagtgaagccgtcggccgtga

SEQ ID NO: 90293 - DNA, 245 bp, Glycine max
gagatatgtcgtagtggaccccacaaaaccgcacttttttctatcttctcttacctcgagagcctgtccgaggctctgagaatccctaactccttctttttcttcttagattttcctttcagatttgattcagattatgctttttcttcttccatctccttgtgcaaattaagataaaataaaagaaagatattaggatgaagagagggaacgaggaatgagagttggtgggggccatgttccca

SEQ ID NO: 90294 - DNA, 276 bp, Glycine max
cttgcacacatgttattaattattattgttgctctttctctttgccctcatgctacttttctttcattcatagccaatgcttattagtatcttgcttgaacctgttcttcaatctctactacattctgttcattaatgtttgcacaaccacctctgcttaacaattcaaatggtcaaagatatttaagctcataatgaggtttacattggattctttatatgagcaagttgctccttactccttgaaatactgcaaatagaagagtagaactttcc

SEQ ID NO: 90295 - DNA, 274 bp, Glycine max
cgtaaatgcaaaaaccaaagttaatttttaccaaaagcacttttattacactgtgagagagagagtgtgtgtgtgatactgtgtgctcccaacaacaagatgaagaggtagaagaagaacaagaagacgaacacactccacttgcttgctacccctactttgagcttgcaactcctcttactcaaaactctccttcatcactccatagctccttcttcttcttctgattctgattcttaaactaacagcacaagcacacaacctagttcagctc

SEQ ID NO: 90296 - DNA, 272 bp, Glycine max
tttgcagtgatcacatcctcatcttctttctcaatcctcaaccagtaacctctcaatttctctctcttctgatcccactctctcacttgggggttgaagatgagaatttgtggagcagcaatcagcagcagctataccaccacgtccaattcgcttttagtgtttgcttcctcttacctctccagtcttgacaagaccaagttcgtgacctcactttctagattgactgtcaagcgtctatgcttcctttcccagactcgtgcgcacatttc

SEQ ID NO: 90297 - DNA, 272 bp, Glycine max
tcagatttgactgtcagagtgaaggacttggagaagaaattagccaggagaaggagtaagagagtgaagacaaaacagtatagacccgcagcttccaaaatgtctacccatgaaatgaaatcctcctaatattccactccatgtgagagcctttgatgttgcaatgtaataatgtctcctttttatttcacggagtgtatgtatatgttgtaattgtgagatgtggtatgagtcatgttctactgaaaacactataataactatacttcttt

SEQ ID NO: 90298 - DNA, 263 bp, Glycine max
ctcacagaatcaagagttgggaaatccaaagttctctcgtctgcagtggatgaagtaaaaagggaagcattgagtgtgggttctagaactgtacctcagcatcaaaagggaggcatgtctaatgagcatcatgtccatgtttctggcaatgatgatatggccaagtcaatgagaaattatgctgatgttagtaacaatgctggagttaattatagttctggaaattttgcacctgatcagcaacttacgttgttaagtccttt

SEQ ID NO: 90299 - DNA, 265 bp, Glycine max
gttaagctaagcaaagcttccttacctttctctctttctctctttctctctttctcttcccttccaagcactgccataacgcgatcgaatgacaacctcgttggagacaccgccttctcctctcgacctccacaacaacagccaggcggggatgcgcgtgatgggttctttttcttctcctcttttcagcccttcctctgataaacgtttctggagcactctcaggagcaggatcgacgcgctcctcgatgctcgtcaatccgaa

SEQ ID NO: 90300 - DNA, 256 bp, Glycine max
ctctgtatagcttcattgctagattatttgcttgctctgcgaaaccataaccatgaggcaaagcagtaacgcagagactcgtttctctggcaccatttcatccccatccctcaaaaaatttcttcccagatcactctcttccatacaacaacccataacaaaccctaacatccgaaattcagatgcagagaacactcctcccaccgatcccaacatcctgatcaaccatgaacaatcgctgttgccttccacacaa

SEQ ID NO: 90301 - DNA, 273 bp, Glycine max
tctggatatggttgagaaactcccacagcagggtgtgtatttgttcaaaggtagttacaggattgttctgaactccttgacccaaaaatgtgagttgaaaagggcaaaggaattgttggggctaatgctaaggagggggtttcagccccactatgctacctcaaatgaattgttggtttgtctttgtaaggcagggatggttgatgatgctgctgtggcactgtttgacttggtggagatggggttccagccaggacttgagacttgggaagt

SEQ ID NO: 90302 - DNA, 271 bp, Glycine max
gttagtttcaagttttaatgtaggtggggctatcctgaagcaaaggagcttttgaactaagtaaactgttgggtatagaggtcacaccttcgcagtttgtttgttgcatgcacctgtctctgaaacagtcgcaagtgatgccatttcacattgttgccctaaattctgttgacattccaaatgttcttcccttgcccaaacctgattgctgtgcaggttttactgggtcattctccatttaaacaattgttcaagagatttgataacaatc

SEQ ID NO: 90303 - DNA, 265 bp, Glycine max
ctgatccttatttttgttgtgtggggtggggttagtaaatggtgttattatatattttaaattgtgtaaggaaattaacagtttatttatcataataaggaataatgtaaattgttggtttcttaattttgaatttatgcatttttgcacaagttccctgctttatataacttggatgtatattttaaggtagttcaccattggtagaaatctgctcaattccaattgcaatgaacttcattcatgcttggaaaaaatgataaaa

SEQ ID NO: 90304 - DNA, 273 bp, Glycine max
caacagtcaccggagcagagagagataaaagaagaaaaacaaaaaagaaaagacgcaaagaaaacccttgcttgcattgcattgcactgcagcacctcctccttgtgctccccaacccaccccctcatgccttgtcgccgaccagacccgacccgttgagctcctgcggaaactttgcccaaaagggtctccgaattcgtccatggccctcgatttccgaccttagagacccttcaaggtttcgccttttcttcttcgctttttccccctttt

SEQ ID NO: 90305 - DNA, 259 bp, Glycine max
gaggttcaccagtatcacctccgtaacaacactcatcctctttctcagcctctatacacacaacaaaaaacccaaaaacgtcaacaactttaccataagctgcggcactaccggacaatcttacgacggggaaaggacatggacgggggacacaggttcaacgttcttatctcatcaagacggcaccgtttccgctaatgcaacaacacaatctccttctaccaatcaagtgccctacaccgacgcactcttgtcccgt

SEQ ID NO: 90306 - DNA, 271 bp, Glycine max
gcaaatctcaactatgctgagtctaacagagtctccatattaacagtggacaaattttcaagaaggatggttcttcagtttatgggaattaatcacatgttatgttatgcttctcctgctttggctgcaccaattatgccagacatgaaggaacctgaagtcatacgcatgtaggactttgaagctacctagtggagtgagagttcaagatattgtagaaggggaaggaccagaagcacacgatggagatttggttacattcaattgtgta

SEQ ID NO: 90307 - DNA, 263 bp, Glycine max
cgaacatcgacggcccaggttggccagagttgatatcgtaattgggcagtgactgttgttcagtaattttagcgaaatggatcaagagttgtcttccatatttcagctggaatcaaggagattgttatggcttatcggcattacggttgctatggttttagcattccaatatttggaacttccttatggtggcattcaacgcattgtattctctgccaacaagataccaacatctgatagcattagatttcaagctgcagatc

SEQ ID NO: 90308 - DNA, 151 bp, Glycine max
ggaagaggcactaggttcatttcttgatatgttttttttcatttgttgttgttggttagtcgttatggcagttgaaattgacttgacgtgtctggaacaattattttatcctacagtcaatgagaaattgtgtgatttttgcggctatagt

SEQ ID NO: 90309 - DNA, 272 bp, Glycine max
atttgcaaactccacccaaccaaccaccttcttaattaataaccgtcgtcgtttcaatctcgttacacacctcaaaacgcagcggcacactcactagaatgcaagccgtttcgctctcacctttgtcgtttagggattcttccgacgagttcgctggaaagttcgaacacgatttcatggccaagctcaaaatcaacgaagagaaagtcgaaaacgaagatgagatagaagaagaagaagaagaggaagagtttagcttcgttctcacgaat

SEQ ID NO: 90310 - DNA, 167 bp, Glycine max
gtaaaacacgagtttgtgttagcatcaatgtggaatgtgttgaaagaacattcatgtgttattttagcatggtcatttatactttttgttatcaagtagagcaatattttctcgtttgtttgaaaaaataaaaaagggagattgtcgtgtatgacatcttattttat

SEQ ID NO: 90311 - DNA, 269 bp, Glycine max
cctcgagcgaatcggctcgagggctcgagcggctcgagatttcgcacagcgtgtccatacgtcagactcacacccgcaacgcaaaagaaatagctcagtctcattgagaaggagcaattgtggcccaaaatgttcggtgtcccaattggaattgaagagtgagagtgagagcaaaacgaagccctatccagcagaggcatcgaggaccataatggagttggctaaggtgggcacgctgtgtacgttgacccaagagggtttgccacttg

SEQ ID NO: 90312 - DNA, 223 bp, Glycine max
tcttctatccttgctacacaattggttatatttcttaaaggagtagtataaacactaaacaaattcagtttttgggcatggattttctctcatgtggatctggaccatgctgtcaagcagtggatatgaagttgaacttggttggcaaatgtttgaattcacgtcaagcaaggtttcccagtgttggaaatagaagcgggtcagtgagatttcatgacaataa

SEQ ID NO: 90313 - DNA, 184 bp, Glycine max
agaccggatggaaccggaggagatggtagtgtgtgaggttgtgaatggaaggtgcgagtgggggagcgtgaggaatgtgacggtgaatgatgtgagtcacatggggagaatggtgttttctggtggccatgtggggcttgaggatttgaagagggcggttaaggataattgtatgtttgtggag

SEQ ID NO: 90314 - DNA, 267 bp, Glycine max
ctcatttcttgcactagatctcgtgagccaatttgtctccttttcacaaaagtgttttttcttttgggggggtcttgaataggtttttgggtgaaggagtagtgttggtggctttgtatatcttttagtggataaggatacaacagcatgcggtggtggcttagtctctcagttgatgtataccgcaaagtgatttccttgaatctgtattgcaaagttattctgtaactcttaagtcccttttgatcaaaaacctttttcaatcat

SEQ ID NO: 90315 - DNA, 283 bp, Glycine max
tcggctcgatgtgagagagagtggtgcaagaggactaagcaaggctgtcctctcagcctcaaagaagaggggaaggtggggcccagaagtggaggaaagactccacaggctgggttggcggcaacgactgagcccatccctggttggcaatgtgattgatccttttctgaagagccaccactcccttgcacttggcttcttcaattgggcctctcagcaacccggtttctcccacacacccttcaccttccactcactcctcaagccgatctcccacaccaac

SEQ ID NO: 90316 - DNA, 265 bp, Glycine max
gcagaatcaagttcaaattaagagatagaaaagcattccaacctttaattggctcctggtcaccttgattagtccttttgctacttggccaagttggaggggtgctctcattactactgctgcagcaacaattaagaggagctgtttgtccagctacagtgaatcccatgtcatctaacaaaaaaaaaaaaaaaataaaaaaaaaaaaaataaaaaaaaaaagggggggcccccacattgaacactcgccccccggggaattttt

SEQ ID NO: 90317 - DNA, 257 bp, Glycine max
ctcgagccgctcgagccgattcggctcgagaacaacgaccatgaacactaatgacagcaacaaccaacgtttacctgtctctgccacatgcttccgtgccactcctccttcgtgctcaatgaatccatgccacacagtttttcagttataaactccctgaatcctcacaagggacgacggataagcgttgctgttccacccaagtttccaaacttccggagggaagcatctctgcaggggaatttggaggctattag

SEQ ID NO: 90318 - DNA, 252 bp, Glycine max
ctggatcaattccagaaagccttggacagttgacatcattacaaagactgtaagattctccagtgtttaactaacccataaaacacatatgaaggcaacaaatgagtatcacaatgtcttcatgcaggaacttaacagcaacctcctatctggaagggtcccagcaactgtaggaggaagactactctacagagctagcttcaagtatgtaatcaaatattaaactctagacaaattatagaatacgtaatt

SEQ ID NO: 90319 - DNA, 109 bp, Glycine max
gatccgtgttgctaacccacagtccctcgctcatccacgtctcttcccgcttcagatcttaaacgtctttcgctggtgcgtttttttctcttccgatccatttccacac

SEQ ID NO: 90320 - DNA, 249 bp, Glycine max
actcgagccgattcggctcgagggcttagtgaaattattataggcacctttttgactgggagtgcccacaatgatgagttctaaatagatgaacatggaaacactagaacaagaacaaatcgctctgtgggatacaggtatttgtgctgttctgtaattactaattagttgtttctagatatgcactatatcagtcacatgtctatatttgtcttacttatattatctgtattgacaatcagggtggaa

SEQ ID NO: 90321 - DNA, 248 bp, Glycine max
ctcgagccgattttatgttgagaaatttgagtgttttttttttgtccacccatgttttgttgacacaaatgagctttcaattcaagtggtttatcttatttattggaattttggtaacttttactcgcccgttattaccatattgaaaaattgaacttttcttttttactagacccatttttgtgaccttattttgctgttttttataataaaaaaatgatccatagtattttgttgaaaattctgtt

SEQ ID NO: 90322 - DNA, 259 bp, Glycine max
ctcagtttccaaaagcaactaggactggcattttgttcttggttctgctgtcttgtacttgcttcacttcagcagatacttataatccgcttgatccaaatgggaatatcactattaaatgggatgttatatcctggacccctgatggatatgtagtaagtatgttcttgtacgcatattacttattaatatgagtgtcaaaccatctattgtacattacgcatggtgttgaaagtttgtctgcagcttttctttccac

SEQ ID NO: 90323 - DNA, 263 bp, Glycine max
atttcgtttccaaaaaggtcttaacttcgaactctaaggtcacaaaagttaagaaagaagacaatgacgacgacgacttccccatcgggagaaggacctccaactccaaggaagtgaagaaaaagaagaacgtaataataaaggaggaagagaataagaataataagaagaagaaagataaaaaggtttatgatttacctggccagaaacgagatccacctgaggagaaagaccctcttaggattttctacgagactttattc

SEQ ID NO: 90324 - DNA, 261 bp, Glycine max
cactcactcattgctattgattgtctatcaaaaccatcatacaagagtttgaattttgcacctaatagactttcccatggtatacctctacacaaattacagtaaaattgctttaagctaagcattctcaaatataaaactgttgatgtttatgcctattgtctattgattgcaattttagtagatgtttgagtttatgtattaagatgcatggaaaatattttgacaacatcttctgtttggcggatatgtttgtgttag

SEQ ID NO: 90325 - DNA, 265 bp, Glycine max
atagaaccaaaaaagagaggatgaaagttgaagtagaaatcatttctagagaagacattaggccttcttctcccacaccctctcacctgcgagtcttcaatctttcccttttggatcacctcattccatcaccatatgctcacataatcctatactacacctcacccaacagtgacaaaacttacctctctgaagtccccaagaggttagaattgctgaaaaaatctttatcggagacactaacccaattctatcctcttggtgg

SEQ ID NO: 90326 - DNA, 277 bp, Glycine max
atcggagttctgctcgaggatcatgagttgcaaccgagtgtagtcgtcgttgttactgtcagtatcacaaaaccctctaaaaactctaagctgttggagacatatccttaatgttgattccgtttgaatggctccattgcgaactcaacaacatttgtaagtccctcttgagggcgaacaattacacgcattccttttgaagacccatctatcacaagaccccttttacgctacaaaaattgttaggctctatgcagccaacaacgacattaactct

SEQ ID NO: 90327 - DNA, 261 bp, Glycine max
  unsure (1)..(261): unsure at all n locations
aaacaagaaaaggtcgcaatccaaacaatctggacccaacctanacaacgttcttcttcttctcagcgtttcggaatcaaccaaccgctctctgaatcaatctcactctcttattcttcagcgagaactcatctctccgaatccacacgcgatcggatccacgtcgagtcgtctttcaaattcaaatttccctggcgatccgattgatctctcactctcgctcgctgtttcctccgatcaacattgcacgatcgtctcacg

SEQ ID NO: 90328 - DNA, 207 bp, Glycine max
ctcgaggttacacaatacttgttttgattcagaaaagaatacaaagctttgaattgatagattataccgaataagatgctgaactgactgctctgcaaataaacatttgcctttcacggcattatctttaggagtagtttcaaatgtcatcttttgtttttctgccgcaacgcaattgatgagtaataaaatcctgattccttgagt

SEQ ID NO: 90329 - DNA, 259 bp, Glycine max
ctttgtgataaggttgaacaatgctagggttgatcactttgagaccaaggttggaaaaaaaactagcatttcattcatgaatagtaacatcttgcatttgtgtgctagaaggggagggtgtttctgccacccttatggtgaccgtgttccgattgttatgtacatttgtcaagccttgcatttcatggactacactgtgtgcaatgcttctcacaaggctcctttgttggtgactgatcctaggtttgatgtgttgtgt

SEQ ID NO: 90330 - DNA, 260 bp, Glycine max
cctcgagccgaatcggctcgagcaagcctagctcctcatatcaactcactgatttatcttactctctccatcgttcgttcactcattcactctgggcgcgcgcacgtgctaggaaccatcgattcgagaatgggcaacgactgtgtgccgtcgacggcggcggcggaggtcatggcggtggtggccgttgagctcactgacgcctccagctggtggcacgacatcgacgactctccggcgtggcaggatcgtatcttcta

SEQ ID NO: 90331 - DNA, 256 bp, Glycine max
atttaatactgcaatgtttatgtttttaatttctttacatgtgccataagagacacgtattatcataaagttaatcgcaaaatacagaccaaaaaggaaactaaagatgaattgattctatttatgcattaattaactatgggtggtggagatataatttccgaagcttgacagctttaacctaattttaaccctcttaaagcagcacttgcaatgctagcttagattccaagataagaaacatcatcattaacta

SEQ ID NO: 90332 - DNA, 254 bp, Glycine max
ctagcacaaacgactgtatggcgtatctctcccattcctactatttcatctacttgactctctctctctctctctctctcacacacacacacacagagaaatgccctatttaacaacatccccagcctaatgcctttcccattctcttgtcctcttcaacttccaacacccactgacacattccctcaactctctcatgctcacggccactactcttatctctctcccctcctagttccattcattctcctcac

SEQ ID NO: 90333 - DNA, 256 bp, Glycine max
ctcgagccgctcgagccggtaatttttgttgtgtactagtaacgcatttgataaacctagtacttcatctgtaaactatttaaatctctcaccactaagcagactctgataagttaatctgtgtgtatatgtattctaggcagacggacggatctatttgagagagagtgggagcaactgccccactaaattttttatttttctttacatgatatatatgtgtggttataaattattttaaaatttaaatatagtt

SEQ ID NO: 90334 - DNA, 256 bp, Glycine max
cctcgagccgaatcggctcgagggcaaaacgccagacaaatactgacacttagtcatcaaaacgaagtcttgtttttctcacacccatctttctttccccaccccacttgtccccttctgtccctatctctctccacacttcttgggacactgtcgttgtcgttttcatctatgtcacttcctagctcccgctttcatttattatatgttgttgatttgtgtgttgctgaattcagaaacaaggcatggaggttaa

SEQ ID NO: 90335 - DNA, 280 bp, Glycine max
  unsure (1)..(280): unsure at all n locations
cggagaggctgtggagaacactatatacagtgttgcgtccaaaactaccagcgtaagggtgcagaaagcagttgatcctgaagtggctgcattgcttgatgatgacgatttgtcacggttgggatctgatgttgaggatttggaagaagactttgttgttcaggcgaatctccttgaagaggaagatgaagaagatgacgagaaggatcctatatgtaatgaaacgagtttttctgaggagtctgcgatacataganacgggacaatgcacacacactgc

SEQ ID NO: 90336 - DNA, 233 bp, Glycine max
taaaacctcgtttcttctcaatacaaaaaaaaaaaaatgctgaagaacctgtgtctaatagggttcacatggaagccatccggaatttgttttgaagaaggacttggcaatggtagggttcgctattaccaagggttgtaaccattaattgccttcccgtgtatggaacctagaattttccagttgtgggcctacccaaagtccatgggaggagtcttgcaagtccctaaaag

SEQ ID NO: 90337 - DNA, 275 bp, Glycine max
caagaatatactacagaatgaattctgcaatacccagagctagtgctcctacaaaggttcacatctttgtccacaactaacagataaccaaaagctaactcttttctctcccctctcccgctatacaaggcattatgccatatttgctctctcataaaccaattcctctctctaattccaattcggccccttcttatttctcctgttatatgttttccaaacccaaggcccatgattgagttggactggaccgactgaacaatggggcctgatag

SEQ ID NO: 90338 - DNA, 275 bp, Glycine max
ccttgatgtcgatgtttatgtttcttattaataatcacgttgagacccagataattaataagaaacataaacatcgacatcaacgtttttatagtaacggttccaacgcaataccttctacaactgtttttcgtcttcaaatgaaagatactttagatgaagaactatcaaagagtgaatggaaccttgcagagattgtatgcgaagattcgtgggccgcatacggaatccatgtactgaaagagaaaagtagcatggaggatattcgattcagt

SEQ ID NO: 90339 - DNA, 273 bp, Glycine max
ttcatatcatgtttgcaagtgacagttgtcacatgaagtggaagagtgcattctgtccatttagttgaagaaaatgacagtacttttttaattccaaggtagtgcatttctttgacagtaactttttaattccaaggtaatgcatttcttggatttggtaccataatctttgaggccttattcaatgacaaacttgtcgtaattttcaccccagcctatctgaattggctatcaaggttaatgtctgataagactatgcaggatatgtcacaa

SEQ ID NO: 90340 - DNA, 267 bp, Glycine max
tatacatggataacaagtctaccacaatccattggcaagctccagtatttggagaccttggatataggagacacaagtgcgtctgagatgccagaggagatcagtaagcttaaacagctacgtcatcttctggctgattataagtcgtcaattcaatcgaaggatattggaggcatgacatccctagaagagatacccccagtgtgtatagatgatgatggagtggtcattagatctgtaggaaagctaaagcagttacagggactg

SEQ ID NO: 90341 - DNA, 265 bp, Glycine max
aatttatctttctttctttctcaattaatagaactccaaaagtaaaattattactattatttatcgtaatgtaatgtactactattaaattataaatttatttttatatgcatatacacatactgagggagacactgtgactgtgataaagtaaataaaatttctgtggctttggattcttctggcaattcgtgctggccagctttacttggctatgggggcagcaatagcatagacccataaaataaaaattgaaacttggcat

SEQ ID NO: 90342 - DNA, 125 bp, Glycine max
cctccgcacaccagatcctttcctctctctgtctctcaccgatgaacgatttcgatggcctcttaaccaccgatttcgggttcaaaccccaaggcaaatcggcaccaatggcagcatccaaatcc

SEQ ID NO: 90343 - DNA, 260 bp, Glycine max
gtaactggcaaagacaccaacaccccttatctctctctgtccaattctgacctcaagttctgttggatcttgcatatagttaccgtttattgattcgcaaagatgaaggtcacagtggtttctcgaagtggaagagaagtggttaaaggtggcattgagctcagcgattctgctactgtagcagatttgcaggaggcaattcataagcgaaaattacagatagagataccgacattttaaaaaattcaagttaggacaaa

SEQ ID NO: 90344 - DNA, 258 bp, Glycine max
attcccttcacaccattctcactcgacagctttcacactctgagaaagcatggctgataacacattgatcagtactgctatctcagccttcgcatctctcataacttcctcaaaatccagatttgccatcgcagttcctctaactagatttggtgtcaccaatgtctcttctacacgcttttttattcgtgctgactggatgctaggccagatctagatctccttaccttgatggttcagcacctggtgcatttggat

SEQ ID NO: 90345 - DNA, 251 bp, Glycine max
gaaaaaaatgaagtaatcaccatttttcatatatgctagtagtttttaaggtcccaaggtttctttttacttgatgctgtgtttgtcaatttcggtctttattcttcaacagctacgttttaattgaatcattttttttcacttgtcttttggaatcagtacttctaagaaactgaggtggattcttctgattgttgttttgattgcaatgaatagtaatgattttgagagatataagattggttttgtag

SEQ ID NO: 90346 - DNA, 247 bp, Glycine max
gaagaggaagataatggaatagaaactttgaggagtggggaggtagaacggcaaaaggaggagagtggttgcatggaagaagaaagtattgggttgggaaaaagtttggttgtagaaaaggagggagaaattgaatgcgaggaggagcaagaggaaggtgaagaaattgaagctttgaggaatgaggaggtggaagacaaagagggtgtgggaacaagttcggttgcggagaattgtttgatgaaag

SEQ ID NO: 90347 - DNA, 264 bp, Glycine max
accggtaataatttttatcctcttctgttaaacttggtccatccatgtcaatttttttggatctcagtcaccgccgttccctttccatcgccaattaatcccccccctcaatttttacttccctctcatctgccatacatacacgtctctataaacatcatccagaaaaaggtgcattgcattgattgttttctttatcgaatatatatatatatatatatatttgcattgtaatttgtagggtttgtgagatgtcggatgcgc

SEQ ID NO: 90348 - DNA, 250 bp, Glycine max
atatctcactagtcacttccaagttacaccctcttgcttctaccttaatttctctcaagacacaaaacaggtctactatagatttagttggtgttcttcttacattggtttcatagagtgataatcaagaaggatgaagggttttgctgtgaaggttgaggaaggaagagaaggtacaaatggtgagctatctataggtcctgtatatcgcaacctcctctccaaaaatgaatttcctccactagatcct

SEQ ID NO: 90349 - DNA, 247 bp, Glycine max
cataccatggcaagctgatccatcagatatggagaaggtggaagatttcaaggttggagattgggtaagagtgaaagcttcggtgtcttctccaaaatatggatgggaggatgttaccaggactagtcattggggtaattcatagcttggaggaggatggcgatatgggtgttgctttttgtttcagaagtaagcccttttcttgctcagtcactgatatggagaaggttcctccatttgaggtggg

SEQ ID NO: 90350 - DNA, 237 bp, Glycine max
acataagcgtactagtcagaacgtgcattcaaatatgggcaaaaagaagagtctctaaaatctcacgaggacaaagaattaccaaacgtaaagcgaacgttgccaatggggactccaaccgatgggtcctcagaactgcagattcagaacatcgtaaacctcaaggacgtcacttctcaaggagaccatccaacgccggcagcagatgcagtctgtccagtgcgggctccagcaata

SEQ ID NO: 90351 - DNA, 112 bp, Glycine max
ggatccggaagtccaccttggtcagcatgatacgttctcatttcgtgtcctgttcgcagtctcagatacttcacagtaccagatcatccatggatggggccgctatgatgag

SEQ ID NO: 90352 - DNA, 190 bp, Glycine max
aacaacagcagacaactctctccggttcgtcgcagattccgagatctccgtcttcgtcgtcgcaaccttttctctccgtctccgtcaccgatcccgttaatctcggcaatggcgtccaagcctatatctcctaccgcgtcatcaccgaagtgttgcaatcgttcacttgcttacatttctctgcttttca

SEQ ID NO: 90353 - DNA, 244 bp, Glycine max
cttggataaccaagtgattgaacacaagcgttaatatgctaaagttaaggttgaatcaatcagatagtatcttatttttatctttggaagaaagaattattggtaagattttacttatctttcatttaaactttggattagtcaaaatcctttttcccagataaatcggagggttaagacaaaaaaattatctgtgttggatttcatattttctttaggagagttctcaaattaaaaacatgaa

SEQ ID NO: 90354 - DNA, 128 bp, Glycine max
cctctttccattttccttcgtttactcgctctttcgcagtttctcagtggatcagtcatcaccatcgcagcagtaagatgtggaaggaaccattcgggaaaaccgatttggatagcggttctcggcct

SEQ ID NO: 90355 - DNA, 122 bp, Glycine max
ctcgagccgttggcataattcaatcacaaataagttaggttatccagtagacatcatccctacatcattcacttgataacctaacttatttgtgattgaattattcatttggaataacacac

SEQ ID NO: 90356 - DNA, 252 bp, Glycine max
aaaggaagtataggagcaatggaactcatggtggtttggataatgtggaatatacctctgatagagaaattaggaggcgcttattaaagttgaacaagaaatctatggactcagagagtgaaacatctgatgatgatcttgataagtcttatgaagatgggaagagtgacagtcatactagaacctctgactctgaaagtgaccgagaagtacattcagaaagtctaagtagggagtcaagaggggatggat

SEQ ID NO: 90357 - DNA, 126 bp, Glycine max
aagagtctctgtgttgtgtctgtctgctgagtgctgagagacaatggagctgtgcactcgaaccttcgcaagtctcttgcttttcaagccgtcttcctcttcaaagcccctgtttcttcgtcctaa

SEQ ID NO: 90358 - DNA, 202 bp, Glycine max
gacatcgacgaataaaaattagggcgaactggtcataggtgtgtcatgtcagacagattctgcgtacacgaagagggaaggctgtgtgcgagacaatggcgatggagcaaggtgaatgcagggtttacaattccatgactcagcagaaagagatgtgctaaaccatagtcacctgtaaggtttccatgtacgtttgcggagt

SEQ ID NO: 90359 - DNA, 229 bp, Glycine max
  unsure (1)..(229): unsure at all n locations
ctcgagncgctcgagncgattcggctcgagtgttgtgacagnttgtatgattctttgagtgacgtggatgaccngagtgtgcaagctttggaacgtcatcgaagtcacgtacttcactggctactgatgacgtgactatagtgcaatcactgtctgcttacgctgagatgatagtgatagcacttgacgctctgaatgccgctgatggatcgagtacatcagcgatatc

SEQ ID NO: 90360 - DNA, 253 bp, Glycine max
gctcgtttcattttagggtttcgcgtcgcaaaatctcttttctgttgctctcaatcataatcttgttgtttttgctttaatcgtgttccagatgcgtgattttggaggccaaagaagctgaggacaaacatctactgttagtgcattctgaaaatcatgttaatctgattaagaacatcagctcaaagcagttcaattcgcggaggcataagattgcctcaaaattggattccatatattttaatgaaggttc

SEQ ID NO: 90361 - DNA, 256 bp, Glycine max
gttcatttccaaggggaaaaggagttctggtaagagcatccattggatcatgttcgccttctgtctcaagagcaggataagctaagtgatgacctatccatctcctcctacgagatgaatgatgttgcacccaaaagggaacctcacacagggataagcagacactggatatgaactcccatcttactgatcacccaattgttggacaagataatccttatgcttcagctggtgggcaagagtcctataacgatgc

SEQ ID NO: 90362 - DNA, 254 bp, Glycine max
ctttatacgttttggaattttcttggattttcgtttgatggggttggaggatactgaatttggtgaaataggtcgtggctttttctttggtggtttgaggttgagctaggtggtgattactatgtgtttgtgaatatgcatgacagagaaagagagaaaataattgatagattcagagagagaaggatgaaggagactgtgatagtgtcaattctggtttaggagtgtgtgtgaggttaaaacataattagaaa

SEQ ID NO: 90363 - DNA, 249 bp, Glycine max
atcaactggtcctcaataattgtaatatatgtccatataatgtcacatggtagaaactgtacacaattattgagcatatattacaatgtgttcaattcagaaaattgaatatatacactggatgttgaaattttttgaattcacatataagtgaagtgtattggaatttgccaatctcattgtcattgaagatactatggggaaacatattttatgattgtctgatgcacgtcctttttctttcaactg

SEQ ID NO: 90364 - DNA, 279 bp, Glycine max
gagacgtcgaagaccatctctgccgcactgaaactcttcgacgcaaagaaagagattctcaagaaagcctactacgatctccaaagtcactcctctcttctcgctccttccttctctctctcatggtcccacctcgacgcccacttcacctccctccacacctccctctcacaccgcttccacctccttcagtccctcgaatcccaacaacaatacccaccatcctctccctccaaatacctcagctttccaccctcccccaccgacccatcatcgcaa

SEQ ID NO: 90365 - DNA, 284 bp, Glycine max
ccaacaccggcacacccccgaacacttgttcgacacttgtttgacacttcttattaggtgtttggctcaaatattactttttgttggcttaaacacttaagccgtcacatttacacaactaatatactcgtaaaaacatagaaagttggttttaaaagatgaatataccatcaatttagattattttgttatatgttattcctatttcatttaactataatctctttgtttgtgtgtgtatgtggtgttcccatgtcgtatattttagacattataactgtgtt

SEQ ID NO: 90366 - DNA, 212 bp, Glycine max
ggcgactatggttgccggaaacaaatccggatgggaaagggtgtatgtagctgttcctaggatgactattgtcataacagaacggcgtttgaagcagtgacgtgttacatcagtacatcacatcacatcacgtaaatataggtaataagctcggaaaaagttttgtcgtttcacacccatctgtatcccgctaccatttccacacaacatac

SEQ ID NO: 90367 - DNA, 252 bp, Glycine max
ggaaaagatcgttactgttagagagtttctcacacttctgaatctggatccagcaaagctgcgcagtgtaataatttagagtttcttttacttgcaaattgttctgatagattatcattttgaaggattttagctaaaactttcattgggacagtttagttgttcactgtttgtgtgaactgtctaggcatttagattagctttgcacattatcaagtcagacacctcctaggtagtggatttataacttga

SEQ ID NO: 90368 - DNA, 256 bp, Glycine max
gacaaatgccaagcgaaaacgaaaagggattgttagtgtgagcagaaattaagacacttggcgcatccaccacgcccttagaaaccgaggacggaggaacgcagccaaccaactctcaactcccatcataccaaatccggaatacctaagtaacatcaaataaataccaaaccttcctaaggttttgaattggatgtaaatagtttgtactttgtagcataatctgcggttttctgaatttgctggtagaagatta

SEQ ID NO: 90369 - DNA, 234 bp, Glycine max
gttggaattgtgttaagatgaatggtctctaatttcaacaattcatcacaagtttcataacatccaaattagagaccattcatcttaacacaattccaacagaatcttagacgaatggtctctaatttcgatgttatgaaacttgtgatgaattgttgaaattgccccctctatttgatgaaaaaaaaaaaacaaaaaaaaaaaagaaaaaaaaaaagggggggccagcaaaat

SEQ ID NO: 90370 - DNA, 135 bp, Glycine max
tgcatatggccatggcatctacaactgcagttacactaatgttacatcttcactatctccacaatcgggttggagatgttcttgcagcgatggtctcgagggaaacccctacatacaagaaggctgtaaattaag

SEQ ID NO: 90371 - DNA, 136 bp, Glycine max
ctcgagcgattcggatcagcacgaaatgcatttcccggaaaacagaatgtggtgattactcctagaaaggtggccttaccagagcatgtggcactttagcaaacagttagtggtagtttatgttccaatcttgaat

SEQ ID NO: 90372 - DNA, 276 bp, Glycine max
gtgaacatctaccctagcggtgtgaactgaaccaacttcactgcaccagaaaggctttcaaccatctactccacttcttcacactctgtgtgtgtcctgactcctgatgttctgctttgttttctctttgacaaggaaaataacaatctcttcttaatggaaataagtattgcaaggtctcatctcgaaacacagggaatattcttttcaaatgtttcaagaacgataggatgggaaagcaccaagaaacttccatgtaatgtggcttcccagagt

SEQ ID NO: 90373 - DNA, 269 bp, Glycine max
attaagttggaccttggtctttctattgtagcttggaatggtcagtactgttgccatatatgattagttaatggagatgaaagaatggctacatacaaattgcaatgacatcagttggaagtcttcaaagtttttattatgtgaaagatgatcaatgttgtatgcatggtgtgtgtgattctcaatgattttgtgatcatttctaatgtcaataatgggatgatcagtttaatggcatttatggggtgttatgtccaggagggagacat

SEQ ID NO: 90374 - DNA, 265 bp, Glycine max
cctcgagccgaatcggctcgaggtttttttaatacatatgtgtttacctaatggggtgtgtacgagtctgtttcctatgattctgtctctaggtctgtagattagatcagaattgaatccaagtggtgcagaattcagagcagcatttggtgtccaaaagaagaggagtaataggagagaggtgataaaggtgtcaagaatggggatacctggtgttgatggagaattgaagaagattttgaacgctaacatggacgaattggtg

SEQ ID NO: 90375 - DNA, 256 bp, Glycine max
gagcaacaagaatcacacacagagcacaaggaatagtggcaattgccacaagatggcacatgcttgtgactgaagcatcttctgaatcaaagcaatgcaaagctcgagtgtcagaaggacttgctagtgacagtgattctgatgattcctccaacatacatgtgtcagtgaccccatcacaactttcttctttccaaaccagacaaactttagtgacgtatttacaacacaatcaaaggggaataacggtgtatgg

SEQ ID NO: 90376 - DNA, 278 bp, Glycine max
tcatttctcgcacgagtcttgtagtttaagcaagagcttacagatggtgcatcaggttcggatttttcgggatctgatgaatgagggcgtctttgacatcgtcactgatgtcttgcaaagtcaagacaagaagcttgttcttactggcacagatatcctcattctcttcttgaatcaggatcctaatcttctgcagtcttatgttgttcaacaggagggaattacacttcttgggctattggtaagtttttgtatgcaaatgaggtctcatcttcttt

SEQ ID NO: 90377 - DNA, 270 bp, Glycine max
cctcgagccgaatcgctcgatcggctcgaggaggaaatggttaaggatatgtcgtctgatttcaagttagacattttttctcagcatgatcctgaagaaccctggttagtcaccaccataacatcgaaaatgtttctagatgaaaaggctaattctgtacaaacaattcgttagcaaggaaagttgtcaatcaacaactttgccacaaatgcagagcgcagaactttgaatgatagatttctgaaagcaaataaagctacaattggtgat

SEQ ID NO: 90378 - DNA, 131 bp, Glycine max
ctttaatactataactaacatcccaacaccattcatggattggactagaggccacaccctccgccgcggctccaccgcggccgtctacatcggggagtcccaccggtccggtgaagtgtttgccgtgaagt

SEQ ID NO: 90379 - DNA, 257 bp, Glycine max
tctcgaaccgctcgagccgcgcgctggcgcgtctcccaactgcttcacgttccccatggtagtacagtcttgacccactgcgaacgctgccaaagaaggaggcgaggctcattgcgttgtagccaaacgcggctttaagtcgaacacgtttgtggggtgcgcgttgattcacatgtattcattgagagggggagtgtttgttgctgatgcttacaatgtgtctgctgaaatgcgcgacaagaacgtgttcgcttgga

SEQ ID NO: 90380 - DNA, 261 bp, Glycine max
caaactctcccaacaacaacaaaaataactaaccactttcttcttcacttcttctcagttctcacactcataaagcttattcttattattactactcgcaccctttcgttttgttttgttctcatgggttgaacttgaccccccgctgctgccactgcgacgccgtttctttgttaaatggagtgggacagcaattccgatctcagcgacgacgaggccgtttcgtttatgttaaacgacgactatgatgacgccgtcccc

SEQ ID NO: 90381 - DNA, 284 bp, Glycine max
caacacgatggggagaggcaaaggagggaaagagcatttccagcagaacagagagactgtgtggacatggaaacgttctaaatcagatcctattcctctctgcaatccctacgctactcaaagccccgctttcgatcactattacaaggagcagggaatcgctttcgataaaacatgtcctgtctagaaatggatatattgattgtcttacacatggcaaagtcgagcatgattcgtatttctggagtttaggaggaaatcatgccttcattgcttatgattat

SEQ ID NO: 90382 - DNA, 292 bp, Glycine max
cttcataaaaaatacagctagagagcacatgggaaccactatggactcaagcaaattttcttctttctcatattgcagttcaagaagaatagctgcaacaatcaatgtgccgaagattaaggtaaccaaagtctccactccaaggcctcccaacaaaaacttggtggcagaattgaattatctaaataattacatttcagccaccggcacaactcatgcaaaagagaatccttactgctccaatctcagcgccaagagttccacagcacctagaacacgcacaccaaattcc

SEQ ID NO: 90383 - DNA, 117 bp, Glycine max
cttcggctcgagcacaactccagccacttcttcttcagtttcaccgacacaatgcctttcatctccataattcagcgccaaaccgattacaccctctttggttccgccactcgcatc

SEQ ID NO: 90384 - DNA, 249 bp, Glycine max
gttgttactgtttaatgtatataacaattaaaaaccaaccttacacctttgtagattgtagagagcagagatgttaaaaggaaagagtaagttggtgatcaaaacgctagttcaattaaacatctctgctctctacaatctacaaaggtgtaaggttggtttttgattgttgttactgtttaatgtatataacaattttcatctgatgtcgttctaactggaatacaaaaagaaaaaagaaaaacaaaa

SEQ ID NO: 90385 - DNA, 283 bp, Glycine max
attttcttgtatttatcattttattgttacttagaaacttatgattctgattgatatgtaattccctaataatcagtattggttacatcataaggcatacccatgcaaccctgtgatcatctatgaatgttatgaaccactttaagcctgtgacattgttaacgtgagaaggcacatgatagatgggcgaagggtgtatgttagctgtcagttagttaggatagcaaggttaactaactgttagttagttaagaagctataaataatcaattagagggaagtt

SEQ ID NO: 90386 - DNA, 254 bp, Glycine max
aacagattcaagcacaaacagttctcgaagcaaggacaaagcatatataaaagcctcttcatcattatattggggttcttcaaagttcaaaccaagttcatttttgaacgaccacaacagattttcttgtatcaaacatatatggccacactagctacagttttcctcccttctaagcttaagccatcgcattcggggaaccaggtctctccattcacgcacaaaacaccactctggaagaaagttaaccaacc

SEQ ID NO: 90387 - DNA, 255 bp, Glycine max
ctatgaatggatatctctggttgtatgaaaggaatgtgctcagaaccattgtatcctctcctatcaagggattgcaagacattgagtttaatcaagttttgtaagttttgatctttagacttgcctaatattttaaaatcattggatgaactaatgttgagtgtttcaaatttcagaaacattacttatcttaatcctcgtaaacatagacatattccaaaagctccggatggtgtactaatgccaaaaaagata

SEQ ID NO: 90388 - DNA, 251 bp, Glycine max
gtccgcgacacatactcgctggtgattgtactctctttctctcgctcacacatggcttgtctatagcctccatggttctcttcattgcgcgtcgtgtccccggtaatactcgcagcaggcttgtcgtcttcaacaacgtagaattccggtatagcaggtgatgttggcggtggtacagttaaggcgggatttactgagcgcgcataccgggaggttccataggtcgacggatggtttgatcacttggagtt

SEQ ID NO: 90389 - DNA, 249 bp, Glycine max
gggaagtttcctagaagctcaactcacttcacaattatattcgattgcttctgttagattaaaattagtttatcgcactcacatcaccttttccttattaccaacaataaggagtaaaaaaatccccctttcccctttgaacttttcattactgtgtcgctttagccaatttcaacgtttgagctttgcaggcattcattcattagtatcataatctggacattcaactagggtttgattcgtagtgtg

SEQ ID NO: 90390 - DNA, 271 bp, Glycine max
accagtttcaccgcacgaatatcttgttgtttggagcgatccgagaaaaactctgtaaacatgttggtttaccaggacctccttacaggtaaactaaactaatctctatttctttcgtcgtagcttttgcttgtagatctattgccatcggttttggtttcgcttctgtgtttagatctgtatcgattgcgcctctgattttgattttagagtattgaactttcgtcgatgtttggatctggcatttttttcgatgtaatttgattcattg

SEQ ID NO: 90391 - DNA, 270 bp, Glycine max
gaactccaacacagttccgcagtcgacctctggcgctggcttctcttctccaactcagtgtcgagaataagaagttcagcacccatccatcttctatcccttatatatatcactgtatcggcgcgttccatagcttgaactaaactgctgttccgaacctccgtgcgtagattcacacgtgcaatctccgctacacactcttctctccgttcggtaacgattggcatcagaagatgtcgggcggtttctttcgaggcacatcggcggatc

SEQ ID NO: 90392 - DNA, 264 bp, Glycine max
cttcccatcttaatcccacctatgtcagcccgctctcttaattggccttgctctcccaatggttataaactgatctcagctatcggtgaaggcagtctaggaactgtttggaaagcaaaagtcaaggaaggaaaatatgaaggcacatttgttgccatcaagaaaatcaatttggaaaaatgtgctgataacaaaatcgaagacatcagaaagtcgattcttctcgctaatcttttacaacaccccaatatcctcagctcaaaa

SEQ ID NO: 90393 - DNA, 271 bp, Glycine max
atttaaatattcagaaacagctgatgatacatgcttaaatgaaacatgtaaatcattagatgcatcctgtgtgccagaatcaacgtttgttcctgagactgaaattgaaaatggaacggagtcaatttctggagcagtgtcttctggccctcttgttggtcctcaggatcaggaagtttctgtgaataatgagttgaaaccattctgtgttcgaaggcgcttaacaaaattgtcgcaaaatccagatttgttggatactgaaatttcagac

SEQ ID NO: 90394 - DNA, 264 bp, Glycine max
atcattctcttattctttgcctgttcctaattttctagggtttcctttctaatctcctctttacaatcctattgtattcccccttcgtattttttcgattttatcttcttcttccatctccaatctccatccgatctctcgcgcgttcttcaattttgaattctcggggattcgttttgttttgggtttagggttctattaaacaaaaaaatacaaaaaaaactgttgcaaagggtggattagggttttcccttgtgattcacg

SEQ ID NO: 90395 - DNA, 268 bp, Glycine max
atctcgatagtgatcaaaatagtactatcaggagttatagtgttatacataggatctgcaaacaaatcaatcaaattccaaatccattgatgagtacaaatctatgatcaaacagtttgatttgaatggggatggtgtcctaagctttgaagaattcagaattatgatgcagtgaggcatgtatatataaatgttgattctgtatagtgtgtatttgaaatttgattgatttgtttgcacatcctatgtataacactataactcctga

SEQ ID NO: 90396 - DNA, 264 bp, Glycine max
attggaagtaactgagaattgatttgtagttcctccttttcactctttagctggagagtgtgtcgttttgcctgtcattgtagggaaccaggaatggaatggcttagaagaaatgtatgtgaaaacggcttgtggtttcacccatagcctgcggaaaatgctttattgtgtttcggatatcaatttaaagttcacagttatgcaaataaccagtgcattagtgaatggcagcgctcttcgtttccacttacctagatttctatg

SEQ ID NO: 90397 - DNA, 264 bp, Glycine max
ctcaatgtactgatcaaagtcttttctctctcttcaaactcaatcttttcattcctcttcatgtggatctgtacttggtttttttccttccatttttattaatcaaatacattcaatttcagtttcatgtcatttctgaaacctctttctgggttttcttcccttctcttgtttttttcctttctgggatgacaattttcgttttgagattcctggttgtggattttttctcagaaatgcgtaaagttttcttctttatgactg

SEQ ID NO: 90398 - DNA, 262 bp, Glycine max
  unsure (1)..(262): unsure at all n locations
atctctcattatccctctctgtttcttttcttcaactcttccaagggaactgagagacctagagagagtcatggacgctgttcttcaaaccagaggccttctttctcttcccacaaaccccatcactcgaatctcactcttgnanccttcacatggttcaaggcacagacttttctctccaaagccaaaaaaacctttctgggtcttctctttcctctaatgggttccccaaactctcaccaacagccaatgtctttgccca

SEQ ID NO: 90399 - DNA, 263 bp, Glycine max
aagttaataaacaaagaatatagtaaaaaatgaaaaggtccaattttttatctcatgtttatctttgattgcacaataactttccttttgctcattgtcatatttcttcctcttagcaacaaaaaaaaaaatcttaaacaatctcttccatcttcaatgtctacctctacctttctcatttctctgcttgttttcatcacaaaccttacccttcttcttcttctaacctcagcatcatgcacagagttcatctacaacaccaa

SEQ ID NO: 90400 - DNA, 270 bp, Glycine max
  unsure (1)..(270): unsure at all n locations
gacgaggttccagtcggagtcacaaccacagagcgtaattctactcacgaaaatcaaaggttacgaaaccattcaaattaaacaaatcattcttcgcgttcccctccaatctcgatcgaagaatcgttttctctgcattttcagaattcactcgagctttgctcgcagacctcaccaacggacgctcaccgctcattctcatcgatcgcttcagaagctactgcaccctttccaactccaactgcttttgtngctccgatttgccgtgcg

SEQ ID NO: 90401 - DNA, 276 bp, Glycine max
gcaggttagagatgatgggaactggatgaaacacactgtggggtaagtcatgtttaaatatacagttatttagtttgctatttacaaaagcaggcacttgagtagtagagttgaagttgagctttttatttctattttctagtaggaaccttgatccttttgggtaatttggtttgatggaaaggaatgggggtgggtatgaaatggaaatggaatacttattcctatgctttgtttgtataggaatgagatgatgactcttttccagtttcatat

SEQ ID NO: 90402 - DNA, 279 bp, Glycine max
ctttcacccgaacagaattcccgcattgcagtttcgccggatgaactcgagttcgaggaagacctcgtgattcgccggccggtgacggatttttccgccgaatactccggcgaggaggaggaagaagagaaggagacagaggagaaagaagaagaagatgacccgaagcttcggcgatcgacgaggggctcgcgagatttgcgaagaagatgccgatgtttgagccagagagggtggagtccaaagagaggccactcgcaattaatttggacttggcgt

SEQ ID NO: 90403 - DNA, 191 bp, Glycine max
gttctcaaggcgtcgtaacatcctcgtcactctcacacatcacacaacaatggcttctcttcattcttctttcctccttacatcaaattttctttccctcacaaacccatcaagttcttccactcacgttctctttcccatgagagtctccacgagccacttgcggacccttcttcttaacacacgacacg

SEQ ID NO: 90404 - DNA, 269 bp, Glycine max
cactctctctctctctttctttaactctcttactctctctctctagaatgcctctattctcctctgtcggtcacacagcgatcgaaagatcatagagactagaaagcattcataggcgccaatagcgtgtgtgtgtgtgtgtgagagagagagagagagagagtacacaaagcagagagacaagtctgtgtctttgcactcatccattttttgggggagacagatctgattcctcaccataagtgacatcgctttgccttgcttctcac

SEQ ID NO: 90405 - DNA, 286 bp, Glycine max
tttgattgctaccgttacaaaaactttgtcttttagtccctactactcttgaaatatcttttaatctttgtgcaataccatttttattctcttttagtttttacacgtatcatattagtgcatgcttggattaaagtttacagacttgagtttgcaaaagcaacccaagccttgcctttgcaaaacatagtttccaggcaaaattctattgtgcaaacgtacttttgaaggtaatcaaacatgtcttgtcaccgaggtactctccaaaattacgtttactgttata

SEQ ID NO: 90406 - DNA, 281 bp, Glycine max
agttgttccagattggcatcaaaagtaagaaggtgcacaattcgaccttctccactataatttgcaatgacatatatcaaacagtgataccaactaggagtgacatgcagcaaattcacactgcaaaattcacaattaagagtttcattgttgaaggtggaagagaatttccatgaagaaaaaccaacaacaacaatgaaagaactactacaatgatcaacagcacgaaagacactgattttccactaaaacaagaaggcctttcttcaagtgatcatgag

SEQ ID NO: 90407 - DNA, 284 bp, Glycine max
gcttacaaagaattggaaatgaagaggaaaggttacaagaaaagactagatgatttgcaaactgcccttcgcaagcatctcgaacaaattcaggcagatttagtggatcaagaaaagctacaggctacgttggatgatgaacatcttaatgctgcttgttgactgaaaaaagcctgtgaaatggttgctctgcttgaagcacaactaaaggagatgaatccaaatcttgattcaatttcagaatatcgaaagaaggtatcttcatacaatgagcgagttgaaga

SEQ ID NO: 90408 - DNA, 252 bp, Glycine max
ctcgagccgaaaacataaaaaccttgtgggaagctgccctccatagactttcaataaggggctagatcttgttcttatcagaagtgcaagtgttacttcatatagttgtagctaatttcattgtaattgtgatgtaatataagtggttgggtccgcaactatgtaattttcttgtctggtatacaccagtattttgtgcaagtgttacttttgtttatatatatatatatacagcctaccgtctgtgtgtat

SEQ ID NO: 90409 - DNA, 256 bp, Glycine max
ctgactctgagcatgcaattggccttggtctcattgcattctctgggaaaatgacgaacaagggcaaaggaaaaggcaaggaggtcgccggaaaaggttctgccggcaagcgcaagggcgtcttccaggatgacaagaccggtagtggctgcaagagaaacaaccgaagtgtccttcagttcttcgaagacgccgctgacgttgaagagagcgatttcagtgatttcagcgacgacgacgacagcgatttcgattt

SEQ ID NO: 90410 - DNA, 258 bp, Glycine max
acaagacatggcatcactgtgtctaaactcattaccagtcccaccatcttctcttcctcgcaaaccaactgacacttctctttcttcttatccttctttgcttcttcataacaacaacaacaatcttagtgacttgaaacccattgttgtcagtggagaccccccaacttttgtttctgctccgggtcgcagaattcttgctggtttgcttttcttattccaactttgtttttgtggcatctgtttggttttgaatat

SEQ ID NO: 90411 - DNA, 271 bp, Glycine max
ggcgagtgagtgagtgagtgagtaagcaagcatatggcgagtaccttctgcttactccactctcccctctatcaattcccatcttcatcttcttcttcttctgggcccataaaattgcgagcttccacaacatcttgcttgcggcagcaagacaaagagccactccgcaacagaagaaccgttcttttgaccagcatcgctcttcttccgtttcgccgtttgaagcgggccccagctctcgaatccccacctccacctccaccccctacag

SEQ ID NO: 90412 - DNA, 275 bp, Glycine max
atttcttctcatcttctttttcttccctttaaaattattattccgtgcaaactcaacaacaacttcatcaccaacacgaagaacaagattagcgttatgggtctcttcctttctaggaatttggcttgcaaattcatatacccttttcttttttccaataaggtttcaaaggatttgttccccaagcagttggagaacatgatatctctggtctctcctcgtactggcaggcatttgcagcgctatgacaaaggctgtcgccaagttgtgggatg

SEQ ID NO: 90413 - DNA, 269 bp, Glycine max
ctcctctataaagaattcctcttcctatcaagtgtctattcaaagtctccaatattcctaaacacttttcctaaacataaaagccttatttccaacactcactctattttcagggtttaatgctactatggacatctatatcagcttcaacagatatagtggtctatgcagggatattcctccttgcattagggaaaagtggtcaaaagctttcagaaaatttttacaaatatcagttgcaagagaaaattaaagagaaaaaggaacac

SEQ ID NO: 90414 - DNA, 259 bp, Glycine max
cttgtttgcaggtcttttgtgaattttattgggaattagatgaacttgaggtaatgaattaactctgtgctgattgtagtttagaacatgtcagattaagtcagctagtcgttgcaattttaaaatcattgtcatcctttttaaattattgatgatgcttgacgttattttgcaggaaatttaagggaccatttggtatgagaaaatatatatatatactctctctacttttaattacaaaatgctaccttgttttcat

SEQ ID NO: 90415 - DNA, 258 bp, Glycine max
actaaactggtaaacatttgtcgtagtggttgaaaagcattttctcttactttcctatatcccatgctgaccaattacaagcttcaccatgttcagttgttcacatagatagcttcagttgttttagtagagtaactagtttttacttaatttgacttttgtcatgtgctgaatttcacttaaatgaagttaatggatttcagattgtttgtatgctaggtatgaagttgacacagatgcatttctttctgttttagc

SEQ ID NO: 90416 - DNA, 255 bp, Glycine max
gcagcatcagcagaagcagaagaagcagatgttagagccatggacataaccccaacaacaacgatcatcaacaccagcaccactctcagtgcaacaaaatccccggaacatgaaacataaacaccgaccaggatcaccacccccatcactcccacaacgacaaaaacctcatctttctcgaatggtgtcctcaaacgccaccaccaccctatgcctgcggtggttacctacaaagaatgcctcaaaaaccacgcc

SEQ ID NO: 90417 - DNA, 249 bp, Glycine max
ttcagaggcaatcacatccccatcctggactgaaaatggcagaacaacttctaattcctttgccttgcctgagtcagatgacaggccaccaagaaagaaatttaatacatctacttcttcaactaaggaatgtatagattcagaaaactttccttccttcattggtgatccaatacctgatgatgaagctcagaaaagatggggatggcgttatgaattaaaggttgttgacctgattctttcagtatg

SEQ ID NO: 90418 - DNA, 245 bp, Glycine max
gtcagacaaactagctgatgttgtccctgaggctttggttctcttctttagccactcacaacaccctttcatgttcttcgcgaagatccttgtttttggttcctcatcaaatactcaacaacaacaccctaataagcaacacctccaaaattcttagttgctgctatgagaaacccattaagcaaaatgggattttttcagttgccagtgacctccaatcttcttctttttcttcttccttcccc

SEQ ID NO: 90419 - DNA, 173 bp, Glycine max
aggtactctacactttcttctaggtagagctcgtgaaacaaccactcttcaactactctcactcacattgcgcttctcacttcactttttttcttcttctcacttagatccaaggcgtttagtttaaaacgcggcgtttagtagttttaagtccagttccttaactcgctgct

SEQ ID NO: 90420 - DNA, 199 bp, Glycine max
ttcaaattaaacttaaggtgtttactttgaatacaaccaatgcagttcagtgaatacaaactaggcacttcatgcaaagtctaatagtaatagctagcattggttgtattcaaagtaaactccttaagtttaattttgagatgactcttaattttaattgtttggaaaaaaaaaaaaaaaaaagggggggccgccgatt

SEQ ID NO: 90421 - DNA, 264 bp, Glycine max
cctcgagccgattcggctcgaggccacgaccacctgggaatgtcaacgaacgaatggaatgtcataaaaccaaccaatagcaccacaatctttcttgcacgccattggtgatcacttccgatagctctcacaatcctatggcggagaacaacaacaaccaccaccttgaaaccgccaccagaaggcttgcctctgtgaccaaccacctcactccttcttcttatcacaacgcacccggccaactcgccccgtgcctcacttccg

SEQ ID NO: 90422 - DNA, 255 bp, Glycine max
ctagcatttttagcctgggctgtgatgggaagatttttgagtggagtttgcaaaatcaaggtctaatcctgtggtcaagagactgtagtaggttctgttaccccctcaatgattcaaaatattgcagacatgagatggcattagatgcaaatgggaggagactcttggtaacatccagttcatttagagcacccatataccaggttcatggtcatttgagtggatggagaacacttccgcatggtgctcctatta

SEQ ID NO: 90423 - DNA, 254 bp, Glycine max
  unsure (1)..(254): unsure at all n locations
tgatctagagngtcgatagtcattgtagtctactttatctacaaaatatctggactgacggagtagaaacaactgcaccacaaggggattggggataatttcaagtcagtcttcttctctatcttccgtttttactgagaaagtaacaaatgtgagtcgctaagcgtatcaaactcgtgaacacagttagttaattagttttctcattctcattcaaagtacgtctagtgtttgcaaaaatggaagaagaaagt

SEQ ID NO: 90424 - DNA, 250 bp, Glycine max
gtttttagtttaggtgaggaaacaagagaaatccaaatcctattgacacgtgttttacgtgaggagatgctaggagaaaaaacgaagcactgagagaactaagagattggattgtaagatgaatagtaagagatttaccaatcttcttccttcttcttctgtttcctatgctctcccacccattgttcttcttgccttttgcattttcttttactatctctcagttacttcatcaccagaaaatcacctt

SEQ ID NO: 90425 - DNA, 249 bp, Glycine max
ctcttccattctctccctctcaataacttgcttgtagtctaaaacctcatagtcacatacctgcgcttcttttctcacccctcacaaaacagaacactctgttttccacttctttattcttctttttatccacctttgaacatctcaacaagtcaccacatggctgcaattgtgcaccacggattgcagtcacaccttgagtcccaacacactgagtcaatagcactcaaactgaggctcccttcctca

SEQ ID NO: 90426 - DNA, 246 bp, Glycine max
gaatggtcaagggatctgtgaaactgttgagaagtagaagagaacacctaaagcaaaccaattttatcgtaactcagagttcttgcttgcgaaggacaaatttccgtcaggagagagtaacaagaagtcgaaattaaattggaagaagcaaggtgggggagaaatgggacatggttttgggatgggatctaaatttttcaaaagctgtagttcactgcttgaaaaattgatgagacacaagcatgg

SEQ ID NO: 90427 - DNA, 272 bp, Glycine max
taagactaaagaaaagatagagtcttccacagatgtcctgaagggagtactaaaacctgtgcttgatgatgaaggagagattccatggcctcccagagatcgtcaggcactaacattgatgaaaaaggaaataagtcaaagggagcaagaaggacagctagatgaagggttccttgctgaagttaatgcacagctacgacaagcaagggaagatggtgataaaccggggcttgaggctatgctgcaaaggtgttgcagctttatgcttccaa

SEQ ID NO: 90428 - DNA, 270 bp, Glycine max
gagattttcatggtcttcattcacagtgcagcctcttcttaggagtagctccttctcttccagttttgtgggaatttgtaacagaaagacgagcaagcggttaaagtatcgaattctccaattcatgccccttcacctccttcttcttcttcttcttgctcctataaccgtcctcctccatgtctcgctcatgcttctcgtaatttcaagtttcctctgctgttgccacaggcaatccgtacctctcaaaagatgtatcgctgctctgga

SEQ ID NO: 90429 - DNA, 155 bp, Glycine max
gtcggcgcctccgcccacagctgccgacgaagaagaagacgacgacgacgccgagatgattggcccgcccccgcctccgccgatcgcgtcggagtccgaagacgattcggatcaagatgaggtaggaacccgcttccggattcccctcagcaacg

SEQ ID NO: 90430 - DNA, 266 bp, Glycine max
tgctaccaagtaggacgctcactttcatacttgctctcctctggtttgaggaaaggatcattcttgacgaagatgacgtttgccgcggcgatggcgacgactacgccgccgagaatggcgaccgggccggtaaggagactccacttgctatagatcatcttcttcctctgattctctcctcaaaccagaggagaggtcgtatgaaaatgaacctgctaccaagtaggagacaagagacaacagagtttgcgctctgatgtctttta

SEQ ID NO: 90431 - DNA, 262 bp, Glycine max
ctcgagtggcaaccctgaccttctctcaccggttcaccctctaagtttctcactctctttctccctagtcctccctgttcttgttcagtcttgagactccattatcaaaactcatattcaagaactttaaaaaatggagctaggttaatagaggtccaaggccaaacttaccttaaggtttgaactgacagactacaatacactcttcacttatacaatccatgattgtgttacaccctgtgcactccttccttcttgcact

SEQ ID NO: 90432 - DNA, 273 bp, Glycine max
  unsure (1)..(273): unsure at all n locations
caaggatgaagttgagaaatcttagttttcactgccagcggctaaggattcttctgacataggactggagaatccttagctgctggcagtgaaaacaaggatgacgttgaaaaatctttgcatttatcaaaccaaattgataatgtaatacacatcctcattgagaggggggaatttgaaactggtattcaatggacagnagcttcagtgaaaagagtttcacagggaaaaaggaagttactagtcaatggatcagaagatctcttatatagt

SEQ ID NO: 90433 - DNA, 266 bp, Glycine max
cctcgagccgaatcggctcgagattaaataactaattattttaatactgcatgataagtcgaacagctggctccaaagtacatactaaaataacttaaaaatcgaaataaggatactcaggtcaaataaaattattatatacgataaaatctgtatttaatgcaattatatatagagaattagaactcaagtcaatttacttgaacacttaatagcattccaaatttgatttgctctatgacaatcacgtgacatctaaagaatgt

SEQ ID NO: 90434 - DNA, 172 bp, Glycine max
cacggggtttgtttgaggttttctgttcgtttcatttcatttggtcgcacagtgctgttggccactgtctctctttctctttcgcgcttcaactttcgtttatgcaccgattggtctaaatggttggatgattttgcggtacagtacagtccatgttaggtcttggttactt

SEQ ID NO: 90435 - DNA, 266 bp, Glycine max
cttttcgctctctcattcaaaccattcgatctcatcatcgccatcatctcctcaaactgtaagtatacctacaaatcactgtaaatctccattaccactctcttagttattaacttagaatcttccctttctagttctaaattataatcattctttttttatatttccccccccccatatggttatatatattattgggttgatatgaagaagattaatgaaatttaccggtacaagacagaagagtattctactgatgctgtaaa

SEQ ID NO: 90436 - DNA, 294 bp, Glycine max
gaagacgttagcgcgctaacgacacaacaatcctaacataaaccctaaaccctccacaaggtgctgcatttctcggtgcaaaatcatggcgaaatcatcaaaacgtagcgtcggaaccagcaccaccgacaagaagaagaagaagagcaagaagttcggtccagaaggcgtggccatgaaagtgaaagccaacaacaacgccactgcctccaaccccttcgagtcaatttggtcgcggaggaaattcgaggtgctagggcagaagcggaagggcgaggcgcggcgcatggggct

SEQ ID NO: 90437 - DNA, 291 bp, Glycine max
ccaagttcatcgttactcatggcttgtaacgtaacattcgtgtttcaagattaatcaggactataataatagtttgcccactattaaattcttgaatgaaaacaaggcgattgtaacgtctatataaagcaaattacaagtacaagtgagaagtgtcctttagtctgtgaaagagacaactacaacaatggccacttcactaaccctattcaaaacaatctttgttttcttaattatcttcactctcctcacaccccaagccacggctgattgtgaagccgaatccagaaa

SEQ ID NO: 90438 - DNA, 279 bp, Glycine max
ttcaggatgaggataagccttttcctgagtttccctccttcatccccttccatggcagcaccttcactctcctccgctctcaactctctctcctccccctccctctctctctccttctccacctcctcccgccgcttctctctcctccctccaccctcacaccaaccctccaaacccctcttcctcaccctcaaatccaaaccctccgacgacattgacacatcgttcttcgacaacatcaacccgcaagacgacatcacattcaatcccccggagccc

SEQ ID NO: 90439 - DNA, 190 bp, Glycine max
caactactcgactactctctctcacttttctgggttctcgctgagtccttagctacagatccgcatatatgaagatcattattctggggtactcttctctggctttcaacttgtgaggcggcttctgcggttccctttaactaatcatggatgatggttcaagatataggactcaattccacacatcata

SEQ ID NO: 90440 - DNA, 250 bp, Glycine max
cttcattggctccctctacatttctcatcccctcatcatcattctctggctgcgtcactatccgaatatccgaatttcctcggctcagagcctcagcggtgagaccaaggatgatcttcactgagcatcgccgaagacgcagatccacgccagtatcaaggagagtccagtacttggaggctctcacaagtaggggtgcaagctagatcgacacttgaacactcaagccacgatggagttgactctggct

SEQ ID NO: 90441 - DNA, 271 bp, Glycine max
  unsure (1)..(271): unsure at all n locations
tctcgaccgaatcggctcgaggagttttaccatgcctcgtgttcccacgttcagaatcaacacctttttgccttctctatcttcttctcttcctcctcccaacccttttttattataaactatagacaaaagggtatgctgttgttgcagctgcactgattcattccacaccctacaaaaattacacncnctctcntggtttgttttgtgtgtgtgtgtttttgtgtatgagtccatgataccaacttatcgttactcagtgtcttcacct

SEQ ID NO: 90442 - DNA, 286 bp, Glycine max
ctcgaggttcaaaatgtgattaattacaagcgtcttaactttggagaaatatgagatcatggggcatacattatggaatcaggcgagaaaccacatcaaaacgatgacaaaaataatcatggagcataaaaatatggagtaagacgaaaaatcacatcaaagcgatgacaacaatatgatcgcaagtaatttctaataaaatggcagagtattttgtcgataattaaacacagttatgaaaatacaagattaaatgtgacttttggtcttttgtattttaatgttt

SEQ ID NO: 90443 - DNA, 308 bp, Glycine max
tcgcatgcagcggatccggctccggctcgatctcaatccgattcggctcgagtattgcaagcgttgtttcgggaacggtgcttagaccccgactcaattacaccacgcttctaaattctgagaatcgtattcgtaagatcgaagcaatagcctttttctctgacgccactggtttcgatcccacacccacaaacgcaaaccctccatcctttgaatgttcttgcgttttcctttcactacctcattcctaactcacacacacacaacgggtgatatcaatgtcgactcctgctaggaagaggctcatg

SEQ ID NO: 90444 - DNA, 266 bp, Glycine max
ggaccacgttgttggattcattcacaatgggtttgttgagcatttgagaggctttgggaatgtgttcattttccccaaagataaatataatggaggcctctacggagactttgtttctttgcatccaatgctaaagacagctgaggaaagaaccagtgcagttggatatgtagtagaacgtttgggagaggagcatattccagggatacggaatgagctttaccctgtgatatcatcatttggtgcacagattttcttttcattag

SEQ ID NO: 90445 - DNA, 276 bp, Glycine max
cgcaaaagcaacaactggcatcatcatcatctcttgtgaattgtgatctccgaatccgaacacaacacatcataagcttcagaatcttgactctctctcacttctcacgacccttcaaggactctgtcctgttcgatctctcactctctctctacttcgtacatcgagtgtcttccacaaatcagatgacacaaaaggaacaaattcctctaactactcccagtgctcaagttgtcggcaacgcctccgtggcgctctattatcacattctgcacc

SEQ ID NO: 90446 - DNA, 257 bp, Glycine max
  unsure (1)..(257): unsure at all n locations
ctttggtgtttgggtggcaaaatcagagagagaatagcaataaccgaggaaaacggaagtgatgatattgagaagcctggaggcatttgtgcctattattaaagcaggatggaggttttctaagatctactgttttatacacgttacccaaacctatttgatcgcccctgctgtgatctatggtcctagcatgcttcctactatcgatttganaacagctgtgttcttaatggaaaagatctcaccccggtttggta

SEQ ID NO: 90447 - DNA, 258 bp, Glycine max
  unsure (1)..(258): unsure at all n locations
attctgccatgtttaattcatgatatctgaaatcatattgaaaatatggtcatgactgtccatcatttcaataagtttcattcataactaatgatgtatttgggatgnggccaatttaaaatacttgaaatgggtagtttcagtcaaattagatgaaatatcatacatagccatcagttaagttggggttggggttcaaatatagtgtcattcttatttaggggtgaatgttcatgctaataattaatttctgaaata

SEQ ID NO: 90448 - DNA, 258 bp, Glycine max
ggttcgagttgtttgttagatcggacatgtaattggcttgataaaaatcggttggcttgatcgattttagatataattgatgactcacttaaaccggatgatcatataagaaaactacaaagatacccttgatgcaacaaggttattgcttggagtttgtcgttgcaaagtagctgcaccatcgtcagcacatgtgttcgtcaatcataggaaagctataatagagaacgagtggaagaagaaactagaataagagac

SEQ ID NO: 90449 - DNA, 260 bp, Glycine max
gtaaacggttacgactggattaggggacgcgaagaggaggaggtgttgagctttgaataaggtgaagtcaacggcagccattacctcattttcttccgattgcgttggcaggtgcgtaatgcgcacattgcgtacaccagacgggatgtcaaccaatcacacgcgactctgtcagtctcgcacactcaaaaccttccttccccgaacaacaaccaccgttttcttgcattccacttctcaccatgtccttgatgcccaat

SEQ ID NO: 90450 - DNA, 128 bp, Glycine max
ctcgagccgttaagatatccccagcgtcttgtctattccctgggcatcaaacgcaattcactgatccaccacatgaggacatgagagagcatttgttgattaggatttggaaggtttttccacttagg

SEQ ID NO: 90451 - DNA, 195 bp, Glycine max
cggcgacggcgagtgtacggattcgctcgtgtgtcgatggtcttcagctccttagattctggctatctccatttgcataagaaaaagctgcgttctcctcactcttggcttcttcaggtacttcctggggctgggtattggaggagactacccttagtcttctaccataatatcggattttgcgaccaagaagac

SEQ ID NO: 90452 - DNA, 247 bp, Glycine max
agcagtgagacgatgatgactagctctagcttgttcttctcctcagcacccctctttctcaatccccacccacctcgctctttcctccccttcagacctctcatcgcactcttcaacccctctcttctcctccggcctccctccaaatacagcaacaaccctttcctaacccgcgccgacgatgacgacggcgacggcggcggccccgaccactacgagatggacgaggacgaaatggaggagctcg

SEQ ID NO: 90453 - DNA, 198 bp, Glycine max
ctctctcgtaatgcccggtaattggaccgtttagccccttcatcttctatgttgctgcgattgtcaatgcaactgcgtcaactaagcctctggcttccacagtttaaattacttagggcgattatccgttggaacttgatgccgccaccacagtctactcagctgctttggggactcggacagagcaggctattgcaa

SEQ ID NO: 90454 - DNA, 258 bp, Glycine max
cttgaaaaaccaatgcaacaacaaaaaggaaagaaagctaactactcttttttataagaggaaaactgcattgatgtcttgatgacttttagttggaagaagaacaaaaaacaaaagaaatgggttgtggttctgagcattttatcatgatcttcaacatcaccctcttgatgcttctatcatcacaaagcacccacattttgactgtggctggttctctattcaatgcagtgggaagcttccaagttcatggcctac

SEQ ID NO: 90455 - DNA, 244 bp, Glycine max
ccctcgagccgaatcggctcgagcatcagaggaagcctagatttggtacctcagcttctctgttgccttgagcatctggatttacctgtagggtatgtgtgttgctcatcctccggtaatctttgcacattaagtctctcgtcggttcaaaatgaggcgtgaaacctgttgcttctttgggtagaggattcaggagtctagctaccttggatcaccacaaagtatgttcagatgtgtgtttcga

SEQ ID NO: 90456 - DNA, 242 bp, Glycine max
aaaaactactttggcgaaagaagttggtaagaaagctgaggagttaaaactttttgagaaggttgtcatggcaacagtctctcaaactccaaatattagaagcatccaattgcaaattgttgataacttgggtttgaaatttgggggacgatcagaggaatgcagagcacaaagactatcagagagattagggacaggtcacaactctactaatcttggatgatgtatgggagaacctagac

SEQ ID NO: 90457 - DNA, 243 bp, Glycine max
tgagtttttcaaatttttaatttcttctacatatttggtacaacatttacatgaatttactttttcattagtcatagtagaaacatgaactttatcactagatttagagattgaaacttcagttttaagaagatctatttctgtttaattttgaaatttctttctctaaaccctaaatttttttcttagatgaagaaacaagttttgccagtttaatagattctctatgtaattcaacaaaca

SEQ ID NO: 90458 - DNA, 239 bp, Glycine max
attgttcatgaaagcttcgtttcggattaacatttcttgaataatagagacattactttctgcggttttaacctttttaaggcttccctaacttgaggctgctacttgtttaagaagaggctgtgtgctcatttgcttagagagttttgctgctaaggacttgacacaattgtgtaaatgtctgtggcttttaccaacctctcttggtggttgtggagtggaaagcatcaagatccaag

SEQ ID NO: 90459 - DNA, 254 bp, Glycine max
aatgaatgaatgaaaattaacaaataataacattccaaataaacattagaaataatgaataatagtatattgttatctgagttgttgtttgtacatttttaatcacaaaagtatcgttaattattttgttattaagttatatctgttgggagaccaaagtgttattacataacaacacattagcatgaaatcagaaagagaaacttcttctcaaaatagtcgtttaagtttaaaaatagaaaaatcaacatttt

SEQ ID NO: 90460 - DNA, 247 bp, Glycine max
gttagctagagaaacaaagattgaacaagttatgatggacggagaagttgatccattgatgaagagggagacagccaaggacaatagagtgaagaatgagggctgcgaagaggattttcttgataatccaataacagagttgatcaagatggaagttgaaggtggagatgcaaccaagcctcattgttttcaatattgcaatttcataaaaaagttgttatgatgagacaaaaatcatggttgggac

SEQ ID NO: 90461 - DNA, 239 bp, Glycine max
atttccccttgtggaatattattattattagccttgttcaccaagtttttattatgtgatgtgttcaccatccaatttttgttgtgggtaggctttgtgtcacaattgatggtttggtgagggaaattatttttgtgttgctagctcaattgcataggaatatctagaaagtttgtgaaattgcttgtgacgagaattgtgctgggggtgttgtttgtttggatttggaaattccagcg

SEQ ID NO: 90462 - DNA, 258 bp, Glycine max
attttgcaaaccaatatgcaacctatctcagcacctcatgtcagaacttcaatcaaaattgttagcacattaaacgaaagctaccacaccaatcaaccacccttggcaggcaaaataaaacgccttgttctcacccaggaaggtagaacaaagctcaacatttacccagatagagagttctatgcatttcaaggcttttaaaacaggtagatgatggtttggtttctaaacctgacaatctttacagagagaggttga

SEQ ID NO: 90463 - DNA, 214 bp, Glycine max
atacaggttagaaccttggtgtaatggattaagcacaaattcaggctatccaacagatgctcaactgatctctgatttgacatttttatttgattcaattattcaccctgacaaaatggtgtgctacagacccaagaatatgaggaaaagggtggcggattcagccaggaagctccttgactgtaaacagttcatgaaggttacaagccatatg

SEQ ID NO: 90464 - DNA, 158 bp, Glycine max
ctgcaacaacgaaaaccaaagaagaaaaaagagtttcttctttccgaaatccaagcagtagggttagggttttttccgatctcaatggcggaggaaccggagagcaccgtcaccaccggacgcccccgacgaatcgctgctcgataagatccaccgag

SEQ ID NO: 90465 - DNA, 197 bp, Glycine max
ctggatttcgtcctggaaagatagttccagaaaacattcttattacttatgttgggagtcaaaatgttcagaaggtcactattgaatctatattgaggaggacactctcacatgctatgacatcagttactggaagggctttgcaggactcagtacaaatagtgactaggttttctgagatggaggagacatattct

SEQ ID NO: 90466 - DNA, 254 bp, Glycine max
gttttatcagacaatagcccaagtctctgggggggtatttgtcggcttgattttcaaaccagaagagagtggcctcaacatgggttgaagggttcttctaatgcccacttacctgttctaatcttaggtgtttgcaaacctcaaggaagtcgattagattctatctaatgactttttcttataggagtgattactgagatatggtgttgcagaagaggttgaactatggttttaatggctatcaggtgcctgtc

SEQ ID NO: 90467 - DNA, 265 bp, Glycine max
gatttgaagtctgaagtgaagagaagtctcatgcatcctgctaaggtgtcattgttggtggatatcatgaatgagggcaccattgagaccataatgcactgtgccaagttgattgagatgttcttggtggaagggaacaatgagactgtttcaagtttgagtcttttagttacgacgttgaggctagtgagggataagaaacacccaaatggggtggtctcaattggtctcatactactcaagaaggctataatatgttcccatg

SEQ ID NO: 90468 - DNA, 265 bp, Glycine max
aggcaacaccctctttctgaattaccttcaaacaacacaatcgctctcttcgatttctagggttttgctattgctttgcatccgttcccccttctcacaaaaacaacgcgttttctcttccccttcgtatctattctttgcgtttgtttttggttgattgaaggcattcacagcgtaattcgttgctgcattttaatcgatttatccaaccaggtttataaataataaataaataaaatatcgtagacacatgtgaatgtgtgat

SEQ ID NO: 90469 - DNA, 125 bp, Glycine max
gttttgaggagcggaatggcgagacagaggtgataagcagcaaagagtgacgagtcgtaaccattcaccagctcattcgttcaattcccgaaggctaaacaatcagtaagaacattttgcgtgct

SEQ ID NO: 90470 - DNA, 226 bp, Glycine max
  unsure (1)..(226): unsure at all n locations
atcgagcgaatcggctcgaggagtttttgctctaatttcaaacttgaccccttttttagctgattttatggttgaaaattttaattttgtggttgattgcttcgataaaaaaatctgctaagatgtgtgacttctctatgcattcccaagtgtccttttttcaattggttcatcaattttcattatcgacacaactttgaattccggcntagagagggggagtggt

SEQ ID NO: 90471 - DNA, 256 bp, Glycine max
attgaatccgattcaaggaagactcagagacttaatcctacggctcgaagaagtgtaagacgtttcattgaaccagcgtaatgctcttcaaatatcgttctcgatcacacacggtcatggtgacaacactattcgaaatatcgcagatggattctaggacgttgggaacgtcgtcaccaggtctaacagcttctcggtcaaggtctcctccttatcgcatgactactgtctagtttcacctatctcaaggggcgtg

SEQ ID NO: 90472 - DNA, 262 bp, Glycine max
attacagcttctggtcggagttccattcaaaattatgaatgtggtataacctaaatccccaaattcattattggaatgttttgaaatttcatcttcttgctcttctaatatgaaagtgacatgaagtacaggaaaccaaaatggggtagaaaaacatatttcttatgcagttttataattttccaatatctggctatatacttaaatagtgttgaattttaaacttgtgttgttccctttagaactccgaaacatttttcgt

SEQ ID NO: 90473 - DNA, 220 bp, Glycine max
ctgctcgagattgaccttacgcttcgataccaatggcatggcttggagcatccactgctgctgctacgcttggcatgtcataattgcttggatgaccccatgaacatcagtcgagccagaatgtgagctccatctgcgtctagtcctggctcgtacaagactgtggctcttttctccagtcagatggctacaccagcacctccaaaactagctgctgctg

SEQ ID NO: 90474 - DNA, 268 bp, Glycine max
gtgcaacaaagcttggggtgccacctgctcttgaccaatctacacctatcgcatctgtaacaagagaaaattgcatacagggagtgaaaaaacacaataaacagcgaaaaaagaagattacaaagaagcagattgaaggaaaagctaacgctggcttagttgctaaaacaaagggtgtgttatctgctagtcacagttcatctgagcctgagcatcctcattgtagtaacagaggcgaagaagaacatgaggtgaaaaatgactgtgg

SEQ ID NO: 90475 - DNA, 250 bp, Glycine max
cgataagacccctctctctctctcacacacacaaacacacaaaaaacaaagcaaaaaaaaatctcaaaataaaacaaccaaaccacacacctcacaccctcttcaacatcctcagcaagaacaagaagaagaagaagaaacaatgtcttgctccaatctgacaatgttggtgtcctcaaaaccttccctttccgacccctcgaacctctccttccgctctgtcctggacgcttttcagctcgctacacaa

SEQ ID NO: 90476 - DNA, 264 bp, Glycine max
ttagaattttgttagttatgtatctgttttttttttttcaagcagccctagctagtttttgaggaagggagaaaacccttcaatttgaatatggatgatgattggtggggaaatcttgtgtcttgcgccaaggctcactctctgcttcttttgtttccaagtatttttcttccgattattcagcagactttgtgtgtattaaactattcgtgactttattgtaattttttagcaactataaaaacggaaaatcttgggtatgga

SEQ ID NO: 90477 - DNA, 262 bp, Glycine max
ctgagaagacggaatagaagaagaagacaataaaaccacacatacactctgcacaccattctcagtatcactagggttttatattattcatccatggcgctaaccgttttctctctcttctttttcttcctctccttcaccttccaccttccctcctgcttctcagggcaatcgagctccatggaatcagtgcctgatcttcagaacactatgtacgcttccatcgacggttatccttgcgtgcgcctggtgaatctctctg

SEQ ID NO: 90478 - DNA, 264 bp, Glycine max
cttcttcttatccgagatactgttaaatatcaactctgttgctaaacacatgatactcactcaacctgggatcacaatgcaggacagtgtcaggaaggacattggtgaagtgctcattggaagtcccaagtaaggttctgacaaagcatgtcttatccgggcttgctgcttccttgatatttatttctccagcaaatcagactattgcagcagatctatctcgtgcaccaaataatctatgccaacttgccagtgccagtgaga

SEQ ID NO: 90479 - DNA, 258 bp, Glycine max
tttgtctgtcagtgaaggaatccctttcatattttcccttcctcaactaaggatttaaaacaatttaatatttgggctgttgagattaaggctaggatctggctcctctgaagtgtatgtgaactttagagggaatagtgaggggttataactgtttgttggaaaatctagagtagattttaacttcatacattgttatgaatatgcatatatttgatcaaaatttaagcctttgattttataaccaatggttataaa

SEQ ID NO: 90480 - DNA, 257 bp, Glycine max
ctaggattatctattaaggtggggtaacagacaccatttaatggttggttcccttgttctggacataacataactccactgtacaatgttgtccttgttatcgtattctatcagtaagagtgtctgcaagattgcatgtctttcttggcttcaccaataggaagatataccagtcattttgcatgactaccgaatttcttaaaacaaattttcagataaattattatcggtgtcctttcttctgcatctttctaaac

SEQ ID NO: 90481 - DNA, 262 bp, Glycine max
ctcaacgtccccaacactgtgttactagtacttcttcttcgatggcagcaacctcaacatcactggattctcaactctacattggcatgcgcacgccatgcctcaagctttattctttcaattctcaatctttctctgtactcgacccaatcttcgactatccctctctcctcccagacactcacgcgccatcgtcgccatggcacgcaccggcaagttctttgttcgcgcgaactggtagtgtaacgcaaccaaagactcc

SEQ ID NO: 90482 - DNA, 238 bp, Glycine max
cggctcgagcatgtggctgcctcaagtgatgaagtagatgaattttcttctcatatagcaacagagagtagtagtgttatgtcatgtttagttttttgtagcctcttcaatatggaggaaatttatacgcttcatcactgaatggtaaacctcattctaggtataggactttatagcatgtacagtcttgttaaaatctttgtgacgctttgatgtggatttgcggttcataatggat

SEQ ID NO: 90483 - DNA, 198 bp, Glycine max
agcttggacagagcggggttgttgttactccgaagcgcggtggggggacgcacggtgttatggaactcgacccaaacaagcccgtgttcgttgagcggcgtggtttgctgcagtggagagtaattatgttgcgtgttcccgcgatgggtttctccgggtcgcttccctccggtttgggaaacctcaccggactgcaga

SEQ ID NO: 90484 - DNA, 282 bp, Glycine max
cctcgagccgaatcggctcgagcaaaggttgctgtaggagataagaacccagtagtgctaagacgctaacacctgcagtgaacacatggcctctggcatcagcatctctgctcaagtcttcacttgttcttgacaagtctgagtgggtgaagggacaaacccttcgccaaccttctgcatcagttgtgagatcgcaccccaccaccccatcagggctcaccatcagagctggttcctatggctgatgagctcgtttaagacgcgaaaacattggcttcacca

SEQ ID NO: 90485 - DNA, 267 bp, Glycine max
gatttaactgttcccaaggaaccaaagtttcagagtctacatgtgccaaaggactgcaccaccaggaaacacacataagagcttcttcacctacaagtaaaactacaggttccgttcacaggcctttttcacggggaaggaaggatttaactgttcccagggaaccaaagtgtcagaatctacaagtgccaaaggactgttgggggtgcagggagggatgttgttcatataatcattgaattttagcaactttgggaaaatggttga

SEQ ID NO: 90486 - DNA, 250 bp, Glycine max
actcgagccgaatcgggtcgaggtacaaaagaatagagccaagaggaccattccaacaaacaacctataatacatgtatgaactatcaacgtcctggagcaagagacgcattcaggtcaccaccaccgggttggaatcggacaaggcaagcgccagtaaatgctaaccttaatccaacaatagacaataacaggatagcatttactcctcctggaccaagatactcaatgccttcccatgagaatatctg

SEQ ID NO: 90487 - DNA, 279 bp, Glycine max
atcaccaatggcagtggcgaatctgcagagactggcctcgtgagtgcaccgtctccgctccgtctcgttcttctccaaatccctgatctccgcgcacctgcatctcttcctcctcctcgaagacggtcgcggaccgcatcactgcggctggtcggcgatcgaccttcgcgggtaaagaagcacgaggtggttggactggtcggccagaccctgatgaatgcgctgataaacacgggactggtcgaaccggagtcccaccgcctggaggagatcgacgcc

SEQ ID NO: 90488 - DNA, 286 bp, Glycine max
ctcgagccgcaactcgccctcgcactcaacactcctctgtaccgatctccgccgaactgagtcagagttcaactccggcttcgtatagatctatctctgctttcctcggacatgcgcaatccggacgaactattgctcgcgtactacacaggccttgttttacaactacaagcaattaccatccagcggatgcttgattttgacttcctttgcggcagggagacaccatcagttgctggaataattaaccctggttctgagggatttcaaaaacttttttttgggt

SEQ ID NO: 90489 - DNA, 144 bp, Glycine max
gcattacaatcgctcccagaatctgttctagtttgttcataactcaataattgtcatcatgggctcactgactgttacaggtgaaaatgatgacaaactaaagcgtgtatctcttccctttgtatcaaccggtcacctcattcc

SEQ ID NO: 90490 - DNA, 256 bp, Glycine max
caaaatgaagctcattaatcttgggcatgcacaaacgtaagtactatgcctttccatgttactagtaaatagctgcttcctgttgctgataagtatatgtcttctttactgactgcacagtacagaaacaagaaagcagattggtgttggagtgagaaggcgatcggaaaagaggcgtggaaagaaaatggtgcaggaatcttgctgcactgagtggcagcgtttaattgcagaagcttctaggcaaggccatgtt

SEQ ID NO: 90491 - DNA, 284 bp, Glycine max
gccatgtcagtgataactttggaaggcttattctcaccactaacttatttcttctcaagaaatggatctcacatgttggattaccagcttgctcttcagcgatgcgttagaaacgatactggtaaatagttgcaatttcagtctaacaataatatccagcagaatcacaaattacatggttgttatccatatagaagtgaatggagaatggtctggaaatcttttgattgtatgaatggattttttggagtctcagatttgaaatataataggatctaaattaa

SEQ ID NO: 90492 - DNA, 275 bp, Glycine max
tccatatctggttcataacgcaaactctgtccaaaatcaccgcttgatgctctttatcttttccaatcttatccaaattcttcccttcaattctcttcactcttttttctccgccgaaatgggtctaatcttgaatataatcttgaatcataatgtgcaatcttcatcggttacgtgtccttaaaattggattcttttctatccatgagttcaattgggttatccgtttcaatccagttttcgtaacagtttgatacacacactcatatatatat

SEQ ID NO: 90493 - DNA, 267 bp, Glycine max
catttgttcaaatggagaacaacatcatcaacaacaacaacccttcttcttcataagcactttgagtttaactcacccttgtgcttgtctctctctgtctgtatctctctctctctctctctatatatatatatgtttagtgttttaccttttagactcacacttgtctctctctagaaatcacgcaattctcatataaccggatttttctttccattcatcacccaccaaactaccaactctctctatctcttaccacaactcaat

SEQ ID NO: 90494 - DNA, 202 bp, Glycine max
gcacaacgaaccactctgaagccgctcacgttatccacaacactctcaaccctccttaaaccctaaccaatccaactctggcttcttcttccaccttcactgcaatgcccgcctgcaagctctcctcctccgccgccatctcctccttccccttcccgctcgccggctccaacgaccggtcgttcctgctcgagcgcgcagc

SEQ ID NO: 90495 - DNA, 257 bp, Glycine max
ttttaggtgagagatgtccgtctgatcatggataggaactcaagacgatctaaaggagttgggtatgtgttttattgtcaaataatttattgtttaaatgtatgtgctattgtggtattaggatatgaacttccaagaatcatgtttaactgtatctttaaatggactagcaatgcgataatgatgagggatggtgggaataccttgcactcatgtttaatcaattcatgctgcgcactcaaggtagatgacataat

SEQ ID NO: 90496 - DNA, 254 bp, Glycine max
gctactcactctgctggtaatctcataacctaaccattgcttaacgcatccttattcttactcctatgtccatttctctgctattccttttgtctgatttgaatcgacggagatgacttacaaagaatcattcgattccgctgcaaacaagcgctacgctgatcacataattcctcatattctgcatctgtatggatcatctgcaacctctcgcgactttgaaatctatgccgcaaatgcttcatttgaggatc

SEQ ID NO: 90497 - DNA, 255 bp, Glycine max
  unsure (1)..(255): unsure at all n locations
gagaaattagggtgaagtgaaggagaagctcttgagaaggtgcaccggctttattgcttgtacatcaaacagtttttgttaattccaaaattatcctgtatcgaaggcatgttctgtcgggaatgattgtagctgacttgaaagttgaaactgaagatgggagaagcaacagaaagatatgcagttgtgacgggtgcanatanatgaattggattagagatagttagacagttagcttcagctggaatcaaagtg

SEQ ID NO: 90498 - DNA, 255 bp, Glycine max
tttttgttcattcagagctttactcactcctttgcacgtctcaatctgagtcttcacttcatcgtttttgggattctctctctcaataatggcagcacgctttcaatctgcagctgtcagttcttcattttttctcattctgtctgtctgtctgtctgtctctctctcactcactctttaagcactgagtaatttgtaatattattctgttcttgcttttgaggtcactgttctttctgcagttgctgcattagc

SEQ ID NO: 90499 - DNA, 253 bp, Glycine max
ctagaggaaagaagtgatggggctcctcctctacttgatagttaaaggtataatcctactcttcgcatccctataactatcaagtagaggaggattataccttttcttggtaaatggaaaggtcattccatcacaaaacgaagtggtgtgtatggatctacaattgctaatgctgatactgtagtgttgcacgatatggatgacaatggccaacttatgcaggatgttacttcaagttcaacttttgatgggg

SEQ ID NO: 90500 - DNA, 187 bp, Glycine max
ctctagcttctcatctcaaggaggtgagcttagctattagagaggtatgtgtatctgcaatgaagaggcctagccaccttcatcaccatatgatatttataaaaatatatatatatgaaactatgaactgcgtttatgcatgtcggaaaatcttcttttgataagagtttggaaatcctcttgtaac

SEQ ID NO: 90501 - DNA, 252 bp, Glycine max
attggttcaaaatggtccttttatcgtttaaagttaacgtcattaatgatattcaaatattgatagctaaatggcttatttatcaaagcgtaagtaatggtccgtttggtagagtagaaaataataaaataaagatcaaatggttcatttatctttggaaaagttcattttggttctttatttttttaaattggttcaaaatgattcttctatgagtttgaagttaacgtcattaatgatattcaaatattg

SEQ ID NO: 90502 - DNA, 251 bp, Glycine max
ctcgagccgctcgagccgctcgagccgattcggctcgagggtggcacttctcgtgttgctcaccacagacaaccatggcgacggtaccagtaatggctacgaccagcaacaacaggcggtccatggcttccttgcgctctgctttgccctctcattctccttctgtttcctcttcattgcgcttccctgtattgccatcttcctcttcatccaagctccgaatttctcgaaccaaacccaaatcccttctc

SEQ ID NO: 90503 - DNA, 245 bp, Glycine max
gtaaacccagatagtggcactgtttgggttaggttcgtccccagatcccagaaatggcgctgctttccaggataacaacatcctcattactactatccctatcctccaaacccatttgcaacgcctttctgctttctcgttcaaccgccacaacctgcacaaaacatcagaacaagaagaaaaaggaaaacgccaaagcagcgttggcgaaggagaagcgcagaacccgttccgacaaacagttc

SEQ ID NO: 90504 - DNA, 253 bp, Glycine max
ggatgttgaagagtcccattgcatggatgatcaaactgctttgataccaataacaccaattgaagaagaagaagcagcagcaaaagcattaatggattccttgaaaccatttgatgtttcacaatctcttcaattagctcctggtattcttaaggattcaaactctgctacaattaatcatattctcaacaatccagaagtgatcgtgaagttggttagagattatagagctgctaataattcacaatatgta

SEQ ID NO: 90505 - DNA, 251 bp, Glycine max
caaacgcattccatttgatccaggctcatggaaccagggcttttccctttacaactttgaatgaagaaaaaataaacagtgagaacgattgggttggctccgtattaggcagcattcaccccagcataagcacctcgatcaaagagcaaaagtacattttcttttatgggggcaacgacaaagactggatccaacagttcaccaagtacgttactgcccttgcaaatgatgctgctataaaggaggcaaag

SEQ ID NO: 90506 - DNA, 277 bp, Glycine max
atccactgaactcccatttctttcatctactctaaagggttgtgaattgtgataatcttaggaaccagaagtcaaagcatgaaaagcaatcccacttccaatgccgaggctgttccttcctaatcccaatcccaatcccaatcccaatccaaggttgtcacttatattcccacaaactaacaccaactagagaagcaaaagcaattcccatgaacaaaaccaactctttcaacaagaatcaagtatttttatttaaactcaaccccctacactcttc

SEQ ID NO: 90507 - DNA, 272 bp, Glycine max
cacactcccttgccgcttccaaaaaaggcaatacatgcattttcaaattatttaattaaccccattcatctttcttttacatatccctcatcagctttctggattttcatatatgcaccagtatatctgaattctgctcatcatcctatacagtaccagctacctatacacttttatataagtgttttcgtttttattactatttataaatccaatacaaggttgaaattctaggattaatattcatgttggcggtgtcacctttgaggagc

SEQ ID NO: 90508 - DNA, 267 bp, Glycine max
ttattctacatctaagatacaacaaacactcataactaaagggaaaagctaacaacaagctactgctaatactcttcggctttgtttttctttataatcaaaacacaacctcgtgtgattccattgagtagttgtcgtaatttctgcaagtagtggtggtggcggcggcgacagcggtggtggcgccgaagagtggcaacaacaactggcagcattattgttgctgtatgtcagtggaatcttatctgcatgggatttactacgctg

SEQ ID NO: 90509 - DNA, 271 bp, Glycine max
gcaacttcttgtaaatttctgagattgcattctcacctcacctactcaatgggcgaaccaaatattttcttctctaatatctctttttcttctctcgtggttgggtaaaaacaacaataatgatttacggacatgaattttaatctggatggtgaattcaacaagatatcatcatttaagttggacatgtcagatcttgattttacatgcccagccaagaagaattcccagtctaaggataagaaaggagaagtttctggttcacaagaag

SEQ ID NO: 90510 - DNA, 290 bp, Glycine max
ggcttcgagaaccctaattctccccagcaattcaatcttctattcaatttccagtcaccttgattgcggcttcttggacttttctatcgtgggtcggcgggttatctcctactcttatctctgacagttctgataggatcgaggaaggcaggatccaacgaccgagatcttagctacttactccgttactcggagacttcgatagggatgacctcctctctctgaatattcgcactgacctaccgacaaactcgactatgaggtcggcacccgagacaagtgcggctctg

SEQ ID NO: 90511 - DNA, 260 bp, Glycine max
actcgagccgaatcggctcgaggatttagtcccttcagacgggttaccatctgattcctatacaatatcagtttcaattttaccacaatctctggctcagttttcggcggtcatcatccagtttccagcaagtgatggggctcttctgagatctagtttagaatctgctcgcctctatttccaccaaagggaaacatctccacctgcagatataatccatactagcgagtctcgtgagtggtgcaaaacatctggttatt

SEQ ID NO: 90512 - DNA, 263 bp, Glycine max
ctattaaatgtttcctttagttcaatttaatataagcaaatcaacttatcattgagtttctaagttaatttctattgtcacagccgcatggaatcaattgtcagcagaatcttgcaaaggaatgtgaagaggaagcaggaatacctagatctatctctgtcaacgccataccggttggtgctgtttcatacaaagacattgatggatatagatacaagagagatgttctgttctgttatgatctaaaacttccaaaagatttc

SEQ ID NO: 90513 - DNA, 271 bp, Glycine max
ggcatatcctttcactttcccttcaacttcatttggatgcatgaaacaagacaaccacagcttgattcatgcatccaaatgaagttgaagggaaagtgaatcaagctgtggttgtcttgtttcatgcatccaaatgaagttgaagggaaagtgaaacaagacaaccacagcccgcctccttgggccctggagaacgagtccttcttaagcgacctataccaaacacatctcttatccacaacaatatcagaatcaaactatttcccatctc

SEQ ID NO: 90514 - DNA, 268 bp, Glycine max
caaatatatacatgggattgtggccttgcttgtgtcttgatggttttgaaaactattggcgtcaacaactgtgatattcaaacactggctgaactatgctgcacaactagcatttggactgttgatttggcatatttattacagagatttgctgttgctttttcctacttcacagttacatttggggcaaacccaaactatagcattgaatcattctacaaggaggaacttcctaatgatctagtgagagtggatttgctatttcaaa

SEQ ID NO: 90515 - DNA, 241 bp, Glycine max
agatgctcaaggttacaccagcatcttctctccattaaaatgacgttcatatctggacaaatgtgtctccaaatatggactttggactactggatatatgatgctatgggatacatcaggagttccgttggattagtcttccacagacaattctcaagatcatgatccatattcttcaaatgccgttgctaatgattgatataatggcattattggcgcattccggaggtctcgttgtaag

SEQ ID NO: 90516 - DNA, 254 bp, Glycine max
cttctcttctttctctagggttttaaccttagggtttcagtgtagtttcactcactctctctctctctctctctcttccggcatagctttgccatggataggtaccagaaagtggagaggcctaagcctgagtctcccatcaatgagaacgagatccgaatcacgacgcagggcgctattcgcaactacatcacctatgccacttcgcttcttcagttaacacagtgtgaagaagatggctggtattaagagaa

SEQ ID NO: 90517 - DNA, 256 bp, Glycine max
ggacgcacacgtgacaaacgtaattgggaaataagcaatgccacgctatagtaactaatatgacataattttaaatgttatattgaaaaatgaagagtcaattttgtatatagtgtcaaattgatccgtaatagttttgaatctaattgaaaacatgatgaattctctcttatcattttctccctcctatggttgaaggatagcgttcgtgtgctaggtccacgtcgatcatcgctctcccagttgtgatggttgt

SEQ ID NO: 90518 - DNA, 261 bp, Glycine max
caacaatggtgaaatcgagttccaccaagtcaaagacaacagaggacgttgacctcctcaaagacgtcgcctccttcgcttccgagctcggcttgtccacttcgcaaccccactcaggtttcaacgatgttgatttccgcaaaaccaagccaaacaagctcccgaagaagcaacaaacgcctgaaaaagtcacgccccaaaattcccataatccaaagaacaaaacttttggcaaaaacaacggaccccacgagaagcgca

SEQ ID NO: 90519 - DNA, 252 bp, Glycine max
taagactatagataagtaatttttacgtgacacatacttaattatgtgtcatataaaaatctgctaacaccatgaataaggtagtgattgaggaccacttaattaagtatgtgtcacgtaaaaattagttaagactatagataagtaatgatttaaaattacctaataatttttcgtgtttgtgtgttttattttcaggtcaaattttatactccaaattccaaaataaaatgtattttggataaaataagg

SEQ ID NO: 90520 - DNA, 252 bp, Glycine max
tcataatcaaggccttaggctttagcaacaaatgcgaccttgccttggccgtcttccactgggatcgaaccaacaactccaacaccaaccttttcagctcttctgcaatccccgttatcatcaaaattctcggcaaagctggtcgggtctcatccgccgcctctttgctcctcgccctccaaaacgacggcgttcatatagacgtctatgcctacacttgtctgataaatgcctattccagtagcggccggt

SEQ ID NO: 90521 - DNA, 271 bp, Glycine max
gcttccagggcttttctgattttgtggaagaaatgttgtcccatatggctcaagtgaggcgagaggtaatgcttcttatagaattgaatgaaaaattatttatgcttctaatatggttaaggtaggaggaaaaaggttgacggttccccctttgctaaaaaaaaataactttctagcaaattaataattacatactaacatttgtttttgaaaagaaaccttagttgtttgaatatgacttgaccctttaactaaggtttggggttccatt

SEQ ID NO: 90522 - DNA, 266 bp, Glycine max
agctaccaacatgaccacttatgcaacccagtgtctatcctcatctgatagcatacaatagtctctgactcacttcctatcattttcttcctgcttgaacaaccaaagagtgaaaacactttcatggagaccaacttagattattccaagatgctctttttactcctccttggttccacttcattgattttcctctcacacttggcttctgcagccactcccaagctcaacactcaagaggtgcaggcattacaggacataggacg

SEQ ID NO: 90523 - DNA, 264 bp, Glycine max
attgtaaagaatctttgtcttgttttccacatttttatctgcctatatatagatatatatataatatatatctatcatttttctaattttctgccattttttttagtttcctatactataatatagaatagaatatgaaaaagaacaaaaagcttctaaagaaatatcactaatattctttagactaatcaaaaagaatattagattccaatacattttagatagaacaacgacttaaacaggcggatttgacatgcgagatct

SEQ ID NO: 90524 - DNA, 255 bp, Glycine max
tgattcgagacaattgaacaattggggtgtgaaatggttctttttttcgctttgattctcctcgggtttcttcttggggtggtggcggttgtggctgccgaagctcttgggtttttgtgggtaataaaacgattgcaaagcaagatcagcaaagaccaagcgaaaatcgcgtcgaaaacgcaactgggtggtgctcaaagtgatcatccccaacaacaattgctaaaaacggagggtgtggtttgggttttggag

SEQ ID NO: 90525 - DNA, 204 bp, Glycine max
gataaatcccacaaaacaaagaaacgtgtaaatccgtcaaaaggggaaaggtagctagaggaaaagtaactgcacacaacacatcacagcgtaagagaattggattctaagctcgagagagagagagagagagagagagaagagagaaaggatcatgtgggtgtggacaagagagggaggttagaagacggaggaaaaaggaga

SEQ ID NO: 90526 - DNA, 245 bp, Glycine max
tttgaaagcaaaaatgacactctccaaagcattttatgcaataatagccattgcactgtccttgtcaatgccattaattagagcaagcaaagaagaattatgtattatactttaatttcaaatatatcatgtgatcatgcccccatatatatatatatataacacaatatatatagagacagagaagagtgtatacacataaaaaatacacggtgtatacaaaggcgctctctctatatagagag

SEQ ID NO: 90527 - DNA, 263 bp, Glycine max
ctcaaaatcaattatattcactttaaaattaatttttaaaattttaaaacttatgcaaacaacaaatgtaaaagtttttgcccaataccaaaacaaaatgtaatgtagaaaaacaaatgtaaagttttcatcctgtatcaagattttgtgatatcccgtcgaatttattttaattcaataagagatattctcaattgttattcaaaggaacacttatttttaagacaaaactccaaagataacatgttcataaattaggtgaa

SEQ ID NO: 90528 - DNA, 270 bp, Glycine max
gtcaaactcgtcgtggacccctctcgtctccattcccatttccccttctcttctcaatcaacaacatcactccaaaaccctacttctctctccgattcccatgtccccttcctcctaatcccccttccccctccgatttctattctcaccccccctatggcatccatcgccatcaccgtttcccccgattccgaaaacgacaccaccaacacgcgagtgaacggctacgtcgtttacactcgccgcaagcgcaccctcgtcatcctccat

SEQ ID NO: 90529 - DNA, 255 bp, Glycine max
gttgctgccaattttcccgataatttaatgattgtgtataggaaaggggctggcatgtacatgtccttattaggtgtcctgtgccccaagagggtgtttggtgcactcattagttatgacgcttattcctacaaaacaaaaaaaaaaaaaaaaaaaaaaaaaaaaaaaaaggggggcccccaaaaaataaccccctccccccgggatttattcccggccgggaccttgggggggaaaatttttccccaaaggggg

SEQ ID NO: 90530 - DNA, 262 bp, Glycine max
ttcagatcctgttatcagtaggtcattcaaaaagcgtaacaaaaattttgggaataggcatccattcagggaaaatgaatctcaagcctttgaaacgctgaaaacttacagtgatgccaccacagataaagaattttatttcaagtttgatagaaggcgccctggcttggcttcagcccctcgaacacctttagatatgagtcaaagactacgggcaaaccaatcttttactggagatcctggtgttggcaggggaagaggc

SEQ ID NO: 90531 - DNA, 265 bp, Glycine max
ctcgagccgattcggctcgagattcatcatatcatagctaaaaaaatacaggagagagaaagcgaaaaaatacctttttttacgagagagaaagagaaggtagccctagaaaaatatgcaaccagataaggacttttgcagctgagacactgcaaaaagagttattatattgagagagaaaagaaagattatctttcttttttttttttccccttttcaatttggaagcttcctttttctgagcattttacccccttttttccat

SEQ ID NO: 90532 - DNA, 266 bp, Glycine max
ctcaggcaaatgaaatgctgcatcacaaggcaaacctgggtatctttcctatcacactggtcaaagtttagaaaagatcaaccaggatacagactgtgattttttcatgaaagcgaaagaagccaaagaatatggattcatagatggtgccatcatgaaccctctcaaagctctccagccattgccggctgcagtggaaggtaaagatcgggatagcatttgaacttgagactactgcttactgttaaataacaatgatcttttgg

SEQ ID NO: 90533 - DNA, 268 bp, Glycine max
ctcatttcacttttttcacttaccagtcaaatctaaagctttcctaggttctgctaagaagaaagaaaacttcttcacttgtaagataacttttattttatcaccaccccatctccgtgtaatgttatgcagccttcgccacatttatttccaacatcatcatcacatctttagtgtgaaaaatgttggaaaatttggaatactagtcactcatctgcttgtaacttgaagagtctaatgttgtgagaatttccccatttttttatta

SEQ ID NO: 90534 - DNA, 192 bp, Glycine max
cttccaaagacatttctaaagtcccaagcactttctccatcacccataggcaccattagccaccacaaaccatcgttgttctccattgaaaccccacatcgagaggaactcttcaaccgaagcggaatcttccaacttggcttgcggttccggtagagaacgaaaaccctaatctgacctttcgttttcttt

SEQ ID NO: 90535 - DNA, 262 bp, Glycine max
ctctctttctctctttaatcttaaaccccgttacgacgtcgtacggcttgggctctttctccctctacccgaaccgaacaacaatcgtgaaaaaaaaaaaacagaataccttcattctctctctctcttactttctctattgcaacgcgttttattctctctcttataatatatttctccactcgcgctctcttactcgccggcgattgtttcagatcaatcgccgacgccgtccaattcactcgctctccgtggcgttcag

SEQ ID NO: 90536 - DNA, 203 bp, Glycine max
ttgaccttccccacttctgatgtctatctaactgtgaaaaccctaaaagactacatttgagataagactagaaaatgcgttcgtgcattcctcagtaccttcacttgggttcttcgctaaaccccaaggcgtgtacttctctcctatgcatttttaggctccgtgctgtctcatccactcataatcacatagaacgtgctcca

SEQ ID NO: 90537 - DNA, 218 bp, Glycine max
gtattgatggatatagtacaaagtaaacctatataacaactgaacaataaatgaattgaaaaaacacacataataatcaaaaggggagactatagatattatgtgtgttttttcaattcatttattgttcaggtgttatataggtttactttgtactattgaagtattgatggatatagtcttttttacggtttaatgttcgatggttcaggtggtat

SEQ ID NO: 90538 - DNA, 253 bp, Glycine max
gtcaaaatgaatttcgaagagaggcacaaaaatctttctaaagggacatgccatctatcatgagaaatcaatgaccattttgttctgatttcagaagttatatctcctgatgttctgtctattttgacgacactaactataatatataatgtgcttgaataatgaatcacatttgaagatgaagacgatgatgaaattgaattggctgaatcattgcaattcaacttcgacacaataaaagttgcaacaaata

SEQ ID NO: 90539 - DNA, 170 bp, Glycine max
cgcttcaaacagcagggaactctagcagttccttgtcggcctgaagaattacagaaaatcttagatggttggagagtgataccggacaacatcaaaggtgcaggaacggaggtttattttcccaagttcctatgagctatatgaggttttaacttctatagtaaagtttc

SEQ ID NO: 90540 - DNA, 213 bp, Glycine max
aaaaaaaaagaaggctgacaatggaaatattttatctcctttgctctatcgtctccacttccctcacctctcttcttctctcccttgtccttccctttcacacgctactgcagcggtggaattcctcacgcgccgcttcttccttctccgatgacgaagctgaacccatatctctctacgaaggcacagtttggcaccaacgtcgcaacccag

SEQ ID NO: 90541 - DNA, 248 bp, Glycine max
agttgcccgtttaaactttagataagttttttaaaaaaatattttttcttgaccattattttaatttttatattttcctggattgtaaacatggatggctaatagagaaaataatgattcttcccaaaaaaaaaaaaaaaaaaaaaaaaaaaaaaaaaaaaaaaaaaaaaaatcaagaagaaatcaagtaaaaggtgtagacagtaagttgtgatatgctcgaattagaacactccgcagatgcaaga

SEQ ID NO: 90542 - DNA, 245 bp, Glycine max
cggctcgagcgcaagggagggggaagacccagagtaaagcgtacacacactgtgaaagctgttatcaaagaggctagggatatacttggggaatctgctgaagcattacctggggaatctgtggatgatcatgagactgagtttccaaatggaaatgctgaggattctgccaatgtgaattctgaaagtcagaaaccatacaatagaagaataccagcgaatgtcaggaagcgtaacggggttca

SEQ ID NO: 90543 - DNA, 260 bp, Glycine max
ctggtgaagatgctatgcagaaaagcattgatgggtatcttgtgaagccaaaagttagacatattcaaggtaatgggatcagaggtgagggccacattcgtcatttaaacaagtcaacaaactctgaagtcaactccctggcaaaaaccaacactggcatgcctgctttgaaacgctctgcgtttggtaggtccactacagttactgcattcaccaagagccaaacttctgaggcatcgttacccgttgatcaggtgtca

SEQ ID NO: 90544 - DNA, 255 bp, Glycine max
gccacattttccgagttttttctattgccttcctcgtttcagagtatattttcttcgtcatcattcagtaaacggaaaatctacatcaaaatcggtgctctgcgagcaaattgaactcgttggggctttaatttcaactgaaaaacatgatgggtaactctaaacttgaatttttccgcaaccctttctcagttttaatctttattggataatgcaagagtgttgaagttgataacagattatgcgttatagaag

SEQ ID NO: 90545 - DNA, 255 bp, Glycine max
cagttagttacatgttcaatggcggttcagagctccacttccagcgaatcgcaagcttcggagaacgttatgcatcgccatttctttttatggagagagtttctgtggggagctgttgcgggtgcatttggggaaggaatgatgcatccagtggatactgttaaaactcgattacaaagtcaagctattctaaatggaattcagaaccagagaaacatattgcagatggtgcgatatgtgtggcaggttgatgga

SEQ ID NO: 90546 - DNA, 261 bp, Glycine max
atcctccaaacttgagacacgcaggctccaatcaacagcaatttgtggcattgcttaaacacaaaagcaatcaaagagaagcagaaaaaatatgccgctcgctgttgtctggaaaatattggaacttagagttctggttttactgagtttggccttccaaataatgctaatagtttttggcaaccaaagaaagtaccaagcaggtaaggagctacaattggttgtgtgggtggcctatctgttggcagatttggttgctac

SEQ ID NO: 90547 - DNA, 256 bp, Glycine max
aaaagctggtgcttcaagggttattgcagtcgaggctagtgccaagatggcagcagtagcatctcagattgcaaaagataatggtcttttgctgagtaaaagccaaaatggagttgatggcttccaaaagggagtcatagaagtggttcatggtatggttgaagagattgataaaacagttgaagttcaacctcacagtgttgatgtactgctaagtgactggatgggatattgcctgctgtatgaatccatgctt

SEQ ID NO: 90548 - DNA, 249 bp, Glycine max
caagagctcaacgtctatctagagattactattttaaacaggtcatggagacttcattgcatcataagtatgacctttggaaaaaattgtagctgggttgttttggatctgttttttttttttttttcttccttaatgtaaggttgttttggacctttgtggtgataaattgaggtccgtcacacttttgcttttgtgtcaaaaaaaaaaaaaagggccgccccccgattagtgcccccgcacccccgg

SEQ ID NO: 90549 - DNA, 220 bp, Glycine max
tcctcgatgctgcttgttgctgcaaaatctgcgatctccggagtcgttttggtcagcttccgggggcgaaaatgtcatcagctggtgtactctacacttactgtggttcgcactgagcgcattgttgtcacaaaggcatgcactctttgcaattccatcagacttgtctttggaagatagatccattttcatatacctctccttatcgtggtcattgact

SEQ ID NO: 90550 - DNA, 252 bp, Glycine max
ctccaagttccaatggagattttcaaatgcttctacatcaaaaatcttattcttgttaccttcttcatggtatcatcagcagttctagcaattgacccttactcagaggcacttctcagcctaaaatcggagcttgtagatgatgacaacagcttgcacaattgggtggtgccctctggaggaaaattaactgggaaatcctatgcatgttcttggtccggcatcaagtgtaacaatgactcaacaattgta

SEQ ID NO: 90551 - DNA, 204 bp, Glycine max
cagaaagggatatgatatcaaatttcttttaataggagtattttggtgggtatatattaactattaaggatctaagcttatatgcttcttttatctagttctagcttctgtgatgtattgctaaaaaaattgttcagtgtcatatttgcaaaattcgagaaactttttcatttcaaagtttagcaatatcagacgagttatgag

SEQ ID NO: 90552 - DNA, 253 bp, Glycine max
gtaagtatacctacaaatcactgtaaatctccattaccactctcttagttattaacttagaatcttccctttctagttctaaattataatcattctttttttatatttccccccccccatatggttatatatattattgggatctatacatattagaagagtcagagataaattaatagtccaaggtagtttcattttctggggtgtggttatctgatcatagatatggctagtggtagttgtattggaatct

SEQ ID NO: 90553 - DNA, 249 bp, Glycine max
gcgtttaacttatgagaccaggttaggagctcgtgtccttgtcccagtataagatctgcgatggcacgttgcttgtaccatctgtttacttatttttatcatgcagtgcatgtgacttgaaactgtgatggacttgtattgctttctgccttatggcacctgtagtagtgaactgatgaaggaagttcatgcggactctgaagctttgttggcttagaatggtaattttgctgtattctatttcacagg

SEQ ID NO: 90554 - DNA, 214 bp, Glycine max
  unsure (1)..(214): unsure at all n locations
cgnatctaagcaccctgatgactgaacggcctggtggttatccatggatcaaaacgtgaggagcctttgatgtcttgacggccatctgcggtgatgcttctataaggctccaacgcgcgacttccttgcccagacaaggttccgaagatacctgtagcacttagccgtaacttgtggtccgaggtctaaactggtccagacttgtagcagtatt

SEQ ID NO: 90555 - DNA, 181 bp, Glycine max
gacattttgatagacctcgatcacaggctgccgcaccttaaaatcggagacaagatcaatcgttacttgatttcaagaatctctcaatttcttcctacttctctgtgtacgattacttaagggcaagcaactcactgtctgagctggtcacagacttcgtgaatcattttctattccactc

SEQ ID NO: 90556 - DNA, 284 bp, Glycine max
tgcgttttgtgtctgatggagtgatggatcatttgcgacgctttgcgcgccgccgagttctagggagatgctcgtcgtccgttatgcatagttgcgtagacatgagccgtgtagatacgacaggagccgggcagtgaagcaccaggtagaggatcagactgcgccgcgccgctcctgctcgggcgtggagatggctcggtatggagatcgtcggagtagaccgtcggtgtactcactcgagcttcggggtagacggtgcatacagtcgcggcgcactcagttgg

SEQ ID NO: 90557 - DNA, 281 bp, Glycine max
aaaatgaagagctccgttctcacttggagaaactaagacttgaacaagctagcctgttagaagtaagcaatatcactaccaaatcagatggacaaattgaaaacagtatctcaaacctaccagaaatggtcaccgagaatatttctctgaagggtcagcttataaaagaacagagcagatctgagagtttgttggcagagataatgaaactttcagctgagcttaggaaagcagtccaagcacagaataaccttgtacgcttgtacagcctgtattaagag

SEQ ID NO: 90558 - DNA, 250 bp, Glycine max
  unsure (1)..(250): unsure at all n locations
atgaaggctagcggcgggctgaccatgccccgggccgtcccgttggaggccatgtgcaggccgcgtacagctatgcgtgatgttcttaagaggctctgaaaacctcatggatcgaattgctggcatcggctgaagggtgtatgactatgacgtagcttccaagttccgagcatatatattcgtattgtgggttgccttgctactanaaaagaaaaaaaccatttaaaatgtttaaaaaaaaagggggggc

SEQ ID NO: 90559 - DNA, 249 bp, Glycine max
atcttttacacgacttcttgagtataaaaaatactctttgaatgaagagacggcctcctgagtatgttactgacacgtcctcaggaggccgtctcttcattcaaagagtatcttttacacgacttcttgagtataaaaacactcatttgtacaatcctacctgtctattgaattgtctttagaaaaaaaaaaaaaggggggggccgccgattattgacctcgtcaccccgggatttatttcgggccggg

SEQ ID NO: 90560 - DNA, 288 bp, Glycine max
acggaggtcaagcccgccctgaccaacatggtctccgctgctaagctcattcgcacccagctcgccagcgccaagtgagcacctttttttgcctttttcgtttccgaggagggcgtcgtcgatgccaatttgtttccaataaacagggctccccccctgtgcccgccgttctgttgtgctccgtctgtggttaggttactagttttcttgatctcgcccccacgcggtacctgttttactatctgtttggtggtttctgaggcaagttgcccgtgtacttgtatcgta

SEQ ID NO: 90561 - DNA, 290 bp, Glycine max
gaaaagagcaaaaaaaggagaggatttataaaaacttgatggctagtttggacactcaaatgctcttcggaattgaaggggatgggagaggaaattagttcatttctacctcaatcctctccaattccgaacgagatttgaggttcccaaatagcctaaaggaaatgagctgaaggttacgtttgatcctctagccttgctggcaattgaatcatactagtatatccgatgaagaaacaaaagtgcgtggagaagtggaggcacgtctatgaactctacactctgcagtt

SEQ ID NO: 90562 - DNA, 283 bp, Glycine max
  unsure (1)..(283): unsure at all n locations
tccgttctccctctcctctcgcttcatacacaccagggcggcacgcgcagcgccatgggcccgccatcaccaacccacctctcttcaattataaacctatcctatatcatcattgacccaagctcacgcgactagtgggtattgatttgcggtcgcgcagatccaggatgcgattcgngngttaacttccaaggaaccagttcattgctggttctgctagcangaggttggatttcagaggcagaagctttcagccaggcgggctcagggcgcgggcacatca

SEQ ID NO: 90563 - DNA, 250 bp, Glycine max
atggaaagctgcggataaagtttcggtggatggatagactttggattggggaccctgctgctattgttcttgatgatgtccacttattgacggatgcttctaatggcttggcgttttgttcataggcttgtggtattctttcgataccatatctgatatattgcacccatccattgtgcagcatttcgaatttagcaaacatcttaacctgcagtggacttgcaagttgcacataactatcatcgcatcg

SEQ ID NO: 90564 - DNA, 282 bp, Glycine max
ctacaccaaaatcatctcttcactaatggaaggtggactaaagggaagctcattacaagatatgaagcttttgtttgttgaaatgggtgttggctatgaccttcatggtcaggacataacagctgccgcaatgagagcatgcagagatgcaatttctgccaattcaattccagctttccgtaaaggtatttctgaattgggttttaattatttatccattcagccattctatacattagatccaatccaatattatttttcacataaatgaattttttttaa

SEQ ID NO: 90565 - DNA, 280 bp, Glycine max
aggggacagtgcctcaggagctggcaatgctcattctttgacttaggggaggttggtaacaataggatttgaaaatctgaatgatccgagttcgtgtgcaggtaattgtaagtgtgtagctgtttctgagacatgggtgtctgcttaggctttgattacgttagtagtagataacaaactggctttgtgggtgtctgacagcagtacagcaccatgtgtatgtaagctggaggtggaaggtactggtgtgttacaagtagctgatcgaccttctcgtatg

SEQ ID NO: 90566 - DNA, 186 bp, Glycine max
tggcagaaatgataaacagtctttgtggtgtgatgaaaattgatgcgtgaaaggcacactgctgtggctgttgtcaagatgcattgtagaagtgttgagatgatgtgatcctcgattcgcaagtatcaagcttaaggtgctgatagagaatatggcacaagtcaagttcactaatgtctggggagg

SEQ ID NO: 90567 - DNA, 202 bp, Glycine max
tacaaaactaaccttttgcctttgctccttggtccttggcactgaattggcaacaacaacattggctttccagatgattaaggttgttattaaaagttcaccaaaaggttggttttgaaggaccacttcaaggagggtttccagaattgatgcaggggaattgcctgtcttgaaaagccatggtggtaggaaatttaatagg

SEQ ID NO: 90568 - DNA, 270 bp, Glycine max
  unsure (1)..(270): unsure at all n locations
cccgncctcgcccggcgaatgggctgaccctgtttctaaacccggcggcgacgatgcatggcccgaacgaggtgtttcggcgtggcgttcaacggcggcttcaatcagcccatcatgtgcggcggggagcgacgcagatgacgctgcaggagcggggcaaagccgatccgcccatctacagcatcaggatacgcgtagcgcagcagccgtaagcttgatcttctccttcagcaaggggccgagtgggacgggccgtacccgctcaagttc

SEQ ID NO: 90569 - DNA, 273 bp, Glycine max
tgtgcaaggatcctcaatgtttgttgtgtgaacagagatacgcgtttgactttggcataaagttaactgttgtcttcttcttcccttcccctctctctctctctatctccctgatgggtatcttcaggtttcagtttgatgatggaataaggaaagatcattgtcgtattaccgatgactggatgacttttttgcagttttgaaaacttgttcgccttgtggcttgtgttgctgcctaagccaactactgccggcagcatggcaattgcagcg

SEQ ID NO: 90570 - DNA, 250 bp, Glycine max
gttcgagtgaggaatttccagtcgggtccccaactctgtcactgtctggtaaccctaatcgtggaggcaagaaaagtttggtttcctacggggatggctcacctgattcagctgggaagtagggttccaccggggcattgaaatgtatcttacaccgttagcccattggctgttgatcaagtccatcaatactttttgttatatttctactgtaagaagcggtttggtccttgagctgcccagctgttac

SEQ ID NO: 90571 - DNA, 189 bp, Glycine max
ctttgaagtagccattgctttgcttcaaagttgaacacccagaatgtcgttgtatctctctccctaaccttaaccttgctggtcagtagcaccagtaccaaggttaaggttagggagagagatacaaccacattctgggtactggtgctactgaccagcaaggcaaactcagcggaaactgtttctttc

SEQ ID NO: 90572 - DNA, 285 bp, Glycine max
ccacacttttcatttcccccaaattccgttctctcagtcacaggtaatcacaatctcctcattttcctccaatttcatgcaattgcttttgtttctctccttcaattatttctcctaatttcattttattcgattcatataagaaagataattgtgaactaatccaggaccatgcaattcatttcaattggaatataatatagtatacacaaagagggtctgttgatttgttggttaaggccttagaggagagatagagatactactactactagttctgtctgt

SEQ ID NO: 90573 - DNA, 179 bp, Glycine max
caagcatccacacaaacactttcacgtcgcacgggcgctgcacacagtgagccgcagcgtcggcaccaatggcttactaccaggaggtggactactgctcggaagaagtgaagtcggtggccccggacggcttcggccggcacggaagcggcgtccagcaacacgtcgtcaaagagaag

SEQ ID NO: 90574 - DNA, 267 bp, Glycine max
gaataaccgaataaggtctaacagcctacaatagcttatgtggtcaacaactaaaaataagtcatcacaaaggggccttaatcaactccaatccatctgtcggtgccgtgagccactgtttcccactggaacgccgctggttcgagaaaacgcggccacgcatgcaaattgacttccccagtctaccaccatgtgcataccacatggaagccagtctcgtctcgcgcggcaaccccgatcgagattatggatgaaaacggatggata

SEQ ID NO: 90575 - DNA, 250 bp, Glycine max
aaaaagtttgctgcgccctgatttccatgtctcggcccaaaattgttgggtccgcaaaggtggtgctaatatgggagaggtaagtgctgaaatgctggtaaatttgggaatcctcttgggtattattggtcacctgaacggaggcagtttttgaatgaatcaatgagtttgtgggagataagttgctatgcacttcaacaggtctgaagttatagctgcatggggaactcttgaacacgtaacggtacac

SEQ ID NO: 90576 - DNA, 242 bp, Glycine max
aatgaaccctgctcggatcgtggggatgtctctctctgtaaacgcagaaggcggtgttcctggcgccaagactgggcctggtgattttaggcttgatgttgcgtggatcaaagcgatgatagctttgtgaactccacaagtcatagttttatgtcacatcggccctttccttctttatcaccctgcctcagtggcgacgctgaactcatctagcgaccacgagcacaggtgtatacatagca

SEQ ID NO: 90577 - DNA, 341 bp, Glycine max
cccccagggaaaccgcctttgggtttaaaaaaaccccttcaaaggggggttttaaatgggcccccccgcccccaactaaaattttttttttcccaaaaaactggggggtgtaaaaagttggggggtccaggggaaaaaaagggggtcccaaacctttttttaaaaatggcccgcctaaattttaaaaaggccaaggtttttttttccccccccttttttcctttttaaactaaaaaggttaatgggggggttaccccccaaatttccccaggaccccccccggggtttgggaagcccccccccgcccggggggggccccttttttgggggggggccccccc

SEQ ID NO: 90578 - DNA, 285 bp, Glycine max
agggaactatctaagggcctgtttgtttgtgatgataattatttccaaaatatataatcttaacttattttgatgtggacagattacaatcccaaacaaacaacccctaagttataaaacagaccggtgggggatactacacaacagacacttcctcagatggtacaaacgttcgaaggaacaggattaccagaaaccgcaaacaagttgctagtggcagagatacaactaaaaatttgaatatggtgcgaatattgcacatttggacatctaacaggcagaacc

SEQ ID NO: 90579 - DNA, 416 bp, Glycine max
agtgggcaaattctgcactatacttataatattatcaagcaaataaaaagtaattaaataaattggaagtacaaacataaaaagttcatacactataatttaccagaattaacaattaatcaaggatgatagttgctctataacaaaaactatctccttcattttgtttttcaggagaattcatttacggttctatacaacagtaacagaaaaagtaaaaggaacagaggtcgaagcaaaacactgtcattgaagtttgcacttcgcataaccacggcaaaaaatgagatttttttcttttaccccatgtaaaaaataaattcatacccgttgaaacttccaaacagacttcatttaccgttaacgtttgtaaaaatagtctagtcttctaactattaaccatcattaccccgtca

SEQ ID NO: 90580 - DNA, 329 bp, Glycine max
ggttcggttaaccaaccgggtttcgtagtatgcgagcatcgttgttggtgggcccccccccccccccgtgccacccactcagaccgaattaaacattaaaatagaccgatatcacccgagcgacatctgccgctgaaggtatcatctgagccgatcaagctaccccccgattaatgcatccggagatcactaacggcttgccgtaagccgaatatgacgcaaccgatcataatgcggaatgagcccacgagaataacggacctagcctcatgagaaaggataatcgggaggcatgcctgtaaggctgccacgccctcctgctgggggcg

SEQ ID NO: 90581 - DNA, 388 bp, Glycine max
gtgggcccggccccccccccataaataatgaaaactaatagaccgagctaacgagattgaaagaagacagaaacgcgaagcggatcgcggacggatcaagataaatgagagtgacataacaaaattgcgagaaatgggcacttctaccccgcatataggaagcggactccgcaccagcagacggcatacttcaaaccacgaatataaatagcatggccgcgtcactagaggagaaaccggcatggaacaggctgccgagcactgacctcgaggcggatgatgcgcttgataacggaggcccctccggcgatgcggccgccgatttactcgataatcggagatttctatacctcgggcgataatgctgacaaccatttctgctcgccct

SEQ ID NO: 90582 - DNA, 373 bp, Glycine max
  unsure (1)..(373): unsure at all n locations
gggggccgccctttntttttttttttaattttttttttttttcctttttttttttttttttttttttttttttttaaaaaaccaaattttcaaaaattttttttcccggcattggggaggatctttactcattttttttaagggttccccccaaaaacatttttgggctccctttaccattttttacaaggggaaaaatcatgtgaacaaacatgtttatttttcctttaaataaaatcatcaagggtgatttgccccattttaaaatttcaaaaggaaagttcgtttttccatggggccaagctcaacaaccaaattgggatatctgacagggccccccctaattgccagaggttcttgtcctttgtcccct

SEQ ID NO: 90583 - DNA, 394 bp, Glycine max
tggctgattcggttcggttaaccaccgggtttcgtagtatgcgagcatcgttgttggtgggccccccccccccccccccccccccccccccccaaaacaaaacattcttcctaacccccgcattggacggggcatagctcgaacagaaaattacacggcaaccaaaccaaaaagaactaacgtacaatgaccgacaacatcagacacacataacataatgacagcactacaatactcctaaatgaaaacaactatcaccagactatcgagcgacgagagacaaactgaagcccaatccgtggaaacaaacgaataggggcctcccccctagccctgattgagtacgccttggtttccctaagtgcgctagctctataacctaacgataaccctg

SEQ ID NO: 90584 - DNA, 321 bp, Glycine max
ttcgtagtatgcgagcatcgttgttggtgggccccccccccccccccccccgcccgcttccctcccccccccccttttaaaagccgacaacacaattcaagaataaatgactaatgagccagacattctccttgataccaccacgacactctacagactacataacatcaaaagcctatgacgcaagatagccccacgatccgaaagtcgcggtggccttatgagtataacgcggagcacggagacgatagagcgcctaatgacgtccggcggcggcataatattactcctagaattacaggacttaacgaacgcgcagat

SEQ ID NO: 90585 - DNA, 228 bp, Glycine max
ttgttggtgggcccccccccccccccacaccgtaactataaaatcagccctaaaaccgcattaaaagagatacttcaagaagctaatgctcccacacagaatccaaagaagccccccccactcacaaaacaagaataacagacagacgaaaatgaccgaccggggccccaaggtccccgggccactcgctaaacaaccctaatgttgaaataaataaaaaagctattt

SEQ ID NO: 90586 - DNA, 450 bp, Glycine max
aatgcgttaaccgttgcgtatgttggacggaatgctaacagacgcttacctagttgtacttcttcgcggtactcaataggactaggacgtataatttgaatgggcggcggtcgcggtatgcgaattatcttagccctagttccggcggaggaaggattggggtttatataagcgctagtcgcaggcggtggggtcgtggactccgaattagggtccggtcttgttctagaagacggcgtcggcgctgtatctgcagtagaagtagttcaggtcgaagaatcggaagcaggtatgtgagtggaataattcgacttagcgctggaattatgagtatggtcttccgttcgcgtatgattatcagagggcgccgtactggtagttgaatcgcagttacttggaatactttcccgggtttaggggatttgggtcagcagctgttctcgttctggt

SEQ ID NO: 90587 - DNA, 436 bp, Glycine max
agcgtaacagcagtgttttattcttttgtacaaagtgccattgagtgataagatcctgcagcaacataaaccactctccgtaaattgcattcaaggcttattgggaacacattactccaagggtacaacgtcccatcatataacaacagcagggtgtgataagaaccagatgagatctgtttgatgttgtcatagtgagctatcttgacaggctctttcccaatatcccactcatacacgtcaccatcaccatcaacagccacataactatcctctctagcagatatcatagaaagatttgacagctgttgtatctgatgaatctctctttttggtccccagcagtgcataattccgatgtctgtcacagctgcggatatgcggaatttagtgctcatctgatcgacattttgaagactctttagtgctgtgggca

SEQ ID NO: 90588 - DNA, 118 bp, Glycine max
gtgattttgagaggctggattgattacgacacttgactctgctgcacgtgctgcatttttggcaaacgaggcgactaaaaaatggactccaagcaatcaggatctggtggaaatagcc

SEQ ID NO: 90589 - DNA, 479 bp, Glycine max
gttcggttaaccaaccgggtttcgtagtatgcgagcctcgttgttggtgggccccccccccccccccccgagtccgaaacgcgtctctcacgagcccgcctagaaacaacaaacaattataagcccacgcaacaccgacgaataaatccacaaagagaaaaccctaagtctagacttagagtatattacccaccgggacccctcgagaccgagacacagagacacccccctacctgactgcgctcccgccaattagaagcaagcccaaccaggacactcagctgacggcaaatgggccccgctcggactggcacatgcctgatcagaccctcccgaaggcgtgctaaagaacctaatggaaaacgactaacaggaaatcggcttgatcggaagaaggaatgagaaccacggcggggcaccttcaatgggactccaccaccctgaccgcgaagcccattctcacctcgggacaactctcg

SEQ ID NO: 90590 - DNA, 447 bp, Glycine max
gttcggttaaccaaccgggtttcgtagtatgcgagcatcgttgttggtgggccccccccccccccccccgataaggaaagctccaccaaaccagccacagcccaaggcagacgccccaaacaaaacaataaacaacacgcagatgttacgagaaaagaaacacaaaagagaaggccctttttatactccctcaacatccaacctcttaagaagtacgtattccctattatgcagaaccccttcccgagacctaatagagacgcgcccgcccgccagaccccgttcctgccccgcccgacaccccgcttccccgcaccccggaaccctccttacagaactcgtccctataccctagcggaagcatagaaaaacgctatagtgataaggtaccaaggtaggggactgacgagggacgtccacgacgtaaagatatcatctaggagaaga

SEQ ID NO: 90591 - DNA, 431 bp, Glycine max
gttcggttaaccaaccgggtttcgtagtatgcgagcatcgttgttggtgggccccccccccccccccatggaagaaaaagaaagacagaaccggcgacgacacgacacgctccggctaaagacctaaaaagatccggcgggggcgcccaagataaaggaccctgaacgaacacacctcgcggagggcgcgcgcgcgcgcgcgcataataaacgaaagcggatacaaccacgataaggcccgctaccatgcacctatacacttccatgatggccccgaggaggagcctactaatgcttctatttcacgccgcgaaagcgcagatggccttttacgcgtttcttttcttgagacgctacgaactgggaaccgagaggccgaaaaaaatttctcctgcctacgcgttcatgttgcgcccctcaatggaacgctc

SEQ ID NO: 90592 - DNA, 398 bp, Glycine max
ttcggttaaccaaccgggtttcgtagtatgcgagcatcgttgttggtgggccccccccccccccccccccccccccccccccccccccccccccccacgcgctaagccgaaaaacgggcaatcctacgaccgatggcggaagaatagccaaactgttcgaaacattacttgactcccaaaatgaggaatgatcaatataccgaaatcaaagtggaattaaagtatgcccctcagaattaatggaacgccaatcaacaccagaaaacaaagcttttgccggtatacgaatatactccgacttggcgatgactacattcgcggatgcggcctcgaatccggcggtgctagccgcgaagatgtcggcccgcgggagtaggcgcaggcggatgcggaggggc

SEQ ID NO: 90593 - DNA, 429 bp, Glycine max
gttcggttaaccaaccgggtttcgtagtatgcgagcatcgttgttggtgggccccccccccccccccccccccccccctactccagccccaccctacgattccccaggggaattcatatatatgccaacctggaaatcacaccacctcgcccatgcgtgcaaaaacggccaccctcctaggcttcccacctcaacaaactatcagctatttaccccccacagaagttacacgaccctccccaaaaaaaaaaaaaaaaaaaatttgttggtgggccccccccccccccccctttaaccggaaaactagagtccaccaactcaaagcgtaaacgcgggcctagagacgcgaatcggaaaaccacaaagagacgtcataccaccagaacaacgacaaatacattgggaccccctgaccaatgaatatttttt

SEQ ID NO: 90594 - DNA, 450 bp, Glycine max
tggctgattcaggttcggttaaccaaccgggtttcgtagtatgcgagcatcgttgttggtgggcccccccccccccccaaagacccacacgcgcacccactcacacacccaaccggcgctgctgatttaaatgaatatattgtcgcactatcaacataaaaaagccagattgaccgcggagtctccctgccccccccccatgctagcagcaaagcgaccatcgagaaagaccccaatatatggacttaaacaaaataaaaacattccaccaccaccacccgccccagctcggagattcgtaaacaaccattactagagggcaagcaattgcgtaccaagtatacctgaacagcctttaccttcaccgcgggaagtgggaaacttttaacactcccgctcactgttgtcactctacgactgaaccgcctcctaatagcgggaccacccggc

SEQ ID NO: 90595 - DNA, 390 bp, Glycine max
ttcggttaaccaaccgggtttcgtagtatgcgagcatcgttgttggtgggcccccccccccccccccccccccccaatagatgcatacatatatggccacgcacccacacaggaccgggcttacaaagcagaaatgaatgaaaaccccgaccccactactagcatcacaacaacaccacactgcttccgcatttgaagcagcatcggcctgcacttgcgacagaatgcgcacacttgaagcggcatcttataaagccggacgcctttcactacgccgcgcttccgcagatgccctaggcttcccggacaatgctactgactgagcggaatctgctgcgcaggctacttacgaattcctccataggaatgatgacgggagcgaagatgccc

SEQ ID NO: 90596 - DNA, 254 bp, Glycine max
gttcggttaccaccgggtttcgtgtatgcgagcatcgttgttggtgggccccccccccccccccccccccaaagaaaataagaaatgaataccggagaaacgatccaaaaacctgacctctcataaagcaactttagaacagaaccagatgaagagacccgacaacaacaacaacaaaaaaaggagaatgaacaccaacggaagagatgaccaggaaccgggatgaatggaccaaagggcaaacggcgatcgat

SEQ ID NO: 90597 - DNA, 409 bp, Glycine max
gttgttggtgggcccccccccccccccccccctaagagacgcgcataaaacaaaaaccaaataacctataccgatttggaaaagataatcagaagctccgaatgacgctaggaattcgcaaaagacaaatttcctggtggccactcttgatgatcgctaaaagcaaaatcgcagacaaaagctcaataataaaactgggcagatccgccgatttggggatataaaaataattttttagactaataaaacctaagaaacaaaataaaagacaaaaccatagacttgcccgcccgagcatcgaatcgacgctgagctgagcaacttgttggcagcttcctggcgattgatgctgccttaccttgggaccgtacgttaatggagtaggggccggagtacacgggggggctgg

SEQ ID NO: 90598 - DNA, 490 bp, Glycine max
tggctgattcaggttcggttaaccaaccgggtttcgtagtatgcgagcatcgttgttggtgggcccccccccccccccagcaataaatccaggagacccaccgccaaaaaaaacagggacaaacagacaaagactatcatgatcatcatcaccctcaagcggcctcaagcacccacgaagacttacaagcagtcaaaatgagatcccggacctggagaggattaggaaagggcaacaaaacgggggagcgcaagggccgaggttcctctgcgccggggcgatcgccttaggctccggcgacgcgacggaatacaaaaacgagatccttagcggagactccgggtctccttgcgatgagtctggactcgtgagcgatgccgcgcccgcgcaagggcatgccgcgccgaaggggagcgagaacaagatggggagggttactaacctgacataaaaagcctccggaacgaacccgtcgtagtaaaggaagccg

SEQ ID NO: 90599 - DNA, 379 bp, Glycine max
aaaaaaacaaaagggggttttaaaaattttggttttacaaagattttcccatccttttttgatctttgggatcaagctcaaagcccaatttacaaaaactttttttatggcttttaaattaccagctttttttggcggcttattccccttgttttgaaaaaaaaagggaactttttaacttctggcattggtcgggcccaagagattttaaaccgttttttccccggttttaacacaaagattaagggggcctttggtttgggtttgaatccccttcaaaaacaatttcataaaaatccccttcaacctgctttggaaagggggatttttataaaacaaaccccctttgggtccttgaactagggggccgggggggccc

SEQ ID NO: 90600 - DNA, 354 bp, Glycine max
gttcggttaaccaaccgggtttcgtagtatgcgagcatcgttgttggtgggcccccccccccccccccccccccccccccccccccccccccccccccccccccccccccccccccccccccccccccaaaaaaagaaaatccttccccaataacacctcacccagaaatacaccgtgacagccgcactacgcactatacgaatgggaaatgagaacgcagataaagcccgccgactcgacccaaaccagaatgacccccctagatgcaaccagagcctcgggtaataataaattaaagcccccaagccgctggacctcggtttggaaatttacccaaaagttcttccgggggt

SEQ ID NO: 90601 - DNA, 325 bp, Glycine max
gttcggttaaccaaccgggtttcgtagtatgcgagcatcgttgttggtgggccccccccccccccccagactgaaaagacacacatcaccgacgacgaaactataaagcctctatcaaatttaaacccgacgcacagatggatgtcaaaccaaagcaagagaatctaaactacagaggacgaccgcacaccaatcaacacacaaaaccgccacaaccacccgcccacccaaaggtactactcacgcacgctccccaaccaaggaaacgaaaacgagcccctaggaagatcaagagcgcctacttcttccaacccccggatgagtt

SEQ ID NO: 90602 - DNA, 213 bp, Glycine max
gttcggttaaccaaccgggtttcgtagtatgcgagcatcgttgttggtgggcccccccccccccccccaaaaaaaacaaacacaaaacgaaacacccaccaataacaaaacgacacccaatcgcaccaacgactcacgggaaagacccactggccccgactccaccgaagttcaacgtttattacgaggcagcccaccagaacccacaaggaa

SEQ ID NO: 90603 - DNA, 389 bp, Glycine max
ttcggttaaccaaccgggtttcgtagtatgcgagcctcgttgttggtgggccccccccccccccccccccccccccccccccccccccccccccccccctataaacgaaaataaacgggccttaccctacattaacaaaattaaaatctttaaaacgggatttcagaaagcctcgatgatcaaaacctttgtactgctcgcgaaaaacttcccgacgccacagtaacctgagagaaccgagaatttcctgcacgatgataaatattgagtgggaggaagaaaaccatgccttagccctagacccccgcgcgccgccgataattaggaaaaacctcggaaaagcggaatgccgatgacgcgcgaacccactgggcacccgacatccccct

SEQ ID NO: 90604 - DNA, 495 bp, Glycine max
ggttcggttaaccaaccgggtttcgtagtatgcgagcatcgttgttggtgggcccccccccccccccccgaaaacgagctagttcatgacacaaaacaaggactcatccgaccaactagacgaaagagaaggcgggaaaacttgccgcattagacaagagactccaccctaattaacaacaacaacggcagcgatacaaatcgtagccgatgcggggaccacccgtgatgcggacgagaacacgactaggaggaacgatgcgagcccctcatcatatcctattacattccttggaaccctatcacaggccgaacgggctcgcgagccggcgacgatcgaacacacgaaattagggaaaaccgaatgggcgcctcgtaatttgacgatgaagcgcttaagcaaaaggagacgccttctgacgcttttcaggccgactaagatgacgagattttagtattgaacgaaaccgccgatcgtacgcctaacttcgcgctg

SEQ ID NO: 90605 - DNA, 459 bp, Glycine max
tggctgattcggttcggttaaccaaccgggtttcgtagtatgcgagcatcgttgttggtgggccccccccccccccccccccccccccccccccccccccccccccccccccccccccccccccctaggaaccctcaaaccccaaaagcatccaacctcaaacaaacgcaagagacgaaccagcctcgaacgagaacccctaaggtcctaccaaaaacaaattttgagcacactacttttacacattttttgaggaggcacctcacttccgagggtacgaccgagcacatatttaaaagaaaataatagaaaagcaaaaataagaggagaatcccgatctgacccccatgcaccgacataccataccctacttgctagccatgataaacaagccgggcgaccagaggccgcctaaggagatagagaatactgcgcgggccgctacctaagacccttgga

SEQ ID NO: 90606 - DNA, 377 bp, Glycine max
gttcggttaaccaaccgggtttcgtagtatgcgagcatcgttgttggtgggccccccccccccccccccccccccccccccccccccccccccccccccccccccccccccccccacccctaaggttcccgaggaactaaatttcgcagaagccccacacccgctggcccggttaatctaataagtccaaatacgcacagttatagaccaaccattataggaacacgaaaacctacacctataaacaccaaaatttgacaacactacattaacatttttttgagagttgaatattaacccccccaaaagccaaacttatggaccgcctacgacggaccggaaaggggaactaccacctagtccgcctatttggaaaa

SEQ ID NO: 90607 - DNA, 480 bp, Glycine max
tggctgattcaggttcggttaaccaaccgggtttcgtagtatgcgagcatcgttgttggtgggcccccccccccccccccccccctgccgtgacgaggtgaggaggcagcccccggagtccaccggactctcaaaccccagacgacacattaaatcaaaagggaaagatcaagaaaaagcttaagatattaatataagaattaagagaaaacgagaacaccgataacccgatacgagatattaaggaccggacttcctcctccaccgacaccgcgagagaagagaagattataaacgaatgaaatagacccaccgcagcgaccgataaagaaagggaatgtccctacgaagccgtcttgaccgcgataccggttacttaatacactacaaagactacggcgaggaccgcggcgaaagaagcggatacggggcccggagggagcgccgccgagatgccgacatcaggaaaggggcgcacgg

SEQ ID NO: 90608 - DNA, 438 bp, Glycine max
gttcggttaaccaaccgggtttcgtagtatgcgagcatcgttgttggtgggcccccccccccccccccccccccccccaaccaacacacctcatacatgagacctggaatactggacactcccagacctcccacgccaataacttcggcattgatgaataagattaatagaaaaaaaaaaattgccaacaatcatggcacaaagcagaagcattgatcagccgggaggaccctagaaatttcttataatcattatgaacaacagaatatataatataccgacatcaccctacctcgacacgaccgatcatcccaaataggggagatcctccacgggatctgccaaacccgcctttcggcgagatagaggtccatatatggcgctaacttttaggtatccaataatgcgaatccgacctcctgggacgctgctgagccg

SEQ ID NO: 90609 - DNA, 493 bp, Glycine max
ggctgattcaggttcggttaaccaaccgggtttcgtagtatgcgagcatcgttgttggtgggcccccccccccccccggcgctctaatccttattcctgccccaatactcgatgactctctaaaagctcgcctcccattcttaacacgcctagatcacgttaacagggctgctattacggttctgctggctaacgactctgcctgccgccctcaccaccgccgactattaacggcttccggaggcccttagccccgaggaataaagacacgaggattaaaataatcggaaataggactacatgaatctgcatatggaaaaggaaataggacccctctttacccccgaatagccctttcaaatcggcacccgcacgacgatctactccaaataagattccgaaaatttttcgagggaaacactaacggcctcgaaaatctatcaatctcggatgcttctttagctgaggatacactatattaccacactatact

SEQ ID NO: 90610 - DNA, 397 bp, Glycine max
gttcggttaaccaaccgggtttcgtagtatgcgagcatcgttgttggtgggcccccccccccccccccccccccccccccccccccccccccccccccccccccccccccccccccccccccccccccccttttggaatataaaaataacaacaacacagactggcatgcacccctaaaaatgaaccaaacacctaatagagggcatgatcatgtgaaggatatactaaactaaaaacttatgaggaaaaatataaaacagatgatcatgcaaccagaactaaaactaaacccagttgttgcccggggggccagggaggaaatcaggagaaaccataattttcaaaaaaaaaaaaagactcatacctaccttaaaaagagaaagaaaagggggggga

SEQ ID NO: 90611 - DNA, 409 bp, Glycine max
ttcggttaaccaaccgggtttcgtagtatgcgagcatcgttgttggtgggccccccccccccccccccccccccccccccccccccaaagggaaacaacaagcgcttcttaatctttcctgatggctaggagcgacaaagcggaatcaggtctagggataagcccggggattacttaacatgccggaaaggaggtcttcgtattacggaccccgctggcgcatggacctgggctcgccgaggacgccgattgggccgcggaataaccgcgaattgaactcatgcgaagtgctagggaaagacctctgctctagcgcgcacactgaacggggaaggcggacgccgtccgctactaccacagaaacaagtaacaacccggccgcttctccgcttcggcaaaagacgaccca

SEQ ID NO: 90612 - DNA, 471 bp, Glycine max
gttcggttaaccaaccgggtttcgtagtatgcgagcatcgttgttggtgggcccccccccccccccccccccccccccccccccccccctaatgaaatcgcgcccctatccccccccccaccgggagagtatggaattaaagcccagaggacgacgaagaccggcgacttttccatatagaacagaactgcgtacgagaaaactaataataaaggaaaaggggcctatagcgagcctgacccccccccgcgcacgccccgggggcccacgccttaagataatcctcgcaagcgccttgcctaacatacgacataacatataacaacaagcaatttccagcccgactacgcgagagcacacacaaaacttgcgtaatggcgctcccccccccccatctactagaccaagaccaagacagacagactccaaatataggacacgggtactgtactgtagaaatgtatttattat

SEQ ID NO: 90613 - DNA, 393 bp, Glycine max
gttcggttaaccaaccgggtttcgtagtatgcgagcatcgttgttggtgggccccccccccccccccccccccccccccccctcgaaagacacatgaggccccaccgagaaagccaccaatgacaaaaccgacgacgtgacacggaagacctacagacgaggataaacatactgcaacacacactctcagacgagctggctaataaaccctcgaactacccaggtcggaagcgcccgtctaataaggcctcgacaaaccgacttaagtctaatccggcacaaatatgcttcccgcgctcctactccatgcgcttcaacttcggaaaactcccgcgggcacgagcctttcctattaaaagttgaacatatagcgtcttgcgtccataacaacct

SEQ ID NO: 90614 - DNA, 383 bp, Glycine max
tggctgattcaggttcggttaaccaaccgggtttcgtagtatgcgagcatcgttgttggtgggcccccccccccccccaagataaagaactgcccatcgccgacctacaagcgataaaatgccctaaacaaaaagaaacccattgcctcgaacagaccaatcggctgcccaccgcgtccttgcagaccggtgaaaattctcgcatcgagcgaatactaatcccacacgccctacaccaccggccaagtaattataaagaaagagctaaaggaaaacaactaactgggggggatcgaggatgctgaattgaggacctgccgaactctcctacgcaggaggcactgaaaaaactaaagcatcaccagagtcgcccgggcctccct

SEQ ID NO: 90615 - DNA, 395 bp, Glycine max
atgcttcgtggctgattcaggttcggttaaccaaccgggtttcgtagtatgcgagcatcgttgttggtgggcccccccccccccccccccccccccccccccccccgaaagcaaactctgaacgcagcaaaacacccagcccacccagaaacccgtctaagtaactgggccggaccatcaggccctattggccaccaacgccaacgcatgatcgtacaggagacgatccggaacgctgccgaaataaaggatgacgcccgacccgatatcatcagagaccgcggaaactgaaacgccggcggctaaaaaatcgatggattaattccacacagatgattttaatacattgatgacttcaagacagaaggtctaaactacacaaggataaaggaaaa

SEQ ID NO: 90616 - DNA, 469 bp, Glycine max
gttcggttaaccaaccgggtttcgtagtatgcgagcatcgttgttggtgggcccccccccccccccaaatcaactgataacacaaaccccacctacatcaccgccgaactcccctcgacctacgacatcgtcagataactcccatttcacacaaaaagaaccgacacacaaaatcaccaacaccacccaaatgaagagaccacaaaaacctcataaaatcccttttttgacttggggcgccctgcggacgaactgcggtggagctaacctaacggcccaagaagcccgccgcgcccaagccctaccctaactaaactgctagccaagaatcctgccttagatgcaacgcctgcagagtgcgtcgaagaccgaccttaggaacctgcagaggaaactgccgcccctcgaggacaaacggagaagcaccggcgggcagtgactgatgccggaggagataccttggacgatc

SEQ ID NO: 90617 - DNA, 358 bp, Glycine max
aaagtaatgcagaatataaattttattgatagtattcttcaatgttttgtcattgatcatagtcgtacagaatgtttagggtatataaaaacaattcatatataaaagtattaatattatttaaagcaacacattataaaaattgtagaaaagtttggggggcatggcccctctttgctccatcaatgctccgccactgaaattgaatcctttaacaactttcttctctttaactttgatttgaatgaaatgctaacttaacaagttgcttggacagctaatcttgctacacgctcgtcaacattcattggaccaattgctacaccaaatgcttcttttgtcaccataaatccacaac

SEQ ID NO: 90618 - DNA, 463 bp, Glycine max
gttcggttaaccaaccgggtttcgtagtatgcgagcatcgttgttggtgggccccccccccccccccccccccccccccccccccccctgtcaaacaaccccccaccccacaacaaaaatgaatgccgaaaaccagatacgaacatatcggaatcaatatagaactttctgccgcctggggaccggcgacctacactcgccctgggccccactgagagaggccccgaaaaccaaggccgatcttacttgaacttaagcgtggcagtacaccgatgcatatgggagaccttaaaaacacccgcacagacctttcaactgacgactgatcccccgaataacagcggatctacccggctccttttggaacgaggccgccggaagctttaaccaactatgaagccctgatgcctactaatattatcaattcgcgcgcgctagctcggatgacaaaccatagggacaa

SEQ ID NO: 90619 - DNA, 356 bp, Glycine max
gttcggttaaccaaccgggtttcgtagtatgcgagcatcgttgttggtgggccccccccccccccccccccccaaaagtgctaatgactcatagacccacactcacctaaaccaacgatctccgaaccttaatgcgagaacctccggacccgcctttagaaaaactaaaggacaaccccgatcccgcctgggcaacttccccccgcgaacatgcctcaattgatctctagctctacggatctaaataaaaactcacggaagcccccaccacaacctcgaagaactaaatccgcgagccgcccgggcctatacctaccagctaaatgcgcctccgaagacagcgcggctgagagaca

SEQ ID NO: 90620 - DNA, 380 bp, Glycine max
tggctgattcggttcggttaaccaaccgggtttcgtagtatgcgagcatcgttgttggtgggccccccccccccccccgaagagtaacccttaatcaccaccactcagtaaaccccgagtcttaatgaaggagtttcttagggaagccgtcatcaaagcagcgatgagtaatcctgagaggcaaactaaaataccgccgcagacactcctttcccagaagaacacgacaaaaaaccgaggacaaaataacagaaacagaaaacgacaaaaagacaaaacaatgaaatgaaccatcaggggaaaagaatcgacggtatcctgtgcggcggaatcagcagacccgcctgctaagggaggataacatggcgctaacgctacac

SEQ ID NO: 90621 - DNA, 356 bp, Glycine max
gttcggttaaccaaccgggtttcgtagtatgcgagcatcgttgttggtgggcccccccccccccccccttaaccaaagaccagcgcccacccctactccactaacggaaacccacacagaaaacatccctgaccgaagccacaactgcgatgcaatttatttaaaggggcgcgccttgaagtcttataagaccagaccaccgacttctacccgcactaagcaaagtaagcccctcctccttgcctcatcaacccttccggaacacgtaatacccgacccgactgcactgagaacgatgcgagaagccctacatataacaacggaattgacggagaataaaacgctgacgacgccct

SEQ ID NO: 90622 - DNA, 300 bp, Glycine max
cctaatcataatgggagatccatgatcataaaacttaagcttttgtcaagaaaaaagtacattttatcggctatcatgtttctagagttcaccaaaccgcaccaagcgccatgcaaatgagttacaagtaaatactttttttgtacagtgaataaagaagtttcaattactaatggatgactaacgcctcactcataagatttctactaaagcatgaaacaagaacaaaggtttttctaaaatccctcctattctagaatatagaagaaggtggagtcctgccatattataacttgggag

SEQ ID NO: 90623 - DNA, 385 bp, Glycine max
aggttcggttaaccaaccgggtttcgtagtatgcgagcatcgttgttggtgggccccccccccccccccccccccccaaggagaggcaaaataaaatccctgacagtccaatccggagaaacccagatggatggcgtaaccctcccgatgcacgccagaacaccagatcaagggacgcagcacgccgctaacggccatctttagcagagcccacgatgaacaatgactcggccacacacatcctctcctgcctgcatgctccggagacatccatttagaaaacaacacaactcgcaggcgcctgtcccttagcccaaataatcaaggtacctatatcctgctctggatccagtcccggcccttcctactaaggaaccaccaaccc

SEQ ID NO: 90624 - DNA, 338 bp, Glycine max
ggaccaattgggaaattttaaaactagttaattggaaataaatttaacacatcaattccttggcaatcacaattttgaaccggtgattaaaaataaaggggccctttatgagggggatataggggggccccacctatgggggggttcacccgatcattcacttttggggggaaacaaaagaggacaaaacttaaaagaaccccccaggtttcagggcatttttagctattcatagattagattgggggggtgacttaacaaaaataacttcccttattacacctttttgaaccacaaacacaagaggctctcccttttgatggaacatttggccaggg

SEQ ID NO: 90625 - DNA, 235 bp, Glycine max
acagaaaatttccccccttactttattcatctagccatttacaattaaaatcagggggattaagaaaaagacccagagacatgatgatgaatacgggagtgatcagtagcactgggaaccccccgaaagaaaaaccacaaggggctgcttactgcttaaaggcccccccaaaccaaaacctaaaagggatcggtaaaaattttttcaaaccccaggctttgaatagaaacttggg

SEQ ID NO: 90626 - DNA, 490 bp, Glycine max
tggctgattcaggttcggttaaccaaccgggtttcgtagtatgcgagcatcgttgttggtgggcccccccccccccccagcgcgaacgtaatacacacctcaacgcccaggaacctaaaccccactagaggaagggacgcacgggaccccgaaaaaccagaaaaacaacacagaaggcgaaacaaggacatagcccgaaacgcgcaatgcacgcaataaagcaaaacttccgcactgaattcacaaaggcacagcatatcaaaaccggccgcccgcccagagcaataccccacgagcagcgggaataaagaatgagacttaccataataaaacactatatagggacacaaggaactcgaggaagcactacgcacggggcgccgaactcgccacccattggagaaatcgcttcatgaacctctgatgaaaggcgccgtttccgctgactcctacagcgcgaaactgctgctaacctctataaccttaacct

SEQ ID NO: 90627 - DNA, 214 bp, Glycine max
ttgttggtgggcggcccccccccccccacccccttaaccgggatgtaggcgccgagcgccacccagacctgctcctggatgacgatcagcaggagagctttctgcgattacggagctgacggacaccccgacgagcgggcccttgatgatcagcagctgggccgcccccataatagccgcccccaggctaaaactgaagcaagtaaagacgacg

SEQ ID NO: 90628 - DNA, 461 bp, Glycine max
tggctgattcaggttcggttaaccaaccgggtttcgtagtatgcgagcatcgttgttggtgggcccccccccccccccccaactatatagacccaaatccccctaacatcccgaggaccaaatcccccaaacacaactcaagactatacaataggcacaaaaaactacaataagcaaatctaagaatgacgacttgatacagggcctgaagactctgctctcccagaatttgtaatttcttgcggtgaaaaacctgagctgtgccatcctgcaatcacaacaactttctgacctattgaagaaaactatccttaccttatccattcttatgcaatcaccctagccccactgtcaaatagagttgtagtacagcgcgggatatgggacactataaaaactcccgtacactaataacatccgatgtcagaaccggcgactaacagcggatctacgcggctcct

SEQ ID NO: 90629 - DNA, 395 bp, Glycine max
aggttcggttaaccaaccgggtttcgtagtatgcgagcatcgttgttggtgggccccccccccccccccccccccccccccccccccccccccccccccccccccccccccccggaataaaaaaaaatcatcgacaaaccccttccatactggaacataaaattttataatgaactgagccccaccttgaactaagcctacctatcggacagaggcccatggaaagtaagcgctaagacacccgcctcctgcttgccagactactccttaaacacgcaacgctactgaaccggccaccccatccaccccggatcatctggggcattttagccccaactggcaaaagctactacaaaatgggccacccggaccttatgaatccgcagaaccatacc

SEQ ID NO: 90630 - DNA, 434 bp, Glycine max
gttcggttaaccaaccgggtttcgtagtatgcgagcatcgttgttggtgggccccccccccccccccccccccccccccccccccccccccccccccccccccccccccctaacttaaatctcctcccgccgaaaccaccaccaatggctctcaaattggaaaatgcacacccttcagaaataatgacattgacaaccaaggggtatagatacctaacacaataccataaaaagcaaaaaaccgcatctggaatcagaacgagccacgcaagggtttaaccacaacccaagaccccaagccgaaaagcttgaccgaaacactagctcatgctggggcctgcccgaaatgccgaatccggagtgacggctacccacatgcaagagaacccatcccctcggacgggaagggtaataattatgaattggggagacca

SEQ ID NO: 90631 - DNA, 442 bp, Glycine max
tggctgattcaggttcggttaaccaaccgggtttcgtagtatgcgagcatcgttgttggtgggccccccccccccccctacaagaaaatcaaaaccattggacgaaaaaatctgacagtaacgcgagcgatctagcgccaactaatcataagattaacacatggccacctcaccgccaattaacacttgactcaggaaactggaattttagaaatgggctcccagccgaaaatgacaacataaaccatgcagagcctccaaggaaaacttatatccatgcggcagccctccacggcggacgacttgccagaaacccacccgaggtctagaagagaatctactactccccttcgggccacctttaaatgccacctaaccctgtacaagtacagcgatgacattccccctcctaaagcctttctttccgctacgacctactata

SEQ ID NO: 90632 - DNA, 481 bp, Glycine max
gttcggttaaccaaccgggtttcgtagtatgcgagcatcgttgttggtgggcccccccccccccccactcaagaccactaaaccggagtctctttgcgcacagccccgacctgcctatagccgtcgactcttgcctaaacaaaagtattggagagtcttaacccgaatggagactagtaatcgcgaatgaactaaaatcacatattttaaaaaaaacgaaaggtagaattccaaggaggaaggttacgccttccgaaaatgaagaacgatccactaccgccttataggatgcagccgtaaccgtcacggaccgcagttgccgctaacaacgcctatcaaacaagtacctgcacgagcaggacataccgcctcggaatgaagatgctgaagtcaatctcccatcctggctagtaatgcctataaacctcctctgcctaatcacgcattaataattcgcgcttataaatgtctcttagcgtat

SEQ ID NO: 90633 - DNA, 410 bp, Glycine max
gttcggttaaccaaccgggtttcgtagtatgcgagcatcgttgttggtgggccccccccccccccccccccccccccccccccccccccccccccccaaaccgaaccggggtgatgaagccggcgcgcgagaacgggcgaaaaaaaaagaaaacaacagaggggccccccaccgaacaacacagaaaaaggaaaaaaagacaaaacaacagacaacgagcaggccggaagccggacggacgcaccactgaagacaaagaggtctgggggaggaacccggaccccccgccccaagcccctcagacccctagcccgccccttacccaagggaatggaccgaaacccggccctagccgatcgaggttgaaggctgtagcgaatccgcctcctccgccgccgccgcctactcct

SEQ ID NO: 90634 - DNA, 452 bp, Glycine max
ttcggttaaccaaccgggtttcgtagtatgcgagcatcgttgttggtgggccccccccccccccccccacacagcacaccccagaacaaacccaccaacccccagaacaaccagacaaaaaaacgacaggaacaaccaccctcaagaagggaagccgaccagaatcccaccacagcaacagaaggggtacagcccaaatcggcactaaaacagtcaatacactgaatgaccgtacgtgacaacacggaccaggacaagacaaaatatccaatggcctctcgcccagaaaagcaaaaatatggacaatactaaaaagaactcgccaactccctcctagacttgccctggcccccactttgagaagccccgaaaccaaagccgatcttacttgaatttaaggaaggcagtacaccgatgcatatgggagaccttacaaacacccgctcagacct

SEQ ID NO: 90635 - DNA, 430 bp, Glycine max
gttcggttaaccaaccgggtttcgtagtatgcgagcctcgttgttggtgggccccccccccccccccaaaaaaaacccaaaccgcgctacaaaccatcgcggcgatccaaaaccgcgcacggaaacagagcgcaacctatacagaaaacgaccctcctacccgaaccaagaatagccctaaaaaccttaatcataagttttattacaggcggcgaccgagacggcaaagagcccaaatcaggcgtggaccataccgccctacctctcctgaaatacaaggtacgagcgccgaacatccccggacaacccccgctaatatgcggcccttctgcttcaacggttctaaaccgcgacacctcggacactgcctggggacaaagacgcggaacggctccagaacatcttgcggctaccgccgctgccgcccgaa

SEQ ID NO: 90636 - DNA, 457 bp, Glycine max
ttcggttaaccaaccgggtttcgtagtatgcgagcatcgttgttggtgggcccccccccccccccccccccccccccccccccccccccccccccccccccccccccccccccttgaaaaacgaatccttcaaggagaagagacattttaacaaaagagcagagaaatttagaaggggaaagagcgacagaacgagtgtgatactcaaagacagggactccaacgcaagaaactttgagggatctaaaagaaaaagggccgagaaggcacccccaaggggcgaatgggacatccccacgcccccttcacgaccgacatcccaatcacagggcccgaatttagtccgcaaccgcccccgccgctacacacatcgcaaagctcgccgccgatggagctactcgcgacgacctgcccgcagatgcataattgccgctatgacccgagctccgcgcactct

SEQ ID NO: 90637 - DNA, 214 bp, Glycine max
ggaagggaaagggcggtttcttctaattattattaagccggggtaagggccaaaagctttttttggtccaaagaagcttaggcttaattaactccgggacagatgggatttaagattagaaaacctaaaaaattttggggccaagtccaatcacttatttaactcgggaattataatttaacattttaacttcaaaacgggctttcaaatatga

SEQ ID NO: 90638 - DNA, 477 bp, Glycine max
gttcggttaaccaaccgggtttcgtagtatgcgcgcatcgttgttggtgggccccccccccccccccccccccaccagaaaccagaacgacacacaagacgaaacccccaaccctcttatactcccgaggcccctggatcataatctaagaagacaaatatggaatcggcaaaataagattcaaaaaacaatgatcactttgccatatccaggaaaaaatcgcaaccccagcccgatcccccgaaggaccccattaagcgatagcaggaccccagaaagccttcacctaccgggagagttccctacccgctctaacggacctaaaccgaatgcaattaacccaaacacgcctcctttcacgaagacagaatcttatcgcgctcctaaaataaaaaaaaaatctccgaggaatttacgtcaacgtcagctcctaactaacatataagtgacactcaaaggcaagggctcctgcaacta

SEQ ID NO: 90639 - DNA, 339 bp, Glycine max
gttcggttaacaaccgggtttcgtagtatgcgagcatcgttgttggtgggccccccccccccccccccccccccccccccccccccccccccccccccccccaggtcggatctaccacaccaacagtcatagccgcctttaaaaactatagaaataatgcccagaagaataactgaggacaacagagggatcagaacaccagagacacaactaaatccatagatactctcgctttttctaacacctaaacttaaatctgtgaagagggaaaaaaaaataacgcttttgaatagaaacgaacctgcaatcccgaatattgcttataacgaacccttgacc

SEQ ID NO: 90640 - DNA, 480 bp, Glycine max
ttcggttaaccaaccgggtttcgtagtatgcgagcatcgttgttggtgggcccccccccccccccaatccacctcacacaacacccccacagtaagcatttgaacccgagatgccccccccattaaaagaaaacggcattattgacatagaacaatatcccgaaaagctcctaattaaacaactaagatagaaatacagacagatgcaactgcctcaagacccggcctataaactaaatttaaggaaaataaatttaataaataaaagaaaaatgcactcagagccgatcccgcactccccgcttcccggatatcctcctgacgcccaatagcccggcgctgacgacttcggacgggtattgctaatatttggagctgcctaatacataactgaaccttggactctttttacagctacctatgcctgacttgacgcgggatctgccgcctcaggactcctacgacaattcaagaaaatga

SEQ ID NO: 90641 - DNA, 170 bp, Glycine max
gaagcctcctcctgttccagttgaagatgttggactcattccaaacacattagggttacctatggtggtgccggtgccggtgccggtaccagtgccagtggttgggctggtaccggtggttgtgcctggagtggtagtagtgggggtggttggagttaaggtggtgggtg

SEQ ID NO: 90642 - DNA, 477 bp, Glycine max
gttcggttaaccaaccgggtttcgtagtatgcgagcatcgttgttggtgggccccccccccccccccaatcaaaaaagaatcaaacacgagacaccaagacacaaacaacagaattcatgaagcatgaattgcgatcaaacaaaaacaaacaaaaaacatctggcgcgacatctacatacatacaacacagaaacttaaaggtacgattccggaggggaccatcatgcacaccacgaaacaccgaggagctaaaattaaggaaaccgggcaagagccgcccccccgcgcgccccgccataatcattaagataagaaaaagaaagattattgcaaatcttttttcccctgccgcttactaccggaatctactaaaccagaataagagggcctcagatctcttgaaaacgcgacggagagacgaaaagaaagatggggaaaatctccccccccccgggaataagctcaggagccaccac

SEQ ID NO: 90643 - DNA, 422 bp, Glycine max
ggctgattcaggttcggttaaccaaccgggtttcgtagtatgcgagcatcgttgttggtgggcccccccccccccccaccccggaacctaaaacgcgagacccgcgtatcacgacgacagccgaatgagaaacctacagaataaacaattacaaggaggaagagacagccgaatgaactcaagaaccctaccaatgacgaatctcgtacagaacagaatgaaaagagataaccgatgatcagataggttaggcaaggaaagtttcccaaacctttctgcagcccaccggagaaacgcaaatgagtcccggaagccgactctaccatcccacggcctgataggaactacaggagaatgcagcgctggaggatgacccggatcatcccctgcaatgcgactaggaggcccgggaatacgacgat

SEQ ID NO: 90644 - DNA, 410 bp, Glycine max
ggctgattcaggttcggttaaccaaccgggtttcgtagtatgcgagcatcgttgttggtgggcccccccccccccccgtcagcgacccagcagctaacacctacatgctacagaagatctcaaatcaacctttcaaaaataaaagttgacataaagagacaaacaataaacaagaacacccacccccattgggtggcgcggccaccgctcgatgttccagccaaccaaccatgcacgcctaacctttagcaacttgatctatggaggtaacacgcgctttaggctagcccggcggacgcgccgcatgatctcctacccgaggccacccccgcggagaaacagcacgcccccgccttcccctcctcgaactaactttcaaagaaccctggagagcccgacaaatactcact

SEQ ID NO: 90645 - DNA, 487 bp, Glycine max
ttcggttaaccaaccgggtttcgtagtatgcgagcatcgttgttggtgggcccccccccccccccccccccccccccgaaaaaaaattcgccacgcgataataatcccaacagaagaatcagggaaaagcgccttacctcagaagtagcactaacaaacgcaaaagcaaccacagaaataaaaaaaaaaaatatcggacgccttagcactaactaatcaaaagagaagaacaaacgagagatcccagactgcacgagtcaaagtactacagaaacagaaatacagaactttaactaggcccgaccgggaacaccggatgtgggataaagaggaaactggactgctaaagactaccagctctaagccctgaagaaaaggggaatttctgccggggcccccttgtatgaagggccataacaaacatccaataaccaacggcgaaacgctaacgactaaactattcaggccgagcatcctagcaaactcg

SEQ ID NO: 90646 - DNA, 292 bp, Glycine max
aaaaaaggggaaaataactttataaacagttacacattttccaaccccaccaaatttatttttatatacagtctataccgccctagggtcccaattttttctataaccacttattaaatttagggccaaaaggggcctccactgggagtcactggccatgggggtaaaaaggaagcccacccttccctattttttaagggggataaaaatgggggggggacccccttatttattagtttagaatagttatggggacccacttttgggcccccctttgcatgtaacccccggt

SEQ ID NO: 90647 - DNA, 405 bp, Glycine max
gttcggttaaccaaccgggtttcgtagtatgcgagcatcgttgttggtgggccccccccccccccccaacgcgaacgcgataaccctaaataaacgacccttgaaaaggggaaacgacactacaccaggtccaactgataactattttcaaacaaaagaaataaaaggaataaagaaaacggacgctaatcctacatgaatgaatcggaagtgtaaattaaaattactaatagacacacacaaataaaaggaaaatgcagcatgaccaaacccgcactggcgccctacgattcctatttgacgatggcgctctttaatatgattaacctgcgggcccccatcatcctcaacctgcggagagtgaccctgaaagcctatcagccgggccaaggcctgccgacgccg

SEQ ID NO: 90648 - DNA, 441 bp, Glycine max
gttcggttaccaccgggtttcgtgtatgcgagcatcgttgttggtgggcccccccccccccccgaccaaacccgaaacaacccccaggaaaataacgcgatcacacggaacactccaaacagccgctcatatatgcaagaagcggcgttcatctcctcaacggatcgaaaaatcacccgagcactgagacactacatcaaaccggaaacgcgaacaaacattcttacgattacctaacaagagataccgcgcggatactatccggcctacacgccgccgatctaaatacttcctgcgaaaacgaaaagctaaattcgcaagtgaatgattccggcgaccaacacgactaatattatggaatcactttctagagatatgccgccgaagctctactgtggcacccttacgaaatagaatgacgccgcgcaagaaacgaagatg

SEQ ID NO: 90649 - DNA, 495 bp, Glycine max
tggctgattcaggttcggttaaccaaccgggtttcgtagtatgcgagcatcgttgttggtgggcccccccccccccccaatataacaaaaacgccccacccacacgagatcgtcagacactacacaatcaagacatttgcaagagacaaatatagagacaaaaatttccagaccactttaagagggactacccaccaagggacaacacaactggaggataggataggataggcgggaaatgacaaaacacgcaataggcaaagcaccagactttaataaaaactgaccaagctgccccctatcgaatttagcccgagactagggcgcccaactagagaacaaaatcggtctacagagtatcccgggcgccgtgaccccgagcttcaggaaacctaaaggcgcctgctccccctaatataacggaccggcagcggcctcacacggcggcctaaacgaaattactagaaacgagaattttaaccaaagacgaaactt

SEQ ID NO: 90650 - DNA, 490 bp, Glycine max
gttcggttaaccaaccgggtttcgtagtatgcgagcatcgttgttggtgggcccccccccccccccataacaaagaattaaaatttacggcgacaccactgccagaaaacaaggctcggcgaacgcgacgggactgagctactgaatttcatcacaacaacaagcaacctccacacagactaccacgacataccagaaacccagaaggaccattgctgcctgactgcgagatcctaacgagttgcgacaaggagttgttaccgatgaggcagccggcggcgatgattcatacgacgctaactgatccggttcctgccaattgcggttagaaagcgatctaagaaattaaaactgcgcttatataataactactgcgggaccgcactacactctaagaatcggaacagaccacgcggatacaaaccgccgccaaccctccgaaaggggggcttaagaggataccgatagtaacccctaggctaaaggctaa

SEQ ID NO: 90651 - DNA, 482 bp, Glycine max
gttcggttaaccaaccgggtttcgtgtatgcgagcatcgttgttggtgggcccccccccccccccaagcctccacgccacagccccgcatacgagcagacccaaaactctcccttcctgccctgcctatgaatgacccgaaggagccgggcgacttccttcgtgcggagagctctccgactaagagagaagacctggagaaaaaagaggctgacctgccgatgcaaattaactctacgcatggcgcgacgaattacgccgacgaggacgcgccctccggaaccttccctgacgccttcggacctaagaactcgcaacggccgccgaggaaaacgggggagcttggccgtcgggtccacgatccgcatgatgaggagcggaaatgcacaaagacgagccccgcgacggagcccgaactctcactgacaccgcttatgaacacatggacaatatggatgaacttaatagactgagcgctacggg

SEQ ID NO: 90652 - DNA, 487 bp, Glycine max
gttcggttaaccaaccgggtttcgtagtatgcgagcatcgttgttggtgggccccccccccccccccgtgaggcaaactttatacggactacgacaaaagccaacgcccctcgaataaaaaatcagaccccacattgcacgactcccgcatatcccaggaaacgtgaggaatctgaactaaactatccgaatcaaaaagccacccctcagatctaacaaataatcatgaaccagcaacttactagcaagtggcgagcgacaatacccgcagcaaatgactaaacaataagaaattccaccgcaaaacgggcggcaccccataacacataataattcttatcggctggacaccacaagcctttataaaacgccttagtacgggagcgctctataagacttcgagtatccacgcggcctatctaagtagaaggagccatctggacatccaaccgaaagcgacgagtaatgaccctaatcagccccgcga

SEQ ID NO: 90653 - DNA, 452 bp, Glycine max
accaaccgggtttcgtagtttgcgagcatcgttgttggtgggccccccccccccccccatgaaagaaggcccctaatagagccacaccagatagagaaaataggattagagaagaccacaataccggtgctccaagaggaagaaaaaaagacaaaccagataccacaaaaaactcaacaatagtggtgaccattcaaaaataagcatcctccggcgcaacgaagcaactagactcgctaattggagccggcccggaggccccccggggacggaagccccataaagtaggtcttaaacaccaaacacttgaaagcctcctagcaaaacagagaacaacttgaatctggcaaaaggacgacgatctgaccataatgcttaatcgacgacgaccaccgaggagcccacaacgacacggaatccctccttgagtacgtcttaagcgacggacgcga

SEQ ID NO: 90654 - DNA, 471 bp, Glycine max
tggctgattcaggttcggttaaccaaccgggtttcgtagtatgcgagcatcgttgttggtgggccccccccccccccccccccccccccccccccccccccccccccccccccttaacactaacaatggcaccaaagccgaccaggaagccccccccccgcatagccccaccttcactagaccacgccccctatgcgagaacccccgaagccaaacatcaaattaattgaacaaaagaccctctgttcaccgatggaaatgggagaccttaaaaacacccgcacataactatcaactaaggaatgaacccgcgaatcacaggggaatatcccgcctccttttggaacgtggacgccgcaagctataaccaactatcaagccctgctgactactaattttatccttacgcgcgcgatggctgcgatgactaaccatatggaccatatgggactactccctcagaagacccta

SEQ ID NO: 90655 - DNA, 494 bp, Glycine max
ggctgattcaggttcggttaaccaaccgggtttcgtagtatgcgagcatcgttgttggtgggccccccccccccccccccccctgctaaaaccagaccccacctagccgatttgcgaccagaccataggagagtacgctttcacactacccgaacagacaactaaagaagcaccccgatcggacaagcgacatcggcactaaccctctcggaaaaacgagcttccgcgaaaactctcaaataaaaaaaaaatagaaatcaaaataaacagcgatacctatccctaacggcagccacttggctaacttttgaaatagaagcagctaacctctcggaggtaacggaaactatccttacacaggaagaccaagccgactgccgccgccaagtccatttagatctcgaacctcaagagcatggcggaatccacgcattccaactgccttactgaggatggatcctccacttgccctacatcctgcacttgccggaaag

SEQ ID NO: 90656 - DNA, 273 bp, Glycine max
aaaaaaggggaaaataactttataaacaggcacacattctccaaccccaccaaacttatttttatttacaggctttacagcccttggttcccaattttttctttaacaacttattaaatctagggccaaaaggggcctccactgggaggcactggccatgggggtaaatagtaagccaacccttacattttttttaaggggtttcaaaaggggggggggacccccttatttattaggttaggataggtatggggacccacttttgggcccccc

SEQ ID NO: 90657 - DNA, 362 bp, Glycine max
ggctgagttcaggttcggttaaccaaccgggtttcgtagtatgcgagcatcgttgttggtgggccccccccccccccccccccccccccccccccccccccccccccccccccccccccccccccccccaaaaacctttaaaacaagcccacaaagattgagagacggcggaaggggaggaaagcgaccccgacacagattgcacagatggggatttcaggaacacacagcacaagaagccaccaaacgcatttagaaaactttgacggagctatatcgagctcggactttatcaaacatcaatggaaggaccagacacacaccaattgttacgaaaactttttttttaggggggcacccac

SEQ ID NO: 90658 - DNA, 487 bp, Glycine max
gttcggttaaccaaccgggtttcgtagtattgcgagcgtcgttgttggtgggccccccccccccccctgaaaatcttaaggctggagaagcctgcccaccccacaccgcgaggcccttaagactcttcaccagccgcgcattaaaagatgagacttcccgttaatccggcaaacgctacgagacggagagtctctacatttaatatttaaaaacaaagacagataaacaaaaaaaaaaaagggcccaaactcgaataagcgaaaagctacaaacaagaatggtctgaatcttttgcagctacgccaacctaaaaaccaaggaggaattaaccccatggggcagataaaaacgcacccagaccccgagatgaaagcacatgcgatgcctccgactcagagagccaaacattcgtgtgaaaccgaggagcctcccgcatacgccgaatacgtcgacgatgacgaaatcgacggattcggactgctgggg

SEQ ID NO: 90659 - DNA, 296 bp, Glycine max
gttcggttaaccaaccgggtttcgtagtatgcgagcatcgttgttggtgggcccccccccccccccaattaaaaggtcacaaccaagacacccgacaaacagagaaccatccccgaaaccgaacactcccagaagactatgacccgacgacaactcgccgtaatcctcttaaatggaactaggaaaacagacacattcgcccgaaagatatcagccacagcagtcatccgacacactggatgatccacacaacaccacggaggcgtattaaagcaccccgataatgacggaattct

SEQ ID NO: 90660 - DNA, 427 bp, Glycine max
tggctgattcggttcggttaaccaaccgggtttcgtagtatgcgagcatcgttgttggtgggcccccccccccccccccccccccccccccccccccccccccccccccccccccccctttcctaacaaaacagacaaaccaccacaaaggcccaacaccaccccctacggccagaaacaaaaaaaacagaacaggggaacaagaatggcatcctacttactcaacaacaatgaggggggatggaccaactcaacttttttggcagtcacagggagggagccacggagagggcatgcacacacctcacagggcggggcggggtatccaggtggggacacacgaccaaggggagctgagggcttcagatggttcttaatttgctacgcttcaattaactccaaggggagagctgccattaatatgatg

SEQ ID NO: 90661 - DNA, 482 bp, Glycine max
gttcggttaaccaaccgggtttcgtgtatgcgagcatcgttgttggtgggtgtacggccttaccgcagggtggtgcgtactttaacctgtgccgaattgtcgcgtcatttgcaacggtggcgagtatttcgaggaagttgagtctggcccttttttggtattgggggcagctgcttcgttgaaagttagttgtttgtgagtgtcgtgccgcatgggttaccgctagccatattgtccgatcgacaacggaagtgagttcatgccgtgtggagcttgccccgaaggaatgtgtactaggaacctctgtaacgaagttccggcgcgtcagcattcctaaccagcacctgtagagctcgacgatcatttcaaaagcaaggctcgcgagtagttcgcaaagggatgcgagtccgggcaccttctttcaagaacggaagagccttctaaccgctgccgagaactacattaatatggtagacgtaatt

SEQ ID NO: 90662 - DNA, 411 bp, Glycine max
ccccccccccccccacggacaaaatcccgctctacccgaccccgacagaactttattagagcacgaccttacccgcactcaccacatatcacaaagagggcactggagacctaccggcgaccaacgacccgaagaaattatcaccctctccgccggaactctgccagtgttccgccccatgccggaaatcgccgcgacaccgccgaacttaccctaaaatgcgataaaaacctggcccgggaaaagggggagactgagggccgcttcagaggccgggccggcgacggcggaggactgagggtacggcgctaaccacgcgcactaacacgtccttggctcggggaagatttccttctaaaacgctaatgatatctgggctacgacgcgctcgaaggcgtatggtaaccggta

SEQ ID NO: 90663 - DNA, 420 bp, Glycine max
tggctgattcggttcggttaaccaccgggtttcgtagtatgcgagcatcgttgttggtgggccccccccccccccccccccccccccccccccccccccccccccccccccccccccccccaaaaataaaatgaccaagccaaaacccaatagagaaagccctagaaccggcaaattgtaggacccaccggtcacaacatcactactccaactggagaggtagatctcgcactcccgaacctctggaccttgacctcaaggaccgtgcagagaaccaacttgatggcgcaacaacatttttttaacgaacacggcatatcgaaccaactatgcaaaacaacagcactagaacacgagcctgggacaatcccgatcacccaacagaatggactctagaccattaacataagccaacaaagg

SEQ ID NO: 90664 - DNA, 353 bp, Glycine max
cgggtttcgtagtatgcgtgcttcgttgttggtgggcccccccccccccccccccctattcttgcaattcagaaactcgaaaccagcacctacggagacaataattacacctaaagggccatttcaaatataacccagcacacctaatccaaaaaacacacaccctactacatgcactgctgaggttacaaccgaatgaaaaaaaaaaatcgacattatcagagccctctacaccccaaaggaaaaataaaactactctaatttactgcacatatgaccattgaagcaatttaaacgaaccgccactcctgacggcgggagcgcgctaaggatgacatttacgtacgagaaga

SEQ ID NO: 90665 - DNA, 439 bp, Glycine max
tggctgattcaggttcggttaaccaaccgggtttcgtagtatgcgagcatcgttgttggtgggccccccccccccccccaaaaacaacggactactaggccacctgtcaacatgatctgacaacagcgcagtcactatccctgagtgcctctgacgggagacagacgaataaacgcctcagatggaggagaaagagatgaaaaatccgcatggacaaaaaattttgagcaagagacaaaaccatattagctacggaaaaccgaacactgttgggacttcgcaaccggactagcaaaagctcaaatgcgaaacacagcacggcggcaaaattaccatactcctaaacagaatcaaccggaactaaatagaaagcgcgcgtatctacatccggccttcacgccataattatgaccaccgaaaacctaatgcagagccgctc

SEQ ID NO: 90666 - DNA, 318 bp, Glycine max
cccccccccccccccccccccccccccaaccacccgaacacccccccccaagctccttagccgtcaccccaccccggccgacccccaccccacccaggaacaccaggattcaaacctatgaggagcgcacacctaacttgacgatcctatggattaaagaaaagtccccttttttcattgggaggaccgaaggaggataataataaagcttaatgcagaaggcataattgaccgggggataaaggagcataccccggggctccactcaataatgacgacgatagtggaaaaagtgctcgtgatgatggactcgccgat

SEQ ID NO: 90667 - DNA, 429 bp, Glycine max
gttcggttaaccaaccgggtttcgtagtatgcgagcatcgttgttggtgggccccccccccccccccccccccccccccccccccccccaatatccaaggagatcgagacccgacctaccctaactgacgaccgaaatataccagattaccgcgcaaaccctcagaaatatcacggcaacggctctcctggcaaaatagaccaccagacgcgaccaagcgtcgggacaaaatcacaaaaaaccaaaatagatgatgccccatcgcggccgggaagcggccggcgacgatcctggctcgaaatgggtaatgatggaagaccggcgcaccgcgccgatgggccgccattatacacttgacaagatcgcggagcttcggaaacttgacacagcctgcgaggctaaacggctgacctgcgaaaggaaagcgta

SEQ ID NO: 90668 - DNA, 323 bp, Glycine max
ttcctttttttttttgctaaagaggaaccagccacaacctgcttgatttaatattctcatctatggaacatgcgggattacttctctaggaaaacagcccatggttggggaagttcctaaatctgatcacatccacacctgtgatagggaagagggaagaataaacatacagaaataaataaaaaaaaccctttatatgtcagaactcactactgattgataacaagccgtgcaagcggggctactgatcttaattgaaaaattaaccaccaaggaatgttagcccctacagacaaaactatttacattctcacagccaacta

SEQ ID NO: 90669 - DNA, 484 bp, Glycine max
ggctgattcaggttcggttaaccaaccgggtttcgtagtatgcgagcatcgttgttggtgggcccccccccccccccccatctaaaaacaaacaacccgaacacccacccccaagctccttatccctctcgccgaaatgctataacatagaaaaccgaactaaaggcaagacgatcagactgcaactatgaaccatataaacctaaatacgagagcccccaaaaaggtcctagatgcgaagcataaaaatgctgccggccacaacgccgctcgagaccatcccgaggccgacccaatgccttatgcccctttattatcggaataagcccaaagactatcctacgatgacgaaaacgaccaccattatcatctataatgccccgaggatctaacacataaccctgaggttggataaatgagaactggctgcgattgacttataacgtaagcgctggatgctacaacgccaggacctgccccttga

SEQ ID NO: 90670 - DNA, 336 bp, Glycine max
aggacccaattagaaaaataagatttaaaaaaataatagatatgggtaaagggggtaatatttgaaagggaccacatatgtgaagatattcaaaccactctcataaatttattacttaatatataggagcacttcagattcctccagatttggaaaggtgctttaaagcattagcaatgtttttatgggttgtttcagtaatggatgcaacaagagggctttcatttgggacaatatcatttttttggtagcttcctggaccttttagtaacttttttgaacccttagacaccactcccttcatgattatgggcttgggagttccagaaattattt

SEQ ID NO: 90671 - DNA, 420 bp, Glycine max
ggctgacttcaggttcggttaaccaaccgggtttcgtagtatgcgcgcctcgttgttggtgggccccccccccccccccccccccccccccccccccccccccccccccccactacggaacaataaaaacaatacacaaaaaaacaacatacacttacaaatctctcaacacactaaatctaggagacactctaatacaccgacaggagcgggacaaacccaccagccaacacacatcatgagccgataccggcggatacccttaaatcctgccgaaatgaccatgaactccccgactctcctcccgatcaacttactgaagaatatttgcgcgaccctttagaacacgacgcgcccttcatgccggcttaggcgccatcaagcgccgctaagggccatagaggagcgggccgactacca

SEQ ID NO: 90672 - DNA, 228 bp, Glycine max
atgatccaataagaaaaataagatataaaaaaataatagatatggataaagtgtgtaatatatgaaagtgaccacatatgtgaagatattcataccactctcataaatttattacttaatatatagtagcacttcagattcctccagatttggaaagttgcttcaaagcattagcaatgttttcatgtgttgtttcagtaatggatgcaacaagagggctctcatttg

SEQ ID NO: 90673 - DNA, 341 bp, Glycine max
cttctcttcactcttttttttaaaaatggttctcaccatttccaattagacgcacataaaaccattcccaatagccgcctctgataattgattactatcaacccaacttcaagttgtgttcttttgtggtgtgtaaccgtattctgtatttgttttcatcaattggaaactgggttttctcgctctttgcagatgagcgtcaatgggatactacatcatggagacgcttcttaccaatcatcaagtgatgatgtttacatcacttgtggatgcacacaagccattgatgtttcagtggcgatgcttgctcgccccggtgcaaacatcattcttccaagacc

SEQ ID NO: 90674 - DNA, 244 bp, Glycine max
ttttttttttttttttttttttttttttttttttttttttttttttttttttttttttttttttttttcaaccagaaaataaattatttcacccaaaaggaaccccaaatctttggtttggatttgggcccaaatttgtacaaaaaaagggttcccccctttaaagaggccaaaatttgttaccccgcgtggggaaaaacccttcccctttattaaaaaaaaggttaaggttttggcacccaat

SEQ ID NO: 90675 - DNA, 386 bp, Glycine max
  unsure (1)..(386): unsure at all n locations
tttntttttttttttttttttttttttttttttttttttttttttttttttttttttttttttggaaaaaaaaaaaaaagaaccctcctttttctttttttattttacgggtttcaaaaccccaaaaaggaaaaatggggggaaaaaatttcccgcaaacttgttttgatccaataagggaatattttatgttcttggcctttgcaggaggctgcaaattttttaaatgatgaaaatgcccccttgctttccccttcaatgactataaaagccccccaaaagtcccccaagggtaaatttgcttgaaatttttgaaatgacaaaaagttcagggctttttcatcccttttttgggaccaaaaaaatttttttgggtttttttttta

SEQ ID NO: 90676 - DNA, 103 bp, Glycine max
aagcaacaacattcagaagtctctcttatttagtccacgagattggatatgggatgagaagatgatttttcaaccatcaacaaagaaagtttacattatcaaa

SEQ ID NO: 90677 - DNA, 449 bp, Glycine max
atgactaccatcaattgccggaagaaaagaaagtgaagagtaacaacaaaagggaaaattgggcaataaaatgttcaactgtaccggtactatatattatgcatcagcgactaattatttatacaaacaagagaagaaaaagaaaataggggggaaaattaaaaaattaaggaatttcattccctcgacttctctccaaaaacactaactaattgggaaaatttcgttgaattttcatttcatttccaagggggggcaatcccaaacaccgttggttttcatgcccaagaaatcataagcagcagcagcagcagcagcagcagaaaaaggagtagtgttgctgacagaaacagtaacagggttggcaacgttgcagctacaaaccttgcagttgttcaaacccaaactgcaaacaaaacaaagattcttctgaggttgtttttggcgag

SEQ ID NO: 90678 - DNA, 382 bp, Glycine max
cccaaaaaaaatttttgcccctttacccattcagggaaccaaaacaggtttaaaacccccgcccaaattttgaaaaaaataaaactttggggggacccaaaaatcccttttgggcttcggattcagcgaccttttaaaactggtagaaccttttgagaggcttcccaaggggcaaaaaaacaatacttttttactattcctaccaatactccggaggctaaaatcagtcccccccctaggggtttgttgccctggggaaaatttgggggcttgcaggggcaaaccccatcctgatggaacccctacccctcaatttttttatagccttccttgcggggggcccattattcctcaaacgatcaaaaaaaagggagggggggat

SEQ ID NO: 90679 - DNA, 137 bp, Glycine max
attgaagtcagagatgtatagagaaagtgaaggttaagaataacgtccaatgaaggacaaatagtagaactggaggttatgttttttttacgtcagagggatggatggatgaagaacttcaaaacagcaagagtata

SEQ ID NO: 90680 - DNA, 344 bp, Glycine max
ggggcaaagggccctttttttaaaaaagcccccgtccccttttttttcaattctcccttaaaaggcccccctttttgaaaattttggcccaaaacctaacctcggtttaaaaaacaaaaagggaaccctccccccgttttactaacaaaacggggaggaaaattgttccctaaaaaggttgaatcctaatttttggaacccgtaaaaatgcccccacaaatttgcaccccaagccctttaaggggtttttttgcccaaaaaaatccctaccccaaaaaaccccctggtggcagggaaatttaacccccccccgtttttttttgagcaaaaacaacccccttttt

SEQ ID NO: 90681 - DNA, 242 bp, Glycine max
ggtaaaccatggacaatgactgcagtgtttttttttttatcacacaatgactcactgtggattacagagaaccaggaaatggcaaaacaaaagaaagagaaggactagaggagtgaaacgttgaatgagaatgtaagttacgggaatcaatcacgttttgtcaatcccaaatggtaaatagtgtacaacattgccgtcacatttttagcagtaaaatgaaaagaaaatgttagttgtataat

SEQ ID NO: 90682 - DNA, 264 bp, Glycine max
aaaaaagggacaacttttattttttcattaataggggcaaacatagcctaaaaatttcatgcccgaaacccataatcctcaatcatgtaataatttcaaaccaacaaaacctttaggaatggggggggctggcccccaacaaaaaaaattgattggggaatctacaacctggaaggggttcccccaacaactacaaggggttttcctgttatataagccgcatcgtcagatgccaaaaaagctgctgcaccccccatgtttttt

SEQ ID NO: 90683 - DNA, 239 bp, Glycine max
aaggagggaaaaaattgataagctgacataattgtcacaagtcaccaaggcacaaatttaccggtgcaccaggatctccccttattaatattaaagattatttttttttattttattcaccgaccttggggggataaaaagtataactcattccagagaataagattatcctctttcaatttatcttttgtactggaagtctggaagaacgggcccaaaatgctttaagttaactttaa

SEQ ID NO: 90684 - DNA, 148 bp, Glycine max
attgaaaggcaaaacaaaccaaattaatagcacaatcagggttattaaaacaggggggcaagctttgcgcaggaaaaaagcagatcaaccggccgaaagtggggaaggcttgatgcaggctcgagcacgtcacaaaggaatttgcaaa

SEQ ID NO: 90685 - DNA, 393 bp, Glycine max
aataacagtacatgatctctaatcagcaatgctagtagtcagttaattactaaacaaatctcaattctcatatcaaacgaagggacagtataggatagtgaacgcccatgtacccttccaggtctggtcctccagcacacatgcccgatgcagccttctaaatcccatatcataggcacgaaatccttacaagtccttcaacgttcggtgtttacttggtaatttaaaaacaaggcaggtccgccagcgaacttatgggtccacggcctgcatccacgctcgatggcacgatcctccagtggttcggtacagcagctcaagtcaagtactatcaagctttcaacttctttgagcggtgctgcagggataccttccgtgatttttgcttcagga

SEQ ID NO: 90686 - DNA, 398 bp, Glycine max
gtcctttttttttttttttttatgctcaaacgcaactgaatgaaaatgcctaaatttttattgcctcaggattgacattatccccaacgtgtataagggggaccatggtaggcatccaaggcacatacaaaaaatacaagtgaggtgatcacaacatacaaaaactcactaaaaggaattggataaagctgcaatagaaacatggagcacaaagatcaggatttacagaatgcacgaagcgtatcgtctagagcctttctgtcataatcccctgtgaaaacgcaattgcctagagggccctttagaaggataagccttagcaacccatctgctaccttcttatccactgccatgacagatttaaacatgtccacagtcacggtctcaggaggggctga

SEQ ID NO: 90687 - DNA, 443 bp, Glycine max
tttttgcttcgtggctatttctggttcggttaaccatccgggtttcgtagtatgcgtgcatcgttgttggtgggcccccccccccccccccccccactgcgaaactacaaccacctacgactggcgaacccgcaacaacagaagccctcaacatagcgcctgtcacacaacttttaggacttccttgacggaaatcagacaataaaaacagaatctattccacgagaagacagaaaaagcgagcaaaatttaccttacaaatgctgaacataaagacttatgagaaatacgattacccagataactgagtaatgtcacgtcgcatatggcccgctcgacaacggggctctaaaagtgaacctggcatatttgggcccataattacaatggccatgaagggacgctgcaggccgccacggagctggactagatacccaaagact

SEQ ID NO: 90688 - DNA, 296 bp, Glycine max
ttctttttttttttttttttgtctttattttctttttttggggacggcacaaaaacataatactctatagcccaaactgtttttgtgtaaagaatacaaaatgctggaaagcttacctctttcaacacagaaaagacatccaaaggtggtgaaaaatacaagagatgactcttttttgaaatgtggaaaagctcactttgttttttaaacttctcaacaacactggttcactggctgtcttgtatcactcactggatataagttgtaaagcggagaaaaaagaggatgagctctgc

SEQ ID NO: 90689 - DNA, 184 bp, Glycine max
atgattaaacaaacgagtttgattgtaccctttgtttgtgatatgcaaaacaaataagctatggaccacatgaactcataagtagtgaaatatatgtttgactcatttatcagcatggttggcaagaaagactgttttccaaaaattcgaggctattgaagcttttttattacaagaaatgatg

SEQ ID NO: 90690 - DNA, 448 bp, Glycine max
aaagttatgcagattgcattcacataccaaaaattggaacaaaacaggcaaagatacaccgacagtcatctcaacagctatatacatgaagcaagtggcactctaatcacaaataattgcaagaatcagatatacatgactaatagggctctcactacatgaagcaagccccctttgcagcaagaacaagcacagctctacctacactaaaatgaagccaactccagtaaaaagatctagcaaccggctggtgggcgatgtatgtcttggttgctgcacactcattactgaagaactgcttccatcgtagcaaatggatgtctgtctacaattgcttctgagctgttcgcatgattctgggatcaccgagttcgaatacccttcaataagtgaacaattccatggatgtgcagattgcacactgatggaaacattggacagacaaatg

SEQ ID NO: 90691 - DNA, 425 bp, Glycine max
atccaccaaatatttgcaacaattttattgcatcataccttgtccaaaaagcatgaggcctaacacaatggaaaataaactcttaacaagatttgaggaatgttattaatgaatttctcctatacatcgatgtaacataggatattgcgtcctctctccaggaaaatgaataggaatactatactatgactttggcatgcccagtaataattggttgaaacctctactgctcttcatttttacttgatacaattttctttatgaattttacaaaggcatttttctttggctctatctttggctcaggagaagggtccattcccttgtcaattgattcatcacacattaaatagacagctgtctttttgaccaccaacccatgcccaaaaatcacataaatctccaccttgtctccgggtcctgaa

SEQ ID NO: 90692 - DNA, 204 bp, Glycine max
aattcaaaaacccataatactaactttatttttaagggaaatttgggaggaatattttctgggagacttttacagccaacattttttgcctggagatttaaattaatttttttttgccaaactgaaatcaggccaaaagttttgacccttcaaaaaaaccctgtttctgggctgccctcattttttttactggccccaaaaatt

SEQ ID NO: 90693 - DNA, 295 bp, Glycine max
aaatgcaaattttcccaccaactagtgccggtgctactacttctaaatcacacaaaatcagatattgaagaagacacgagtcttacattaatgttaaaccctagctactcaaacggttaatcctagctagctatatatatattttaggcttggacatggtaaagggtagcaagatcttaaaatgtgctcttaacgttgactatatacagctagggaagtcagttcccgaaccttagagctctcagaactcttttggggcactgagaaagaatcatgcaaggtgcgctcttgactt

SEQ ID NO: 90694 - DNA, 217 bp, Glycine max
gttaaagatgaaagtttataaccaaagcggctttatcatcaatatatacatttcaagattaaaatttatccctataagaaggtgaccatctgcgggcaggaaccggggggatactggaaccaatgggatggtaacataactctggttacctaaatttggataagggtaatttcctggaagtgagaaaaaagggccttttaaccggtagcatttgggg

SEQ ID NO: 90695 - DNA, 118 bp, Glycine max
tcgcgatctagaactagggcatatgctgcacattaagctgcatctccaatgcaaaggtaccaactttctctccagtcgcatcagttgagattccaactcctcagaagaggaggagaaa

SEQ ID NO: 90696 - DNA, 464 bp, Glycine max
agatggcacaacatctagctcagagtttgctattgcaagtaccaaaaataattaattattatccatccatacattgtttcaactcacacctgaagaaatacataataaaaccatttatgtatgaagggtttgtttcttagataaagtatcacaccacttgtgctgtatgctagaatattcaagtgctttccctcttgaaaatcccaaatagagtgaacaagaaattaggaaagtcaaccatttgctttgtcatctttatctttggaaattataactgcatttagtttttttgacgtatacattttgtcctctccccaagaaggatggcaggtgctgttcatcattgatctgtgaagtgatcaatcaactttaggcctagcagcttgaagcatctcaacaatgagagtcttcacatcctttctatcttctgcacatcgagggaaaggtacacgaagcttgaaagt

SEQ ID NO: 90697 - DNA, 242 bp, Glycine max
gaaaagggagactaatgcttattcctttattaaatcaggtgaaatgactggtcatccaagaattgttaattgctgatccccaatggaaacagccaccggtcaaaaattaatcaaatgatcttactacaacctcccttaacactgaaaatttgagaatccaacaaattttgattagactaaaactactttttttcccacacgatccccccccattgaacatctgcttttgagtaacctaccct

SEQ ID NO: 90698 - DNA, 113 bp, Glycine max
aatggagcaaccaaggaaataagaagggcagcagtagtggcagtaacataaagccagaagaatggaggttgcaggaacagtggatacttataatgttggggaagatattggaa

SEQ ID NO: 90699 - DNA, 408 bp, Glycine max
ggtcatgctaatgaaactttaatttaatgatatgatctcgctgacaagacaacaacaacaacaaagaaaataagcacttcttacaatatttcaagtcctaattacaagctttccaataatagtgcaagcaaatacaaacttgaaattgaaactgtgtttcccttacatgttgcacaaattcatgaataaacacatagacccccccctccccgtcggcgatctctgtgctaattcacaagaggcccatgtaattgtttggaaaataaacagaaaaaagtcatagaaagatatatatgaaaagcgggatatgatgatatgatatgatcaaataaccaatatgactgacaaatgagagatttgtggtacggctacagtaagcagaaagagaagggctatgaaaagaactca

SEQ ID NO: 90700 - DNA, 304 bp, Glycine max
gccaataaataagtcaaagacttgaccattaaggcattaactacatcttgacaaccaatatttcaatttttaatggaaaagagaccctatgaatgatccagcatcttgaatgcaactatgaaccatactctctcaacgtgtgaataattataccgctcaaaaggagatcaaggttctaaaatttgcttaatttatagccaatttcatatcatgttgcaacttacacctaaaccccatcatattacctcctttacaagattcaaaaccgccattaaagcttattggggaacatcaactttaccaa

SEQ ID NO: 90701 - DNA, 313 bp, Glycine max
ggggaaaaaatctttttttttgcaaaaagtttttttctaaaggggccgtcaaaaataaacgattttttttttaagctaaaggcccaaactaaacgcttgctttttagccttaggatttttgaagggaaaaaaataaaacttataatacccccctgttattgccctttttttaaggccctcctaaaaaaacatatttagtattttagccccatcttttttggaagggactgaattgataaggggggcaaactcagggccctttaatgaagcccccccaccaagaaatccctcaattttttttttgttttgcaag

SEQ ID NO: 90702 - DNA, 346 bp, Glycine max
aactcaaaatgcagatgaaatttattgtttttttatggaggcatttgactcaagctcatacgaagcagataagaaataccttatctgtttgttcgttacatgttacaaacaaatttttttttcctatgatgtgtgtgctttattgaagctattttcaatttccattacagaatagagcaatgtctatagattggtattaaactattgtctcaaccacacttggtagtctggtcctttgtcaacaaacttctgccagcttccttccaattggttttccttggagggattccaatcaaactgcccaagcttcattaccagcgcattaccaacctgagctacataacct

SEQ ID NO: 90703 - DNA, 373 bp, Glycine max
aaactagaacatgaaagatcagtatttgagcaacaattttcaaggggggtccaaaacgaaacccggtgaaaaggaatccggcatcctaggtgtagtagcataacataagagaaatcttaaaaacaaacaacaactagagactaactaacaaggaagaaaattacaatgaaaaagtaaacatttgcaacaaaataattcctcgcttttctaataaataaagccggattcttcttccccggacatcccattgtctatcctcctaattaagaaaatcgcaagttaattcatgccaattcttcttgtccttccgagggacatcttatcagctccaatatgttaactacctctcccatgtcaagcctgttagatggca

SEQ ID NO: 90704 - DNA, 295 bp, Glycine max
gggggcaaacggggggggtttcggactaagggggcagggggaacctccgttccaaagggcgttttccaaaaccctaaatttcccggtttaaaatttccaactttaatttttttcctggccaatctggggaacaaaactaattggaaaattttctttttttgaaaaggaagcaaggaaccccttaaaattttatcctttttatggggaaaaaaaaaaaaccttttttcctttttttggggaaccctgggggggggggggggatttcagttagattctgaatttttagaattttccc

SEQ ID NO: 90705 - DNA, 298 bp, Glycine max
ctccctgcatattgcatgtgcaattgcttttttatgaagcaagacctttggttcaaccattggatctgaagttcacttaaaaacgacttttaacgaaaaactaaaaaagagcccccccctacaatttatagttaactaggccctgttgtttcaaaaagtttatgagcaacttcaccacccccacatggttgaatgattttattgggtcttgattcacaaaaagccattgacaccttacatcaaagcaaagaagcttctagctaacaaaacaacatcaatgcattcaaaatgataggat

SEQ ID NO: 90706 - DNA, 319 bp, Glycine max
ggggaactatataataatgtcaatgccagtacatgtaacattcactcagtgctcaaaaagaaaaaaaaaaaattatgtagggaaagatagaaggaatgcttataacaattgaaaagggatccattaggaataatcagtttatgtgaggggtttgaatgggtgtatttttactgggctaggaacaacccctttggtatctatttccatttttaaaggaatggttctggaagtggctttcctttcaaaaatgcttttagcagcaccagtgacctctttggttgggaaaatggagcttcatgagcagttcctcttatggggg

SEQ ID NO: 90707 - DNA, 106 bp, Glycine max
atgacgaaacatctcaaataagctttgatcaatggaaagatcctcttacattcataaacatggggcctgcacttctgagaacattgcaaaaaagaaatgttcaaaa

SEQ ID NO: 90708 - DNA, 363 bp, Glycine max
cagcgtcgtcgtcgtcaccgacggaacgacgtggtctgacttgagcacgcaaattcctccaaaacttgctctttaacctgggactcagtcgcctgcgtctgatgatgttcatgactcatcgtggagtccttctcacattggggatggttctgcagcttcggttagacaacctgacggtgctacatcttctgaggggactggtcacataactaggctagcttcaattgattccttcgattcaaaatggcagcaatttttggaacctggggaatctgttcttatgatctctatggtgaagaaattacaaaaactaacaagcaagaaggtgcaactcatccttaccaacaaaccaaagctgatcta

SEQ ID NO: 90709 - DNA, 209 bp, Glycine max
gaattatacatatctacaaataattgtaggtaaaaatttcattcctcagcatacccctaaaatttggctgcattgcagaatttggagaaaaatatctattgaaagtactctattgggagattatgttcagaagggaagctctagttttaatcaagcgcctaaacacactctccaagccattctcaacagtttcaatggcattctccaaa

SEQ ID NO: 90710 - DNA, 305 bp, Glycine max
ggaagcatgaaagccatatatacaataatcgaaactgagttacattttggacattctagaagagataacgccaaacacggaggaattggaagacagcgaaaaccagcacaacaatgcccaccacagggccacttgccctccaaaggtctgggaagtcccccaaccttaacgctgctacggggggggtccaatcgttcatgtaaaggccggagagcttatttatagtgccagagtaccacggcgagtttgggacaacatggttgcatagaccattaacatgagacgccccgtccttgggactcccc

SEQ ID NO: 90711 - DNA, 197 bp, Glycine max
aaccctgaaattttaagcattggaattggggggcgttaatgtacaaccatatgacagttctttcattgggcttagaaaagtggggccaagggatgataatgccgcaacagcttggggtttcaagaaaacaaaggcttgaaaaaaaaaaaaaccaaaaaaacccctttttgactcaagctgggcataccaaataccct

SEQ ID NO: 90712 - DNA, 684 bp, Glycine max
agccccgtactactatccccgctaccgttagccgccgcgctgctcatctggtggcggctcgcctccctccccccatccgccgccgccggctcctcctctagctccctccttaccccgagctttaagctcgtgctacctgcctacctatccgtagggagagagagagagaggggagaaggttcggtcggtcggtcgggggctctcggatctcgccgctgcctccccgtttcttcgttgggatctcgctcgcttcgcgccatggccgccgtcgcgacgccaccggcccccgcgcccgccgcgccggcaccggcaccggcaccggctgctgctccggctcccgtcaccgtcgcccctgccgcggaccaaaccacggatctgctgcagaagttgtcgctggattcgcagcccaaggcggcgggtgcgacagagcctgctgctgctgccgctgccgccaaggagggtgctgtgacaaaccagccgctgagtgtggccatcccgccagagcggtctatcacgccggtgcttcaggactttatggatcccaacctgttctatctaccagcgtattactatggaggctacgacagttccatgagcgagtgggatgattatccaagatatctaaattcagatggagtggagattgccccagcagtgtatggagatatttatggatatgggtat

SEQ ID NO: 90713 - DNA, 415 bp, Glycine max
ggggaaaaacaacccgaatccagatgggccgttaacccaattgcaactggggaaatgacaagcttttaaaaaacaggggcttagggttgcccttccggggaaatttttttttgacccaacttggggggtccttacaaaaaaactgaacaagagcttaagtcccccacgttttgggttaaacttttttttcaactaccgcattgtttggcaggggttactttttactttttttacaactaaagcatagggggcggggggttgcttggttttggccctccaccaattggctccccccttataaccggtaccaacgcacctttgggttccattttctggataaatcgctttacttttgggtcaaaaattggagcttgtgggacaacaataccaaaaacactgtttttgttttgggggg

SEQ ID NO: 90714 - DNA, 489 bp, Glycine max
atctaaaccttatattataagatagcaatgtgaagcctcattgtagtctcctgattacttctcttcacattaaaccctagatacaagttgggaaaattgttgaacaggacttacaaggcagaaatggaaaattgttcccaaattaaaaaagggttcagatgaagagacataaacacatgataaacgaaagtctggacagaatgttctcatatcaaaaaaaattggagcacaaataagcagcacaacctattggagatgtgaaagggcatgtgcacaatggccttgcagattctgagttattcaaaagcaaggtgatcgtatggattgctaaaattcttaaggatggccatggtttattcaagatcaaagggatggccacaaaaagtttatatgaacacaaagataattggtgtgaagtgtgctagacctgagaatggaactaggataactgaaaacaaaacctattggaggatctccttgaataattat

SEQ ID NO: 90715 - DNA, 224 bp, Glycine max
gatagagagagataatcagaacacgctttgaaactgttagagagagtaagtgaaggtgtgtgtgtgagagagagaatcaagagagaggtgtaaacagagacaaacgctgtctgtgcgagttagagagatagaggaatcctagaaaatcagtgaatctatcccccaggtttttctcgctcgagtttccatttgatcggaggttctcattgtggtgttcctgatta

SEQ ID NO: 90716 - DNA, 443 bp, Glycine max
tggctgattcaggttcggttaaccaaccgggtttcgtagtatgcgagcatcgttgttggtgggcccccccccccccccaacggattaagaccacgaacccacgacgagcgaacagacaggaagcccggacgggtctcctccgaaaccaatgaagatgagatacatacacacactatcacgacacgacctcctatgaccatccaattgtaacgcgacggaatgcagccccacgcctcaacgtctagccgctgctaacccttaatcaacgcgttcacccaactgccgctaagaacttgccacaaccgctgatcatgcggttgaaattcggaacccggccacgcatgtgattcggaccgtggatgagaagagctacggcatctcgctgacctcctatcacctgcgttctgacgagggcatgtcagccgggaccagcgagaaggcgt

SEQ ID NO: 90717 - DNA, 130 bp, Glycine max
gaaggagaacaaagtttcttgggtctcaacaactacgaatttaaagttcaattggctgagtcgaatgaattatgaactttatgcgtgcagattttttgtgttgcgggacttgagcttcagtgattgtgta

SEQ ID NO: 90718 - DNA, 137 bp, Glycine max
gaataaaaaaggtttttcatttgaaaatatatacaagttatttcgcacctatagattttgctttgtttacagacagatcgaacttcgccttccttaccttttcttcagcattatattaccagcctattcatatgaac

SEQ ID NO: 90719 - DNA, 169 bp, Glycine max
  unsure (1)..(169): unsure at all n locations
aaaactaatattgcaattgtcaaacctattgtccgaataatattattcgttctgggacatgcacngtgaatgaaaatattaaatacgaccctaaattacaaggtttcattttacaccttaaattacaagtaaatgaatttattattttatacatgttacaaggaaaaat

SEQ ID NO: 90720 - DNA, 146 bp, Glycine max
aaactgagaaattttttaactttaaatcaccccacattaaagttattaagatcagttatataacaaaatacatagcccactaaatcggtgagaaaggggtgttttattgtagaaggggtgttttattgtagaacaacaaagataga

SEQ ID NO: 90721 - DNA, 264 bp, Glycine max
tttttttttttttttttttttttttttttttttttttttttttttttttttttttacagggtgcagaaataggccatgccacccccccttttatttttttgggcatcatatttacataccaaaaattaaggggaaccccccacaattttaatattttcactttacaaaaagggcaggaatatataaacaccttgaccattggtttgtatccctcataccggaatgaaggaaatttacccacttctaaattttccgggtgacttg

SEQ ID NO: 90722 - DNA, 265 bp, Glycine max
aaggggaaccgggggttttttcaaaagttttttttggaccaaaaaattttttttgaaaggggaaaagggggtaatgggaattaggggaaaaaaaaaaattttcctggcctttacccttttttcaaaagggccaccaccccagttaaatgccattttttttcccaccccttttaggggtggccccattacctgcccccaaaaaagaaccttggttgggaaaccccaaaaggggggtccggttttccaaacccaaccccgggggggg

SEQ ID NO: 90723 - DNA, 337 bp, Glycine max
aaaaaaaaaggcctccctctcaatcattccctgggttacacttctttggccctcaaaaaggtttttatggggccccacccccgggtgggtaaatcccaaaaccaatttttcccttgaaaccttttataacaggggtttctaccgggggggggggggggcccccccccaagggggcccccaattctggaaaaaaaaggaatttccaaaacccccccccattttaattccctttggccccccccacattggtcttcccccaaaaataaaaaaaccattttaaccccccataaaggggttccttccccccccccaaccaccaaggccgggaaaggccatt

SEQ ID NO: 90724 - DNA, 276 bp, Glycine max
ggagagcaaccacaagaggttcatttttattagttctctaactttaaatttgctcaccaaaaaaacttgtttcatccaaaagtttaaaagtttctcccgttggggcacttagggtctgagacccaattatgttattttctcctcaggggggataatactggggcatcatctaaaatttcacatcatccaataccttttttttgtctaacaccaccccttgaatatgtgttctccctttaagcatgcttaccacttaaaacatggggggcctgagtg

SEQ ID NO: 90725 - DNA, 259 bp, Glycine max
gaaaggccaaataaataaaatggtgatcacacaggacccagagacacatataatctagaaataacataagtaccaaatcaagttaaatgagttgccaaaaaggaaaagaaaggatgagaagaacaggtctatgaaacatatatagaagtgttcccccgattggaaaaagttttctataacgttggcaaggacagggggatagtcagtggttggcccgaatcagtgacaatgtgatacagagtgataccattgagtgagg

SEQ ID NO: 90726 - DNA, 111 bp, Glycine max
  unsure (1)..(111): unsure at all n locations
ggcagncattagtattattaatgacaagctacgatgccctcaatttatatcaagcgtaccctttgaggaagccttcaaggaagtaatatgctgccatcgcacctggatctg

SEQ ID NO: 90727 - DNA, 262 bp, Glycine max
gaatgaggaaaattcatggcttcaatggcgcacgaacgcaaaagggaacggaaattcacattcttgattggaagccgaacaacgtaccccttttggggaaacccgggagctaacatactaatggttgcttaaatgagacacgtgcttgtaagaacatccaaagcaaagctggtgccaaaagggactgaattgtttttaagaattatgcctattgtggtgccctgaccatataaaccaaggtggttcatgatgctggccacat

SEQ ID NO: 90728 - DNA, 169 bp, Glycine max
gacaattggctcttcatttttgataccgacgacaagctatatacaagacgaccactatgacggacaagacgctagctcacccctcagagggcagaacctgggacaggaccagaggcacttcggacgacctcgtagaccggcttggcaaaagtcttaacattgggggtgt

SEQ ID NO: 90729 - DNA, 304 bp, Glycine max
aaaaaaaacatgttaacaaaggaaaatgtttgtacattttcatacctgggtaatacaaaaattttcatttttgctaatgcgagggaagttccaccaccatcgggtgcatgggctcagcattggataatatggggttgcgtttgtgcaaatcatcagccgagacagcatattagttgtccagtgatgggaaacaaatctttgaattacatgtccaatcatttgtctaaaccttggtcactgactgacttcaacgatgggctcctcaggaaagtaacttggggtgctgaaattggatgccgggttg

SEQ ID NO: 90730 - DNA, 385 bp, Glycine max
ggtaagcttacacggataacagactattaacagggctgataggtcttacaacttctataaaatacattttctattcagacatgaagtcagaaactaaaactcaaagtataattctagaagcttaatgcaagaataagaaaaaaataaactaacatgtagaataataagcctatacggataatagactatcaacatcatttactcttctatttcatgaataacttccaactcgaaattctgacgtcttgttggaacaagagcatttgttctagaagaaccagtgatgtcaaaaggagtaggaggggcaattaaatcatctccatctcctttaagcatttgtaccacagttttcatggatgggcgggcccttggattccactgaatg

SEQ ID NO: 90731 - DNA, 166 bp, Glycine max
cgagccatccgtgtttaaatgcctcaaatgtagctttgagattttttagataccctttcattatgctacttcctttaatgaggatttctcccattgtctttccatcgcgcggagactcttttgcgtgtccttgttttgcacgtcaacgtcagctaggccgaagatg

SEQ ID NO: 90732 - DNA, 238 bp, Glycine max
gtggaattgtgatggaatataactttattctataatgtttattcaatttgacaacttttacatacaaacccattgtgctaatcagcgcaccactagtgttgagaaaacaaaaggggtatatatcgtacggcgtatgaagcatcgtaattgataaataccattaaacgttgaaaaaaaaacgatatatagtatatagacgtatatattgtaccccccgattttgtattgacaaatgccc

SEQ ID NO: 90733 - DNA, 284 bp, Glycine max
cacgtcgtacagaactaaacaaaagagtaagagacagagatcctggggatcatgaattgggcttggcaaaatacaaagtagtgcataacataagctaagaagaaaaaaagggccggaagcaggaatggattggagtaacctaattaacgagaaaggcttatttgaggaaaggaagaagcgaatgtgatccaggaagggcaaatgctgaggcctatccttgcgcttcacataaccaattgtctttttttgggaataacaccttaacccacgctttccgttttttt

SEQ ID NO: 90734 - DNA, 196 bp, Glycine max
caggcggtacagaactaaacaaaacgagtaagagacagagactctggtgatcatgaattggccttggcaaaatacaaagtagtgcataacataacctaagaagaaaaaaagggcaggaagcaggaatggattggagtaccataattacggagaaaggctaattagaggaaaggaagaaccgaatgtgactcaggaa

SEQ ID NO: 90735 - DNA, 168 bp, Glycine max
gccggccacgggcgcggcgcgggggacgcgcgcgccggtgagaggagaagtggcggagtgtggccaccgcagtgaggggcaagcgggccaaagctgtgagcggaggggagcgggcggggtggacggtgtggacgagggcgagggattagtaggcgaatatagcgtggt

SEQ ID NO: 90736 - DNA, 248 bp, Glycine max
gttcggttaaccaaccgggtttcgtagtatgcgagcatcgttgttggtgggcccccccccccccccccccccggaaacaagtgaacaaccaccaccaccggagctaaaagaaaaacaacagatatagaataactataataataataataaagtaaccagccgatatcgcgagccttggcctagccgaagtggataccctggatgtactactagataatcttggactcctattaagaatggactgcgta

SEQ ID NO: 90737 - DNA, 411 bp, Glycine max
gttcggttaccaccgggtttcgtgtatgcgagcatcgttgttggtgggcccccccccccccccccccccggaaacaagtgaacaaccaccaccaccggagctaaaagaaaaacaacagatatagaataactataataataataataaagtaaccagccgatatcgcgagccttggcctagccgaagtggataccctggatgtactactagataatcttggactcctattaagaatggactgcgtagtagtggccggatatgttaaacccgatgtggctgttggaactgacgggcaaccttatcgcctaatcagaaacggagtactcaaccttaaccacgttctagtcatttcccgggagcgcggcggaacgcgaacccctgccggagaggccgccggcctaaaatgcggct

SEQ ID NO: 90738 - DNA, 379 bp, Glycine max
ccgttgcgttacaccccctcaacttaaggaattttatctataccttttacgccttcccttgatgaaccgcggttaaacgcgactgctgcgacctctcatttagtgggtatccgacttggggataatcacactaatattgacacaactatccatcctagacacaccggccctttactctgacaccatatacttcgagaccctaacacggccacatctaactcagcgacggttgcgaaacgcagaataaatccacccgctttaaaaatggatactgccctcacatatctaattacggataatctgtagaaccctcctaaaactgccttcgagatctcgcgcaattgcccgctgaatatatgccgcaaactacggacccgcc

SEQ ID NO: 90739 - DNA, 184 bp, Glycine max
aattattgacgatgccgacatgttaaatttgtagatacttgaaattccaaaggggtgcaccatttaacaaagaaaatgttacatactgatctgtctgtattaccgggcataattcaattgagagcaaaacatttgggtttaaattaaatgcctaatctaccctctcttattaaaagaattacaa

SEQ ID NO: 90740 - DNA, 403 bp, Glycine max
cgttgcgtatgctgcccttgcgcggtcataatccggcgagactcaagatccgactttgaactaccacaccgtggatcacaacaactctaacaccaactcctgctctgatagctacaagtttgcgccctccggatcgacgatttactgatagaataaattggcgcgcagaagcattttaatattcgaaagaaccttgaaataaatggaaataaaagatgcctaaaggggaataccactatttattagacccagatctcgcaaggctttatttggacccttctcgatagaaccgctctgaacgacgaacggcggcgattgcttgaccgcctggtccttacgccgctatattatttcgtccggtttccgattctgctaatatccgaatccctgccggccgactcgc

SEQ ID NO: 90741 - DNA, 339 bp, Glycine max
ggttcggttaacaaccgggtttcgttgtatgcgagcagcgttgttggtggggccgcccccccccccctgagccaaaaagtagaataaacccaccgaacgagtatgttcaaaaacagaagacagaaacaaaaacaatttatatctagacgcagagaaaacggagagaaagccaaacgaaagtattagaacaacaacgggaacaacaactactactacaaaaactataaaatgcctaaggcccatagcctatgcccaaggccgcttcccttgcgtaatagacagccaacaatataacggccaacatagaagatccgcttaaaccggccgccgaacccttga

SEQ ID NO: 90742 - DNA, 341 bp, Glycine max
  unsure (1)..(341): unsure at all n locations
cgttgcgtatttaaaccaatgaaaaggtgtcattctgcgaaacgacatcgcgatgacacaaatcaacacgccaaggcacgctgccaacctccctacctctacttgttactaatttttaacctataatgttgtgcagtactcccccgctctccccatattttaatagagtgtgcagaggccgagattcaacgcgcactgctgccctgttgattgtatacctattaggccgccgntactactttccgaataatcttgtaggaaacgccctagtcctccgccgaatgaaccgattaacgaattacccgaacgtcctccgcgcggtaaaagccgtgccgccggcg

SEQ ID NO: 90743 - DNA, 307 bp, Glycine max
gttcggttaaccaaccgggtttcgtagtatgcgagcatcgttgttggtgggccccccccccccccccccccccccccccccccccccccccccccccccccccccccccccccccccccccccctttttaaacgaaatcaaacacttgccaaagtatatctctctcgagaacccgaatactagattggcgcttggacttgggcgattagccacacaccgaggcccgcataaacctgcaactccgtaatcaaaaccgatagccggaaacgaaccggcgatctggtacctcaaagaccagaagcagcat

SEQ ID NO: 90744 - DNA, 384 bp, Glycine max
atgcgttaaccgttgcgtatgtgtagaaaaaagaggaggcgtcccttcctcctcccctggaagtccagtaaagtaaagtgatgacctcgcggagctgagtgactggtcccagcacacaacaacaacgcccgaaaagtcctacctctccttccggccacctgtctcgcttcaaccccaacttcctactgtctccctactttactttatgcgataatatgacggactgcttgaaattcccatagacaacactgaaaaaaaaccacccccctcccctccccctgactaggtctcccccctactcaatctgccccccgcgcgctccctttcttccccagatgaaatacctagtccaactcctaccccagcgagaatgcactgtgccgc

SEQ ID NO: 90745 - DNA, 366 bp, Glycine max
  unsure (1)..(366): unsure at all n locations
cgttgcgtattgaacagaaaatggcagacagaaaaaccctaatgtactaataagtcctccacatacaggtacgctganntcagacttaaacccgcaacccgcctacttcataaagaatcagatctaccgctctaccacaagaagaaaatgaaccagcactagaacttagaaaaccggaaaattgccctcaatgacctacccacgaaaaagttacccgaattatataccggaaactggaccttatatgccgactgggcgaaatttactaaggcccgggacaagatagccaccttcggcaccggggaacggactttaaaccctagaaagccataacgaccttacgcgcggcgaaacactgcgagcttc

SEQ ID NO: 90746 - DNA, 466 bp, Glycine max
cgttaaccgttgcgtataccaaacaaaacgaataaatgactgacactactaataattctctctttccctaacatcttctacttgatgagcccccgcttcttatactatcgggacttgatattgctctagcctcatgggctcttatcctatcgggctccctttttgaacgagtcggcgccgaggaggacgtagaagcctcctggataattctatttagaaattggactggcgctcttccaggcgaaaaagggcatcgctattggacactcgaagcgcggcttccggataatttcctgcatgcgcctcttttccgggccgggaagcctccatcgagcccccagccgacacacactcaacaaagcgggggcagctccttgcttaaaccacacacacacacacacacacatacaataaaccgagcgaacaaaaaaaaaaaaaatatttgttggtggtagcatctatgcgt

SEQ ID NO: 90747 - DNA, 347 bp, Glycine max
  unsure (1)..(347): unsure at all n locations
cccccccccccccccnccctttttttggaaggacaagaccccgtaacacttaacgcagggaataaactgataaaagacttgcgactgtacccttactcctcccgcgacaggccagactcccataaccagttcttacccctagtaacaacgtaccacccccgaaaatccgcgcgaatggcgctttctgctagaaaaacaaagtaccacccgccgtaatcatgaaagcaaagtgattcacgacatggacataatttacagaaacaaaagcgacaacagagggactccacctggagacccccaactgtgcgcctaaaaggacaacaatcaaccaatggagaagcccgcct

SEQ ID NO: 90748 - DNA, 372 bp, Glycine max
tcggtaaccaaccggctttcgtagtatgcgtgcatcgttgttggtggccccccccccccccccccccccccccctcccccccatgagaccccgtcccacttgagctggcggataaactaataaaagactttcgaggtcccagtttaactcccgcgacaggccaaactcccataaagagcctaacccctataaacaacgtcccacccccgaaaatccgcgcgaatggcgttttttgctagaaaaacaaagtaccacccgccgtaatcatgaaagcaaagtgttttacgacatggacataattttcagaaacaaaagcgacaacagagggactccacctggagacccccaactgtgcgcctaaaaggacaacaa

SEQ ID NO: 90749 - DNA, 313 bp, Glycine max
ggctgattcaggttcggttaaccaaccgggtttcgtagtatgcgagcatcgttgttggtgggccccccccccccccccttactcctggctataacagattaaatcgggaataacctgaacttgttacggacttggtccaatattggtaaggttaccggctaagaggaaaagctaatagagaacgaggaggagcgccccgacctctccggggagatataaatcgaactttgcaacgcgacggatctgccttcaatactaccttccacaaatacttcataagaggggatagaggaagagggaatcacaaaactct

SEQ ID NO: 90750 - DNA, 213 bp, Glycine max
gttcggttaccaccgggtttcgtgtatgcgagcatcgttgttggtgggccccccccccccccccttactttggttggaacagattaaatcgggactaacctgaacttgttgcggaattggtccaatattggttaggttaccggctaacaggaaaagcttatagagaacgaggaggagcgccccgacctctccggggagataaaaatcgaactt

SEQ ID NO: 90751 - DNA, 186 bp, Glycine max
atgcgttaaccgttgcgtatctgggccccttatagcctgtgcccccgccctccacccgccgccctccggataacgacgacgaggaacaccccggatgaagagacccaggaatgcagacaatcataaagattaccccggacaccctaatctggagttctgccggggtatattgccttgaagccaaat

SEQ ID NO: 90752 - DNA, 411 bp, Glycine max
tggctgattcaggttcggttaaccaaccgggtttcgtagtatgcgagcatcgttgttggtgggcccccccccccccccccacgaaacttgctcaatagaactcaccatcaaccgagcaccaagacctcctttaatcagaaaattgaaagaaaaacttggcactagcctaaacactaccaccggctgacccccgtttagcaaaggccatctacccgatttgtctttcactttaccaaacaccaaaccaccaaccaacgacttatatgactatctggtaatgatgcggccttataggacacgctttgacaccctcttaactaaaacagccctgtatcaccttaaaggctgctagggcgcctcagatccacccttcccgcgacgccccgatggccgacgctgtgggccgcgatg

SEQ ID NO: 90753 - DNA, 304 bp, Glycine max
ggttcggttaaccaccgggtttcgtatgtagtgcgagcactcgttgttggtgggcccccccccccccccagagaccccaaaagctaccagcactgcctgaaagcgaccaaactaactttcctgcgccgaagagactgcttcaagcctatactcacagatcctcaagcgaaaatcacgagagacctcacaagatccaggcggcaaggaccccttcaaagccgctatttggcataatctaaaaaggacattgatgattcatctagaatatcccgcccagccccggcagacactgggccccctctaa

SEQ ID NO: 90754 - DNA, 429 bp, Glycine max
cgttgcgtatctatctcctatcttaaagagctagagtgacgacgcgcgcgagattcgcgaaaatctgcaaggccgaacgcgaactgcacgcgccgccgtccgcgatcctccggacccgactggaaccacggagctcgcagcgaaagggaacctccatccggccggaacgccatccagcggccctgcagaagattaaggataaatccgaatcgcccggatgcgaattgcttacccctttaacgaaccaaacgctttcctactaataacaagcggactgaatcgacctacggagggcgctgatactaataatagtaataaggcgctggcgaatatccctccgcctcttaaatagataagggtacttcagaacctatgaaacaacaccgcgccgattcttatactcctactcccactacgccgaatgggcgc

SEQ ID NO: 90755 - DNA, 382 bp, Glycine max
ggctgattcaggttcggttaaccaaccgggtttcgtagtatgcgagcatcgttgttggtgggcccccccccccccccataaaaggagcaacccacacatcagaagaaccgacggaaaagctaaaaaaaagaccaaaaaacgatcaatcatcgagctagttacccgatagaaacacgaatgattgacaacgaaatagcgactacgacgctccgtaaaatcctgaaaagccccccaataatctaacaagccagaaagaggcaaaagagaacaaccagattccctagtcagaacgcccacagcccgtcaccagaatctacatacaaaccctcgagctgccgctcgtcctcacacccgacttcctgaaacctgaactccaagacaa

SEQ ID NO: 90756 - DNA, 315 bp, Glycine max
cgttgcgtatacttacacctctggggatagcactgactagtttcgaacctagtccgaatcgctacacccacatgcccttatcctccgccccttatacgacgagattgattaattgtacgtagaacagaaatggctgcaaataagaaaacgcatcccgactttgaaatcgcccaccgaaaaagggtcaaaagtactcgtctctatactttcctagggaacctgcctaatttcgatcacggaactatattccctcaggagtgcgcctgcacctgctggactctctccgaataagatggcatcactgttggctaaaga

SEQ ID NO: 90757 - DNA, 403 bp, Glycine max
cgttgcgaattctctagattctgccccggagtcgccgaagtcgcccgcacttatctcctcgggaatgctaaatttgagcctggatatgaagcactcgacccaaaccacgcaaatacccgctttctgaagaagcctcaggccgctgcgcgatctggggctacaccgacgaaccacaggcatgatagctctaatatgctgaaacctacgacggaagaagccctaaatatgccaggacctaattcgagaagtcttattgatggccagcgtaagatacctttgtgaccagcgcctccgaaacaagaacaccgggactgagatcctgcactacccggccgcaatgccttagacgaacttcttgctgtagcgcgcaagtaggcccggtgcatacacgccgggaacagcg

SEQ ID NO: 90758 - DNA, 130 bp, Glycine max
ccgttgcgtattgaataataaatgatatggcgcagcagacgacgagaccgagacccgatcaggccgcgcccgcgggatcgcgcgagagagaagaacctaatatataaaacttcctagaactaccgtgcgc

SEQ ID NO: 90759 - DNA, 247 bp, Glycine max
cccgggaaaaagggaaagggaaaattctccagtccgaccccgacgaccgatatccccgatattatgcgcccccccccccccatccgataaatgataaatgagtgagcctgttaatctaatccagttcccctgggccgccgcttcttctcgttatattaagactcggtcattaagaagaagacgtacacgtagacttgtgtcctccccttcccattccggtccgcttccgcttgttgtgcgtgttgtc

SEQ ID NO: 90760 - DNA, 427 bp, Glycine max
  unsure (1)..(427): unsure at all n locations
cgttaaccgttgcgtantaaaaccttagtgagatgaaaattgcgactctcgcgccgggacttagagaccgaatatccactccgccaattatggtaccttatcgtcctgcccaacaagcggccttaaccacggcgctcctacttgcagtcttaattcctgcggctgcgcttgttggttgctctgctgaacacctaatgggcgctatccttgacgctctagactcccttatgcgtgctaaaccctgaaataatcgtttgccggcggcttgtctcctaagaccgcgagcttaccattaggctaatgtttctgcggcccatgatgcgacgggtactcatagaatacctggcccagcttaatgcgctgaagctttatgaaaaccactagatgctgatgcgatgctacgaatggctcccgagcatatgccttc

SEQ ID NO: 90761 - DNA, 475 bp, Glycine max
ggttcggttaaccaaccgggtttcgtagtatgcgagcatcgttgttggtgggccccccccccccccccccttcttatggaaggacaaagaaacgaaacaaaaagagcaggaagacaacgcctagctgaaatctgaaaggacccgaactccacagacatagacgactcgccgcgtagcccttttcgacaacgtcaaccctacaccagggagaagccaccaactccatgccccttacaggcacgagatggcctaattatagcttcaggatggggagttccgacgatatacacacctttcgagcctgccgagagcgaatcaaccacgaatcggggaccgcggcaaccgagtaggaaaaggagctgtcccaactggcggggacttttgcctatctaatgacttcctatatgaaccaacggagagaaccggatggccaaaatggccatcaactgtgcgagacgcccgcatacgaccctac

SEQ ID NO: 90762 - DNA, 267 bp, Glycine max
  unsure (1)..(267): unsure at all n locations
atataaacggacaggatcaagtaataaatacttgtaaaacggcagaggctgaaaatgctaatccggctagaagtatccctataatgtgacaataggatattccacgggctngaaactatactattttccagaccctgatacaccttctgtccttactataccaaataacgagccgaatatgcttcaactgccggggccataattggataggcgccgaaattctttgccgctaatggactcatattcacacctgccccctttggcggc

SEQ ID NO: 90763 - DNA, 350 bp, Glycine max
tgcttcgtggctgattcaggttcggttaaccaccgggtttcgtagttgcgagcatcgttgttggtgggccccccccccccccccccccccccccccccccttactcataccaatccattcctcaacaaagaaaggatgctaagcatctcattttgacaatttaaatttcccgcttattagtgccaactctctaaacagcagaaagtgtgtactgccaccaagattattttgaccacactgagatctggacgtagagtgcagacatcagacagaccaaaaataagatagcatggggatatggcaagggaagagagaaaaaccttggaccctctgaaccctattgggcctaa

SEQ ID NO: 90764 - DNA, 222 bp, Glycine max
cgttgcgtatatgctggttatacaaatgcagaagacacagcaaaattacacttgcctaggcctgctactgatctcgcccacgatgattctattaatcaagacctacttaccttttaaactggacatctaattaaacatataattaggaatacttaaacacgacatttcctatcttctccccgcgccaattcgctctaaagggaaacctaagcgagccttgag

SEQ ID NO: 90765 - DNA, 123 bp, Glycine max
cggatatttctctacctaaaatacaactaattctagaatttatcccccgttcccaggatatatctataaacctaatatccagcggagctacggaccgaattgaatgattgctcggagcatccc

SEQ ID NO: 90766 - DNA, 363 bp, Glycine max
gttcggttaaccaaccgggtttcgtagtatgcgagcatcgttgttggtgggcccccccccccccccccacctataaaaactacacataacctcccagtagtaagcgaagtccgccccgccgccgacctgctgccctaacggcttaagcttgaaaccgtccagatactagttttattactaccatagagcaagggcccctccctgcctctcccaaaacagcgtcccggcgacgcacgacaaaactacacataacctcccagtagtaagcgaactgagcgtatggtaaccggtatgccagtcagtgtctgactgtagtcgacatgcgccgcacatctcgaggcaaaccgaaccgagcttggtcgt

SEQ ID NO: 90767 - DNA, 220 bp, Glycine max
tgcgttaaccgttgcgtatagctgccgaggccgctgcgcataaaaccgatcttctacagacttgccgttgcagcgcgcgctcatggaaaggatgggccgattgaaacatttaaattgccgcgctaaccgcgcttggcggtgatgcgacgattgccggccgggccccgcataaaacgccgatattacccggaccgctcgacctggccggataggcactgat

SEQ ID NO: 90768 - DNA, 237 bp, Glycine max
ccgttgcgtatagcacggacagacatggagccgagagcgagcgagcgcctcctggccgacttggaatggatctcggacctattcacttaagggaatcttgaaacagatatcctcgatgaggaaaggaactggcttaagcgtccttacgaacgccgcgaccgaaaactactccgtggcctaaacactcaggtataataaaagtacccctcgatcctaatagacgacctgccctacctt

SEQ ID NO: 90769 - DNA, 393 bp, Glycine max
tgcgttaaccgttgcgtattcctaatgcgcatattgacacagggatacacgcatcgaggggcccgagaaaagaaagaaagaatttaccacacgcgcctacacggcccaccgcaattacccaacctgaagcttattcacctacagaaactgctccaccccctaggtaggacgattagatacaccatgcagtgcgatcttcgagcgcaaaaattctaggatctcaaatccctcatgcgatttctaacgaccgccaagctgccgatgatactaattctcaagcccacggaaccctacgtaaattcccagaccatctcccgctcttttccctcggaatgactcccccgcctcgcgcttcgacgatgcatcatcgatcaactctaccgcccgaagcca

SEQ ID NO: 90770 - DNA, 409 bp, Glycine max
  unsure (1)..(409): unsure at all n locations
ttgcgtantggcgaanccaaaaaactaaacacaccccaataaatatgtgtctcactcagcggccctcccatcaaggtaggtgtatatatatatatatatattatcgcacaccgtgtggcgtgcgcgcccacccgcggtggaagtagaggaggtgacgcccgcgcggtccgctgaccccggaccgcgccggtactggtgcagcgcggaaccggcgtgggctgctgaggtggtggtgatcttccaagcggcgttaggttaatgggttaccgtcgcgcggccgacttattaagctgaattcgagacgcggaaccgccgtggcgcgcgataactagaaaccgaactctcgcgttccatgcgccatggagcgcattgttaggacacgaacttgaccttctttaaaagctcctta

SEQ ID NO: 90771 - DNA, 456 bp, Glycine max
gctgattcaggttcggttaaccaaccgggtttcgtagtatgcgagcatcgttgttggtgggccccccccccccccccccccatatcaataacgagacccacacacacacaaaatttctcctcagaataataccaaaaaaaacaacatgacacagtaaatttacaagcatagaaaaaactttaataattaacttgacgaaagctctaatggaacggacggggtcacaaacgtaaaccagaatatatgagaccctcaaagcgatacgcctggcgggcttaaccttaaatactactagatcacggctaatatcggacggtttccacgatcactgagggatcttggatgacgccgaattagactgacccgaagcggaggcggccggcgaagatgaatgcgccgatgctgacttacggtgctaatacgccgaatatgggacgcactcaatgccgcccgctg

SEQ ID NO: 90772 - DNA, 256 bp, Glycine max
cgttgcgtcttaccacggaacctctcggacctattacggaccctacgattactagctttatgagcactgaaaaccaagatgctaatccttggatgattctgatacctccttctactacgcggcctcgaggaagggaaatgtttcttataaatgaacgaattataattgcctgaactgggccgctcctaattctaacgaaaccttcatctcagctaaatcacctaatgctcttaactcgcaaagaatgcttcctttt

SEQ ID NO: 90773 - DNA, 391 bp, Glycine max
acggctcatcacccccctaaggtaatcttgcccacgtcccttgctcctaataatcaggatattactagcagactgctggcccacgctattggtattcaaccgttgaattaatctactcaagagcctccttacttttatgcgaaccatgcacaacttaagaatgcctcgcctactgctaaaaaatatttaacccgcctctaacctacctacgctaatagagcaaccggcctttacaattaaagatcatatcggcgatccaagaatagattaatacctgcctccatcgactaatgcggcacaagcttattccccttctgctaaacccgatgccgcacctcctatgtcctgccgcgaattccatattggggctcatgaataaccctcttcgctt

SEQ ID NO: 90774 - DNA, 336 bp, Glycine max
cgttgcgtattaccacgcgccctagaaaataccgaaggcccgcgccgtgccgcagatatggggaagaagaagagacatgagcgatgaacaataattcgggcacctctaccccggccgagttcttattgcccctgccgttccgtgtgaggcttggggacaccgagaagctcctgactgtggcgtgtcgttttgcggaatgttgttcttcccgtggttagcaggtcgcgtgtggttatgaggtcgccggctgctgttcttagtagtggtcttattgttctattcttgcggatattgatttggctatgcctatttattagtgtcttcctatctttttgt

SEQ ID NO: 90775 - DNA, 437 bp, Glycine max
  unsure (1)..(437): unsure at all n locations
cgttgcgtatgaacgacgacggggcgcgggngaagttacaaanntatatataatttcgggccgaccgcgcgagagataaaaacttgatgtcgatcccgtctgcgacttgcaagggccgggcgggaaactattatggcgcgggcgagacggcgccgccgacgggccctgacgcggaaccggtgccgcgcgatcccgcggataaaggcgcgagtgggcccgccgcgaaaattcaagcggcctcgtgcaatgagatcagctattgtgtgtcgctcttccctgtattgctgtggtaataataattcttaccgttgttcaaatatatgtgtggaatggtataatgaggtgtcccagaagaaatgcgtgaaacgttataccaaaagagtcaggaataattccccttaatgcgcataatcagccaataataaacgatactgtga

SEQ ID NO: 90776 - DNA, 279 bp, Glycine max
cgttgcgtattaacaggccagaaaagaaagattcgggataaagaacgaccaaagcgggaacccctcgcctccgcagcgacgagcgaccgcgcaaggcgaacccgaaacaaaatcccgaccgccccgagctgcggaacgcggggcgccctacgcgagcggaaggagtatactgcgaaagccgctgccccgaatccctggagcccgtccgcaaccgcgtataaatgaaatcaccccaaaccctcctatatttcctctactgctaactcctcccggaggatc

SEQ ID NO: 90777 - DNA, 460 bp, Glycine max
  unsure (1)..(460): unsure at all n locations
gcgttaaccgttgcgtatttatagatgaattgcctcttagaccgtgatcccttagtaacgcactaagaatttgaccagggcttaactttagtattacgagggcaccgacccctcctttgagcgatgattatgagaatccaccgtctcgcctngaagaaactgctcttgttacaattgactcgaattttcactaaaagaggcgatataagctttcaccaatgtcgagacggccacgtttatgacccaacttttagcagaataaggcagtgatacttgactgctggataatactttataagacctaaaggcaccctggctgcagatgcactggtgaccttttctacaacacactaccttccgtagacccggcttgctaataagcagcagaacccctttccctacgagcagaagactcgccttataaaaactttgacacttttcgcctcctagctggcacctt

SEQ ID NO: 90778 - DNA, 340 bp, Glycine max
ccgttgcgattgagactaactatcagccatcgcgcgccgcgcgtgcatgctcccacaaggaatagagcaagcattcaagacataacctataatcaacttaaactaataatggtctcctctatatcgtatagaacctccttacggctttaactccttccgtagtactgactgacgtcctagacttaccagccctctaatagggcccgaatgacgaaagataaattctccgtctgatagcctaccttccggacgacgagcgaccactggcggacaacttgcgggctaggcgcgccggcgctgctaaaacttctcaggagcgagccggaacgggggtaaatgt

SEQ ID NO: 90779 - DNA, 298 bp, Glycine max
tttggggaagacggccccgcccccagaaggaaccttaggctcaagagggagagggatctcagctgtgaaaaagttggggatgcaaaagagattgaccagagggatcttacctgtgaaggaataataagagccaccgaagaagaagaagacggcgccgcccccagaaggaaccttaggctccccaaagaccaatctgctttgctagaaaaaagcttcaaccaccatagccccctcaatcctaaccagaaccaggctttgtcgaaccagttaaatctaaggccacaacaagttgaggtgt

SEQ ID NO: 90780 - DNA, 585 bp, Glycine max
ggctgattcaggttcggttaaccaaccgggtttcgtagtatgcgagcatcgttgttggtgggcccccccccccccccctcctataaaattataactcccgcgacaggccagactcccataaagagcctaacccctagaaacaacgtcccacccccgaaaatccgcgcgaatggcgctttctgctagaaaaacaaagtaccacccgccgtaatcatgaaagcaaagtgattcacgacatggacataatttacagaaacaaaagcgacaacagagggactccacctggagacccccaactgtgcgcctaaaaggacaacaatcaaccaatggagaagcccgccttactctagctaacctacaacttcatgaaagcgattagggcccaactaatgaggaggaagaataaacggacgaacacgccgcctgccgtgtatgcgatgagctcctgcgtgacccagatagggcggacaaacaaccgtgtccccatactaaagccgatggtatagaccgccgccaatggatcgagtaagatgctgacttagccggctttgcctgcgtttctcttgagccctggatccggaacct

SEQ ID NO: 90781 - DNA, 300 bp, Glycine max
  unsure (1)..(300): unsure at all n locations
cgttgcgtnttgcttaccactccgatcgctcttctataaatcccctttagcttccgctaggacagccgtctataaatacttaacgctttgatccccttggcttgcacgcacagcctgacacaaaaacaaatacaaagcctaatagaatgcctcgagctcctaatagacatccgtggatgacctttgcagccactttgtggaccaccacagcgtacactagcactaaaagtcttactgattctgatgaaattaagctacttgacacccttcgaatgctgatcggcgagcccgataatcgaa

SEQ ID NO: 90782 - DNA, 300 bp, Glycine max
cttatctttcttcttcttgttcttctaaaccgccgccgattctcagtttccgatggcagaattggatttcagaatccaaaaaaatgaccacgttaatctaaccgccttttacaaaccgttaccttgggggggcccctaactctttcctctctccgtttggacccaccaccaccaccaaccttaaccttccggggttccattccacagtggctaccaactttttgtaacactttccggttcgggccacgctttccgaacgtgccacttccgatgaagtagacacgcaaccggtggttgagg

SEQ ID NO: 90783 - DNA, 381 bp, Glycine max
ccgttgcgtatgccacgcccgccgccgccgccgccgcgaaggtcgtcgtaccgcgatcccggtacctgataaccctacccgataacgaaaaaaactaagagtccaacgcgaggtggccgcagaaaggtccaggccctcttttcgggccagcgcccggcgcgcggtgccgtagagaagaagaagaggaaggccaaggccggtattccggaccggagatcctgcaggaagccgcctcgagagcgcggttccgtttggagtgcgcggtgagtctggagccggtactaatcatagagtgaaagttcttcctattaagcccgatattataacaaatcttaatataagaggaagtattagaagagaaagagtcggagcccccgctgc

SEQ ID NO: 90784 - DNA, 336 bp, Glycine max
ggctgattcaggttcggttaaccaaccgggtttcgtagtatgcgagcatcgttgttggtgggcccccccccccccccgcgatcttcagaaaaacacactcacgactagccgagacccgacgccccttattccgcctaccagaccgtttaacccgaaacccggctgaagtctatagagttgaacaacagaagactgcaaagcccccaaataaggcacaagaccgcgccgaccctactcccaagtaactgaagacttcacgcctgcggggcatcatactgaaattgcagcgaaagccccaagagataaacgagcgacggactatcctttttggactaa

SEQ ID NO: 90785 - DNA, 359 bp, Glycine max
ccgttgcgtattcgaatctgcggttcctgacttgcacccaaatagaagcactgagaccacttcgccatcaaatgagtatcctcgccgagaaccgacaaggcctaacccttatgggaccggaccttaaaatgcacttgacactgctagaaatgcagaagctcgcgcgggagacaccgaatatatacctgcttcaacggctcaacctgcggcgacgccgagaatccggacttcacaacaaacttaacgtagggatacacactttagggacacaactacaaaccgaccgggtcacgacagcgccgataaaactcctcctaattaaaatatgccgtaattaaggcctgagaaattgccatccc

SEQ ID NO: 90786 - DNA, 381 bp, Glycine max
ccgttgcgtatgttttacaatacctaaataccgaagaacttggcgctgccgctgcagcgccgcgaatcgacgcggctccgcctagaatctgtatctttcgaaattggatagggccgtggaaggcgcgtctatactcaagggccggcgatgacgatgcgcgaggacgaaatgctgccggcactgctagtatgcgtcaaaaggtgaaaagatcttggcgaggttttgtcttcaccccttgtacttactatcgaaactgaaggctgtttaatgtcccttgacgcacctttccatataagagataatgcaacgttgattgacaggtcagggcagcctctagatcaggcttcgccttctaacagacgcgcttctggaccgcgccct

SEQ ID NO: 90787 - DNA, 425 bp, Glycine max
cccttcctaccatttcccgccgttgctgtctgctactgcgcctccccgcgagatcgagagaagatgaacttaatgaacgagatatttatctaagaagacgaagacgcgctaccgccagaataataacgtgaccgattcgcggaagaggaaaaatggcgcgccgccgcagtcgaacgcgtggaatattcacactgaagatgacaactattcctatgcgcgatgagcattaacttgcacctgcagatcttccagctcctgctaaacgcctaaaaagaactatgcctgcacctaaaataaaacgagtagacgaagatcctagacgaaatactaccgcatattgataggctcggaaaattggaatacctaaacaccagcctttaatagctaaaaaccctactatcctacttgttgctgctgctgctgct

SEQ ID NO: 90788 - DNA, 369 bp, Glycine max
ccgttgcgtaatttggtgagatgggtactcctacttacccccttccttcttctgaaccgccctgatcccggcggacccagataaggcggacatacaaccgccagatactgatgagagctgaaataaccttggtgagatgggtactcctacttacccccttccttcttctggcgggctaatggttatccgtcttagacgacaaactgctggagctctaataataacctaaaccgtcatccattaagctacacaactgctggcccgaatgctgccgttaaacctgctccccctatccccttacgctctgccctcttggaactcccctaagcgctcccatcagctaacaaagagtgcccggccctatacgcg

SEQ ID NO: 90789 - DNA, 463 bp, Glycine max
  unsure (1)..(463): unsure at all n locations
ccgttgcgtntaatggacgggacacggcccctcccctccgcgccgatcgctccctgtatctgtatctaaaaaaaactttctttttattatgcactattcgttgttgtaatacatggttaaccttgtctcggaattgttgtgcggttggccgttgtgcgggcagttatgatagttcggtgaagtgtcgtgtaggaagttgttcgcggttatctcgtcgtgatcgttgtaaacggtgttattcttgtggtgctgagagttgatgctggctttagtacctttagccgtggtattacttgtaaccttcgtctggtattacttctccgttccgctcggggagcgcgtactaatgcaattaatggaggtgatatcctaattagtgcacctacgaatcacacgccctcggctatagccgcgaacaccgacgcgggttcttcgaatcgcgctgccctcgcgggagcgcgca

SEQ ID NO: 90790 - DNA, 232 bp, Glycine max
cttacactctcgcacgaggcaacgcaatcgacgtctcttcttcttccccttcgttcttgaatatataataaagaaatggctccgccgccaggactcgttacgacgccggtgtgtaatctgcaaggtaaacggcgcgggttccaggttcgatacgggcagctataccggttcgaagtcggaatcgacttaatcggccaacgtagatggatgagcctaagcttgccgacgctag

SEQ ID NO: 90791 - DNA, 277 bp, Glycine max
gttcggttacggtttcgtttcgtagtatgcgcgctgttggtgttggtgggccccccccccccccccccgaaccctgaccccggaggcaggaacaaagaaaaagaattcacccccgactcgaatccaagctggaaaacccaacctgttccctgcttcagaaggctaccaagagagtcagaccgactagagccgcccagaaggaaaggagctattgtccggaatgccatagaaaaggacacattggaccccccccgcacctgttaaatgtatctcgcca

SEQ ID NO: 90792 - DNA, 469 bp, Glycine max
ccgttgcgaacaatctccgtggacagactttaggacaagcttcaccatctacccatacggatcggtgcttggaaaccgagagcttgtccgctctaattccttgctttactatcggagcgtgattttaatattgatggaatatcccggcctctttatacctaaggccctagaagaccgggaactcacggacgcggaccggggccaattcctattgtgggccttggacgtttgccaggccgcccacacttcgcgaattacttatagactttgaccttccgcggaccgactcttgcggaattctttgccttttacgaattaactgaacgcccaaagccggattttgccttctccagaggacttactgaaggcatagcctactgccgcacaggattcgcgaaggatatccacaggaatgaacttgccgccgctgaccggattaaacaattagaacttacggccgaaaacgccg

SEQ ID NO: 90793 - DNA, 386 bp, Glycine max
ttaaccgttgcgtatggctacggggcggccgacgcagcggcgccggcggaaaagtgcgggcgcggaggagactgcgaagaggtggcggtgctggtggtggtggtgcgggcggggtggtggttggaacgcgtagtggttacgtgtcttggcgactaccgggcgcgggatgtatcgagtgaatacgtatcctcagcgggggtggccgcagtggtggctgaggtggttcttaacggcgatgctcttggcgagcgagactaggtcgagcggcgcctaggcatcgaatctcaacactgatacctagggctgcaatcagaatatgacgcgtcgcttccccttatcccctgccaattatgatttaccgattttgcccccccgtcttgctttct

SEQ ID NO: 90794 - DNA, 475 bp, Glycine max
  unsure (1)..(475): unsure at all n locations
tgcgttaaccgttgcgtacgtcgtatggtaccgttgcgtatgcantgcantttcccgctatcccactcttcctgtggcgctggctcaaatctaaaaaggccgcgccccggccgcgcgaatcgcgaatatacccgacgacttgcggaaataattagaattgcggaggaggccggcggaatgggtggaaacgcttgttcttgaatgataataataataatcttatgaatttaaatgaaaattataattctaacaagacttctgctccctacgatttgaggcactacaatgcggcccgctaatgcgggaaaccgaatgcgacgagcggccggaccgcccgctacgtccctattaccaacttacgagcctgaattaattgcacaatataacctacttgcattttccgacgattacttctcgctgggactgaatggatgaaacccagaggatttgagaaagaggcattctcttagctacg

SEQ ID NO: 90795 - DNA, 348 bp, Glycine max
  unsure (1)..(348): unsure at all n locations
gcctcttccttaaanttctcactggaatacgacttatacctatcgcgtggctgccggcctctttgcggactcgaccttctatggagggcgatggccttaatgatcctgaagagcatctaagacatgctgagcctacgtcgggtaatacttcacccggcgcgcgggacgaacagcatgctatagctccttaataatgacctattaatcccacatatttatctagaaattaacagcaaattactcatatgccgccgttgatacaagctaatgccgtgtcttatgaaccagccggccctctgatattagcagcaacaataatttcgaatcctcctagtcatgctacaaagc

SEQ ID NO: 90796 - DNA, 315 bp, Glycine max
cgttgcgtattttacacagactacgctataccggcgccacgagtagccccttagagtaacgggaatagaattacaaggtcgtactatacgcacaattagagtcttccgaactgttacttgtatcacgttccgaaggtttccccttcgaattatatctatctctaaaatgaactctttcgtaaggttaccgaatcgccctaactgcccgtagccaacccgcccgcgtaggtttccttacactcgtttcgccccgtattagggtaggttacgtaaccgttcctaagtttcctcccgtagatcttctggatataaaac

SEQ ID NO: 90797 - DNA, 240 bp, Glycine max
cgggtttcgtagtatgcgagcatcgttgttggtgggccccccccccccccccttgaaatgctgccacgaccaagctaactcaaccagaacttttactcccccccagacagaaaaccactaaataataaaaatctaaagacccgcgttcaaaaccagaatacgaggcaacgaaacaacccctccctttagaacaaatatttatcacggactgcgctgtccttaaacgatcacccgccaaag

SEQ ID NO: 90798 - DNA, 207 bp, Glycine max
  unsure (1)..(207): unsure at all n locations
acttaccgaagatcctgataaactcttccctcaaccccagctaattctggactcaccgaccgggcgaaacagtgcctggtggaatatgcccatattgctgcaaagattgctntaaattccggatactcccagcagctggcgaatgccccttaatggagcttgacacggagctccggcttccgattacccttcgataaataattttct

SEQ ID NO: 90799 - DNA, 273 bp, Glycine max
tgcccttaatgagccaatggctaagcgaattggatgacatataattttacctgcccctgcgataatgaaagctcctgctgccaaacccggcctcgatgattcttcccgcctttccacttacccaccctatgacaaacagcagccatattagccattcctgataccctcctcatgacgcccagctgccggataagccattaccgatagcccgcactcacgaaccgcagccggatcccctccatcataagtttattagtgccggacccgctccgc

SEQ ID NO: 90800 - DNA, 284 bp, Glycine max
gttcggttaaccaaccgggtttcgtagtatgcgagcatcgttgttggtgggccccccccccccccccccccccccccccccccccccccccccccccccccccccccccccccccccccccccccccccccctttggaaatttggacaccacggaaaaatgaagtcccagacccccccggaacgggagaccaaaattgccagaggccctaatacccgttaggaaaaggaaatgggttcccatataagataaacttaatgtgggggggtccgcagcaagaaaagt

SEQ ID NO: 90801 - DNA, 335 bp, Glycine max
gttcggttaaccaaccgggtttcgtagtatgcgagcatcgttgttggtgggcccccccccccccccccccccccccccccccccccccccccccccccccccccccccccccccccccccccccccccccccttttgaaatttggacaccaccgaaaaatgaagtcccagaccccccccgaaccgaagaccaaaactgccagacgccctaaaacccgctaggaaaaggcaatgcgttcccaaaaaagaaaaacttaatgtcggggggtccgcagcaaaaaaagcttaatcaaaacctacagacaaaaatcgctaacggcaatccgcttaatgatc

SEQ ID NO: 90802 - DNA, 333 bp, Glycine max
ccccgggtgtccccgtgataaagtcttgcttggcttccgaggagtgtttaaagttcgctacaatatagaggttgacagcgctgtagacgtcacaagtccagcttcccgagaccgaggagggctaacctagcgcgccggtttgtgcacgactggacaggtgtaaattcccctgtggaccgtacttctcgaagtcaaactggtgccgtggccgtgtgtgtaacctgaatgcgctgaccaactaacgttgaagtgtgttttatattgttccctgtcacctttgtgcgccggtgccggcgtgcgagctagcgtgctgtgcgttcgtccgttgctgtt

SEQ ID NO: 90803 - DNA, 185 bp, Glycine max
cagtaacctcagaattcatattatgctcgcggatttattaggtcgaaacatgaagaaatttacagtgaggactcaggtgactgcaaaaaaacaaaatactacattcacttgcatatgcaagctgatgtacaacaaaaaattgtcatcactcacacatgcaagtatgtaaaagaaaaaatcaaagt

SEQ ID NO: 90804 - DNA, 432 bp, Glycine max
  unsure (1)..(432): unsure at all n locations
tgcgttaaccgttgcgtatgcgaatcacgctatccctaataacagaaanttcttaaaatgacagganttccggaccaataatgctgatgatccttatagaccatacgccaaagagagccactcgagctcacctggatcctaaacctcttatgcggaagtaccagtggacgcgccttctcacgtccactatacctaacggcactgccacccagaccgaattgacttgccgacttcttgctggggcacattagccactgaacgccctgaaatgccctccccacatattgtaacgattgccctactacctatgcattaaaagcgagcgaagcgattattgccttgacgataaatactataaaagaatacttctgctgccctctccgacggacctataatactacgaacgcggtgcgacctcggacaagctgaacc

SEQ ID NO: 90805 - DNA, 185 bp, Glycine max
aaaaaagggataacttttattatttcattaggaagggcaaacattgcctagtaatttcatgccaggaacacataatcctcaatcatggaataatttcaaacgaacaaaagcttcaggaatgtggggggctggcccacaacaaaaaaaattggtgggggaatctacaacctggagggggttccccc

SEQ ID NO: 90806 - DNA, 371 bp, Glycine max
cttaaagcacactgaaataattgaatcgggaggaagcattaaaacaagttcccgtgtacatagaaacaaagaaagtgacaagtgaagaaaagaggttaagaaagaaacagacgggtttttattctggcacccgaaacaatccacttacatacaagaaaacattgttctgaccctcttcaacatggatcccagttttggactccctgattaagattcacctatccgacaatcactaatttttatacattcccgtcaacacaacatcactaaatgaaactaaaaacctcgtgccttcggcaccaacatatcataaacattattactttctccctaaaaacaaccatgacacttaactttacctatactattat

SEQ ID NO: 90807 - DNA, 456 bp, Glycine max
tggctgattcaggttcggttaacaaccgggtttcgtagtatgcgagcatcgttgttggtgggccccccccccccccccagcagtagaactactcaacgcgcgagcatggatacattcgaccttacgagacaacaaggaaactggagaatacacgacgggtttaacacaagcagaatccgaaaaaccgcggtattgaaatacacgacaaccagcgcaacatcacaactccggagaaagcgcgaaggcgaatcagccttaaaaaccaaaccatatctctagaaaaaaaaaataagagaaataaagacgttacataactcgaatcgaaaatgaataaaataaaaaaaaaacgcaccccagcacttgactctcctcccctcgggcccccgccgcgtcacacgaccggacgataacgatgcgcgatccatgaagcggagtattcgagcgccgccgaccccc

SEQ ID NO: 90808 - DNA, 363 bp, Glycine max
gttgttggtgggcccccccccccccccatactacagaaactagggcaccccacccaacctgggaaccccacaggtccgcgaagctcgaaaacaaactaaaattgcagaaaattaatcacatgaaccataggaccgaaaccaatccttgaactcgccctctttcacatagaacgggcccacgaggacggagcagcctcggagccggccccatcacggacgcctcctccaagaacgggcgaagcggcagcttaggcgtatgactaacggctgcgtcagcaaccggaaggcgctgtggcattcggaaacgcctggggacgagctaacgcttctgcctgacctctaaaagatgatgagctcgcagcc

SEQ ID NO: 90809 - DNA, 239 bp, Glycine max
gttcggttaccaaccgggtttcgtagtatgcgtgcatcgttgttggtgggcccccccccccccccccccccaccaaaaagaacacatgaacaaagccgaacctaactccagactgggaaattacgaactccgaaacaccggcaaccctgggagcgggcttgacgtagtaccacctaccggataccagaaaattaacaggacacagcacggatgaaggctctccccgacggggaaaacct

SEQ ID NO: 90810 - DNA, 509 bp, Glycine max
atgcttcagtggctgattcaggttcggttaaccaaccgggtttcgtagtatgcgagcatcgttgttggtggccccccccccccccccccccccccccccccccccccccagggaagcgacgcccccaaacaagcaacgctgcaagtaacccctccgcacccacagaatgaaccaccagaacgacaccagggccggagcgaggaagaaaactgccaaacgcacccttaaaaaccactctggccactgccgactattccaaaaaaagaccccttcctaaatgcctgaaatctgcgagaaaaactttaaataaataaaagaccactaacttgcaatccccgcgatccccgacgtcggccgagaaatacgccgatataaaaggagatcggcataaactcctcgacctcgaaattgagccataggatatcaattaggctaatataagacctaatactccggacgaaaccgaaaatctgcatattagctcgtcattcctttcgtctgaccttact

SEQ ID NO: 90811 - DNA, 536 bp, Glycine max
  unsure (1)..(536): unsure at all n locations
atgcttcagtggctgattcaggttcggttaaccaaccgggtttcgtagtatgcgagcatcgttgttggtgggcccccccccccccccccccccccccccccccccacaataaactattcgaacctgaaccaaaacccgactaaacatggaacgctaacgttccgacctaagcgagggggttgggcgatcagaannnnnnaanngnactaaaaaccccgaaagcgggacgctcaaaaacgaccttaacccaacaataataaaaaaaactaaactaaacagaacttttttttaaaacatagtttaataaatgtttgtggtcaaccgagatcacaatatgtagggatgaggcccccccctaacccgacctaacttctaataataataataataataataataaattgccccatcaaccctccacttctctatatatgcattcttatcggcctagcgctttttcttctcactagggcgttacggcccttaatttcgacgttattacctcgctaatggacgacgttcgcgtggggttccaa

SEQ ID NO: 90812 - DNA, 445 bp, Glycine max
aatgcgttaaccgttgcgtatttgaaaacaaattatcaacccttcgtggtaccttccgagcattcacaatacgtggcctttgtcttgcgatttaacgctgcacgccgaggagtagctctacgggtcgacgtctgacgtgtacgcgaaaggcatcaagacaccaccttagtgctatacttattgatatcgtgaaccccttctcgtgaatcctaccgataggtagtatcggactcgctcgacctggttccggcacttgcagacctgcggataacactgccagagggccgaatcgtactaaaatatctagacccagatgcagttatcttctcctacttatacggcaatcttaaaagtccgttcctactgataacccttgtactttaagatgtcctcctacctttccattcgcaatacaaatcgcaaatacttgacctactagacacct

SEQ ID NO: 90813 - DNA, 549 bp, Glycine max
atgcttcagtggctgattcaggttcggttaaccaaccgggtttcgtagtatgcgagcatcgttgttggtggcccccccccccccccccctccccataagaatcaagagcctaaaccggacctaaatcaaaacataaaactaccgcggcacaggaacgggggagaacaataaaaacacggaaaaaaataaaaacgacccgaacgacacaaagagaccaagacctacggtgaaccttgcccctcttgaaattaactcgaggaggaagaaggagacctcggggatgagacgtaggcataagaggacgaatgaacccggcgcccttgccttggcgcctgatgacgaagagaagacgggcgacataattggcacggtgctttcccgcagcttctgaaatgaactgaaccgcaatgaccctcacgacgcgccgcgcgagctattctgagggctggggctgaccgcctcggaacactcgacgaactggacgcccatagcccacgccataggcaagggaacgaagaagtgctccgggacgtggaaaccgctgacgaa

SEQ ID NO: 90814 - DNA, 339 bp, Glycine max
aatgatggctttcttggctagagctttgaaaaatccaaccttaatcttttttttacttcaccagaaggagaagaggatggagcttgtttaggccatgtccaagaggaggagaaggccaattgagagagggccaaaccatggggttgttggagaagaatcaagcagtgttaaggttgagtctcttgtgtttggtgatgaatatggttttggagtgtcagagttggaagtgttagctatggagatgcaaggttatggtaagggaaggagggaacaataagaggagcctgatgaggtactagatcaattacaagagaggctggagaaagagcttgatgaagg

SEQ ID NO: 90815 - DNA, 403 bp, Glycine max
caaataaaaaattactcacaaaatgtcatctccatgcttaataagcaaaatatcaaacaaatgcttggtacatgggaacatatttttcttttgaaatccctatagatgtgtgaatgagatgagtttattaaaggattacttatttcactcaagttttttgagaatatatatgtgaaaaagaagagactagcaaatagaaggataaaaatagatgcatgtaatattatgaatataaaaaaaaatggtgcttttttctttcaataaattaaatatacaacatgtgtaacaattattacaagtgttatattttgatcaattatctgttataccttgtgtttttttatttattgagaaacaacaacaaaactacatttaaaatgataattgatacccaagtttttaa

SEQ ID NO: 90816 - DNA, 453 bp, Glycine max
gagctaactagagctataatagaaatgcaatctagtttagtagttacataaaatatgatatgtgaaatattaattggtggactagcaacattgaatatattaggtgaaatacgatatgtacagtactagagagtaataggctaatagctacacaggtgcctgagatcgtggatgtgatcacccgaaacagattgcatgatgataaatttgaagggtgtgtgtgtttgcaatgtcaagtataaagaggggatgcagagggtcggggataagcgttgggagtctccaaacggctaatatcatcggcacttcttctacgaactcgagatccattaacagaagaaggattttgatggccgctattaacatcagcacttcttctacgaacacgaggccctccatttacattagaaagctgcaactgctccaatgtcgtaaccacttgatccatgtttg

SEQ ID NO: 90817 - DNA, 393 bp, Glycine max
ccactggagccttaaaaaaattaaggggggtttttaaatgaaaagaattttcactgccatcggcatggatcacatcagcttatacaaaaaatacaattgcccccccattgttcaaggggcccccaccacagacttgagaaatctagaatcaaggccctcgttgtttacaggcctaatatgttacctggaagtgtcaaaaaattgccttcttaagaggggatctttcctatttatggaatttattctcatttctctcacattatattaccactcaaaacgtgtccacccaggggcaacattgtttaacatttcccatcagccatgacttcactgtttaaggaggttcctgatgacatatggaagaatgcccccatggttaaagtaagcaagttc

SEQ ID NO: 90818 - DNA, 318 bp, Glycine max
ggggcaaaccagggggacccctagtttaaaattaaaaggggaaaaaattaataggggaaaccttaaaccccaatttaaaagggggcttcatacctccctaaatcattttttttaaccaaggcccaaccaaataagaagccggggtcccccatcttcttttttcccctataacaaatgggcaacccaccgaaaaagcgtttggaaaaacccaaggcccctcgggggttatattccggaacagtatgcccaaaaccctttacgggcaaaaaagaaaaaattttggcgaatccttgggtttacccagcaacttgaccattg

SEQ ID NO: 90819 - DNA, 323 bp, Glycine max
ggggggaattaaccccacagcactttttggatttttaacatgaaataaaacaatttttttcctaatgatctcaggggttggtctaaaaaaccccattttccttgggtatacccaacaaaaatttatctttttttctcttctataaaaccatgatgcttttaacttaactagacagtttacccagggacccctccacatgatgctttacttatttacacaagagcaaccttttgagcttgcttttgctgcttttgaaatcctgggagggggccaacataaagatgagtcccacaaaaatcaaattggggaagcctttgtttttt

SEQ ID NO: 90820 - DNA, 258 bp, Glycine max
tgcatatgtctatgaatagatggaagcaccacaaacgtagttgatgatcaacgtattcacagtgacatgctgagcactacttgagaactttgtggtgggatgtgctcggcgctgataactatagcacacatgattttcctcttgactttgctgccagttcaggaacctctgctcatcaggtggagtcgacctgctaacaaagaaggtagatctcctagcgtctgggacacctttgccaacgctgcatatgcccatgga

SEQ ID NO: 90821 - DNA, 318 bp, Glycine max
ggaaagattcaacatgacattcacaaaatttattcatactttattgaaataccgtaaaacaaggcggatagccagtaaaacaaggcggatagccaatatggaatatggggaatgggaaaaagaagaatcgagggatcaggggatccaactagaattgaagttaccacaaccttcaattaatattcggctaccactttaatatcgggggttctctaattggacatgcaccttattggatttgccacatcaagggccaagcgatgtttaacatcatttttttccaatctttcaaaggcagggttcacgtaatccattgga

SEQ ID NO: 90822 - DNA, 281 bp, Glycine max
gaaaaaacaataaaaaaggatttccatgaaattatttaacagatgcctgaaacccctacactaataaatatccctaactaaacatgacgagttgctaaactacatgttggggacacataaaaaagtttcttcacaaattaaaacaaaaaagaagagtggctagcccttacaacatcttgcaaaaaaatatgccaacctttcacaaccctgaagcagtcaggaagtttttacccacatgaattaagggtgaaggacccttttagtctgacaactaaaaattc

SEQ ID NO: 90823 - DNA, 390 bp, Glycine max
gttcggttaaccaccgggtttcgtagtatgcgagcatcgttgttggtgggccccccccccccccctaaccggcagacacacagccgccccgcccctccggacccactcatacgaaaacaacaattgaaaccaaaacgatccatctctacatatgagtggatacaacccaggcactagagcaacttctggggccacgctgccctaccggacctaaccctaacgaaatgcgagaccacgacagaactacctgacctcctcatgattaacaaactaaaacatgcagactgggaagcgaaactactctaggacaaagaacagacctcctcctcctgagacaccactcgcactaaagccggactcggagaaaggcactcccccccatgaacctcc

SEQ ID NO: 90824 - DNA, 262 bp, Glycine max
gaataaaagcaaggaaacagcaaaaaaccttatggtttatgaacaaattgaatgcagcggaaacaatgggatttaaaggcctgtctgaccaatttaccaccggcttttgaagttatttttggcatgcccacttgggcacatactcacaaatttgttgagaaaggggttcaaaaattaattgggtatttcaccggcagggccaggtcgtgcagtcaacaaagggtgaaaagctttgactacaatgcttatgtttggtctgaaa

SEQ ID NO: 90825 - DNA, 306 bp, Glycine max
gacgaaaggaaaatggcgtttatacattacaatatacttttcgattaatcaccgatcggaatgaagatgatgatgatgataaattataaaagcaacagtgggcgggagagcgtacttgtaacgcctgcctcctccattttcccacacggctttagtttttttgtcttcttgcttgccggctcgcaatcagggtcacgcacggcatgacatgccagcctgaccccacaaacatcgcacacgacgcctgacctaaaaagcgcgccccggatgcaacaactcccaggaccatgatcacgatacaactgc

SEQ ID NO: 90826 - DNA, 353 bp, Glycine max
aagcatcataaaaatatacattattaacttgcaatgcacccttggtcacacaagtgttccaaatccatttgtgcccccacttcacaatggccagccaatattacatttcggccataacacatttcaattttcaaacctccacctgcctattttttttcaattttatttaaaattaggaattaaaaagaagagagagagaaaaaaataataacccctaatcatgaatcaccggcaaccggctgcgccaaagttgttccatcccgatccgacgtcgaactgctactcgcagaacacaaacacggccttagcttattcctccacacatccctaaaaaccccaccatccccattcct

SEQ ID NO: 90827 - DNA, 419 bp, Glycine max
aggttaaggaacacatgagattctctactttccatagtgaaatgaaactagtgaatgtcctactttatgattttacaccacgaaaatagaagcaaatatttcacaatgatatgcagccaaaactcaattgatttcacggggtttccaatcgaaacttacaaatctcaaagtttactctttacagggattaagaggcgttcccacacaaacctttgtttccagaataagtgctcccaggaaagtcagttagaggcttaccctctggaatttccccttcaagcacattatctgataaatccaattccgtcagctttttcaagttgagaaatccagttggtattttaccactgaagtgattgccttgcagcttcagtctctccaacaaggtcaactttgccagcatctctggcaagttggag

SEQ ID NO: 90828 - DNA, 344 bp, Glycine max
gttaggttcatactttacacatgatacgtattacatagcccaaaatcatagtatccacagactacaccaatgcttacaaagaagtttttccgtaaaaaaaaaaaaacttttatggaaggattacggaagagtttatggaagaaatttttccatagtgaagggcaaaattagaaaaaatggaaaaatgctagctgcacctagcaacacctaggacattttcatgaatctgaccccatataatttatcttaataaaaaaaatgagtaatgaagtataaactatggtacaccattgctggtaactcataattacattagcaagcagattttccacccacaaggaaaa

SEQ ID NO: 90829 - DNA, 495 bp, Glycine max
atatatcaattgctatgaatttataacagaattcagtaattcacatacacttcactcgtaatcaagatttggattattacacaatcacacacgtctcgatacaaatcctggtctcacacaaatgagcaacttccactgcactcgtcacttaagaattggattacacaacacaagccaaaaaaataaaacatgtctcgaaacaaattcttgtcacacaaatcacaacaccacccttgtcggttggattacctgacttaagcaatcaatctggaaaataatgtctccatacaaattttttcaagaaacaaattttcaatttggaggaagaacctaaacttaccttcaagcaatgatgccagcaaaagctgttgttgacaaactgctgctcacagccaaacactcaattttgcacaaggatttcacaatagggaggaatgtcatggtcttcagtcttgatttcctttgacatgtttgtcaatttcaagtcaaggagag

SEQ ID NO: 90830 - DNA, 283 bp, Glycine max
gtaaaattgagtaactcaacaattgtaactgattcaatatagaaatacatttttctcaattttatctcactttttttttagtttctttgaactctaaatctcaaatatggtatcaaagctttttgctttgcactgaccattttttcccttacgatcttcgaaaaactcaacaatgattaacgttgactttataaaaaaaccaaatttttatcaaaatttaaaatttcaataccctttatagttccatgacttaaaaatagccggtgcttaggtcctaatttta

SEQ ID NO: 90831 - DNA, 125 bp, Glycine max
gatgtatatatatgttattttgaatgaaataaagtaagcaagtgagagaatagttcttcctcactctagtcacagcttcaacttttctctttacaaccagacacacccttagagagtgtgcttta

SEQ ID NO: 90832 - DNA, 139 bp, Glycine max
aatatctaaatttttatattatattattttgtaattaacgatatatccatggtacacgagtaaccgtaatttgacggtcaacaacagtagtacgcaactagtagttttcagcgattcactaagaattcctttcattatt

SEQ ID NO: 90833 - DNA, 274 bp, Glycine max
gagaagttgaacacaaaccaacacgtgacaaaaaaaaaaaccactttccgaaatcaaaagagttacacataatagtattaagttaagcagcttgtgaaaagtttaaaaggtttagtggtgtggtactggtcccaaatgagggtgtgcaaaaaaattctaggggacacaagtaactagcgagactagtgaaaaaaaacatgggaaacacgaaataattggggttcccagagttgaccaaatgagtgtgcaagataggccagtgcccccacaaggg

SEQ ID NO: 90834 - DNA, 550 bp, Glycine max
acaggctgtcgtggaaagtgcaggcataattgtttctaatgccgatctgactctctgctacgatgaaaggggtgctaagtatgaattgcccaagtatgttttgagtgaaccaaccaacctgatccgagacagctgaacggcagccggccgtaggaagacccaccgatgtaaaaactgtaaatgactgcagatgccgccaaattggtcccttgcttgtggtaactggagtgcctcgagtaaccttcagatttgctttggcaactttcggcaatagggttttccagttctagtgttcagataaaaaaaaacttttgcgtaccctcgtctattgttcttggttctactgtaaacatgagtctgcttagaattctttggagcgagaatgctgctgagattgttctcgtccactatcatgatacaagctggagcatacgttttagaaacttgtcacatctcgtgcaactaattatattattatgtggtctggtctgacatttgaaatgaaatgcatgataaggagcaaatcgcaatctaatttttacattatcgc

SEQ ID NO: 90835 - DNA, 253 bp, Glycine max
gtagtgaggagcggtgtcccaaaactcctcacgcatctgcctgagctgggccatggttatcggttggggatgcttccaagctttgggtttcctcactctcttagtgccatgattgacatcgctacttcccccggcatctttggtggccggggtggatcctacgcagcccatggaacgggaggcagtttgccgagtctcagcggcggcgagggtgtagtgtgtgggagcggcgcggcgaggccttcggcacggc

SEQ ID NO: 90836 - DNA, 263 bp, Glycine max
tgacgtcgctgcggcgggaggtgggggacggagtttgagctcccggccgacggggtcatccacgaccagctcgtggggtgcttggcgacaactttgggttttactgatgtggaattcaaggacgattctgagcgtggagacctgatcggagttacagcttcacagtattgacgcctgattcagttttgcgttagaacgtcctgtaatcaaatttcggaatgttttttttatcttcatcagatacgtcctgtgatccatttttg

SEQ ID NO: 90837 - DNA, 389 bp, Glycine max
gaattcgatctgggaagaacaatccataggaccagtacaggctataggcaaggaatctgagatatgcgaggatctgaccaaaaaatcctagatgtcgtgtgctgcgcagcccgcaacaatccaacagggtggggaatgcaaggcgcatagattcttttgtactcgtcgcgatacgatagggaggggcgcaacctatttattaatcagctatatatatatatacacacacacaagagcctgtacacagaaatgctaatccgccaggaattgcttttcgactgcttgcttatgcgcttattgatggtcgtcgaattattgtctccaacgcgttggagaagaaccaagaaagaatactatcctacacactcctgcctaactggaggggatag

SEQ ID NO: 90838 - DNA, 194 bp, Glycine max
ctcctagcatagctagcgcctgctccccttcgtctgtgatcatgtcttgcagcagcggcaagtgcaactgcggctccagctgctcctgcggcagctcatgcaactgcatgtcccctgacgtggagaccgccgccgccagcagtatcaagaccatggtcctcgctgcgccgaccaccaaggccagcgccggcggc

SEQ ID NO: 90839 - DNA, 405 bp, Glycine max
ggtacttcaaaagtacttggaatgctccatcataaactacaatatgtcactgttacaaaatcgatatattcaactaacaagtcagtcctctatcaatttatcttacaagtagtacaaaaagaataaatgaaaattattaaatatggtttcactcttcagttcacaataattcttcaatttacagggtactacttaacattcacaaacatcaatcaactatattttctaaaccacatatacttttcaacttctatcttggcttgatggttggtatacttccactaacaaggtcactacctgaaacatctcctgaaataaaaggagtttttataacagaagatgaaggttctgaactgaatattgtaccagaagagtcacttgtaatgacataatcatgtcctttcg

SEQ ID NO: 90840 - DNA, 308 bp, Glycine max
gcaggagacggaattaattgatgattgtgtgaaaccagggaacggctagagttttattcatctagaacaaacaagaacaggtttgcgacctatcgcttcaaccttaactatcagaacgcaaacgggccaagtattacggaccttatttgaatcgcttctggatgatggtgttcaaccggatgcggaacatgtcacacccaatcctcctgatccaaaaatgcgtcatccttaggcctttcctttcgtacgttcggtggcggttctctgaggttcgttgcgtcgggccgctggttgtactgtgcggctcg

SEQ ID NO: 90841 - DNA, 232 bp, Glycine max
ccgttgcgtattcgtgtctgggccgacgatctccagctgtgacgggcggtcccgcggcaggtagcggttttaattaattaattatctaagaagaaagggaaggaacagggaccgccctccctgctactgaattactatccgcccgcggacgagagttaaaaatagtggtccggataatgacatataatattattattgaataataatatatgataatactatagctgcgtgg

SEQ ID NO: 90842 - DNA, 310 bp, Glycine max
ccgttgcgtatggcctggagtgcggggtcgccgaggccgtagggttaaaaaggtttggttatctgtgctccctgcctcgttatccgtaagggttctaaagtttcgtttcgcctgggaaactcaacgagatcccggagacataactcacctagactcttccggaccgcgactagagtctcggcgccctcgtgtggggttcctaagtgtgtggttaaggttaatcctcctccacaagatcagggtacggttcccggtaaaggttccgattgtaaaactataaggtaaggttccgccgccgccgccggcgccg

SEQ ID NO: 90843 - DNA, 251 bp, Glycine max
ccgttgcgtatgcttaccacctggaccgagaattaacgactgacgtctactctaaaggagacaactcaactacctacgactatgatgtcaatgccgtggccacatacctttttgcctgatatccgcacgacggctttaaataacacaactccgtgtcttgacgaatacacccgaaattcggctatgccgcctcctacgccgaatagcactaccagcgcgcatacccacttatcgccttcctcactccctgc

SEQ ID NO: 90844 - DNA, 385 bp, Glycine max
gcgttaaccgttgcgtatcccctactttacatgggaggaacccttccctgcgacaagactcaagaaatacaaatatccctcacagacaaaccggagtagaagacctacacccgccttccaggcgccgcgatactaactaaacttatagacttccccgacaaccctaccaagctaaccaaccagaacaccaccaagaaaaaaaaaaaaaaactttgttggtggtagcatctatgcgtcgtagggtttaaccaaccggttaggttcaggctgattgtcaggatgcccgggcacatctatcgtcaccatatgccttgtcaacgacttcgacatgctcccggctctctaaacctccacggtgcgagaaccggagagaagacagtatggt

SEQ ID NO: 90845 - DNA, 286 bp, Glycine max
  unsure (1)..(286): unsure at all n locations
ccgttgcgtattgatacctcctgctccaataatgccaaggaatactttgcgatttcggatatatcttccttgctaaacaaagcacgccttggaagcagatgacggcaaggcctcgaatccaacattacagctgccctattactaagacgttgccgcttcccactaacccactggcaatttcatgacttaaaacgacgcaccgataatattccgccagcccgatggaccgcgccttatccctgntaactaaaacatgagcaattttgctgaaatttcgcctgccccg

SEQ ID NO: 90846 - DNA, 254 bp, Glycine max
tttcacatgacatcccaacgtgatggggtattttaacaaaaggtagaaacgtcctaagacgttatggatataccgatatgtttcaggaggtagtacttacagcttgttattgttatgacgaggcagatggtggactcgtgttcttaatccgtgttgtcttgttgatcaggatgaggctgcttagaaacgtagtggtgagtcgttagtggttcttgcttttccgtgttgttcttgtgcccctcagcctgctgtgt

SEQ ID NO: 90847 - DNA, 242 bp, Glycine max
  unsure (1)..(242): unsure at all n locations
ccgttgcgtatttaaaacctaaccggaggcggccgacccgccgcggcgccaaccaacgggcccctaagggcccacatcctggccgaccaatacccctactgacctacatgacgaaaacaccttcttgngagaatgagaaactatccttattgattaagctcccgcattcactagattaaaatctaaacgaattcaccgtactaacgaaaaagtcttttcggaattagcttcattaaaacttc

SEQ ID NO: 90848 - DNA, 434 bp, Glycine max
cgttgcgaatccccccgcccgcggtggggcccccctcctccggccgccgcgtccgtcgtgccctctacgcgcgcgctgaaggactcggtcgtataaatatatatatagggattcccagccttggaatgcctggtatgattggtatatacagtaataaaccttcctatctcactaataaatcatgaaaagcctacgcctacgctagctcttaataaattaaggccgcgcgatctttacagaaaaactctaccttctgagtaatttggcgccttgtgacaactcggcgaacctatgataattaatatcgcaatttaaactatgagaactccaaagctacgaatatccagctggaaaaatcctattattaagcgcggaaaacgtctcttctagaccgctagcaccacataggatgaccctaccggccgccggttacg

SEQ ID NO: 90849 - DNA, 353 bp, Glycine max
cccgcacccgctacctccgatctcccgccgccgccgccgcatcccgttcccgatcttccacctgtttcagtcgcgaaccgtcgcgccaacagcgctttttcgccgcgcattccagcaggtcaccaccgcgccacacaaccatacccactgcgccgcccatttccggagaagtacacttggagcaaatcttgagagaagagttttaccaaaacttctgttgatgcccaagtcagttttgcttaatttctcatgtggatgctatcagcatgtagcttttagctccttcaattttccccttggtggtggaggctttagctaattactaaaatattgaaaattcagaatgccaaagg

SEQ ID NO: 90850 - DNA, 280 bp, Glycine max
gggtggtggtggtggtgacgggtccgggtacgccggaggctcccgatcgtgtaaggtcgtgtggaagatgtgcccccgtggtgtgaccggatgattcgaggaggtgtggagagaaggacagggagctgtggtgggacccggttataatcagagccttatgaaacgcctatataatatccccaggaaaagccgctcctactgggaatcgatcccctgccaacccgcgactcttactgcacgatgactcatgccccatgcggccgaaccccggggccttctt

SEQ ID NO: 90851 - DNA, 170 bp, Glycine max
  unsure (1)..(170): unsure at all n locations
gttgttaaacttttttttgntacactaattgggggggctattaaaaaacgaagggcgctaaaaaaanaaaanaaaaaatcacattcttttatctcccttatgtacatgtgatttgccactcttctataattaacacaagatgtattaatctacaggggaatacattttct

SEQ ID NO: 90852 - DNA, 443 bp, Glycine max
ctaatcacttgttacattttaatttgggggaaaagagataacataatggtacataaaacaacataaaactacataaaacaatatagaaaacaatatagaaattttttttagtacatatttatatattttcttaagttttatgttgtgtctttgggatggtgacatgagcttcttacaaccatttatatcaagcaatctcaaggatggtggaagctccggtagagacatgagtttcctgcaaccatctagccgaaggcttgtcagcattgaaaggtttttgatatttgcaggcaagctctcaacattagttccccttaagtataacttttctaaagacaccaagtgaccaattgatgatgacaattcacttatattggtgtaagataagttcaattttgtcattttctctgatgttactgagaattccttgagagatgaacaac

SEQ ID NO: 90853 - DNA, 361 bp, Glycine max
atgcgttaaccgttgcgtaatgaagatgagaacatgtttccagctcgctccgaatgcaggacgcgcgcgcgcgcccgccatctggcggcctggataatccaaaacttgggaataaagcccggcaccgagacgctaacgatctaagtattttagggctagaatgcgctctaggatacgcggtactgctctgcgtactgactgccttatgattagggctagatgaattcctggctctaaaggctgaggaataggaagacttctacttccccgttatatacgagaaggaattggaagtcttagcactataatacctctgtctagagactgattaagaccttcccctcgcgctactactccttcg

SEQ ID NO: 90854 - DNA, 212 bp, Glycine max
caaatggcaaaccagggggggattaaaaaaaaagaggccttggaaagaaacaagtactggttgaaattttcgctcccagcctgaactcaatcagagtataggatacagtttaaataatagggacagtggggaaaataaaccaataacgatgtgaaaacaaaaatagactacattcaaagcgttttcttctccacctgacaaaaatggttccc

SEQ ID NO: 90855 - DNA, 433 bp, Glycine max
cgttgcgatgatgtacgagtcccctccgtatgccggcggaccgcgaaccccgataacgtacccgtaatatgctgccgtcgccctgcggaggaaaaccgccgaggtcctcatcctcagcgatggagcgttatagaggtgcaacgtacatcccatccttgaatcgacaaaccatcccgacgcgccaatacccgaccttaatgatcgaaaactcgagttaatttccctacttaagaataggctatcaatccttactctagaaatcctgacggagcccgcggataatcgacacgcgttgattgcagcaccaacaccttgagcacattcgactcttgagacttgaatcgtagatcctctaaatgaacacgattatcggatagctctgtcccaaaaactatccttatgtaagaccagaacgaatgccttgcactgcaac

SEQ ID NO: 90856 - DNA, 395 bp, Glycine max
gcgtatgcccgcgcgcgcgcgcgcgcgagggatacgcctcatgaacttgtatgtgcgggagcggagtgtaatatccgtctcagacttgtaagtcttgttatgattggtatgtgcagtattatacttcttatccgacttataattcgcggtggcggtggtatatgtattatgctaggtcttattatgtcaaggcggcgcggtcgtggcagaataagtctacgttgtgcgtggtgtggcggcttgtgacgacgcggcgaacgtatgataattattatatggtgttgaagtattaggagtcgtggtcgacggtgtagcaggtgcggaatacgtattggtatgcgcggaagacgctgtagttaacggcgaaagcggcgtagagtgtggcgtcggggcgg

SEQ ID NO: 90857 - DNA, 122 bp, Glycine max
tccgttggtttcgggatgagacgctgtactcatatgaacgttggtccctagggctttctgtaggtcttgctaaaagatagccgaaaactttggatctcgatcgattacaatatgggctggta

SEQ ID NO: 90858 - DNA, 447 bp, Glycine max
  unsure (1)..(447): unsure at all n locations
cgttaaccgttgcgtntctccanttcagccctaggaccactttcacgacaatatagaccactgataacgacccagccgaaacagcatgagcgccctgtacttaaaggggctccatcccttactgatannttacaccantaagactaaaattcgcgagactaccacacaggcctaagcgaagctccgcaaacatcgactccccccccccccaggataacccgaaccaggctacttactcgattcgaattccgccgtccgtactataggggcagtagcctattactcttccacattcgatcacaatatggagagcatattattatccagacacggatgacagtcctactacaaaagctcaggaatgttgatgccaagcggaagaccctgctgatgctgggcgccgacatacaactgaatactttacttttaggccccgctactaattgc

SEQ ID NO: 90859 - DNA, 402 bp, Glycine max
  unsure (1)..(402): unsure at all n locations
cgttgcgtntgccgccctcgcgcgacgctcgctattacccccggacgccatccggcttattgaggattaaggctagggaacaaagaaagggccccccccgcccgcaacccccgcaaatcccgaccccccaacggaacttgaagcctttcaccacgataactcatgcctaatggcgcctgcggatcaacgggcataggcataagcttttgatcccctcggatgaggcgaaattccttacccccttatagaaagaattcaccttaattccgcaatcccgaaggccctattctcaaggccnatttatattaacctttttccaaaatctatctcgggccctattacctgccggacctaatattattatgaaaatatctcgtactcaacgagactttatcaactttt

SEQ ID NO: 90860 - DNA, 462 bp, Glycine max
ggttcggttaaccaaccgggtttcgtagtatgcgagcatcgttgttggtgggccccccccccccccctaataacaaaacatttatcacacaaaccaaacattttacttcaagcttcaataaaagaggtgaagaccgcacaaaagaacccaccccaaaccagcacccaacgtattcgcccgatccgctacgaaacagaccaagaaccctacgactagcgaattcaggagccgaacacaacgaacccacagatattaccgagctccgaataactacaaagcagacacaaggcaaagaccacacgactcatccagaacctaaaccacactacggtcggacgcacgggcccaccaactagttaccgaagcgcaatcaataaagcgaatagaacgcccatatgaacaataacctctcacaatcgcgcgcctcgcacacaaaaaataaccccaacgccgagcgctacc

SEQ ID NO: 90861 - DNA, 230 bp, Glycine max
  unsure (1)..(230): unsure at all n locations
ccgttgcganttcccgaccccgccgccgccgaggggagctcagctgtgaaacggatccgcggggccagggcgcgggcgttcggctacgccccgggtggacccgggtgtcccgccccagggatacccctaacagcatggtccttacgctggacccccccgaacccccccgtaggtcctgcgcgtggttatctaagtttaaactcgctgtcggtaatgttataataattcgt

SEQ ID NO: 90862 - DNA, 175 bp, Glycine max
atggcaaactgaagcaataaggggggttttttaaaaaaaaaggggggttataacacgcgggcaattcttcccactgggtcttaaaaaacagttagcaaattcaacatgtttctaaactttgaattaaatagttagcgggattgaattataataacaacaaaacactaagtataat

SEQ ID NO: 90863 - DNA, 446 bp, Glycine max
  unsure (1)..(446): unsure at all n locations
tgcgttaaccgttgcgtatgagtgtgctaatagtagtggtcagtactatgtgtcatataacgagtataaggagtgtcctgagtgtagtgaggatacgtggtatcgtcttacggagtgtcgtgtntaattccgcatatattacgtgatagtgttctgcgcggataaggccgtataattgttgctattagctgcagtggtcttaaattacgcttaatgccgcgtgttattcttattaggcggaggctactacttacggttagtacccgcctatagctaataacgatgcgcgttctaaacggcggttgttgtaaagttgccgtccgctgccgattcgtaattatccttcctaagctagtaatactctgatatacgctattgagaattctggttatacaccttattcttattcttacggtaatttattaggtattaccgaatattgttgt

SEQ ID NO: 90864 - DNA, 440 bp, Glycine max
ggctgattcaggttcggttaaccaaccgggtttcgtagtatgcgagcatcgttgttggtgggccccccccccccccccccccccccccccccgcggaaatacaaccctccaaacaccccagaagtacgaataggaccagataacccaacggagccccggccaaataaaaaaaataacccgcaaaccagacgcccctcccccctgcccccgggcgcccacctattctcaagagcaggaaagcaaagctaacaagaccacggacaaaactgggaaaggtaaaacccgagcccttggacgtccccctctggtccccccccccccgggccacgacacggaccctccaccacgtccaccacgggagaatcacggaataaaatcgccttgttgacggaatgccttaaaacagtcgttccgaattaaaacgctatcgaagtatcgat

SEQ ID NO: 90865 - DNA, 245 bp, Glycine max
ttctttttttttttttttttttttttctcaattaaaactgaatacctttggtgtgattacaaaaattaaacgtgggaaattacagaactcacctgttacgcaatcccaaaacttgagagcaaaagaaaactagaattaatataagaaaatttcatagacaaaatttttaattaaaaaggaaaaagaattcaccatcacctaagctatagcttaacaaccaattatcacaaaaatctgtcaatact

SEQ ID NO: 90866 - DNA, 346 bp, Glycine max
gttgcgtgtgcggacgatgcctacctactatggactgaatcgatgcgaggcctgctgcactagacctggaaaagcgcttcctgaccgcacgacactacggaaaccctataccttgcgcacttggccgctgatagcggtgcgttaaattgacaacttacacactttacgaatgctactccacaaatacaatctattactataccagaccccctagctttttctactacggccactactacaactcctcccctaataaagcccccgagggaaacgcgaatgccccaacctccagctaattccgagatttcctgatacaccagagtaattgacccaatttgatttcctg

SEQ ID NO: 90867 - DNA, 176 bp, Glycine max
gcgacaggtccttaaataatttactgctgcttggactcctgccaacccatccgcctgtaagccctcgccgcctatccccacgatatagtttatctgatttacgagcatgcgcccgaccgttcgatatcttggttgatcctagacgggggcctacgactaatgaccctgatccggaa

SEQ ID NO: 90868 - DNA, 247 bp, Glycine max
cgggtttcgtagtatgcgagcatcgttgttggtgggcccccccccccccccccccccccctgcccggcccggaacgaacatagaacactccgccaccccacccccgcggatgaatgcgacccaacaccgccaccatgtcctcaacagaatgccagaatggaaacatcagacataaggacccggaagtcggttgacccgtgcgagcgatagagcacctaagctgacacaccaacgatttttgagaccc

SEQ ID NO: 90869 - DNA, 380 bp, Glycine max
agcatcatgctccttttgaggttataaaggcgcttaacctgccgcgggaggcccaaccccttttataaaaatcacatgtttcatccagaccttattaacgaattatagagaataaactaccaacccgtgctgctaagagaactccataggttaaacctaatcaaccggcacttaccactctaagagatgaacttatgtcgcggataaatggtagtccaaacacgtaccctctacctagaccttaaagagacctaatggagagcaccatcccctttggtatcgaaaaaagatataactaggacctaggaatttaatttaagagcagaacaacagaaatgagcgccaattactcccaacaccggcctctccaccgcggcacg

SEQ ID NO: 90870 - DNA, 439 bp, Glycine max
cggcccgaatggctgcgtctccgcagctgattaccccagcttatcgggctgctcctcctaggcttgcctgactgtctactgcactaacaatgccttgatctaccgcaacaataccaacggcgcttccggctcctacgcctcgacctacgaccgatccgaatcctactcatgaattcgatataactgatctgattggaacacttatgcctatccggatataaagaattatataccctgccccgctaaactttttcgaaactgcccggtcaacactgcctcctcgggcggcttccgtttcacatcagacgattccaacgcctaacacgccttagtctcctccccgaagagctatttgcctgcgcacggctagatctcttccttaagctaccgagacagaagaactacatactttgccttatcctgcttacttttctccttc

SEQ ID NO: 90871 - DNA, 512 bp, Glycine max
ttcggttaaccaaccgggtttcgtagtatgcgagcatcgttgttggtgggccccccccccccccccccccccccccccccccccccccccccgagctcatcgccaataaaaccaatcttatcacccaaactaaaataacaccgagctggacgttgacttacgagacgatgccacagaaaaaacagaacctcggggggacctccgaactttgagagaagagatagactataaacgcataacgaactgagcgtcctcccagattggcaacactccaggcttaatctcgaaaaaacctggccgccaataatttacgcccggcacccacctaacccaccgcgacccgcgcgagaccacaccaggagcgaaaagtctcagagtgatcttgaaagacctcccaagacccgggacgatggactagccgagctgccaactattccggctactagacacttaataactgggggacttccaaatcaatgaatccggaggcgttctcgtaatgtaagctctga

SEQ ID NO: 90872 - DNA, 411 bp, Glycine max
cgttgcgtcccccccgggtcccgcgctgtaaaaaaaacggacatgttcccccgcgagcgcgatgatgcagcccaccggcgagccccccgcccgaccccgccactaggcgccgcggccgccaccacaaccacaacacaaacacaaagaccgcccgctccctcagccctacaactacggctatcctaaaaatccgtcttaagccctgaggcctccattcgacaccggcccgaaaaccagtgtgccgttgcctagacgtaccggccctgagccggaaaataaccttcctctgatcggcctccccgatagaggacgcccaatcccgctcgtagtccctatccgcacaacttgcttctaccgccgctcaactcggaacttacagatgaatttgatctcgaacggagcaagcaaggc

SEQ ID NO: 90873 - DNA, 376 bp, Glycine max
ttcggttaaccaaccgggtttcgtagtatgcgagcatcgttgttggtgggccccccccccccccccccccccccccccccccccccccttgggagccaaaaataggtgccacgcctaagacgtatcccgataagggcgaaaatcgaacgcaaacgaggccatattgacacgattcttatggaaataaccgggagcaagatcactaactgtactaaccaatcggcagtacactccgccccaacctcagagatacccaagacaacgccggcaattcctctggctcgacccatgcctggacagatggggcaattctcctacaacaaaccactatgcacgcctgagatgagacgatgacggactgcgaggacttccgcga

SEQ ID NO: 90874 - DNA, 104 bp, Glycine max
ccgttgcgtatcactcgcacttgctactccttctgcttattctaatactggacctccagaccctatttcacctgcacggccagtggaatattagtacagatctc

SEQ ID NO: 90875 - DNA, 414 bp, Glycine max
  unsure (1)..(414): unsure at all n locations
tccggtgagctgtgcaattggctgttactgtatacgagtgtatctnttaagcggcctgttagtggttttatgtggattattgatcttctgggtttatgcttaggcgtggtagtactcttattgttcttgttattattatacgtcatcctgttctaacctatggtggtatttatccccaaggttaaaaggtgtgtacggtgtacggatatgcggaggtgcctaaagtgatggcgtaagcttcgtgagttaacggattagtacggtaagaagtctagtgttccgtctactgcttgtgtgtaaggtacgaccggtgtgagttacgttgggccgaatagtatgacgtctccctgtgagtacaaattaaggcgctctgcgccgaaantctgcccggtgtccctgtccgataaagacaat

SEQ ID NO: 90876 - DNA, 440 bp, Glycine max
  unsure (1)..(440): unsure at all n locations
ccgttgcgantgcccaaccctgccctgccgcccagcgggggaccctgccggaaagaaattaaaaacgagcgcgacgctataacggaaaggcggcggcaacccaatcttctttcgatgcagcacttgccgtcgcgctccagcatgttcttctccctctgcctacgcttcctgcccctgcgcgtgctcctgctgatatgatataattaacagctggcgtccaaacaaatagatctgattcataaagcagctcgaacactagcgatagacctgaaggttggcattctcttttcggcctcccacggcatcctggatcgattctacgaccacttcctcaagcatactggctctgctctttatatgcactatagggatcttacgaatacgacttcgaaccctgcctccgacgagcatgctttctagacccacgacctgctgccgtc

SEQ ID NO: 90877 - DNA, 425 bp, Glycine max
cgttgcgtatatataacaatggaccgagaattactacttccccctaatcactgcggaaacttaagggcaccctatgacgcagagaccatataatgataagaagcatagcttttaactataactattacatgcactttaacatggcagctcgcttatgagcctgacgatgctagaggagggacctggcagattaagacagcacgccggcgcacacaggctagctaataccagtgatgcaaaccacgataggccatcccgcttagctacacatcgcggagaaataatttccgctaatggggagatgctccttaaagcggccgatgacacacaaattggaactcccagatgcccttatcagcacctccgtaaccaaccagcttaataaccgggccctggtcttataacttgccaccctaatacctttg

SEQ ID NO: 90878 - DNA, 355 bp, Glycine max
  unsure (1)..(355): unsure at all n locations
cgttaccgttgcgtatttaacactcccacggcatattaccgtctaggccaccaacgaattaaatagaaaacggccctcccagacggctaaacttcacaaactatcactactaaggaagagaacgagcctattaacgcgccacttacacccacataacctaccacgaccacgtcgacgcccacccaacgccgacatcgctgcgaccaaattaacttgcgaannactcaaatttacaccactcacttcgccctccgtagaacccctaacttcgccggttccccagacgaatacccttaactacccactcataccagaaaaactaccctaatatacagaataaaccgcgctgaccact

SEQ ID NO: 90879 - DNA, 459 bp, Glycine max
agcgggatcgccgatcccgaggattaacccacgccgagctggttccgcgccttgaagcgttccgctacaggatcgacctgaattccccgacttatcgctaatactcattagttagagcctagcctcggctggcccgccgccacgaatatcctcagactatagcgtgcaagactcccttaacatatattcgctacactcctatcgactccgcgcagctgtagcgacggttctgcgccaatgaaaccttatattaagggccgatctatccgactaatagatgaaaaatacctaggaccgctagttaccgaaagaagaaatacatcataatcgctcccctgatttcccttacgagattaagcgtaaactgctaagacttaccttactgctgacgaaacaatagattcggcgcgatcacaccctgccaacacttctcttgacttgacgttatagacctccccc

SEQ ID NO: 90880 - DNA, 457 bp, Glycine max
ttcggttaaccaaccgggtttcgtagtatgcgagcatcgttgttggtgggcccccccccccccccattccaaccaaccaaccaacaccataacatcaacctcggacgacagattaaaaacgaccaccccgcagaaacttagacgtaaaagaaatagtggaacacctacttaaccccgatccgacaccatgacgcgccagaagctatcaacaagcactcggccgaagccccgacacgcaaaaagaactcgcggtactggactggagaggacaccaatgaaacacagctatattaggctcgccaccctactgatgacggaacggactccgatgacccgtatccggctctacggaaagggctgaaaagatagccgcagcacgccctcctccctaacggtcgataacttcgaacgccccctgctcgccgactaagcgagctaatttccggcgcggaaccct

SEQ ID NO: 90881 - DNA, 498 bp, Glycine max
  unsure (1)..(498): unsure at all n locations
tgcggcaatgattggcgcttttatgagaataataaaaataatacgaaatctagcccgggacgattcgaatatgttaactgaggacgagattgaaccattaaactgcctgagctctatacaaggaatagagganngatcttatttganntttggaacttttggtaaaagagcgctgaactgcctcttgtctgtgcagaatcgattggttgccccggggtaacacgtgggctgatgtatcggaagtcccctctgttggactgagcggaagcgggacaataattcggcctaaactattaagaatagattgaggaaacgcttgccctgaagctcccgctgctggcgaggataagcgaccggaaagagcaagatgatggccagggcctaacacactctaaatttttaaattaattaccgcatccttataaccgcgcaaccgcgcccgaatcgccgcgcctatcgactcgccacagaattcccctaacctgaccgcagaaagct

SEQ ID NO: 90882 - DNA, 478 bp, Glycine max
tggctgattcaggttcggttaaccaaccgggtttcgtagtatgcgagcatcgttgttggtgggcccccccccccccccccaaataaaaaaaaactaaaaactactataacaataaaatcaagaaatagcggcggctatcagctgcagaaccagcataggcaaaacttgcaagagcgcttctagcgcagggcgccctagcctgacacgcgcacgggcctccgccgatccgcaaacacatgcagaacactacgactccgcacccctgcggcacggggggaccggatgggctcagaaaaacggaactataaaaacaaactagatagaataaacaagagaaatagcaattccccaagcctgttcctggacgaaaacctcttagaaacacttgctactgatcgagaaggtgaaggagaagtgatcctgatagaggcgcaaaaggcccaagacctgatccctcataactgaaccgaaaaggcct

SEQ ID NO: 90883 - DNA, 380 bp, Glycine max
gtcaccgcgcgtgcgcccgcccgagctcgagatatggagacggaactttgccgggatggaagttgtggcgctgttgggatggggcaaagccggcgacgcagttggtgagtttgcttaccttgttggcggcgttgcgggcgctggtttgggatttgacgcggccggagcagttgcgtttggtggcgtagtaaggtttggcgggcgtaaaggtagacatgggcggcgaatgggcgggagtcgccgaagtggtggttgtcgagttttggtggggaaagtcggtagcttctgtagcgggagaaatcgtataggacggctaggaagtcgtcgttaagggcgagcgcgtggtagtctctgctgtaggagttggcgaccgcgacgaa

SEQ ID NO: 90884 - DNA, 286 bp, Glycine max
gttcggtaacaaccgggtttcgtgtatgcgagcatcgttgttggtgggcccccccccccccccctgagccaaaaagtagaataaacccaccgaacgagtatgttcaaaaacagaagacagaaacaaaaacaatttatatctagacgcagagaaaacggagagaaagccaaacgaaagtattagaacaacaacaacaacaacaactactactacaaaaactataaaatgcctaaggcccatagcctatgcccaaggccgcttcccttgcgtaatagacagccaacaa

SEQ ID NO: 90885 - DNA, 319 bp, Glycine max
  unsure (1)..(319): unsure at all n locations
ccgttgcgtntttggcgccgtctgcgtcgtggttgagtgtgctgcccgagtgtaagcagaaggagattccgttgtagtattcatttggtcttaatccaagttgtccggatgtccctaacccgagttgatattagtctgcttatctccctcgtcctcggtacaatacagcttttactttacggagtttaagttcccagatatgataaactggattcttgtatacgacatgttccaataatgctctttttaatgataattataacaacacgatagttattatattttccgcttgctattcttattctcctttaaagtctat

SEQ ID NO: 90886 - DNA, 393 bp, Glycine max
  unsure (1)..(393): unsure at all n locations
ccgttgcgtattttantccgaaccggtgccgaggaaagggctaaatgggccacaaggggaagggaaacgcggacgaagaagatgaatatccggacttcgtcctaacgggaagaactaaatgcgctataagggcaataataagggcgcaccggggaagagggtgaaggtcccccgtgtggccgccgcggtgagaaggagatggtgaggagtactaggggaggtagcggcggtcgccgtacatccgggagcagtgggcctattggtatgggagtgcgaatgggtatggaaatgggagtctttagtataatcaggtttggatttgttaggtttcttctccgttttaatatttgggaattttaatgctgtttctaattattattattactatattgt

SEQ ID NO: 90887 - DNA, 456 bp, Glycine max
ccgttgcgtaacccgagcggggaaagcggatatcgggaggtacaaccgcgcccgggacagcgcgcgctctccgccgctccgcgcgctcccgccgataccccgcgggcggcgatgtggctctaatccctacctgccgaccgccctaatctaaccctagaaccaatcaaaccttcctataatttccgaccggcgccgaccttaataacaaaagaaacacctgattcttaccccccgctacttgaagcaactaaaacgccggaggaaactcaacaaatgaagcatggaattaaccaaaaaacacctactaacgaggcggctattttaccaaatcctcttcaaactactactacccccgaacaacacactgctagacctaatttggatgcttaagcggccactacaacttatccccggtgactaatcctccacctcgcgtctacccgggcgagcgcggcg

SEQ ID NO: 90888 - DNA, 360 bp, Glycine max
tggctgattcaggttcggttaaccaaccgggtttcgtagtatgcgagcatcgttgttggtgggccccccccccccccccccccccccccccccccccccccccccccccggaccgacccatcgggaagaaaatcaccaccgaccctaagggacgccctacgccgggacagaggggaaggagacccggggcccgcgcaccacccgaacaaagaaaaccaggggagaaactacacaatccgaaccacctaagaagccgaccagaacgccccgaaagccgccccggtttgacgaacgccgccgcctcgatggctatgcccctgaagcggaggctggccgaccttctgatgatgactaaggact

SEQ ID NO: 90889 - DNA, 493 bp, Glycine max
ccgttgcgtatgacagacaaacagagactccctgccaccccaaaaaacaacaacaacccatcggaagggctcacaatatacatgcgaaactacctttcactcgccgaacagtaaatgcggaacttgccgccagcagccggcgcctgcctccgcgtcgttctgaagcagatgccgcttttgctaagcactctgatagccccagcgactgaggctgggaaagcctcctggcacatctaataaattatcttggaaatggaccgataaataaggagtgactttgtgccggccagcggtacctgacccggactagctgccctcaaagttcctctactgacgcacagctccttactacagaatgaagccgaccttttatgaaagatgatgatgcaagaaggaacgatgcatatttccgaagtctaccaactacaccaattggatctcttataaataactggggatatcatctcgactctgctacaccgcctgccctcga

SEQ ID NO: 90890 - DNA, 357 bp, Glycine max
  unsure (1)..(357): unsure at all n locations
ccgttgcgantacgccgggaaaataacagaaacgcgccctaatccccgtcatccgcgctaacgacttatacttaagtgtcgccgtaacccggcgagagccagacttacgtcgtgggtataaatatatgtatacctttgctttagacgggctaatccgggaattgcgattcattacctcccctcttagaatactcctttagcacccgaatgccctgcggccngaattttcgggcgataagacaggagcatccgcgcaccctccaatggatcctgcgtaaaacttccgcgggggnccttgtatactactagaaatactttgaccagactcccagtgccttataaaacccaagccgcgtg

SEQ ID NO: 90891 - DNA, 433 bp, Glycine max
ctgattcaggttcggttaaccaaccgggtttcgtagtatgcgagcatcgttgttggtgggcccccccccccccccccccccccctgggtcaaaacgcagaaccccgaggacaagaccatgaccccccccccgccgctcagacgtaacggatacggaccgaaaaaccggcagacaattacccccgatgacatgaccttttatattagatgctgataaaaagcatggacgagagattctatccgaccctgggagacgccgaaacggccattaattcgaactactgatgatccaataaatctaacgacgccgcaaatctccgcgcgacaaataattaactcgcaatatgccggccttgctcaatcgcccgatattttcgacacgcaatcaaggggctgaatatactcactatacgtggatgctaactacgcagact

SEQ ID NO: 90892 - DNA, 305 bp, Glycine max
ctaataaattaaagcctttagccttcgcgaaagcgcgatccggctctcgctacgaacgcaacccctggattccggctagctaaatctttagccccaattacttttacgctgcctcgaagatttacttatccgtaacctcgcgcgataactactcgtaatgcggaggcggaacgaatggcagatagaaggatccaagcccttgatagacatactcaacgaaatcctccttaaatttaaacttattttcatccgaaccttctgaagagaaacttagcatcgatcccccctgtcctaattcaaccgat

SEQ ID NO: 90893 - DNA, 469 bp, Glycine max
ccgttgcgtatgccttccccgccgtggcctgccctccccccgctcggacccttgcgcggcgcccgcccggccctcccccctttttcctaaatgcgaatcccctattacctaattatctccgatgcagctttccctctccgacccgacctattctccgccttgggccgggttacggatgccgacgcttccacctccttcacaaccgccatcccccatcgcaattaatactcgctatatataatttcggaagaaccaacgggtaacatcatattcataatacttaaaacagactggcacttaccgataaatatttcgtgataataaaataccgacctgacttgccacctaactacatttaaacacgatattaataacgccgaaaacgagatccaaataatcctaccaaaatacgaaagcgcgacgtttgaacatcctaaactgcacggaacgagaaacgatgaaatccccg

SEQ ID NO: 90894 - DNA, 472 bp, Glycine max
ccgttgcgattgttctttatcttttaatttatttccctcgacccgcgaatgaccgaagggccggccccgcggcctggcgctcggctagggtccgccccgccgcggactgaccgggataaatcctcatatacttaatagaatagataaatcgacactatccgatgctgttggccctcctaattttttaccgaataacggctctactactgcctgatgacactggcctattatcccttctgaatctacggccgtagttcgagcaggctgaatgactatcccgacgctgatctgaccgcgtaacttctcgatataatgcgggatctcggcactctccttgaaggcaccatgcctaattacggcagcatcgattaacctccctattcatcatatgattatataatgcctatttgaggggacgaataaactgctgcacccccgacgagggctggcccttatacccctatcctgatga

SEQ ID NO: 90895 - DNA, 404 bp, Glycine max
  unsure (1)..(404): unsure at all n locations
ccgttgcgtnttgagaacaccctacctctccactcagtccgaaatatgatgccgngaagactctatttctgactggtcttattgctctacttggctggtctacacctaaatcaggcctgaatgcgctagattatcgatccctttaaattagattctgaagaactcgatactactaatactaccctgatacttacttgcgcccatacgatcgcatgtgctagtttgactagactactttacccttcggacctgccggcagataacgctaaattcgggctacttaaatatccgtcgattatgccaatacctatgcgaatgatttccccaatcgaataacctaatactccatttattaaacaccaattaatgttatatgctttaaaccaggattcagagaagacgtt

SEQ ID NO: 90896 - DNA, 361 bp, Glycine max
  unsure (1)..(361): unsure at all n locations
cgttgcgtntttctacatagaactcgtctcctgctacgaccggaccttgggaccttaaaccgtctcctctattaactttaggccctattatgccacttaccactgaacgcgaatattctgtcggacaaacgaacacaattctgaatactctctaacccgagagggacaacttatccaccttagcgcatttcctctcgctctgaccccatggattaaccaggagaccttaggggctaaattattattctattccgccgtcactcttgccacctttgcctatcgaaagactcatactcataccccaccctcctcccccccctgcaaattcccctcacccccctttcatctctcattagcgact

SEQ ID NO: 90897 - DNA, 448 bp, Glycine max
  unsure (1)..(448): unsure at all n locations
gactcctgtccactctgcctctccctacgccagccgagaccccggctgtgccctctgaacagatcgatgaggctaaatctggacctctagagataccggcttgccgatcttgagcgcaggccggaatgagcactgctttcactctagttcttacaatatcgactttattaagcctcagcagcacccctcctaacgatatttaaaggccggtattagggctcttccgctcttgcacaactttttaggcttgctgcgcatgccgtacttaccgacacactatgacttcggccccaacccctattgatgaaatagaatttttttcgccgggaangagctgaggcnngaacggacaganntgcttcganaattcccggantctccacacacccttaccgcggctgcttctcttttccccgacagcgatataacaaaagctaccagacaagct

SEQ ID NO: 90898 - DNA, 371 bp, Glycine max
tggctgacttccggttcggttaaccaaccgggtttcgtagtatgcgagcatcgttgttggtgggccccccccccccccccccccccccccccccccccccccccccccccccccccccccccccccccccccccccttttgaaagcattcctagacgcatcccaacaccaacactttaacaaaccaacaattcaaagacttaggggaaacccaaaactctcgccgacagacggccaaacggccccccccaagaaatcggaaagaaaacaattttgttgtccagcggacgccgcgccccggggcaaacgaaaccttgaacggatgtttaaatgtccctcaaaatcggaactggcgcgttttcccacaccggt

SEQ ID NO: 90899 - DNA, 413 bp, Glycine max
gacaaggtccgtccgtccgtccgtccggggagcctgccccgaccccccccgcgggccccgtgcaaggcgaaatatatccgatcacccacagaaacaaaatccccccgcccccccacccgcttccccgtccccttaacttgctttaccctgctcttatcctccttataatggtggtatagccgccgcgggacgtaagggaggcgagtgggccggtgagtggttatcccttaggcccctgggcctaaacagacatgctgctagtctcgatcgggtggtgcttataagatggttaatgtggatattgcttacattgtgtgccgcggttgaatttaactgtcaagtgttccgacatccgaaacgtaattcatcctattcctccggtaaccaccgccgtaatatcggaagtccttagc

SEQ ID NO: 90900 - DNA, 307 bp, Glycine max
tggggctaacactgtcgaatcttaaacctagctataatcggtactcacaccgccccttatcctctgccccttaagcaaccagcttagttaatggatcatactgacgcgaaggccctttaaactatatgccatcctaactttgcgtaggcccagctatcgactgagcgtagagactattaaccgtacatcccttgatacggaattgcataaaataaccactcctatatctaacctcacctgactacctaatcctgctgcagcctctctgttgaccgaagctgaaatataggcgtgactttagaatcct

SEQ ID NO: 90901 - DNA, 462 bp, Glycine max
aaaggaagagaggagagcgcctgaacgaacgaatcttgttaaggccggcggcgtaatgggtggtcgggcgcggctaattagtatgcttagacgtctacgggtagtacggtgaaggcgtagccggcgtatactcttgttgggccgccgtatgggcacgaggcgacgacgtctgattagttataggggaagattaggacgaaatccgggtactttccgtaccagtaagcgcagaaggtgaagtagacgaagattacgcctttcgggaattggcggctgacgcgtcccaattaccgctgcctcgtgctgccctttcagacttctcgcaataataatcagacgcagaggacgtagtagtagctgccgtcctgcaaatacggccgcttaaattagacgaactgagcctatgatgagaccaataacgcggcactcggacggagaggacccccgccgaagagggcccac

SEQ ID NO: 90902 - DNA, 513 bp, Glycine max
  unsure (1)..(513): unsure at all n locations
atgcgttaaccgttgcgtatgaatgacttacatgcgtctccgtctatacttactcccccgaacgaagaagaaacgaaagaccagaatgctaacctatatatgtgagatatgaacacaacgatgcgcttactttccccgatatagatccctgataaacttaaatatccgaccctgactgcaccgatgaagcagatgcctaagcttgctactgaatatatgttatcttaagcccgaactactaccgaataactcgggaaaccaaccgaaaaaacaactcaagcgatcccttagattaaaacttaatggaaccctagcctaacttaatgaactgccgtttctntaaacaacttcgcggccggaatctaaatgagctgcaactacttaggaccctcacgcagattgaactgacgaacggatagctaagactcctgcttctccggcacctgcggacgacgcgcaacctcggaggccgacaggcgggagagatggaatcaagctgacctgacggaccct

SEQ ID NO: 90903 - DNA, 187 bp, Glycine max
ccgtggtggtatacgatatacgggtggaataatagggtgtcgcttgcgttaaggccgtagaggtgttattatttgttgggtctggcagtagtggtggtgtgtttatcccgtgtctgggcaattgtaatagaaagccgggcgcgggccgttaaaaccccaataagtgtatgggcatggaaatgatgag

SEQ ID NO: 90904 - DNA, 489 bp, Glycine max
ggctgattcaggttcggttaaccaaccgggtttcgtagtatgcgagcatcgttgttggtgggccccccccccccccccccccccccaaccaaactagcccctgacagcccatccaaccccccaggactaaaccgaccccgacgactaatactttatgtaacctataactcttgagctctggaggatcgtctcatccagacatgggagtgaggaccttagtccttatcgaggcctaatttatattcaagaatatggaggctcgaacgaaacgaagtggaagaagaagtaggaccagcaggaatcagtgccgagggagatgccccgcccggccggggaccgtcacccaacctaaaactcacacgagaacgaaaacaaccgaaagcccggtctccaacccgacctaaggaaaccacttgctgaaggaaaaaagaccagaggtcatcaaaacacgaacgaaaagtaaataaaaaggttactatgtgccgtcta

SEQ ID NO: 90905 - DNA, 419 bp, Glycine max
  unsure (1)..(419): unsure at all n locations
ccgttgcgtntttgctgatattaccctacccacgatgccgtcgaatattaatacttaataaaagaaaacaataaattaagaagcaataatagcacaagaaaagatttgccctaaatgacgcttcgatcgatacgcccgcttaaactggcgaaaataggccgcggcaactgagaaagccttctaaaggtactctgggaactaattaataccctcacgacttccgaccctgatgactgactgagcgacctgctcaccgcaactttctcgcttgaaggtcctttccctgattgaactgaataaccccgatacgctctagaatctccactaatgataagcaaatgtgtaatatatataagatgacggcaccaaggatatttaaaaagagagggcccacggctcataaaccagctactcaggct

SEQ ID NO: 90906 - DNA, 204 bp, Glycine max
gggggaattaaccccccagcacttattggatttttaacatgaaaaaaaacaatatttttcctaatgaactcagggtttgggctaaaaaaccccatttttcttggggaaacccatcaaaattctatttctttttcttttctataaaactatgatgcttttaacttaactagacaggttacacagggccccctccacatgaggctt

SEQ ID NO: 90907 - DNA, 476 bp, Glycine max
ccgttgcgatttcccccaaaatttaattagacttaagagataacacttagaaccgccggcctagcttcagcggaggaaagcctcctaagacttctataaaacggcctcacgatggaaattgacaccgaagcgactcttttctaagcacgctgaaatatgctaaccgaccttgagcagaatgcattgagagtgttgctagcaagctgattgcagcagaagagtgttcccgtgtacttcaggcaggaacatgagaaacttcttgaaaagacttatcctctccaaagccgaggctgacttaaactatttagatatatgaagactatgacctccggggctattttccttccgacgaatctaatacttgatggataagatgattatgataagcctgcttttataactgagcctatatacactactgattctgaccccgcgaatccgctcgaagaatcaagcgcttccgcttaccttgctga

SEQ ID NO: 90908 - DNA, 463 bp, Glycine max
  unsure (1)..(463): unsure at all n locations
ccgttgcgtnttcctccagtattagcgaaacactcagagcgatgaaactccgctgaggtctacgcaaatggcatgaagcctgcagctaactggaagctctacgccaatacctgatagcccttcgcgtgcataagcagacgctatagctacccgactagctatcactcttccagcgttcttcaggtatgcggatatccagccgccaacctgcgataacacagctggtggacctacacccttcgctccttcctgacggccttctaaacgacaagaatagaaggggcacccgcttttaaataccactccgacgatgcgattgctaccagttatgcgacattgcgaggctactagagcatggccttacccgcagtaatctacaactgcgtcatacactctatagatgccggagaacacggaattgaagaaccctgctgcatacccggaatcactcgcggcttctgct

SEQ ID NO: 90909 - DNA, 392 bp, Glycine max
ttcggttaaccaaccgggtttcgtagtatgcgagcatcgttgttggtgggcccccccccccccccccccccccccccccccccccccccccccccccccaaacttaatagaaggcgaccaaacccgaaacaacccccaggaaaataacgcgatcacacggaacactccaaacagccgctcatatatgcaagaagcggcgttcatctcctcaacggatcgaaaaatcacccgagcactgagacactacatcaaaccggaaacgcgaacaaacatttttacgattccctaacaagagataccgcgcggatactatccggcctacacgccgccgatctaaatacttcctgcgaaaacgaaaagctaaattcgcaagtgaatgattccggcgacca

SEQ ID NO: 90910 - DNA, 449 bp, Glycine max
taagaggtagcgatcgcgcgaggagtcgaggaagaaaagaaaacggaacttgtggtcgcccgtgaacgaagttgtgcccggggatgtggatatcgagcggcggccggtcgaggttggtaccgtggtggtcgcagatgtattcggaaaagatggtgacgtaggagtgggcgggcgcggggcggtccgcgaaaaagggcccgacgacgtcgtagttcggggaaatgcggtggtggttgaagggcttcgcgtgcgggcgggaccgagcagccgaaccccggtcgtagaaccatccgcagtcaacccctacacctccactaacaccaccactctggaacatatgctctgagcgccattcggaccacggcccaccctcgccccaagaacaacatacaaacactcacaacatcccatttagaccgcataactctccctccacaaccgcaccatat

SEQ ID NO: 90911 - DNA, 424 bp, Glycine max
  unsure (1)..(424): unsure at all n locations
cgttaaccgttgcgtatctgactcacgcactaactacttaaggaggagaaagtattcctactacgaagtccccgacatctatcccgccatgagcagcctctaagccttcttctttatctgcgttgtgctacaagcacatgatatactaccccggcgcctagccctccccgttccgattaaggcgctgccacgattcttaattatgctgcaagaanatacttaataagcggcatgacgctttagaggccctggcagtgcttacactgggacttataaaacttatactcatggctctactttcaggaganaatcagaattctaacagtgctgaggcgaccctcttaaaacaaaaaatacctattgacaatgcttagaaataaaagaatgccatcgaccacccctccgcagccacaactgggcccaa

SEQ ID NO: 90912 - DNA, 553 bp, Glycine max
agtgtcagtcaatgcgttaaccgttgcgtatttgcgaagccccgcatcaatatattccacccactcttctcgctccgcaccagaaacatccttcttcagctttgacgccaactgcagctacgcctacttatcaccccaactcctctcccgcagaggcttaccagggcgccgcgccccgctttctgatacccgtatccggctcatacgatataatttgctgcaacttattgccctgctgcaatgaaggagccggccggggcgataatgatgacttataactcttacacactctggaaatgaaaatggcgatagtgcttaccgggactccctgaaagactaattatgaaataactataccccctcgaactgataacaactgctcttgaagtgaacttattcttaaacaatattgcgggacttataatattggtacccttgaagcaatcctccggagagaacttttaacccgactacacgaggcccctaaggcacctggcttggctgctgtcggctagcggcggctttcctactgaatctaaaaacccgcgtatct

SEQ ID NO: 90913 - DNA, 456 bp, Glycine max
acgccccttctagaactaatttacacctaattcatgttaccccttaccttgaacccgcggaaccgctttaagaatgatggggcgagcatcgtctcctcgaggccacttcaggtcggcggttaagcccctgcgttccgaagatgccacttcggacggtcttacgcgcttatctccttgctctcaccctgataaccagcaacctttaatggcacagccgattttataagctattcctatgaacctgagaaaaccccgaatgccctcttgcggggaggctaataacagcttaaaaataggatagccggcgactgaagacctccgaatggagaagaaggacactacatccgggcggtatatagacccaattaccccgactgacggagctcaaacgccgcagaaagcgccgcccgctcgtaaggaatgaaagtcttaagctggcgccgctgcgcgcgacct

SEQ ID NO: 90914 - DNA, 485 bp, Glycine max
ccgttgcgatgccaaaacgcggtacccgttcgcgcgctgtgctggttaagatgccgtcacagtactttgcggcggagagagatctgttgaggggctggcagtcttgagggtaatctccaataaaaaaattgcaagtacttccggaaatgctacacgcttcgactgttgtcgtcccctcactccgccgcgtgcttgcccgccggcccggaagagtataacgcgactagtactcacaagaaatccgcgatatggtatccctatcccggaggtcttccccgtggctaccgtaatattgcaacgcggaataccgcatcttgttacgggcgtaatattaggtgtacccggtggacatgcgtgtctcgtcttccggttaatttgccccgccgtgcccggtgtggttagcctctcgatccttaaaagaataatactggtccagttccagttccagttattaatataacaaccggaattcggggaatccgccg

SEQ ID NO: 90915 - DNA, 412 bp, Glycine max
  unsure (1)..(412): unsure at all n locations
ccgttgcganacagcccgacacaccangagttaatataaattatggagggcccctagcattattcgaacagatctttgaagaacattccagcagacataaggcagaaccccgcggaactcaaattattagactgcaacatgagtttactaaacacccttgggctcagcatgtgctactaatcccaataggacttattaatgaaccaaaatctgcaagaacaggaatcacttggcatgatgattaacctcaaggaataacccttacagctgaaagagcactcgaattcggaccgtctgattgacctcccttacgaagctgcaccccaggtcatttatctactccggccccttatttcacaatactatgttacccttaatataccctttaccagattgggccgagaatcagcca

SEQ ID NO: 90916 - DNA, 394 bp, Glycine max
aaagccggaagcaatccggccggagtgcttcatatcccggaagaggagaggatggagataaacaatccctcttaaaacaataaaagaagaccccagctcctccaggtccgcaggcaataataagaacgcgaaagcaacagagaagagaaaaatatccagccaataatgacatctcttaaccacctagccaataaaccctaaaaggagccctcgggacgggagccttagccggaggcgaggggcccccgcgaagtggactaaaacatacacgatgaacctacgaaattcgacccctccccctcttgcgctatattttatctaccgcaaagcaaaacacactttttgcttttaatatatcagatgcaaacgccgcaaatcacgccgttgatgcgat

SEQ ID NO: 90917 - DNA, 420 bp, Glycine max
ccgttgcgaatggcggtcgtgagggaccgagcggagaagaatgcgtcgggtaaagtagtcgttataacacgtaatgacctgcctactgctgaatacagtactagacttactactccaatatgccataatggatcttctccggcgcctaccggaattactaagaatttattagatgcgccgacacttgctgatgcaacttagacacctacacctcttatcacccaacgatcatattttcttacgccaaccgaggaaactattaaaataacagaggcgccgacctttgactcgcgaactttgactcttattgctctaataaaccaacgacttgcttatgcaactccatctcgccaaagatcgagtatattagcggaacttactaatgatctatctttttaatggataatctacttactgtac

SEQ ID NO: 90918 - DNA, 392 bp, Glycine max
ccggcgtcctctccgctccgctcccgtctctcagatgcgcccgctccgcgcgcccgccgcggaatgtaccgaccgaaccccgaaccgtaccgtacgtgaccgccgccgcagaccgcgtaccggccggcccgcgaagaagcaccacaccactgacgccgtcgcgggcgcgcgaggaaggaggcatttcccgcgcggtagtccattccccccccccgtcccgcgtggtttacccctttttgatagccaacgcggttgatgcacttggcggaagcctgatactatgggcgattcttatgatacggagttctaaaccgtgtagaagcccgtatgggcgtgaaacttgcccgataatgcttacaataccaaatactggaacatagaaatcaacgatg

SEQ ID NO: 90919 - DNA, 259 bp, Glycine max
tgcgttaccgttgcgaacgcgatggtccgttgcgttcctacgtcagatctcaaggcaatctggacccttaactaacccctcataccagaaaaagcttgccttaaatacagggaaaagcccgatgaccacttccgaattaccccgcgaaaacctaaacgaaagccgactaataccggactgaacaacagcatccagcaccctataccggccaaacctcaaacacacacacacacacacacacacacacacacacacacac

SEQ ID NO: 90920 - DNA, 472 bp, Glycine max
cttgggcccgggcgacttcccgcgctatgctaaaaagcctaggatggcgcccgcggaacggaagaagacccgcttagaaccaggaccttacccccgttcccttaacaaggccatctcctcaaccctcgaagaaccggccgaactatagacggggccccaacccgaaagctagcgacgcgaggcgaccatcggcctggaagaagcgggcccgtttcgataccggctacgcgtacaccggaatggctgtttatgctaacccttggaagaacaaggccatcttttgctctggcaaacgggccgccatacccggcatccgttggccctggttcaagaacgccagacgatgatactgcgcgggcggatgccccggcacttatggaggttgctggcacggatgaaataaacgtaaaatagcgttctaaggctgagctcctttcacgacgaccttctgcctctctcctttaccctcttc

SEQ ID NO: 90921 - DNA, 388 bp, Glycine max
gttcggttaccaccgggtttcgtgtatgcgagcatcgttgttggtgggccccccccccccccccggtagcaactcacacacaaaactcacccaaacccccgaactccctataaataactaacatgaacagaacaacgagcctgaaatttagggaaccctacagtgaacgatgcaaacgcttcatgccaagcagcgatgaggaaccctcccccagcaagccggaattaggacaatcggaccataccttcccgacccgcggctccactaacactacctaacctaccagacgccaagaagcacctatgataagaaaataacgcgacctcctaagatattcataattaactcgaagctgagtattttccttctcaaaagccgctacgcatag

SEQ ID NO: 90922 - DNA, 389 bp, Glycine max
  unsure (1)..(389): unsure at all n locations
cgttgcgtntaacccccacccccaagatgcgctcagctaataaaagttgtacctatatttatatccctantaacttctaataattattatccgcctatataaaagttgtagaagtaaaaggtccggtcgcgtgttatctagccgggcgggaagccgacgccgttatcctggagccgctgacacgatacataattctgcctcaattatttcttcatattcggcatgacactttactggcccagagagagttaattaaaaaccgcctagaaaatgaacttctactcctgatccaacgaccacgacgttcagacttaatacacctacgccacatggaatcctttaccctactgccacataccccgaacccgccttcgcgttaccccggggta

SEQ ID NO: 90923 - DNA, 166 bp, Glycine max
tgggcccccccccccccccaagattgaaaagaaacaaacactacttaagatatccccgagagaaccctttaactaaaccgtacatctataaaaactcatataaacttgacctcatgggacagaaatgccggaatcagctacaaattcttaaccgctctgccagccc

SEQ ID NO: 90924 - DNA, 526 bp, Glycine max
cgttaaccgttgcgtatcgaaagcgataggactaactcctttatataggatattagacgttacagatggatttagcagtcactgctcctactgaggaaagtgttgccgatactcgtggttctaaagatggtggtgcgcatggtggtgacggacttgaccggttcgacgttagggtttccagcgttatagacctgtcgtcaactgcaccagatggccggaaccctgatacaagcagattttctgccagatctagaactacaactccaatcacaactggctgggacaccagctgtacccctacttgcacgattactatcctccacttttatggtgacttgcaattatttgtagtgattagtacaacccggcgaagcagaccgaaaggaacttgaaaagcgccttctggtagtagaagacgaactatcccttcctttagaagaaagactgcttggcgaagtcagcctcgcgcaattaatcgacataattaaagactcagcgcgcctatcggagaatggcgatgatatat

SEQ ID NO: 90925 - DNA, 384 bp, Glycine max
  unsure (1)..(384): unsure at all n locations
ttaaccgttgcgtantttttcactaatcccagaccccataatgcagacagaattacggttctttcctctgctgcattaactcggacttacccagagattaatagacataaaatactcgcaatgaactttaataatgcggacggcctcacgctgatgcctactctaatcgaccacccgacttatactacgcaaattaaatgataacagattattcctagacttacacttaatactacgctttctactgaccagccggatccgaattaaaataatgctacaaatcctcctagggcggacccttataatactgaatcccggcaaattgctttaataacctttactgctaatattaagacggaagataatcgatttatcctttaaaat

SEQ ID NO: 90926 - DNA, 427 bp, Glycine max
  unsure (1)..(427): unsure at all n locations
tccacaagggcatgcgttaataagcaggacgcgcgtcggacctcgctgtcgcgagcgacggcgaagcgccggcgcgccccgccggaaagggtaacgcttaccgcggcgcgcgggtacccgaaccgcgagttcgccgaggtacgtggatacgcgcaatgaggtgcgcctccccgacgtaccaaacaagaaagaaaanaccttgcgaaccccaccccaagacggcaaggaaaaagaaagccccgagggtaccccaagaccgtatatcaaacccatcccagcctcctaccccccccccctccctcccctaccaatcccgctcccgcacccaaacgtacaaagttgtattcgtatgtccataaccgtaacccgttataaaaaaaatcagattcaccaccattttaacgtgtcttaatgtcctattatatct

SEQ ID NO: 90927 - DNA, 324 bp, Glycine max
ttcggttaaccaaccgggtttcgtagtatgcgagcatcgttgttggtgggcccccccccccccccccccccccccccccccccccccccccccccccccccccccccccccccccccccccccccccccccccccccctcccaataaaaaagagggatcgataagcaaccttcgagtttcgatggagaaatacacacaataagcagaactgggaaccattttttcgttttaaaaaacccaaatgtaaaaccccgcattggaaaaaatgaatcggataagaacctaagaagaccaacccggaaaaaaaagcattttaaaacccgg

SEQ ID NO: 90928 - DNA, 450 bp, Glycine max
  unsure (1)..(450): unsure at all n locations
tgcgttaccgttgcgatactgccgcttggccggaccttgcgcctaatcacattccgaaagcctcccttaatataaacatcataactttaacacagggcatacgctcagtaaaaaacagactacaaatacacagaaaatacagccaatacacggccctactgcccttactaagactataattacgcccccgcctagacctgactgccgccgaatttactcaaaccatgagaatcctaacgaacatccatcttcgtccagttctagatgcctaaatgcaggacctagtctcctgcctaaaaaagagccacaaatacctactatgacttcgtctctaatactgactaccctacagaagaaactttaatataaacctccgtagattaacgaggaaaagaggganttcaacctgatcattccacttcgcggctaatactcatgctactcccctca

SEQ ID NO: 90929 - DNA, 415 bp, Glycine max
gggattccgtactcgcggacttcggacattgctacgagaccgaggtggtaaaagcagagaaggggtaaatgcaaacaaaaacaaaacgaggccgtaacattaaaatgaaacgcgaaaccttcatgtgaagcctcgagcctattccctgccgtaccgccgtacgcgataccaaatctcagtaaataatattgccccgcaaagaaaatattaatgtcgaacttctttactaataatatattagacttgtatattgaatctttccctccggcagaataaaaggagcgccccatccctgccgccgaagacctgctcctgcgcgcagtccgccgtgcgcgcgcactgccgcgcccagacgcagcggttaaagtcccgggtgaagtgctgtcctcacatgggatacgataccgttaaaact

SEQ ID NO: 90930 - DNA, 460 bp, Glycine max
agaatatagaagtacatacattgatacatacataaagaaaactatgaataatgcgttgcttttggttcctcacagtaaggatgatggcttccttggttgtatattcattcattcacttccactacctctttttaggtacccccaccaacagtcttactctcagtaccacactgtgttctttaaaagcaggttcatgatatattatatatcccacaacaacatcgatctttaaccttttcttgttgctgccagagaaaacaggataaaaactacaagcaccagtagtcttacatggactactactacttagaaaatctttcagcataaaaatcatgaaaagttgaaaaccctaatttaaatttaaaatatactacttaaagtaggagatcataaatagtgaccggaaaagcgttgagaagagtgggaatttttcaggaatgatgacaatagctgaatggcg

SEQ ID NO: 90931 - DNA, 377 bp, Glycine max
  unsure (1)..(377): unsure at all n locations
ccgttgcgtntgcgagcgcgagcgagcgagcgcttcgagctcgccattaagggcataagaataagggctatagaaaaagaagcccttacgctcacaatggaaatttcccgaatcagcccgccctgcatgcctcgcggacttaccgaaccgaataacccacttatcgtctaagagctagacgaggaggaggaggtgaagaaggaggatgaagatgccatccttcatgcggaaccggggccgctgccggcggaggaggatgatggtgcagtataaggaaaatgtggtctagcttaagaggcccttggatcaggcgaataacgaggtagggggcgcgcgggcgcggattctgatgttctgagagtcggcctaacccgcga

SEQ ID NO: 90932 - DNA, 222 bp, Glycine max
atagttgtccagtttaccctacctttaagctgcttataatacggctaggtcgttacgatttcctactatacgaattttggactacccgccgaatttttccaatctttagacttctcctgtgacctctattggaggccacaccgggtaaaacttattcgaataagaaatcttttccgttgaaaatgtagtcttaatctccgtcttagaattctccccccggaa

SEQ ID NO: 90933 - DNA, 457 bp, Glycine max
cgttgcgtcttataacctctccttaataagcttctgagatcaagatctcgaggctaaaaccccttattatacggactcggaaactcgcctaataaagcgcgatcttaatgcaccctccggctacgaccccaaggcgataaaacaaacataccaaagcgcggatacctacccccgggaggagcaccgacccgaacagatccgcccctttcgaaggaaatcgcagagccgctaacgctacgaagagtatgaccaccaccccttgcccaggaattctaatcctgataaaagagaagagaggacacttcctaaatggctcaaatacctgctatactacctcttacactctcacacagcctctccgctgactccacagatattctaaattctactaccctgccttctgagcactatagtacagctaacctatcggactctgcatctccccatagccattctc

SEQ ID NO: 90934 - DNA, 350 bp, Glycine max
gccgagatcgcccactacaagctgactaaacaggacaccttttctgcctcctagaatcgcgcgacagataccatctagtacatatccagacctgactagcctacctataagactttcaaataaacctagatagataaacgaggcaaatatagatttaatgttattataccacttccagcaaaatacacaaccgaatcgccaaaatagaagcgttttaggatctaatccaaaacgaccctcgcctacccggggacacgctagaaagaataaagaacataacttaacttaaactggccgaattatactaaaaaggccaaatgagccaccacgataaagttcaccccacggga

SEQ ID NO: 90935 - DNA, 435 bp, Glycine max
cgttgcgtatgcacaaaaacgcactcccgcccctcccctaaccgaacagcgatctgccctacctctgacccctgacgataatgattgagctgctatcgagatcacttattggaaaatgcgaaaggatacaaaatattaaatgaactaccggaaccactacattaaatgctaaacaaaatgaccctactaccgaaaaagcttctccaaattcgcctcataccgcttctctaaaatacgggagtgactccggcccggttgacgtagacaagctaaaagtcatggatctagcgtaagcctatcaccggctcgacataggcagaatagacagacaagaacggctgagctgacaactaatcctcgaggaaaaccgtaatctgactggattatcttttacccccggaatctacgaacgacttaaccggaaccatctccact

SEQ ID NO: 90936 - DNA, 406 bp, Glycine max
  unsure (1)..(406): unsure at all n locations
agtgtcagtcaatgcgttaaccgttgcgtatgaaacgctacgaaaanttgcagataaatatgaacctagccgactcacttacttcccacttacggaccaagacgcttatagcacgggaagatgactgtacgagcctctattagaataccaggaaatcccagctgatatgaacggaaagcagccaccttccgaccctaccccaccttggcaaagcaccagcgcagaagacactggcgctagtgaggctacgcaatgtaagggtcggcatgcagccaagataccgcgcctcgagcggctgacactaagtctactttaaaggcaccttaacaaatacctgccgctaccttccacactcccacggaatattaaccgtctaggccccaccacacaggaaataaaatcagaa

SEQ ID NO: 90937 - DNA, 409 bp, Glycine max
gctgattcaggttcggttaaccaaccgggtttcgtagtatgcgagcatcgttgttggtgggccccccccccccccccccccccccccccccccccccccccccacgtaaaggaaaatcccccccgaccgccaccacaagaacaagaacaagaacacacatgatgcacaacgaagctacagagacgccctcccgaggcgcgatcggaactttaggcgcccataacaaaataacaacgaacagggcgcaatcgaaaccattaggcgcccataacaaaataacacgaaataaaaaggaaacaaccacccagaaacacaaggaactaacaaagtaacccgacaccacccagcatatgcacaaatcgccgcccgcccgcctataaaaccgcctaaggacctgtgctaaatgccc

SEQ ID NO: 90938 - DNA, 373 bp, Glycine max
cctcggatgccttctagcgcctaccctcgctataacgttaccacttgggcaggctgcagtaccttctttgcccgtcgtcctaggataccttagcctgaccggaacataacgagttatgccggctaccgctcctttaacgccgccatcgctgcccacgcctacgctattttaaacgatccaagagcacctggctgccgccccatgattccttctgtcgcatattatgcgtaccctatccgaaacgatgcccgatgtgccggctagcgcacatttcgtgcctccatagcaaaaacacctaactcttaagaaactacacatattaagccggagaccgctccttcatcctccgccgggccatttatgccgtgtccta

SEQ ID NO: 90939 - DNA, 479 bp, Glycine max
tttaatgaaatcatagaatccgaattccttatagaaatcatgctgtttactgccttcctttcggctggagcgactgaaaagctctcgaagaacgcctataaccacctgaagaatctaccgggagacacttctgaatcactcttacttgaggacgagacactttttaccgcgatagccgacttcatgatactatgagccctcctcgaagaccggaatctgggcaggcgcctactgctgatgcggcgcggccctctgatttacgagatctcacttcggccctatacacccctttgcctagaaaggcttgactgacgctttctcttccttcgccttcttagcattggacgcttgctcgaaaccctgaaaatgggccttgcctaattcgagctcgacgatcaggcgcggcaaaaataaaaactaatggacagaagacgccttatgctaccccccctcttcgatcatataggaatacgaaactg

SEQ ID NO: 90940 - DNA, 507 bp, Glycine max
  unsure (1)..(507): unsure at all n locations
tgcgttaaccgttgcgantccgacttccgacttaaaaggaataccgtggaatattccttggactccttgcttcttaagctttacgagtgggacccaggaatcttgtgatgtacccctaattagggatattaggagaggtaaactgactcatctcactgtaacgtgagatattactacacaccagctatttattatccttactatctttgtaatacagacaactaggttccgaatgcacttcagtcttcttaaacgtgaaattaatttcttaaacagatctcatttccggacgagatatatcacgagtaatttatgaggccggaaaatgtcgtatttaccggccttgccctagactctttggaggagggactaccgatccctgatctgatggcaacccttataaaactttacactacacgaataagtaccctgcctctccccatttgacttataatcatgcatacctgcaaacctctcctctcacctcaccctccctctcacgtttct

SEQ ID NO: 90941 - DNA, 347 bp, Glycine max
ttgttggtgggcccccccccccccccgacacagaacccccgagccgaccccccagggccacaaataactaaagaaagaccaacagcggaacaagagggtactgagaaagaaacagatcagagaagataacgcatgaacgcatgcagtcgcggactgggcaatagagaatgaaacgtacgcctacacgacacgggaccccgcggaaaccattgctgagctgaaagcttacgactttcttcttgggagactcgagatggaattaacgggcgtagtgccccttaattctgcgggcgtctacagttcgctctactaagggcagagctcacccggagggccggccctgtacc

SEQ ID NO: 90942 - DNA, 533 bp, Glycine max
ccgttgcgtatgacaagacgaacttagcgtaatagaacgagcgacgaactgattcttgaccacctatgaacgacccgctggctttggaccctgctcttatactcgccgttgatcccagaattttctttccccgagctacgaatgggccggctgttacgccacgaatatattaacttgatcttattacggacggcgcgggcacttggccgtggcctctacatactagcagggccactgctcctacttagcatatacacttatctgcacggatagactttccaattagcagtcgcggcctcagcactggagttactactgatccaataaatagcgataagcggaatgccttcttaattaatgctcctataatttcgagttctagcctaaatagaatggacttcttggcaatcctaagagcgccgaatacgctaccgagaccctgctgaccaccacacttagctgccgatgagcggactgatgctctaacccgttagaacagggccacttgttcccgacggcaaacgtcgaagcgc

SEQ ID NO: 90943 - DNA, 516 bp, Glycine max
cgttaaccgttgcgactgcgcgagcgagaaagagagagctaagcaaaaaagacgaaaatatagacttgctatgaaaggccgacgactacgaatggctacttgtcggaaatattggccaccttgtatacgaccatgataccctataataaattcccgcagctctaaattccctaaagcctccagctcttaggtcggcccctgctataatgagcactgctaccctcgctggaatggcccgcccatcttcccttcttaccagaccacgcgcttgggctcctcctggactacgctttatttgaataactcctccagaagcttggtaaataccacgttatggagaaagggatgcgaacgctatggcttaagcacggtcttctagccctggacctagaccttaattaactccacggacttaatctactgatcctaaatctgcaagaattaaacctgacctcttcgggctatttgggctgcaagcttgaaatgcgggaagagcgccttacgcactataaacga

SEQ ID NO: 90944 - DNA, 296 bp, Glycine max
  unsure (1)..(296): unsure at all n locations
ccgttgcgtattcctangaaccggcgcttactactggagcgaagggcgcctcccgcccgatgccccgttctgcgctaaatatgcgaatataggtactcttactgctactgcttcgagatgctctaagctttcttttcttcccggccagccggccccgtagagctagcttactttcgtctattcgcagttcttaagctgcttttattagtgtcagtgtaatttatctgtgtctttacgtccatttgctacttcaaagtggtcgtctcggatgccgactcgtccttgttcttatggtc

SEQ ID NO: 90945 - DNA, 353 bp, Glycine max
aggttcggttaaccacccgggtttcgtagtatgcgagcatcgttgttggtgggccccccccccccccccccgacaaaaccccaaccgcagcaccacacttggcgaagggtcgaaggccttgacgaactccatccattccattccagtcaagccaaccttatagagtgaggggatcgaaatataccatataccatataggatatataaatatacaccctaacccctaatcaagaagagtgatctttagggagcgtggacaagaaggacctaggctccggccgggccggggggcagcccggaccagcgaactgcaaatccacgaccaccaccggaagcggagactgccgcgctct

SEQ ID NO: 90946 - DNA, 193 bp, Glycine max
ttcctgcggtggtacgggaccgaatattccaggttgaggaatcgcctgcggtagaagagtggtacgcgtattgcgaatagcactggttgtctagggggacctgtggtggcgaggactgttgttccggtcgatgtccagactcagcaccgacacctgcactacagcccatattcagggtctcttggagaagggt

SEQ ID NO: 90947 - DNA, 424 bp, Glycine max
aggtaatgccgtatagccagacgccgtgtgcgccgaactataaggaaaatgggttgggaacatggtaagtgaagcttttggcgccggaaggctacccgagcgggtcgcagtagcggttaacggcggtgaagttagattcccaacgccccccccccaagccccgaggccaagagcaacaactacaatctgattcaggagaggggcaccaaaaatatatcgaccaaacaccatcaataggcaaataaacactaccccctctaaaccatctccccacccaccatccccccagtcacaaaacgaacttaaaaaaatatacaaccactacgcgccctcggccccagccccctgcccccgatcccccgcgcggaatacttatcagaacagagaaccgtatactgaggttggctcaaatggtcgtaccacc

SEQ ID NO: 90948 - DNA, 308 bp, Glycine max
ttttttttttttttttttttttttttagaaaaaacgatgcaaaacatcgaagttcatttcattaaaatactctgccatagaagaaccttaaattaatacatagtataacatggttcgagatccccttggacggctcttaacagcacgggaaaaacccaaaagattctgtccccatcttactgctctaactcttactaagaacttaacaactccctcaaaaacaaatgaaaatataaaacgcataaagtaacattcactcgctcagaaattggtattgcaaattcctgagatctcacaaatcattaatt

SEQ ID NO: 90949 - DNA, 497 bp, Glycine max
tgcgttaccgttgcgtattaaccgtctagggtcccgatctcagcgtcacacttgccttgagcccgaagagctgataatattgccggaaatggcactaaaggataattgcctatccctaatggacttgaaatagcgaaagcgcaaaaagcttccgctaaggccctcgcagaagccgctacaatatcaagctgctcaagcggcgctgctgctggtggtggtactctcgctctcgctaaaatccccgcagcagccgctactagcgttaatatatcactcctcgagagaaccgaggacggcgctctgcctatccttacaggcgttgccggaaacggtcctataatttcaacttccgaagctattaatgcagcttttgcaacaacccttcttgctaagcctgatttgcctatacaggataccctatcgctcctaaggctggaggaggaggacgctcctgctgttactgctgctttacctatggaaacccctttgcctacccc

SEQ ID NO: 90950 - DNA, 496 bp, Glycine max
  unsure (1)..(496): unsure at all n locations
tgcgttaccgttgcgtntgactaccgagccggataaggccgccgcggaggaggaggcggcggtccggccggcgacagggcgcgcgcgccttggagccgactcctgatccgatttgtgcggattgcggaggaacctgcgcgtgtggtgagtggagtcgacgggcgacgttgtggaggtcggaactggtaagtgtcgccgcgccgggcgtaatttccaggtgtaaactggagtgtagtcgtcccatgaacccggtcccgggtccctgccctaagcggagtagtcgtccctttttgatgtccccgcgtatttttccctgtagtgtgtgttgttataagttcaatgataactaaagtttgtatttgctgctcgtccgtgttaaattataattagtaattctctacaaactagtggtgtggtaaatatccctagaactctaggtgccgctatttaatccctttctataataataataacaataatttacgtcgagggtcgt

SEQ ID NO: 90951 - DNA, 290 bp, Glycine max
ttcggttaaccaccgggtttcgtagtctgcgagcatcgttgttggtgggcccccccccccccccccccccccccccccccccccccatgtacgaaacacacccacgccagcccccacaccccgtacaagcaaaccccacaccccgacgcccgataaacagaccctcgaactaaccagacaccgaaagagtaaaccaagcacccagggaaaaaccaaatcaaaattcagaatagaaacccaataaaattcaactaacattgccccgcactaaccctcctcagtgtcgggcc

SEQ ID NO: 90952 - DNA, 125 bp, Glycine max
gtcagtcaatgcgttaaccgttgcgtattgaccccacttctcatccgattacttaggattatgaagagcatgtagctcctggtatcagacttcttacttccgcgccattaactcccctgccgtca

SEQ ID NO: 90953 - DNA, 482 bp, Glycine max
  unsure (1)..(482): unsure at all n locations
cgttgcgantcgttgttgaaactgggtcgacgaattcttttataacttgttttgaaccctgtaagtgtattcgttaccgtccctattataataagttgtctaatgccggtatccagatattttagaagaccaagttatagcggccctagtataatcgtattaccggttacggtgatattactaccatttgccacctggaatggtgttgtagtgctaacgccgcgatatgcccgtggaggttcttccactgctgcactgatantttccagcgatcttaacccttagccgagttacgagatgtaagatttatacattcaggtatatgcctgcaaggtatcctactattgcgccttaccgacttgctgctgctttgcgagatcttaggacgggacaactataagaagctaaccgcttagacgcgactatctgccacctcctggccactaagaacgggcgaggattccttaccgaagccgcttcgc

SEQ ID NO: 90954 - DNA, 318 bp, Glycine max
cgttgcgtataaaccaacacggaagagcgcgaatgcccggagcccgaaagcgctgggtgcgaaccctgcccacgcccggtatacccacacagagccccacctaaagctcctttaccgaatcgctaaagaaaacgccaataatccctgttgatgctactggacgacgccccatcacttaccgtgaagatgcgccgatcccgtaaccaggccagactcgacgcccagggaggtccggacgtgccgccttacggcctaaacactagagattaaagcgaggcaaccgagggccgcggagccacccctaccgctagagcgccc

SEQ ID NO: 90955 - DNA, 404 bp, Glycine max
ccgttgcgattaaaggcacaccggtgtgagttaggtcggcccgaagatacctccccgtgaagtaatttagccgttctcgccgaatctgcggtgtcggtcgtaaacatcgcagtaacgatcagttgtacgtaaggtcggtccattgcttctactaggaagtctttaaatgaagagccgtatcagcctccgcagtcctacccctattggcggacttgctattccatttgagataagtgtccttgttattctgattaaccgagtcgcccgcctgtatctccttttatccagggcacttagactaagagggcttagaggccggcgggttttataccatgacggggccacccctcgcccccgacgcgcgggcgggaaaaatatattaaagaaaaagacacaccaaactc

SEQ ID NO: 90956 - DNA, 480 bp, Glycine max
ggctgattcaggttcggttaaccaaccgggtttcgtagtatgcgagcatcgttgttggtgggccccccccccccccccccttactaacgcgcgggactcacagccccccggcaagataaagagaagaatcaccgaggaaggaaatcttggaaccgatctcagagagaaccaccagaaattgacccaaaccaaaggaagcagggcccgcatgccacgagagcaggagtcacgcaaccaccgcggacgggcgcagtcagaaaaacgaagtcagtcaccgcgccgtcgcgccaaccgcaaccgacctgacaagggcaaatggggaaaacactagaaagtataaatatacaacagaataagaggaactaaaacagacttttcaataccaatacaaccaaaacaactatcccactccccgccccaccgagaaaaccgataacggacactatagacccaacacactccccctccccggcgcgcccc

SEQ ID NO: 90957 - DNA, 473 bp, Glycine max
ctaaccagaaacggcacgaccctgaacgacccggcactcgacgcaaaggccgccccaagaaaagaaaaaggactcctaataatgaacgctcgcctcggccgcgagcatcaactgcaacccgacccactcaccgtagaaggaggccatgggaaccacgaggatgccgatggggcgcgaaaggtggggaaggctgcggcaggacaggatgctgttgcggcgaagaaggaccttccgggcgacctggagatcgaggaatctaccggagcggctaaatcagcggatgagcctagacctccttaacggctattaattgaaatcgaccgaagacggcaacggtcgcgactaaaaggagggaacctacgaaggaagcgaactgagatgcggcgagcagcaaacgattcttgaccaggaccgcctgaggctactagatctggccgcgataagcgaaatgatttcccgcgaagcgcgcccgc

SEQ ID NO: 90958 - DNA, 412 bp, Glycine max
  unsure (1)..(412): unsure at all n locations
ccgttgcgantacgcgcgcgcgcgctctcgtgcccgaggtaataacaagcctagcccgggtaagcggaggctataaaaatacagggccaaccgtgattgtgtcgcctctccttagaagaaggagaatactaccaagccgtaataaaggtatcctgtagcgttggcgggcttgaagtagcgatgagcgaatttaatctgctggaatatcttgccgcgctaaagctgccgctcctaccctaatgccaacgcccgccgcctgaccaagtagcgctggcgttaccgagggcgacgcactcgcagatataatgggaaatataagaatagcaggagctgctaaggcggcggatgcaactacggatgaaaaggaggctgaaattgagaatcttctttccttggaggatccattcgaccc

SEQ ID NO: 90959 - DNA, 480 bp, Glycine max
  unsure (1)..(480): unsure at all n locations
accgttgcgantcgcctagaaaatacgaatacacagtcgcattctagcccttcgcctgcgaaaactcctcgacgctactacgcctgccggcgttcctccttgagcggaatccacactctgggatatgccgcctgctacacagggcacttgcgcaatcgatacacgcttcgccctttactcctcacgcactaaacttgctgccagaatggatgccccaaatgcccctagacagaacgacctgccacaaaaacaaagaatctcacatcacgcgggactggaagcactcaccgctgctgccccgtatttgcctcgaaaatcactcctgttaaaaacggctatcctattggaagctgctgataaccagccaacgacggagacgccgatggccagaccgacaaaaccgaagcaaaaccaaacatggggataataattcagccccggaccggaacttgggtatcgaaaccagtcaattataagcgt

SEQ ID NO: 90960 - DNA, 263 bp, Glycine max
aagtagggaatttacggagtatcattaatggaggtaaagccttaaactaagacttatacttaatcaccacgttcctatggacactgaaacagactcatgtgatcttagaggaagggtctttcaagaagttccaaccacgtgtattattgaccaggggcgagaagtaacttggtattttttacctcaggcactatgacatcatctgtctgaatcatagtttctataaataaaaatatatcacttaactcctcataattcggcct

SEQ ID NO: 90961 - DNA, 453 bp, Glycine max
  unsure (1)..(453): unsure at all n locations
cgttaccgttgcgtnaaaaatctcacatgtcaaaagcttacagcctattgataaagctccggtgcgcgatcctaaatcgaagtaatcgcgagatgagagcgatacgcgcgccgcgcccgccgaaccggacctcctcccttccgggccgagcgcgagaactgtaacggcgtcggctgcgcgcgcgtggagggccgcggcgccgcggcggccgcgcgggaggccgctgtaggaggcgtggtagtagtattaggcgatgccggcgtagtatgggcggtggtgtggttatgagtaggaggagcagttgtggtactagcggaacccgttgtagccctattagccgtattattagtagtgttattgtcagaatgatgggtattcttagtataattagtcgtcgtcccctaattataagaagccgaggtagtggtcgaataagaaggtgccgtcgacttc

SEQ ID NO: 90962 - DNA, 317 bp, Glycine max
gttcggttaaccaaccgggtttcgtagtatgcgagcatcgttgttggtgggccccccccccccccccccccctgcgccgaacgcccacacaagacttcgagaaaccagaagccagacaacgacaacaaaccattaagaagaccgtaatttacatgaacaccaataaaactaacaagtatcaagaccgaaacccttctaaatgatacctgagcagataagcctatctttcctaggtgtcactcatctaaatctcctccagcagctgacaaggccaagtaggccccttaccgactacgctttataagagatgagcattt

SEQ ID NO: 90963 - DNA, 248 bp, Glycine max
attgctgaattgaaccgagtcgcggtttttatgccggcggactgcggcggtctagtggactaggatatgggggtcttccattccgaagcggtggaaagtctgccgcgatgccaatccgcaggcttaatagggcgcgaacccgtaccgggcctggtcgtccccgaaagatcgaatgattccctgtatacctgaatacaccaattgatgaacactgatttaataaccctcagaccataccgatcctgagc

SEQ ID NO: 90964 - DNA, 454 bp, Glycine max
ttcggttaaccaaccgggtttcgtgtatgcgagcatcgttgttggtgggccccccccccccccccaaaacaggagacggcctacagaccctgcccatactactactttaggtagagagaagagacagacacttctaaaagaatcccccgacgaaaataggaaaaagcaaaaaaataatatcatgaaaaccaaagcaaatcgccaccgactccgctcagagacgataatgatacaaaagagcgtcacaaatctagcatagaccaactaatcagcgcaacctgattcgacgcgggaggaagagtaaccaacctcggccgctaatgcaacaaccacagaacctgacctgaccgccctgccccagcacctactacagaaccccaatccgcctcggaatgcatgcatgcatgccaaccattacggaaccccttctacacggcctgcatacgctcctcac

SEQ ID NO: 90965 - DNA, 475 bp, Glycine max
ccgttgcgtatgccccccgacgcaacaacttgctaagaagagtccgagtctgacggacgcagtactctccggcgaagccgatattttaatagagagtgcacttcccgaggttgaacgcgcagatttgcgcccgctagaatttaaccgtcaggccgccctagtaatataatgccgagatgttatattaaacaagaggctgagcccctaattgaaccaaataccggataacctggacgagctctgcgcgctaatagccctgccgccggcgacccctgccatactaagccagacggacctccgagctgtgggatcacaactttactactaccacaggatctccccacaattctcacggccgctacctcgatagaggataatttcagccacttataatgaccttgcaatgacaatacaatacccggataaaatccggataacctttatacttgcgctgtcgaatcctgctagcctcgct

SEQ ID NO: 90966 - DNA, 452 bp, Glycine max
ttcggttaaccaaccgggtttcgtagtatgcgagcatcgttgttggtgggccccccccccccccccccccccgcctaacaaacccagcggaaccaacccctaaagactaataacagcaaagcaaaagctaaataacaaccagtttcctaatccctaagaaactaaactttgttgctatacgaccgagacgaactgactctacaaaatcaaaacagaagaaagaccaaccttaatagccaccaaccctccttcccaaaccccgacatcgccaagaaaccgacgacatgcaaccctaggacgaggacgtaaacgctgatcctgaacgacgcggcggaggcgcggaagatcctctcccctagggatccctacgataagcctggcgaagcgagcctgctaaactcatggacccctacggcctcgaaagaggcctaaatggcgcgctcaccgcctgc

SEQ ID NO: 90967 - DNA, 463 bp, Glycine max
  unsure (1)..(463): unsure at all n locations
cgttgcgtntaataaacgctaacctcgttcgccatcctacgtttggagcttattattgatcacgaaatacttcgattcttaagccactgccgacattgtgactgcgccctactacttgatattatcatagtaagtcgcctactaagcatctctggaaaactacatactcgaattagcaagatcaatattaaaccaccactctttgacggagaaagccttatgcttccgagagcttgtggtcagaagcttcgattaatcccaccgaggagcaccaccttgcccctgagactattagccattaaagcttaattggcccgactctaggatattaagctcgacctacggcaaccagaagccaggcgggaactcctgcgctacaagcgcctattctccttacaacttaacttctgccgcggtcccttgagacgcacactattgcttctaatactgcgatgcccgaagc

SEQ ID NO: 90968 - DNA, 491 bp, Glycine max
ggctgattcaggttcggttaaccaaccgggtttcgtagtatgcgagcatcgttgttggtgggccccccccccccccccccccccctacaccaatttagagccctgacaaccaagctcgcaagactaccgcagatcaatacacttaacacctgaaccaaaatatagagactgcataccagcctacccgccaccagtaaacgccgaaactttgcacctcaccccccataacccgaagattaaataagtcacccggactttaggaatgcgaagcagtataccaacacttgctagatttggaggggcaagctacccatagggcctcgggcctcggggctgaagtccggactccccgccgccgaccccccggccgcgcctaccctgctacaaagcaaggcgaacgaacggggccacgaccccctcttgaaagaccccgccgaaccgaagcccttcgaaatcctaaatgctatgacgccgaggatggcgacacatac

SEQ ID NO: 90969 - DNA, 446 bp, Glycine max
ggttcggttaaccaaccgggtttcgtagtatgcgagcatcgttgttggtgggcccccccccccccccccccccctgaatgacaccgagaacgagtggaagacatgaagaagacgatggagtatgaacagaagattgatgagactcagggtaacgacgtagaagaagcggcgtactcggacccgttccgagcagcagctgaccgtggccccgaagaaccgggggcccggctttcaaaaatagtagtagagggggtatattgcaaaagacataaccataacggaaagaaataatgaatgaaacaaccaaaacactcgcgctccgctaaagaataaaagcagaaattaagtagaacctaacctaaccctcctccgaatgtatctcattaccgcgctgattataatcggcggagagtactcggcctatgtgcttggtaatgcggcctgct

SEQ ID NO: 90970 - DNA, 464 bp, Glycine max
aggttcggttaaccaaccgggtttcgtagtatgcgagcatcgttgttggtgggccccccccccccccccccccccccccccacttataactataatcccgcacagaaacaagaatagacagtcaaccagactagaatcccccatacaaccgtgaggccgcgagcttggagcggtacgcgccgagcataataaactacagcaccccgacaaacacgccgaagacgcctgccagacaggaaagtagacggtgaggcgagcacccggaactaccttgaaggacaagccccgaacagaaaccgaacccgagctggtagaagaggccgagaaacgactcgagttcacccacgaacttagaatcatataacacaaattctatttgaacgcatgcggactttattcaaaccggcttaagctacaacgtggccaggaccattcggaaagaatcatgagcgaagccgactact

SEQ ID NO: 90971 - DNA, 281 bp, Glycine max
aattgttgcgcaacaaatacactcccaatgggggtttcactataccagtatgaaagctcgatcattttaattcagtttgttttacaaacacatagttggtgtcttgtccacataaaaactcatggaccttttatgtttcctataaacagaaacatgaaatccttgcagcaaattagctttggatatacaggtcacaaaaggacttgttacaaaatcacacacagctgcagtagaaaaaaaattaacttagatcgatagtctttcaatttccttgatgataa

SEQ ID NO: 90972 - DNA, 313 bp, Glycine max
ctgattcaggttcggttaaccaaccgggtttcgtagtatgcgagcatcgttgttggtgggccccccccccccccccccccccccccccccccgaatgtggtggataaaacccgcagcctacacacacggcaccccacagaggaatcccggaaaagacttttcccccaacccaataagcgacgacaacaaatcacttctctacaaacctacttagagggcgcctacccgagatttaaaaataaaaggcagcagacggaaccccccaaaccaaccaacaagcgcgcgccggcccttaacaccgaacctaaactcc

SEQ ID NO: 90973 - DNA, 491 bp, Glycine max
tggctgattcaggttcggttaaccaaccgggtttcgtagtatgcgagcatcgttgttggtgggcccccccccccccccagcctgaatggcaaaaacgaacacataaacccgacaaatctagcagaaggatataaggctaaaaaagaaaggcccgacccccaaccagaacttaggcttctccagaacaaaatggattagagcctaaataccgactctaaccctttcccattgagttttggagcaccccttctgaatttaggaatgcccctaacggaactaataatgggcccgccactacgggaagaattacccttgaggattgcgatttccggacgagcttgaatctaataccgaaacctgcgcaacacgccaagaaggctggataagcgattggcgcctcgcttcctgaatgcggaagacctgcgaaccatatgcgtgacctgattatttgatccctacttaacaacgttcgcctaaccgccacccagcag

SEQ ID NO: 90974 - DNA, 251 bp, Glycine max
caggttcggttaaccaaccgggtttcgtagtatgcgagcatcgttgttggtggcccccccccccccccaaacaaggctccctaccccgatgaatatccgaccccaaccccacacagcgatagataccgactaatgcatgaaataagaccaaatgatataacgatatatggactaattagccaagagtatggacgacccggccttgcgctgcgccatacaggctatagcctgcgaaaacgctaaagtgactc

SEQ ID NO: 90975 - DNA, 224 bp, Glycine max
ttaaaactaattttaatctagtttaccatacacattaattatttaaaatttagggcacatgatttttttatatgggcataattaaaaggtttccaagtttgaataaatcgattaatatgggttggatggttatcatgaatctttttcacaatcactttgcctagtttgggatcgggcctaaaagccaacggcccaccgttttaaaaaacacatgcgttttaaaa

SEQ ID NO: 90976 - DNA, 424 bp, Glycine max
gggtttcgtggtatgcgagcatcgttgttggtgggcccccccccccccccaaaataactaaaccttcacccgcagaaaacctcgaacccgcacagaacctcccccagatctaacccagctgcgatagaaacaaaccgacggccacgaggacgctgccgaatattaaacatactttacaacagaagcggaactcctaaattaaagactcgaatattactggaggcctttcaggcggaaggacccggagaggacgatgaaaggagcgcgacgcggatctaataatattggaggattaggcaagcgaacgaactggagacgcccgccttgaaagaaagtcggggcgcgctaaaactacttgaaccgacagactctaagctaacctcgcgctgagtattaaaacaacaccttgcccgggcgctgacga

SEQ ID NO: 90977 - DNA, 472 bp, Glycine max
gttcggttaaccaaccgggtttcgtagtatgcgagcatcgttgttggtgggcccccccccccccccccccccccccccctgaaataagaaaacagctgaccgagcctgacagcgagacactcatcactccaaaataaataaaacaaaatccaaaggccggatatgtcagaaacccgaatagccgctacctgatcagggggagcttaacgagcgcgcgcgcgcggcaactcgcgcaactatcatagacgggaaggggcacgggcggaacattatacacaaagctgcttaagcctcctgagcgcggaacaacggcgaggcggacccttagtgatctgctcaacaaaccgccgattgacacgaaaaatgcgcacctaccccatcccctccattctgcgaactggcaacttcaggctgccgaactaacgagatgtgcttactactatgcccccaataggattgacctgcgggcggc

SEQ ID NO: 90978 - DNA, 292 bp, Glycine max
gttcggttaaccaaccgggtttcgtagtatgcgagcatcgttgttggtgggcccccccccccccccccccccccccccccccccccccccccccccccccccccccccccccccccccccccccccttttataaagaaagtttaacctccgacaatccactcatataaacaggaccagaaagagctaagcaggaaagaagaagtcgcaaaggcgcgggccgccgaaatttctagagagcacaaaacgccacctcgtcaatgatttttagcaaccgagaatgatttccgcccg

SEQ ID NO: 90979 - DNA, 293 bp, Glycine max
ttcggttaaccaaccgggtttcgtgtatgcagcatcgttgttggtgggccccccccccccccccccccccccccccccccccccccccgatcagctgagcaaaaataccaacaaaccccagtgaatgagggcccatggtagactctaacaagcaccagaccgcgatcacccctcactgaaaaaaaaaaaaaacataaaagtcgctacgcgcgcgagaatctgagactttgatgtttcaagcttgttcttataaaacttaaaacaaaccctcgagaaaagctgacgcggcggac

SEQ ID NO: 90980 - DNA, 347 bp, Glycine max
tcaggttcggttaaccaaccgggtttcgtagtatgcgagcatcgttgttggtgggcccccccccccccccaatctcaaaataccgaataaaatcaccacctattgccgcccggtcccgcctcaacagaacgtagaatcacgaaataacaaaataactaagacggacagaaactaaaatgaaccgaacgatggcattaataacaaataacatctcctcttcaccctcccgtatcattaccataattatccgaatactcccttgagcgctttttaattggcctcttaaacgccccttctcgatctgatcaacctcaaacgactcaaccgccgctgagggaagcgatcgc

SEQ ID NO: 90981 - DNA, 316 bp, Glycine max
ttcggttaaccaaccgggtttcgtagtatgcgagcatcgttgttggtgggcccccccccccccccccccccccccccccccccccccccccccccccccccccccccccccccccccccccctagttaccctaagatgcttataactctgatctgatctgaaccgaagttaaacacgaaaaccccgatggaggggcccccggccggcacacgacaggaagcgagacggatgatgaaggaaaagaaggaccagatgcgacgactagaaatttaagagccccctaattaaaaacggatcttttcacaatgcagaatta

SEQ ID NO: 90982 - DNA, 260 bp, Glycine max
gttcggttacaaccgggtttcgtgtatgcgagcatcgttgttggtgggccccccccccccccctggaaaaacgccgttgcgcgaccccgaccgaaccccaccccctatactccgcgaacccgatgcctagaaaccaacttgcccttgccacttcctattcatagaataggcaggaacccgaaatgcattcattgaaaacctaggaatgagcataacactcgcgtatgaacacaacagagatggccgcggagggggcaggg

SEQ ID NO: 90983 - DNA, 391 bp, Glycine max
tcggttaaccaaccgggtttcgtagtatgcgagcatcgttgttggtgggcccccccccccccccatttaaaacaaccaaccagcgaaacccaccaacctggaaagacacgactcgcgccacactcccacatcctacgaagaacttattgagtgtgttaacgctaaaagaaagaggagcttcccggaaaaataaaataaaaaaggagaaaaaacagaataactaaaaataaagcttactcttgaaatctgaattaacgcataagaatgaccacaccagaaaacaaggatttatttcagtttgcctcgaagcggaaattactaatcccgaaaatcctacacgcctccccgaaaacgacccggccccctgggaaccgtgccaaaaaacacgcaa

SEQ ID NO: 90984 - DNA, 306 bp, Glycine max
ggctgattcaggttcggttaaccaaccgggtttcgtagtatgcgagcatcgttgttggtgggcccccccccccccccctcctgaaactaacgacgacctgctcatagtataagattcgcacaaatctctcaaacatgcatccatccacagaccagacacgcagacgaggccagacgaattcagccaacaagaatatccaaacacctaagaattaactgaaacccgcctgccggccgagcccgctacccataaaaaaccaacacttcccttcaccacccggaaatctccaatctccttacccactct

SEQ ID NO: 90985 - DNA, 516 bp, Glycine max
accgggtttcgtgtatgcgagcatcgttgttggtgggcccccccccccccccccaaaatgacatcggacatacaccgccacctgacgacgacgaagagcggaaacaagaaaataaatacagaaggaggctaacagtgggacatcttctaaaaagagagaatgaaagaaaagaaaggagaggaacaagaagaaatgcgcgagacgcgggcaaggcggaacagcaagagaaatcacgaactccgggctaaaggtacgtacggatcgaggtggagtctgagaatcgggccacccaaccaccacatgaagttgaagagtctaggcgtcggccgggcaaccagccaccccacaccccacacctgtataaggaaaggttttagttacccgggtagggtaggttatagtgctgcgcgggatagtgatttgaaagttggttgtggttacgcttggttaagaacgcgtggttaacgtcttactgtatctagttctatttgttctcctaatcagcgcgctacccta

SEQ ID NO: 90986 - DNA, 307 bp, Glycine max
gttcggttaccaccgggtttcgtgttgcgagcatcgttgttggtgggccccccccccccccccccccccccccccccccccccccccccccccccccccccccccccccccccggatgtttccctcgcctgtgattttaacacccatgatgatctgaaccggaaatgaagaaaacggccgcccaaaaaacccaccccccccctgaaatcccaagaataatccaaacaagaacctaaacccactttgcccatggccggaaacaaaattaaatttaaaggactacaaaaacccgcatgccaacccaaga

SEQ ID NO: 90987 - DNA, 440 bp, Glycine max
ttcggttaaccaaccgggtttcgtagtatgcgagcatcgttgttggtgggccccccccccccccccccccccccccccccccccccccccccccccccccccacactaagataaaaccgaccatcatcaagacgaactccgaactgacaggagccacgaccccccggggacccaccgctcccaggacacagagaatcaagcaaggctcaagcaacacgacgaagaacgatactatccgaacgaagctcagacccacattacccaggataaacctcgacgaatctactactcacgactacgcccccggaggcggatgcggacgcgattgcggagatagggaaaccgatcgacccgaactcgctgaataccgccgaaacgaaggagctaaatgcgtcgaattgtggctagaaggaatcgctgatggggaatgcgacacagat

SEQ ID NO: 90988 - DNA, 489 bp, Glycine max
ttcggttaaccaaccgggtttcgtagtatgcgagcatcgttgttggtgggccccccccccccccctaccaatacatctatgaagcctcagaggacgacacccaaacaatgtccccagagccccttccccggatatcatcagcatcagaccatattaaaagacataaataaacaatcgcccaccccgcgcgcacagaaccctcagggggagtctactaagccaggaagccggaagggcggaaggaaagctaagcgcagggggacaccaagacccccgataaattaaaaaaaaaactgcgaactagaatagaggaaaactgaaaaactatgaaaaacctaatataaagaaagaggccctgcgaacgaagcgccgatggccctgcgggaggacgaggaggagaaggaggcctctcagacaacgatacgatccaggctctgatgaaccgaacgaaaactgcggaatgccgcaaatgcctgcttgaaaacagcc

SEQ ID NO: 90989 - DNA, 325 bp, Glycine max
gttcggttaccaccgggtttcgtgtatgcagcatcgttgttggtgggcccccccccccccccccccccccccccccccccccccccgggaatatacataatgaagcctacccgctcagagatagacctcaacaccagaagcacacaccactaaagcaaagagacaagcctgtatggcgaatgcatgggcatcatcaccattcgccgaccgcctatacgaaccctaccgcgcgaagtcttgcccttacggagaacgcgatataaaagatcgggatagacgaagccacgagcgcgccctcatgcagcagcaatgcgccgtgcacgat

SEQ ID NO: 90990 - DNA, 212 bp, Glycine max
gctgattcaggttcggttaaccaaccgggttttcgtagtatgcgagcatcgttgttggtgggcccccccccccccccaaaactcagcagcacccttcactccctactcataatcgagacaattgaagcattctccagaaaacatagcatttaaggagatgagggcaacacatagaagaataagaaaaactatgcaacgatatgcacgacaga

SEQ ID NO: 90991 - DNA, 308 bp, Glycine max
aggttcggttaaccaaccgggtttcgtagtatgcgagcatcgttgttggtgggcccccccccccccccccccccccccccccccccccccccccccccccccccccccccccaaaccaagaaatgtcaataaaactaacccgagccgaggaatgacgcgcgccgagatagagtaaactgaaacccgggggggtaaaaatttgaaaaagacacaaaggtaaataaaggaaagctaaggcaaaaccacccagcaaaccttggaaacaagaaaccgacataaataaatataatacctttacgaatatatat

SEQ ID NO: 90992 - DNA, 476 bp, Glycine max
gttcggttaacaaccgggtttcgtagtatgcgagcatcgttgttggtgggccccccccccccccccctaacagagaccaccacggacaccccaaagaataccaccagagactaaagatcgagttggaccttcgcaagacccacataaatattcgacattatgaaacctaagtaaaggatgccgatccaagacgaagcgtattaaggcgaaagcccatacccttaacgacatcccgaaactgccgggactaaggattcgactcgccattatgcaacataactaatggatcccaatccaaggcgtagcgtattaaggcgcaagccgatacccttaatgacatgccgtaactgccgggactaatgatgctcgcgccgacgagacaggaggaggccgaaaccgcgaataccttccagctatcacttgaaccgagaggcctgagatgcctcgacacctataccggctataccagacatacg

SEQ ID NO: 90993 - DNA, 411 bp, Glycine max
ttcggttaaccaaccgggtttcgtagtatgcgagcatcgttgttggtgggcccccccccccccccccaagaatctgaatgcccaagcgacggaccccatgacgcatgcctcagaaacaaacagaataaagataaaggagaggttggagaaacgaaagcaaactctaaaacccaaatgagagagaaatatttctaaggcgagaagacttcaccagactttccgaaagcgggcagcccccacccaacgacatagtgcgactcatgatctaggaccaacagcccacaccaaaacatccccatgcatgggaattcccgaaacctgtaccacttcctcaagaagacacgtctactcctcttcttcatatacgtatcgaaatgcaaaggacgctagtgactgagaacgttaaaggcc

SEQ ID NO: 90994 - DNA, 244 bp, Glycine max
cgccctatgccacttatcgctacgcggacgattcgacgaaatgcaactagtagcctagggtgtaagaggacgatccccccgcccacgatactgcagtctgaactaatcacactgacagatgcaactcacacgagatataggccaatgggaataacacagcttgaaactgaaagctgaaagcgaaatccctctaccccttaccttgcatatcctgaccgaactactggggaagaagaagccccct

SEQ ID NO: 90995 - DNA, 419 bp, Glycine max
cgttgcgtaattgcttatgaaacacgctcaggtcacctcgcccatatttagggaaccttctgctgctgcttttccttctgcgatgaccgcgaactccactgacgccctcacttccgactgggctttcctaaatcgcctcgaggacaccgacgctaatactgggtcttccctgccaaatgctgcaccatttagggctacggctcctccccggcctaaaactaacctccacacttctatcgaccgggctcccgttggtaatccgcctaccggatccccctggccgggacattaaaatgaaatacctatatttaattaaaatactctagcaccagatggcaccgaaaaactttccttgcactgcgcgaattgctgctatagagcttgaaattaattaacgatctgctatttcgaccaaccct

SEQ ID NO: 90996 - DNA, 256 bp, Glycine max
ggaaaatgtgaacatagataattcatttattttcaatctggagaacttgttgctgctgtttatacaaaggtcattctggaaaactagaaagtggcttcttatttagatgaattacagccagatccaagagaattaagagtgctttcccatgtttgattcacaccctgaaggggtccaaagaagaatttccatcaaggccctttgcataataatatgccaaaaacgctttcaaggttgtgtcgctgtagattggtgg

SEQ ID NO: 90997 - DNA, 435 bp, Glycine max
ttcggttaacaaccgggtttcgtagtatgcgagcatcgttgttggtgggcccccccccccccccttaaaactctaagacatacaaccgacccaccccgaacgcttataagcctcctgctgctcccacagaaattcgaccgcttaaaagcataaatcttgccgccacccatactaaccagatggatacggaatataaccaatatctgcccgggactccctaccgagagggctaattttcggaaataataacccggacgaattgggccctgacaacaacactggaaaaagcgcccgaattcctctcgcgctcataccttctttccccgccgctaaatgatccggccaaccttaggacagacgccctactcagggcgaagctttcgactctaacccagaaataatgcctgcagatacaccgcctttggctctcccctc

SEQ ID NO: 90998 - DNA, 414 bp, Glycine max
ttcggttaaccaccgggtttcgtagtatgcgagcatcgttgttggtgggcccccccccccccccccccccgacgtcgcaagagaggccgccgagcgcgccgccgccgacgtcgcaagagagccctacactcaaggcggagacttccggaccggccccgggaatggagccgccgaaagctaccaccaccccctaaatgacagtgccttatacgaaatacactctcactacggaacgggaagacagcccgctcacgtcggtcgcgactttagcgaaaccgcctaaaccccggacctactaagaggcgcttacaggttacaaaatagggatcatagttctgaacactaatagaaataatcccttgcttaaacccaccagtaaaggataaataaacctaactcggagctgccctgcta

SEQ ID NO: 90999 - DNA, 314 bp, Glycine max
tggctgattcggttcggttaccaccgggtttcgtagtatgcgagcatcgttgttggtgggccccccccccccccccacccccccccccccccccccccccccccccccccccccccccccccccccccccccccccccccccttttaaaactgaggtttgaggaaaaccggacccctcacgaagctttctaactacgatcaacgatttcaaagaaattaaaaccctccgccacgcacgcacctagggaagccgctttacagacccaagataatacagatttttacgaccgacgaatataccggtgaccccaccc

SEQ ID NO: 91000 - DNA, 388 bp, Glycine max
taatttaccgaacacgggagtatagagaacctctacgaccaacttccttttgactgatatatacggcgatcctcttaactactggagactgcccaaaggctatattccctactcttaattatattataaaaatccttcatgacccttgactttaataatttgcctgggattataagggacttgcactgaaatctcgatgcccagccctttacctcctaccgaactcccctagcttaaagtatcaatctattaaaatgcctacactagatataagaaccttacgaggcctcgatattccaaccggaccttattggactctgaattgcgtgggagcctggagcaaaaccttaacccaaccaccaacatcacccccacccttaaagccttt

SEQ ID NO: 91001 - DNA, 345 bp, Glycine max
ttcggttaaccaaccgggtttcgtagtatgcgagcatcgttgttggtgggcccccccccccccccccccccccccccccccccccccccccccccccagggaaaaaatgacactcccacagcagaaactatgggtatagattgaggaactcagaccaaaaacggacaaccattgcgaaagatctaaagaaaactagcacatattattttccttttgaaacaagaatagatctcgaacatgctttacggccaaagaagcacccccccgactcgcaaacagcaatcaaccagatccggccctcactgcaacgatcccgatgaatgaacgcgcctggatagggctgac

SEQ ID NO: 91002 - DNA, 212 bp, Glycine max
gctactgatattaatacgcgaaatattgcccgaattctccctagaattacgaaaacttgcagacccgatgaatctattcacactcacaaagccccaccgcccgcaccgagcccccacctcaagcccgcccgcgctagttgaactaggaacgaaatcaccgactatacccgctagaaatcaattccggccgaaagcctaagaaaaatgaatca

SEQ ID NO: 91003 - DNA, 257 bp, Glycine max
  unsure (1)..(257): unsure at all n locations
aaagacgcgctaagcccagccctactgctagcccgccagcccacgctaagccttccactttatctgctatgtcctacgaccacgtgatatcctagcccggctactaaccgtcccccttccgattgaggcgctgccacgattcttaattatgccgcaagtaatactttataagcggcatgacgctttacaggccctgggactgttctncactatgacttataaaacttatacgcatggctctactttcaggagaaaca

SEQ ID NO: 91004 - DNA, 339 bp, Glycine max
gttcggttaccaccgggtttcgtgtatgcgagcatcgttgttggtgggccccccccccccccccccccccccccccccccccccccccccccccccccccccccccccaacgacgcaccccaccggccacgcgccacataatgttaaatcgaaagagaggagcactgaagaactcctcaacagaaaaaaccacataaggcacctaaacaaacttggaagataacgaaactactgacggccgcctatccgaacatccggcgcgaaaaaggaccctcaggacccctgatacatgccctttcacgcgccgatgcgcttacgacgggcacgaagacatcacat

SEQ ID NO: 91005 - DNA, 436 bp, Glycine max
ccgggtttcgtgtatgcgagcatcgttgttggtgggcccccccccccccccccggtaaacataactgtaagcaccccacctcacaaccatcctcacttacatccctagacccacccagggaacacccctaccttggatccacgcaatcagaaaatgaccgccatagagcaggaacgccaaagggacgcctaccctcaagggaaggggggagacgaacataccgtaaaccgggacctaatcgtcgtcgggaacctaatctatgaagaggaatggcgccgaccctaatccggcgattgcgaagatttcagccgggatataatgaatgacatgatcatccaatatgacgacggggcaagaactcgccgaagccacggaatttaataaaatggatgtaacggtagggaacaaagccggccacgcggcggagagcgacgct

SEQ ID NO: 91006 - DNA, 221 bp, Glycine max
agccaacatcagactttatcctactactaagaatatacttattattattattattattatatataataatataaaaataatgacaatgattgcggcggccgcgcgccgggcaccatctctataagattttcccatcttctaaatatctaatatatactatcttatctaattttttgatctcgaaggggcagcctaattggcactatttggaaaactttctg

SEQ ID NO: 91007 - DNA, 396 bp, Glycine max
gttcggttaaccaaccgggtttcgtagtatgcgagcatcgttgttggtgggcccccccccccccccagcgaaaccccaccacaccaacctatatgaccaccctccaagcccactctgagccagaacaacaagaccccaccaaccatgccggagaaggcagggccaaccaagccgccggaaccgccatatactaacgaagaggcccagctcctagagcctgaaatacggcatgaacgcgcaacctctcaccttgaacaacccgatccgcgcctattcggacccggggcgcgccttggcgatgccgaagcgcgacggcgcgcacgcggccgacctctcggaccgcctgcctccgctaggccacgacatgccgatgcatggacgccaaagcccgctgca

SEQ ID NO: 91008 - DNA, 497 bp, Glycine max
gttcggttaaccaccgggtttcgtagtatgcagcatcgttgttggtgggcccccccccccccccccgcaaactgcccccgacgaatggctgcgatctccaacattcaacgctcagaacaacccaagccaaaaagtaactcccccacagattaaggaacaagagggactgaccgatcttgtctgtccagcggaaccccagctaccgaaccctatggccgcacgagactagcctggatcctgattttccgcacagggtaaatcggtcggccgcggccgacccgcaccccgaaactgataaataataaggacccatactccagacaccctctttgcggggccggggctcgccccatgatgagaagccgagcctcttggccacatgtgctgacagggaaaaatgaagctctgtggcaacaggcgagagccgcgccccgtccctaaacaaagcggagctcgggacgcgatcatcacgccgatgcggaactgatccatgccat

SEQ ID NO: 91009 - DNA, 397 bp, Glycine max
cgttgcgaatagctgcccgcgcgctcgcaccggtccgaaatgtcctgtcataagatataaaaataaatcaggaacccgcctatatataaaagggtaataatatcgacttgccggaggccgtagtggccgaggtcgtagtagtaggagccgtggtgggggcggtggtgctagaggccgcggttgcagttgtagccgcgcagcccggggcggtagtactcggggtcgtaggagtggtggaggtgttgtcgtggttatacgccgttaccgatgtacgggtacggattgcagcggggtcgcgggccgtatgaatctgagtataactttaagttaaacttaaggtcaaagttgcagttgtagttgtccccgtcgcggtacttaggttctgccggtggtggtt

SEQ ID NO: 91010 - DNA, 301 bp, Glycine max
ggttcggttaaccatccgggtttcgtagtatgcgagcatcgttgttggtgggcccccttccccccccatatacttctcaccaaaagggactaagaccctatcccggaattcgacaacatcgatcaaatttcacaacctacagaaaaggcgaactacatatacaaactgaaaggaaaaaatgaacatatagcaacatgacttgaaaattacggtcaaataagctgttttttgaaaatcaacgtgataatacctctatatgccaatcactgactaaattgatatccactcataatagctgcgg

SEQ ID NO: 91011 - DNA, 457 bp, Glycine max
tcggttaacccaaccgggtttcgtagtatgcgagcatcgttgttggtgggcccccccccccccccccccattacaaaaccacccgcgcgcagcagcataaagctaccagaactactagtggaacattcaaaacacgaacacccaataaacccccccaaaactagaagccacagaactacatactaaacagagaaccgacggggccccgctactgacaaaacagacaacccgccaccattaacaactctctcccatcataaacaagacccagcccacacaaagcaccctctctaacaggaacaactttgaccacgggaccatccacctctacattcacccccccatgactcaaaccaaactaacaccgaccagatggacggacctccccctcctctagctgccctagcactgcgctcggcttcacgaacctgcccccggccataaagaagccgcctac

SEQ ID NO: 91012 - DNA, 270 bp, Glycine max
gcgttaaccgttgcgttttgtagtatgatacgtgttctctccttagtgtgtgttctattaatgctgcttatatatcttcttatcgttcttatataaaaagtccttataattgttgtatttatctcgagtgttcttatgttacgcttaatcctccaagttattcctattagtctgagtctactacttacggttattacccgcctattcctaataattatccttttactactataaacctgttttaaacttcttgtcccctgccgattcgta

SEQ ID NO: 91013 - DNA, 484 bp, Glycine max
ttcggttaaccaaccgggtttcgtagtatgcgagcatcgttgttggtgggcccccccccccccccattcaaattgtaattatcacgaccgaagatataaaaaacagaagactacgctaaaaagaatacataactaaatgtaatacaagaaacaaatataacatcccgagacaagtagagattgttattttccccgtcgtgctaaatgatcttctcatgttaggcgatcttatgcttgagtctgtatactttaacatctattacgacgttctcctgttagacaaggttatttttgcccgcctcgtcatagcggtttctgtcattttctatgaagtagtcgtcattttagtcatttggatatgcgctgcccgcctggttctgttctatgtactgtttgtaggaggccatattggcgtagtcatggtaggagatctagccctccttggccagtgcggagacggaggcttccgagtggcccgacgggg

SEQ ID NO: 91014 - DNA, 520 bp, Glycine max
tggctgattcggttcggttaaccaaccgggtttcgtagtatgcgagcatcgttgttggtgggccccccccccccccccccccccccattaataccctatgcgcccgacgaaaacagcatcacagactcaccccctcgccgaagcgcacccagaagcaagcatcataatccggcccttatttaatctcccaacgaacccgttgactgagtcaacggagtaaccgaaaaccgccccttatcctacccatttgaaaatccacttgctgagctagaacctgtatcggatggaaaatcagagtgaagcttagacgctactttacgggctactcctgagaaaagagaagctcctcaggaaccattagcccgctggactcccttaacgggcgacactgctgcccagactactaagagcctatatctctgctccgaaacgcacggaagacgctagtcccctacaaaagatcctacttgaacttccttcgtgctgctcctggaaggaccgcttccttgacctgactggt

SEQ ID NO: 91015 - DNA, 362 bp, Glycine max
  unsure (1)..(362): unsure at all n locations
aaccggttttcagatcantcttcaggaggagaaggcgagggccgaggccttacctttctaagagcatcggctgccactactacttgccgaaattaacgagctgcaatatacggcggcgcttaataggggcctatgattaaattaataaattctctggacttagctaatattaagacaatcctcccgcagcttttgctaataatcacttgaaattctaccttataaagacacgtgtaaaccactctacgagcattagtggaagcgaatcctgcatggactgcgataatcagccgacgattgaagcacgattattgaattagaatattatttgcatgacggactagacaagaagttccaacgcg

SEQ ID NO: 91016 - DNA, 441 bp, Glycine max
cgttaaccgttgcgtattacaagcccccttaccagattgcacgcgcccttgttaagatagcgtcgaagcttaagcccatatctttgaccacgcaacccatctaactagggatattctgctgataattgaatatactatccttagtgcgaatcattaggatacgttgctccaaactatcgataggccggaaaagccggccacgcgattaatacatcggcctaaagagccattcctcagggcggttgcggaaccgcaacaggagagtcttgccgataatagacgaacacgtaattaccgaaactccggagtatagagaatcctctaccaccaaacttcctttggactgaaagtatacggcagataccacttaaattacttgtgaatgcccaaaggctatatttccctactaataattatattttaataatccttcatgaccct

SEQ ID NO: 91017 - DNA, 397 bp, Glycine max
ttcggttaaccaaccgggtttcgtagtatgcgagcatcgttgttggtgggcccccccccccccccccccccccccccaacctaaatcaaataaacccaccctataaaagctttgttcacagaacacctacacactccaactgcgagggaaccgcagaactttggcctagagacaatacaaataatatcaacaaaacacaaacaccgccacacgcacacccgcgcgcatactcgaacctagacacatcctcggacttactacccccttagaaataccaccaacccctaaactcacacactacgaggagcgccagagagcaaaaccacaatcaccataccgctaacgagggaatcccaggaaacaaaaacagcaccaacaaccaaaccggaaccccatc

SEQ ID NO: 91018 - DNA, 395 bp, Glycine max
ggttcggttaaccaaccgggtttcgtagtatgcgagcatcgttgttggtgggcccccccccccccccccccccctttcccaaaccaaactggcaacgcagggcgcgccaccaaaataaccagaaacgctgaaaacccaccccgatctaccaaacagccgaacgaaaaaccttcgatttacagaacaagaaaagggaaactttggacacataaacaggaattctaagaaaacgcgacggggctggcagaagtcgcctaaattaacccatcagtcgactttatggccgaacccaccgccagaagaagacttcgcgcttaccccgaacacatggccctaactgccccaaggaccgttgaggaacctgaggacgcacaagagtactacgagatgctatt

SEQ ID NO: 91019 - DNA, 510 bp, Glycine max
tggctgattcggttcggttaaccaccgggtttcgtagtatgcgagcatcgttgttggtgggcccccccccccccccccccggggtaaataccgcataaatcccccgacaacacacaacacatcagcaaccagcaaatactacagagctaccactcagaatgagagcgcgaatatgatgaaacgagacaacccctgccgactgctactgcatcagagttgaccaagcgacaccgacacggaaaacgtatcaagctcccctcaaatgagttaagatacgaccgatcctaataatccgaatgataatgattcattcccgccggcgcaattatgaacgccattctaccctcttatcggctattatggcaatccatatattgcattgaattcgacacttagtatgacaggaaatatatgaaatatctgtaatagtactaaatcaccggggtatatggatcaatggtgtatgatgccttctatccaaattactgtctagactctaatgatatccct

SEQ ID NO: 91020 - DNA, 342 bp, Glycine max
ggttcggttaaccaaccgggtttcgtagtatgcgagcatcgttgttggtgggcccccccccccccccccccccccccccccccccccccccccccccccccccccccccccccccccccccccccccccccggaattaaaaaaccctatcaataccttgctaaagcctaatcattaaccccacaataaaaacctgacactgagggcgcaccagtcattgataaaatcaaaggggggacccacataaaaatccccaaaaaaacagaaaattttaatacggaatatcctcaacgcatccctgagcgctgaagacgcctagggcagcctgccccctcggaatccc

SEQ ID NO: 91021 - DNA, 373 bp, Glycine max
gttcggtaacaaccgggtttcgtgtatgcgagcatcgttgttggtgggccccccccccccccccttccggaaacccttaactcctcgagcatcgatctcgaaagctccagcttctaaaatcagacaccttcataacaacaacttccaaaaataatcaaacacataaagaaaacgaagagacttaactcaattgactcggaacccaaccacgcctgctacttaattgaaggaccctacagtcgatttgcgcgaacccgaataaatgcctctatcaaatccccggtttaataactcttgccctaagcagcagcaggctaaaactactactaatagcccatgccaccgcgctccggcccccgaacgcctacatgac

SEQ ID NO: 91022 - DNA, 466 bp, Glycine max
gttcggtaacaaccgggtttcgtgtatgcagcatcgttgttggtgggcccccccccccccccacgaaaatccccaccacccttcgaccacccttgctactcaaccgaaaagagcctaaagtagccaaatcagaaaccaaaaaggcagagttacctgggaaagagagagaaaggatttcccagtagatctaaagggggacgcagaagaattcgacttggagcaagacagccttagcgtcgagccgggaatcaaataagatgccgatggagacggcttttgccaataagatcgggcccaataccttaacagatctgatgaacggggcgacgacgatctcctattaaatccccagcgactttgtcatttaggtgacaattatagagagcaccgagcgctacgggcaattccggaatgcggagttgatctcccgtgaggatcgggagtactggtctgccgtatgcgtcac

SEQ ID NO: 91023 - DNA, 221 bp, Glycine max
tcgtggctgattcaggttcggttaaccaccgggtttcgtagtatgcgcgcatcgttgttggtgggcccccccccccccccaaggataaactgaccccactcacctgaagaaaaacacctcaagcacagattcccgttctgggggacctccgatcggaaagaagttctacatcaataagcaagatccgcaatgagaagtaaacgcgcgttctttaggatgaa

SEQ ID NO: 91024 - DNA, 394 bp, Glycine max
ttcggttaaccaccgggtttcgtagtatgcgagcatcgttgttggtgggcccccccccccccccccccacacccaaagagagcgacctgagacatcaactgtgcccacccaatctaacaaaacaccagacagcatccgagaaactgaaaattagagcgacgaaggatacaccctatagcgccagatccgcgaataatcgtgtcgagacatttccatcttgtccataagcgataacccgaccgccaagtggaaaaataagatggatcaaatgcagcttaaaattacgaagcgcatcaataaaaagaaccccgccaggcgcgggaatctgctctgtaacggcccctcctacacgctattatgtacctccaagctgataagcaacggaatgatcttc

SEQ ID NO: 91025 - DNA, 360 bp, Glycine max
gagaaaaaggacttgccggagcatactgcgccggcgggaggttgaagttggcgacgtctatgccgttgtattactgcgacgtagccgtccgggaggtcgcggttgtctcgggcgtgttattgcggtttaccggcgaattgggggttgttgtgggggtggaagatcctggacgtggtcgtgtatagcgttgttgaaatgttgtccgtcgtttaatgcgttgtagtagtatccgtttgagactgcttggttaacggctaattataagtagtctgtacggtagtttacgaagccgtaaaatttgtgtgtgaggtgtgcttgtccgtctagggcagtgtggtagttttatgtctatccgactcc

SEQ ID NO: 91026 - DNA, 531 bp, Glycine max
tggctgattcaggttcggttaacaaccgggtttcgtagtatgcgagcatcgttgttggtgggcccccccccccccccaacatacgcaggccttgccatcgacgagacaccttagaatcagatcagaaaagaattgtgctggtagatggggagactcaacctcaactcaacacatgcaagcaagcagcccttccggtggagtacctttcttccaagcatttccgagcgcgttcccttcccttcgcttccgttctttaaacgtcctcgacccacaacacgaacgacgagagacctgccgcagctcacttcccattccccagaagggctgccgcggaccgttcaaccaccacgacgagagacgctaagccctcgtgaggtgagaatgaagcaggctatgggagctggcgatggcgtcgccgaggtcgctatttccacgaggttcttctaatacttgttatcttttagctggtctttttaattatctgctcgtgaacgttattgttgttattattattattattagttgtcttcc

SEQ ID NO: 91027 - DNA, 425 bp, Glycine max
aagcctccttcacaacagatacctctattgctgaaccagctgaacctattactgagcgacctacatatgaaacgcgcctgcctctgctcacccttctaatgcgatggcccgaaatatccttcgaagcccgatggaataattttaaccgcctgtactgagaggctcattaactgacgggaacagatagataaccggctcttgatattgcagcccttaatagcaggttccatcgccctactgctctcacagcggaataataaggatacctcctaagtaatgttactgctgattatgaacaagctcttgcttttcaaaactccggcaattgattggaccttcgatccgaacgccccgagcttggcataatgaggctaataacccactgtttaaacctccccacggaaacccctaattgtggtgcccga

SEQ ID NO: 91028 - DNA, 312 bp, Glycine max
gttcggtaacaaccgggtttcgtgtatgcgagcatcgttgttggtgggccacaaaaaccaccccgatgctgtgggagaagaagcccctgaacccctggcacaacccgaacccaccactcctgaccacatcctcgtcgggaagcaaaaacaatttaccccacccaaataaaaactccactgaactctacagaataacccgcctacattctgattgactgatggcggccgaatcctcattacgaacccactaaatgttgtggccgaaaacccttacaaaagaacccgggtgacaaaccgccgattctgccgcat

SEQ ID NO: 91029 - DNA, 385 bp, Glycine max
cgggtttcgtagtatgcgagcatcgttgttggtgggccccccccccccccccccccccccccatggaacaacaacctaccctgatgcttccaccaaggcccctaaatgatgcagaaaataacagaaattcccagcgagcagcgagcatcaacaggaagcaggaatagcatctacagaggaactgccctggaccggcgggaagggatgacacccgccgaatcaaaacagacctccgcttcagacgagatctagaattgcattataaaccgaaaaactgcctgcctagaccatgacacaaaacctttagagacagcgcccattagaaataacctagagagcgaatctcggggcaatacaagcgacgaagataaggacctggaccccc

SEQ ID NO: 91030 - DNA, 388 bp, Glycine max
  unsure (1)..(388): unsure at all n locations
cgttgcgaatgcctgcgataagaccgggacttcgactgtggtgaaataaacgaaataccacttgagctgcaatatgcacctaatttgtacccgaantggtcttggaaattcctgccaacgacctattacccttccaggatcttgagtcgatccccttaagctgttgtggacctgtctgctctttaccaaatacgatctactgctcctctcctacgtacatatatgaattcttgatataaaagccttattaaacttgacgaatgctgactgaaccaccaaacctagctaaacttctaaacccctttgaacgagtttaatgcctactaatatacttcattttcctccagtaatccgccatattacaacgtcaattcctgctgcccttgaa

SEQ ID NO: 91031 - DNA, 460 bp, Glycine max
ttcggttaaccacccgggtttcgtagtatgcgcgcctcgttgttggtgggcccccccccccccccagctccaagaaacacccaccaaagagaaagttgatacggaacccagtagtgacgaccgaatccccttgcgccagcaaaatcaagactacataagttcgtcccccaatgcaactgaagagccaagcgccgcctatagcctcaacacaactcacatgaacccgattcggatgctttagcctatatgacaacaggcatgcaggcctatggataacgattagcttgacgcggacaataaagcaaagggccccttggttactgatatgcttacgcataggctgcagtattcagataatcggccccacgacacgtccccttcttctcttgacgattttacgcttatctataatatggccctgcggcatacccgtaggcgtaggcgtaggcgggggctcgcg

SEQ ID NO: 91032 - DNA, 254 bp, Glycine max
ccgccggccgcgcggaatggcacgacgagcctctggcgctgcctctatggccccgacctcttccctctgctggttcaagccgaaggaactagcccgataccagtcttttatacttcgtctaaaaacagcgaagaagtggaaacgccgcgagcgcgcgggcctagaattggcgcttgcgcttgccggaacggaattaagttacagccaccctttgatacctagactgatgcgaaatgcgtccggcttaaagcgct

SEQ ID NO: 91033 - DNA, 456 bp, Glycine max
tggctgattaggttcggttaacaaccgggtttcgtagtatgcgagcatcgttgttggtgggcccccccccccccccttaacaaaacaacacaaaacatcatatcacgctcaacgctatagaaagacaaagaagcccaaccaaaagcaaggtgaataacagaaccctgaacaatgagccatatctgacctaatcaccagtgagcctgcgacctaagcctaatgcgagctaaccggaatgctaaacctaaagcaatgagcctgactagactcgtgtcgctgaaccgcgcccagaagactgcgcccgacttaatgccaaaacccgatgccgatttgcctctaatccctaatggaaaaagcgcgtttagacatgcgctctacttcccgctcttgcccatcctcggacaattgacgaataagatactattaaagtcatccggaaaacaatgcggacgaact

SEQ ID NO: 91034 - DNA, 440 bp, Glycine max
ttcggttaaccaccgggtttcgtagtatgcgagcatcgttgttggtgggccccccccccccccctaacggcgacccggccccgggccagtcccgagcagacgagccctcgcctcaaaaccatccagacccaaccttccctattccctgccacatagactatccactctcatcactctaaaacaacggccaaagaccataacccacacaaagaaaatgctaaagagcacaacacacttagagaagactgaggctcagtgacgataaattaatggctacaaaccttgctgccgacatatatgtccgccggagcccctgacgcctcggcggtcgaggcccgcacggccgcgtctcccctgtaactggactctacaagcgggagccctccctgtcaggcgatacttacgcacccctcataagaggttaacaagacgaagacgcc

SEQ ID NO: 91035 - DNA, 401 bp, Glycine max
ttcggttaaccaaccgggtttcgtagtatgcgagcatcgttgttggtgggcccccccccccccccatacaacttccctccccaccgacgcaaagtagaccaacaactgaataaaccaaattcaagacgcgcccccaaaaatcagctttaccgacaagaacataaatcaaataaacccaccgaattaaagctttacccacagaacacctacacctcacactgaatcggagagggatcagcagacccttggcctcttagacagtagaaacaccaccaaccccaagactgacatagccagagaggtaaaccactatcaccatacggcgagggaaacacaggaaacaaaacacctccaacaagccggaagccctgcttgtatctttgtttgcccagagacatggc

SEQ ID NO: 91036 - DNA, 398 bp, Glycine max
ttgttgtctgttgttctgatggagctctggcgttataatagtggtgatcttgtgtgtttaggtgctttaggtaatagtgctctaagtgtctgttttccgttccgaatcgtttcgttgcgtcagggtaacaggtagggtgttgtatggggagtccgtctgctagcgatgaccgtaagcgtgaggtgaattcgacttatgcggtcgtggataattatgctgcggtggaggaagaagaagaagaaccagaagaatatgaactggaggtcgagagcgagaaggaggagtacccgaaatccctgctagtctcggccctcgttctgccggccgccccacaaccaactactagcaactcgccgataacaccacgatcaaacaaaaaaactacccccccccggacc

SEQ ID NO: 91037 - DNA, 463 bp, Glycine max
aaaactgggagggggtgttccacacaaagattaaaatttcccagatgataaacgttctaaatcccagatccaatttgaaatttgccaaatttgtttttgaaactttttttttaaatttaaaaaaaaaaccggttttagcatttcaccttgttttagagaagaacaaaattttcaacccccctttgaattaaacaattgttttagggccagaccaaaggagccaagccttttggccatgcaattccacctgtttttggagacttgggtcctggggaaaaggaacaatagggggttaaaccaaatccagtttttttttgaattttttgagacactttttttttttccttacagtttcccaatttttctacaatacaaaagcctttggagaaaccttagccagcttttgcacaaggaggcttttttttttttttttttcacccaaatccttaataaaacttttttt

SEQ ID NO: 91038 - DNA, 503 bp, Glycine max
cgcaacagtagcgagcacatttaaatgcttcagtggctgattcaggttcggttaaccaaccgggtttcgtagtatgcgagcatcgttgttgggggccccccccccccacccccttaagaaaaataaccgcgagctacggccggaaagagacgacaaaaacaaacaaacaaaaaccagatcagactagaaagttgggcggcccacctaaaaaactatccccaagcacgctacattacaatcgaggcctgctagatacgcctatacacgagcctatgacaaatccgacgaacgggattaactcgacaggaccgctaacgagctggcaccttactcctgcatttacccgcctgcgacttaaacgccttctcaaacaccgccttccgctacctagaagataactcgcaataataatggaagaactgactgcggatcgactagaagaaatagcatggctcaagaactaggcggaagagagtctcctggcggcgggcgctcctcatcct

SEQ ID NO: 91039 - DNA, 207 bp, Glycine max
gaaaagcaaacatggctattattattattattattgaaagccttaaaaccaacgggaaataggataaactgcccacgattatacggctccaagaatcatgggccatgtgactaaatcaaaacaagaaaaacaaacttatcacggagtactgttagtaacacgtccttaaaaacagatatagggtccccactctccaaaacttaaaga

SEQ ID NO: 91040 - DNA, 351 bp, Glycine max
agaattgttcaaatatcattaatcttgatttatttttcttttattagatgctcctggcatacataatgcacattgcacactagtaattttagcagcataagatcacagtcccacatatcagaaacattcttgaatcagtttgttttacatgcataggctaaaaggcactgctaatttaccatccttttaagctatcttataatgataaatctgaatattctccacatttagtttcttgaaattgctgccctttctacggacaagaaacttgccccaattgtatggcctatattttgcagggttttggtcatttgtcaactcctccaaaggcttgacttcagtgtagtgtgc

SEQ ID NO: 91041 - DNA, 203 bp, Glycine max
aaaaagaaggcacccttggccaaaagttaattaaaggaaacattaacgaaagaaaaccccccaaattgtccttccagggaattccccttggaaaacctaaaaaatcaagggttcttaattccacccctgaaaaaaaaaaaacgccccctaagcatgtggggatgcaaatgccaaaaggggaaaattcccaagaaaggaaaacc

SEQ ID NO: 91042 - DNA, 528 bp, Glycine max
tggctgattcggttcggttaaccaaccgggtttcgtagtatgcgcgcctcgttgttggtgggccccccccccccccccaccccacctttaaaattatgaaaacgcagcccacccgcccttccagatagcctgatcaaacacacaaaagagccgatagcacaggggtgaacagcaaaacacacaaaagcactgactcgcatgataaacaaccccccacgcttcagactcccagcgcaattagcgctgccacctactacgcggcgtacaatacgctgatgccggctaagctcctatactgcgctctgagcacgccgccgcagttctacaggaaaccggcggcgaatggggacgagaacgcgaaggtcacgaatctaacgatgcggaatatgctctaactcctagcgtggacctagcccatatcgacggtacatatgaatccttccgcccagaacccctgagaggccgcgcagctcgcgcttcccatgatgagattaaagctcaattgtaacctaggtcttgctctatgca

SEQ ID NO: 91043 - DNA, 273 bp, Glycine max
ggggggaaaattggggaacctttttaaaaaacccttttgtttttttggccaggaagggaatgggggaaaaatttattagggattcccaaattttctggttctacttggataaaacaggggaaattactcggttaaaggaaggaaggaaggaaaaaagggattgaagttgaaaacaatgggacttggtaaaggctaagggtaactaactataactttaaggaccagggggaaaaatatagggccccccgcccccgttgaggggaaattggaggg

SEQ ID NO: 91044 - DNA, 180 bp, Glycine max
ccatgacaaggccgaaattcaataattaaatgatcgcaaaataacagatttgtgtattgctcggaagtgcaataataaagggattgcattatagcaagcaactaaatacagtgaaaacgtttaagtagaaataactaacagaatgattttggaatctatttttttttcagtaaataggaa

SEQ ID NO: 91045 - DNA, 286 bp, Glycine max
  unsure (1)..(286): unsure at all n locations
tttntttttttttttccacccancctatacttttttttttncccccccccccaccggatgaaaccgtttgaggcaattcaaaattggggccaccattgcctaacatgagtgcctttctctaccctttaactataatgcatttacaattgggttttatatcatctgggtagctatccccctgagccaaaaaaacatcctacacataatctggcttctaatttgctgctgaactcactaacggttgcttggggggaattcccaaaacatttaataatttattgcctaa

SEQ ID NO: 91046 - DNA, 490 bp, Glycine max
cttcagtggctgattcaggttcggttaaccaaccgggtttcgtagtatgcgagcatcgttgttggtgggccccccccccccccccataaggcgaagcgacggacccgcaaaaccccacgaaaaccaaaaaaaaccaaccaacctcacccaagatcggagcgacccgcgcagcaccccttcggccctacacccccgtcgtcgacgacgacgacgtcactcacttaacgaaagccttcaacatgtaccgcgcctgaagctcacccagctctaacaaacgttccgtccgtccgtccgtccgtggcgatcttgatcaacaacctgatctattcggagttcagataaaggcatttgccggacgtaagctgtctcatgaataatgcccgtggttattgggttcctcttgttggtactgttcttcagtggtgtcagtgaagtaacgctcttattctctgttgtacgcttagttatatctagcttgtgcttagtagtg

SEQ ID NO: 91047 - DNA, 204 bp, Glycine max
gaaaagacattatttattaattagcatcgtgaacatcacccatattacgtaaatcttaccataaatacaatattaacaaacaaacacaattaataaacaatcaccgtaaaataaacataagcttacggtaagtatatgagatatcaaaagtaaaagtacaatcagattgagcacacatcatttagatagagatcatgttgggaa

SEQ ID NO: 91048 - DNA, 161 bp, Glycine max
gtatagcaaagctagttttttcgatgttaaaccacagagtaattgattacaaaggggtaaattgatctcacatatgcacagtaactacaagacatgaagagtcaagtaccataaaaaaagggaatgcatgaacacaaaggtttatatattatgaggggatg

SEQ ID NO: 91049 - DNA, 164 bp, Glycine max
  unsure (1)..(164): unsure at all n locations
gatataaagttcacaaattctttaaacgttaacatatttaaattaagaatttggttcataacnacatagcatgaacaactacacaacgtaactaaaagaatgaaacatggtgattagtgaatgagcacagttcaaactaatttatttaataattggacccatgg

SEQ ID NO: 91050 - DNA, 527 bp, Glycine max
gcaacagtgcgagcacatttaaatgcttcagtggctgattcaggttcggttaaccaaccgggtttcgtagtatgcgagcatcgttgttggtgggccccccccaccccccccccccccccccccccaactagtttaccgcgggaaaaacacactcaacacacaacataataaaaaggaaaaaataaaaaaaaacaccactaaaagacagcgctgaaagtggggaaacacgaggagtaacaccagacgggaaccaaaaaaaaaacgacgaggcaaaacaatataaaggcgaaggcgaagcgagagcctggcggtatattaacgcggatcccgccgcactcatttctaatgacgctaccgccgatggaaataccggaagactgcctccaggcgatcctcacgacggaaacaacagccctgccctgccttccccctcggaaggtctgaatgaaagagataatgaccttcttgaataacaccggcctatacttgagcagcaagcacgcgaaagactcggcgacgctacgctc

SEQ ID NO: 91051 - DNA, 510 bp, Glycine max
gcaacagtagcgagcacatttaaatgcttcagtggctgattcaggttcggttaaccaaccgggtttcgtagtatgcgagcatcgttgttggtgggccccccccccccccccccccccatacagaaactatcataagaacacaaccaaccaagccgcctagcctcgaccccgacactacgaacaatacacacagaatcggccataagccgaggaagacctccagcctccaagccgttaaaactagacctataagtaaagaaaagacctcccaattacaacgagatccaagaaatccaatgtgcgcgccacccggactggaccgaagtgcctagaagaaaaattcgattataaaagaaacgaaatatcgcaggttgacgacgaaaatgacttacactaaagatatagaaagaaccagactgaactcccgcaaacctcctgccgcactgcgccctgcgaagacactaaggctgaatcggatattctggaataaggtcaaggcccggggaccga

SEQ ID NO: 91052 - DNA, 291 bp, Glycine max
tttatttttttttttttttttttttttttttgaatgtatcccccgacccttgggcaaacggagattattcatctccttccatggaatggctcatacaaaattataaccaatgacattcatctatctgtccttacagctataattgaataattgagctaacatccaacatctactaaatttcctcttcatcactctcccccccaaatatggaagccattttcatggccagctttgcagccatatcccttctttgaaaatcaagcatcaatcgcaagcctgcacgcatattcc

SEQ ID NO: 91053 - DNA, 197 bp, Glycine max
aaacaccgtaatctatttatttttgggttcaaattcatggacataaagaaacctagaagaattaaacccacctcatacaagtgtgaatgaagatatatacggtttaaaaccccccgtaaaagtgaattgaccgagggaacaaccgtctaatcctttattgaaaagaaaaaatgagtggtataagaagatacataatt

SEQ ID NO: 91054 - DNA, 443 bp, Glycine max
aatgcgttaccgttgcgataaacgctaacctacaccctctacttagctagacacgcttaccctacgaccaaggatacctatagggcgaaccggaatcacttaatgatttccggacctgccgccccgaacaaatactagaccgactacatccgcgcaaattccccttataatcaccgcaaacgaatctcctaatctgagagccccaaagatttctaatacgtatatcctaaacgacctttctaacaccacatgaattattaatctgacggaccctactactcctactctccggtcccagcaactagcttcttaagggcctaccgaccaccacgagatttcaattatcacacggcatctcctaatcgttagaactcttgaagatcggcctacggaaagacagcaaacgaccctactacaaactacacctaacacctgacttattc

SEQ ID NO: 91055 - DNA, 265 bp, Glycine max
caagcaggaatagaagacacatcaacgtgaaacattcacgttaaaaacttcatggtgaaaattccaaaacatttacattaataaataatccattaaggatcagtacgtcaataacaaagcaattttgagattggtacatgaaccactatacataatttgtttgatgtaaaggatgatcacaactaggcaacggcaggcactaacaaccagtttttggaggagatgggtccgtttgttgtacagaccatggaggcagattgttgtg

SEQ ID NO: 91056 - DNA, 167 bp, Glycine max
cggctcagcggctcgagcggctcgagcggctcgggcgagttatatagagatcatggaaaaagttggtgtagggctggtggtattgctgtgatacattgagacagcggcgatggcccaacactgcgggcgacaagctggtggcctgacatgtggcctcaacctatgct

SEQ ID NO: 91057 - DNA, 102 bp, Glycine max
gggattgtaatggcattaaataggggaagaaatccaaaatcccgaaccccacttattggtgattacttagggaaagaccaagatcgatgtttattaattaag

SEQ ID NO: 91058 - DNA, 372 bp, Glycine max
aaatccttttcaattgcttcttcacctgctctcccgacctctagttgttgtacttgggaaagctgtttgtagatgcttctttgatagactcttgagaaggcactgctgatggaacagttccttctctttaagatgtaataccgacctccgcgggcgcaataagctggaaatgagacctgcttttgatcttgttcttgttattattgttctaaatctgtcgcaacctccgtgtggagtcacgacaagcacccaggatatgaagagtttctttagcctaagtggtctatctgccacctgcgaagcctttagtgctggaaaggccagcgccttgtgagaaacacttgcttagctgcccgctcttggggtccttag

SEQ ID NO: 91059 - DNA, 469 bp, Glycine max
atgcttcagtggctgattcaggttcggttaaccaaccgggtttcgtagtatgcgagcatcgttgttggtggcccccccccccccccccccccccccccccccccccccccccccccccccttaccccaactcgaccaacaattacaatacacagaaaacgggtaaggggagccacctactaccagccattcaaataggagtacgtactcccaccaaccaattatgcatgacgtattacactcttatcaaaccattcccatcaatcctgacacctcctgaagcaaccaacggggagatcctagaaagctacatccaagaactatactggggctcctacacggcgccggacgctctcgcacggtacctaagagcgggagtcggaaacgcaagggcggtcctgctgagctacgaagaaccgcgagaaccactccgtgcgggtcgggctcaccgtcgagggttattgaccccg

SEQ ID NO: 91060 - DNA, 233 bp, Glycine max
agcatcagtaaagaagagttttcattgaacatcatttttgacaaccacattaaatgattgttgtctaaatggataaattgcaagttagaatttgcaaatgatggaacatgactaagctaaattattttgggagagatctaaatgcattagatttctaggtcgtgccaatcgtattggaatggatcgtcaaaatggttattggacatataaagcccatgcaccattgagaattt

SEQ ID NO: 91061 - DNA, 254 bp, Glycine max
aaaacctacaacataatttcaaccatgtaattgggtttaaatttgatacgttttgtttataaattaaaacccaccaacaattaagcatatttatcattaatcaggagtacagcattcaggctaagtacaatagccaaggaaactaaatccgtattaacattggatgtcagaaacatgtataaatctacaacaagcagatcacgttggtgaaaaatgtacaaaattgaagggataaaacaaaacaaagggttttt

SEQ ID NO: 91062 - DNA, 604 bp, Glycine max
atgcttcagtggctgattcaggttcggttaaccaaccgggtttcgtagtatgcgagcatcgttgttggtggcccccccccccccccaaggacccgaaaaggcgagaagacagacccggaaggactcaacctttccccaaaccctacacgcccctcccacaaaccaaaaggggcggaagaaccaatgacacccactgccaacgattatcagatgaccgattcgaatcagaacatggaattaaacgaaaccggcaccaagaccttactcggtaaatgctcagcaaaccgagaacgaatgatacagaagccttctaaaaactcaggaaaacctaaatttacgaaaatgaaaacgaaatttccccctcgcgcgaacgcctccgccttttctcatgacgaccctcctgacggaccttccgatgccgctgggggccgccaggcccgccgccgcccggaggtggcccgccgccctcgccctctgggaactgcatggagtggcctacccgtttacgacgcacctccccttctttgctgaagcggcttatctatctatagtcaagagtacgctacggacctttgaccatgaatagatctaaccctacactctg

SEQ ID NO: 91063 - DNA, 279 bp, Glycine max
  unsure (1)..(279): unsure at all n locations
aacataggaaagtgcgtcatattatatacattcacatttatcacattttcacatttcaccggaaaccagaaggataaatattcacacaaataacatatcgcgcgttattttatgggtgaaatatcatagcgttaatttgaagagtaggcactcaacattacatgtcaacattgagggaaattgttgcattgaagtcatcaataacacattcgtcatccatttttgtaccaaaccaaatgggtcatcattttgtttgttgggattgacnaaccaaaatgt

SEQ ID NO: 91064 - DNA, 388 bp, Glycine max
aatacacctcttattacggcgtcattgcccgcctgcgtagacacctaagtctaagagcgcaacccccaaaccttatcaaacccaaaaggcgaaaacccgaaaccaggacaacctttcagggcccctcccattcccctaacctgttgctgggtcaacccacaacgctcaactatgaaagcgcccattacgacacgggaacccggtccgtacaccaaccgatgacttcctctccccccgcaggcagcaccggcgcgacccaacactaatatttgggatcccccttgcggaaacctcactaaagtagcactaagcacagctcaattactctggggcttatcaacaacagtacccgccccgacttgagcaaaaaaaaaaaaaaattttgttg

SEQ ID NO: 91065 - DNA, 379 bp, Glycine max
agaatgaccccaacacaggtgtatttatttagactaatacataatattggacccatacaatcacaaaatacgatgaaaaagcttgttatggggggtagtggttagggtaagattgcgatcatcgatcgtagcccgacttgaatttcgcataaaggttgaagtattgtgatttagaccaccaatagttgaaatagcgcaaaatcatacaccaagaaattgtctctagcttcaataatctatggtgctatcgtataactcagtacataaattggctgaagggggttagatagaagtgagatagatctgaagaatatcatttccttttcgtggcattctatcgacacaaggctttgttgttcccatttacatgtcgtgtgta

SEQ ID NO: 91066 - DNA, 373 bp, Glycine max
ccacccataaaatgaaaaccttctaataccctgctgaccttctgcttacacctcttttttcggcagcacttgatcgacctgagccaatctgggacggacctaatcctgctcctcctacacgcgcaaacgggtgacctgatggcttaagatctaggatgccggcacgcactaaggcttggcctacttctcctctaatgaactggtcttgaataaggcgccgccgatgagctactcctaaaatgactcgccctattgctagacatctccctcgcgctcgaagaggggaagggaaagcgatttcgccttatgcttcaaatgatgataccctagacacctttatatgtgaggtgagctacctgctactcccgtaatc

SEQ ID NO: 91067 - DNA, 579 bp, Glycine max
atgcttcagtggctgattcaggttcggttaaccaaccgggtttcgtagtatgcgagcatcgttgttggtgggccccccccccccccccccccaacgaaagaaaagaatcccgggcatcagaccgacaaaataccttatcagaaatcaagacataagacaaagggcgggacccgggagaacccacaggggacccactcgaggaagcaccactataaatccaatgattaaaataaaaagcgccagaaaaaacaacaaataaccaaagctagctggcgaagaccctagcttcacctgatctcagcctacgaactacgcaccccagtggaaatgattgactcgccctatggacttacggatcttgccaggaacctatcaaagcactaatggaacgcgagtgaagccacgatgacggagaactcccgctggacgaaaaagaaactgcttccccctgactcctcgaaacacggcgcttcatcgtatatcgcctaagcgacgggagcgttccataactgaaattggactctgacggccctcctgccgacattgacgggaaagaagagctaggccgccgagatcatc

SEQ ID NO: 91068 - DNA, 336 bp, Glycine max
  unsure (1)..(336): unsure at all n locations
cgacgtagaccgcaagggtatcgtaccggaccctgaataatcagtagaaacagtagtcgtacaatgaggtgtnctgcaactcgcgcttgtagtactggccctggatagcgcagtggcggtcgtagtggtagacgtattgggcagccgataaatgataaatctgccggaattataaattcaattgacgatgctcatgtacgaactgatataccgtcgtcagcaattgcgttcctgcttattattccgggaatcctgatataccatgctctaaaagattcaaatatttgcccgacgagaataaccctgctgggtcaactacccttccgcctgacctgg

SEQ ID NO: 91069 - DNA, 504 bp, Glycine max
atgcttcagtggctgattcaggttcggttaaccaaccgggtttcgtagtatgcgagcatcgttgttggtgggcccccccccccccccccccccccccggcaaccgacgatgtcgaacccacaacagcacaagacacaggaaaagaatctcacaaaacaatgatgaagcacccaagacagagacagcaacttcacgctagactagctgacagagaccagagattagctgccacaaatgagaatttgagtggcgcgaatcgtgattaaaccccgagaacttcataaacaaaacaataaaacgataatactcggcgaaaacagaattgaaaggaccgtaagacggacgatggccctcagagacgacccgcccatcagtcctcacaatcattgttgaaccgggaaatccactacgaagaaaagaacacgaacagataatcccgtagcttacgtaatgcttccgagctctcgcccaatcgcaagaccctcaccgccaattcgatattac

SEQ ID NO: 91070 - DNA, 492 bp, Glycine max
aatgattgaaggtaacatttgaatacttcataggatattcatgataacatttgcttgtgcgctggtggtaaaaggatctcttaacttataaagtattcgtataaacgtgcagtttgcagtgatgtttgtttctgaaattttgccccgagtctagatgagaaatcggttaaatccaaatggttttgctctgtaagtcttttatctgttgcactacctgtaacagactagtttgtctttttggaatggttgaggcttgaagcacatttgtctattctctgagtgttagtgacacaaagtggctgttttgctgcatattgttcatactaattggagaaagaccagagaccagctagtgttagatagtttagaagttcaataaaaagaattatcactggctactaaacaacatgttagtcttccttgagttccaactaaacatataagaacatcgttctaattgtacatttcaaaatgttaatgaacatttttttt

SEQ ID NO: 91071 - DNA, 465 bp, Glycine max
  unsure (1)..(465): unsure at all n locations
aatgcgttaaccgttgcgtattaagggcttctgctcacccccggttcctgaatcgagaaatcaaanttccgacgagcaanatggtganncacgatcttaaaggctacagngtannccttcttcccttcacagaangcaanacggcgantccganncttatcacgtaggcgaaacatcccgcnncctccatatgcnnttaactacttatatcttgcagccacgannncccacgcaccgcnncactaagtatgaccgaanntacttcagccctatggatcgatctaccgcgcaggatgcaccgctctgagcacagacggcttagcacccctcagactaatatcagactagacggaggctttagacaacctgatatatagctttcccgactccttcccccttatacccatctcttaccggcccgagccccatgacagattttcttcttgcgcctactaagatctctta

SEQ ID NO: 91072 - DNA, 599 bp, Glycine max
tcgcaacagtagcgagcacatttaaatgcttcagtggctgattcaggttcggttaaccaaccgggtttcgtagtatgcgagcatcgttgttggtgggcccccccccccccccagctttgccaaatctggaccaatcccaaatatgacacgaactcaaaaacccgaccggaagacgaaacactaaaccaaagctttaagactagagctccagcccctacaatggcattatgccctaggactggaccgcgacgcaaaaagaaacaaaagaatcaaaaaatatccttggccctaaaaagtaattggctgattgctgatgacaacctacagagaaaattatacttcaatacaaatcggcctaaagagcgcggcctgatgcagacttccgaacattaaactacggaatacctaaaggagaataaggaacccagaggaaatctgccaacaggacgttgaatactaattaccgacttctaatgggcccccctccccggccgccaacaaagacaattgaacaccgcggacttaagaatcccggaacagcgttgggacacgcgcgcacagccgcgctgagaagtatgccgacgggccgcgcgcggata

SEQ ID NO: 91073 - DNA, 402 bp, Glycine max
gcttcagtggctgattcaggttcggttaaccaaccgggtttcgtagtatgcgagcatcgttgttggtgggcccccccccccccccccccttcgaattcacggacgcgacccgtcagaataatgaaccaccgattggcgaagcgctaataaggcctctaaagctaactgagctcgagcgggactcccgagaagccgacattgatcgcgaaaacgggggaccatcctgcacactgtctcgaacttggaattggactaaactgactgaactccaatgagggggtactaatataacgataagcttaagctgacgcgataatgacacggaatttgccgaattctctgatggacttggcctccgacattcttctttggagacgcgaacacgccaacacgcctctgctt

SEQ ID NO: 91074 - DNA, 449 bp, Glycine max
caatgcgttaaccgttgcgtataatcgacccggccaccttaatgatccgcatcaactgcggctcatactccttattccccgacaactaacccttaagcatcataaacggctgcggcgaaatccccgacaacaacgctagcgaaagctgaatattatccgagatcaagcagcgcgaaatacggagcggaagccccatttcccgccgcatgccagtccctttagtctcttgaggccgctactacttacctgacacttctcggtaaatccagcgccgcatagatggaattggacctaggaggtccttgcttgataagaacaacataaacttaattcgaataacaggcatctagatacacgttcgaccttactactatttcccgactacctcctacgtgagccgagctcacttaggcattaacactgcctacgtagacatatagactattact

SEQ ID NO: 91075 - DNA, 544 bp, Glycine max
atgcttcagtggctgattcaggttcggttaaccaaccgggtttcgtagtatgcgagcatcgttgttggtgggcccccccccccccccaccaaataatgatgaaatagggataacaaaagtaaaggaaagaaaagcaacgtcggaagaccattccgcggttcgagaacaagagcaacaggacctggaaataaatccttaaaagaccttgccagctaagcacacttcgcaaacggataccgaaccgcgataggggataaataaagcaaagagctcggcccaaactagagcacaaaacatgcaagatagggccgaggacctcggaactctacaaataattaagaagcgcagcgcccgccttctcatctcgtgagaagaaattggaatgggaatacgattatatttaggattaagctgaaaacgcctacgagaaaccgcttatcgccacgattacctcagctatgcctgctattcttatcccggtacgctaatggaccgcgccaacgagatatataatttccccaccggtgcggccgtcatacatata

SEQ ID NO: 91076 - DNA, 524 bp, Glycine max
atgcttcagtggctgattcaggttcggttaaccaaccgggtttcgtagtatgcgagcatcgttgttggtggcccccccccccccccctctagaacaccttaatccgccaacagctcccgacacctactcctacttctgataaaacacaagacatcaaatggataaacagggtacctgaatgaagcaaataccaccacacttgctacggcacaaccgacgcaaagctaaaggtgaccataatgccgagatagcccaaccctcgagggccccgacgacagatatttagctacgttaacggataccccatgcgctatagattgaaagagtcgctcggaggaaatcgacggcccctagcgcctcgaccgcgcgtaagccgcactgttataaatggatgcgcttaagatcgaaatttaaacgaaagctccgacgggatagattaaaggatccaccctaaaccagagactccccgccgccttggacacgatgcttaagcggaagaacagaaaggccaagtcaaaatcgtt

SEQ ID NO: 91077 - DNA, 492 bp, Glycine max
gtggctgattcaggttcggttaaccaaccgggtttcgtagtatgcgagcatcgttgttggtggccccccccccccccctgagagctccccacccacccacccacagactgaaaatcatcgaaaacaacctagacagcctcgcagacgaaaatcctagtattaaaatcaaaggctgtcagcatgcatgctcgggactcagagccccacccaaaaacctaaagacaaaaaaacgcctaaagtaatgatgcaacataacggaccacccacacacaagaacaaagcagcacacagagacagaactcaccgcatcccatcggggcaaaagagtatgaatccaccgctttctcgtcatgggaagccgcggaaaccgttgcttagctgaaacctaacgacattcttcttcggagaatcgaactggaattcacgattatactgacccttaacactgcggtcgattacagcccgatctactaacgggagagctcaccggga

SEQ ID NO: 91078 - DNA, 320 bp, Glycine max
  unsure (1)..(320): unsure at all n locations
ttttttttttttttttnncttttttttttcttttcccccgcctcaccttaaaaggggcgggccacccattattgtatttacaaacaccaacaccgggttaacaagacacttggcttttattcgatgtttacaaccttttgttaaacaggaaacacgggttttttttgaatacccatcgaggggtggggaatattgagtaaccatatatctttaaatcagtttttactaggcaccgaaatacaagaaggatacataacggaacatttatatgggaaccacactattggaggtttggtacatttttcacaatatcacaagcc

SEQ ID NO: 91079 - DNA, 590 bp, Glycine max
gcccccccccccccccctaacaaaactctggcgagcctctaaaaaaattacctccgctcccccggccctaccctcagggaccgtctcgctgcgaatgatcataaacaaagcctcggaagcatatcgcatagggagaaacacgactgaatctggcaacgaaacatgattggtcaacagcaaaagtctcatagagcgctaagggaagaaaggagaaatgacatgccaccctgtagtcgccctttccactctgtccactcgctttcctggcccggcgacgacttgcagaaagcgacgacatccaaccgccggacgacctcgctcacgaagccgatgaactacgcggcccacctccccgcgacgagggacacacacccgccaatttgataccggaagcgccggacctctactcagggtgcgccacgacctcgaaaacaccgaaattgcccacacattctacggcgcgcccggaccgcaccgactctgacttcatgatccacaaaccgaactcaacgaacttccggacccggacgcagacgatggtgccggacgaagctggcaagccgataccgttaaatcccatcagggaaccc

SEQ ID NO: 91080 - DNA, 360 bp, Glycine max
  unsure (1)..(360): unsure at all n locations
cccgccccctgtgacgccggctcgcgcaagacgcgatatacgggctacgcctactaataccagattaattcaactaattacccctggtcttaagcttataaagcttgttagcatccgcctatcctgctctctaaacgcctttganataaatttcacgctaataattctccgctctttcgaaatttaggaaaccccttaagaaaatctatgaagcagggcggactcggtaatggatatgctacaacattttgctatatgggagagatactgcttcttgacgaccgcagcgccggaatacgagaattcgatcttacctgatgcggcgaattactgggagcttacctactcggggggaactgt

SEQ ID NO: 91081 - DNA, 318 bp, Glycine max
tcagtggctgattcaggttcggttaaccaaccgggtttcgtagtatgcgagcatcgttgttggtgggccccccccccccccccacaaaacatgcaatacgtttccagcccgcaacaaaataatctgacgaacagactggaggaagccaaggacgagacagaccagagaaacaaagcacgacacgaatgcaactgcccaccccctaagcacacaccactgcagatactgctgacaagttatgacggacatgaaacaaatacatgatcaacgccatcaaagacacaccacaccacaaccaacacaactgccgaacgctat

SEQ ID NO: 91082 - DNA, 226 bp, Glycine max
gtgggtgggcccaccccccccccccccccgagcgcttcattgaccgacggggcttagaagtacaataaacatcactaagacatacttgcctccattgacgaagcactttcgcgtttttctcataacactctttcgcctgagactctcctaccataggatcgggcagaccgcgcggtcggcgcggcgcgcggggccggtggccgcggtagtgggaggagggcgagtg

SEQ ID NO: 91083 - DNA, 99 bp, Glycine max
aatcttacctccaagaaatggaaggaaggatcaaaatgactgaacagaaacagaaacaaatgatgaatttcttggtcagggcaatgcataatccaaatt

SEQ ID NO: 91084 - DNA, 409 bp, Glycine max
  unsure (1)..(409): unsure at all n locations
ggaattattaattgattagaatgtaatttattctatgatctgattgccataatttttgtacagaaaagtaagaaaaagagagtaagttctaattggggggtaagggtaagggtaagaagcagatccatgaagaaagcagaagcagcaaccagttttccagatgaggtccaatgctatggatccaaataacttacaacaacacaaccttccatccatccatccatccatctccatgcctatattataatattactctacaacaccataacacaatctaacaacttcaattaattaaaccagagatagtcaacaacaacaacaacaacaacaagaagaaaattatgattataccgagaagaggctctttttcatcagaggcacagcgcggtggcggngacgtcgtcgtcgt

SEQ ID NO: 91085 - DNA, 306 bp, Glycine max
ttcggttaaccatccgggtttcgtagtatgcgtgcatcgttgttggtgggcccccccccccccccacaaccaacgcccccggcctggaactcgcacacccctctgaccacgaacctattggaaaacccagacactaccccctataaacctaataccgacgcaccgaagcaagagaaaggcgaaactcgtagccccacctcgccatacagcaatacaaaagcgaaaccaagaacaaaaacagcaaataaagatcagccaaacccatccgacacagaaaaatatcctgggcctcagtttgacgaacga

SEQ ID NO: 91086 - DNA, 202 bp, Glycine max
ggtgtagacaaattgataagacgccagcttagcgcaagccggattgggacacgtgctagccctttgcttgggtcatacgtagaagagcgttagggagtctcggagtgatccgtgtttaagaactttgcagactggtggttatcagacataatttcggaactcttgaagagtaattcttactctcacatccctttcccctact

SEQ ID NO: 91087 - DNA, 325 bp, Glycine max
ggctgattcaggttcggttaaccaccgggtttcgtagtatgcgagcatcgttgttggtgggcccccccccccccccaatatcgaaaaacacaccccaacgcccgcaacaccgagactcgactcacggcgagagaagcgccctgcctagcagaactctggtcacaacccaacgacgggcccgagaaacaaagaatgtaactattgtacgactacagctctagcgaagcaacaactattctaaatcctacacttcaaaaagcaaaaagttacctcgaagaaccaacaacataggaaactaccaaggagctacaccattttcatcaga

SEQ ID NO: 91088 - DNA, 274 bp, Glycine max
ttcggttaacaaccgggtttcgtagtatgcgagcatcgttgttggtgggcccccccccccccccaaattatagaaccatcgaacgaacgagctacagtaaaacgatgaactcagctaccctaaatcaaccagagccggaaaaagaaccggctaagctaaccggcggagccgaggaggcactgagaataaagaactgggaaaggaacaccggaaagaatccaaaaaaaaaaagctcaaaaggaacacgatcagggtatgagcactggagaaaaag

SEQ ID NO: 91089 - DNA, 320 bp, Glycine max
ggtttcgtagtatgcgagcatcgttgttggtgggccccccccccccccccatttaaatactggacagacaccacacaaaggacgatcgatgaaccaaagctccgaaagctacaatgcagccagataaaaataacactactgcgaaaacaactactcggaaaaaggcaggcgtagataagaaggaaggaccgggccgggggatacctaaactaaagctgcttcgagggcaagatacccggcgggaatcgccaatggaacggacccccgcgcgagggactgcatacgggaaaacacaaaacacgaacgccgaaacgaaaaca

SEQ ID NO: 91090 - DNA, 322 bp, Glycine max
aaaaaaaaattttgcccccaaacaagggggtttattaatcccttcggggttcaaaggggaataaaaacaataaggggttaaaggcccaaagggttttttcccggggctaaaaaggcccccaaagaaaaccctttccgttttgggaaaacccgattttttttcccaggggccgaataataaagccccttaggggaactccttttcctaattttccccattccagccttttaggggtggtctgggggaaccacaggcactagttttcccgaattttggggggacaacaaaaccccccttttcaggcccttggggggtccttttt

SEQ ID NO: 91091 - DNA, 327 bp, Glycine max
ttcggttaaccaaccgggtttcgtagtatgcgtgcattcgttgttggtgggccccccccccctccccgcccctgaagaagccaaaataagaaccagaatcaatgatggttttatatattataaaaaaaaacccgaaacgaaaagaatggacattgggaataacgctaacggactacgagcgcctttcagctacctacattatggcgaaagagcctgcccgctcgaggacgaggacgacgacgaccaacaatgaaaccggaagccgcaacaaatcgacgacgggagaattggactgctgcacctccaccacctcgaaaaccatcacga

SEQ ID NO: 91092 - DNA, 329 bp, Glycine max
caggttcggtttcccaaccgggtttcgtagtatgcgagcatcgttgttggtgggcccccccccccccccccccccccccccccaactataaacatgaatgatcaaggaccaaccaaaaacaccaaagaagaaaatattgctacagaaagacagagaccaactctagcaaatcaaagctcaaaatcgaaacaaacaccagccaaataagaagataacgactatcagggtgcaacgagccgattttcgaaagcaaactcctgagaagaagaaagcaaaacatagatatcgacccgagggcgataaaaacgatcaggagcagccggcaaggt

SEQ ID NO: 91093 - DNA, 404 bp, Glycine max
ttcggttaatccagccgggtttcgtagtgtgcgagcatcgttgttggtgggcccccccccccccccaaatagtaatacgtctcaaccacacgagtccgagttcccatccagactataccagaaagtaaaacaacccctctcccaatcaactagttctttgcctcgagtcggtattcaccggcctatgccttcaaagcgaatatggtgacgtacgaatttgcttattgggcggtgatcacggccgcctaacctgtagtttcgccctgctcaggcgcgtacacagagagtcagatcgtgtgggctatacggttccggtgcgaaggttaatagaagtgtataaggacgccgtaatattagaactctaggcctaccgcctgcaagtgctggtcgaacgtttcgttctc

SEQ ID NO: 91094 - DNA, 585 bp, Glycine max
atgcttcagtggctgattcaggttcggttaaccaaccgggtttcgtagtatgcgagcatcgttgttggtggcccccccccccccccctttcgaaaccccgccccctccgacacaacgacactctattaccgagacaaaaggggaattcatattttctacctcgccgatagaacagaaactccaaaagacccgcagaaccctgacgataaacaataaccgaactcgaaaccagacgggtatgccgacgaaaatcaacgctgacccgacacccgcggacgggagaaccgccgaataccccctcaattagcagaatcccgacttagatgataccgacccgtaatcaaggccctgcttctaacgctctacaacccctatatcatgcgattattaactgaggaacgaaacaaagcaattccgcggcctacggcataccgacccagagcccccttaataagagctctaggagcccttatcgggggaagtgaactggagcctgtgcttatagcctctaatgccccgatgaacccggccgaagatcttccggccgaatagcctggggcccagggactagggattatatggcaa

SEQ ID NO: 91095 - DNA, 333 bp, Glycine max
ggcccccccccccccccgaatagaacccgaacaccgaacaagcgtgaacttgaccaccggcgaagctaaaagacaacacgtacagagcggggattaaaagcaacgcgcaacaaagataattcaagttattctgtgtccatttcacgacaaaagaacgggaaacacaccaagcgaatcccacttacggacactctacgaatccagctctcggcgaccgctgcagcgcgatgctgggccaggctatatcaacacttactctggacctgccgcgcatgctccatggctcggcttctacgacacgtaattttgccacgaataaaacgaacctggcga

SEQ ID NO: 91096 - DNA, 305 bp, Glycine max
tggctgattcggttcggttaacaaccgggtttcgtagtttgcgtgcttcgttgttggtgggcccccccccccccccaaaagacccaccacccatacacaaatcttcatatactgacccaccaacaaccataatgacgagcctgtcagcatcagtcatcagaccttattcgttctgaaaccaaagcaaccaaaaggacacacactcaactatacagggccaaccaccgctatcaacgatgaggtatcccactacggagctcccgaacctaaagctatccttcacccattctaccctcgattggcta

SEQ ID NO: 91097 - DNA, 310 bp, Glycine max
ttcggttataccaaccgggtttcgtagtatgcgtgcatcgttgttggtgggcccccccccccccccccccataaacgaacgccagaaacaccccgacgacccccaatactccgacgaaagattctagtagcaaagatcgcccaggacaattcccggccagagccaccgcacaacagctattctcggggatagggccaaaactctttaacaaggggggagcacttgcaggacactgcaggactatacaagctcccagacacctgaccctcgacaacctacaacccaaaaactagacctcacagcgggatac

SEQ ID NO: 91098 - DNA, 350 bp, Glycine max
ttcggttaaccaccgggtttcgtagtatgcgagcatcgttgttggtgggcccccccccccccccccccccccccccccccccccccccccccccccccccccccccccccccccccctataagagcaagccctaatgctgatacaattcactagagataaccgagagagcagacagaacggattcgtcccctaactatccaaaaaaaattcaaaccattaactaattccgagacaagaccaaagatccgccaatagtacaaacttcgatgaccaacagaaccctaagcagaaggcacggtaaagaatacgcctgggcctgcacccaatccataccacggggggtaaattg

SEQ ID NO: 91099 - DNA, 385 bp, Glycine max
tggctgattcggttcggttaaccaccgggtttcgtagtatgcgtgcatcgttgttggtgggcccccccccccccccccccgaataccgcacacctcccacacaacacccacacaccaccaccaactacattaacaaaaaaaaacaagacctgagaaacaaactatcgcccaaacaagaccaactcctatacttcacataaaaccgcacccaacaactaactcaagtaacaaacaaaataaaaacaacgaacgccgaacgattataataaatcacgtattacggggaggaccgaacgggtccccctcccgaccaccataagaccaacttaaacacacccttaaaacttaaaacgccccccggaaaaaaaaaaaaaaacaaaccacc

SEQ ID NO: 91100 - DNA, 374 bp, Glycine max
ttcggttaacaaccgggtttcgtagtattgcgtgcttcgttgttggtgggccccccccccccccccctaagtaaattaaaacccacaccctaggaaaacaaaaataaattaatacccacctgaagaaaataaaaatataactgtagagcaattgagagcccaagactcaagataaagaatgccgaaagtaaattgtacggcagtccggcgaagacaagaggaccagactcaataaaaatgagtcggaaaagagaccagcagaactaaagaacatcactccaaacaggacagaggacaacaaagcatgcaaaatcccacaggaccgaagaaattactcaccatactataacgtcgatgacgaaacactgacccct

SEQ ID NO: 91101 - DNA, 312 bp, Glycine max
ttcggttaaccaccgggtttcgttgtatgcgagcatcgttgttggtgggccccccccccccccccccccccccccccccccccccttaccgataataaagatctgagcgataacccataatcatcagacccccgccttcccgcaacacaaaaaacataccaatgatctcaaaaacataacaagaaaacaagacatcaaaataaataaaaaaatcaaagtggtacgattggaactgatgatgatgatgcaaatggaccaccaccgcgagaccaggaggcagtaggtataacacggacaaaggcagaaaagatc

SEQ ID NO: 91102 - DNA, 322 bp, Glycine max
gtgggccccccccccccgcagattgtataagaacgcccgacattcgcagctgaacaccgaagagcagggggaacttgaaatgcagatcggaatcggagcccaagtaccggacagcacaaacaaaaaatagacatgttaggggaaattgccataaatcacgtccccggggctagccgctataaagccgctttaacgttcgggaaagttccaaagtagtgagtctagtcgcggtgtctggttcccgttaccgggcagatgagcagtcacgcaacgcagaactcccgaccgtatcatggtcgtggtgtctcgatcctgagagggc

SEQ ID NO: 91103 - DNA, 281 bp, Glycine max
ttcggttaaccaatccgggtttcgtagtatgcagcatcgttgttggtgggccccccccccccccccccaactttcaagactgaatcccccaccacacaccaccaccaccactcacacaagagacagcataggctggaatgccaaaacaccacccatccgcagctttggcagattaccagactctaataaaacctgatctaaagggcccccgttggaaattaagccgagactaccattttttctggaagggccccataattaaacaaaatatcggactacat

SEQ ID NO: 91104 - DNA, 342 bp, Glycine max
atgcttcgtggctgattcaggttcggttaaccaaccgggtttcgtagtatgcgagcatcgttgttggtgggcccccccccccccccgacccataacaacaccatgcgccccccaccgacttacaatgcgcatgcagagcaagaccaccatgctgctctttcggacaaccgaaccctgatacaaagccgcacgacgaagagtctgacggagtctggggcggagcggatccagagaggtaaggcctagcccttatctaaaaggcactagtgaaaccgcgcacattgacgaggcctccgcaaccccagactacatacaaatctctagacctcagcaaaaacgaaa

SEQ ID NO: 91105 - DNA, 280 bp, Glycine max
ttcggttaaccaccgggtttcgtagtatgcgagcatcgttgttggtgggcccccccccccccccccctaaaaagaatcaacgtaccccacctaaacgataacaaccaacgctactaaaggaagccctacattgacactgccacaacttcctaaattctaaaccttaaatcgagagaaagagagactaaaacagtaacagccacgaaatcactaaacgtagccatagatcgacgctgccacttcctgaattctacatcttatatggagagaaagagcctcc

SEQ ID NO: 91106 - DNA, 449 bp, Glycine max
  unsure (1)..(449): unsure at all n locations
tcaatgcgttaccgttgcgatctctagatttcgctcttccngctacatttggagatgcgcagacctctgttcctggtttttgcgctaacggcgagcctatacctcgaatgcgcctgcctactgcttttgctactggtatctggcctactggatcttaagaatggttcgaacgctacctgcggctggccctaccgccctcgaaaacgtgtaattaattggacttatactccggcgattttcttcttttaaatatagtactaagcgactatggattataccgaatatataaaataatgaaccatctacaacaataaataacagggctcctacacacgagctggatagacaaagaagttctcacacttaagatactaccccattactcagaagccgaattctaatggcctgcgaatttgccagcgggactagcttaggtatctcggaccgtc

SEQ ID NO: 91107 - DNA, 337 bp, Glycine max
tggctgattaggttcggttaacaaccgggtttcgtagtatgcgagcatcgttgttggtgggccccccccccccccccccctacaaaacttgacaacaacccccacacaaaaaataacctctgctgccaacgaacttgaaacagccctattcggagcctgcatataaaacagacggacggagggtcatataaaattttttaacaaaccacagcaccacagaacaaaacaaaacaaaaccgatgacggccgccgtccgaagtcccgcggaatcgccgggctaggcataatccttaagcgcggtccgaaacgcgcttaccaaggctaagccctccgccct

SEQ ID NO: 91108 - DNA, 246 bp, Glycine max
actcgagttgccattttgagagatagggaaaaggaccgtagcgatccagattatgatcgtaactatggaagatatgctaggagtattccaatttcttcccttaacttgatgccttttaattttgaacaagttgaacctccatttgtgcgagatggatacacacactacatgactttatcaactagtattgacatcaacattgcaaggaaagaaaaggtcatccttggcacacaatatgctggggaa

SEQ ID NO: 91109 - DNA, 376 bp, Glycine max
cgggtttcgtagtatgcgagcatcgttgttggtgggccccccccccccccctcatggctagaattggtaaaacccgaacaaccaaagtgcgtgaaaacaagataccctctcacctcgcgttaatctcgaacaacaatatttacgtcgccacatcgaatgaatgcaaacagatctaaaaggcccaatcataaacaacgaaggtaactgccccttagccgaccccccccccgtgcaaacattaaactgcgcgacgataacacattaggatgatatagaacgcgccgatcgaagccgctacggggcggcacgccttattcgtctaacggacgaaaaccgccgcctaacaatgcctgcatcccgaatgtctcacgcctac

SEQ ID NO: 91110 - DNA, 326 bp, Glycine max
ggctgattcaggttcggttaaccagccgggtttcgttgtgtgcgagcatcgttgttggtggcccccccccccccccctaacttggaaaataaaaccagagcacgatgatagaagcccagaaccaactagactatcgactagaaacaaacaaaccactaccgcgacgggaaaaaacgtaaaggcctagcagcattcagacaaaaaaaagaccaggacgagcaagcagcaagagatatttgacttcgcgagaaaaacctaggaagggaaacggtttcggtacggtaaccgcaaagagtttctttatacaacaaaaccacggcaagggg

SEQ ID NO: 91111 - DNA, 194 bp, Glycine max
aaggaaccggccttttgttttggttcatcaggggaaaaaatttatttttgtttcccccattcaaaataattaacttcctttgggccaaataaaccatttaaaaaaaaaaaatggacctcaattttgttttccatgcaggggcccttacataggggacccttttttttttttccttttcctttaaaactttttcc

SEQ ID NO: 91112 - DNA, 256 bp, Glycine max
ggggaaccctaactttgaagctgcaaataagggttgacccaaaattcacacccttcatacaatccaggtggttttgaaggggttaaaaaaaagggaaattaggaatgaggggtcccataacattaaacagattttaagaccataaaggggcagcattaatacaatttgaactacaacctatccgaaacaagatcttgcttttgctatttaaggtagattatctccctgaaaggcaacatgaagggggtggttgggg

SEQ ID NO: 91113 - DNA, 347 bp, Glycine max
ttcggttaaccaaccgggtttcgttgtatgcgtgcatcgttgttggtgggcccccccccccccccacaacaacaacaaaccccaaataccctgcgcagacagcagaagaaaacatgcggagaggctgctatgcaacaactggaaatgaaagcagagggtcagacaccgtgtacaatggcacggaaaggcgatttcccagagcgacagaacgactgacacgtccagaacaccactcccgtctgcccctagaagagccgaccctcaattacctttaatctaacaaatgaagtaaaaagacaaacgcagtcgaagaatctgaagcgattagttacattaatgcagatgcc

SEQ ID NO: 91114 - DNA, 326 bp, Glycine max
tggctgattaggttcggttaacaaccgggtttcgtagtatgcgagcatcgttgttggtgggcccccccccccccccccccctaaccagcaaacaaacaactcacaaaccaaccaacctcactgctgcgaccagacaaaccaccgaactaaaaaaacaaccagcaaactccacctccaacacgggggcgcggggcactgtttcagaaaaaaaccggaacaactcatcgatacccacacacagataaaataacgatgcagcgccacggacgattgaggaggaattgctccgaaatcgtgaaagctgaagtgaacgccaaggcgaactg

SEQ ID NO: 91115 - DNA, 393 bp, Glycine max
ttcggttaacaaccgggtttcgttgtttgcgagcattcgttgttggtgggcccccccccccccccccacgtaaaaaaaaaacattccgcccagacaaaaagaattccactcgcatcaagctagccaatcctgaaagaagatagaatccgaacaccctacagcgcatccagccccacttaaagaacatgaagcccgcaccccggacctgctaaaagaatgctaactaacaccgacgcccctaacggatatatggaaaaacaaccaacgttcaccaatattaatacctacctctctcgaatgctctgcgacgcatggaatacactactcgaggaaaaagcctatccaccacccgacgattgcgagggcgaataatctgactacattgacggcctc

SEQ ID NO: 91116 - DNA, 291 bp, Glycine max
tggctgattcggttcggttaaccatccgggtttcgtagtatgcgtgcatcgttgttggtgggccccccccccccccctctccgcctaaaaaaataaaaagccaaaacaaagaagaggaacaaggcagaccatctcctatagccgaaccacccaaggcaccggctctgcagactacatgaatgccctaaaaccccgactcaaactcaaactttttaatacaggaacccgaacttaagaaaacttaaagctaaacccctaagacaaaaacaaaataggtaatatggcggccgc

SEQ ID NO: 91117 - DNA, 312 bp, Glycine max
tggctgattcggttcggttaacaaccgggtttcgtagttgcgagcatcgttgttggtgggcccccccccccccccaaaactaggggaagagattctcacccacccatagcaacagaaaacaccttagggacagaacgagaaaacagtactaaaaatgcctccactaccggcatccaccagaagaatacctgaaggacgaacgtcaagggatgccgaacccgtgaaaaattccaaaccacctaaacccacaggaggaacataataaacatgtgaaaacgacagaggaataaacctcgcgcatgccgaacaacg

SEQ ID NO: 91118 - DNA, 436 bp, Glycine max
ttcgtagtatgcgagcatcgttgttggtgggcccccccccccccccccccccccccccttggtagaaacgatccacgcgagcaaccaaagaacctagtccagaaaaccacgcagttagaagacaatgccctattcccctactagcaattgaaacacctgatgcccgcacgagcaattccatgatggactacgaattgacgtcaactcctgctgagaaatggctaaatcagaccctccggacggcagacagtgaagactggactctattatgaatagctaacaacgaaataaaggagcaggccgaccaagccccggaacgcgacgacatacacccataggaatgaggaacatgattcatgaagctcccagcggatatgaatagcccttgcctcagaagctattgaccccactagcgatcattatgacgccgaggttt

SEQ ID NO: 91119 - DNA, 286 bp, Glycine max
ggaagagagaaaaaatcttttgcttggggaaaaaaatgattctgttttggaaaaaaccaatgaataaaccgggttagaccccttttttttaacaaaaagatctaggggctggtttggttggcacaaacttcataggggccccctttccatttgggccccccctaaaccccttttaaaaaacaaacctggaaatttttttgacaaaaatttcttttttggtttgacatcgggcccaaaagccccccccccaaaaaaggggataaaaatttaaaagcctccaagggcc

SEQ ID NO: 91120 - DNA, 325 bp, Glycine max
ttcggttaaccaaccggttttcgtagtatgcgagcatcgttgttggtgggcccccccccccccccccccccccccccccccccccccccccccccccccccccccccccccccttaatatatataaaacgcacctgccttttaacataactaccgctccacttaaaaaagaaactaacaaagatgacataagagccgacgccaagaaaaatacgcatattgctccgctcactcgagaaagccgacattcttgggggcccggacccgtcagagagacaaagaagacccaaaaaagaaagacttaaacaccacatagaaaaacccga

SEQ ID NO: 91121 - DNA, 380 bp, Glycine max
tggctgattcggttcggttaaccaccgggtttcgtagtatgcgtgcatcgttgttggtgggcccccccccccccccccccaaacaaatcaacccaccccgctgacagactagatgcgaacagaccctgatatatggtgatgaattctgagacaacaatctaactaagggagaaggctgaaatccgagagaatcgaatttgagactaaaactcccgactccttgacgccaatggaagtggacccgaatgcttgcatcaatgatttccaccggccctaataaaatattgctgattggcgagacaatataaacggccaaattttcccggaggaccctttgcttgatgcttctatcggagaagattgacacgatcggatgtgcc

SEQ ID NO: 91122 - DNA, 433 bp, Glycine max
caatccgattagatgataaatgaatttgctaaatgatacatgcgttttggcttcacagtctccggtagcaccaaatccaattcctgctgctagaaaatgaatccaatgtttgatgcaaccatgagctaatgaacaaatcctatgttgtcattcatgacacagattcacctaccctcaacttcggaccaagtaagagacattgaggaagagtgacgaatatcttggaaagttgggtgtgacgtatagctaaaatactgagaatattcagacaatatatcccttgatttcaactgttggagcaaataggtatccatattctcaatttctgagtcgtctacctcattcttcccctctaaaacattcaccacctgtctcattgtgggtctggcctttggttcagggtaggcacacaacaaacccaagtgcattaccc

SEQ ID NO: 91123 - DNA, 149 bp, Glycine max
tgttttttttttttttttttttttttttttgttttccatagataactgatgctaaataatttattgaaacactgaggtgtggtctaactacaaaaatcaacggattcaatttgtaaaccataagacatggatgacagaaacaaattacc

SEQ ID NO: 91124 - DNA, 327 bp, Glycine max
gcttcagtggctgattcaggttcggttaaccaaccgggtttcgtagtacgcgagcatcgttgttggtgggccccccccccccccccccccccccccccccccccggacatacaagctactgcaaacaacccacctaaagagctattctcttcgcaagcagaaaaacgaagttaccgaaccctcaaaggacaatagactcacaagaaaaagaaacccggctttataaggcagattcactaagcaccgagacaggggaggaggatgaacacggaggacacgaaaagcacgacgacaccgaataacataacctcactgcggcggcgcgca

SEQ ID NO: 91125 - DNA, 319 bp, Glycine max
ggaagagggagaaaatctattgcttggggaatagaatgattctgttttggaaaaaacaaatgaataaaccgctttaaacccttctttttaacaaaaagatctaggggctgttttgtttgtcacaaacttaataggggccccctttccatttggtccccccataaacaacttttaaaaaacaaacctgaaaatttttttgccaaaaatttcatttttggtatgacatcgggcccaaaagcccaccaccaaaaaaaggggataaaaatttaaaagcctccaagggccttttttggagaggttccagttgcccggggttttg

SEQ ID NO: 91126 - DNA, 400 bp, Glycine max
tggctgattcaggttcggttaacaaccgggtttcgtagtatgcgagcatcgttgttggtgggccccccccccccccctacggacacaagaaagggatcgcaccattacaattccaatcccccaccagctcacgcatgacgtatgcgccaacagaatacggcgcaaaggaaggacctctagaagcactagccggtaaaaaaactgaattaggcaccgccaaccggcctgaacaacaccctttactaaacgaaagactaaccaacctaccccagaacacaaccactctaataaaattaactcagtatagcaaccacgaaaacccgaccaaaagaccgagccgtattgagctagaagagttgtaccagaaaaatgaaccgctagacgagagaacgaccgacga

SEQ ID NO: 91127 - DNA, 440 bp, Glycine max
agggaaagatgccatacatattatataaaccatcagtcagcaattaaactgttcaaactgataagctacttacagaaaaagaatatgatgctcaaaataatgatgtccaaaaacctacctcgacagaacaaccaaccattcccttcccccagattgaaatgaaactgctggtcaccctaacagatttcctcccaagtcttaagccaatccatttttctctcacccatgctagatcccaaaatataaaatatcaatcttcaaatcaaaataaatgaaaccaaaatgcttcgtgaaatatagactcgtaatccctaacgttaagcattgacaggaggtggaggtgtttgagctggtgcaggctgattaccattattgccgccaccactactgttatttttccacggcctcacagtgaagagcaccacaaagaagatgatcac

SEQ ID NO: 91128 - DNA, 303 bp, Glycine max
tggctgattaggttcggttaaccaaccgggtttcgtagtatgcgagcatcgttgttggtgggcccccccccccccccaaaagaaaaaccgaccccgccgcaccaaacccaaataaaacttgaaaaagagaaagcccaaaaccaaacaaaacaaaataacgccccaaggctcgaccgcgcccctagctcagaattcacttcagacacgatacaccagtcgtagagcgtagatctcctctctcgactcgaggcgctgaaagcgctggtgatgtcaaaccggcggcgaacgcgatagcgaccggaa

SEQ ID NO: 91129 - DNA, 261 bp, Glycine max
tggctgattcaggttcggttaaccaccgggtttcgtagtatgcgtgcatcgttgttggtgggccccccccccccccccaccacgcgaagcgtcaatcgacccaccacccccgaaggaccgaatcattaagaccgcagagactaaattgaataccagacgagacatgtacgcccctagacaaaagagaacgccggagcgcggaaacgaagaagcgataccacccaaacacggtacgagaatatgacgcccgcggccccaaac

SEQ ID NO: 91130 - DNA, 398 bp, Glycine max
ggctgattcaggttcggttaacaaccgggtttcgtagtatgcgtgcatcgttgttggtgggccccccccccccccccagaggtagtaaaggactccagctggggaatccacgacggaacgagacatcaaccacccgatccgaaaagagacacgccaatagcaagcgacgaatcatacgctaaaaggggataattgaatgaagcacacgaaaaacgattaccccggccttcaaacgaactactagaactaccactactgataacgacccggataacaataccccccttacgaacctatccgagcgcaattctacgctaaatcccgaggatgacacctgagagccggaatccggcgccgaacggtaataatgctaccacagccctggaacgtgcgagccg

SEQ ID NO: 91131 - DNA, 195 bp, Glycine max
aaaggaaccggccttttgttttgattcatcaagggaaaaaattcatctttggttcccccattcaaaaaaaattaacttcctttgggccaaataaaccaattaaaaaaaaaaaatagaccccaatcttgttttccatgcaggggccattacaaaggggcccctcttttttttttccttttccttttaaactttttc

SEQ ID NO: 91132 - DNA, 356 bp, Glycine max
gttcggttaacaaccgggtttcgtagtttgcgagcatcgttttggtgggcccccccccccccccacacaaaaactcaacacttgataaccccaccggccttaggaactacgaaccgcgtccctactaactcatgaccatcccaagaaagacgctgaatttaacccgggaattttgcgaagaggacggagacacaattcacttcttgactccacctgcggcctaatatccgagtcggaacaacgaccgccgctacgcgagtatccggctgaggaacgcgtcatatcccttgacgcgcgaatatagtaggatcattacagcgaccgagacaaggaccgggaggcaaagacctcacctg

SEQ ID NO: 91133 - DNA, 328 bp, Glycine max
ggttcggttaacaaccgggtttcgtagatgcgagcatcgttgttggtgggccccccccccccccccaaaaaactttatttaccttaacgtcaaaaccaaataaaagaacctcttacctggagagcaaaaatcttacacgacagagaaggataacgttaacttgcgcagaaccaaatgcacacaaaacgtaaatggcacaagcaaaatatttgatatcacaatgggccaccgaccaacccaaccgcaaatacagaggcgcgcacggagaaaacccaccatccaagacgacgaatgcaaatggcgctccccgattctgcgggaggatctc

SEQ ID NO: 91134 - DNA, 201 bp, Glycine max
gtgggcccggccccccccccccccccccccccaacggaaaaatgaatactaaagacggccttacggaacaacacccgcagaatccggacttatcggaaaggatcgcaataacaccaaagaaacgcataattgacaaaagaagtacggctgctccagtaagccccgagggtcccctctttcttctgagccgacgccggccta

SEQ ID NO: 91135 - DNA, 341 bp, Glycine max
gtgggccccccccccccccccccccgtctaaaccccacaacacacactaattgaatctggagctcccaactcttgagaaaaaacaaatcctggtccccgggccagaaccccggacaaaataaacaacctacggtgcacacacacattcgtggtgagcctctgagcaggacagaagcggctacgcggtagaggactcacgattaatggaaaacacttaccgcataatattacgcaagaagctgctaattaaatactttatataaaacaacctgtagccaacagcacaacacaaccacatctctaatcaaggctctaatagatgggatgctaaaaacacgcta

SEQ ID NO: 91136 - DNA, 210 bp, Glycine max
catcgttgttggtgggtcccccccccccccccccccccaagggaaaaccctgaacttgcccatcacccagccgagctttgaacaacaaagacaaagtgaaaccgaaaaatagtggctcccaaaatattataaaaaaaaataaaaagtccgtacccaagctgaagaccacaccacccagagtaaaagctccggccgaccgagcgaccgacc

SEQ ID NO: 91137 - DNA, 265 bp, Glycine max
cgggtttcgtagtatgcgagcatcgttgttggtgggcccccccccccccccccctattttaagcgataataggcctcatccaccaccagagcccacactagaaaaaacagggaaacaaacgcgcctgataaatataacataggactcaaaggacgctacggtttagtgacaacgaaataaactgcagaacacccgctaaacaccgccaggacgtatagacgccaaactaaatttaaaggactaatccccttgacgcaaaatgcag

SEQ ID NO: 91138 - DNA, 315 bp, Glycine max
ggccaaagccccccaaaaaaaggaaaactttaacattttttatttagggggccctttgcaaaagttcccgggggcaaaaaatggcccccccttttttaaaaaagggaacaagggggaattcatgagtcctggtgggctggccagggcacaacccactttaaaaaaataaattcacctgggtttatttaatttttaattaactaaccccccttaaaaagaagattggttttaaatttgggggaaagttgggggtgggggggatcaaaagggaaaacccttggggagggacttggggggaacatggggacccaaaaa

SEQ ID NO: 91139 - DNA, 240 bp, Glycine max
ggcccaagcccaccaaaacaaggaaaactttaacattttttttttagggggccctctgcaaaagtttccgggaggaaattttggcccccccttttttacaaaaggcaacaggggggaattcaagggaactgggggggtggccaaggcacaacccacttttaaaaaaaatatttacctgggtttatttaaattttaaagaactaacccccctttaaaagaaaattggttttaaatttgggg

SEQ ID NO: 91140 - DNA, 411 bp, Glycine max
gcaacagtagcgagcacatttaaatgcttcagtggctgattcaggttcggttaaccaaccgggtttcgtagtatgcgagcatcgttgttgggggccccccccccccccccccccccccccccccccccccccccccccccccccccccccccccccccccccccccccccccccttggaaagggaaggaaaagaatcaaaagcccaagaccacacacaaatatagggggggggaaaatccagattcaggaaaaaactcagagaggggggggagaaaactgaagaatgttgaaccgactatcagctgctctgctgggatctgagaggggagcccaaaaaaaaaaaccgaggcctccccacccaaccaccaaccaaggaagagggaccaaaaataatacctaccccaaaccct

SEQ ID NO: 91141 - DNA, 347 bp, Glycine max
aggaaccccaaaagagcctagtagtttattcagttcacaagccattaaaacttacaagcaaagttttacaatagcaaaacactttaaattacaggttctaagcttgaaagcccttacttaaattaaattcaataagaggaatatttataccggtaaactttaaagataggggcattggattactgaatacaagcttcagcactttacaatttattaagaagggacacttttatcctattgccaatcaaaaccttgcaatcaaaactccataagaaaaaccagtcttacaaattaacaagggacaagatgcaaacctttccagtgagcatttcaaacaggagaatacc

SEQ ID NO: 91142 - DNA, 453 bp, Glycine max
atgcttcagtggctgattcaggttcggttaaccaaccgggtttcgtagtatgcgagcatcgttgttggtgggcccccccccccccccccccccccagaaaaagaaaattgccacagccacgagccacgataccagaatgccggaagacggcgcgccgtaaattacctacacacgaacgataccagatccaaacaacaacgggccagacactaccccccccgccgccccagccccctctaaacgggaccgacactaacaccctactcaaattacaaacgatcaagtaaaaatgcagaactgagctgctcaagcctcaccgaccaacggactcaatccccaccccagtggagactactgacctggccaaccaaccacaccctgcccggccggaaggaagttgctcaaaaacggaagtgccgggtgttgccacaccggttgagtctctggatgcgg

SEQ ID NO: 91143 - DNA, 318 bp, Glycine max
agccaaacgatagactttcaattaccaatcggagaaaaaagagggtcgtttgccaaggcacatacaacgaattgacaacatcattatataggtacaggggcgggagacaatttttgagatccgtgcaacccacagttcagcacgcggaaggaatccaaagacgttgaagcatgtggcttgcaagccgagcgctgccagttattattaaaaactgctaaccccggccgggtacctactagcattccgctcaatacaaacaacgacttttcatgctctttcctgtcgcctaacgagagaaggtgctgttgatggcaccaa

SEQ ID NO: 91144 - DNA, 444 bp, Glycine max
gcattaacttcataaaatgttttatataatcattcaatcgggattcatgaacataaaaaattttatataatcatccaatcacaattcatcagataaataaatttattaatttttaaaataatttaaatattaatttgagattgaatgaaattataaaactatattgtattatcatgttttataaaactataaatcttattcaaggaaaaattaaataacacaggttttcattctttcattatttatttgtacacgcatctcttttgtggcttgatttcattaactcgtcttcatcctccaacacactttaatgacttatttttgacgacatatattatggtattcttctttaggtaagtctctacctcgccaggggcatgaattcggtgttcacattcacgctaaccgcttcaactaaatatctgggattggcatcacaatgtt

SEQ ID NO: 91145 - DNA, 595 bp, Glycine max
atgcttcagtggctgattcaggttcggttaaccaaccgggtttcgtagtatgcgagcatcgttgttggtgggccccccccccccccccccccccccccccccccccccccaatcacaaggcccctcaacacgcagaagtcgccccccacccaaatcccacctcaccaacgacagacgaaaaagatcaacccaaaagataatcagagagctcgcgagaagaaatacaacatacatctatacagatgagcgacaaaatgacagcgaaatcattaaaaccaaggaaacgagatgagaataaaggatgacaaggaaacagcacaatacactcggccatgcatatatgaacgagacgaacgccggccggggaagatatcttttactaacccgcctcatcggggctatacccggccttggagctgacggcgaattctaagagctcccgcgccacaacacgtgcgccctactcgggctattcggccgcgatgggcctataggaggagagtttcgatctgacggcgacgatccggaagaccccccatatgtcctgtgataaggccccgacatcagccccctctttgacctacagacgcaacat

SEQ ID NO: 91146 - DNA, 696 bp, Glycine max
ttcagattttactgaattacgaatgacaccatatatatcacaattttcaaagcattccttgttgtcatattcatatttgattggaattggaactggaactggaacttaccaagaagtcttcactactctcaacaatagcatatctaaggaattggcaaccaacgtggcttgtgatgtttctctcccagccgacaattatcccttttggttggcccatacaagtgagggacattccgtgtatttcactgtgcctgaggattgtcgcttgaagggaatgattctatgtgttgtatatttatcaacccctgaaatcatggcatccgaatgtctaattagtgtcttgatagttaattacacaaagtgcaccatccagatacacaagcgagacacagtaatttcctttaatgatgaagattggcagggcataatatcacatttgggacctggagacgaagtggagatttttgtgacttttgggcatagattggtggtgaagaagacagctgtctatttgacgtacggtgaatcaattgacatggaaatagagccttcgcccgagcaaaaggaaaatgccctcattagattcataaagaaaattgtaacgtgtgacttctggtaagtcatctctcttttttaggaacaaatcgggatcccttgtgttattgaattaaatcctagtgtacttgatttcaattt

SEQ ID NO: 91147 - DNA, 619 bp, Glycine max
atgcttcagtggctgattcaggttcggttaaccaaccgggtttcgtagtatgcgagcatcgttgttggtgggcccccccccccccccctagtggtagcatgcgggcagcatctagccaatcgataaacataccgagataaccctaagaatgagggcactacattacgggggaccgaccccgagaacgctacccacgacccagaagacgatatgcggaaagctacctacccgtcttgaacggacactttgaatcgcaccccgcaaccggaacaaacacgccggatacgaaacaccaccgatcccctcctacaataaaagcacccgccccccgccccgcgccccggatcatacagaatgactttaaaattaacccgaatcacctaagaagataggggctggggcaaaaagcgatcggaagcacgatattgatcaatgcatcaagcaccttacgataaaaactacccacctgataatcccttccgaaatataatcaagagacccgccaagcacacacggaataccgcaggggtaacgacttggcgttgcccggcgaggcggccgaggttcggtactactaataggcctcgattctttgggcctttaggcgggtctataaccc

SEQ ID NO: 91148 - DNA, 496 bp, Glycine max
cgggtttcgtagtatgcgagcatcgttgttggtgggcccccccccccccccccaaattaaaagaccaactaggccctggaccgaaacaacattctccggagggaaaacaatcacacactcgagctaagcagactcggcaagaatgcaccctcctaattctatgcatccggagccaaggaagcacgactgagatagagattatatgctcggccgaggcggcgaacctacctgaaaaaaagacgatcgcctcttttaagaacgaactcgcgagcgggaatcggctgatgcgcgcgaaaagcaagaggcgcaatctaaccaagagccggacccgtattgtactaagagagttagggaaggtaataatggactgacacttcccggcggacttcgtgggagggagctgtggctacaatacgcatgcggcgatggagccgaacgacttcattggcgactcgagcactaaaatgaattgacgcaaactgaatgcgatggaggc

SEQ ID NO: 91149 - DNA, 441 bp, Glycine max
tgcttcgtggctgattcggttcggttaaccaaccgggtttcgtagtatgcgagcatcgttgttggtgggccccccccccccccccccccccccccccccccccccccctggaactgcagtaaaattgacagagccgcgaaccaaaagaagcccataggtcataaccgaaaacggataatcttgcatccccccttccgaggaaaatggcgacagaaaacgccaagaaactaaatgattcttgctgcgtggagaactacaattgaaactcaagaaaaaaaaaaaaaagatcaacacaatacactctaaaaagattcaagggacggctacaaactgcccctacctaatccctgacggaactcatacactaatattcacaagtttaggcgcccctgaggacgcaaaaaaccctggaaaaagatgataataaccgggctcaacttt

SEQ ID NO: 91150 - DNA, 385 bp, Glycine max
ttcggttaaccaaccgggtttcgtagtatgcgagcatcgttgttggtgggccccccccccccccccccccccccaacctacaccctgagtgaaatgcagttgaaagaaacttaaccgcaccagaccactaaccagaatccggcctgacttgacagacgaattaaaagctttaatcctcctcactcttacctaccctggagatggccacacatagaaaggaaactgccaacacgaagagaaagagtctcagataaaataaaggagcgccgaataaaagataaaacaataaaaagcaagacaccttaatattctggggaccggagcggggaattgaccggaaaatcttacgaactacgccgggccttgagaaatgatctaagagccc

SEQ ID NO: 91151 - DNA, 356 bp, Glycine max
gttcggttaaccaaccgggtttcgtgtatgcagcatcgttgttggtgggccccccccccccccccacccgaaattacaccccaccagcccgaacgctccgccagacaacaaccacaactttaaaagagaaccacccgcttgataacacatgaaacacagcgcggtagagacccctgtctcgcagaaccgcccggacctcacgacatcaaaccaaacaaactctcaatttgcgaacgccgacctacagaatgggctcaacagacttttgaacaccgatgagaacatggctagcctagcactcagatcacagagatcgccctgtgacggaaaccgcgccacacaaacgccctccccct

SEQ ID NO: 91152 - DNA, 268 bp, Glycine max
ggaaaacccggggggaaaaatgaaattattttttgccactccaaccaaagggggaagccccgagtccttgcccttgcacattgttttagccccgctctttttatccaggaacgttttttttttttaaggggaccttatcatccttaaaacccccccaaaagagaaagaatattttgaacaattttgcccctaataggggccctcaaaaaattttccttctgggggggttccggggggcccctaaggggaaaaactggattaaaacttt

SEQ ID NO: 91153 - DNA, 431 bp, Glycine max
ggttaaccaaccgggtttcgtagtatgcgagcatcgttgttggtgggccccccccccccccccaaaaggaaatataaaacctaaacagcctgggcaggagaatcccaggaagacagaaaacgattaattcctatgcgcacaccgggctaccactaaccagagtcataaagcagaatacgtgcgaaaggcatatcccgggcgactagaaactcgctgtaaacaaccggaaaccctgttcaaaaaacgatatcacaaccagaaaacataaaaacgcggaccactaagcaaactgaactccgggacccgaatgacgcaagtccatcaacatggaagatgcgcgattcgccccttgatctcgctgatgcgatgacgaggtggccgaggcaaaaacagaactgtaggacccgtcgtaagatgaacccgcgtaaccg

SEQ ID NO: 91154 - DNA, 397 bp, Glycine max
tggctgattaggttcggttaaccaaccgggtttcgtagtatgcgagcatcgttgttggtgggcccccccccccccccccccaagaaaagtgacttaaacacaccgaacgaaaaacgaaagaaagaatactcaatgaagagatgagtgagtgagaatatttctgaatatccggaaccacatgcaaaatcaccatgcaacccaatgaacgacagaaagggaatccagagaaaatataacagcctgcatgaatgaccgctgcaccagaagaccgtgcataaaatacaatgacgcccgcggaataaggtggatagcgtgactaaacgaggatagaataggaaaacccccgaaactcgcgactgccctgcttgaactcctccataaatggatcggaaagggc

SEQ ID NO: 91155 - DNA, 164 bp, Glycine max
tcgttgttggtgggcccccccccccccccttacaggcccgcccacctctccctttcacttccgcacttcctaactaaagccagaccacgacgaccactacactactaatgaaattcgtatgatgaagtggctaactacattaatatcccactcagaacccaaaa

SEQ ID NO: 91156 - DNA, 454 bp, Glycine max
tggctgattcggttcggttaaccaaccgggtttcgtagtatgcgagcatcgttgttggtgggccccccccccccccccttcaagaagctaatgctcccacacagaatccaaagaagccccccccccctcacaaaacaagaatagcagacagacgaaattgaccgaccggggggcccaaggtcccgggggcctctcgctaaacaaccctaatgttgaaatattaattaaaaaagccctattttatgctaacggtcgacgcggcggccccgcgcgccgcctcgctcccgggaaataacggagactagagccggttaaccctcctggcaactgcctgcgaaccgattttcccgcccaactgcgacgcggaggacccgaagctgacctaaagctcgacgccgaccttgcacttcctagctataacgaacgggatacggctggctaacgcggcctaaga

SEQ ID NO: 91157 - DNA, 348 bp, Glycine max
  unsure (1)..(348): unsure at all n locations
agggaaaaatcatggatttaatttctaggggcccaaaaaggagagagagagagagagacaganatgatcccttcaattgaaacattacaagctacagactacaaagaatacacacaaaagaagccaaaatgcttacagaactacgaacttcaaccttccctcaattttgaaaaaagcaggataaagttagctcgtgctattgagagcaccttgatttttcaaaatggattcactaatttcagggatactcactattgggcaactgggggagttctgtaataagctggaacaggggcagggaaaaacatttgacgaatcccttcggccttaattatgggaaggatgatt

SEQ ID NO: 91158 - DNA, 451 bp, Glycine max
ggttaaccaaccgggtttcgtagtatgcgagcatcgttgttggtgggccccccccccccccccaaccctaatagacgacgatacgactccgcccccacccacccagcccgcgagacaaccacaaaatgcccaaaagaggcaagacctatatgaggccgaccatgaacgaacaaaaaaacttttatggaaacacctaacgcttgcgggtacagaatacaaggcaccaaggcagggaagggaaaaaaagaagtccaaatgggattaacataccgaattcctcagccccgttaataccgatcacgggcgccgcggctcaactccttcccgtccactggacgaatatgcctgattcactctcattaatgatcggtaccattctttgccttacctgctaccgctgcttgaattaatgtagttacgaatggcgtaataaacttttggacttcccgct

SEQ ID NO: 91159 - DNA, 322 bp, Glycine max
tggctgattcggttcggttaaccaaccgggtttcgtagtatgcgagcatcgttgttggtgggcccccccccccccccctgaaaagagaacacccacgacttcatacccattcgaacaacacacaaatgcagacggagacgggcctggaaaacgaagacaccccgccgcaacccctagttgcgcacacaaataccatgcaatattatcccatgactagtctccagaacacccaccagacgaaaccccggcggcagtatatcgcgcctattgagccgacaatctcacgctccctccgattgccggaagatcgagagtaagtcag

SEQ ID NO: 91160 - DNA, 237 bp, Glycine max
ttcggttaaccaaccgggtttcgtagtatgcgagcatcgttgttggtgggcccccccccccccccggcgctttaatcaaccgccagacaagaaagggggaaacaacactaccgagaatgaagcctagaccaatagcacggcgaaagaatcaccgaaaagctgagacgatcagccagagtgacaaaaacatagagctggactaacgcacggaacacaatatcaaatactgatagaccc

SEQ ID NO: 91161 - DNA, 222 bp, Glycine max
gttcggttaaccaaccgggtttcgtagtatgcgagcatcgttgttggtgggccccccccccccccccttcagccttcatcagaccctcaacccactgcacctagaaagacccccaacagaacaaccttggctcagaagacttacaagagtcacaagactaacatgagactcatgaccacctacaaacaccaccaagtcaggcctcatggaataccgtccagc

SEQ ID NO: 91162 - DNA, 299 bp, Glycine max
tttttttttttttttttttttttttttttttttttttttttttttttttttttttttttttttttttttttaaaggggggggctcaagtttgaattttcccacttaaagataaattgcccaacggggcttgtttttttaataatacccagaaacttgctgacaaactgatctaaaaacttttgaaaggggggaatccccataagttggacatgaattacaaaaaactggggggcaaatgctgttttaatcagttttggtgagtaaatagagcgaaattggaaactaatgtttattgccc

SEQ ID NO: 91163 - DNA, 386 bp, Glycine max
ttcggttaaccaaccgggtttcgtagtatgcgagcatcgttgttggtgggccccccccccccccccacccatcccccgaacccgaccaaaacactggaaacacccgccagacaacgacgacgaagccatagagaatcccccgcgatctcggaacaagaagattaaaaccctaactctatacgccacccaacgcagcgaaagcgcttcctgcactactagcgcaactaccagctttagtgacacaaaagctcaagcccactgctatgatctattagattctaacgactactaaatttcgccggcaacagactatcaaaagaagttctctacggatattatctgatatataaatataaaagatttcccggaccccggagacggtaaat

SEQ ID NO: 91164 - DNA, 343 bp, Glycine max
ttcggttaaccaaccgggtttcgtagtatgcgagcatcgttgttggtgggccccccccccccccctcataaccctacaacaccccccccacaatcaccttcccaccggaactccttacggagagcacatgacaaaaaataaaaacacaaaagaggatgcccaccaaatcgaaaccactatggtatcaaacaaaagagtgcactcttaaattatggatacagcctaccgcagaagcggcgggaggagaagccttcaaatagcactaaactacagctaggcgatttatgctgtttaagaacgcctgggtatgattcaggaaagggaacatctcaaggacccgggc

SEQ ID NO: 91165 - DNA, 457 bp, Glycine max
atataacacttattagatacgttgaaaaagtaattaatattacattaatattttaagtgtcaaatcaaattttacaaagtgactcagccagcacgataacttgttgcatactgcatcggtattttttggttcttcaaacaataagcttaaaccataatacaccatcttcaacccatgcaaaaccactaaaccgtagtgcatacagcataagcttaaagaatacagacaacacaaatatcatcgtgaatgatgagaagaatatccaaacaaccagccctctcttgccagttgatgggtctttaatatttgttgaatccggctagcttcaaccaattctaacaccgaccacgcaaccacaaagtgcatcctttggttgtactcaaaacagggagacttggcacatgtgaacctctggaacaagtttcattcagcacttctggttttgctgatagcatgt

SEQ ID NO: 91166 - DNA, 289 bp, Glycine max
ggttaaccaaccgggtttcgtagtatgcgagcatcgttgttggtgtagcgtacgccgtcgaaagctactcctgtaaagtgtaagtgttaaatgagccctaaaatgaggtaatccggccctcgtctctgtaaaagaactgcgtcgcctaaattagttcggtctgtgtttactacattgcgcgcgtgtatgacgcgagaaaggtgtctagtcctgcgttacgtcgccttaccggtcggtggacgagtccgattggtcatatgcggtggtgtgtctgtgcgtgtacttgttg

SEQ ID NO: 91167 - DNA, 454 bp, Glycine max
cattaaaatatgcgagatatttcttacataatcatcatcaacttagacacaagtttttctcagtgtccaataacaacaggaaaatttgaatgtgagatcttatttaatctactcaaactctggttgctatgatgactctaatgattactgggacgcatataaaactgtaactttatgctgagcagtgaggacaggtgaatcatgatgaaagggtcttcctaatacatgagtaaaacaacggtgtgatccagaggagtgcagagagaaagagaaaacagggttttcattttccacatccgaaagtaaaacaacgattggttgctgtaccccacctgaaattttgggatacctacgcgcacacctgaaccaagtttttgaattttagctagtagtaacattgtgttacactttcactgctaactattaacaccaccagtgatgatagcatgatgca

SEQ ID NO: 91168 - DNA, 415 bp, Glycine max
ttcggttaaccaaccgggtttcgtagtatgcgagcatcgttgttggtgggccccccccccccccccccccccccccccccccccccccccccccgaaagagaacactggatgacagatcctacaaccacacacgatgcggagaaacctacaagaaagatcatcaagaccaacctttagaacatatccgaagagaaaggaaagccaccccgaaattcgaccagatagggaccagagacgagacccgccgccaaaactccctttaaaacggaagacgtaagacgagagataaacgatgcggatgccaaaaggggggagtaatagtgaagaggaatctgatatcctagcggccgcttactcctcatcgatgtattatggccggacggcgcatgctccctggatgaaaaacaatggcgc

SEQ ID NO: 91169 - DNA, 515 bp, Glycine max
tggctgattcggttcggttaaccaaccgggtttcgtagtatgcgagcatcgttgttggtgggcccccccccccccccaacccaacagcccgcccgccaaccaaccttaccagaattaagagacatcggagaagaacatgatgtaaagactggtaaaattcacacaaacacaaacagcaagagacagaaagttgacccacctatacatgcgaagtatcctgactgacttatccactttcagagaagcaaaacctgaataaacttacaatccgcccgaaacctacgtaaaacgagacggccacgtcagcgccctgagtcgctgaagcgcaagaacgaccgcttttccttgaagaagaccaaacacccttggcgactgcgatagtatactgcacgccccttggcatataagttcgatggctataggatcaatacacggatagagctgttacccgactttctagggtctttcgatacaaatgacgaagggacgttgtaccaaacgcacgcctggctcga

SEQ ID NO: 91170 - DNA, 482 bp, Glycine max
gttcggttaaccaaccgggtttcgtagtatgcgagcagtcgttgttggtgggccccccccccccccctaccagaaaattcagcacaagacgaagcccggctgcccgagaaccccagatactatccttcattgccgaggcccgaaaccctgagcacacacaacactcactcgaaaacaaaaaagtgcactcactgccccaccaccagagcccggcatggcctcaactcagaagataacgcgccatttactactattactactaatactaaacgggatatgttgcaaagcgttggcctcggactcctaaatggcctcttagtcgacgcccaatgcggactaaagtctcggcccctaccgcgctgcgccgaccatcagggccccgaattcaaaagaatcgattgaatcgacggcggactaagccacggaagagccggtatgaactgtttaatcatgtggtggggacgcggagctccccgacaatt

SEQ ID NO: 91171 - DNA, 462 bp, Glycine max
tcggttaaccaaccgggtttcgtagtatgcgagcatcgttgttggtgggccccccccccccccccccccccctatgatagaaagaatgcccaaaaagacggggcgggttaccagacgtcagcatctccgaatcacagcagcctatcacagaagttcggccgcaaccaacaccaacagccaactgaacgctccaaaacccctaatactattaaaggaaccaaacgaatcctaatgccgccgcgaaagatgcccgccaattgaagaataaacacacgaaaccttaattcttttcccccgcccccgccgccgattctatttttagaaaccaagataagaaattagagttttctttataaagcaccaagaagccttaagatagcagacagacccgcagattgttatcatacaacacccagagtattgaagagcactagtgaaagaattgagagctgcccgcctgac

SEQ ID NO: 91172 - DNA, 325 bp, Glycine max
ttcggttaaccaaccgggtttcgtagtatgcgagcatcgttgttggtgggcccccccccccccccccccccccgggcgaactctccaccccagccggaccggcgagaacaacaacattccaccaatccaatgaactctgactgatgaaccttaacacactactgcgggacggggggagcgcaccagcgaaacgagatacggactagaaaccccctcccaaaataaactttttacctggaagaccctaggaagtcatgatgccgactaccgggtaaaagaagggaggcctaactcgtaaggagagagtacgaactgaatactatat

SEQ ID NO: 91173 - DNA, 466 bp, Glycine max
gatcatgctcacaagcatgcaaaaaataagtatagatagaagttatgaacacataagggaatgaaatatttgaagagtacaagttttataccacactccaatgcctactcacttatactattttccccccatttatatatatttactacgtctatactgaatacggtagtaaaaaaaaaattaagaatacagcgtcaaagataaagcaccaataagggatctatttttctctctttcatatcgaacatccaaccagacacatccaaagttccagatttagcaaagcatgggaactccacgaaccacaataagggaatggcactagaagtagaaacagaacaataacccgatttatgaattaattaaacgaatcattgaaggcgtaaccctatgaatatgatgattgctttccctagaggttgcttaattcttcatatttctttttccttcagtatcatgccacact

SEQ ID NO: 91174 - DNA, 403 bp, Glycine max
ttcggttaaccaaccgggtttcgtgtatgcgagcatcgttgttggtgggcccccccccccccccccccccccccccccccccccccccccccccccccccccccccccccccccccccccaaatcctatttgggaatccctaaccacagaagccaaatacaaacctcggaagtttcgcctcacacacaacaacaagaataaagcctgctagaaagctacgcaaaaagccgctaaattttttaacagggacaatccttagcctaaccagaaaaaagctgattcgaaactgctgcccaacgatcacctactatcatacatatgtaaaccttatagcaactcgcacctgggaacaaaaccgggactcatcaacagacaccgggtagcagctccaggaaacccaact

SEQ ID NO: 91175 - DNA, 414 bp, Glycine max
ggttcggttaaccaaccgggtttcgtagtatgcgagcatcgttgttggtgggccccccccccccccctacgaatggagaatgactgaaaaaacaatcacatacataatcaactaagagacaatttaactaaacaccctaatatcagaatcaccacaggagagcggaactggcagcgagccacagcaccccggggggacccacacacacccagcagtcgcacagctaacagttcatcaaaaaaaaaaccaataacagatgtcgaaatacaaatgaggaacaatttacgcacccccgcgcgcccgacacgtaagacggaaggatagagacggaaatccggatacccatgaaatgactttaagcggagtaaggagaacaatttaacttgagcataatcataaagataagaacaaggg

SEQ ID NO: 91176 - DNA, 504 bp, Glycine max
tggctgattcggttcggttaaccaaccgggtttcgtgtatgcgagcatcgttgttggtgggcccccccccccccccagcatcaaaaaacggatacacaacttccctgacacaaagatcagaactctacttcaaagacaaaatcatccggagaaagcctccacgaggaccaggaagcaccgctatctctaactcttgggaaagatcccgaataggaaaaataccagccgaaagcctcgctcctggctggacgatttacctgacacatgagtaccttcctctattttgtaactaatttcaaacgagaggctaaacacgggcccgcgcggatcctgaacaaacgcggagtgctaatacccgtgactccttatcgcggacaatgcaaatcgcggcccccttcagacttttcaaggagacgaactaaacggcggggccgccgaatgcccccgccctcaaccatacaacgaaagcggagcaactcgattgcaagcatccgacgcacgcga

SEQ ID NO: 91177 - DNA, 485 bp, Glycine max
gttataatagtttaatttatgttatcttccaataaatgtacacatcacatcgaataattttcaggatgctttaatagttccttagcaatttttgtccataactaacatttaaccagcaactgccactagagaaggcaagtcttcctcagccaacctgggcagccaggacaggagcactcagtcgcacaactctcagttcctaagttgaaaattcaaatacagacgcgcggggttgccctacaagctttgacaatgctgtcaactgcttgctgtacacatttttcttgcaaatggcataggaattggagtacaccataatacatgttcttggccgaatatttaaagccaaagcaagtacacaaaaacccaacaggatggacttcaatttgcacaaagttatggaaccattggatctccagaggatgcaagcatttgtaaacttgtttcttcagctgcccgtttagaagcatactcttgcatggaat

SEQ ID NO: 91178 - DNA, 205 bp, Glycine max
ttcggttaaccaaccgggtttcgtagtatgcgagcatcgttgttggtgggccccccccccccccccccccccccccccccccccccccgtgataaggaaaacccaagccccaccccttggcctgttgaccgccacttacagataagcaaccatcctaactgacgaacagaacgccactattagccccgccgagaccctaatttcc

SEQ ID NO: 91179 - DNA, 438 bp, Glycine max
ttcggttaaccaaccgggtttcgtagtatgcgagcatcgttgttggtgggcccccccccccccccccccctaacttaataattgacacgcccaaacctaacctacttttcttaaaagggtaacccaaatacccggaacgacagagaacacctgaagaagaaaaataaccccaaaaaaaaaatagcccgcccccccagcccccccagggaaaaggcaatgaaaacacaaaaagaaagtagagccccccccatagcgcccaaacggaaaatgctacgagaacgaaaacgaacttgtccacccactaaatgcggacaatagccgaaagtaggaaaatggttcccgcggacctactccgcgccgaaagactaacccagcgccgaacatgaattttgagatagcgatggaaccctgttcagcctatatgacataagacgcgta

SEQ ID NO: 91180 - DNA, 232 bp, Glycine max
gaggccaaccaacaaaattccccttgggtttaaagggagaaacaaaaaggggactaaattggggggccttggtgggagaaagcatttttttttttttaaaaggcgataaaaattgacaaggaattggggggttaaaaaataaagggggtggtccaaaagtttccccacccttgggggggggtttaccaaacgggggttttttaaaccgggttattttatttttgggcccaaa

SEQ ID NO: 91181 - DNA, 274 bp, Glycine max
ttcggttaaccaaccgggtttcgtagtatgcgagcatcgttgttggtgggccccccccccccccctcatgtgaaagtatttttcccggcagaacagctaactacccttggaaaaccccattcacatttggagcgatacctcctcaatagaatcgaaataaatgaatgctctggactccatgcatctagcgctttgaccgcggacgaaaagctccaccaccaatggcgaatcacctcatcgccgcgatactagggaaataatttttttacccggg

SEQ ID NO: 91182 - DNA, 423 bp, Glycine max
tcggttaccaccgggtttcgtgtatgcgagcatcgttgttggtgggcccccccccccccccccccccccccccccccccccccccccctatagacacaagctgacacctgctacccgaccgcccgccccgactcaaataccgacaacagagaatggctgccgataatcatgattaatcccttatcccttagaaattaccgaaaaattaaaatcaacagagatctctgaacacacacccgaaaacaaacagaaaacgcgcaacgagaccgaaatttcttatattacacccgcattagatggccatctggacccgactaataatatgcgtgcccctctaatcaccaaccagaccactctcccgatgaccgcgaatgagccgatgaaccacctgatactgatttggaatattccggcgatggaggg

SEQ ID NO: 91183 - DNA, 416 bp, Glycine max
ttcggttaaccaaccgggtttcgtagtatgcgagcatcgttgttggtgggccccccccccccccccccccccccccccccccccccccccccccccccccccccccccccccccccagaaaaataccaatgctggacctcccgacgcaatcaaagacgagccgacgaaactgatgatactacagaaacctgaagcctagaaatgtaggggcactgagaaactcaaactaaaacaactgatgttagccagattacacttgagcctaattatggaaaaatttaaaaatcaataaaagccccacatccaaaaaacaatcgacaaacaaacggaccgccccgccccgcccccccgccgccaacccagcagctttggaattcgaggccttaggatacaagcgcagctgactgataccccgt

SEQ ID NO: 91184 - DNA, 419 bp, Glycine max
tttttttttttttttttttttttttttttttttttttttttttttttttttttttttttttttttttttttttaacaaggcccaaaaattccctttctcaaagggggaaaagggctaaaaaaattgggccctttcccgggggatctcctagataagggaaacaacccttttttttctttccttaaactttcaaaaggttataaaccacattttttttttttagggaacaggttcccccctttggggcccccggggggggtaacccaaaaagggcccaaaacgggatcccaaaaaaggggaactttttttatttcccacaaagggggattttaaaaaaaattccgcgcccaagggtagttttggggccccttcgaaaaaaacaattggggaaaaaagccaaacttttctttggttggggc

SEQ ID NO: 91185 - DNA, 497 bp, Glycine max
ggttaaccaaccgggtttcgtagtatgcgagcctcgttgttggtgggcccccccccccccccctccgaataacctaaaccctgccctacctaaacgattccagaatctcaaatcctctgtctacccttctagaactacatactaccatccggaaacgggcgaacttcgatttacaatataaagcatataaataaaaaaaaaataaaaaataaaaataaccagaccggagggcgggatcacagagaattaaactagacgaacacgcactgatgaacatatttacttccccttccccctctgctctatctgacgacccattatatagaccacgcggagcgccctcgacctcgatcccgggcctgacggatgccgccatgacgcgaatctgatgccccttcctacggacatttaggactctaggatggcgtcacaggcctattaaatatatattcggacttgccccgatgtccggctgccgctgaggacgaagcaaaaac

SEQ ID NO: 91186 - DNA, 481 bp, Glycine max
atacaacccaacactttatttacccactgcatgccaaagacatgtataaaacattgccaccataacaataacgatcctcatacactactggcaacgcacagccttctgtaaacaatacgaaccacacacccacaacatcaacatagaatcaccaattcataatgccgatggagacagcatttggaaacaacaaatattaaattaaaagaaacagaatcagagcatggattcaacgtactagatcttaggaatcaagcttccatagggattgacccaaagaaaagagaacttggagagctatgattagagaaagagagaataatactattgtaaccaatagacccttgattctgtacggcatatctctattactagagaacccaccactaaggtgtgaatactagaactgcaaattacataaatgatggtcgcagtgattcaaattgttgccagaagcattggcaacgaaccctaatccttc

SEQ ID NO: 91187 - DNA, 501 bp, Glycine max
tggctgattcggttcggttaaccaccgggtttcgtagtatgcgagcatcgttgttggtgggcccccccccccccccaattgaaggagcaaaactgaccagactcacctataaccctatacacagagaccagagaatctaacaaaatgagaggcgctaacccctccaccccgcgcccccaatcagacagcacaataacaaaccaaaaaagaagccttggagaggccccccccctcaccaccgagttccgcgcaccccccactgaactaataacaactcataaccttatactaatagacgaagttcctaaggaatgaccaagccaccgggcgaagaccactacgaggaacccgcacaggactttgggacctgagtcctgggctcgtacgaggaccctagcttggacaccgagtccccccgatccgccctaacgtttccgagcatccctgcttatcactctcctcggcccccagcatatgcaccccggaattaccgggagggaa

SEQ ID NO: 91188 - DNA, 310 bp, Glycine max
tggctgattcaggttcggttaaccaaccgggtttcgtagtatgcgagcatcgttgttggtgggcccccccccccccccctccccaacatcccaacccactccacgccggaacaaactcagagacgagacgtaacaaccccgattactgcccaacatccggccatgaaccccctcggacaagcaagacccaaggatgaagctggagcatataattgaatcgccggcgatggaaggctttgatggattagattatgagcgatcgtgagaagcgcgatccggcaatcctaaaaccgaaacagatagtgtgttt

SEQ ID NO: 91189 - DNA, 460 bp, Glycine max
tggctgattcaggttcggttaaccaaccgggtttcgtagtatgcgagcatcgttgttggtgggccccccccccccccctactacagaacccatccacccacgaactgaaacataaagcagcaagtgctgtacacccataacatatagaaattcaccataaacaacagatgaacaaagccgaacctaactccagactgggaaattacgaactccgaaacaccggcaagccaggaagcggccttgacgtagaagcacccaccggacaccagaaaataaacaggacacggatgaaggaaggctctccccgacggggaaaaccttaggaaaacttatagagaattaaccagcggaactagggccgctcaagcccttacggcaggggaaaacacaaataaacaaaacgaaaatacatacgaaagccattagcaatagccgacctgtacagaagaccctgcggcga

SEQ ID NO: 91190 - DNA, 505 bp, Glycine max
gttcggttaaccaaccgggtttcgtagtatgcgagcatcgttgttggtgggccccccccccccccccccctgcattaaatcaaccaagacggtagcctaattcacttcgcacaactcaaaaagacaaacacaagcacaagaatgcaggccccgcggagaaaagcgaacaattgcctgaatcccaaaaccacccaatacggcctatagcataagcaaaaagcaaacacccgaggactggatacaaacaggcagcccactagatacaaacgctgcttgagaacatgccgcaactacaaaaacccacaaacgattgaccgaactgcgataaattgccctcctacctaagtccggaggacgccgaatcggatccggcaaaccggccacacgacggaagcctcccggatacggcatgcgctgctgcacttcttactggcttccgcgctcccctccactgctgaaaaggctgaaaatgcgaccgagcgctggatcccgatcacatcgctga

SEQ ID NO: 91191 - DNA, 470 bp, Glycine max
ggttaaccaaccgggtttcgtagtatgcgagcatcgttgttggtgggccccccccccccccccaaacaagccacggcacaacctaaaacttaaaaactcagccctgaaaaatatccagaagccacagaatacacttcacacacaggtatagacacactattcatcatctaaaggaacaatctatgcgaacccattcattgcgggagcgtgatcagcaacaaaaaagcgaggtcaggttcagttttcgagctagagccgggggacctagtccagtcaagtcaaggacataatacataaccaaaaaaaaaagaaaaaaaaaaagggcgtctgtctgaagaggaagtcttgagcaagacgacatcacatcaagaacccgaaacacaaaaaagaaggcgacgacatcatgccgatcttttcgaatcgatgtccaggtcggtagagaatctgaggggggggggagatcgaaagcg

SEQ ID NO: 91192 - DNA, 256 bp, Glycine max
cgtagtatgcgagcatcgttgttggtgggcccccccccccccccaaaatgctatgtgcgataacgatgaaaaaggagacagacaccgacctaacatactgaaaaaatcttcagaatacgaaaccgcggaagaatttagagagacgtccttcatgagtaggagaggagctatttagaatgatattaggctcgggagcctactacgggaatgaaaagatatcagaccagagataaaaaagagacaatactgcggcaca

SEQ ID NO: 91193 - DNA, 277 bp, Glycine max
ttcggttaaccaaccgggtttcgtagtatgcgagcatcgttgttggtgggccccccccccccccctctccgcaaacgctagcacaacatcctcccgcctaaacaccacaaattcaaccaaccaagaaggccattacactcggcaaagaaattagccgaaccggccttgatcttgatgaacatttcgccttgtgggcgcgcctgttgatgcaggaaccaaaccgcgcccgggacccccagggccgaaggaaaggggaaagatcccgaaagcccgcgga

SEQ ID NO: 91194 - DNA, 438 bp, Glycine max
cggttaaccaaccgggtttcgtagtatgcgagcatcgttgttggtgggccccccccccccccccccccccccccccccccccccccccccccccaatgagaacactattctcaatgaacccagacgcgatgaccccaccaaaagatcacagactgagagagtaaaccgcacacactaacatcccccccggctgacttggcctaccgaacgcgagcccacaaccaacaagagactgctacgagcccaaccgggccgcgcccacctgacaacagcccctcacgggccccgcttagcaacctgaacaagtaaatctaccagaagcggtgaaggaacccgcggtgacgatgctgataccgctaaatttccgggctatcggaggcgccgatgacccgcaagtaatggccgttgctacggacgttaaggactctagggtgacga

SEQ ID NO: 91195 - DNA, 391 bp, Glycine max
gttcggttaaccaaccgggtttcgtagtatgcgagcatcgttgttggtgggcccccccccccccccccgttaaaaccttacccctaggtcgatgcccctaataaagcataaagggactcggagactactagaaccgaatgatagaaggaacctgccctaactcaaaaaagacatgaaaatcttggcacagagcccggaaattatgatcggaactcacgacgaaccccagcctcccaatgaaaatcaatcccgaaactgacaaggaaagctgaggcacagacacccacgcaactagctttgaaaacaataagatagccgggcggaatatagtccgagcctaacgctataagaaccacacttacgatgctgcggtttgaaaacggagagccgg

SEQ ID NO: 91196 - DNA, 375 bp, Glycine max
ctccaaaggaaggagaagcagaaccacctatgctttttctgtacaacagttaagcaaatttatttcagggatatctaaaaccacgtatgtacaagatttttcaaaggaaagtgaaaaaaatttagatgagcatactctattacaagattgcatcctctaagatatcccacttacagtacatagggaagtataagctacagagctgtaccaccagtccacaatataaattcctcaaacttcttctgctctctatttatcatcaagggaaattgtcgtttatcatataaaatgattcaaaacgaggctcggttaaatctaccatttcttcatctgatgcatgccagctctcaccttttgaagtaaagagcatcaaac

SEQ ID NO: 91197 - DNA, 220 bp, Glycine max
ttcggttaaccaaccgggtttcgtagtatgcgagcatcgttgttggtgggcccccccccccccccccccccagaaaaacaaaacccgaagaacagtaacatagacgaaaactcacgaaaatctaacacaattgcacacaaaaaaaaaacaccccctcaacacgtacggagcattataacttgcagtcccgatcgatttaaggaactcgacgaataaaaca

SEQ ID NO: 91198 - DNA, 450 bp, Glycine max
ttcggttaaccaaccgggtttcgtagtatgcgagcatcgttgttggtgggcccccccccccccccccccccccccccccccccccccccccccccccccagactgcggaaggaacaatcaaagatttaaagcacaccaaacagggatacttagtacacacacacacatcaagacctaatagaggaagcaatgatacggctactaactaccgccagaacagctaagtgcagcacgtcggaccccccggatgagacatctcgggaaagcactatcatggcgtaggaaaccccggcctgagaaaaagcgaccgggaaaaaggccgcggagcccgggctataatcgactgagaaagagactgtcgccttttccgggagggccgcctgcggtttgaataagtggatgttctaatacgttatagaccgccggtttatgccggttggaacggggggc

SEQ ID NO: 91199 - DNA, 475 bp, Glycine max
cgggtttcgtagtatgcgagcatcgttgttggtgggccccccccccccccccacgacgagaagggaagagcccacccagggagctgactggaaatagactcacaaaagacctggaggacaagaacaagtacggcgacagagcagcttgaagtgagatggccgctcaaagaacagtaaggagagagggagaagacgaagacataacgaggaaccgacaactggtacttatagatgacccttaaagaagaaacaccaaaccaaaataaagataacgatatgacttaccgaagtcagcatacgccattaacgaatgccggacatttacctagggaaataaaatataagccttatatgcactaccatataaatatataacaacagcacctcaaggaacatagggcctaccgctcagttgacacgcgcaccagcatataagggaggagcaattctctaacagcataagctgaaaccagac

SEQ ID NO: 91200 - DNA, 295 bp, Glycine max
aaacaccattcattaccatagaccataggttacactttacacagacatgggtttttattcagatggtgacgcacttctacatacaaagaacctttttaaaaaatggaatagaaacctatctattattcaaaattaatttttctttttaatttcaaccgacaacagattagggggggggtctaccacgggggggttggttgcaaacagaggtaggtttctgggggggggagcacaggtgggacgaccctggacacgcatgcagacaattggcccccaaggtggcggaaaccgccgg

SEQ ID NO: 91201 - DNA, 207 bp, Glycine max
gttcggttaaccaaccgggtttcgtagtatgcgagcatcgttgttggtgggcccccccccccccccccccccgcagtaacgaaatgtagaatttgctaacgcgatcttacgtcttgatgaattggagcgctggagccagaacaggggtcgtgtcacccaatcgtcgctgaaattaccgcagggtggtgcgtactttaacctgtgccg

SEQ ID NO: 91202 - DNA, 338 bp, Glycine max
gctgattcggttcggttaaccaaccgggtttcgtagtatgcgagcatcgttgttggtgggccccccccccccccccccctgagataacctaagaactttgcccaaacaaagtcatatcttccagatcattacggtgcgggaagcctaaggctacccatatcccaacccaaggggagagatcataagtaaaaaagacgagagaaaggaaaccgggcgcgtcggggtctggcacatccaagagtcaaaatttttataagcagcggaggaattacgggaaccccttagcgggctaccaataccgaggcacggtagaacgagcaacccccacagaccgggtc

SEQ ID NO: 91203 - DNA, 212 bp, Glycine max
ttcggttaaccaaccgggtttcgtagtatgcgagcctcgttgttggtgggcccccccccccccccagactaccccgagaaggctctagggccccccaccgcggcctcaccctcacctcacccgttactaccccgggagaggcgcttaccacgcggccgctaactacatcgacttggcgactttctacgccgcctccacccccggaggtaagg

SEQ ID NO: 91204 - DNA, 372 bp, Glycine max
tggctgattaggttcggttaaccaaccgggtttcgtagtatgcgagcatcgttgttggtgggccccccccccccccctactggaagtaacggacccatggacagagctacaggccatgtacagaaacaacccataaatctcgccccagaattttccgaatgaagccctcatgcatgcaggcgtttgcgatgggccgaacccacacagcgcgactgacgcctaccccgtcttccccaccgaccgcacccccagactcaccttctttttttatgcagcaccccagacacgacacatgagacttttctccgctgctgcccgctgacctcaagagatgacctgaaagatgcagggccgctcggaaatactttatga

SEQ ID NO: 91205 - DNA, 268 bp, Glycine max
ggggaatcttaaaaaaccttttttataggggggaattaaccctcttctttttattggtacaattttatttcggtcacctctgggccaggaaagaaagattttcaaaaccaaatttggtaaataatcattagacaaacctttatagaatccccctaattaaaacccccttttaaattggaaccccttcaagatttttacattggtttctccatgccccataggtttagattcatctaatttcaaactatccattttggttatttttaac

SEQ ID NO: 91206 - DNA, 207 bp, Glycine max
cgggtttcgtagtatgcgagcatcgttgttggtgggcccccccccccccccaattatgataacggtacagataagccccgcgatcaaaaagcatttacaacacagacttaacacgaattaaaggaacaacaccaacctctcaccaataccccaatatgatgagaagctatggcagacggcgaactagaaatcaaatgaaatcagaac

SEQ ID NO: 91207 - DNA, 193 bp, Glycine max
cggttaaccaaccgggtttcgtagtatgcgagcatcgttgttggtgggccccccccccccccccccccccgtttttccgagcgccgcgcctcttctgggcctcaacaattatggggaaagaccaggcaattctgactgacagacgagaaaatcccggaatgagccgaatcaactataagaaacacgcgatcat

SEQ ID NO: 91208 - DNA, 231 bp, Glycine max
accaaaactagactcttctatctatacaattcatacatacacttgatcaagggaatcacttgacgatacgcgaccgattactttgactatcagggtttcaaaagataactccttctggtccctttcaatctgccacctagagctagtataccgtactactaataaaaaaccagtacacacagtcacactccataactaacaccaaaaaccaaaccaaaagcacgtcattaa

SEQ ID NO: 91209 - DNA, 132 bp, Glycine max
tatttttttttttttttgcgctgggccaccagctactaatactaaccactctacatcccgataggacagagcccttgcgacaattagcagttcacaagcgcgtacttacggcacgtcaaactacaacacgcc

SEQ ID NO: 91210 - DNA, 320 bp, Glycine max
aaaaacaaacaaagcttaaaaaaaattccgggggaattttccccccaaaaggaaagggttccctccccatccccccctaaaaagggccaatccccaattttggccccccagtaaacaacaaaacctttttaaactttaagggggttaactttttttagggggcccggaaaaaaaaaaaaaatggggacccccccccctgaaaaaaaacccggttttaaaccccccttgaaaacctacaaaattccccccccccaaaacatttaggtaactttttttttgggggcccaaaaaaattccccagaacttggcccccaaaattt

SEQ ID NO: 91211 - DNA, 363 bp, Glycine max
ttttttttttttttttttttttttttttttttttttttttttttttttttttttttttttaaaacaacaaacaaactttttggtttttaagggaattctaatattgatcggggcggaaatgttaaggggtcccatttattttgaagggaattttaatattaaagggcaaaactaacattttcacttgtttacataaaaaaaaggggtcaactttaaagccacatttatttgggggtcacccactgtttttggttattgcaaaacacttttatgttttttttgaaagcaggcaacccaaccttttttaaaggcaccaaaaccttgaaccccttttttttttttgaagggggtgttgaataaggc

SEQ ID NO: 91212 - DNA, 127 bp, Glycine max
cacagagaaaatgaaaatcacttcaatattcaaccgaaaatgtctcatattgtacccaagaccttattcacgtgggttaagtgagatcagatgtccgattaaaacataatttaaggtcataatttta

SEQ ID NO: 91213 - DNA, 199 bp, Glycine max
gaccttatcacagatatttcatattaatccttgaataaaattggcggttcgacgaccaaaagacacggggaacatcctgatcttttcccaggcaaccaaacaactcaactctattctttcacctaaactcctctaatacatggaagtatgactttcaggtaatccgtctgttttgatgacattaaaaccaaaattcgga

SEQ ID NO: 91214 - DNA, 444 bp, Glycine max
gaagaacagattccaaaaggcagagttttgctcaatcaaattactaaacatatttggtaacaaaatcagttaagctaatgcttcaagtggacaacaaaacagatgcgaaatatgaaccatggcaggattgagcatcatcaactcttctgttagtcaaaatcacaatcaaacatgaaccaatactaatcgacaacgtaacggatgattggcgtcggcatctaaaacttccaaggatggcaaagtccaatgaataaccaaccttctgaagatccaaacacaggctgaatacaacagtacaataacaggttaatcttgcacatgacatatcggtacatcagtgtcaaaacaactcaatttcaactgtaacctaacatagggacaaaactaaaagctcagcgatacccgccaccaccaccgagtttgggacctttgggcataacaccc

SEQ ID NO: 91215 - DNA, 422 bp, Glycine max
cccaaataattatgatcaagaatgatacacacattatgatgggttgcgtaaaaaagaaaaaaagaacgaaagaaaattccacactatgggaatctcactcattttttttggccaaagcaagaaaaaaaaaaaaaaaccttgttgtaatcgacctttttgtttttaacgcttcccagggaaaaaaatacaaacaatttttgggacttgaaactttgtagcattcctcctatgtatccaacacaaagcaaaccttttcacttttgctttttctaaagatgaaagacattttttttggagaatatatatgttttttatttacaaaaagcgtgccgccaattatagtaactaatcaggggttgggattggcaacaaagtttgctaaaatcccaacaaagggggcattaatgtatggggttggttcg

SEQ ID NO: 91216 - DNA, 230 bp, Glycine max
aattatctatggatcaaaacccaagggggattcttacaaggtacttcaagtccaaaaataacaattccatagtttccctatgaaagcaaggaaaagaaccagcaatcccattatcgaaaaggttgccaaggtaaaaaaaattaaaaaaaaaaagcgccagaaaaaaaaaaaacgaaaaagagaacaaagggatacatatataaagatgtttttgcgatgtttggtttggg

SEQ ID NO: 91217 - DNA, 321 bp, Glycine max
gagcaaaaatttcttattaagcgaattgagttacaattgatattgagatacacagaacagtgaccttccttttcagcatccaatttttacttcagcggacgtaaaaattgccaatttggaatcgaactcggttaactaaggcaaaaactagaacgagaagctgctagcccccgactttgaatccaataaaaaaaggtaaacccaaacattggattgaatatcccaaaacaagaatgattcgattttcgtttaccacgaacgccctactaacttaacacaataccacgacgctgaatgtgttaaaacaggtgtgggcgtctt

SEQ ID NO: 91218 - DNA, 330 bp, Glycine max
ggggccctctaaatcaattataactggacttatgaggcgggctcaaccgtaaatatgagtaactcaacaattggaactggttcaaaataaaaaaacctttttctcaattttatctcactttctttctagtttctttgaaccctaaaactcaaatatgggatcaaagctttttgttttggactgaccactttttcccttacgaactttgaaaaactcaacaatgattaacggtggctctttaaaaaaacccaattttcatcaaaatttaaaatttcaatcccctttataggtacctgacttaaaaaaagccgttgcttagggcctaatttt

SEQ ID NO: 91219 - DNA, 355 bp, Glycine max
ggaaaaaaaccccccccccaaactaaatggtccctggtccccccccaagattttttaaacccccccggccccattttggtgggggggggaaatatttaaaggtaaaattttttttgcccaaaaaaggggcccccaacaatgggcccccctttttttcccaaaaaaaccggaggaaaatttccccggccccctggaattccccccgaatttttcccttttttcccaaagcctaaagcccccgggttatttggcgcctttttttggacaaaaaagcccaaattccgttttgttgccaagggggcggggttttttcccgggggggggggggggtaaaaggggtttttttttttttttt

SEQ ID NO: 91220 - DNA, 476 bp, Glycine max
gttcggttaaccaaccgggtttcgtagtatgcgagcatcgttgttggtgggcccccccccccccccccaaaataaaaataaaacttcacctatataccgaacgaagcctaccacagaccaaaacttcgccgaagcctaccacgaaagcagaacccaagaacgagactgcaagatgagccacaattgtgaagcgttaagaatgccggggaacttctataaataagacaccctaaccctttgcgtcaccgaagactaatgtgatacaatgcaaagtacgatttggataactcataaaactggactatatcctcacagaggaaacggatgctcaccccaaaccggcccacaaacttatgcggcgcaaaaccgacacctggccctgctgcactgaatgactaatcaacaccctttgactcggccctctttaagagacgaaagcacacgcgtgcagaagccataaacgcgccctcggagag

SEQ ID NO: 91221 - DNA, 202 bp, Glycine max
ggggggggaaaatgaagtaatttttagtccaacccaatttctttcaaccaacaacattggattttcagcatttttaaagtcccctttttttttgggggggggaatttctttcccccccatttttttttaaaataataattgtaattgctttgggctttgggctgcataaggggcttaaaaaatggcccaaaaacaggggttt

SEQ ID NO: 91222 - DNA, 148 bp, Glycine max
aaatacagttcatgttaccgacgatatgtagtcaactaagtcatgtttatttttgtgttgtgaatcatttggtgtcctctacggacttagaggtcttgtaatacggctctttcgcatagaacgagtttttttctttctttctcaaaca

SEQ ID NO: 91223 - DNA, 274 bp, Glycine max
aattaaaatcacagtgaatttatatgctattattgcacatgaattatacaattatataatcacaggaaaatttccaacacaggaccaatacaagttaccacaatatccatctacaattagaacatacagtggaagtttcaggttatgcttgggactaacggagcattcacatgcacatgcattgcacatttcatttggtggtcattgagtttcatcacagcaacatttatttggaaccaaaattatgaagatattcatgcactggaagtttttt

SEQ ID NO: 91224 - DNA, 476 bp, Glycine max
gaagcaattacaactgtgcatgggattttagaaacaacaccatggtccacaacaccatcaactttatcaaggctttttgctacttcagcgaggttttctattggagatgtaaagataacatcaagaatattatgtccttctttggtgactactgggaagtcacctcctagtggacctgcttgccctatagatggtcttctccagacctcagcatcacccagaaacatatcatcaatctcttcagcaattgtcatccagttgagagactgaattaaaactggaatagaaccttccagacctcctttgtactggttttcttcgataatgaacacacatttattggcggacatggttaaaggctaaagagaaagactttaatattagcttcaaccattggtcttccaatatatcgaatttctttggctagtttggttgggcttgtttgaatttgttgtattagtttgggttgtttttat

SEQ ID NO: 91225 - DNA, 220 bp, Glycine max
gagaaaaatgaataaacattttcaaggcacatgaccttttattcaacttatggaaaagggtaaacattaacccttttggttttgccaaggtgggaaggggcctgcaacttaaaacgacatttttttttttaccggaaaaagggggggggggctttttcaacaaaattccttaataggggttttacttgaacgggctcaggggccccaaacactgaacttc

SEQ ID NO: 91226 - DNA, 316 bp, Glycine max
ttttttttttttttttttttttttttttttttttttttttttttttttttttttatttatttatttatttttttttttttttttgcaattggtagggttttttctcccaatgaaaggcccttttgtaacaaaatttgaaagcaatgaaagtaaggaaattccaaattacaaaattacaaaaaggcccccaatttggggggctctccccccttggagggtcccccaaatttgggaggcccctaagcccaaaagccccaaaggaagtaccccgtgcttctggccccaaatcctccaagggaaggggccaacccccctt

SEQ ID NO: 91227 - DNA, 154 bp, Glycine max
acggaaatggtgaccacatacacacgaatggaataaggatagaaagagttgatatacatcgacattcattttatttagtaattaaaggaacccacatcacgtttaagtgttatataaaatacatcaatttattaaatttgggcaatgaagatat

SEQ ID NO: 91228 - DNA, 124 bp, Glycine max
gaaaagaaagaaatttttactaccattaaacactatacttacaacttacagccaagtgccgacgcaattgcagggtcacacttcaagtcggcttacacaattgccccatttcaaggggtgtgtt

SEQ ID NO: 91229 - DNA, 166 bp, Glycine max
aaccagcaaaaaaggatggaaaattatacatattgaatattcacatgaccagcatcatttataataatgttgccacataaatctccattaaaaaaaataaaacgaaaataaattaaagtatagcacaataatcagaaccatgacattgaaatttatgaagaatatg

SEQ ID NO: 91230 - DNA, 150 bp, Glycine max
gttgctgaataaccacccttacttgctgtagtttagcccacgaggttcaaaaatttatttacagggaacataggcttccttacagccatatttgccctccaatgatcttttaacttaaaaacaaaccaatcgtttccaaatacatgaaaa

SEQ ID NO: 91231 - DNA, 152 bp, Glycine max
gctgctgtagaaccacccacacttgcttaagtttaacccacgaggttcaaatatttttttacagggaacataggcttccttacagccataattgccctcccaggatctttaaacttaaaaacaaaccaatcgttttcaaatacaagaaaaac

SEQ ID NO: 91232 - DNA, 169 bp, Glycine max
cattgacactaaaaatgtgggaatgaaaagtctatacaaaatcattgttgttaggcagtacaaatattgcacaaaaaaaattatcaatgaatatctcaattaaaaagtatgagcatttaaatggatacgcatatatggaatccatttccagtgatccaggccatgaaaa

SEQ ID NO: 91233 - DNA, 452 bp, Glycine max
  unsure (1)..(452): unsure at all n locations
tttnttttttttttttttttttttttttttttttttttttttttttttttttgttttttttttttttttttttttttttttttggggggggaaaaaattttttttaatgtttccaaaaaaacttttccaaaatttttgaaaaaaattttttttccttaatcaaaatttttttaaaattttttttttttttcccccgaattttttaaacaagggtgaaaaagttttcaacccttaatttctttgggtcaaattttttaaaattttttttttgggaacaaaaattcttcaaatgccaaataaaaaccttttacccctggggggtgttccttcttttagaaaccctgggccctttttgggaaaatcctttggcctaaaaaacattttagtggggggtttttttcaaataaaaaggtttttttttttcccgggtttaaaaaaaaattttttggttt

SEQ ID NO: 91234 - DNA, 241 bp, Glycine max
ttttttttttttttttttttttttttttttttttttttttctttctttttacggcccgggtttttttattcccaaaaatttttaatcttgaaaacaatttgttgtcccaaacaccccctaaagtttgattttaaatatactaggggttaggtatacatttactggcttattttctcgcttcaaaattccacccccggaaaaccttttttctttgaagtagtagacaatttttttttttccc

SEQ ID NO: 91235 - DNA, 176 bp, Glycine max
cactcctatatctcgccgttataactgctcagctaacagtaaggaatggcgccacccgccaccttcaccggcggtacgctgccggtgctaactaaccgaacccggtttcttggccttaaactctacgtcctactcctaattgcagtactaatcgcgatcgcaacggtgatcctgat

SEQ ID NO: 91236 - DNA, 110 bp, Glycine max
ggacaaagggtacgacaacaacaatggaccaacacaagagactccaaatagcagtaccatatactcaaaattgcacaaaggacaagatacgacgcatatcgccaaccacc

SEQ ID NO: 91237 - DNA, 234 bp, Glycine max
aaaccggggcaccagggacagttttcatggctatttccaaattacaagaggcctttttccttggggagaccccaaattaaaaaagttctaaagcaattcttatacaaagtacaaaattcgggggttaaatccttttaaaaatacagtttggttaggaaaaaacaaaacttctcctaaagacaagcaacaagacctgaaagccttggaaaaattaatcatttatgccttggggga

SEQ ID NO: 91238 - DNA, 234 bp, Glycine max
gatcccacaaattaataattaaacagtttgacatattctatatacatcagaatcaacacattttgaaacaacaaaacacacacttgaacacacctttgaccatttgaggcaactataatacacatgaagcacaattgcgtttgagaaaaaagaaaaagaggtacacaacaatgaacacatactcattggtgttgtcaatggtggtgtgtaaataatacacatacagaaatgaat

SEQ ID NO: 91239 - DNA, 187 bp, Glycine max
atgttgacagaattatgaaatccacattgatttaaaagtacagcataattatgtaaacaattcatttacaaagtatataaccatgaaatacatattacataccaaattaaaaaaaaaaaaaatagtcacattgtgggagatcatgacaatgacatagtgggagaagaaagaacaggttttgggggga

SEQ ID NO: 91240 - DNA, 343 bp, Glycine max
  unsure (1)..(343): unsure at all n locations
cggtcgacgatgctcatctatgtcggcggccgcccttnntttttttttttttttttttttttttttttttttttttttttttttttttgttttttttttttttttttttttttttttttccgacccggggtcttgtttgattttttacctaaaaaattggggcccgggggccccttgccttgtttttttggtggcccccccggaatttttggccccaaaattgggtcctcccacccccgggggggtttccccctccttgggggaaaaggcccccctttttcaaaaaaaattccccaggggggaaaaataatttacccccccctaccccggggggggggggggg

SEQ ID NO: 91241 - DNA, 437 bp, Glycine max
gagcatcgttgttggtgggccccccccccccccccgaagccatctccgcggaaacaaaaaccaatgatccaacactcagatcaaacagataccgttgttacgaactgcagataataagagcatcttccgaagcctacaagagtatacacggcccgaaataatacttttgagactgcatttgctaagactactcggcggccgacggaccggttctggagcgcccgaaactctggcatatacacaagacttcagatgatgcgctgccggcggcgcggcttctaccctggaacggagtacaaagctaattatcaaggccacttataaatcaaccctgatacactgcatccccgtaattatggctatgccttatcacggaaaacgagacacgccgaaactaatgtggtttgccggacggaagaagtctccccggaagccga

SEQ ID NO: 91242 - DNA, 449 bp, Glycine max
ttcggttaaccaaccgggtttcgtagtatgcgagcatcgttgttggtgggccccccccccccccccccccccaatgataaatcggaggcgcgacagaaacaccaccgatgaaccggcaaccggacacctttcccagagaactttttgaagacaccaaattttgaaatacggtcaacaaagcagacgttgctatggctcgacacaaagactaccacgccggcgggcggaccgaacgctaatattcggcggattcatacgaaggtctgaaccggcgggatgagtagggcgaataagctgctgaagaagatcatgagaatgcggatccggagattgcatttcctgcggctgcggggtgcgggatagagagaccccgaatctataaccatagaagagcctcagaaagcgctctccatccgtctgatttaagaggcgactactccgaaacccct

SEQ ID NO: 91243 - DNA, 465 bp, Glycine max
gttcggttaaccaaccgggtttcgtagtatgcgagcatcgttgttggtgggccccccccccccccctggaaaggacaaaccccgtagccgctaaccgcgacgagaacactcctcactcactactcactacctagccaaatatcccagcatcaacaccccctgccactcagctaacccgaccgaggcaaaaatcatttttaacttaatagcacgccacggaaatctaaagcaacccgccgcccagaccctcctccaagaacgcaactgcgccgcgtggcacccaatgcacgaccgccgggtaactaactcgcatcagtccctagtcttacgcacgctcaaccgtatcacccttcaaaatggaacggtccccttgatgacgacaacgcgaaacaacacggcctcccgagtgctcccatgactcacgaaaccagcctctaaagcgccatctccggcggaatgcgaact

SEQ ID NO: 91244 - DNA, 249 bp, Glycine max
gagcatcgttgttggtgggccccccccccccccccccccccagaataagactcaaacccccgacacaccttaatttgagcccaaccagatcctaagaataatcatgcatggaatagagaatcataatgggggaattggactgaatcaagcataaagagtacgatcggagaaaaatacgagcagtagggcgctacccgagctggcaaaaccctgaagggcgtctcgcgatgaaaagacggtgaaactcga

SEQ ID NO: 91245 - DNA, 477 bp, Glycine max
tggctgattcaggttcggttaaccaaccgggtttcgtagtatgcgagcatcgttgttggtgggcccccccccccccccccccaggaagcaccgagggagcttaatgaccattacgagaccaagtgggggacccagaaaccaccgaccgagggagtaaacctccgacgacaaacagcgtgggccctaagtagacctttgacggcattgaaaatgatgtctgctcggactacgcctaatggaccgataattggaggaacgcttcgcagcatgtagaaggccgagacggcgcctcgggctaagttagaattgagcgtaggggcccaaatgccgccggcgcatcgtgaatatggggatgggagtagacggcatttgatcatcgagctcaggatgcctccctggatactgatctccgaccagccgctatggcttaactagccctcccaggaagcgcccgggacgtccacgcataaaggccat

SEQ ID NO: 91246 - DNA, 480 bp, Glycine max
ttcggttaaccaaccgggtttcgtagtatgcgagcatcgttgttggtgggccccccccccccccccccccccccccccccccccccccccccccccccccccccttaaaacactactgcgggacggggggagcgcaccagcgaaacgagatacggactagaaaccccctcccaaattaaacttttacctggaagaacctaggaagtcatgatgccgactaccgggtaaaagaagggaggcctaactcgtaaggagagagtacgaactgaatactatatggacacggacagacctctaagatcgaaagagacaatgctgaacacccagcatttccgggccggcaaacttaaagaaacggacgtatacgctatgctacgacgcgactttacgcgaacgcgagaaaattacttacagctgaaccctaatggccattaaaattccaaagggtagccgcgaagcaatgacgacccggccccggcc

SEQ ID NO: 91247 - DNA, 415 bp, Glycine max
ttcggttaaccaaccgggtttcgtagtatgcgagcctcgttgttggtgggcccccccccccccccatggaaatcaagagagcccgccccacacacaccccaatacagtcataccctacaaaaagaatgaaatgcgcgcactaacccactggagcggcggcggatctactggaacgaacaatacaataccgattctgcccgctgcttaagcttaaggctagcgaaaagactaggaaatcctgctgccaaattccctttggcggacctatcggcaggggcgagaacgcgatgaggacgacgaatcgtaatgaatctgcctgagcgaaaaaacggaggacgctggaatcccggcagacgatgaggatatatacgatatatttaacggatgagagctccggctggagagcgggcggctc

SEQ ID NO: 91248 - DNA, 439 bp, Glycine max
ttcggttaaccaaccgggtttcgtagtatgcgagcatcgttgttggtgggcccccccccccccccccccccccccccccccccccccctcccccccattggacctaccgacaactgcccaccgccagggacgatcaattacaagaacggcgatcgagattcaacccggattcgcacacgacctactagcagcaacgaaagtaaaagaatatagacggaaaccgaagaaggatctgcgtggacgcgccagacaacgtaatccaagacatagaatagaatcgccggactaaagcggcgcattcgtggcgagcatacccgaaaagagtataatgatagcaccacacccagacaaactagcgccaccactcgctgctcgaatggcccttctaaaccacacatgcatccaagcctgacgacggccatgcatgttaagataaccc

SEQ ID NO: 91249 - DNA, 411 bp, Glycine max
ggggaaggcaacgagatggggtttttccaatgaattggcagaagacacaacagccttttaacattaaagaacaagagagttaccgggggatctacctacacttctttggggtggcggagcaactttatgtcatgggggacacgtagctaactcacgggactttcattttttttttttttcatctaggcttgggagaggccatgtcaggcccattgtcaagggatagagtcagctggacagaggcaagaaggggatgcttcactttgatcgatgaatgaaaagtccggtccattgtattttgaacatcaaacagccgaatttggggttcccactaccaatttggagactggttggtatagctgctcctcgtcgaagggtttaaatacgtatccatccattcccgattttatg

SEQ ID NO: 91250 - DNA, 185 bp, Glycine max
acccctttgtaacacgttttgatgttgagaaatatcctgctctccccacagtttgagcaacagtgaacatcttgtaaggttaatgatgtacaagaaaatgtttagtttctggagaaaaaaaaaaaaaaaaaaaaaaaaaaaaaaaaaaaaaaaaaaaaaaaaaaaaaaaaaaaaaaaaaaaaata

SEQ ID NO: 91251 - DNA, 333 bp, Glycine max
ggttcggttaaccacccgggtttcgtagtatgcgagcatcgttgttggtgggccccccccccccccccaaaacaaccgctgctatcataacacgaaacaaacaaattgaaatggaccgctactgtcacaagccgctacatcgagaacacacacagcacgatctcacttaccgcgcaagcttaagcttatccgagccaacagagcaaaaggacatgaaaaaggaaacttgacaaaagcttctatgaaaggagacttcctggcccgatactagaaaatcacaagacgattagaccaaatcagacgttcaccggctatccactaggagcggcactc

SEQ ID NO: 91252 - DNA, 425 bp, Glycine max
gctgattcaggttcggttaaccaaccgggtttcgtagtatgcgagcatcgttgttggtgggccccccccccccccctgtaattataaaacaaggtacgaaccatccaacccatccaaaacggatacagagcgattaggctcgtcgtctccctaatcaatcgaaggacccgctcacgcagtactctgagagtaccgagaacgatcttatagaaccagatcacgaatagctaataggaaccacgaatattacctaccttcccttctgttagcctttatataccatttgccccaatgaagacctacagatagagaatatggataggctgccagactgcccggctttaacgaaagaaaggagagcccagcgacaaccgcgcggcataatataaatacacattactggcgcaccagcgcgccgcgcgccg

SEQ ID NO: 91253 - DNA, 433 bp, Glycine max
gttcggttaaccaaccgggtttcgtagtatgcgagcatcgttgttggtgggccccccccccccgatccccaagcgaatccccgtgaccacctcatccctgctcaagcccagaatctacctgaggaactcccccgcgaaaaaaaaaaaaaaaatttgttggtgggccccccccccccccccctcagaatccccggctacttaaacgaatgaccccaattatgataacggtacagataagccgcgcgatcaagaagcattacaacacagaattaacacgaattaagggaacaaccccaacctctcaccaataccccaatatgatgagaagctatggcagacggcgaactagaaatcaaatgaatgagaacacaaccacaacaggcgcgaggaggaggaggagccccgggaatgccaagaaagcacccgcctccgc

SEQ ID NO: 91254 - DNA, 358 bp, Glycine max
ttcggttaaccaaccgggtttcgtagtatgcgagcatcgttgttggtgggccccccccccccccctaaaacgaccccccctggtcgatataggatgaaccctgctcgcagtattagaataaagaaaaaataaggaatcataacataatcaccgctacattcttgaacaccatgacacgcgcagagattggccgaacgcaagtgtctcctaatacctgccggcatgcatagacgactagactacggacctgtctaatctgcctaccttaaaaaaacgccagacgaagacgattacggcgtgctatgcgaaggatagccttagtaacgtcgccgcggagaagatacctacggagcacttt

SEQ ID NO: 91255 - DNA, 448 bp, Glycine max
ttcggttaaccaaccgggtttcgtagtatgcgagcatcgttgttggtgaacatatacacgaagagaagggcgagcgagattaatagcttatggaccagcatctcaacgtcctgaatgacgcccacaattagacttacctaattgggatgctctcgccctaacatttcgcgggagctcacgcggatccacttgctgccctctatggcgagccgggcctggcggaatatgcggatcgcgaactcagccgccctgaccacgggattgaggaggatgctctccgataaaaatctggacaataacaggatcgagctcctgaaagactatgaaatgatggagaagcccatggggaatcaaattcctgggctcacatcatgggaaaacagttaagagaacagggagcaaaacattctaaactacctggaaatgaggattccccacgacgcgcgcc

SEQ ID NO: 91256 - DNA, 418 bp, Glycine max
ttcggttaaccacccgggtttcgtagtacgcgagcatcgttgttggtgggcccccccccccccccccccccccccccccctgactcaacaaattcacgacatgacacatgacatgacattcacccgacagacctccgcccctattatgagactgatgaaccgatcgccagcagactaccgcgcccacccataaaagaaatccccaggaaccaaagaaagccacgatgcattgccctgaggccatagaaagctaccaattcagcgacggagatctactcacccgagacgattacacatatgctaatgccggagcggaaaataatagcgaacccgaaatccatcactacgggggcccagacaataatatcttccaacctagattacgagaccgagtttcttctgttagcgccgaaccctg

SEQ ID NO: 91257 - DNA, 239 bp, Glycine max
gtgatgagctgtggagattcatcatttgttcctctccgttcattaagctttaagcccgtgcctaatgtgcacttgaaacaagggacaatattgccaccaacctgatgggactgaggtggcccgcgcctccggatgttcttcagaagatgtctctttcctcgctggaaagcttcattgaaaaactcccatttttcagtgccaatcttgcggaatccctggataaaaatgccaagtgaatt

SEQ ID NO: 91258 - DNA, 293 bp, Glycine max
ggttcggttaaccaccgggtttcgtagtatgcgagcatcgttgttggtgggccccccccccccccccccaacgccaagacacccaaaccagtaacccttccgataagcagcatgactaagaagcagagaagctacgcagaataactaaaggcttctaccatctaactatgaggatccagaaacgaacccacccaacaaccttaggggctttaagcaaagagatgagaacactctgataatgatactaatgggtactgacggacaccgccacccacaccacgcccgcccccgac

SEQ ID NO: 91259 - DNA, 492 bp, Glycine max
gttcggttaccaccgggtttcgtgtatgcgagcatcgttgttggtgggcccccccccccccccgaattaacaaatcaacaaccaacaaagtaagcctacgcacactaaaagactgccagagtacgtccataacacgtccgagaagctattgaggaatcccacaaagcagccaaaaaattgcctgaagggcacgaggattcatcaggagcccacggaccctatcgaggctgattcgcccccaatccgccctacataagcccacaattctcccgcgagccctcacatcgagatgctctagcctctgataatattgctaataagataggcttagactgtttcttgtactggttatatttctcgcaccgaccgaaaagggacccagaactgggcatatactcccgaagcccgaaacctaccgaagcggcctgactgcgattaactattgtccttgtgaagcgccgattctgaccatggatccgcctatactctaat

SEQ ID NO: 91260 - DNA, 461 bp, Glycine max
tggctgattcaggttcggttaaccaaccgggtttcgtagtatgcgagcatcgttgttggtgggccccccccccccccctaagcactaaccgccaacacaccacgcagcctaaaccaaagaagccccgtgacaccacagacttaattaacgaccccccttcggaattaataaatgagactgaactattttcgcttgtagaagcaatatatgcagaaccatgtacaaaaggaggtatctccgacgtggtaaactgacctggccgaggtggataggctggcctataacaacactcggtagtagttagagcgcgatgcacctactctgcgggcggccgatgctgaggacacagagccccgctaagatcacggaaaaaaccgcctggagaaagaccacgaccgctaacctgccggccctcacggtagcggcgatggccgcccacagtcccggacgcgctgcgccga

SEQ ID NO: 91261 - DNA, 438 bp, Glycine max
ttccttttttttttttttttcttttttttttttttttttttttttttttttttttttttttttttttttttttttttcctaaggactaattaccccctttttttttttcctttggccccaaaatggaaaaaaccagtttggcctttttaagacctaaatttaaataaaaaaggggggttaaaaattggccctttaaacccaacccccccttaaatgggcaaaaaaaattggttcagaaaatttttttgaatgggcccaaggcccctgggggagcactttttggccttttttcttgggggaccaaaaaaaaaccttttttttgggtttattccaccaccgatctttaaaaaataaattttttggaaatccctttttttttgtttaaaacgggaaaagggtttcattttgacaaaatagctaattttttgaaatttcctt

SEQ ID NO: 91262 - DNA, 523 bp, Glycine max
tttattgctacagtcttttactatgttttttttgttcagatataaaacactatatataacctgttgacaaatctatctgggagtagtatacagccaagacagtcgcctcccgcccgatccatgaacaaggggaatggcaggttacaccagcttattggaatgtacagagttaaccaccccctagcgcattttcatttaaagggccgggattcgatgtttacagtatgcatccgtgctgcatcacggccagacgggctgaaggaaggaaccagctggaccggccccctcatatggcgtagatgcgggcgacctccgaatccgagagcttcgagttgtggtgccacgagttcgagccgctcctcctcggcgacttcaccttctttctgatcttgcgcacgcgcttggacttcaccacgtagtacgttattgtgccgagcacgccggccatgatcaccccgccgatcagggtcaccaggagcgccgcccacttgaagtgccgccccaccacgatgtacgaggagga

SEQ ID NO: 91263 - DNA, 469 bp, Glycine max
caggttcggttaaccaaccgggtttcgtagtatgcgagcatcgttgttggtgggccccccccccccccctaattaaaacgaaaccgccaccacaaaaaggctgaacccagagcacacactcaacccagaatattatgtctgacaaagagagcccggggggccgggccgcgccaacacaacccctatacaaacacgtgctcgaccaaaaaactcacgcatgctctcaaccttaaaaataaccctcaacctagcactaacgacggcaaccccagccctgactatgcacgcgaggatagcctcagaccgcctgcgtcgcctaacaccgccttacgcccgtacgagtgcgccctatgacgctacggactcctccctactaaatgatcaacttaggatatattcttcatacacctcccgggacttacggactgggacggctaaccaactcccgatcctaaaaccccggaccccg

SEQ ID NO: 91264 - DNA, 452 bp, Glycine max
ttcggttaaccaaccgggtttcgtagtatgcgagcatcgttgttggtgggccccccccccccccccccccccccccccccccccctaccccaataccactcacaccctatcagtaatacaaaagaaaccccgaaccgtacgacttagtcccatttaccaatccgacacgcatatgacggcgaaaaattgtaaagagacgacaaggaagaaataagattccatgctatcgaccatccgtcccgatcaagccgaccaccgacggccgaagctatcgaccatctgacccgatcaagccgaccaccgacggccgaagctatcgacggaggcgaaaaaggccggcgatcccgcgccgtcgctaccgaaaaaggcccgcctgcctcccgatgcgccgaccgacataaatcatccgctcagatgttccaatccccttgtaacggcctgtaacgaaacat

SEQ ID NO: 91265 - DNA, 493 bp, Glycine max
tggctgattcggttcggttaaccaccgggtttcgtagtatgcgagcatcgttgttggtgggccccccccccccccccccccccccccccccccccctaagcgaaagctaaacccaccctagaacaggcgaagtaacataaataggccagaaaaaccactataccagaaaacaacagaacagataaaaacgctaaaaaaacaagagcattttgaagcccacgcggagaacatctcgcggtcaacccggggccgcgggggaattgatacccctggcccgacgcccggcacaagaacaaagaacccagaaatggattctgaaacaccctaaccctaaggggtttctctcttctagcaaagacaaacgcgcgaacactgcctactatctcccgtgccctagcaagaaagtggataaatccgaaggactccctcagatttctctgagaaacgtactgactagccaaacatatcggaatgatagaaaaagcccgttcga

SEQ ID NO: 91266 - DNA, 436 bp, Glycine max
caggttcggttaaccaaccgggtttcgtagtatgcgagcatcgttgttggtgggcccccccccccccccaacccaaggcgcctctccgacaaaacctggcctaaacttctcgagcctcagacattcccttacaaacctgaaaacctcacaccgggactcactagatgctatattattaatatgataaaaactctacggattctcgccggatcacagacggagaaaactcaagccccgcaatactaccttatcacgccgccacaacgccttaactctggacttaacttctggagcgccggtcgttacagaagggacatccggcggagtgccggatatactatactgcgacgtctagcgaggactataactggcggccttaagatgagaataggcctaacaatgtggcgaagatgacggaaacggatactaccttact

SEQ ID NO: 91267 - DNA, 300 bp, Glycine max
ttcggttaaccaaccgggtttcgtagtatgcgagcatcgttgttggtgggcccccccccccccccccccccccccccctctactatctaagactccggagagacacatcccgacaacctcgatcaagcactagccaaaagaacacactgaatctttgctaaacctcggggaaatgaaccgtacgaattcatcccacccccgcaagggcctccccccacaaccattaaactacccgccgccaccacctaaacccactcactcatacacacacacacacatgacaagggcatgaacgccccc

SEQ ID NO: 91268 - DNA, 382 bp, Glycine max
gttcggttaaccaaccgggtttcgtagtatgcgagcatcgttgttggtgggcccccccccccccccaaatgacgcctaaccccaccccaactgaggcgcgtcaagcggaaaaataaaacttaaaaacatgggacgaccaggaactttaacgaataaacccctatgactcaaagaacgtaaaggaaaactaccctaatccaaactaagggaaagcacctaaggaatggggcgctgcctaaaagacgcatgacttgatgcggaaccccttgattttagcggagaagctctaggggatgccgggctatttccccaacccctcgcctctgatctgggcctggagggtagagaacatgcggatgactagggacagtagtaggatttt

SEQ ID NO: 91269 - DNA, 486 bp, Glycine max
tggctgattcaggttcggttaaccaaccgggtttcgtagtatgcgagcatcgttgttggtgagaggtggggcgcgctcggaggaggagtgaggggaggtcgcggttgtgtcagagtgctacgttgatcggaccgaccctgaagttaccgcgaaggcggagaggtgaagcccgtcacggacctctgaacttaagggcacaacgaaagattacctgtccctgccggccctgtatcccgatgacaggaagaccccgattttctactaatcaccgtccgcggagaacgcggagagggctcctcgcttgtaaacgccgatgtggtccaaattgtattcattatcttttctatccccggactagaattgtatgtatctatacttttccccctagttcttctagtgggtaaagttgtggtgacgtcgcaccttaaggacggactactgcctgccgcaaccggtgctccgggccccgctcgatatgatgcggtg

SEQ ID NO: 91270 - DNA, 429 bp, Glycine max
tggctgattcaggttcggttaaccaaccgggtttcgtagtatgcgagcatcgttgttggtgggccccccccccccccccccaaaatgattctaactaacagcacccacaaacgaactaccgaacaacactggcggcattaagcacaaacacatgaatcaaggaaatttgaagaatctgattatgaaactaaagggcacttaggaaaaccgccattggcacgccgccccttcctaggatgcctaggaccctcccgaggaatataattccgacgatccttggagccacgaaccgggaaagccggcaatggaacacgggatactcgctatcgatagacaggagcctctagcggaaaccgcttaaagcgccgacatcctagactacctgcggagatgcgaccgggagcaggctaatgatgaggagcaagacca

SEQ ID NO: 91271 - DNA, 433 bp, Glycine max
gttcggttaccagccgggtttcgtgtatgcgagcatcgttgttggtgggcccccccccccccccccaacagcaatttctgtccctaaccaagaccaaaacgagttataaaccagagtccggaactcaaaaacccgaaatgaaggacacctcatgcccgacctaaataggaccctatccttaccgaatctaccgggaaagacagagcaatatttctccttagggattcagcgaagtggaccgacccgatatccgcgcttgacgcgaacccgccggatggagtctcaagcacgaccccggcgcccctggcgaggaacaacggcccgtccattaaaagaatcacaatttctacgcgctcatcattaagatcgggccggacgccgcccttaacaattatttggaactagacgaatgagatgagacttttccacttgc

SEQ ID NO: 91272 - DNA, 414 bp, Glycine max
gttcggtaacaaccgggtttcgtgtatgcgagcatcgttgttggtgggccccccccccccccccatcaatcctaatagaacgccccacaataccatatatctgaacaaaaaagaaaaatataaaacccaaaatatattaaatttaaaggaaaatgaaaaataatcccctactccgatgactaaaatagaaataaaatgaaaataatcccctactctgatgacgccggacagtcccctaatactaactgatccgcaggagggaagaatgaatatcccgaaaatctggacggtaacacacataggacacccttgcctcgcaaatcaatgctgggccttacgatgacgaagccggaattctacccgacgaatcgccttaatatttctgacaaggagatgactcgcgctgacgagacc

SEQ ID NO: 91273 - DNA, 316 bp, Glycine max
gttcggttaaccaaccgggtttcgtagtatgcgagcatcgttgttggtgggccccccccccccccctaaactcaaagagtacaactaagaaaaccccgctacccagaaccccgattatccgcgatcaccctcctcatcaaagcgcgaaaccagagctggaccgacaccatcatttgtaccgcagatcaaaaaataacaaaaaggagcctacttgatcaaagatattaacagcagtagatagcgacaattctcgataactactatactcgacgactaaatcaaaacatttggaccgcgatgctgctcctattcccct

SEQ ID NO: 91274 - DNA, 410 bp, Glycine max
ggctgattcaggttcggttaacaaccgggtttcgtagtatgcgagcatcgttgttggtgggcccccccccccccccccccccccccccccccccctaatgagacccacaacccacaacccgaaacacaatttgagggaataaaactaaaatttaaataacgggctcatcgctaacacccaaaagttagccaatccagaccgccctgaaattgcagcctttctaacgaacaaaccagattcctgaaacacaccggttcgaaaacagatttagaagggccaacacttataagctgtatattgaattactgctgctgaagacctcgccggcgccgtctttccaagagaaagaacctccaggaaataatgaggagagaaccgcgaaacgccgaactaataaacctaaacccccc

SEQ ID NO: 91275 - DNA, 424 bp, Glycine max
cggttaaccaaccgggtttcgtttatgcgagcatcgttgttggtgggcccccccccccccccagagcccagaacagcaacagactagccagggtcagaaacgctatcggaataaacagacaaacaactaagaacattgaaatcgccgaagttatatagaaacaagagaagtaaggaagtttaccatccccgccaatataaagcaagcaacaagcaggtcggctagtcttataagtacttctgagatggcttctaggcctagttgcttgttgactatcataagttaacccattgcggagattcccgcgaccttgatgcctaactgtgcggaaaccgcggaaaagccggccgacctacctcgtgctccctttgcgatactgaatagacccgaaataaatgctatgcacagtaaactgatgccctta

SEQ ID NO: 91276 - DNA, 431 bp, Glycine max
tggctgattcaggttcggttaaccaaccgggtttcgtagtatgcgagcatcgttgttggtgggcccccccccccccccccccccccccccccctccgaactgacaggagccacgaccccccggggacccaccgctcccaggacacagagaatcaagcaaggctcaagcaacacgacgaagaacgatactatccgaacgaagctcagacccacattacccaggataaacctcgacgaatctactactcacgactacgcccccggaggcggatgcggacgcgattgcggagatagggaaaccgatcgacccgaactcgctgaataccgccgaaacgaaggagctaaatgcgtcgaattgtggctagaaggaatcgctgatggggaatgcgacacagattactggctgcatgaagatggagagagccgacggtt

SEQ ID NO: 91277 - DNA, 307 bp, Glycine max
gcggcctttttttttttttttttttttttttttttttttttttttttaaaatacaaaaaatactttttataaaacacattcaatcaatcgccttcatacagttaaaaggctaaaattatgctatactttctccttaatctccccccaaataatatgctaaaactaattcaacttataaatgtcaaaataaaaaggtttctatttcactaaataatgggggcaatttaattggaaatggccaccatctaaaacgggtttaaataaataaactttgcctagggaatatgaataaatgatcaaagggggt

SEQ ID NO: 91278 - DNA, 299 bp, Glycine max
tcaggttcggttaaccaccgggtttcgtgtatgcgagcatcgttgttggtgggccccccccccccccccccccccccccccccccccccccccccgaacagaacaaacagccgccaccaaagagaccgaacgaacgtggccgacagatgcaaaactgcaaaaccactgcacagcccgcggcccacgccgggggcaacaacactgcaaaagccaccgaagccacaaactcgacaacacaaattcccgcacccgagcgaacaaccttttgaaccccaccctatacctggaggacgccaaag

SEQ ID NO: 91279 - DNA, 493 bp, Glycine max
actgtgaggagcgtcccgcgatgcggcgggtggtgcagatcctcaaccgagaggcggagcctgtgcccgtgccgcccaagaaaccactgctggtgttcagctccagcgcgtccgcgaagctgcaggagatcgccttctcctgtggcgatgacgtccgaggcggctactccgttgccaagcctgcatcaccaaagtccgagggagccgacattgaacgctgacgcgaagcagtcgataccaattacactactacagatttgttggtgtgggaatatataggtgcttcagtctggaaagtgctgatgaatgcaaattccatgagtcatctacggtctagagaagctggcattgacgcttgatagcaagcgatcaatgcactgatagtgaattactacttgtgtgattcatatatgcattggccatgtgctcgtgaagggaatataggtaataatcccctctgttgtatgaatgttcaatactgaataatggagtc

SEQ ID NO: 91280 - DNA, 479 bp, Glycine max
ggctgacttcaggttcggttaaccaaccgggtttcgtagtatgcgagcatcgttgttggtgggcccccccccccccccaatctgacaaaattgctactcataaaataccccttcagggttccgaccactcccttcctgatggagctgaataaacttggagaatagaaaccgcaaagaaaagataaggcatcaaacttggaaaagttggcccgatagcctcggcagaggatgcccactaaatactatgcgggaaaaatgcggaggcttttgagatgctatacagataatagtgtcactttaacctcagaacgtatagcaatgtccataaggacgaaaagctgggctgtgagccctcgtcgccccccgcgcggaaccgcgcggggacacgccttgccgatggagttgagtccgcgcacgaatacgggctcctcccaagacggcctgatcccgagtcttttatcgacgcccgcgatacggcc

SEQ ID NO: 91281 - DNA, 457 bp, Glycine max
ggctgattcaggttcggttaaccaaccgggtttcgtagtatgcgagcatcgttgttggtgggcccccccccccccccccaacgccgaagccttgcctcgggccacgtcttaaaaccacccaccacagactcctatcgacctccaaagataaatgaaacgccccgtttataaagaatagacgctccaacaagcctactaagcccacggaatgctaaattcaggataagcagccgactataagacctagccccgatactacccggcccccttttatatatagcgtaaccagtaccgagagtcccaaaacatcaagatacacctagaaaaacggccatccaactccagccgcctcggttcttactttacccacctcctaggagaccgagacacgtgccgcgccgaagcatgccttgacaaacgcgcggggcgcgccttaaacacgcgacaaaatgggcct

SEQ ID NO: 91282 - DNA, 215 bp, Glycine max
caggttcggttaaccaaccgggtttcgtagtatgcgagcatcgttgttggtgggcccccccccccccccatgaaaataacccaccccaccacaaaaacttggacaccctcccagacatctactggaaagattttaagaaactaaataacccaagcagatcatgcagaagaacaaaagcaacaggcttcatcttcactagaccgctacgacataaa

SEQ ID NO: 91283 - DNA, 593 bp, Glycine max
aacctataaactttggtatataaaatacaacaccacttttttaagaagtacatataaactctgttacgatacaaagctcttgattattccacgatattaatatttttaggctgctctagaagtctttcttattcttccccatcacacttcttatccaaactttactatataaataatatacgatgtaaaacaatattttttatggctatatacacgcttgctcatcacgtgcataacctacacaagtccaggagcacagaattttttgtgccatcactatcgctgtcccccatctttgctacagacagcatcaagtcttctgttttcagcttcagaaaatgtgcagctatactcctgtactgtggcaatcgtgatttcaagccaggaataattgttgcgagtggggtggcggtgaatatgcgtgaacatgataggagccacgtacctttacttgcaggagcacaacgtttctgcctacgagcaacagttctggccccctgaaactacaaattcaagcaaaaacctaccgcgaagtttctgcaacattcagtcttccttcgatgacatctctaacgaaactgttcaaagaacac

SEQ ID NO: 91284 - DNA, 442 bp, Glycine max
tggctgattcaggttcggttaaccaaccgggtttcgtagtatgcgagcatcgttgttggtgggcccccccccccccccaaaaagacaaagaagacagcccgtgctaaagtatccgaacagacgaccccaaaagacaacaaagatgatgagccaaaggatatactgaaatgagaatccgaatttatagagctaagaaagatacaatagacactataagagccgacaaaatttaccggggccatgaaggaggagtaattgtaattagaatactgaaatcttaccggccgctaacacctcaacgctggaattcagtaggacgccggaacctgccgggatgaaaaactatggcgctgctacgcttatttacaggccggcctcggctaacgccatgcccgagacctcgaacatcacgatatgcccggaggcggaattcaacttcgcc

SEQ ID NO: 91285 - DNA, 296 bp, Glycine max
ggaatcaacaattatattttctgttattcggaatatgcaaattgagatgctcgcaactcctaactggactaggaaattccgcgtaatataagcatccgataacgagacaaggggatgacaagagaaatgaagcttagattcactcatttgcaactaacaaggagggcggaaagcttgttaggcaagaagggattaggtagcacgaacggagaagaagccaagggattaagaacgggcattaggcggagtggatttactttcccgactatcaggaacgggtattggggaagaagggg

SEQ ID NO: 91286 - DNA, 463 bp, Glycine max
ggcccccccccccccccagatgaacacacacacattgacctaactggcccgtgacatacacatgaatcccccaacagcaagaaaaactatactaaattttaccagaaaattaccccgccccccgccgggaccacagcgaccctaaactactcgatcacaccaagatttagaaaaatgcaaaaatttttgtaaaaataaaaaaaataaaaccgacggaaaagacaagaaattaagccctatccatcagatctcgatgctgctgcattcacatgcagtgccgcgactaaaccactagctcgatcggaagcgaccgaaacagctgacgatgcaaattcagcatccgtcggcctgccgcccctgactgcaaaagaggacgaggagcacctgggccggggcccgacgaccacactgagataccgcgacgggaggcgtctgactatgcgaccggaccggaaacaccttg

SEQ ID NO: 91287 - DNA, 416 bp, Glycine max
gttcggttaaccaaccgggtttcgtagtatgcgagcatcgttgttggtgggcccccccccccccccctaagaaactaaagacgacgcttctcccccccccacccatgagcacaccacctagaaataacagcaaaagttagcaggaatttccacgaacgaactctgacctctaaatttctcggcgcgaactggacaatagctgagctttgaagtaacaccctaacgggctgggaccggcctcgcccttcctcaaaactcgagagaaagactttctatccctggcccaatgctattcaacgggaccgcccggtaccaaccttttaaacatacataaaacctagctaaaccgaaaaacgacaatgaataacccgcctgctagcggaaggaaaacccaaatactacgaactacctgcccc

SEQ ID NO: 91288 - DNA, 370 bp, Glycine max
ggggggccctcacagttcacattcttttctaaaaaccgaaaacatcaatcccataacaattttttattttacttaacccttttgggaaacataaaatacaactcccacaacttaaatcctaaggacaaccccccaactttaaaaaatcatactaacccccaaaaaaacaaaactgggtgcaaatttaaccaactttaactaccatccaattgcccttgaacaaaaacccttggaaaaaaaaaatttaaaaatccccagccctgaaacaggggataaataatattttaagggttcacccctttctaaacagggggcaaaaaggggttcccccctccaaattcatatttaagaaagggggccccccattttt

SEQ ID NO: 91289 - DNA, 370 bp, Glycine max
gttcggttaaccaaccgggtttcgtagtatgcgagcatcgttgttggtgggcccccccccccccccccccccccccccccccccccccccccccccccccccccccccccccccccctgtttggccgagatccgagacagacccgcataaaggtataagacgaacgcgaaaagaaccacgcaccaaagccaagcgaccctttatagacaaaacagaagcggcagaagccatacggcaattagaagaggcgaagcccaaacaacgacagcaagcgggaaaaaaagaaaagcttactgaaacccatggaagcccaagcaggacggatcctgagcctaagaataaggaccttaaaaataatacccaataacag

SEQ ID NO: 91290 - DNA, 518 bp, Glycine max
tgaagggcttcgtgtccaacctcgtccacggcggcggcggccatggccatggaagcggctacggccatggccatggaaacggctacggccatgggaatggcggctacggcggcggccacgggtaccctcctcccgccgccgccggcgcgtaccctcatccgcacggcgcgtaccctcacccgcacggcggccacgggtaccctcctcccgccacctaccccgcgcactcggcgcactacgggcacacggggtcgtaccacaccagccacaacagctacggcggcggcggcggccaccacggcatctacggcggcggcaagcacggcgcgttcggcggcggcaaccgcaagagcggcggcggcaagttcaacaagtggaagtgaagcgaccgaaacgaatcaaaacaacaccctcagtctcgcttcgcacacgtgcacccgcacacgaatcctagtgctacataataaagtgcaagcaggcaggaggcgtacgtgtgcgagtgagtgctgctgctgcgg

SEQ ID NO: 91291 - DNA, 202 bp, Glycine max
gctgattcaggttcggttaaccaaccgggtttcgtagtatgcgagcatcgttgttggtgggcccccccccccccccgaaaaaccagcctgaatcttgcagactaaactcccaccacgccgagaagttaagaagagcagacccgaaaaagaaaaccttcgaatacctgaaaccaccacttcgcgcggcttttgacgtctgccc

SEQ ID NO: 91292 - DNA, 409 bp, Glycine max
ctgattcaggttcggttaaccaaccgggtttcgtagtatgcgagcatcgttgttggtgggcccccccccccccccaaaccgcaaaaccaaaccccgccgaaccagagaaagacacgaccaatgacagccccgaggcaaagcgaacctaaccctgccgctcccccctcacaagccagaaagactacagggaaattattgaacgatataaacatacgaactaaactcgtcgcaacaacctcacttcacccatagagctggatgacgctcgcggactaccgagggaaccactaaggcatggaattaaaaagacctttctactcgctgaaggtgggctccaaaagccgaagaggatcgcgctcgaggaaaatatctctgcgaaacctatgagccgtcccaggacggtgctcaa

SEQ ID NO: 91293 - DNA, 414 bp, Glycine max
ttttttttttttttttttttttttttttttttttttttttttttttttttttttttttttttttttttttttttttttttttttttttttaaaagggggggggggggcccccccttgaaaaataatttctaggggggagaaaatgaaaatttaaagccccaaaaccgaggggacaatttacatccatttggtaagccaaaaatgggggaaaattttagggtaaaataaaggggcaaccatggggggatttttcgaaacgttcctttaattgggggtgtctttttgttcagggaatttctcaagcgattttatgaacccttaaaaaaccttggggaaaaacttatggggctgatgggggattctttgggttttacaaaggaaaacctgaaatgggccgggtccaaaggccatttt

SEQ ID NO: 91294 - DNA, 414 bp, Glycine max
ttttttttttttttttttttttttttttttttttttttgaattctttttttttttttttttttttttttttttttttttttttttttttttaaagggggggggggggcccccccttgaaaattaatttcttggggggtgaacattaaaatttaaagccccaaaaccgaaggattaatttacatccttttgttaagcctaacattttggaaaattttagggtaatttttttgggcaaccatggggggattttttgaaaccttcctttaattgggggtgtttttttgttcaaggattttcccaagcgatttttttaaccctttaaaaaatttttggaaaaacttattgggctgatgttggattttttgggttttaaaaaggaaaaccttaaatgggccgggtccaaaggccaattt

SEQ ID NO: 91295 - DNA, 279 bp, Glycine max
gttgttgtgtggtttggttgggtggtttggttagttgggttgaacgaggcagagcggaaaagtgtttggagggtcgtagtaaagggtcccaacaaaacacccacgagccgaagggaaaattgccaaaaattatgacccccaaagggaaggagggggacctagggggggcccccaacgtacgtccaaggaaagacctttttgggacaaaatgtgaaagcaaagcaaatggccaagtacaaaattacaaaaaaaaagcccccaagggggggggaccccggg

SEQ ID NO: 91296 - DNA, 434 bp, Glycine max
  unsure (1)..(434): unsure at all n locations
ctgattcaggttcggttaaccaaccgggtttcgtagtatgcgagcatcgttgttggtgggcccccccccccccccccccctaccaaaaaanttttcccgaccctaaaacacacagaatccacccctgaggcacataccgctgccctcccagatatatacctaagccctggccggccatgccccgccgatgacgacaccaggatggcaccgacactaagaataacggaccccaaggccacataggtgcgctgtaagccctagaacgaagccatgacctccttactcggctcgctcatgaccgcgcctacgactcggacgggaaactgataacgctactaagcatttacctcaacccgacatttaaactaaagatgagggcgaatacccttcacattcttaagactacggccgccgcgaccaagaaacccaaccac

SEQ ID NO: 91297 - DNA, 394 bp, Glycine max
gggtttcgtagtatgcgagcatcgttgttggtgggcccccccccccccccccccccccccccccccccccccccctttaaaaaacgacctcaaccttgaatcgcgcggaaatactcgatcaaatgaacgaagctctagaccttcaataaactaatgacacacatacccacagaaaatacaaattaataaacatcctggaattacgaatatgccggagctaaaggcctagctccgccgacgcccgcgacccggacccgggcctcgtcccttgttgcgctctgccgagctgcctatggatactttcccaaaggacagcgagcctcatgctgagctcagcgagctgcctgaggacaccggctatccgggaactggacccccgctaagcccccgactc

SEQ ID NO: 91298 - DNA, 488 bp, Glycine max
ctgattcaggttcggttaaccaaccgggtttcgtagtatgcgagcatcgttgttggtgggcccccccccccccccacatcccaatgaatatagatgaacaattctcgtaacgcgatcacagaggaacgatcttgctaaccacaaaaataacccttaggtaaaagagcccctccccatccctcgcccaacgctcagctgaaaacgatgcacttcttctggctctttttgccaaggcatcaacaacaccgatactgacctgtttcattgactgcttactaatcaaaagatatagcgcttttaacctatccgacataagcctccttaaatacttgatggtacttaaattcatgctagacctataacggctactactgctgatgatataagtccttcagcttttcatgacctaggcttggactctccctggagtgggatccttttatcggtccctaattacgaagtggtaccgcgcgctgcgcccggggacc

SEQ ID NO: 91299 - DNA, 435 bp, Glycine max
gttcggttaaccaaccgggtttcgtagtatgcgagcatcgttgttggtgggccccccccccccccccattattcagcacttccccggaccaaccaataggtacaatcagactcgatcttgagaaatcccgagacgatattacttatccttgaactctatattaatatccgccttattacgacgatgcacaaacttatttccccagatcatatgaatctattaaccctccctgaaatgcttcctttagaattaagcatcgaaataatgccactaactttcttaacggaattcctcgcccggcggcccccacgcccgaggacttgaacgctcctgctaaccgatgaccgcctaatgtttatccccaggacagaacttgccgatgccttaagacacgaaattaaggaatacccgctttatctctccctactatccctt

SEQ ID NO: 91300 - DNA, 308 bp, Glycine max
catgcacagatgcacttgcacacgatgcatgcacagttgcacactatgcatgtatacgtgtaaggaatgcaatgtttcatcacactactgactactgtactgtacgtgtgtaaaagagtatgtttgtttttgtgcctaatggccactggcctgttgtacgtgttgttaatgtggagtcgagtcacctgtactcactgtattgtaccgatgaataaaaagagaacgtgcatgccattgcgcgtgttcactaaaaaaaaaaaaaaaaaaaaaaaaaaaaaaaaaaaaaaaaagataaaaatgataaaaag

SEQ ID NO: 91301 - DNA, 427 bp, Glycine max
ggttcggttaaccaaccgggtttcgtagtatgcgagcatcgttgttggtgggcccccccccccccccccccccccccccccccaaagcccaaacactagagagaacccggacctttatacctctacggaaaaaaatcaccaattagcagcgacgaaaatatcatgcagaacccataaaccaaccttaacggctacaagcaacgaggaggggctattaccaaccaacgcgagacaggaaaaatcagccgcacccttctcgagcccggactgaccgcacatgtgctactccgcaaacgctgcacggatcttgctcccgagctagccgaaccggataaccttgaacaacgcggacttaatgcgatccttccatcgagagagaaacgatgaacccagaaggcgaagactacaggaaggcatgcatgcacga

SEQ ID NO: 91302 - DNA, 391 bp, Glycine max
tggctgattcaggttcggttaaccaaccgggtttcgtagtatgcgagcatcgttgttggtgggccccccccccccccccaactaaaatgctctagcatatcctgtcccgacctacaacataatttgatcatctagcaccagagccgaacgaaagaataaaaataagaattaccaaaattaatctgacaatgaaggcaccgaccccgcacacacgcgaatcaaatcgaagctcccttaaggcatacagagagagggaaaaaaaacaaaaaacaaaaaatccttggcaagaagagtctggaaaacctatcatcataacccctagagagccctggcggccaacgatgatgatacccgcgaaaatttggtatcgcaccacggtgcatggcctagt

SEQ ID NO: 91303 - DNA, 478 bp, Glycine max
tggctgagttcaggttcggttaaccaaccgggtttcgtagtatgcgagcatcgttgttggtgggccccccccccccccccattcctttccctaaatacccgaccactacccacttctttacaacacgccccccgaaccggaggaaaatacaaaagagaaacaccctagacaaaagagcttacactaagacagttactaactctgctgactcccgacgctggaatcaacgacgagctaatttactcttctaaccccactggaactccgcggaccgccccttcaggtgctgccaatcaaatttgaacgactaacggagataagataaatatatccatttatagcgcgccgcttgaatgagcttatagtatttgaaggataaacacttaattagccgatataccctattcttaaaaagggacacatccctcctcctccatgccctaagacggaaccaagcgtatgagagctatatattact

SEQ ID NO: 91304 - DNA, 474 bp, Glycine max
ggctgattcaggttcggttaaccaaccgggtttcgtagtatgcgtgcttcgttgttggtgggccccccccccccccctcctcctcctggaggacgagcctgatggcgccgcctattaccgcgcaagacccctctctctcgctctcgccgctccggcctaaccccgatgccccctgccatactttctccggatcatccgcccacccgacctcgctccgcgggcttcaaggccggctgcactatttaggacgctcccgggaaaatctaactgaccgctaccacaatacgacgccgccgcttctgcactccgggcgcgcccactcgcttcgcgatacatccgacggacgcgaacgcagaagcccccggagacgcaataatgggctgcccccctttcatctacccggaccttggccgcggactatgccttacacagccttcaatgaactgacgccgcccattatcggacttaggccct

SEQ ID NO: 91305 - DNA, 273 bp, Glycine max
aagaatgggagcccgagggttggtgggacccccctggctttttaaacaataatgaagccattatcccctttaatgccaaccataccccattttttggttcttgggccaaaaaaacaaaatttcactttgaaagaaaataaaatttcccccccaaaaaacctggccgatattgatggtgattctaaaaagttgaatggtttggaaaaaacaaaaatcattttcacccggcaactgggtctcaagaagggccttttcaacattttctttttttgg

SEQ ID NO: 91306 - DNA, 347 bp, Glycine max
tggctgagttcaggttcggttaaccaaccgggtttcgtagtatgcgagcatcgttgttggtgggcccccccccccccccagaatccagaatattggaccacggcctcttatagtggaaaccaaaaaatcagcaaatgaacgcgacagagatcagaaaaccgttcatccaaacggccccaataccagatccctggcattaaaaaagataagcagcggcatatagaatgaagaataggctaaatggccttaataaccaacgacccactgaccttgttaagtgatgccgattactacgactcatgacgcgaccggaaaagacccgggcaacgacgttccgcggggaactc

SEQ ID NO: 91307 - DNA, 515 bp, Glycine max
ggctgattcaggttcggttaaccaaccgggtttcgtagtatgcgagcatcgttgttggtgggcccccccccccccccaaggaccaaccaaaaacaccaaagaagaaaatattgctacagaaagacagagaccaactctagcaaatcaaagctcaaaatcgaaacaaacaccagccaaataagaagataacgactatcagggtgcaacgagccgattttcgaaagcaaactcctgagaagaagaaagcaaaacatagatatcgacccgagggcgataaaaacgatcaggagcagccggcaaggtgcccagatacgccccaggcgcctctggcctccaacaagagcctcagaatcctcggccgacgactccgattggcatgcgttttgctactcactcttcctaaaaaacctgttgatgctgctctagctcttgcttttacacctgctccgacagaggctctcgctctcgctcttgatcttgttcttgctcctgctttcgcgacgggcgaacttgtg

SEQ ID NO: 91308 - DNA, 432 bp, Glycine max
gttcggttaaccaaccgggtttcgtagtatgcgagcatcgttgttggtgggcccccccccccccccccaagaaaaactgagagccccacctacctgacgatacacctgccaaacataccaatccaaaaaagctaaaaagctaaaacaagaagcaagcatgcaaagccgatgaagcaatgccaatgctgcaatccagcgagagacaagaacgatagaaggcaagaagaaagcggccaaaagccttcaaacaaccaaagacaaaaacaaaaaacaaaaaaggaaatgcagctactgacagaccctgagagtccgaaagaacgagaaacatacccagaataaataaactaacccctgagacaaagcgagaagaaaacaaccaacagaaaaccaaatgaagccccgcggaaatcgcccaacgcgcgccgcggaatc

SEQ ID NO: 91309 - DNA, 292 bp, Glycine max
acaaaaaaaacttataaaaaaatcatggggggcaaaacttccccaaatgttttttttcaccaatggggaacaacccggggggaggggattttatcttaatatataaaaaaagcgaatgaccactttattcctaaaaacagctttttttcccccacccattcgggcttggggggaccattttaaaaaaattgaggggaacaaaacaatttttaggcttgattttactaaaaacttttatcctttagctccccccaaaatcaaaaaaagggggggggggggcttcctttcactt

SEQ ID NO: 91310 - DNA, 149 bp, Glycine max
ggttggaaaattgcacatccggggcagcacttcagcaggaacttaattacaagaattaacgtggagtttcaacacagtgcagctggaaaaagggggaacaaaagaatacatcaccaaccaaaaatgtaaagaagacataccgtcaaagc

SEQ ID NO: 91311 - DNA, 387 bp, Glycine max
ttcggttaaccaccgggtttcgtagtatgcgagcatcgttgttggtgggcccccccccccccccccccccccccccccccccccccccccccccccccccccccccccccccccttttggaagctcgaagctctaatcccgatacgaaacctcacaccatggactaaaaaccgacacaaaaacatcccaagctccgcgcaatagatgattgggaagcgaaatttttatcctacggaatccgcaaacttccggatataccggactatgctaggtgggccgtcgcctccgacgactgtttccctgcgttcatccttagacctggggccgacctcgataagatggcttggcccgttaaataaagctccgggataaaagacgaccgagggc

SEQ ID NO: 91312 - DNA, 490 bp, Glycine max
tggctgattcaggttcggttaaccaaccgggtttcgtagtatgcgagcatcgttgttggtgggcccccccccccccccccccccaaaacgacgccagaggccagcccacgaacctctataaagcgaacgcaccccaccgccacatcgccgcacaatctgccacataaaatcccgcggaaagaaaaggacagctaatagatcacattagccttgccctcttctactaacgaaagcaaccagaaaaaccaccgcgaatgctgaggcacccaggagcgtttaggaacccataccgatcttacccataatcgacacctatgcaatctcaccttcccgctaacggctgaactgcctgccgaatgcccggagcacgctagcgacttacttcgcacgccgattaccgccgccgaatgatccacgctggaacccttgcagccccgtatgatgaggaatctaacaccttccgcctatagtattacgaactacgcctgcg

SEQ ID NO: 91313 - DNA, 375 bp, Glycine max
tggctgattcaggttcggttaaccaaccgggtttcgtagtatgcgagcatcgttgttggtgggcccccccccccccccccccccccccccccccccccccccccccccccccccccccccccccccccaagtgaaaagagaccctagacctaaccgaagaacttaatctaagaaacagaaaagagacctacccggatgacggacacagagcagatattttcatcaggggccccccctatagagtaagtaagtcgggcagcagccaacaaggaaatgcatagaagaaaagaaaagagggaaaggcagacattgaatatttagacagacgacccacccaacccggggacacaaaggagacgagaagaagagaccaac

SEQ ID NO: 91314 - DNA, 487 bp, Glycine max
gctgattcggttcggttaccaccgggtttcgtgtatgcggcatcgttgttggtgggcccccccccccccccccacgccgaaaccctaccaagcccggacccgaaccaacccgccaaacctcccgggttctttctctctcacgaacatctgaggagatccacctcagcacgtcctcaaccctactcagcctggaaacagaagcaaaccgatcgagctgcaaacacaacgccgaaacgcatcatttgacaagctcgcggattaaacgaacaacgcgaagatgcccacacacccgggctccctaggtcatctgctggaagaacccgaggaactccggcctctggttactacggacacccgagcaccgaccaaaccgatctggccttaaagcgcctaagcgtgaaagctgagcgacaagaactcctctagcgcaaacggacaaggccgattagccgaagcggaagctacgaagctcagtaatacactacat

SEQ ID NO: 91315 - DNA, 451 bp, Glycine max
tcagtggctgattcaggttcggttaaccaaccgggtttcgtagtatgcgagcatcgttgttggtgggcccccccccccccccaatatgaagagaacacgacgccaacttataccccaagcgaactcacagattacactctacccacccacacagaatagcataaacagcaggttttaacaaacacagcgagttagacccgacctacatacttctcctaaggctaagcgtaccggggcagctgaacgcccctaagcaccggagccctcgccacgttccccccattaatcttgaagcgctccacatatgcacctatacactaaacaagcctctccaccccattcgctcgacgcttgccgcgcctcagagacaacaaaggaacccttactgacccaagaagccgagctctacgagaaaagcggtggccaacagcccttcgaaacactcccaact

SEQ ID NO: 91316 - DNA, 516 bp, Glycine max
gtggctgattcaggttcggttaaccaaccgggtttcgtgtatgcgagcatcgttgttggtgggcccccccccccccccccccccccccccaaataatgcaaagataccaatcaccaccaggaggtaagaagctttcaagaattataaatcccattgacacttaggtagaacaaaccagaagcaagttactagaaatcgaggttgacgcgacgaatacggcagacagcaagggtacggctggataaggcgcctaacgagggaatctaagagaagacgcaaggaaaccaatgcagtatcggtgacagcccacgggcaaaaccggcggaaccaacaccagagaaatgcaacacaagattctctgacggcaaactgccaaatgacaaaatagaggaatcaacatatgacaagaatcatatcgctactctcgctcgagaagaggaaaaggcagcagagaaatactctatattatcgaatcagccgcagccggatttgactggcctaaatgccctctccttt

SEQ ID NO: 91317 - DNA, 460 bp, Glycine max
tggctgattcaggttcggttaaccaaccgggtttcgtagtatgcgagcatcgttgttggtgggccccccccccccccccacaggaacagacgaccaccccaagcccaaaccaatatacctgaattcgggctattgtgagggtggacagaaacatgcacaagccccacttcaacgcgccaacgggagatcgcacctcagaaaccgctgcactctcatcagcacaaaccccaaacccccaacaaccgaacccggcccgcccaacctagcaatgagacgtctgacctcaagatatggacgctttgactcatacgaataagctgccgaacccgagcggacaaacaagatgtactattccgagattgctgctcaagtggcaacattataaaacctacttcaaactaataagacaagaataacgctaatgattaaccttagcaaagtcaatcttggcggagtccct

SEQ ID NO: 91318 - DNA, 470 bp, Glycine max
gttcggttaaccaaccgggtttcgtagtatgcgagcatcgttgttggtgggcccccccccccccccctgccaagaatcataaggaaacaactcgactggaaacacaccacacagaagtgacaaagcagacacaaagactgagtagggaaagtgcaagagagggcaaccttggcccacccacaacgacaactacaagacacaacgacgggcgcgactacagtcctgaggcaacccctaaacaaccgtaggtcagaaaagataaaccaggaaatgtatattagaatagaaaagataaaagcaataagagacagaggaagacatccccacaaaagcacaagccaataaaagtggacccaccaaccaaccaaccacgcgggccgcatcaaaccaatctagttcctttgagaagtagtcgtcggatgacggagattcgacggactcctcggagcgatgagggactcctcgaaggg

SEQ ID NO: 91319 - DNA, 440 bp, Glycine max
ggctgattcaggttcggttaaccagccgggtttcgtagtatgcgagcatcgttgttggtgggccccccccccccccaaaaaacgtgaccaaccgaaaactaaccccagacagagacacggaaagagcgagccaaaagatccgccctaagagactaggcaagaccatcgacccttaatttaaagacacccctcctcctcagagaccgactcagagacaactaaacccgaagatgaaaccctggccgaagaaatctcgagcggcgaccgaagaaacgtctgcggacgaaaaaataccactggcgaccgccgaaactgacttgccctgacctgatgaaaatgactgactgactgacccttaagccctacactcagataatgctcagaccctaaggttccaagcaaaaagcaaacgcagagacgcaacgagccggattaactct

SEQ ID NO: 91320 - DNA, 444 bp, Glycine max
gttcggttaaccaaccgggtttcgtagtgtgcgagcatcgttgttggtgggcccccccccccccccaagaataaagaaccctagcgaagccccacgaaagaggccgctatgacgacaaccctgcccagactcggaagttctaagatacgcagacgaaaaccccataacaggaaaaacgacaataaccaaatgatacgcacgcccatcataatacgagatcttgcagtgcttgatatttattttaagagggagcctctaactgctgaagtctctagcctttccacaggtggagcctttaaactaccgaatgcccttctcccctaatcaaaatattcagatatttaggcctccgtgccgggcgcgactcattacctaacgcgcacaacgccgcggttgacgctgccgatgacttggtagaggtcccctcggacagcgagtgcctac

SEQ ID NO: 91321 - DNA, 406 bp, Glycine max
ctgattcaggttcggttaaccaaccgggtttcgtagtatgcgagcatcgttgttggtgggcccccccccccccccaccttaacccgccgccccacccactgccccgggtgacattcagcctatctagcgaccagagaatttcagacatccagcacagggtccaccgcagagccaagaaatttgacgcaatgggcctcgcgccccaccgaccgccacccagctgcaggatgagcatgcatatgggaaaattagaaaatctcttcatgagactgaaaaatttgcgcgcaatggagatgcgcggcgctatagcggctattcttaaggattaatgctaaatttcctcctccgccgaggctggcttggctgcttgcgcccattccaaaatctctgctaacgagccggcgct

SEQ ID NO: 91322 - DNA, 518 bp, Glycine max
gttcggttaaccaaccgggtttcgtagtatgcgagcatcgttgttggtgggccccccccccccccccaatgataaaagacctgaggcgacgagccaccgcaggaagacttctccaaacaacttgtacggttcttccttatcaccgaaaacgaccgaggaactcactccggccgccatctttccgttactgcgcacgcacattattaagacagtccgactaaactaaataaagagcacggggcagatcaaaaagtacgggggcaaccgaaaaccgggaactcgtagacatctaaaccaaacaacgaccacactacgtgtcaagtaaatgcgcacccctgccttccctccctaccggcggccgccgaaatctcgagtgcatttaagcctgattacggacaagccttacggccctgttccctatcctgaatgggacctaatcaagaatccggtggaaggccggcaaagctgtgggaacaatgagcaaagtgacatgcgtgtctggataaaaggtaacgttt

SEQ ID NO: 91323 - DNA, 411 bp, Glycine max
gcttagtggctgattcaggttcggttaaccaaccgggtttcgtagtatgcgagcatcgttgttggtgggccccccccccccccccccccccccccccccccccccccccccccccccagaggaagtgaaaaaagaaccgagaactaaccgaagaaaaaaaaaagagaactggaaatttttaatagggggccccaatttagagtaagtaagttggggcggaggaaccaggaaaaaatggaatggattgaaaaaaagaggggaagggagcaaaaatttaataatttttagaaagaagaaccaaccggggggaaaaaggaagaaggaaattcgaaaagaagagaccaaaattggagggttcggatgtttctgtttcttctggttgaggttcttcggggccaaaagggggttggg

SEQ ID NO: 91324 - DNA, 481 bp, Glycine max
cttcagtggctacttcaggttcggttaaccaaccgggtttcgtagtatgcgagcatcgttgttggtgggcccccccccccccccttgctacctcaacccccaacggcctcagccgggccgacggctctgaggcccatgagacctccgttaaataaatgaaatgacataaactcatatgagtaagacaagaacgacaatacaacgtcaacggcacatgaacaacaatgccgctctcttaccccttaatgacccgcacccacctgatgaaacaataagtggcatgtccaaccaaacgcaccgtcaccccacccaagaggattcatcttgcccggccggaaaaattgcccaatcatgggtatctacgcgctcttcctataaaatttatgccgactatactgcggcgccacttcttgacactacaatactccgggacacagcctctcggacggctggaggctccccgggcgaaaggattgcgcac

SEQ ID NO: 91325 - DNA, 489 bp, Glycine max
gttcggttaaccaaccgggtttcgtagtatgcgagcatcgttgttggtgggcccccccccccccccccaaaaatgaaaagacacccatctcaccacccacccgaaaaccaagacaactagaacgcgaacgagatgcaccacaacgagagataaggccttccaaggcctccaaggaggccaggacggctggggaggtaaaggggagggttggcgagacggctattgttaggggggcttcagctgttgttgtgtctgaggagcggcgggctgtgatcacatcaaaggctcgcgggagcgtgtgcacgacagtggaggctgtgacagtggtgaccacggttgaaggggtggttggcgaggagtggtggagcacacgggcggtaacagtggttggggccaaggacggggtggtcgtaaaaggggtgcccgttgtgatgactggcggtcagaggtggctgctccgagttcatggacgataagggacggcgctga

SEQ ID NO: 91326 - DNA, 319 bp, Glycine max
gttagtggctagttaggttggtaacaaccgggtttgagtatggagcatcgttgttggtgggcccccacaacacccccccccccccccccccccccccccccacaaccttcaaaacagcccaccccaaacttaaaagaggggaaccgtacttctggaatgatattctttaatttttaaaaaagggggaatggaaaattgccggggaaaaaatgggaaaaagggtgaaaaaaaaaaaaaaaaaattggcaatcgaaaagggggaacaaggggggggggtgggggcagtaaaatgtaaagaaaaaaaaaaaaagggggtttt

SEQ ID NO: 91327 - DNA, 342 bp, Glycine max
ctgattcaggttcggttaaccaaccgggtttcgtagtatgcgagcatcgttgttggtgggccccccccccccccccccccccccccccccccccccccccccccccccccccccccccccccccccccccccaaaatagaaaagcctaatagctagaccccaccaattgtaccgaaattcagaagtggagcgatacaccaagacattgctttcgttattttttcaaacagacattggacatccccaccaccagggaaaacacacccctaaaccacccgaaaaaatatttggggaggagaggccgaaaaactgccttctccacccatttttctaggaaatttg

SEQ ID NO: 91328 - DNA, 279 bp, Glycine max
gggggccccccggcaactgggaaggttcaaaacatattggtttttagccatgaaaaattcatataaaaaaaggttaacgggcctctaaaacagcatgccccactcaaagggggaggggacccctggtcttaagggtcctaaaaattccatgagccgacccccctttgtcttggtcattatgcgggtttgcccggaagttggacattgccttttctttggaaaaacaacctggcctttcgggaaaaaactgtgcccaaaaaacattattcaccctgtctt

SEQ ID NO: 91329 - DNA, 444 bp, Glycine max
tggctgattcaggttcggttaaccaaccgggtttcgtagtatgcgagcatcgttgttggtgggccccccccccccccccccctaaaagcaacgatcaacttaccactacccactaaacactatcatcggaccggacaatgaggacgacacgagaaattcagctcaacaaccaacaaagagaagaccggcctgacggacagcattgagcccgagaccccagctaccccattgacaatgacaaaggatcgacaagagcgatagctgcatacctatcaagtaatgcttaagcaccccagacctgccgttagcgaagcgaagaccaaagcctccgcaggaataaccaggaccagacaaagccgaaaaggccccgccggaagcggctggcgcctcagcgaaagcgacgatcccgatggaaccttcccgctcgaatggaccgcacttcgc

SEQ ID NO: 91330 - DNA, 452 bp, Glycine max
gttcggttaaccaaccgggtttcgtagtatgcgagcatcgttgttggtgggcccccccccccccccctgcgcaaacagaagccgccgacgcccccacgaacagaaaccagaaaagcgtacgtaacctatacgacttagaaaaacataaaggacccgaatcacataactaaaattttcaagcatggcaagaagccacaattggcatcccggcgaccaccaattaaattattatttgagagagaaagacggctcgagggcaaacggaccccaaagggacataatactggacctccaacttaatattgagaataaaagctcacgcagaaaatataccaattcgaaatttcctatgccgccgcatgtaccctgcatgatccctgcgatcgaaatgcctactgagttgcggaggttggcgcgaatcatcggcggaaatctatagggctgcgaagagc

SEQ ID NO: 91331 - DNA, 223 bp, Glycine max
gttcggttaaccaaccgggtttcgtagtatgcgagcatcgttgttggtgggcccccccccccccccccccccccaataaacaacctagcatcctaaccacacaaacctcccaaaaccttaacagaaagctcactctcctctggaccgcaaccaggactcccgggagagccaggcccaccccgcctgggaccgcgaaccacccgatctaccaggatcgagcatt

SEQ ID NO: 91332 - DNA, 314 bp, Glycine max
aggttcggttaaccaaccgggtttcgtagtatgcgagcatcgttgttggtgggccccccccccccccccccccaacagtcgctgaagcatgaaaaatcaccttggaccaggagaccacacacccttaagaagataaaacaaatgagtatatgaaacagtccagaatagaccagaccacagacgacgaggcggcaaccaacctctaaaaaaccgtggccaacaaccacctcttaacgctgggtatccgaacgagctcggcgccgacgctgacataaatatataactcaattagaaggagccgggaaaaaactcaa

SEQ ID NO: 91333 - DNA, 429 bp, Glycine max
gttcggttaaccaaccgggtttcgtagtatgcgagcatcgttgttggtgggccccccccccccccccaaatagtaaatactatcaccacataccccacaggcgattctccacccctcaaccttaacaacaaaaagaaaataagacacaatatactatataccctaagccggccaacctcctcttaatgaaggctgactgatctgcgaaaaccgatattgacaaaagcagtagggggcgcctccgggccgacgaaaaggatcagcgggcggccttgggaaaaaacgataacactagtactcgacctgataataataataataatattagagaaaaaagttgagcttcttcttcctctactaggagaaacaaaacggcgaccacctctactgcttcatatgggaactaagagtcctaaaacgacgacgacg

SEQ ID NO: 91334 - DNA, 324 bp, Glycine max
ggctgattcaggttcggttaaccaaccgggtttcgtagtatgcgagcatcgttgttggtgggcccccccccccccccccccctttacataactgagctggcccgaaacgacacccaaatccgtcaacccagatgctgctatacagacacccgaccacgaagaaaacttggggaaacaggacaccgctaaacccatcgcatctgcttacacctggctgacgcagaatggatgagacccacattgaaacgcttacatttcaagaaaaaacagaaacaattacaacacagaagtctaggaaattacgcggacagagccacccgaccc

SEQ ID NO: 91335 - DNA, 357 bp, Glycine max
cccaccggggttcttgtttgaatcttaaaccaaaaaaatgggcctcaggggccccttgcctttttttttttttggcccccccaaaataattggccaaaaaatttgtttccccaaaccccaggggggattcctttttcttgggggaaaaggcccccctttttaaaaaaaaaacccccaggggggaaaaataaataaacccccccaaaccggggggggggggggggccctttaaaaggtaaatcccaaagcccaatatttttacccccaggggcctccccaatttttgggcaaacacccccccgggtttgggacttaaaaccccccaaggtttttccctgaccaggggcccccttaaaa

SEQ ID NO: 91336 - DNA, 359 bp, Glycine max
gttcggttaaccaaccgggtttcgtagtatgcgagcatcgttgttggtgggccccccccccccccccccccccccccccccccccccccccccccccccccccccccccccccccccccccccccccccccccccggtaaggttttcggatcacttacggcaaaggaaaaaaaccttgacgaatttgggacctgggcttccccactcccttgatggataaaaaaccctggggaaaacccttccgggggaaagggattattttaaaggcggggcctttttataactggggggagggcgaaaaaaaaaaagggaatttttaaaaaaaaaaaaacagggggaaaaggttttttttttttttt

SEQ ID NO: 91337 - DNA, 267 bp, Glycine max
aaaaccagaaaaaaaatcagggggggcaaaactcgcccaaagttttttttcccacagtggaaaacaaacagggggagggggatttaatctaaataaataaaaaaagcgaatgacgacattaatcctaaaaacagttttttttcccccacacattcgggcttggggggccccttttaaaaaaattggtggtaacaaaacaatttttaggcttgattttactaaaatcttttatcctttagctccccacaaaaacaaaaaagggggggg

SEQ ID NO: 91338 - DNA, 451 bp, Glycine max
aaataggaaaaaatgaaggagtatatggttgtgcttcggcgtcgtcactacatttctaattcataataaacggtggttggagtttgtttaattgtttctccctctttctttctcttttgacggctcctactaatcccacttctccatcgccgcctcagagtctttcgtcgaatacgatgctgttttctcggatatcgagaaacctcagaggcagcttcaactcatgtcggtggtttctgtccatcggagaccacaaccaccgcttcctttcgctgcacaattttcattcacgtggtggagactctactcaacaggttatgagaagtttaattatttcaaagggcctgccagcattgcatagtagtagatatctgatccatcatcaaagcagctccatagttgaggatgaacatgatccattttcactggttgcagatgaactgtcacttct

SEQ ID NO: 91339 - DNA, 446 bp, Glycine max
gttcggttaccaccgggtttcgtgtatgcgagcatcgttgttggtgggccccccccccccccccccccccccccccccccccccccccccccccccccccccccccccaaagcatcaataaaacgaatttattgaaaagcatgggaaatcgaccaccagaagaacttataagaaagatatttaattatacccaacgcaaacaaacaataaaatgtaactagtagaccaacggcataaagatgccaccccgggggagagaccgtttgccttttttaggaccacataaaaacctacttcaagaaaagaacccccatcgcctaccccagcaatacgccccacggcccatgcagggagaaaaagaaaaaaatttattttatatcgccggcccgagccctccgtttcaactagcgctctatccatacgcacgatttgcccggcctaccccg

SEQ ID NO: 91340 - DNA, 449 bp, Glycine max
ggctgattcaggttcggttaaccaaccgggtttcgtagtatgcgagcatcgttgttggtgggcccccccccccccccccccccccgggcaaattagtcccctatcggaccgactaacaaacatcctcatccccgacctccgaaaaccccacgaggaattaacaaccacccaattcagaactagccaacgttagggacttggcccaaccgggatatcacgcgctaaacctatgtctgcggcgacttccgtggctggaaccggcggaccagggcccgcgacgacttgatgaaaccggggacaacgaacgctcggacgacgtcgcctacgaacccggcctagaacccgacgtacacttagacgacggaaaggtaagcggccagaatggctcctcacgcgacgaacttccacacaaggagccggacgcccacgaaaacattataaatgctaga

SEQ ID NO: 91341 - DNA, 322 bp, Glycine max
tcaggttcggttaaccaaccgggtttcgtagtatgcgagcatcgttgttggtgggcccccccccccccccccccccccccccccccctagaggaagtgaaaagagacccgagacctaaccgacgaaacagaaacgagacctggatatcttcatcaggggcccccactataaagtaagtaggtcgggccgcagcaaccagaaaacaatgcaatgcatagaagaaaagagggaaaggcagcagacattgaataatattcagacagacgacccacccggggagacaaaggaagacgacaatccgacaagaagaggcgtatggtaa

SEQ ID NO: 91342 - DNA, 511 bp, Glycine max
gtggctgagttcaggttcggttaaccaaccgggtttcgtagtatgcgagcatcgttgttggtgggccccccccccccccccccccccccgtaaaacacgacaaccccaagctccaaaaaatagaagaaaccagaactgtaatcacagaataccgagtggcgcgggactcagctcctcagcaatacccagagcctacaggcggaaaacattatgcggagaaaatttaatgacgcgataaaacaacatcataaaaaaagcactaaacaaacaagaagatacctaatacacatattctggacgtttataagaatgagagaaaaccgggactactcaccgacgacgagaaagacggtaatgaccagatctatactcagttagcacagaaataccgcgccccccgaggcccggatgccaatgaattccacgctggcaattaacaatgcatatcgagattttccgccacaccggatcccattgaggatgactccggaaaaaacccgagaccgacact

SEQ ID NO: 91343 - DNA, 403 bp, Glycine max
aaaaaccaccccgtaaaaaaaacgggggggggggggtgttttttttcctgggggaaaaaccagggggttttttttggggggcccccgaaataccacccccctttgggggggggggccccattttttaaaaaaaaaaaaaacccccccttgggggccttttatgggattttttcccgggcattaaacatggggacagggctaaccccccctttgggtggtttttaaacccccccccccctggggggggaatgtttaaccctttttccccaatactttaaaaggcccgggcctggaacccacccggttttttttttttccccaaaaccccccggggggtgtaaccccgcttccattttttttaaccttgaagtcttccgggggggggcccccccacctttttttc

SEQ ID NO: 91344 - DNA, 220 bp, Glycine max
aggaatgggagcctgagggttggtgggactcacttggcatataaaacaataatgaagcaattatcacgttaaatgcaaacgatacctcattttttggttcttgggctaaaaaaacaaaatttcactttgaaagaaaataaaattttccactcaaaaaacttggctgatattgatggtgattctaaaagtttgaatgttttggaagaaacaaaaatcattt

SEQ ID NO: 91345 - DNA, 214 bp, Glycine max
aaggaaagggagcctggggtttggtgggactcacttgttataaaaaacaatgctggatgcgtatggaccttaaatgcaaacaattcccaattttttggtttttgggctaaaaaaacaaaatttcactttgaaagaaaataaaatttcccactcaaaaaacttggctgatattgatggtgattctaaaaatttgaatgttttggaaaaaacaaaa

SEQ ID NO: 91346 - DNA, 316 bp, Glycine max
tcagtggctgattcaggttcggttaaccaaccgggtttcgtagtatgcgagcatcgttgttggtgggcccccccccccccccccccccccccccccccccccccccccccccccccattaactctatggctattccctcctttagcgagcctcgacacaaaagaacaactaatgaacaacgagtccaaactgaaagtaaagttgacccccctcccggctttggaaaaaaagaaaacccgagccctaaataaaacaaaacacagaagcggaaaaagcctcgctaaacctaatcctaccggataatccctaactcacc

SEQ ID NO: 91347 - DNA, 409 bp, Glycine max
caggttcggttaaccaaccgggtttcgtagtatgcgagcatcgttgttggtgggcccccccccccccccccccctaagctaatcagcatggattgcccgaaacgagacgagcgcttcccactccagacaaaactaagacttagaacggccagaatccagaagagaaactagatgcggccgagtcgcggcgaagaaaagaaacctcacacatcacagagacgccacccgccgccgagatgaccaccgaaaacggtcttaaagcgagcggcctccagatagacgaggtacacgggggcaactgaccatcgcgagcgcgagcgtgagggccacaccccgatcaaaatagataacaaacaaaaatgacgagcgcaaacaaagaagacccagaacaccagagatgcagacagac

SEQ ID NO: 91348 - DNA, 360 bp, Glycine max
tggctgattcaggttcggttaaccaaccgggtttcgtagtatgcgagcatcgttgttggtgggcccccccccccccccggtgcaagatttagattgacgagacaccaggtcggatctaccacaccaacagtcctagccgccttcaaaaactatagaaacaatgcccagaagaataactgaggacaacagagggatcagaacaccagagacacaactaaatccatagatactctcgcttttcctaacacctaaacttaaatctgcgacgagcgaaaaacacataacgctttagaatagaaacgaacctgcaatcccgaatattgcttataacgaacccttgaccgccgcccctatacccct

SEQ ID NO: 91349 - DNA, 105 bp, Glycine max
gatttcggtgccagcttgaacgggctggttcagcagtttttccggacgttgccggtgccgatgccattcaagcacgaggagagttcactgagggtggagggtggg

SEQ ID NO: 91350 - DNA, 420 bp, Glycine max
tggctgattcaggttcggttaaccaaccgggtttcgtagtatgcgagcatcgttgttggtgggcccccccccccccccccccccccccatgtgagaaatgaaatgatcaaactgccccacctaccgcgaagaccccagaaaagaagctgccccaccccaccaaatggaaagactaaatgagcgaaagagagcataccaggactctgattccttactaataaaccgataccggccgcgccgcacgccccaccgaaatggagaaaagccaattaaggagaaaggcgccgatacatatacagctcctttaaccggcgctaaatccaacggccggccagcataattgaaaatgatatcacaattgaccctaagctttggagaagttcccgcgatcccgcgacgtcctcccgcgcgctatatccc

SEQ ID NO: 91351 - DNA, 191 bp, Glycine max
ctcgagccgaatcggctcgatctggtgggggagcacattaaatgttcttgcagatggggagaatgcataacttcagaaagtaatagaggaagatcaacttgctgagccaaatgaggaaccccaggtggacttagaagtgccgactgtagctgaaactttggagaatcctcaagaggaactggattccaatg

SEQ ID NO: 91352 - DNA, 376 bp, Glycine max
gctgattcaggttcggttaaccaaccgggtttcgtagtatgcgagcatcgttgttggtgggccccccccccccccccccccgcccttgggactatacccttgaccacacacccactattagcgaatgaagaccccaaccaataactaatgaactcttaggaaacaagtcgaggtagagaccaaagcacatgacgtcctcccaggagacacctgcgcggcaaacataggctgaataagacctcgctgtacggcaaaatgacgagacccatccaaaggagaaagaccctagaaataaaacaaaaaaagcataaggaaaccccacgggcggagaccaccaaaatgaaaagaagatatgccacctccaaaaaggtccgga

SEQ ID NO: 91353 - DNA, 504 bp, Glycine max
caggttcggttaaccaaccgggtttcgtagtatgcgagcatcgttgttggtgggccccccccccccccccccccccctagataaaagcgaccttaacccgcggccccaccgggtgaaaatcccgtctagcgaccacatatatcagccagaccaccaccccagatctaagaaaattgaatgcaaatggccctccccgccaccgaccaccaccaccaccacccaccttcctgcatgagcacctggaaaaatagaaaatcttttcatgagacagaaaaatttgcgcaatggagatgcgcgccgctatagcggctattcttaaggattaagcctaaatttcctcctccgcccacgctggcttggctgcttgcccccattcctaaatctctgctaacgagccggcgcttcaactgtccgaagaactatccctggggctgaatatctggtacgactttctcacgaccttcgcctaactagagacagcgtaatcctcgagcgctctacgcc

SEQ ID NO: 91354 - DNA, 538 bp, Glycine max
atgcttcagtggctgattcaggttcggttaaccaaccgggtttcgtagtatgcgagcatcgttgttggtgggccccccccccccccccccatgccaacggaaaagactatcacgaacaatgatctagaacaaggacctctgtttgagagttgaccaacatcatcaccaagtaagaaacagaaactacaattaccttggccgacctaacgacggattaggaagcccattaacacgacaactgcgtgcgactccctgaatacaccttcctaaacggctaaccgcacgagttctatacccaccataaacgccatggaacgctctaagacgaatcctgcgggcgctgcgcactcacgtggcgcggtggttctcaatactacgacgacaactttgctcgccgggcccgggtgccaaccgagcgagacgacccacacgcggacgaccattacgcccttggctccgctcacccggaggctgctaaagccgacgccgttgtagcctgataatcctccggctacccgcgcctccgccgcccccgccg

SEQ ID NO: 91355 - DNA, 415 bp, Glycine max
gttcggttaaccaaccgggtttcgtagtatgcgagcatcgttgttggtgggccccccccccccccccccccccccccccccttcagaaatttcaaagctcaaccgtcccaagaacatatctaatccagaacctcagacacacaacaaggacatcagacaacgacgccgttcccgcgcccgcgggggagcacggtcgtcgcgctccctggctcctttcctctcagagccgcccgcagcccgaaatgatgaacataaacagaaactaaacaaacgtaaaaccgaaaccacagatttaaaaaaacgataaaacagctaagaataaacgcagaaccctctggtggaatcgaaatgaaaccacaagatggcagatattgctcgaaccgaccgcctgagtacggacacgcgctgacaccac

SEQ ID NO: 91356 - DNA, 303 bp, Glycine max
aaaaaatcaataggatgccaatgaaattatattcgtaaatcaacaataaggaagtaatcatcaaacaaaatgggttcaaaacaatttccagggcaatgcaacaatggcatggttcaatgaaccattaaatgatcatatatgtataataacaaaataaaatataacatacaacagagtgagaggagtgtcggtacatataattcacatgaagatgattggtcaaaaccccatggcatgtgaatgttggatgggtcagtacatcaggaatatgggggcacataattgggcccaccattgggtgaa

SEQ ID NO: 91357 - DNA, 182 bp, Glycine max
caagaatatatgtttacttgtcaacaagacaaaaacgaggctaaggggcagttgaagtttattgcacaatacttaacacagagcctaggtagtccttaaggggggtaggtaacacagtttaaacacagaagttacgtgatatagaagaaagacatacaaggatggaagttctaattcttcac

SEQ ID NO: 91358 - DNA, 244 bp, Glycine max
ccggggcaatttcaaccttaaagagctttttctggtttgaccacccctaaaatattcaaaaagcgccaaacccttaaccggttaatttatcccccaaaccgggggggccctttttaggggaaaaaaaaaaaaaaaggttaattttacccccccaaccctgggtttttaacactggtttccaaaatttcaacaaaaatttccttttttccccccttttgttaaaatggggcgaaaaaggggggaa

SEQ ID NO: 91359 - DNA, 367 bp, Glycine max
agcccgagatgaataaggtactattactatctgccatccccttgcatctacttagcgctttactcaactaggaactaatattccttataatcatgagtggagaccgccataattgtggtgatacgacctcgaacttattaatgacgcggctgagaatcctcctggtagatgcctagctaaacctgaccattcataaacatcaaatacaagacccgaacgacatcctcctacgctaaacgaaatataaaagtcgatgaaattggcggcccaacccggcaataaagctaccgcgtccaacggccccgaacgcctataatttgaatatagttcaactaatgctcatatcctacgcactaatgaaaggggg

SEQ ID NO: 91360 - DNA, 471 bp, Glycine max
gattcaggttcggttaaccagccgggtttcgtagtatgcgagcagtcgttgttggtgggcccccccccccccccttaacaaatccgacgactccccaccggacccggccgaacaaaaaaaacgaaagaacaacaacctacatttagcgaccgcttcggggacgcggcgggccaacggaaaaaacaagttcgaattaacgattaggaaactttttaaaaaatatcagctacgcaaagccgacgacaagaaccaacaagactgaacgggcacgactaatgataccgccccctggaaagaagcgctcagataattccattataaagagaatgctaatctacaggaatcaggaacttttcgacgataatattttttttccctgccgacatacgaagcgcagatgccgaccaggtcgcgccctgggccgcgaatacctaaaattaccaagtataacgatcccgccattaaaccaaa

SEQ ID NO: 91361 - DNA, 282 bp, Glycine max
gcttattaagcttgcttcctacataaaatattgcaaatttgaaaacatattgggccacataaaacaataacttaattagagtacaaggattgatagctattatatatgcagaaaataataaatataatagaaaataacaacgcatagaataaaatctcacgaacttctctcccaatattttaggcaggatgtgaattaagtcaagaaatcaaatatcacgattaggcgatggtgggttagcgacttcaactaaaccttccagcatttggttaactttcccca

SEQ ID NO: 91362 - DNA, 332 bp, Glycine max
cgttaccgttgcgtaacccaactgaatacacggtagccctttccttgaatcctcctcctccctaggaaatcataagtaacagtactacggtattaagcgtattacactcttgcggctaacttccgataactcctgctctagttccaaatcttactcccagatgcccttttctactcctccttaaacaccctgctgataataatctctactaggacttaagggtattaataataaaattgaacacctagatacctttgccactacctcctctcttaatttattccagactgcccttcttataagtacatttaatgacctcgctagaccttgat

SEQ ID NO: 91363 - DNA, 428 bp, Glycine max
gctgattcaggttcggttaaccaaccgggtttcgtagtatgcgagcatcgttgttggtgggccccccccccccccccctgcaaccaatgcctgccggcagacaaaacaaccggaaacaatagaagacacctaaggagacataagaacaagccaaccatatcagaattacctacatgcaccacacactgataaaacaacaaacacaacataaaacaagaagtgacataacaaaacgcgagtaagccgcgcgggaacaccccattgattactctaaccaatcgaataaacgaaacacgattaccattgtacttctttccatgtagccgaagcaaaggccggatgacccttccaagcccggggacatccttggcgacccgattacggcgcctaactgaggaaacctgcacgcccagggaggccctcaaggc

SEQ ID NO: 91364 - DNA, 305 bp, Glycine max
  unsure (1)..(305): unsure at all n locations
cgttaaccgttgcgtantgaaacccgcggacantcctactttgagccggaccgcgtagtgggctaagtccgtgtcttaattccggttgtagaatcaggcctcggcttgggagttgccgttgagttaggaacggtgtcttgatgtgtctgcgggccagccgagggtgaagcagatgtcgaccgcgcagtaggcgtcgctgtggttgatgtcgaaggggtaggagccgtagcaggtggtccacaggagggcgtagtggcagtcgtagtaggcggcgaagacggcgtagtgggcggtgtcgggggtgc

SEQ ID NO: 91365 - DNA, 473 bp, Glycine max
ttcggttaccaaccgggtttcgtagtatgcgagcatcgttgttggtgggcccccccccccccccccctacaacaacaacaacaacaccaacaaaaagaaagaacgagagcaagaaagaatcgcgcgcaacccgccgcgccccccccccgcccggcccaaaattatataatgagaatatgaacaacatcctaccaacaacagcaaaaacttggagtgacgagtctaaacggagtctgataccgccacggccaaacaaaaacgggatcgaaataaggaagagggagagtccaccgtggattctcggatcccgttatggcccgtcagagcctcctcctcctcctcctcctccgctcatgatcatgccgcatggcaacgcttcatcaacatcagcatcatatccaaccagccaaccaaggaggatatggagtgtggcatagccagagtgtgcagctgtatatgtgaacgcgcatgct

SEQ ID NO: 91366 - DNA, 524 bp, Glycine max
agtgtcagtcaatgcgttaaccgttgcgtatgattaaagatcagggcgaatgctcgacagcccactgctaccagcactactggcaggtgagctcgactaataacggaatgaaacagttaccgaaatataggccgaagtccctgctcttacgattataaggaggccacaagccgagctctccctggagactcttgagaggcaactggagctctctccgaatgggccgcgatcagacgaacctttacttctccgacgcgagttattggactcagaaatcaacccgcatcactccccctgaattaaacccgagggaaggcggtcccaacccccctccttaaaaaaattatatttcttttctaacttccatcaccctttaccctgcctcgggcactagcccaactgacgatgcaactcaagcacaatctatttaacgattcgccaggctcccctgcagaagcctctcggcgctgagacgacacactactataatccgcaattaacactcctcacccttaccatcacgc

SEQ ID NO: 91367 - DNA, 419 bp, Glycine max
ttcggttaaccaaccgggtttcgtagtatgcgagcatcgttgttggtgggccccccccccccccccatacagcaacagaaacagaagacaccggccataagccgcgacgacacactactctgatattagagaatcctcatgaaaagattcaataggctaccgggcgagccacatccagaccatgctactgaccaaatcgacatttagaatgaaacgggaaacagcaaggaccgaggggagggcgcggcccccccggaagaaaaaaccaaagttattcctttctaaacccggcctgaaaaagacagcataaaccagccctcagacttggcggtctatactaagaggacgggaacctactcagctataatttgcctaagagagatcttgaccattctctgagactcttgaagagatctaat

SEQ ID NO: 91368 - DNA, 479 bp, Glycine max
ccgttgcgatggtaaagctgaggcggagcgcggagcgaccggacgcaacgccgggccccgtgccgatatacggaagcggcgacacaaccgaatagaaaacgggtgtccccgctgacccgcatagtccgcagggcagaatgctggtcataaaccgaccacttcttaagatgctgaagccgacgacccccgggctccagccgagggcgtggttagcgcttcttatgattgatgaaagccttcttctttggctgtaaggccttattcgcaaaacggaaacgctctcgccgcttcttgcctaattgaaattgagaatggggccctaaaaccaacttaaggagatcctccagacgcaaataaacgcctaatgactattactacgcaggccgaggcggggggattagccccacgaaggatccaggctaccttatgactgccgcctgctggaccagaagaaccccgccttgatgctaaaatgatct

SEQ ID NO: 91369 - DNA, 512 bp, Glycine max
ggctgattcaggttcggttaaccaaccgggtttcgtagtatgcgagcatcgttgttggtgggcccccccccccccccccccccctccgagaactaaaacctgacgcccaacctatggaatataaaataacaacaacacagactggcatgcacccctacgaatgaaccaaacacctaatagatggcatgatcatgtgaacgatatactaaactaaacacttatgatgataaatatataactattcccagctgatgccccgggggccagggaggaaatcaagagaaaccataattacacaaatacactcatacctaccttagatagagaatgaaaagcgcggggattttggataacaatcgcaaagacatgaattatagctactgaagcggaaggtccaaggacccgaaaacgccattctgcccgctgcttaaggcttccgagaagaggaactcctccgacattccctttggcgagcgatcggctggggcgagaacgcgatgaggaccccgtat

SEQ ID NO: 91370 - DNA, 478 bp, Glycine max
  unsure (1)..(478): unsure at all n locations
cgttgcganaaaataggattacccttgcttttagccccgggagtggttatacttgttgagtttgggagtagtcttgttgaacttgggctattttggttcactggctcgcgaagccgtgctagcgtagtcttgttccaggaaccgggtggagctgcaagtgaaattacacagataaatgatgatgatattgctggtattgcccgataggaatcgataggccataaaacagtaacagaaatgaatatctctcaaaatcttctagtagaagaagtacgagataagaaaaagtattaactccccacagttattaataatatgaatctccatacactggctatcctgccannttaacacttctgccactcggggaagagacctgacatttcactatcactaatactgctagccttactgcgaatactgctattctcgggcnacttatcccgcgaacccaacaagtctgccccttcccttcccc

SEQ ID NO: 91371 - DNA, 452 bp, Glycine max
aaccgggtttcgtagtacgcgagcagtcgttgttggtgggccccccccccccccccaggaaaagcataccgccgccccacccaaccgacagacaaagcctacgaatttaccgagcctactacagtgtacctaccagccctagaaaaatttcccgaaaataaaaccggccccttcgggcccgaacgctggaggcacatgcatcacggtcagcagcaacaaaaaaggatcagatagatcgagagcggaaaagcaagacaaaaaaggaaaggaaaatgagtccaccaaacctataaagcggacatttagaggcgatgacgcctatgacggaatcgatgacgccgacagcgacagggcactgaactctccttttagacaatgaggacaccggcaatgaagcgattgacacgcaagagcctgcgccgccggcggtcacaaaagaccggcgtccccct

SEQ ID NO: 91372 - DNA, 387 bp, Glycine max
aaaactaatcatcctataatatttgtttcaagggggagttaaaaacaaaaagagggtgagactttcaaaataatattatatccttagacaaaatatctcaacaaagtaagataaacgctgaaaggtacatatcaatcatacagaagcaaaaaactattgttatttcaaagcatacatgattaccataatgctatgttcaaggattccaaaactgaaaccgtttgaaggctagagagacctaaagtgaatcattgagcggacaaggtgtagccaatgtacatctgagtcctaaactttatgaaaacacctaagattatttgagttatttagacttctttccttggtttttcttgataaccttatcaacatacattaagcccttgcctt

SEQ ID NO: 91373 - DNA, 146 bp, Glycine max
cactatccacctctagtttatatgcccaagataacaatattgggaaaaagggcaacgtctaactctcgcacgtgcaatactgcacatgcgttagaatactgatagcgaaacatactctttaaacctgcacgacggttatggcaacg

SEQ ID NO: 91374 - DNA, 220 bp, Glycine max
ctaaacactcaggcgttgctttaaaccttaagaaatttaccgcccattgctcataatttcaaaagacgctcctgattctcttaattctcaagaatctggaggtaaaaatagaaggtaaatttttcctaaaaactcaacttcaaacccagtaaaaaagaactaataaggccttttcatcctcaatgccccataaaatttttgaaaaaaaaaatcacatttt

SEQ ID NO: 91375 - DNA, 355 bp, Glycine max
atcttccacaaattcactcatagggaaatattcaaacaagttttcattacatccgaattagcctactcataattctgcagaatgcagaatctacctaatcagccgataaatatatcagatactctaactagctgcaacttacaacactgaaactaaatcctatggtaataaacatcagacacgtttgaaacaatctttagataagagagagaacactgtaaacattaataaaacagctgagtcatgaatgttgtcagcaagagttcttgaggatcgagagtgagcgtcgaacatcaacttaactatcaggcaaagatttgttaatatcagtggctgactttcttgagtctggcat

SEQ ID NO: 91376 - DNA, 379 bp, Glycine max
ggctgattcaggttcggttaaccatccgggtttcgtagtatgcgagcatcgttgttggtgggcccccccccccccccgcacataatccagcccaattcacgctaagctgaagcaacgccgatctagccgccgatccagacaccctcctcatgccgagagctataaagatttacatataactagacagcatgaatggccctattaccgaggagccccgccgaaactcacccctgggcggacaatccctcactaactctcgttggagataacaccgaccgcttgctcctaaaccgcatacgcaaccccgtcccgaaacactacgctcgatgagctcaccacgacgatcctaaacgaggaaaagcttgacgaaggccacgct

SEQ ID NO: 91377 - DNA, 439 bp, Glycine max
gttcggttaaccaaccgggtttcgtagtatgcgagcatcgttgttggtgggcccccccccccccccccccccccatcaagaatatagcctatcaccccacacaaaacagaaacccgaacagcagtcccactattaaaaacaacaacgccttaggcggacgaatctaggccccggcgcgggacacagaaaattaaaaacttaccaccggccgaacccccaccctgactacaacttagcacaatcgccttcctcagacttatccctaatgatggaacatatgatgcggcaccggatacggacgcccatcactgcgcacgaggagacctccctagccccgctccggcatgatgcgctctagctaacgcctgaaacaatgggctcacctattacaaccccgacacaatgggggacgaacttgaagaagagccgcgccgggacc

SEQ ID NO: 91378 - DNA, 258 bp, Glycine max
ttcggttaaccatccgggtttcgtagtatgcgagcatcgttgttggtgggccccccccccccccccataagcaaaaaacacctctaggccgacatggataaaagaggcaccagacaagatacctcggagaaaacacaaacgcccccgaatcactgggaatcgaacgacgatacataaaacaaagatagcaaaccaaaagtaaaagcgaaaaagccaaaatggaagcacacccgatcacccgggaggcctgccgcaggg

SEQ ID NO: 91379 - DNA, 422 bp, Glycine max
gctgattcaggttcggttaaccaaccgggtttcgtagtatgcgagcatcgttgttggtgggcccccccccccccccaaaaatggaaagaccccgccccacaaacaataacaatcgagacctccccagcgcgccagcagcagttttcatcggaggtagttctactatcagtcgagtaaccccgcgccccagcaacggtattcaattcaacagacgacgaagaactatcaagcaaacatgggacgaagacccctatcaagcagtggcgaagaactctttcaagcagtggcgccaaccccgcccacgcagaccgggtcgcaaccggcagtcgcaggctcgacaattagaccgcatacgaccccgatctaggccaaaaccgctcttagtcctaggatatgaactgataccggagaccccaaaacac

SEQ ID NO: 91380 - DNA, 346 bp, Glycine max
aggttcggttatccatccgggtttcgttgtatgcgagcatcgttgttggtgggcccccccccccccccctaaaaaaacataactctactacaatcccacccctgctatcgacactacgaaacggaaggcacagaactgcgacctagcaaacaccatattgatttgcctcagagcttaccccaccggactacccctacctgaaaagcgcatgagagctgctccacggataaaagcaatacattttcagaacccacgctttgctaacagacagttgcaactaagattctttatgattaagaaccctgttccccgttgtatgacgccggaatcgccgacgaaaactggt

SEQ ID NO: 91381 - DNA, 423 bp, Glycine max
gctaccatgatgctacctccttttttttattttcttttctgaaagaaaagggtacataatttggaaccttcactgcaaggatcatgtaatttcgttacatttaccacttatttgcattatcctatccaaattaactcagtaacaccaataatgacaatagtagtcacgacaaacaacgaactgtgtcaatccacattttctatggacaattatatcaagtacatgttgagaaatgaaatcttagatgccctgctcaagcattgctcgaaccttcattggaagaccataaagccgaatgaacccagcagcatcagcttgatcatatatctgcccactctcaaatgatgaaatgtcttccctatacaggctaaagggactcattcgactagttacaataacagaacctttgtacaatttcaaagt

SEQ ID NO: 91382 - DNA, 325 bp, Glycine max
gattatggatcataagatttttagatttcttccattttactgttgaataataatgtacagaacaaatccagtagtagactatacaatgacaataatacttcatctcccacaattaaacataacatgcatcatgcatggactctctacaaaccttgacttccccatccataaatgcatgatcacaatacagtttcccatctaccgtacagcaatgtctaacctcccaaaaaaaagtctgcaagttaagttttgtatcaatttaaccctttctctggcatctatatggtgttccaattctagaagatgcatttgtcattgcataaac

SEQ ID NO: 91383 - DNA, 229 bp, Glycine max
ttcggttaaccacccgggtttcgtagtatgcgagcatcgttgttggtgggccgccccccccccccctccccgtcctaggaacccacagcgacgaaggaagggaataacgaccatggttccaacccgaaaatcaaagcgagcatgcatcgagatacgaaacacaccacctaaacacgggaaaaatgaaacactaacctggaggtcgaaaagaaataggcgacaccactgg

SEQ ID NO: 91384 - DNA, 232 bp, Glycine max
aaccgggtttcgtagtatgcgagcatcgttgttggtgggcccccccccccccccccccccagcgcgaaaagaatcgaaattcaagtattctactgagagataaactgaggtgaagacgctacaaccaatgaggaggcgcacctactcgcaaaggagccctccagcccgaagaggggcgcgaccaaaattgggggagaacggaacagaaacagaaacaaggaaaagccgggag

SEQ ID NO: 91385 - DNA, 392 bp, Glycine max
ccaaataattatgatcaagaatgatccacacaatatgatgtgttgggtaaaaaagaaaaaaagaaagaaagaaaaatccacactatggcaatctcactcatatttcttggccaaagcaagaaaaaaaaaaaaaaaccttgttgtaatcgacctttttgcttttcacgcttcccagggaaaaagatacgaacaatttttgggacttgaaactttgtagcattcctcctatgtatccaacacagagcaaacctcttaacttttgctttttctcaagaggagagacattttttttggagaaaatatatgttttttatttacaaaaagctgtccgccaattatagtaactaatcaagggttgggattggcaacaaagtatgctaaaatcccaacaa

SEQ ID NO: 91386 - DNA, 363 bp, Glycine max
  unsure (1)..(363): unsure at all n locations
tcctttttttttttttttnaatttttaattttctcccagaccgcaaaattcaaaggccaggggtggctttttttttggttcaccaaaagcctcgtacaaaatcttaacaaatgaaaacaagtggctactccccacaatgataaggcaaatgtaacaaaaaaaaaaaaaaccagcaatatatgatatgtgaaaaacaggcaaccgatcctaataaatgcttttaattgaagtttgcatccaatgtagatatgaagaggtatatcgagacctcttttgcaccatccaaaaaatttgccataaacagcagaagaattccttgtaatgggggtgatcatttcacagccaagatcttgatgatagatg

SEQ ID NO: 91387 - DNA, 359 bp, Glycine max
attcagaattgaaatgtactatgaattagggggcatgtaaactccataggggccagttcctacaatagcataacataaaattaattaaaccaccgagaacgggaatgagataaaaaaatattaataacaaaaggattcgagactcgctccagtaacagtgtaacacatgactgtcctgaaatctcaaatccaaatctactaattaactacccaccgcaatcattagcaacgtgaagaagatctataaactaagggggggaacataccgaaccggcaattcggcctcgaaatccaaaggtcttgttcctggttttattttttggtgtgtgaaaatgaaaaaatgaaaaattaattctgct

SEQ ID NO: 91388 - DNA, 239 bp, Glycine max
gttcggttaaccaaccgggtttcgtagtatgcgagcatcgttgttggtgggccccccccccccccccaataagataaatgagagctaaacaacctaacgtcgacgaatgatgaaaagaatccgggtctcagacataaagaaataaatctagaatctaataaaatattcaaataaataaagatagtttcccccaccgcttgagggtaaagaacggagccagacagaataaaagaccaccg

SEQ ID NO: 91389 - DNA, 213 bp, Glycine max
ttctttttttttttttttttttttttatctttttcttttttttttaaaggagggacttttcaaaaactcttggggccaaaaaatggtttcaattggaacacaatcttgtgaatacctaaaaattaaataatggccaaattttgccaatcatggaggttttgcataacgaaatcctccaaatttgcaggacactagttgcatgcttaatcaatt

SEQ ID NO: 91390 - DNA, 295 bp, Glycine max
aattcagttataactggacttatggggcgggctcaacagtaaatatgggtaactcaacaattggaactggttcaatatagaaaaacatttttctcaattttatctcactttctttctaggttctctgaactctagatctcaaatatgggatcaaagctttttgctttgcactgaccactttttcccttacgatctttgaaaaactcaacaatgattaacggtgactttataaaaaaaccaaattttcatcaaaatttaaaatttcaataccctttataggtacctgacttaaaaa

SEQ ID NO: 91391 - DNA, 328 bp, Glycine max
gttcggttaaccatccgggtttcgtagtatgcgagcatcgttgttggtggcccccccccccccccccccccccaaggacaacgacggaaaaagatccagaataggaaataccacagcgacaacccccgggttcggaccacgcatcatcatcatcatcaccaacgaaaatcaacacattcaagaagatgcatttttaaaacaacataacagagaccacaaacgcctttgcgaacagtctgccgtagtagaagcgaagcgaacgacgcgaacctcgtgagctcacccagataataaaactacaatgaaagaattaaactactaaatggtg

SEQ ID NO: 91392 - DNA, 448 bp, Glycine max
gtaacagtctgtgtctgtttttgtgttcaccacaacaaatggatcaagctggccactgatcgagtgcggcatgcaacacgacaggacaacaacattattcagaacattaacaagaccacaccacaccatgtgacgcttataaactcatacaagatttgttttcattggcaaaatgaccgacaaatacgacttacaaagccaaagggactccaatctctcctccgacgatgcattcgccaaactctacgcctacgtcgacgccgacattgaggccttacttcagaaagcagataccgcttccaaggagaaaagtaaggcatccactgtggagatcaatgccgagaatcgtaaaaccaaggctaggttgttggaagaagactccaagttgcagaaattggctatgaaaaaggtaaaggggctttcatcacaagaatttgctgcccgtaat

SEQ ID NO: 91393 - DNA, 352 bp, Glycine max
ctgattcaggttcggttaaccatccgggtttcgtagtatgcgagcatcgttgttggtgggccccccccccccccccaccaaagtagaagaaaagacgccctcctcggcgacttcaagatataaggcctggtgactcaggccaccaatagacgcacataaaagaatcctccggaggaaggcaaatagaaaacacaaagaaaaaaaacaaaagaaaagccagaaattaacggtgagttgaccccgccccccgcgcgcatgcgaaaaaaaaacaaaaacctccgaatggcaccaagccgatcgactccgcgcgaatactcgcaccccacaacccaggcggctccagagccaccca

SEQ ID NO: 91394 - DNA, 146 bp, Glycine max
gggaaagaaaagctttttattttacaaaatttggggaacttgaacaaaatgttcaaaagcggggggaagaatgaaaaccccacacaattcaaagtagctctgctgtattacatactaatttactcaacaattcaacccacaaaaga

SEQ ID NO: 91395 - DNA, 469 bp, Glycine max
ctgattcaggttcggttaaccaaccgggtttcgtagtatgcgagcatcgttgttggtgggcccccccccccccccgataaactctactacaacatgaaccaagcagaaccgaaccgctactccagaccatgcacacccgacaacgacctacagaatcagaaaccacgtatggaaacgtcactgccaggcttctgaaagtggatatggccctccgccgaagtagtcttagcaccgaacagcctcgcaacacagaaatcactactcccgaaactcccacctggccgaccgccccggaacgaccagacaaagaaacaatactaggacgcccctggaaccaaaacacgacgacaactacacctttccccgctccgggaagcccaccgctcgaacaaaacgacgaagcttgacttccggaatgcggggaggaaaggcatacgcaagatctagctcccgctcccgaagccggccc

SEQ ID NO: 91396 - DNA, 273 bp, Glycine max
aaaaaaacaaagcgtaagaaaatgtttttctcttcaccaagcatttttttttacagacccgaaaggcaaattccccccccgaaaaggggcaaaaccttttaacccgaaagaaaccaaacggaccctaaaattttttactaaattgcccaaataacaaattcttagaaagaaagagaagattgggatcaagagaggggggccccggggggggagaatccaggggcctttttttcgtccaagaacaaatcatgggttttcctcaacgccgggggc

SEQ ID NO: 91397 - DNA, 460 bp, Glycine max
cctaggcatttttttgcatctaccaaagtacattctatataatcaaggacttaaaaatttctgcataaacatatgtgaataaatacaaacatacaactacacactcatggaaacaactttttttgtcttgaaaagccaacagaaatggaatttattaagatgaaccaagacaggtacactcatgtaatcaactaattggtgttgttataaaatagactgtatgctgccatgcataattgatcatcttccatcatccaaagcaatcagtacatgatccctaatgctatcatacccagcatattgatggctgctgctatcaccaagctcataaatgctagatgatgcctcgtgaagaaggtgttgagtctcctcaacattttggtctgtattaatccagggatgcttctccattatccttattcccttcaactccattgccacttccttcatgctaggcctt

SEQ ID NO: 91398 - DNA, 413 bp, Glycine max
gattcaggttcggttaacaaccgggtttcgtagtatgcgagcatcgttgttggtgggccccccccccccccccccatacaaatcggcacgaaaccaatacactaaaggccaatcagacagagtctacaaacaaacaaaaaaagtcataaaagaaggcagcacagatcctgagatacgaggagatatggcaggcacgtggatgctacaacgagacacaatggcaggcccgcgacccgtcaccgggccgccggcccggccggacaaaactgaagccaacgctatattattaagcaagacgaaatataatccagaatttcttaaaaacttcccgcccctacacacgacacgacaacaacgacaccaccacaaccacaacaacatcaacaacaaatgaaggcggcacagtcacgacc

SEQ ID NO: 91399 - DNA, 449 bp, Glycine max
gctgattcaggttcggttaaccaaccgggtttcgtagtatgcgagcatcgttgttggtgggcccccccccccccccccggcacgacaaagaaagagaagcacaacacgccacataactgctcccccccttgcacggcacaagaacctgatcacacaccacggggaaagaacagacagaagcagaaacagatccccgcaaataacaaaacaccactagcaaattaaaatttcagtcaacaaacggcgcctagaatgacccctttacgcataacttcctgaaagaataaaccagaataccttatgagacaccaccaagctacaaggagataaactgacacatgtgacatcacagacagacgaggccaatcatatcggccaaaaggatcaaccaacacaagcgagaaatatcagaataaataaaaagaatactcctgaggagccagagccac

SEQ ID NO: 91400 - DNA, 393 bp, Glycine max
gagacagtgaataatacattaactcgggacaagtttccatgtttcttctatttaattccaaggtatctttttaatacatagagcatagagattctctcgacagctccagatgtcaaaaagaagaaaatacgtcaccacaatttgcctataaaattctttatattatataactatatatcgaactcagtaataataagaataaaataagataataaactaaaccaaaaaaaaaaaaacactaaaacagaacaggtaacagagttacagaggtaagaatagaataatcacaaaccatgtgaaaaccaagcatgagcgaaccccaacgttgtcttcttcgaaagcccgttcatttcaggatcgagtttttgtgcggttctcgcgggttcagatttg

SEQ ID NO: 91401 - DNA, 376 bp, Glycine max
agagtgtataaaaaataatcttattgaaattttggggtgggggtgtgggaatataaaaaataacaaataatattaataacaaaaatgaaacaaaatttaaatttttgataaacaaattaaaaaaaaatatacaattttggggggaagaggccggggggtgtgacaagaaagagacggggtgtgggaagaggctagggtgtgggggtggggcaacccttgttccctaggcgcttggtgcagggcgccaccggtcgcgtactccatggaagcgcctgtctgggagacggtttgtaataaaaaaaacaaacccccaagtaaataattgcaaaatagcccctatttggtaaataaaatgtaaaagtggcccttttttggt

SEQ ID NO: 91402 - DNA, 370 bp, Glycine max
ttcggttaaccatccgggtttcgtagtatgcgagcatcgttgttggtgggcccccccccccccccccccctgaagcagaaatcatggatcaaaaataaagcatactacgaccaagcatccgagcagaacatagcgcgacgcttaccccaaacccttgaaaggggaataaattacagaagtaaggcagacttcaagccaacaagtagcaaggaataaaaatcgacgtcgacgaataaggcgaagacgcccacccggatgataactgcgcgtaggaacccggccgaggaaaccttgaaagcgcacggcccctcggagatttatattcagaaagttcatggcaaaaagtttcgctagaagcggaatcctatga

SEQ ID NO: 91403 - DNA, 401 bp, Glycine max
ggttcggttaaccaaccgggtttcgtagtatgcgagcatcgttgttggtgggcccccccccccccccaaaaagctaaaaaaacagcacccagaccaacaaacagcaccggacacccataacagaccaaagaacatcatcatttatcagcccatcgaccccatcgctgaatttcttgaaatccataaccaaaaagactcgacccccgggcccactcgaccagaaggctgctatgagcggagaccaactaaagcagcacacagtatagaaagtgacggtgagaagctctcatggaaactcaaaagctagtcactccggagaaaaacacacgaaagggtcaacattaagaaaaacgacgaggatagcgacgatttgattctgaagggacacacgaccgacgacc

SEQ ID NO: 91404 - DNA, 353 bp, Glycine max
ttcggttaaccatccgggtttcgtagtatgcgagcatcgttgttggtgggcccccccccccccccgcgtccacccactcgcccacgctacttccctgccaccataacaccatcgcgctagagaatcccaatctcagctcttggatccgaccttagaacctcatacacacgggctgcatacgctcctcacccgactcttgcgccaagaatcctcggatgctgaacatgatagactatgtacagcggggttgtattagctaaggttgcagaacttcttggatcatggcataaccctgagggttataccgccctccttgagggcctagaggaatcaaaccaatagactgctagcta

SEQ ID NO: 91405 - DNA, 440 bp, Glycine max
gttcggttaaccaaccgggtttcgtagtatgcgagcatcgttgttggtggccccccccccccccccctttttcatgccacacaatcgaactagaaacactggccaaaaactcgccccgctcaactcactgcggaagcgaccttcagatcaaagaaccttctctaccgcaacatcacgcaattgaaaaataggatgaaaagctaaagcaccggcaccggcctcgcgatgccgcgattgcgcgatgctctagcacacgaatggcctgggcaatatccagattactaacaaacatactatgatagaaccacccgaggagcacgactggtgcctaaaaaaaaactctcaattaagcaccctgccgctgaaggccccatccgggatgaaacataaaatgcaaaatacttgcttgctgcaactctagaaagcaaacctcacatgag

SEQ ID NO: 91406 - DNA, 111 bp, Glycine max
ataagcaaaatagatacaacagatatgataccactaccaagcaaagatacacttccttctcataaacgtgttattataccactacgatactatcaggtgctctcatatgca

SEQ ID NO: 91407 - DNA, 448 bp, Glycine max
  unsure (1)..(448): unsure at all n locations
gtcagtcaatgcgttaaccgttgcgtattggaagaagccgcggatgccgtccgtcgaagcgaagagccactcaacgcaaccaccgccgcgcacgaaccggcccgccccgcgcccccagacccccgctacccccgccaacccctgcctagcctcatttacccataaaatcctcaggctaggtgctttatccgcgtaagtatcaccccgtaatattgtaaaatgtcgccgcgctgtaaacggatgtagttaatacggcgcggtgacgcggcggtggttgtttatgaagctggaggtcttgttccggtcgtggtgctggtgcacgctgtacgggtagttgtaatacngtcatcgtggtcgtaagcggtgttattatgattctgcccgtcgtaagcgtcgtggttgtatatgaggttcttatgctccttagtataagtatgttgctataaat

SEQ ID NO: 91408 - DNA, 190 bp, Glycine max
cagacaccaaaacaaacaaagtagaacatgaagatcagtatttgacaagaatttcaaggggggccaaaacagaaaccaggtgaaaaggaatcaggcaccataggtgtagtagcatacataagagaaacgttaaaaacaaacaacaacgtagagcgtacgtaacaaggaagaaaattacaatgaaaaagta

SEQ ID NO: 91409 - DNA, 421 bp, Glycine max
gtcttactgtcccttatttacctgcagttctctgctgtttagctcgagggctactcttcgtaatggacatcgaaggaaaggaaaaatcctgatgagcggagatccgcgcaggccaagaagtggacgtggtacccgtgcgaatgccctagccggaatgccgggttcaacgcgaattcttctcccccgagaaagcgcttaagataatgaaagtaaccttgtacagctacctgaattccacagagatttctcgactagacaacacgcgcaattaactgccacgacttcaactgatgctttagaactttatgcagatgcgaaatgacgcttaaacccaactcatcagatatcttctccgacgactgatcaaacggatagggccacatattgaccccgttccgctacttatataatcactgaatat

SEQ ID NO: 91410 - DNA, 498 bp, Glycine max
aggttcggtaaccaaccgggtttcgtagtatgcgagcatcgttgttggtggcccccccccccccccccccccctatacaacagatcccgacccactacacaacatagccccaccaaatgcattacgccttgcgatgccgagaccgcatagaattcgaatcggacctgtcgctgcagaaatcgctgacgccgcccttctaaagagaagtttttctcaaccgctaatagacccggacatcaaggagggccaggaacaatcagcggcaaccgcccgacccttcggaccagactgatgtcccgaggcccctgcttatccccaatccgagtacgatctagaatccgaagcggcatgaccattggcgccggggcgagacgaggaaccaaccgacaccctcggcctatttgatctatggcccgcccgaaacattacggaaggagaaagtgtcccctcctaatgctgcgcccgcgcaccagccccaaaagatggaagggctgatga

SEQ ID NO: 91411 - DNA, 603 bp, Glycine max
agtggctgattcagggttcggttaaccaaccgggtttcgtagtatgcgagcatcgttgttggtggccccccccccccccccccgcttacaagacactataaaacacccgaaacccacagactaactatactataccatctacaacaaagagatcaaccaagagtctttaacaacacaacccgacgacggtgatgcaggcacagaaaatgccagtacggctaccgcctgaaacgagccgcctacgtaggaataaaacaaggggaaaaaaataccgcagcgcccgcgccaaccaagccgccgagggacaggacaggccaggcctataacaatgcacccagataaaggagaatcctatcctactgcggccgccggaaaacaaacgccagccccgccgcgggggtgaccgcacagagaggtatttaatctgaagaaaactaaacgatgtagctagaatgcggtaaagggagggaagacgtttaaggggtaccctagggtaccgttaagggtagggtcggatactaccgcgccctgcgatcccccgaaagacggcgtgggccactgccgtcggataccggagggcgcggacaagatttcggcggcgtg

SEQ ID NO: 91412 - DNA, 420 bp, Glycine max
aacaaaggctagtttaatattctttccactatggcataaaaggggggaaatgttgaatgtgctataagcaaaacttggtgtaaagttaatgagacatcaactttgcacttaaaatgtgaagctgttcccaatccttcctaccacgtacatcatatatctaccacttgctaacaaccaacaaaaataggaaatccacaaagaaacaaaattataagaagcaaattaaattaataaagcatctaactagataaatgcttaaggaattaatacataacataattaagatacatataatttcaagtactaatcaaagacaatgcttctccaaaattcttggctttgatcccaatatactccttcacagtcacatcacgaaaacgagcgacagagtctactaaaggagaaaccacataatctaac

SEQ ID NO: 91413 - DNA, 387 bp, Glycine max
ggaaggaaaattccttcatagggtcacgggcttcaattacatacctatatatagtattcccaagtcctaaagataagaatcaagcagcagcaattaacaaacctaccccactacagacaacactagttatgacagaattgttaatttgttggcagacaacattactattgttataacagaattgctataacaaactattccatatttaattggaattcctttaatacccttacaggaactaatttacttaggctagggtcctaacaattccacccctttttacaaacaccttgtcctcaaggggtagttatggtcaacactttagcctttggaaattccaaattacaccaggccatttccttcatttcacctgggggaattgaaaca

SEQ ID NO: 91414 - DNA, 186 bp, Glycine max
cactgcaattttataatcttttaaggaaattctcgtgcaaaggggtggggcacgaaatatttctcattttttgaccagcaagttacatatccagcttcctacagtaactaagactagccaactcaaaaacctcattttttttctttttaagcaccctaaaggggttaataatagaggaggggggtc

SEQ ID NO: 91415 - DNA, 349 bp, Glycine max
aggtcaaaggggcgtatgaatatttggacgcagggggaatagaaaagctgggctttggacttaaataattaggttttttgggctgaagcaatccgggttaaagtattgggtcgcaaacccgacccgcaaataacctagaaacaaactcaaaaaaaaagtgtcgtgccgctgcaagtctcgatcttcaatggtgatccagtgcaatccgccaaaattgcaaccgaaatcagagagagtggtaatgatcgtaaacctgtacgatcctatgctccaaaacgcgattttgactatcatgctccaaaaaactgacagctataagccttcctatctttcactatttccttcaatt

SEQ ID NO: 91416 - DNA, 226 bp, Glycine max
aaaagaccaggcaacaacatataagattccaatgcttcccaaaaaaaaaaaaaaaacataaacctccgtttataaaaaggggataagacacctcactgggtaaaaagcactagggggtcctttaaccaactaaggacatctaaccttttgaagcgacaggggaaaaataaaatatgaaaatcttggccactaaaaaacccaataaggacaagggcctaaaaccccc

SEQ ID NO: 91417 - DNA, 341 bp, Glycine max
accaaaaaccccgaaaaaaagcaagggttttaaggagcaaaatccgatccaaaacttttctcagaaaaaactagggataatatacatggaatatcagggaaaccaataatattaattgggtattaagattttaagagcagcacaactgagcctacatccttaatgacaaagtaaagcaaagcccaatgtatttataaaacctctaatcaccaccaccacctttgttcccagagcttaacaaactattttttgttccaaaaaaaaggaaactatttgtctatttgttctgaaacacaggctaagccctgaagcaatctcactatttcagttgtatcatccag

SEQ ID NO: 91418 - DNA, 290 bp, Glycine max
gggttggggttttttttttgggggggtttcattaatttaatcaggggggaagaaaacaaaatttggtggaaaaaaaatttttttttccccttccaggggaaaaaaccccgccaaggccaatatatgcccttaacttaaaaaaataaaaaatagaaccctcaaaggggaatgacccccaaagttttgtttttttttgaaaagtttttacaaaaaaagccccaaacggttaacgacgtacatttgccacccccgtttccgggctcaggactttgattttttgggacccccct

SEQ ID NO: 91419 - DNA, 374 bp, Glycine max
tcaccccactccggaatatactaaaacccattcgagcctaatcgcaattactgcgcctataccttaaaaaacgcccacgcgaaacctcggatggttgtccgtaacgctgtccgtaccctaaacggagtggaacctatcccgacatgccggaatactctgactagcctcactaattcttaaccaatgccggcatatactcaaccatgagaaccacggggccaggatctacgaaataagcgcacgtcaggtacttcgaagagacggcgaatcccggagaaggcgagtcgtccgaatctatcgatcgctgacttactagctactaataaccctgcatatatactacctgcttctcaaacgggctgtcaaccgtcttc

SEQ ID NO: 91420 - DNA, 437 bp, Glycine max
  unsure (1)..(437): unsure at all n locations
atacttaaatactnggggtcttataaataacatccggcttcatacacaaacaatatatatccttctagaaatacctatccttctaccacaaaagaaaggaaaagaaacaaaaataaaataaaatattatcccctgctgagcctctgccatgcccatcttgggtaggcaaatccaagaatctaacaacataagaatattataaaaaaaaaatcactcactttatacaccccactgatcctaaaaaagaatacattctcttggtcatgcctgctgttaccttccgctttctgatctagagccctgaatgtcaactgccatctgtgtcagaattatccttatgtgattcaatttctgagttaaccccacgatttcttcggtgcctacgatcctctcttgctaaagggtactcctttgactcaagcatacgtacaacttgg

SEQ ID NO: 91421 - DNA, 326 bp, Glycine max
ggtgggccccccccccccccccccccctattcttgaaaccgctgagcacagccacaacaccacgaatgaaacaaaaatcaaccaaacaaaccttaatcagaaagacaaaaatccgacagagcacaacccaggataaccaagaaccaacgaattactacatcctgcgcacaagaaaaagcacgcggccgacccctcccccgattataaccgacccagttccgcacagaagatcaagataaaaatcaaaattaagatattcgtaatgaaaagagctcgacctaatccctgagccgtgacaaggagttgaaaaaactatacccccccgc

SEQ ID NO: 91422 - DNA, 358 bp, Glycine max
gcacacaaaccaacaaagcatccaatcaattttatcaaaaccatatatatatgtcaatgatacaatggttccatggtaaaatcagcatcctgcttctaactcacaattccatttcatgatttctagaaacaccacttaagcataaggatattttacatatagtacatatgtgttctttataggaatcaattgaaaatactgcattaaaccacacaaacaatgaatcagatcggttttgttatttatatacacaccatgcacgatatctagtcaagcttgtacaatatctggattgagtcccatttgttttcttgttttaccaacaaacaaatcttcagacttgatgaatccaggaatt

SEQ ID NO: 91423 - DNA, 411 bp, Glycine max
acgcgcctgtagacactgaccaagaacgcggcatgctcctctaacaggaatgccgccgtttaccactgagagacatacggaattcctgtcgagtcttgcccgaccaccaaagacctttgcaatcgaataatatcgaactaaagccaggactttaggcctcgcatgcactgtcactcccctactctgaccgaccccccagaaactataataggctgcacggccggactgcctgattatacttatagaagtcaccgctcaagctcttactactccgacctctgccagccctacgaatcctaaaaagccctctaccccttcgtggacaagaattaacgaacctgcgatgcctctgttttacccccggaccacctttgacacctcgactaccactgaaacagctccacacgctca

SEQ ID NO: 91424 - DNA, 395 bp, Glycine max
tcggacttgtagtagagtacggtgtggtgcggcgaatgaggcggcgagggtcgcgaagggccgcgtgcggtcgagtcagactggggtcgggttgtagtgaggggcgtgttgtctagtgctacgggtttgtagttaacgtttggcgcatcaaggttgtgttcttatgattctacttattgtactgagtgtggtgctcagccgtataatcagtattctgagttgtagactaattgttctggtggttattctgcttaacgtacgattaataagaattcactcgctaatttattagcttggagcgggactttgttcttatctaagcgtgctaagtctgatgctattaattatgcgtacgcgcagtggcgtgcgtctaagctgccgaaggcgggcttggc

SEQ ID NO: 91425 - DNA, 245 bp, Glycine max
ggttcggttaaccaaccgggtttcgtagtatgcgagcttcgttgttggtgggccccccccccccccccacatattagtaacaacccaattaacacaccccggccccttataaaacagaaagacacaacaaccgacatccaaacccaccagacctccaatatccagcggaccgaaatgatcgtacccctcaaaaacccggttaaggacccctgatatatccccttatacgttccgaaaccaccccc

SEQ ID NO: 91426 - DNA, 424 bp, Glycine max
cgttgcgtatcttttcccaagaatggttcttctcgcggcctgcctccgcgtacgtacgcctccacctcaaaacacaacaagccccccacacgtctacgaatactgtggtatttatatggaggtggtggtcgtcttacggtagttgtatgattgtaattatagtgttccggtgtgtcgattaatgttggtctttttgtaccgtgttgttataccgtatacggtcttaataatgatgtgcatcttgcttttagtccgtaccggtggtattactggtgtgtttgccagtagaattgctgggtacggccggtgtttgggaattggaataggaacccggggcggccggggttgggtagttaggaggagcggcgtgatgataccggtggtgcgcaggattgggagtttgcccggaggaatccgtatgggt

SEQ ID NO: 91427 - DNA, 377 bp, Glycine max
gttcggttaccaaccgggtttcgtagtatgcgagcatcgttgttggtgggcccccccccccccccccccccccccccccaaagaagcataaaatgcccacctaactggtagacgacgcaacccgaagcataatcccgagcccgattatccgagaaacccaaacaactggctatccgcctagcgactatgctgctgaactaaacgcgagtgaaattaactcccaacttctcaatgctatcaataaaagacctatataggtacccgacctcctttgtatatgaattaccttgacccaatgagtgaaactgaagcacttgaagagacagcacccggaccaaaagctagacctccttgctctttattgtccttcggaacac

SEQ ID NO: 91428 - DNA, 612 bp, Glycine max
  unsure (1)..(612): unsure at all n locations
cttcagtggctgattcaggttcggttaaccaaccgggtttcgtagtatgcgagcatcgttgttggtggcccccccccccccccctaaatatcaacctaccataactcaacccaccgcactacgctacctggacaaccccctcagataaaatcaataaaaatatatcaatccgcaaccttttttcaatttcaatttcaataatgatacggactaataaatgataatgatgaaggatccccggatactattcggaactgcacttacggaaacaagccagaagaagagaaggccggacggacggacggacggacgcggactggcacaccacaacaccagcgcagaagaggacaagagaacgcaagaagccgaaccaaccaaaggatatacatcgaagaagaagaagaagaagaagaataataaaaccactaccacaggtataatattgcgccgccgacgatattgagatgtgttcttgttttagtcgtcgtcgtcgtcgtcgtcattgttgacgtttgttgtttattcccatacgtaatttaatgttcctggttaattattattctattagtgagccttnccgtcgtagtagttttaaataatatcgtgaacgtg

SEQ ID NO: 91429 - DNA, 395 bp, Glycine max
cataccagaccaccgagttttactacggcctctccgccggttacttagctactgccactgcgactgcaataattgcttcgtacacaatgatacaaatgtcagctaattttcccggatgagctacacctccttcgtgactgccgcgctctcaatataaattcgcaccagctaaaaaaacgacaacgaccgccgcccagaaatagaaccgatgaacttggacatcggtaatccctaatgcttctgacgctgctaagctgatcttaagcgtcacacgcgacccccctggcagacgcgtcataacctccgatccgcgaaactttattttcggattaggctaccgcgtgacctcacacacatacttctgcccctacgcgcccgactgcttagactcctat

SEQ ID NO: 91430 - DNA, 274 bp, Glycine max
cgggtttcgttgtatgcgagcatcgttgttggttggccccccccccccccccccctaaaccgaaacccaaaaagcaccgaacatcgacccaagttacacaccccgagcatcccacgaaagaaaaaaacgaacagccaacgatagaagacaagggggcgaagaagccgcgagagatgaacaacagatcacggtggacccaaaatataataaaaacactctaaaactatcctctccgttgcttcatgacaatcctaagacccgttccgtgtatcgc

SEQ ID NO: 91431 - DNA, 292 bp, Glycine max
gttcggtaacaaccgggtttcgtagtatgcgagcatcgttgttggtgggccccccccccccccccgacgtgatagcagcccgacactttcttaagacggactctcctaacttgagctgataacaaaaaatccagagaaagggcagctgacgacccgcaagagcagacctcctgcctaaaaggatcttccgcgattgaccaacggaaatggaaaaagcactacccctgccgcctatcaagtgcgggcaaacccgaattgcaaacaagaatggaagccttgcctctagccgtta

SEQ ID NO: 91432 - DNA, 107 bp, Glycine max
gcctcggggagaaatagtaatggacggtccaaatataactaaaggctgttgcaataattaagctaaaacagcggtagcctacaaggattatcagaacggtattctat

SEQ ID NO: 91433 - DNA, 401 bp, Glycine max
ttcggttaaccaaccgggtttcgtagtatgcgagcatcgttgttggtgggccccccccccccccccccccccaagtaaaggaaaactagctaacccaacactgcctacgccacgacgcctaataatcccgccagtatttataaataaaggaaacgtccatctaactgatgccagaacttaaaagcaacaccagattaatgaatcattgccggagagcaatcgcaaaagagcacgagactttgagaacgatcaccgttcacgtcgcgacatctgaggaacgaaacgccgaggcccgaggcgctcacaagaatgattagagaatcacacagagacacggagaacgacgcgatgaactgcccgaaggacacttctctcctctccccgctgaagccgaggccttc

SEQ ID NO: 91434 - DNA, 224 bp, Glycine max
cgctctggagcaagtactccggcgtcatcgactacgtcaacttccagttctacgcctacggcgacaacaccgacgtgcccacgtacgtcatgttctacaacaaccagttggcgaactatcccggcggcaaggtcctcgccagcttcaagaccggcaacgtgaccggactgctctcgccggaccaaggtatcagtggggccaaggagctgcagcggcagaacaag

SEQ ID NO: 91435 - DNA, 345 bp, Glycine max
ttcggttaaccaaccgggtttcgtagtatgcgagcatcgttgttggtggccccccccccccccccctaaaataaagattgaaccgacaccgacacggactacagattatagagtacgtatcatgaatagaatagacaaatactatgacaaaccaccaccacatacaagacaagaccactttatgattaataatagtatttctgactctgactctgactactataaaatgaaccgaatgtacgcctcctcacggatatcgtcccatcgcatctatgtggccccttatgcttgcggagccgctgcggaattccggaactcagggaacgtagacggcgagtatggggt

SEQ ID NO: 91436 - DNA, 390 bp, Glycine max
aggcattacaatttgattgaacactccaattatctttgcatgaaacactcaaacagtgacttcaattgggtactcttggtccccaacaataaacaaataaggcccttcttcaatcaccatcgaaccagcctcattagccacgctaagatgctcacaagggcttagctcaaaccccacttgaaccgtttcccctgcattcaccttcacactttgaaaccccaccaactgtttcaccggattcccattattaatgtttctcacctttccctgcctcacaaacagcaacaccggatgcttccctgccaagttaccacgattcgtgactcccaatgcgatcgacaacaacatggtctggcatgtttcttccgccaactccgaaaccagcttgta

SEQ ID NO: 91437 - DNA, 283 bp, Glycine max
ctcatctaatccttgtgtattaggaataaccgaacaaggccttacagaaaataaagaaaaaagatctggattctggacatgtctatgtatggagtttcaggtctgagtctgacggcagcgctcttccacggtggttgaagatcatgaaatccaggttagccgggagcgagacgatcctattctcatcagaatgtggaagcaccgagagaaatttagtgggaacagcaagacctgcccacatgcacaagaccaaccctaagagcaactccatcatcacatccat

SEQ ID NO: 91438 - DNA, 497 bp, Glycine max
gcaccagattctcaacagaccgatagtatgaatcaccagatgtttccaaagtgcgataatatgcaggtggggcatgtcgaagctctggcacatgatgatgatctagggccggcggaacatatcgaggctctagaacaagaggaagctgccgaggctcaggtgtaagtgctggttgataatatctgtggtgatcactagccaaagaatggccatgctgagagtcaacaggaactggagcatagcgtggtgccctgtatggatcctcaaaaggaacatgtctaaccgcagggcgcctttcctcatcaaatcgtggccgacgcgctgcttcaataggccgcctttcttcaaaatggcgtggcttccttcgtttttcatagtggcgcctttctccaaggtgattatttgaaacagattgaggtgcactaacaggcttaaacagcaaaagtaacctttggacttgttttgtggtgagctctggatcaaatttgctctttgca

SEQ ID NO: 91439 - DNA, 205 bp, Glycine max
aaagggggcaaaaccgcttctcacaatgttaaataaaaaccatcctaactcacgggcttcgttaaagatccaaaaaagggaaaaaaaaatggttttatttttaaacaaccaaaacaacttttttattcataagtcccccttttcctttcccgaattcccgctgggtggagggagggttataaaacaaaacccttttaaggccccc

SEQ ID NO: 91440 - DNA, 223 bp, Glycine max
aaagggggcaaacccgttttcgacattgttttagaaaaagcatcctaattcccgggcttggttaaagtcccaaaaaagggaaaaaaaaattgtttttttttttaacacccaaaacaatcttttttttcatcagtcccccttttcctttcccggattccgggtggggggggggagggttcaaaaacaaaacccttttaatgccccctacaaaccccgttttttt

SEQ ID NO: 91441 - DNA, 258 bp, Glycine max
aaaagggctaaaccccttttccccaatgttttagaaaaagcttcctaattccctggtttttttaaagttccataaaagggataaaaaaattgtttttttttttaacacccaaaacaattttttttttcatcagtcccccttttccttttccggatccctggtggggggagggagggttttaaaataaaacccttttaatgacccctacaaaccccgttttttttcacccccacagaaaaacctttcctgcccattttt

SEQ ID NO: 91442 - DNA, 213 bp, Glycine max
atggatataaaaaatttaatttaattaatcaaatcatttgaaattttatgcttacaatattttgacatatacaaagttataaattttaatttttaatcataaataaaaaaaagtttcacagcattcaagtaataaaaggatcccacccaaaaccaaaaaaaaaaaggaagaatgtcaaaacgttacattgaaggaaaatacatttttttaaaa

SEQ ID NO: 91443 - DNA, 271 bp, Glycine max
gggatccaccaagggatcctttttttttgggaattccctaaagcctgtaaaacaccccttcaggaagggatcatttttttttttaaaaagctggaattatttgactggctttgggcaaaaaaattataaagttttagccgcttaagagtcccaaaatttccatgcttccttgtagggagagaataaatctttcaaagcttggttttgattttgaggaccatgctcctgggcgagggttttccagttttggccctgttttacactttttttt

SEQ ID NO: 91444 - DNA, 206 bp, Glycine max
gggggctgcaaaacaattttaattaaggatgctacattgtttgatcacacctttaagcaaggggttgcattcttattttatatatgcatagtggtgcacactggcgacaaaatacttgacccaaatggaagccaaattagggagattttttcatttttggccgtcatggggttctccaggttaaaaaccagaatccaaagttctat

SEQ ID NO: 91445 - DNA, 202 bp, Glycine max
atacggtattcctttttttttttttgttttcttccatttttagaagcgtataactcctgatagccacaaaatatatactaccagggtaaggaatcccaaactggaactggagtacactaaaaaccccaaaaccatagcaaaaaccaaatggcataaaactggggagcaaaccacatggttgcctttcagatgacaaaagtaa

SEQ ID NO: 91446 - DNA, 278 bp, Glycine max
aacaactaaaaactcattcacataaatatatcacttattcatccaattacacacctaaaatcaccactctattaaacagtaaatatcaaaacaactaaaatttcatccaaattcaagactagtttacttgttccaaaccacaacattaacaatatcaatgacaaaacaataacacacatcattcttaacaagacactccataacctcattaattctatctgctgtcattaattcaatatcactcattatattctactttacacaaacctccaacattt

SEQ ID NO: 91447 - DNA, 245 bp, Glycine max
ggcggggaaaaaagaaaaaactttaaggccaacacaattgccaacaaccaacaacatgggaatttcagcaaatttaaaggcccctttgttatgggggaggggaatacccctcccccccattttttattaaaaaaaaaaaaccaatggctccgggctcggggccggaaaaggggctcaaaaaaggatccaaaaacaggggttaaacaaaccccattcatttttttccgggccaacaaaaacttttt

SEQ ID NO: 91448 - DNA, 254 bp, Glycine max
  unsure (1)..(254): unsure at all n locations
ggggttgggaaaagaaaaaacttttaggccaacacaattccattcaaccaaaaacattggaatttcagcatttttaaaggcccctttttttttgggggagggaattactctccacccgatttttttttaaaataataattgnaatggctctgggctttgggccgcataagtggctcaaaaaatggtccaaaaacaggggtttaacaaacaccatttattttttttctgtccaacacaaactttttccaaggttt

SEQ ID NO: 91449 - DNA, 363 bp, Glycine max
ggggggggaaaaagaaattacttttaggccaacccaattcctttccacccacaacattggaatttcagcatttttaaaggcccctttgtttttgggggagggaattcccctcccccccatttttttttaaaaaaataattgtaattgctctgggctttgggctgcataaggggctcaaaaaatggtcccaaaaccggggttttacaaaccccattcatttttttcctggccataaaaaactttttccaagctttaggggttccccttgggggttttatttcactctttttgggaaacagcactttttcggcatttttttaaccgggtttttctggaaccattttggggggggggctgatcccc

SEQ ID NO: 91450 - DNA, 211 bp, Glycine max
gcgttgagaaatgaagtaactttcagcccaacacaattccaaacaaccaacaacattgcaatttcagcaaatccaaagaacgcaatgttattggggaagggaattaccccccacacgatattaaattaaaataataatagaaaatgccccggaccctggcctgcaaaagtagcccaaaaaatgacccaaaaacaaggttctaacaaacacc

SEQ ID NO: 91451 - DNA, 202 bp, Glycine max
acccccaaactaataaaattttcgggcttttttcaaaatgttctactacaaaatagtcttattgctaattggcaagtcacaattgggcacaaaatgaacaactacatgcctacagttttttatttttgatgatggactcagctggggtaaataacctcaatgatgtagggggaacaaaatttcaattaacttaaacccgggt

SEQ ID NO: 91452 - DNA, 136 bp, Glycine max
aaaaaacaaagggaagacttttccaattggttgtaaaaaatcctgatttaagggttggcctataaacataggcccctgggccgggaaacaaaaaagttgttccacaatcttgttatccccatttccaccttttttg

SEQ ID NO: 91453 - DNA, 225 bp, Glycine max
ttttttttttttttttttttttgatgatagaaccaatatgggaattgaaagaagagaaaaaaagacaaactgaagtttcatgtatacgaaacgattataaaaacacgatacccataagctccatttgatacagttgatacagtcacaattacatcattcatttggaaagggaggatgaaaacagcacaggaggcaaaaagcataatggagagaaaaataagaggg

SEQ ID NO: 91454 - DNA, 200 bp, Glycine max
aaataatattccatgtaaagatttccgtgaagaaagaagaaaagaaccgattgaaccttatactaggaacaatacacataacacacatagaaaaagtttggcttcgtaatcaccttaagatacaacgaattggaccatgatgaggggatcattttccgacatcagatgaatattttagctcttaaacatggttgaagaat

SEQ ID NO: 91455 - DNA, 216 bp, Glycine max
catccaagaaaataatctaaaaattcaattttgaccttaaccctttttttgtccgcgggggttgaaattaaaacctgcccaaacgaaacttgttctcaaaaaaggggaaagggaaaccaaaatccctttggaggggggcggcttttcttttcactggggaatgttcttttcaagaatagctataaaattcagcgaccaaggccttcaattttgcct

SEQ ID NO: 91456 - DNA, 390 bp, Glycine max
aacaaaacgtgacaccaacattacatgctgtcggttttcacgtttaaagaatcaagatttgatacatacatacgtatgtatacacaacaacaaaaaacaagtagcaaaagcagtccaagtacattatgaaattttaatctaatctaaccaaagattgtccgtagacaaacgtagaaacacataggcatagtttcacatacatctcatttttcacagtcaggcagccattgacgtcatcagatatactacaccatctcaaaacatgaagcacttttggccttgatggaaaggaggcaatgaatgcacaatacaacaccgtcatggttccgatggtgctggaggtggtggtggtgtgggaacattgggggacagcagagaaaagggtgtttt

SEQ ID NO: 91457 - DNA, 272 bp, Glycine max
ccaacaacccaggaataaaaaaaaattggctcaagccaacaagggggtttcctgtttcacagtttcacaaaactttcactcctggtcccattcatttataaaatttccagatggatttctcagattcccccatcccaaagttcctaaggggatctgtgggccccataagtttcatgggcaaatggggccccccggagtaatctggcctgtggaatctaaaaaaattgggggggcgggccctcaggttttgcccagccaaaaacataaaaatt

SEQ ID NO: 91458 - DNA, 216 bp, Glycine max
aaaaaacagaacatagtgacagagtattccagagaatttattaaagaactgtgaggaagagggtaactgcaaacaaagcaagcaaaacaaaagacgcaatgatggagaggatgaagaggatacttctacggcttctagccttcactatgcttctcatattaccagaagcttctgcgacaaagtttactattagaaacaaccaattttggaacccca

SEQ ID NO: 91459 - DNA, 196 bp, Glycine max
gggccccctgaaacaatgggaattttttttttacaagcgggaaacccctttaattaccccggcaaacttgggggctaaacatttactatatttggtttaacgggtttcaaactggggaagcaaaaaaaaattttattttcctttttttgaaggtctgcccttttttaaaagctttagccctgacagaagcttaaaa

SEQ ID NO: 91460 - DNA, 469 bp, Glycine max
ggagattaaaggtacatcttatatatttatcttcaaaaaaaaattaccgtaaatttctccaccaaaaagcatatgaaaacattttcaaaaatatatgcgcaggttgtttacatcaactttcctgcttcgagaattttacagatgagttggtgggcttcacctttaaaatttgcactatatataatatgtatgtcaaaatcaaaaacactatgtatggttttaaaattacactttcctagccttgtaatgtacaacagaatctctgagggatgatgaggatgatgaagatgaaatcccagagcggctaaactcggccttgtccttgttgaaagccttgtggacgtcatctttaagctccatgaaacgcgtccttttgattctctgctcttcatgagtaccttttcaaggtaaaacaagtcaggcaggtcatcctccatgaacttgtccagcacttccgagcaatgtggga

SEQ ID NO: 91461 - DNA, 347 bp, Glycine max
ggaaggcggcgcgagaaaagacggcggcagccaaacaggaggcgcgggaggggggcgaggacggcaccgcaacagcgaggcaggggaacagaagggcgcccacgagaaacacagccaaaagggagtggagacggcgagggcagagggccggagagggggcacgaggtggaaaggagctgcagcatggcaacccaccgagcagccagcgagaggggaagtcttcaaagaggcgagttgagaagaatgggacggtgaaggtcggtgagggtgggcgggcacggcggaaacatgaaacagagcgcacgacgaagacaggaaaggggacgccgcaatggatggcaccagaa

SEQ ID NO: 91462 - DNA, 198 bp, Glycine max
  unsure (1)..(198): unsure at all n locations
ccaaaaatatttttttanagcttacatanaataattaacattattaggacagtaantgaacatctccaaaaaacaaaaataaaataaatatcaggcagcattaaaagaaaaantgtaatatggcatatttcgatattcattttaaagaaactattagcttcagcttttcctaattataaaactcttctgttctttgca

SEQ ID NO: 91463 - DNA, 232 bp, Glycine max
ccccaaggaagggcctttttgtcccaaaatttgaacgccaggaagggaagtaatttggtatttccaaaccccccccgggcccccaattggggggggggttcctttttgggggggccccccaatggggggggccttttagcccaaaggctttagggggggtttccccttgtttttggcccaaaatttttagggggggggcccccacccccctttaaaatccccttttttttgg

SEQ ID NO: 91464 - DNA, 216 bp, Glycine max
gcgagcatcgttgttggtgggcgcccccccccccccaccccggactgacaccccccccgaccggcgcacctgcccgcctgagcgtctgcaagaaaaaattcgtggggtatcgaacagggtaaggagtagggcctggcctctccaattaagactagggcctgtattatccccgcgcccccccggggagtgtgttccgtccgcctagcgaaggaagga

SEQ ID NO: 91465 - DNA, 417 bp, Glycine max
gttcggttaaccaccgggtttcgtagtatgcgagcatcgttgttggtgggcccccccccccccccccccccccccccccccccccccccccccttatcttaataccgacgcaaacggccatcacccctccacagacaaaaaaaacccaaacacaaaggacccctggcgcaaaaccatcccacaactccaaaacaaccgccaatgaccctggagaataaaactataaacacacatgacagacgccctaataaacaaatctcaagccatttagcatgaaataactcagactcgccacggaaaatctcagactgacactacacaactgactcgcgactacgacgggcccccgccccactcatattagagctacagcccctccgatttagaacttcatacccatcaaataaagcaaaacct

SEQ ID NO: 91466 - DNA, 177 bp, Glycine max
  unsure (1)..(177): unsure at all n locations
ggcggccgccctttttttttttttttttatttttttttttttttttcctttntttaacagggcaaggggtgagatcgagtcttttttttccttgggcttggccatgcaatatcctattctgattcatatcacaaacattgagtatacatggtagtagaatacttatgttcaatcaat

SEQ ID NO: 91467 - DNA, 369 bp, Glycine max
gttcggttaaccaaccgggtttcgtagtatgcgagcatcgttgttggtgggccccccccccccccccccccccccccccccccccccccccccccaagattcgacgagccttaacgtatcgccccccccggcctatgccttggactgaacacggcaccgctaccgacacgagaaagacctatcacagacttcatcataacagccactcagaaggaactcaacgatcaatgatcatgccctggacctcttgtgctatagctatcgctctcgctgcggctttaactttcacctctgagcctaagactcgcaatgcttccatttctgctgctccggcccaagctaaagagcctccttgcaacatgaatgctc

SEQ ID NO: 91468 - DNA, 182 bp, Glycine max
cttaacaataacaggtaggcagctggttagggaggctttggcagcaggtgcaaaggatttcaaaggcttactcactactgataccaactaccatgactagttatacactaatgctttgccattcctaccaaccagcatctatcttgaggtaaaatacattggtttggtacatcacagggaca

SEQ ID NO: 91469 - DNA, 281 bp, Glycine max
ttcggttaatccacccgggtttcgtagtatcgagcatcgttgttggtgggcccccccccccccccccctctatccaacgggaattagcacggtttagcatataagattggccaattgcgagcgaatactgagatgaatcacatgggcgtctttgcacgaggggtcccgccaccaaccttatcaacgccctacttgagctacgataaaaacaagttcaacctcaagcaggccgttcaatggagtttcagcaccggatgccctcaccggtgaaccctccttaa

SEQ ID NO: 91470 - DNA, 374 bp, Glycine max
ggttcggttaaccaaccgggtttcgtagtatgcgagcatcgttgttggtgggccccccccccccccccccccccccaaaagcttctgccaccaatgcaatcaacacctaggataaactcacaggagactatgagaaactagaaaaattgaacgctggagggaggcttgcagaccacaattaacaagcacaattcgcgctgccataacaaagaattaaaatttacggcgacaccactgccagaaaacaaggctcggcgaacgcgacgggactgagctactgaatttcatcacaacaacaagcaacctccacacagactaccacgacataccagaaacccagaaggaccattgctgcctgactgcgagatcctaac

SEQ ID NO: 91471 - DNA, 180 bp, Glycine max
ggccgccctttttttttttttttttctttttttttttgagtcagaaacttaaagctataaggtagggcgtactggcaagaattgcctgttattacaagtgaagtgtcctacaaatgcaataaacataactattatagagatatatcgagagaaactttgtaatgtacgagctagcatttc

SEQ ID NO: 91472 - DNA, 198 bp, Glycine max
aatactaagggtgcgtttgaattaacattaaaatcacggagaaattacacgttccaatgtaaaaatttcaaagcaaccatattgtagctttcattgaaagaccatttgagttggattcaagtgattcccaaacatacactaagagggtgttggacccaggtactcaacgccattcatttcagagttctctggcatctc

SEQ ID NO: 91473 - DNA, 414 bp, Glycine max
ttcggttaccaccgggtttcgtagtatgcgagcatcgttgttggtgggcccccccccccccccccgagacggaaacatgacctaaagacataacttaagccgcggacaacaacagatcaaaatcgaccgataaaaaaagaatataaaccaaaactcaaatgaagatcagatcatgaatggaacccatgcctactgtaccaccgcccaacggtcatagacggcacaaggtatatgataaatgaaacgttggtatcgcaagccgcactaattaaataagactataacttctcatggaacatctgaaaaaccgcggaaaccaaaataatcgaagaggcccatccatcaccctcatcggcctagacttatatagcgttattgagggcgatgaatttcatgacgaggccctcaatccgg

SEQ ID NO: 91474 - DNA, 137 bp, Glycine max
accatgtggtttgctcaccagttttatgccatttggtttttgctatggttttggtgtttttagtgtactccagttccagttagagattccttactctgatagtatatatattgtgactatcagaagttatacgcatc

SEQ ID NO: 91475 - DNA, 300 bp, Glycine max
gttcggattaaccaaccgggtttcgtagtatgcgagcatcgttgttggtgggcccccccccccccccccccccccccccccccccccccccccccccccccccccccccccccccccccccccccccccccccccccttattgtaaaaagcggctacatggagaacacacacaggaggatttcaattaaggggcaagtttaagtttttcagggcaaaaaggggaaaaggacatgaaaaaggaaacttgacaaaagcttttatgaaaggagactttctggcccgatactagaaaatcaaaa

SEQ ID NO: 91476 - DNA, 177 bp, Glycine max
gaggcgaaaaacttcggaaagccacaatatatatacgaccagagtaaggaaccccaaacgggaacgggagtacactaaaaaccccaaaaccatagcaaaaaccaaagggcataaaacgggggagcaaaccacagggttccctttcagatgccaaaagtaaaacatcaggccattaaa

SEQ ID NO: 91477 - DNA, 370 bp, Glycine max
ttcggttaaccaaccgggtttcgtagtatgcgagcatcgttgttggtgggcccccccccccccccccccccccccccccccccccccccccccccccccccccctcctattcacattactgtattgccccaaaccggaccaacggaaccaaaacagaaagacggaatagacgctcccgaatacctctcgccgagctgaaagaggcaaaacttccacttacctagccagaatacattagcgaacccgacgtcgaagatcgcgactacatcctcaaggaaatccgacagggccctcattggatataaatgctagagccccccgcaattaatgagctggcccaatggcgcgagcgcgacccccagagaaagga

SEQ ID NO: 91478 - DNA, 495 bp, Glycine max
ttcggttaaccaaccgggtttcgtagtatgcgagcatcgttgttggtgggccccccccccccccccccccccccccccccccaaatatcaagactgcgcccgccgcgaaaaatagggacccctagaaagcgatagagaatgcccgctcaacgcccctagaggcgctataggcctaaacgcgccattcttcagggctctaataatttacgaatacagccggcgtatggtaaccggtatgccagtcagtgtctgactgtagtcgacatgcgccgcacatctcgaggcaaaccgaaccgagcttggtcgtccccagaagtcgtctagctttaaaagggcttgtccagggaagccaacgtggcctgatgagacgggggcccgtggatgcttgtcaacatgtaatattgggtgaggtacgtgggccgggaagatcctgtgagtgctaacttgtaactttagtgtgggctcatgttgtgaccaatgtgttgtttctcttct

SEQ ID NO: 91479 - DNA, 480 bp, Glycine max
gttcggttaaccaaccgggtttcgtagtatgcgagcatcgttgttggtgggcccccccccccccccacgagaaaccccttcaggatccccatagaaaactcctacaacaagcctgggacctgagaaggactcacagaaaaacgatgccaaaaacatcaagaacaaagccgaacatcctaaccgaacaaaagaaacataaataacactcatatgacacaccatgcacaatttcgaccgaccgacattccgccgaaccgccgaacgaacttctctagctagcatgaccgataaacgagctaagcgaaaactgacgacgaccaacccgcgcaagcggcgcctccgcttagcgaacgataccgatgctctctccctctacgaaaaggaagccgccgacgcctagcctaattgcgactgaggacccgcataggcggacgccccttaggcgcgaaatgactacgaccatataattaatcccgctca

SEQ ID NO: 91480 - DNA, 148 bp, Glycine max
aaaaccgaacgggcccttaaaaaatagatttcaaacccggtcttttgggttttttacaacataagcccccgttttaacgcctaaataacatacaagggggccccttttttttgggggtatcaccattagtccattttttccagttttt

SEQ ID NO: 91481 - DNA, 267 bp, Glycine max
ttcggttaaccaaccgggtttcgtgtatgcagcatcgttgttggtgggccccccccccccccccccccccccccccccccccccccccccccccccccccccccccccccccccccccccaaaaggtaagtttgagccaataaacatacacgaaaaggtacgacccattcgcgccagaagacaatgaggatccccaagttgcaaacaagacagaatattcagggcacccccctcctccacgaggaccatcggaccgcccggatcgcc

SEQ ID NO: 91482 - DNA, 409 bp, Glycine max
ggttaaccaaccgggtttcgtagtatgcgagcatcgttgttggtgggcccccccccccccccccccccccccaaggacaaaaggactcaccgggcctactactaagacatagaacattgcccctaaactctgcgcagcgaactacggtcaaccaacgaagatagacacagcgtccggaacgatgattttaagcgaagaaccttaagagtctaaacaagcagggtatcaaaacgagcccggaagactgcaggaacactggcaggaaattaacagcagaaacaaaaggagaactatagcaccaataccaccccccgcggcgccgacccttcttgcctcgccgaccgccgctgctcttgcgatagctacccctgacttaatggatgaaacgccctagatactttcgaccctt

SEQ ID NO: 91483 - DNA, 393 bp, Glycine max
ttcggttaaccaaccgggtttcgtagtatgcgagcatcgttgttggtgggccccccccccccccccccccccccccccccccccccctaaaaaatgaaataaatgagcacacccgcgacccacggaaataccccaacacacttagaggccaaaatatcccgcggcagccgcaaaaaacggagaatcgatctatcaaactataaactgaaaacctaatcgaagcctaattacgcaaatagcccgatatatataaaacacccttgttatagctcttatatggagcgcgaatcaaaaattccgcagctgaacagtaggcatagtcagcctaatactaatgaatacacgccggacgcggtgctctatagaactggcgacccgctatgaccccggggc

SEQ ID NO: 91484 - DNA, 398 bp, Glycine max
ttcggttaaccaaccgggtttcgtagtatgcgagcatcgttgttggtgggcccccccccccccccccccccccccccccccccccgctttttgaaacttaaaaaaaacaaaacaaaacctattatccaacaacgcctaacacccgtaaagaaggctaataaagacaccttcctagaaccctagagcatatacatcatcatgctacaatgcccgaggctgggcaattcgaagagcgatgacagaggacaaatattgactgacagactgactgactgccgccccttcgcggatcctcggactaagaaaacttgcatagagaatctagacgcacagccttttaactataaactagaaaaaataaatttctagaaataaaactaaaagcgacgacgacgtcg

SEQ ID NO: 91485 - DNA, 385 bp, Glycine max
ttcggttaaccaaccgggtttcgtagtatgcgagcatcgttgttggtgggcccccccccccccccccccccccccccccccccccccccccccgggacgaaacacaacatacgcaaccagtttaaccaagacagaacccccccccgccgccgccgccccgcgcccacgtctaccgaaaccagataaccctaagaatagaagagacttaaaacgaatctataaagcagggcaacacaccaggagcaacaccgctccgattaataacaaccgaccactgtcagctaatttgaaatcgcgagaaaggcgaaaaaaaagccgtcgcgactcgagcgaagtataatccaccgcgtatggataaggaaggaccgaatgaaactgacctcgt

SEQ ID NO: 91486 - DNA, 188 bp, Glycine max
gaccacaaaaaacggaacagggacacccaaggtaaacacatacaacagtttcacataacaatcgcaaaataaattatgaaaaggaatatccccaaaatacggggaaacaaacccgtgacagcccccattgcggggcatgcaaaaaccccccaacattaggggagcaccgggttcagacttcagagccc

SEQ ID NO: 91487 - DNA, 502 bp, Glycine max
gttcggttaaccaaccgggtttcgtagtatgcgagcatcgttgttggtgggccccccccccccccccaagtcggaacggccgagatctgcgcagacaccgaaaatgacaacctgcataaagaacccccttcttaacgacccaaagcctaatatcccgttaaaaccccctaagcaagaagaggcttgcggcagatacccgacaacctccgtccctcgccgggccaataataaagcaacggaaagtataagatggccgcaaactgcaatgagatcctaaccggcttcccggattcaccagagtccgcgcaatcaaaagtcgatctaggaccttctaggaaaggaccccgagcatccccgccctgacataacgcggcacagacttatcgaagccgatctatacataactctggcttatacaaaattgcttctcggcctgcctccagaaagcggcctggaggacaggcactccggaccatgccgacttcccgaagaaacccgcgct

SEQ ID NO: 91488 - DNA, 464 bp, Glycine max
tggctgattcggttcggttaaccaccgggtttcgtagtatgcgagcatcgttgttggtgggccccccccccccccccccccccccccccccctaatgaactgagccccaccttgaactaagcctacctatcggacagaggcccatggaaagtaagcgctaagacacccgcctcctgcttgccagactactccttaaacacgcaacgctactgaacccgccaccccatccacccccgatcatctgcggcatcttagccccaactggcaaaagctactacaaaatcggccacccggaccttatgaatccgcagaaccataccccgcttacgcagcttcggcggggcggagaggcctttccgcttattctagggcccaagcctggaaaggaacgcgccggcgcggacccgctgcgcccgccttccctgctacaatgcgagccgatccacccctcccacgctgcctcc

SEQ ID NO: 91489 - DNA, 181 bp, Glycine max
gccaatgaaattccatttttttccagctttgcaggttaattaaaatttcccgtttattttccaaagttttaaagggtgggtgaaaaattccaacccgtaatttgttggattgatgatccattttcacaaacttttttactccttccttcctgggttctggagaaaaaatttttttagccgg

SEQ ID NO: 91490 - DNA, 387 bp, Glycine max
gttcggttaaccaaccgggtttcgtagtatgcgagcatcgttgttggtgggcccccccccccccccccccccccccccccccccccccccccccccccccccccccccccccggaaccaaaccagaccacaccagatgacctgaatccaaccaaaacacagatgccacccgggatatcaccaaatttttttttaaaaacgggaagagtcaaccctccctacctattaaagaccccgagaaagccccgcaggggccggcgggtttttggttaattataaacccccccatggtttgtagttgagaaaacctcaaaataggagccaaattggggaagacccaaaatttgtctgggacttggggacttcgtttttggcctttaggaaaagg

SEQ ID NO: 91491 - DNA, 498 bp, Glycine max
ttcggttaaccaaccgggtttcgtagtatgcgagcatcgttgttggtgggcccccccccccccccagaaaatgacaaaacgaaaccacaaaacaagcgtccgactggagaattaaacgaacacggatgcatcatatacatcaaacctagaagcctatctaaaacacgccgggctagatgacatccatcccaattaaaaagccaaagacttgcataaagacgatcacactttgaatcccaactgctgctgtacggctactcctactccggataccgatgcttttgactctgatggctcggatagggcttgctgacataactgctacaattactaccctgatgcttctcgctttacttatggagctgatgacctcacttatactgtcagctcctacaattttaaagcttcttgacacaaggacacttattacaacagctactactacaccttggattcttattcttgacgaccttactttcacaacccctgaccctgctg

SEQ ID NO: 91492 - DNA, 418 bp, Glycine max
gttcggttaaccaaccgggtttcgtagtatgcgagcctcgttgttggtgggccccccccccccccccccccccccccccccccccccccccccccccccccccccccccccccccctttaaggaagaaccacaccccgccccacggctaacaccgaaacccacaccgggggaaggggcaagcctagcactacaccggtgccaacacaacgagggcacaagcacagaatttttctagaatacaaactaatgccataccgagggaccccgaagcaagaactatctgctaaatgcctccattgaataacttaccactcacgagcaagctacaacaatggaatctaccaataagcttgaccattgtcatcttacccagcccgggtagcacgattaagttacaccttctaataatttttgccg

SEQ ID NO: 91493 - DNA, 431 bp, Glycine max
ttcggttaaccaaccgggtttcgtagtatgcgagcatcgttgttggtgggccccccccccccccccctacaaaatgaaataaatgagcacacccgcgacccacggaaataccccaacacacttagaggccaaaatatcccgcggcagccgcaaaaaacggagaatcgatctatcaaactataaactgaaaacctaatcgaagcctaattacgcaaatagcccgatatatataaaacacccttgttatagctcttatatggagcgcgaatcaaaaattccgcagctgaacagtaggcatagtcagcctaatactaatgaatacacgccggacgcggtgctctatagaactggcgacccgctatgaccccggggcctgccgccgctggcgctctgctagccgggctagaccgccgacgccgaagctgcctcat

SEQ ID NO: 91494 - DNA, 421 bp, Glycine max
gttcggttaaccaaccgggtttcgtagtatgcgagcatcgttgttggtgggccccccccccccccccccccccccccccccccccccccccccccccccccccccccccaaagataatagcccgacccgacagaggaaagcaaaagcggaactagcggaacgaacagaatccacaagagcccaaccaacaaaatgcaagaaaaggcccccccccgcctcccccccccccggaccggcgcacctgcccgcctcagcgtatgaaagaaaaaattcgtagggtatcgaacagggtaaggagtagggcctggcctctccaattaagacaagggactgaattatccccgcgcccccccggggagtgtgttccgtccgcctagcgaaggaagggagtttccccccagagtgtggagggacggacgga

SEQ ID NO: 91495 - DNA, 395 bp, Glycine max
tggctgattcaggttcggttaaccaaccgggtttcgtagtatgcgagcatcgttgttggtgggccccccccccccccccccccccccccccctcaactaagaaaatacagcctgatgcccgtacccaccgctgaactgaccggagaaaccaaaaagactacgcgccatgacacagcaggactcaaatgccaggcagacaccacctgtctgcaagaaaacaactaaggaccctatcccctcgcgcagaaagcttctcgaggcatgttccacccccgagcaataccttgcacactgaagcaaaccaccgcaatagcaaaatgccaggagcaaacgctcacaaaattaactaaccccaacccggacgccagccggcgctccgacccaaacgcgaccgc

SEQ ID NO: 91496 - DNA, 447 bp, Glycine max
gttcggttaccaccgggtttcgtagtatgcgagcatcgttgttggtgggccccccccccccccccccccccccatagtatacacgatacacacacctggaaacaacccaccagacacacagaacgctaaaaagaacatgaatgcggaaacaaccacatgccttatttatgaatcgagcacccccacctacgcgaaatgcacatacaaaatatgcctattcgacgaccccatgataataacggaaatacctgcccaatctgggccagtaaactttccctgactaacgaaggtacgtacacagaaacctgaagaaggaaatttgccgactggacgaaccattccaaccaacaaacccgatgaaggaaaaagggtcgactttgatatcagcggccactccacctggggagggacccccacctgacggtgcttctagccgatcatgccgcc

SEQ ID NO: 91497 - DNA, 414 bp, Glycine max
ccgggtttcgtagtatgcgagcatcgttgttggtgggccccccccccccccccccccccccccccccccccccccccccccccccccccccccccccccccccccccccccccccccccccaaaggattgatacgtaaatatctcccttactacgccacccaattttggggaagaaaagagggagcacggcaatttaaaacctggcaaaaccaccagagagaaacttaatcatttttaggcaccttattgggggaagccagccggaactaaataggccccctccagaaaaccctaaatgaaatgaaacctcgaaccagaaaaccagaaaaaaaaatgggggaaccttttcctaggggcctgccgcctagggaaaccgccgaatttactagaagaaggggggcccggaaccgggg

SEQ ID NO: 91498 - DNA, 442 bp, Glycine max
ggctgattcaggttcggttaaccaaccgggtttcgtagtatgcgagcatcgttgttggtgggcccccccccccccccccccccccccccccccccccccccctaggatctacaagaccgcaagcatgcccgaataatgaatacggattaacagaacccccaacctgacagcgaacagaaaaggatatgacacgagaaaccccttcaggatccccatagaaatctcctacaacaatccaccaacaagcctggcacctgagcaggactcaccatgcctaaaaacatcaagaacaaagcctaatccttaccgaacaaaagaaacataaataacactcaaatgacacactatgcacaatttcgacctacccacatccgccgaacgaacttctctcgctagcatgaccgataaacgagctaagcgaaacctgatgaccgccgaacgt

SEQ ID NO: 91499 - DNA, 374 bp, Glycine max
ttcggttaaccaaccgggtttcgtagtatgcgagcatcgttgttggtgggccccccccccccccctgcggacgaaactacccagaactcaccggataataacattgaagataaacaagctccccataacaaccccccttgaaatgaaggccaatacgcttgcagccatccagctgcgatacttattcggaggagtaacggtgccgctaatactccggaatgcatggagggtgctgatttactgctccctaggcacgcctccgggaggcaggagctgctgatgtccgctgctgctgagaccccgaacctaataaactggggggaaaggacctcctagcacgttacgactagctttaacattaccaccgaactctt

SEQ ID NO: 91500 - DNA, 387 bp, Glycine max
ttcggttaaccaccgggtttcgtagtatgcgagcatcgttgttggtgggcccccccccccccccatgaagaaccacaagcacaaccattacctagctcacactcagaaaacggaaaaaacaccagcggacgggcggctaatggtcgaggtaccgacccgcgcagacacgaggaggaatttgccggaggatcgagcgaaactgggctcaaaacagatagagctacccaggcttcgctgactgagagtatgataccggatggatgaccttttcacagaaaaaaatctagtaggaaaaactagctaatttgacttctttaaaaaaaacaatactccagaactggaaaaccctcagcgacttacactcagagcgctagcgctaaactaacg

SEQ ID NO: 91501 - DNA, 479 bp, Glycine max
gttcggttaaccaaccgggtttcgtagtatgcgagcctcgttgttggtgggccccccccccccccccccccccacggaaaggaaccctaaaccgctgctaattgaaaccaaagaaaaaaagcctttacagaccactctacgacagaagaaaaaaatttgacgacaaagcccctggatcgatacccacacggctcgcagcggtgcaaacataccctaaattaaagaaattacctttatgaaaaaaacaacaacgaaagagggggacaaaacgatattgaacagctgccacctacggcaatgaaaaacaaaaacgcatagccctgcgtatggtaaccggtatgccagtcagtgtctgactgtagtcgacatgcgccgcacatctcgaggcaaaccgaaccgagcttggtcgtccccagaagtcgtctagctttaaaagggcttgtccagggaagccaacgtggcctgatgagacgggggcc

SEQ ID NO: 91502 - DNA, 512 bp, Glycine max
ttcggttaaccaaccgggtttcgtagtatgcgagcatcgttgttggtgggccccccccccccccccatgtctagaaagaatcgaccggcgtactgctaaatgacacccgctacgcgaacccgccaaggaaaacccgaacaagacccagtctagaaaacacccataatataagaattaaggcaaagaatggaataaaaaaaatagcatgacgaaggaagcaatattgaagagcaatactactgcgcctctaatgcaaagtcagctctcgcctaaagaccaccgtcttggagcgcggaccgccgcttcccagagcccggcaaggcttacacctctgtcttaccttaaggcggacactttcctggcaggagccctcagaatctgcagccgccgcggccggccgaggacctgcctgccgctgatgaatcggaattgcgccgctaaatcctggcgataacgacgagataaccggactcacactttagaaagcggcctacagaaatggatgggcgtat

SEQ ID NO: 91503 - DNA, 441 bp, Glycine max
gttcggtaaccaccgggtttcgtgtatgcgagcatcgttgttggtgggcccccccccccccccgaagtttaactaaacttgagtatccccacaaaaccaaaagcattctcaacaggaaatacaaaaaccaaaagggggccggacctaaacatgaaaaaagcggaaaactgagagtgcctccaatggccttcccgaataatgccacgtacgacacgatgatgccgcctaagttcttctacatcgctttgtgcccgccgccggagatcaacaggaaaccggcggcgaatcgggacgagaacgcgaaggtctcgaatataacgatgcggaatctgatgaaacccatagcgcggatcaagatactaccggcgcttcatctgcaacctgccgccaagcactcttgagaggccgccgagctcgcgcttcccctgagagacgcaaacg

SEQ ID NO: 91504 - DNA, 469 bp, Glycine max
ttcggttaaccaaccgggtttcgtagtatgcgagcatcgttgttggtgggcccccccccccccccccccccccccccccccccccccccccccctagtatacacgatacacacacctggaaacaacccaccagacacacagaacgctaaaaagaacatgaatgcggaaacaaccacatgccttatttatgaatcgagcacccccacctacgcgaaatgcacatacaaaatatgcctattcgacgaccccatgataataacggaaatacctgcccaatctgggccagtaaactttccctgactaacgaaggtacgtacacagaaacctgaagaaggaaatttgccgactggacgaaccattccaaccaacaaacccgatgaaggaaaaagggtcgactttgatatcagcggccactccacctggggagggacccccacctgacggtgcttctagccgatcatgccgccca

SEQ ID NO: 91505 - DNA, 394 bp, Glycine max
  unsure (1)..(394): unsure at all n locations
tcactaaactccatcttttcacggtgggccccaccgatactaaggaactcctagcctcataaatacatcaaaccttataatccacccaaaacccggagtaataatccannaagcccgttgataatgaaattacgccaccatcatagcggcactcaactcttaggatattgccttaaggaaattttgctactaaacanaattgcgagggacttcccaaattcacctaactttagaaacctcaggaaactaaatgctgccccaccggctattccaactactaaccatacagcgaaaacccctataatccctaatattcctagaaggaaagcgaaggccggcgaaaacgattgggacttataaatactgctcgacgcaaatactcgaagccctcgtt

SEQ ID NO: 91506 - DNA, 354 bp, Glycine max
ctggtaagaaattccttatttcaattcttgcgccacgagcttatgatgaatctttaccttataatatagatctatacctccgtgctaagacttatgagccacctcctgatgatacaccgaatactaagaattggaggagatcctgatgccgaacatttcgatatatatctaggcaggaggacctctactctatatactaaaaggaatcctaataaagaacgaatccgagcccttaaaaagacttcgtgacatactcccctccgatgaagtgtttaacaacattccggccacgctttacggcctaggcctacgctaactatccctagaagagaacctggagaactccgtgttctc

SEQ ID NO: 91507 - DNA, 493 bp, Glycine max
gttcggttaaccaaccgggtttcgtagtatgcgagcatcgttgttggtgggccccccccccccccccccaagaccttagaattcaaggagacacaagcgccgacatagccgaaacggatcagcccgagcagatcggatcacaaaaacccgagcattaaacaggtaactgccagcaggaggacgaaaagccaaaaaggataacataaaagaatttcgcaccacaagatcagataaaaacctcacgccagcgctaaacggccaacatgcaaaacaagacgctgatggaaacttaaaagccgggcgcaaagtcgacgcatcaaccgctctaacaacgtaaagcgaactttgtcctatgaacgttatggcttaaaagatgactcgcaaaccttcgacactaactctgacagacgacctgatgagccttggagctcagacaatgaggacgggcatagaggctaccctaggggtctagaggaaaattaccgacgacatt

SEQ ID NO: 91508 - DNA, 458 bp, Glycine max
tcaatgcgttaaccgttgcgtattagatccctacttctatattctactctcttcccttttgcaacaccagccctaagttttgaatctagcacctgctaaaaggcttgcctaaaccttaaaccggctacttttctagtacctataacaattatacgaagtagggctgatacacgcaattactaactcctcgtaatcctgctatacccttccggatctaacagactagctgctaagccctaccctgatctgcacagaacccatccctcgagaccatgatggatggacgccccatgccccgcaccctgctttaagcaaaattcctgataatgaaacatccggccagagacccccccccgaatgttgactacatcttctaaacaacctcgctgcgacgcacccaccgacggctcaagcgccatttgaattgcctacacatcgagatgctatatggctataat

SEQ ID NO: 91509 - DNA, 376 bp, Glycine max
caaacgaccttgatcacatttggaactgcaactgcaggatttcgactaccttaaagcagtaattgaccggcctgaagcacacacgagggcctgaatgagcaagatggccatccggcagtatgcactgctggttgctggggaactctgaactctgtaactgatatccatactactggagagatacatgatgacgctgatactgaagatctacctcatccttctgatcgcatgcacatattgataaatcgcctagataaccaagaccgccgccggattagaagatgaagccgcatctatctaatcctgcaactgacggaatttaggctctaccgcctcgacaactcgcttctttttgacttactctcggccctgcaaa

SEQ ID NO: 91510 - DNA, 447 bp, Glycine max
ctgattcaggttcggttaaccaaccgggtttcgtagtatgcgagcatcgttgttggtgggcccccccccccccccccccccccccaaaattaaacaaaggactaacccatgaagctcgtaagctactgaacgcatgactattcagtcgcgaaagataaaaaagaaaacccgagccgatattctgacgaacagcagacaaaccacaaggatcagacgcattctccctcatgcgcatctcaaacgctgctagcctgactttgatagaggacggctacctaaggcgcatggacgaaccgggcaacatggccggcctgaatctacggaccaacggcgaaagttcgatatataacttaattatcaactatgcctcaccctttctggcgatatattatgcctcgacattcagggctacgtaatatgaggactccaccgaggccccggcccctg

SEQ ID NO: 91511 - DNA, 294 bp, Glycine max
tggctgattcggttcggtaaccaaccgggtttcgtagtatgcgagcatcgttgttggtgggcccccccccccccccccccccccacaaacattttcctacaaaagatgtgcccagatatgacggaacacccgaatcgagaaacagaacttgaataaaggctccgagaagccgaaacgcccagatagaccgagaccccccccttgcagactactaagatgacctacaaacaagattacatccggcctccgggaccgcacagaaaggaccgggggactaacctacccccccgggga

SEQ ID NO: 91512 - DNA, 392 bp, Glycine max
ttcggttaaccaaccgggtttcgtagtatgcgagcatcgttgttggtgggcccccccccccccccccccgcccgctaattttcaacagcgcagcccaccaatggaaaaattagaacaaatcccgcaaggccaccccacacacctgcttacctactccccatgcagacattcactctggatagactagacacacaagaatctcaccaccagacaacggccatcccattttgaaaaactccggcggattaggctgaagactaattccccaagaagcctaggaatcggcccgggctgagataggcctacacgagcgatgactatatgagcggacacctgcgatcgctgccattcatatcataatggaataacccaggaccttcagccatgatgaa

SEQ ID NO: 91513 - DNA, 205 bp, Glycine max
atctataacattacgggaacaactatgagaagactagaatcaaataccgccgaatgacaaatacgaaatattgacctccccattaccggagtctactgatcctatattgccgtgaatccccctgctataagtagccggcgaatacgcacaataatttcgcccgaaatatgctttgcctagaggttattcgatgaacttcgaaaac

SEQ ID NO: 91514 - DNA, 361 bp, Glycine max
  unsure (1)..(361): unsure at all n locations
gctaagagttctgcgagacaactcctattatccccatgactgggctgaacttattgctcgaattaccctcacaagatcaccatggttcacacccgccccgacaacccacccctgtacctccactctnaaaaaaaaaaaaaaaaaaaaaaaaaaaaaaaaaattttgttggtggtagcatctatgcgtcgtagggtttaaccaaccggttaggttcaggctgattgtcaggatgcccgggcacatctatcgtcaccatatgccttgtcaacgacttcgacatgctcccggctctctaaacctccacggtgcgagaaccggagagaagacagtatggttaatgacaaatctcaaatggctttt

SEQ ID NO: 91515 - DNA, 558 bp, Glycine max
ttcagtggctgattcaggttcggttaaccaaccgggtttcgtagtatgcgagcatcgttgttggtgggccccccccccccccccccccccccccccccccccccgagacaagaacgtgaaaacaaaccactaaaataaacacagggaaaacagctccacagaaacggcctagatggcggacctgatttgactgcaaaagcggcgaagaccactctatgaggtctccgatagccgatatcgcgccaccccaccacacacaacacaacacaacacacacctcagacagacaccgcactcaccgcgtatggtaaccggtatgccagtcagtgtctgactgtagtcgacatgcgccgcacatctcgaggcaaaccgaaccgagcttggtcgtccccagaagtcgtctagctttaaaagggcttgtccagggaagccaacgtggcctgatgagacgggggcccgtggatgcttgtcaacatgtaatattgggtgaggtacgtgggccgggaagatcctgtgaggctaacttgtaactttagtgtgggctcatgttgtgaccaa

SEQ ID NO: 91516 - DNA, 519 bp, Glycine max
tggctgattcaggttcggttaaccaaccgggtttcgtagtatgcgagcatcgttgttggtgggccccccccccccccccccccaacgaaaaccaaacagacacaaaacacaaacacgaacacccaagaacacccacgcatactcctagaaaacatgcctcgacccctacacaagactatttaacacaatgcaggagcgcaaccttaactcaacctagcctaagcctgcaactattaagcaaattctcagccaccaggctcacatcgagaaaacgtcctactagtgaaccgacggctaaaaacgaatatgcatgcagatcgcctgacattgaccttaacgacacactgtttcacgccttaaacctactgaagtctatatctgatgctgaattccccggatacgccgggcctcacttagctgagccatttggagggtgatggctgactatccattattgagatcattcttcgctacctgatcgagtcttaatggatacctgaacaaactggttgcctgcct

SEQ ID NO: 91517 - DNA, 341 bp, Glycine max
aaactcgcaaggggggttccacacaaagattaaaatttcccagagggtaaacgttctaaaaacccgatccaatttgaaatttggcaaatttgattttgaaactttttcttcaaattgaaaaaaaaaaccggtttgagaactccaccctgtcctagggaaaaacaaaattttcaacccccctttgaattaaacaatagttttaggggcaaaccaaaggagccaagccttttggccttgcaattccccctgtttttggggacctgagtccgggggaaaaggaacaataggggggtaaaccaaatcccgctttttattgaattttgggggacaccttttttttt

SEQ ID NO: 91518 - DNA, 515 bp, Glycine max
  unsure (1)..(515): unsure at all n locations
tttnttttttttttttttttttttttttttttttttttgttttttttttttttttttttttttttttttttttttttttaaactgggggggggggttccccacaaagattaaaatttcccaggtgataaacgttttaaatcccaaatccaatttgaaatttggcaaatttgtttttgaaactttttttttaaattcaaaaaaaaaaccggttttgggcttcccccctgttcttgggaagaacaaaattttcaacccccctttgaattaaacaatttttttaggggcaaaccaaagcacccaagccttttggccctgcaattccccctgtttttgggaacttgggccctggggggaaggaacaataagggggtaaaccaaaccccgtttttttttgaattttttgggaccccttttttttttccttacaggttccccatttttcttcaatacaaaagcctttggagaaaccttagcccggttttggacaagggggctttttttttttttttttttt

SEQ ID NO: 91519 - DNA, 201 bp, Glycine max
  unsure (1)..(201): unsure at all n locations
agttgaccagagaattgggcacaaatctgatggggaacatcagtggctcctccacaggctgaccatccatcatagctgcactgggactgcacaatcccagcatctgctcttgctgntgctggcaactcactctcactcaaggtccacacatttcatcagccttacaccaccaacaccaaaagattgatgaattaggttgtg

SEQ ID NO: 91520 - DNA, 475 bp, Glycine max
ttcggttaaccaaccgggtttcgtagtatgcgagcatcgttgttggtgggcccccccccccccccccttctaaaaatgcgaccgccaccaggaaggccagaaccagacccccaaaaaaaaaacagcaactcgcctcacctacaaaatcagaatgaaaaataacttgaaataaatcataaactaactttatatataagaacagaccccggcaacgcgccgcggaaaaacgtgaaggaagggcaccagcccaccttgctctacctactaacgaaacgcatgagtcggctcgccttattccactagacacaaagaacccagttccctaacgaacttccggccataaggaaatgaggactcattaatcccatattcaaaagccaaaactcgggctagaacaatgagagcaccaacgctcgcaccacagagccagtcatatacctattccacccatgattcagcacacactcacacccct

SEQ ID NO: 91521 - DNA, 439 bp, Glycine max
aatgcgttaaccgttgcgtattggtggctaatcctcctgctccgtttctggagccgcaaaccctcggaaccccgaaacgaagtaccttgggtacactcgataaaaatgcactaacgacttccgcgacggcgggcagctacatctccataaaacttgtataggactatccttaagcctcctactcttcctgatacgattcatgatcctgggcccgagactgctgcaccccttattatcgcactgtatgggtctacgaagcgccttatgataactcgtgcccatacccatgcgttgaatattgatatacttgaaccgactgggtgaagtaccccgcctggtcgactaacgactaaactattagtggaactgactgaaccacatgacctcgacgggccgcgccttatagctaagctagcggatatgatatttccactacata

SEQ ID NO: 91522 - DNA, 438 bp, Glycine max
caatgcgttaaccgttgcgtattccccacggacttatacttagccatctactcatcaaccagattcttaactttaaacctactttaattatactctcttcttagactcttattgatataagagccgaacccagaataggaaaggcctcataaccctctaaccgtgaatacaccaccacccgaaactctaccccgaataaccgcgggccgcttaacacagagggatcccacctcatgaactcctcttccgtacactcgaaaccccttgcggcgtctagcgcggcaacagctacttaacctacggataccgaatccgaaactcgctgacatattagcgacagacacgcaggttatactacgcctcttgctcaaatatctttctttactatcacttcacctgtcagttcgtgggcatgcagttcacgaggacggttgtctc

SEQ ID NO: 91523 - DNA, 431 bp, Glycine max
tcaatgcgttaccgttgcgattttggccgatttgccgattgaaagggcccacccctcgggtgcgagccactcgttccattaaacactggtgaaccttgcttctaaacgtttagactttaagcctattcagcgacacgaaactggaaccccttacacccttttctgaacttctttccgaaacactcttgccgcacggaatgggagctaaatgcactaacatacttacctaatcattttgcccgcaggggccccgaatttaggactgaaagcagcagcggggcatagattatgcccaggaacttgatcgatcatggtatcgctgtataaactgccctttcacaattcacaatgcagcgggaccggcccagagggctaagcactaatgcgactcgatcttatggggaacctggataggcgccccgccgcgaccc

SEQ ID NO: 91524 - DNA, 522 bp, Glycine max
tggctgattcaggttcggttaaccaaccgggtttcgtagtatgcgagcatcgttgttggtgggcccccccccccccccccctaaaagcgccaataatcagaaaaccactctttaaacacaatccacaagcacgaagccaaaaccagagactaaagacataaaaccagacctctaaaggaaagagtccaccaacctagaccaccaatcgacttccttaaatggatctaccgaagcctttggcccggagaattcggacccatggcaactcaaatcgctcaccgacgacattcgaccttctatcagaattgcttggcgcggcgctcgagaatgcggccttgattcctaactatcaaacgagccgcgttaccacataagaactggaattagagagtacgccctccctatccgagaacgagggctctgcgcagagcgcctcacacctgacctgcgatgaggctaacccttcgaggaactcctactagtaactgaccctttagattgccaagcactagggaccgacgc

SEQ ID NO: 91525 - DNA, 502 bp, Glycine max
gttcggttaaccaaccgggtttcgtagtatgcgagcatcgttgttggtgggccccccccccccccccacctaaaggccgagaccccatcgaagacctaatcttaaatgcaactgaactacacaaaagacttaaaactgaaactctctggccagaagccaaaatttcatgcaccagagcacctggcgagcgtagcaaaaaatacacgcatatgcctaattctcactgaccaaaagcaataagccgaattggacaacaccaagcgcgggaaagccgctcgtctcggcacaaaccaaaactagataagtaagaaaaccgaccgactcatcgcgctggggaccccatgagcgcatgatgacgggattcccctaagaatgatgaactccttgcccgaaaataaactaaagactccgcgaattaagaccgacgagcctcacctagctgaagactcgctatagttgaactagaattcgaggataccctacgatacccgcttggcctatg

SEQ ID NO: 91526 - DNA, 512 bp, Glycine max
gttcggttaaccaaccgggtttcgtagtatgcgagcatcgttgttggtgggccccccccccccccccgaattacaaaaaaatcacacaaccaaccactagaccgttaaaataactatacttcaaatgaaagaacgatcattacgagctcaagtatcgcccccacctgccccgagctgcctagtacgactccgcacccctccctcctagcgccccgcctcagtgctgccgaggccggaaatatcatcatcaagaccacccggccccgcactgaaactcgaatcatgcttctagctctcaacctgagggaggactcgcatctggagtgacttgctacgatctttcagaaaacttggatgccctattacggaacataatcacattcccccacactagccaagaaatggcccttcctcataccctcgagccggtgatcatatattctccgcacgcccgtggaataaaaccccaatgggccgggagcccatcccactaagggaatgccgatcggggc

SEQ ID NO: 91527 - DNA, 436 bp, Glycine max
cgttgcgttttcagcctaacactcttaattaaacttacactgtatttccgattcaggagcctcttgccattctaatatagctgcattatacagcctgtctacacatcccgcttaccaagacacgcggactgcgacaacacctccgacgcttacaccaatggatacaacgctcctaccagcgtcgacttcagatcaaatacattttacccgatctcgatggattgcccctattactacaaatactatgccgtcgtacgaggcttgagcggctccccgagctgaggatatctcaccccattctctaacacttcttcaaatgctgatagagtctttgatattatccagcccacagctcactacacctttctacagggccccgccttatagagagccgaatacagacactagaaaacatcgaacaacggcccatcagcgg

SEQ ID NO: 91528 - DNA, 449 bp, Glycine max
ttcggttaaccaaccgggtttcgtagtatgcgagcatcgttgttggtgggcccccccccccccccccccccccccaaaagccaaaatgacagatgcagacgaacgtgtagttaggggagaaacagacgacttataaccggtttaaagagaccggattaaaaagcaggtagactggaactccatcccctaaaaacacagaaggataaataaggaggcagtcaacagacgatatccagccactaatgcaccgcataagcaaaaaacactgcaaaataactaaaaagccgaggctaacctaatccgaaaacaaatttcgctgagacttcgccgcgaggattcgacgcatatcctagacaaaaccgacgatcaaacacattagaactcgctgacatatcctcagcgaagatacccagcgataaatgacgacgcacggacccggtgctggatga

SEQ ID NO: 91529 - DNA, 312 bp, Glycine max
aaaaaggaaaaacaacttttgcccggaaaatttaaaatccagaggggggttgttttttggttcaccaaaagccttgtccaaaattttaacaaaggaaaacaggggggtcctccccccaagggtgggggaaagggaacaaaaaaaaaaaaaaccccgttttttttgttttgggaaaaacggggacccggccctaaaaaagggttttaatgggggtcggccccccaggggaatttgaggggggtttttgggcccttttttggcccatccaaaaaattggccctaacccggaaaaaaattccttggggggggggg

SEQ ID NO: 91530 - DNA, 441 bp, Glycine max
ttaaccgttgcgtatacggaattaaaggatcctcgagctgaagggatactccttatcgaactacgaaacgcgggattggaaggatttggtaatgcagctactcctggaactgatccgcttacttgagaagctctctactgccatcttctaaagtgctgcttatggcacggataggcctgctccgaagaacttgcaaaacactgacctaatgatatatgagggcctagcacttctactctccgaaaattaccacttatgagcgaggttcagggactatgggaccatatatcgcatgccgccgctgctccataagatggaagcgttgcatatgttgcgccacgccttccccaagcatattatttatcagctgaaaccttcttgtaacagattggatttactgaaccgcccggtcttcctccgggtatgcgaatagctacatgc

SEQ ID NO: 91531 - DNA, 468 bp, Glycine max
gcttcagtggctgattcaggttcggttaaccaaccgggtttcgtagtatgcgagcatcgttgttggtgggcccccccccccccccccccccccccccccccccccccccccccccccccccccccccccccccccccccccccccccccccccccaaaaaataaaaagaagcccataggtgaaaaccgaaaagggataattttgaatcccccctttggaggaaaatggggtcagaaaacgccaagaaactaaaagaattttggaggggggagaactacaattgaaactcaagaaaaaaaaaaaaaaggggtcaacacactacactttaaaaagatttaaggtaggggaaaaaattgcccaaacctaatccctgagggaacttatacactaatttttacaggtttgggggcccctggggagggaaaaaaccctggaaaaagatgataataacgggcctaaatttttttt

SEQ ID NO: 91532 - DNA, 100 bp, Glycine max
gatgaattgttcttatagatattcttcattgtgtatatacatttggtacctcttgtctgactttgttttgacaacgttgctgaccccatgtgttgacaaa

SEQ ID NO: 91533 - DNA, 424 bp, Glycine max
ttcggttaaccaaccgggtttcgtagtatgcgagcatcgttgttggtgggcccccccccccccccccaaccctcaaaaaccacagccccctaatcaatacaataagtaaaactccaggccagaaagcaactaacgcgcagactctataacctcagacggcctcgatgagccgatgatcaagccaaccagaataaacaagccttaccgcgaagagacctgatgcctacaaacttctaagaaaataacagaggaggaaggaaaaactcaaataacacacaggccgaaatacccccgcagatagaaacacgggatcgaatggaaaagggatgcacggaaaaggagaaatcccgatatggccctgcgggagaagcacggagtggaaagcaagaaaataactctttaaatagcaaaagaacgatcaccg

SEQ ID NO: 91534 - DNA, 436 bp, Glycine max
  unsure (1)..(436): unsure at all n locations
ccccccgtctctccacatttaagcaggtgggtaagcgaccaaccanttgatgacttgataagtaatttccccgagcgcgcgagattcctggaagacaaacggaagaaatagctccttgcttctacgaacttgatatctccttagtctagaaatccgccttattaagagggtttattataatattctaccgcatattcatgctttaattactgtaggagaatatccctagtccaccttagagatgaaatgatgagaaaacacttcggcaaatcaggaatctttctcggcggaattctggagatccgaatattcatagcctaattactcctcttagaattaacggaagaggaaatatactatctggccgtctacgaaatatttctgaattcgcaatcgggcctgcccccagtatccgccctccggagccgcctcatgc

SEQ ID NO: 91535 - DNA, 408 bp, Glycine max
tggctgattcggttcggttaaccacccgggtttcgtagtatgcgagcatcgttgttggtgggcccccccccccccccccccacacgaaacccgcatcacaacctccccgacctgcatcaaagacaattgaatccacacgaccgaaaacacatgcagaactagtaagcccaccgccgcgccggagtgagaaccacactagtcgggattgggccgactaaagtactaatctacttcaaaaatagaaatagaagccattataagaaagaatagataacgcaaattagggaaccaccactgacaacaaataaggagccggccatccgaaagccgaaatgccctactcccgggcgtttctactgagtagaactcaaccacaatgacggatatctataaaacgacgaatgacct

SEQ ID NO: 91536 - DNA, 143 bp, Glycine max
gataggctccagggaccacaatattgggcatttaaaaggccatgggtggagatatactgcagaacaagatacatcgcctagttggctcatggctatcccacgttggtagaagatacaagtttagctttaaaagtctgcatcta

SEQ ID NO: 91537 - DNA, 508 bp, Glycine max
gttcggttaaccaaccgggtttcgtagtatgcgagcatcgttgttggtgggccccccccccccccccccccatcaaaatccgatcaaccaaaagcccctgcccatcaaagaaaccgcctgacataaatacagtctgaccctgacacctcacctactcggatccgaaaatcagaagcacacactaccactaaagatacctctctagaatgccaccggaaacactttagcagccgaatctccacccggtagccgactccccccgactacatacgactgactaccgaggccgacccgcgacgacaccctagccgactgcggcgcctcacgcgagcatattctttaaggtatgctagagctgctgggcgcagctgaggccgttaccggaacatccccttttggacactcagtcgacgatatgctcgcaaataactatgcagctagctaccacgatagaggctccggcccctttggtgcttccccttcgtcgctacctgccgctgatggcggt

SEQ ID NO: 91538 - DNA, 249 bp, Glycine max
ggggccacaaaaaaatattttaaattttttccttcaaaagaaaagggccaaaaaaaaccccggagaggggggttttaaagacaaaaaacctttgggcctccaaacaaaaaaagttttgggtccaaaaaaccttaacttcccatcaaaaaaagcggaatcccaatcccggcccccattttttggcccgaaaaatccccccccaaaaaaaaggctaaaaaccaaattttggcccaaattcattttttggtt

SEQ ID NO: 91539 - DNA, 394 bp, Glycine max
tgcgttaccgttcgtattttaacgactcgaccacgaccgaatttaatggggcaccttacttgcggctattccacaaaaaagcgcaacttcctgaaggcatgctcctacacacttatggccttactgagatccccttaaacttgcagaagcaaaggcggccttatcgatcactaattttcctgctggactccgaataccttcaacatgaattaagcgggaagaacgggatacgacgcgcgcctctaattaaattacccctccattaaactggcagaagtcaacggagagaacgtgggccgatggatctaaccaccttaggagggcccctcaaaacactgctgaggcccataaataggcaccgctttcggctatcgcggccgatagggatgatcac

SEQ ID NO: 91540 - DNA, 362 bp, Glycine max
ttcggttaaccaaccgggtttcgtagtatgcgagcatcgttgttggtgggccccccccccccccccccccccccccccccccccccccccccccccccaatgcagcaagcttaatccgaacatctacaccctacccagagacgcgaaaaccaagcgaaaatttttaaaggagtaactctatcctactaaaaacagacggcgatgctataacgcgcccgggatccctcgatgaaaatcggccaagaagaatctgcaaatacttctctaaaccaacgacttattattctcttataagcagaggactaaaaaaatacaaaaagaatccgagaaaataaaatggataaataatgaattagcttata

SEQ ID NO: 91541 - DNA, 464 bp, Glycine max
ttcggttaaccaaccgggtttcgtagtatgcgagcatcgttgttggtgggcccccccccccccccccccccggggcaataaacccgaacctacctacgacatcttcccgaaaacctcaaaatagcactatgcacagagcacccagaaaccggactcgaaataaacaagaccgcacagactaaacgactgatcaaattgaaatcggggccagaattggactacattccacacgcacgcacgcacacagaagacttcacgctcgaaattcatcgcgcgtcgctgagcgacgagattaatcgaagacctactcgatgaagaaacctgccgaggtaccggaaaatcttctactaaaatagaaagcacaaaaaggatcaacccagccctacaaaatcacaatgagcccgccctaatattagcgctactaataccgcccagtatagctgaatgctctaacacacctctat

SEQ ID NO: 91542 - DNA, 296 bp, Glycine max
gttgacactcattctccacatgaagctggagcatcattacattatccgtttgacctgcaacatacacaagtgcctagatagtctttgggatgctttagtttttaaagagaatgtagcattgccatctccttcccctcccccaaaatgattttaaattcttaagcttgtatatatgctttactatttattttcgattgtaacatattcaggtagtttgcgcaggttcaattttcctgtatctcctttaattctttcatgagacttgttcaaatttagaaagctagtttttgtttcgt

SEQ ID NO: 91543 - DNA, 359 bp, Glycine max
gctgattcggttcggttaccaccgggtttcgtgtatgcgagcatcgttgttggtgggcccccccccccccccatcgccgacctacaagcgataaaatgccctaaacaaaaagaaacccattgcctcgaacagaccaatcggctgcccaccgcgtccttgcagaccggtgaaaattctcgcatcgagcgaatactaatcccacacgccctacaccaccggccaagtaattataaagaaagagctaaaggaaaacaactaactgggggggatcgaggatgctgaattgaggacctgccgaactctcctacgcaggaggcactgaaaaaactaaagcatcaccagagtcgcccgggcctccc

SEQ ID NO: 91544 - DNA, 376 bp, Glycine max
gacagttgatttgaagtatctgacagttgatttgaaagatggtggctgcaaaatgttatccttagaatatggactgatctcaaaagtgaagctgcgagcacgagggagcatacggctcatgctgctcatctctgggaattctaagttatatttccacaggaatgtgtgatcttgatcaagttctctcatttggttcttccagtcgaaataggattttaacttatcattgttgggtagaatgtgtttgccataatcagatacatagtttaggcagtaactaaaaggacggtttctgcgtttaatatcattggtatctggcagttggaaaacgacacacagagcgaaaccaatgagcctatcatcactgcaaaaattt

SEQ ID NO: 91545 - DNA, 398 bp, Glycine max
accaattaaaaaaattactaataattcagtacacaatgatttctggttagtatctaacctccgtaacattttcataaaataggaattactaatcaaattatttgaaatggaaatgtcttaatatctaaaacattaaggctatttgtttcgagtagatcacattcaccgaccaacaggcatcatgatttcagagaactcgaccccaggtgtcaaatctgaataaccctgtaaaccagaattatcatttctttgaacatttccatcggggacaacaccaccctttttctgaagatgcatcgctaaaacaaggttctgtagcacttcaccaatggatggcctctccacccctctttcagccaaacatttcattgcaaatcctaaatataactcaaagcact

SEQ ID NO: 91546 - DNA, 391 bp, Glycine max
ggtgcaaacccatatatcattcatcattagaagcttcgtattagcacactgaaaatatagatcatataagaattccccaaagtccaaagtcagcaaatacttcttctcatcatcatctcacccggcaacttttcttgtcaaagttctttcagttggaatttgttgtccggacctgagcaagtttccagattcagaaatccaattgactccagccttcatgggaggcggacgggtttgtcccaaggacagtcttcgagtaccgattgacatattgaccaacttctcagctgtttctgaaaccccacgtgcagtcctccccttgtttattgaagttgggctgccttttcctggtaatcgatattttgattgttgagtagtcttcaatgatttc

SEQ ID NO: 91547 - DNA, 344 bp, Glycine max
ggagacaactcgtaataggattatattgttcaacaatcaacatgataaaacttaaacgtaactatgaatatctcactttaacaatgttaaacttattatttttttgttcatagagcaacctctaaacctggtttcatcaagacagaaaaagtaacaacttcaagaacatcgagcccttcttacatttttgcttccatcttcattataattcttaattcctgagaggagacgaaggatttgtaagtataaaaagcaaatcacactcttagggttgagcctatttccttttcatggaatggatagaaagatgtttgggatattgtagcaccatacatgatccacca

SEQ ID NO: 91548 - DNA, 250 bp, Glycine max
caaaacataacgcattttcatctacagaggtatattcatttatcctcggcgagcccgaatcgtaaaacgcattccgcttcctgctagccattcccataatggtagcgcaaactcttacatcgctcctgggaagcatctaaatgagctgctggaaagcccggttcaatggaaatcggagaggcttgacttccttgtaaaagtcaatgggggcgacagcacgcttggcaatgccctctggagggaacccaaa

SEQ ID NO: 91549 - DNA, 453 bp, Glycine max
ttcggttaaccaaccgggtttcgtagtatgcgagcatcgttgttggtgggcccccccccccccccagaattaaagctgaacaccgctccaccaaaatgaaagctgaaaaaccaaatcaaatcatgaattaacccaccagaccctcgcccaccagactgaggaagaaagatagaaacccgatctaagagaagaagaccaagacacgcataagaaatcgctaaagtagcagagagtgctacaggaatactagatcgtgacaatctcatcgaggatcgacgtgggccctacccaccaaccacaagcgcagaactagaaaactacacacatcacctctgcacctaaaaacccgggccggacccgccggcggggttacggactgagtaccgaccaggctacggctcctgatccttcttattctgctacggctcatttagggctagcgcagacgcgggt

SEQ ID NO: 91550 - DNA, 218 bp, Glycine max
ttcggttaaccaccgggtttcgtgtatgcgagcatcgttgttggtgggcccccccccccccccccaaacctgccaatcgcacaaaaccgcccaccaaactaacgcctaaagcacaacaggaataagaagaagctactaaaacacggacacaaacaacatgaggcacaacaacaactccactcagaatacggcagaaaaacataacgaatttcatcata

SEQ ID NO: 91551 - DNA, 385 bp, Glycine max
gttcggttaaccaaccgggtttcgtagtatgcgcgcctcgttgttggtgggcccccccccccccccccccccccccccccccccccccccccccatgtaccatgagagttgaaatcaaaatcgagatcgacagacagcagctgcgcagcatccaaaagaaaccaacccgcccacagataaaaacacactaccaaaaaaaaaactaatcatcccggagaaactatagacttgtaaccgatgctacggaagctactgggagaaactgaacaacagacagatgggcaaggacacgataaccacaaaaaacgaaaccagagaggaggctgcacccggagagcacacatagaactcccccgccccccataattaccgactaacccctatc

SEQ ID NO: 91552 - DNA, 216 bp, Glycine max
ttcggttaaccaaccgggtttcgtagtatgcgagcatcgttgttggtgggccccccccccccccccgcacaaaagaacccaccccaaaccagcacccaacgtattcgcccgatccgctacgaaacagaccaagaaccctacgactagcgaattcaggagccgaacacaacgaacccacagatattaccgagctccgaataactacaaagcagacac

SEQ ID NO: 91553 - DNA, 379 bp, Glycine max
gttcggttaaccaaccgggtttcgtagtatgcgagcatcgttgttggtgggcccccccccccccccccccctaacaacaggagacaaacgagccccgcctactaacctccagaaaacctactctccttcactaaaaccacacccagaatcactaccccaatccaatgaacgagcactacgccgggaggaaaacactttaaaaaaaagataatgccgatatcataacgccgcaaaggccccgggcctacaaaaagacgatttagcaaaccactggaaccggcgcccgaattagagacctcgacgggcgctacgcacactgcggaactgcggcgcacggagaaaacccaggaccgctctattgagaaaatggccaatcaaa

SEQ ID NO: 91554 - DNA, 510 bp, Glycine max
gctgattcaggttcggttaacaaccgggtttcgtagtatgcgagcatcgttgttggtgggcccccccccccccccccatcagtaaagtaataaagccccaccgaacctaacaactaagcccagatgtctacctgcgacatgtttggccgcgcgggtgcacaacccagaatggagctgggaaaaacaaacacgactaaagagaaaatggcacgccatagtattaatgacatgcctacaaagcgcggatgttcttcaactatgccctgatcgaggaccattacccttttcagaataaaccccccttttcttcttcttctcccatactagctccggagcattaaccaaatgacggcctaccagctctagaacgggagcccccactaaacagggacgctcccgggcctgatgccgccttagacctcgagctccaacaacgcctagaccccggggaaccgtatgaccgcctcgtacaacctgggcccctacactatatcggctggcacaggaacc

SEQ ID NO: 91555 - DNA, 328 bp, Glycine max
ggggaacaactcaaggatgtattaacaataatttaaatctatgcagactaaatttatggctacagaatattgtcatataatgcacataattgaccaggcagtacaattagatattaagcttgctgtaaggatgtcgaacaggttttttgccagggcaaccgccctaaaatggcacttccatgtactgggaggtatgcagcatttaacttatcaacatcaggcattgccaagggatcatacaattcctccctttgttccatgggaggcacagacatacccgataggtcttgagcaccttcaacctaaaaaataaacaatccatgtgcat

SEQ ID NO: 91556 - DNA, 453 bp, Glycine max
gttcggttaccaaccgggtttcgtagtatgcgagcatcgttgttggtgggcccccccccccccccgcgccttgcttaaacctcttggaaaacagatccgccccccggccgctcgcagcctaacttgtcaatgctttacgaaaacgaaaccctaaaaactccccttctttacagaaaacaaacccagaaggagagagagaaagctaaagaataaaataaaacgactttagctaaagtaaagcttggggaaagcaactattacaaaaaaaataagcccatgggatacaaacataataatgccgaataccctgaaatggatcgccttacttgaatcgtaatctgtcaacctttatcaataaagattctagccaacccgaaaccatcgactttataatcacgactcggaccccggaaggaccgagtcacttgacgcggccgacattcaaacggtcgc

SEQ ID NO: 91557 - DNA, 450 bp, Glycine max
ttttttttttttttttattttatcttatcctataattgaaaatggaaaaatgtactttgcaaaaagagttacaacttatacaagatatggtatatataccgagacatatatgaggtagtagtgaaaccaataagtgagctcaatttaggtaggctcccactcgcagtactaataaaaaactcaccgtaccggtacggggtcactgacacttcccccattgacgttacgtaacgtaaccatagaagatagaattaaaaaaaaaacaaaaaaaaaaaccctcgtgcgtgcaacaccaacgtggcactaacatcatagtatagtaacaatttcaaatataaaaaacaacctcatcatagtagcttcagtggggtcaagtcagcgttaccgtccgacacaagtgcaccccccccccacagtcaaacttcacatgcgcactcggccccgtaattt

SEQ ID NO: 91558 - DNA, 342 bp, Glycine max
ttcggttaaccaaccgggtttcgttgtatgcgagcatcgttgttggtgggccccccccccccccccccccccccccccccaagagaaaaaaaacggagccttagccgacgatatacaccagcacggggcttcctaccaccgatggccgggaaacgaaaccaggcgaacaaaaccaacccatcggaatgcaggaaaaattagcaaggaaaaacaataagagcaacccagacataaatgcagatgcagctgcaggaacaacatcagataattaagcacgtcatccgacgtggaagcccttactacatctggtagataatgctccggctgtctcaaaagcctccc

SEQ ID NO: 91559 - DNA, 386 bp, Glycine max
ggttaaccaaccgggtttcgtagtatgcgagcatcgttgttggtgggcccccccccccccccctagcgtttttccaccccctacccctgaaaccagagaacgagatggtcagacgagagtctatgctttggcgccggaagccaaaatgatattacaagaccttgggactagtgaagagactgaggaggcaacaacgacaaccccagacgcccagacagaaaacagaaatagcccaaaccaaaaccaaaaaaaaaaatacaaagatacgacgcctactaaactaaaggtaaagggataaagacctcccctacccccccctcctccgggaagcctaccaatgactaagttccctacctaacgagccttagcctaatttaacttgggct

SEQ ID NO: 91560 - DNA, 445 bp, Glycine max
gttcggttaccaaccgggtttcgtagtatgcgagcatcgttgttggtgggcccccccccccccccccccaaagattcttcaaaacaccaaatcccgccacccaacgaatacaattttaagccgcccataaagaatcccgggatcagactcaatacgacttcatacggcccaccagacagcacccaccgcgcacacttactacacactctatgaaccctgccaatgaaacttggccctacctccagaacggaatcctcgcggttttgccaccgggacgacgcttgatcaggccgttcataatggtacggtacgccttagggtaccacggcttggtcttggtgaccgtattggaggtcctaccactccttctactagaggtcatggattatgggtagggtgctatgctcgatgagcatacttatcggacgccggatctacgagacga

SEQ ID NO: 91561 - DNA, 213 bp, Glycine max
tggctgattcaggttcggttaaccacccgggtttcgtagtatgcgagcatcgttgttggtgggccccccccccccccccaaaactaaatccaagcggcgacactaacaactaacgaaaagtccaggagaaattcctcccgatatgtcgtctctaacaaaactgacctaccgcgatcttgcaagagagggactctaaatggaaacctaccaaca

SEQ ID NO: 91562 - DNA, 337 bp, Glycine max
gttcggttaaccaaccgggtttcgtagtatgcgagcatcgttgttggtgggccccccccccccccctgcgataaacatcacgggacccccacccaccccagcccaacaaagacccaaccaccagaccagtagtgggcgctaacggaaaacaacctgataaataactagacctagaatgtactgatcacaactttaaaacttaactgagaaagacacctagacacagaaacagaaaatgatccctgacacacccccgccactagccttctgtaaggtctgaccggatattaatagggctatttaacgtccctattcgctctgaacaacgtcaaacgac

SEQ ID NO: 91563 - DNA, 497 bp, Glycine max
ggctgattcaggttcggttaaccaaccgggtttcgtagtatgcgagcatcgttgttggtgggccccccccccccccccccccccccccccccccccccccccctttacgaagcgaatcactcaccaagaacaacccaaacgcactgatgcaaacccactttgagataacacctcgacacaactgagacaacctaggattgatcagaaccatacaccaatgcctgctcaattactcgtaagattcccccctggatttgaaggtgggcaaaacttgagccggactcagctatattcactgatgacccaagccacgaagacgattgacctggaatttacgacagaaccggcgggccctccggacttcattgagatagacagggtacattcgcctatgaggccgaaggcaaaaacaaagaacggactctgactatcatgggaacaaaaccaccgcgctgagataaaggaacagatcacgcaagctaacccaagacgaacat

SEQ ID NO: 91564 - DNA, 337 bp, Glycine max
tggctgattcaggttcggttaaccaaccgggtttcgtagtatgcgagcatcgttgttggtgggcccccccccccccccccccccccccccccccccccccccccccccccccccccccccccagttacaaataccttgacaccagaacccgcctatcccaactgaaatcataagacaacacaccgcacctctaacccgaccatagagtacctaaaccttaaatcccgcctgcacccctccagaacctggtgccgaaccagcaccaggcactgaaaaagcaagaccccaatcaggaaatgctaatctaaaacctaatgctagctccactaccccgatg

SEQ ID NO: 91565 - DNA, 508 bp, Glycine max
gttcggtaaccaaccgggtttcgtagtatgcgagcatcgttgttggtgggccccccccccccccccccccccccccccccccccagacaattacaaaagactaacaacttaattaagacgaaaccgccaccatgaacccagagcacaccctcaaccaagaatataatgtctgacctagagagcccggagggcccaggcgcgcccgcacaacccctatacaaacacgagttcgaccaaaaaactcaagcatgctgtcaaccttaaaaaaaacctcaacctagcactaacgacggcaacccctgccctgactatgcacgcgaggatagcctcagaccgcctgcgtcgcctaacaccgccttacgcccgtacgagtgcgccctatgacgctacgcactcctccctaataaaggatcaagttaggatatattcttcatacacctcccgggacttacggactgggacggctaaccaattcccgatcctaaagccccggaccccgaaccccggc

SEQ ID NO: 91566 - DNA, 422 bp, Glycine max
ggctgattcaggttcggttaaccaaccgggtttcgtagtatgcgagcatcgttgttggtgggcccccccccccccccatcagtctagccagagccctgacagcgccatttatgacaaaaatccccccccccccccaaaaaaaattgagcatacaacaaccgagatccaccgagatccaaagcattaatgagttagagatgcggcaatctggtgtgagatagagttgccttagggtgttataactctcctaaagccttaatcgaaaaaaacataaaattgaatcccagttaccctaagatgcttataactctgatctgatctgaaccgaagttaaacacgaaaaccccgatggaggggcccccggccggcacacgacaggaagcgagacggatgatgaaggaaaagaaggaccagatgcgacg

SEQ ID NO: 91567 - DNA, 321 bp, Glycine max
gcatcgttgttggtgggccccccccccccccccccttccccccaatggcaaaacccccgcgcctaaaacgaaaccactgaacccccaaccacaactagacctaacccctatcggcattacacatcttaccaaaaacccaaaaggctaccccagtggaggaatgccaccgaaaaccctaatttgaagcgaaactaacaaaatctatataataaactactaccgcagttggcaatgccgaagcccagcacgccccggctttattaggcctgacgacgccccgcgggccgatgcgagatcccgccgaacccggggaaaaccctt

SEQ ID NO: 91568 - DNA, 447 bp, Glycine max
aggttcggttaaccaaccgggtttcgtagtatgcgagcatcgttgttggtgggcccccccccccccccccgtgaaaaaataaaattgacattccccacctatgagccctgatatgaagaaaaacctgacgaaccagcgaaaaaccgtaagaaagctaccgaaacaccgacgtagttcttctcaccggagtccattacaatgccgataatggcgaatacgcccttgatctcgaacgcgacagagctgacgcgggcccacgctgctctatcttcagaactggatgattcaacctcccttaaaataatggcggccaactcgcccaataaggccccggcgctaaagacaatccccccgaatatcgccgggaacccctccgcgggagaaatatactacgcgacccacttcgaaacaaccgccatttatcgccactctgagttcccctccgaa

SEQ ID NO: 91569 - DNA, 411 bp, Glycine max
gttcggttaaccaaccgggtttcgtagtatgcgagcatcgttgttggtgggccccccccccccccccctcctgctgacactcaacgaccgccccccacgcccacacgaaaaagccaaagactgaaaatacagcaccttaactacctgtaatcggcctgataagccgtaaagctgaaaaagaatcagaagctgaagcgacgataaaaggaagatcggcagaaaaaaagaccctaaccacaaaggactccgtcgcactaactgcggaaaccaaactcatctaaaaccttactggaccgcttaaatccacggcccgattctgaccccatttaagtttctttcctaatcacatacgatttttattgattatacgacgacccataaacgccctgatggatccgcgctaggatgcca

SEQ ID NO: 91570 - DNA, 448 bp, Glycine max
gctgattcaggttcggttaaccaccgggtttcgtagtatgcgagcatcgttgttggtgggcccccccccccccccccccccccccccccccccgactcaccaaccacccagccgaccgcctccttcacgaccaaagcactgcagactccgcgtcacaactaaatgattgccatcaggcttcgaagcgatttgcacggccttagtgctttaaagcggagccttcgcgaagaaataggccgctgacaggacggcggccgccgcgtaagcctcatcataggcctcggaatcgccgaattgtaagagttctttataggacgccgacgtttcgtactgtcccgcggcttacgacgcctattatatagcgggatcagactctaagattctgccttggtccaggaacaatagttacaggagtgcggacaatataaggtactcctaatcttccttc

SEQ ID NO: 91571 - DNA, 370 bp, Glycine max
gagcatcgttgttggtgggcccccccccccccccctaaataattaaaagagcagcatctcatctcctccccccccaaacaaaaaaaaatagatacatattagaatgcaaaacccctaggccttgatcccagccaaagcgcttggagcaatggtacgcaccatctagcgaactgactgaaaacccctccctatgctaaacatcacgatagactaccgtgatttcctcaaccctcaatgaaaataatacttctaatacactcttaaccttatgatttcactcatttttcggaagaacttgctctacctgggcgaaactggggcgaacctaatcttgctcttcctagacgcgagagcgcgtgacacgatgcct

SEQ ID NO: 91572 - DNA, 525 bp, Glycine max
ggctgattcaggttcggttaaccaaccgggtttcgtagtatgcgagcatcgttgttggtgggcccccccccccccccccccccccccccccccccccccccccccaagaattcagaaacacacagacaacccagacaagtcaaaagctataacggcacgaaattaaaactagagaaactagaaccccttaaagaaaagatacctacacctaaagaaaaaacacaggcatagcattaatattcctaatagataaatcaaaaaccctatactaaccacgatggaacgccccgctctccctctcgacgctatttggacaccagctcgcggactatggtccgggcgaccaagcggaatccccgacgatatacccgcctacacacgcgatgactaccagacccgcctagggaccccggacaaattctaatggtatccaggacgagcgcccgatgaatgcgcctcctgcggccgggaatttacgtaacaaaagtcccgggacgctgcttccctccctaatgaagaaaacca

SEQ ID NO: 91573 - DNA, 514 bp, Glycine max
gttcggttaaccaaccgggtttcgtagtatgcgagcatcgttgttggtgggccccccccccccccccctcttatggacaaaccaaaaaaatcacaagtactaaatattggatccacttaaggaacccagactcctgcctgatagaccgacccgcaccttaaagggggcaaaaacaataccgagatcttttcagaatcacttagaaataatagcaaagcccacagggtgaaatactaaaaacagaaaatccttgaagtaggcagggcacaagaaaaagcggggcagcacagacgggaaggacgtcccgcagctcgaaacggggacccagtaggatgcaaagccggacagacgcgctgcgtatggtaaccggtatgccagtcagtgtctgactgtagtcgacatgcgccgcacatctcgaggcaaaccgaaccgagcttggtcgtccccagaagtcgtctagctttaaaagggcttgtccagggaagccaacgtggcctgatgagacgggggcccg

SEQ ID NO: 91574 - DNA, 435 bp, Glycine max
gctgattcaggttcggttaaccaccgggtttcgtagtatgcgagcatcgttgttggtgggcccccccccccccccccccccccccccccccccagtaactctacatgtcgtcatgtacactaattaatagcaggcatcagaggaatgctaaaacctagaatagcagatgctaacactgagagcacccgggtccagactagacaatataaatactttttcccgggctatcccagatgagggcagcgccttatatccggtactacttcacggccttgacagccgctaactagtcgtgtgcgtcttatgactcgaaattggcgctctgatcggcctgggcctcagaagattacctggccctgtggcggctttcttcggcggaataatcggccaagttgtatgaggctcggatgtagaagtagggacttttgacgacgt

SEQ ID NO: 91575 - DNA, 368 bp, Glycine max
gctgattcaggttcggttaaccaaccgggtttcgtagtatgcgagcatcgttgttggtgggcccccccccccccccccccccctactgaaggacactaacgcggagacgacctacagaaacgtggagcaagaggaaggtgatgtactgaagtgtagagccgtactgtgtaactctgtgtgtcagtacgtgatgggtcgcaaatgcacggagggccccacgtatatagatgtcatagcgcgggacggtcgcggagcgcgcgcggcacgagggagcgatgcgatgcgatgccttatgccaatagaagcggcggagagcgtgacggccgccgcggcgtcggccgcggccgccgcggcgggggtgccggcgc

SEQ ID NO: 91576 - DNA, 473 bp, Glycine max
gttcggttaccaaccgggtttcgtagtatgcgagcatcgttgttggtgggccccccccccccccctccagaaaccgacagaagccgaccaaccgaagcgacggccgaactcaatcttccggcgctagaacgacactgaataagaaacgcaacgccggccacctcttgcaaatctacacgcgaaaaaagaatcgactcaagatcaagggaaatggagaatctaaaaggagaatccgcatactatacaaaataaagcgaagaaacacacgcagtaaatccgcccttgatgatgaacaagatgccggccttctacaggaaagcggcctcacacccccggatgcttatgagcctgcggaaacgtacgaactggcacttggcccggccctgccggaagaacgcctctggaaggaaactcctacggctggcgaactgcaagcgcatgctccagctaatgattcatagagcgcggcctca

SEQ ID NO: 91577 - DNA, 469 bp, Glycine max
gttcggttaaccaccgggtttcgtagtatgcgagcatcgttgttggtgggcccccccccccccccaatttgatgaaaacagaacacaccaaccagatcccactcagatggcgaggccgaaaattctgaaaagggcacgcccggtaaaaacgattgatttaacaaatagtaaatgtagaaaagggaaatgaaaataaaatcgtccataagtgcaggtcccgcataagggcgcgatcttagggcgagagcaaccacaaccaacatccaaccaagcaaccacacatcagcaagaagaaggctgcccctagagcggcgaggtctagattgttttaatccatgatgagagtcttgacggggcctggagtcggaaagaactcggccgatgtgtttggcgagtcggcggcgagataagccttgtcaccggaagtctcgtggttgttagccgtaaaagcggagaagttgtaggcggt

SEQ ID NO: 91578 - DNA, 398 bp, Glycine max
aggttcggttaaccaccgggtttcgtagtatgcgagcatcgttgttggtgggccccccccccccccctcggctaaagatgcactcccgaaggaacaatatctgggaaaaaagactacctggccagcgaacctgcactctcgaacacgcaaggggccctcggaaagattcactgatcacacgaataccggcaaatataactagaaaaaaagctcaactacatgacactgacactgcgcgacatttgtagctgcccgcgcgacgtgaccaaagcgctgatgtaactcatatagatcagcgatagaggggacgataggaaacctcaccgggtgcagatgatcacgagaacgggcttctcccagctgaccgccgagatcttaaatctgatggacaacagaat

SEQ ID NO: 91579 - DNA, 556 bp, Glycine max
aggttcggttaccaaccgggtttcgtagtatgcgagcatcgttgttggtgggcccccccccccccccccccccctattcctattctcaaactgctgctaacaaggacggcgagcctcgagagaatggcaaacccaaacacccacccagaccttgagacattgcggccagatggacaccctgggcgtatctacgcccgaggcaaaatgataggaacgtcccagaaagagacaaaaacgacgcggcaatactacgcgcgacaaataattaactggcgaaatgacgggcatgctcaatcgcccgaaattttcgacacgcaatcatggggctgaaaatactcacaatacgcggatgctaactacgaagactgctgaccacaattccgctcatcgttttaatgccgacaagatgcccaacagcgcgcgtctatacctgagggcgcttggatcggaaggcaggggccgtaagacagccgcgctgactcgttcgaagcgcgcccaagacgctgctcttcacattaggaatgagggcgcggacgacatggatactgcgcaaacc

SEQ ID NO: 91580 - DNA, 358 bp, Glycine max
acactgccaatctttattaaacttgcactaggtaaagtttacattttgcagagagaaaacaattaagtaaagtcgtctctcagtgccacacaataaatgcaaattggcctaaaagacccgctcgtatttattccacgttgaaagaagccactactcaccaaaaggttttttttttttttttccatggatacactttctttaaaacctccttgcattttcatacttatcgaggaatatctccactaagcgacatctcattgacagactttgttgttgacttggtaatagactgatcaatttgcacccacttcagcatgtttgattcagttctactatgcataaataatgcaggctgatt

SEQ ID NO: 91581 - DNA, 444 bp, Glycine max
gctgattcaggttcggttaaccaaccgggtttcgtagtatgcgagcatcgttgttggtgggccccccccccccccccttccccaaagcacacgcgcccacagcttaaacagattcagaatcttacaagactggaggaacacacaaaaaaaaaggcttaattgaactcaactctccaggctttttaatcaagccgcctgctaaaatgaacaaaataacaaccctaataacgatgatccagcagagacccgagaagaccataggttattcgacgacagcccgcctgacgttcgtgataaacagcacacactggcaaataagaaatttgaatagcatcccgaatatctgctacacattcttcagaagatcgggagctgctgcaggagcttctcttcgccgaaggtcagccgagtaagataacccaacgcttgggtaaaactcccgga

SEQ ID NO: 91582 - DNA, 408 bp, Glycine max
ggctgattcaggttcggttaaccaaccgggtttcgtagtatgcgagcatcgttgttggtgggcccccccccccccccccccctacaaaaataagccgagagaccttaaagaccacaagagcctaaacacctcagccaaaagaagcagataacaacgatccatccccgttaggccgccaaaaaggcatcctacgcctatacccactcccctttgacccaccccaccccacaaccacccccttgaccagagcccaaaccactcaagggggacggtgatcaacaacgcttggatctactcactaatgatgcttaattgaaattaaaagaaggattcttctacactcggcgtttacgcggaatcgcaggaagcttctccctatagagcacacagcgaagttgcccacgatgc

SEQ ID NO: 91583 - DNA, 440 bp, Glycine max
ggctgattcaggttcggttaaccaaccgggtttcgtagtatgcgagcatcgttgttggtgggcccccccccccccccccccccggcaacaatagcataactcaaacgcaccccgatcaccacgcagccctacccttgcctccagaataaacctttgctaccccctgaacgaactcatgttgaacccacgagacactctatacggaccctaccccgattagtaccaaaaatcagaaaagaaacactcagatctacggaccgataccctgcgaaaactgaactcaagcaacccgaatattaatagcgctcctggtacgcatcattataataaatgacattccccttcttgacccggaattaaccgactgctggccggaagacccgcacgagcgcagcgaccacattcgtacgacccttaaactccctaactgaggacaaagg

SEQ ID NO: 91584 - DNA, 499 bp, Glycine max
gctgattcaggttcggttaaccaccgggtttcgtagtatgcgagcatcgttgttggtgggccccccccccccccccccccccccccccccccccccccccccagtgagaaagtatatcgacaagctaagagcccgccgcagactcagatgacaacaacacaaccgcggcccgcccgctcgcaaaaaataaaagtcccccccccgcacacgaagcccgctcgaaaaaaaacgagctcagcggacaccagtaccacccgcaaagctctaaacaaaaaaccacactaacttacccatgcaaaaagcatacccaataacagtaagcatcggcctaagaagctgcgggacttgctctcagaaaaatctcataaccctggcctggccctcgcgggccgaggaagcgcctgaaaataactaccctcataaatccaccctcccctcgagttcgcctaaatgcgggaaactaagaagaaagactcaaacactcatactataaaacctt

SEQ ID NO: 91585 - DNA, 431 bp, Glycine max
gctgattcaggttcggttaaccaaccgggtttcgtagtatgcgagcatcgttgttggtgggcccccccccccccccccaaaacccaaaatcacacacaaacaacaccaacaaacaacaacccaacagaaaccaagtatcgaagaaaccttaccatgttacgaagattccgatacacgaaaagtcactaccgaagggaagagcgaacttgccctagaaatccaaccccctagccaccataacgcaaggactggaacgggaatacagaacaggaaaagcatcatcaggcccttacctgccaacctaatgtcgaacagacccgacgaatggccatttcttctgcccggaagaaatcctatcctatgcctctgccggaacacgctaccgaactgctcctcagaccgcttagataagactaagacaagaaaaccca

SEQ ID NO: 91586 - DNA, 447 bp, Glycine max
gttcggttaacaaccgggtttcgtagtatgcgagcatcgttgttggtgggcccccccccccccccctaaacaacctaaaaccaaaaacataagagaatctttgccccctaaagggataaagaataaacacggaccgccaacgataaagaaagccgaaaactacaaaccaaaataaaatctaccaaaccttcctatacttcaacccgccaccctgcattaatctcgtaaggaagctgatatgcctgcctttctctaaatcattaagcctactaggatgaggcgccatcttcaagaaaatcaatcggacgtcaatgaacttcggacggcgggaggctgcctgcttcacaggatttatcggaacgccgtagtacgggaatggggaagcccgcaatatctcacgcctcctaatcgagtttaaccgccggacgttcacgcggagctcaaagg

SEQ ID NO: 91587 - DNA, 397 bp, Glycine max
ccctctaagtaaattcttgaaacccaatatatatattacctatccaaacatatcattcaaatctttgtatgtacctagctagctgtactttccaataccatatataaaaatacaccttccccaactcaacttgaatcctcgaattaaactacttcagaacatgtaaatctgaatttctgcaagttcataatcttaaaccagcttccatctttatacatggagcaagttatcacacattcttgtccatttcttttctttttcctttttgttctctcctgctgctatttttctgctaagttaacactctgaactgcattgtgctttgtggatatattgcaacataaaaaataaaataaaaaacaattccttcatggggtatcttcattgattaattacc

SEQ ID NO: 91588 - DNA, 404 bp, Glycine max
gttcggttaccaaccgggtttcgtagtatgcgagcatcgttgttggtggcccccccccccccccgaccgattcgaatcttactcaccgacggagaccttacccacaccgcctctcgctcccgaagcctcaaggaacccgccgagatgtaataaaaaaaccctcacacctaaaacaacataaaaagtcagaacttataagagcgaccccgcccctcataaaaaatgaccacggcctgccagttcaaaacgacgtatttaagaatgggcaacaccttaacgggaagcgactggcgaggacccagcataaaggatcaacaacgcggaacgacatgcgtaaaaaatcgaccgcttaatactgagaaaaacctcaaaagcacaacatcggcgggccggacacaagctga

SEQ ID NO: 91589 - DNA, 296 bp, Glycine max
atgcgagcatcgttgttggtgggcccccccccccccccaagagaatctgaacctcccccgacactcaaatcatgaatcatgaattaaccagatgagaacacacactggaccaccaggcctgatgaaggaaactatataaacccgatggaagagtcagccagaacaacaagacaaccagcttaggaaatggctaaagaagcaatttagagaggtataggaataatatagcgtgagaatcatatgggcgacgtgggcgggaccacccccgaccatccaaccgatgatgagcaccacca

SEQ ID NO: 91590 - DNA, 512 bp, Glycine max
ggttaatccaaccgggtttcgtagtatgcgagcatcgttgttggtgggccccccccccccccctcctggaagccagagctggaacgcccaccaaagcctgagcattcaaatcccagacccctgatatataaaagaaccaatccaaatcgtcgcgcgatctggagagaacaaactgaaaccttggcaaaatagggtgcgtcacccaccggagtcctaaataatggagcagcgaggaaaattccccccccccccccccggacttacagagcccgcccaaaaggcggcctgaccccgacagccacgtattaacacgcggagcaatgtagacgcgacctagatagccctcctcctagccttcaacatagctacgaaccctgagggagccgatgactccctaccgatccgcagcactgacaaacaactgattgctaccattcaggttcatatcaagatatcaagcataaatgactataagcagctactggacctcattcgcacgctgcttacgccgc

SEQ ID NO: 91591 - DNA, 474 bp, Glycine max
ggttcggttaccaaccgggtttcgtagtatgcgagcatcgttgttggtgggtccccccccctccccccatcctcagaaaaactctaacctgagacggccacgatgacccgaagccgaagatcaagccaaccagattatatatataaagcactacacccaagagacctgatccctacataattcttacctaataacacagaggccaacctacccccgcagagttaaaacacgggatcgatggaaaaaaccgatggacggaaaaggataaacccgatttaggcttgccggaaacggacgaagcgggacgcaagaaaataactctataaaactcacaagaacgatcatcgacgaagacccttcctctaggacttggacacataaacggctgaaaacaccttctcaaacgacctctaccgagccccccgattaagccggaccctattattcaatattcccaataatgcgggcgctaga

SEQ ID NO: 91592 - DNA, 336 bp, Glycine max
gtagtatgcgagcatcgttgttggtgggccccccccccccccccccggccacgcccggtacccaaacccggcgagacatttgaccccaactacgagacaaaacaacctccaccaccggagaagatgagatgctgcggtcccaacacacaagaagagaaaagcagtaacaccactttctcacatgacgatcataaacacgcaacacggagtatctagaatactgacgtcagcaacctaggctgccgacttcctatagaccaacccggaaacaaggccctgaacgcttaactctaagtcgggtctgcagtctaccctatagcgttgctgcctgggagc

SEQ ID NO: 91593 - DNA, 439 bp, Glycine max
gctgattcaggttcggttaaccaaccgggtttcgtagtatgcgagcatcgttgttggtgggcccccccccccccccccccccacaagaatattacccggaagcgccaccaaaataataccccggtagactgacaaagtgatccgacatcccgacacacacgcccacaaacacgacacttctactaattcttgcattggcgccgacctgatacagagagtaggcgcaatgacttggggcacatgccggaacttataacttcttggagacgcccaagccatttaaggaatactattcgacctacaacttcctactccgacagttataaatattactgaattggaaagctaattggggatatgcgaaaatacggcccaagaaatcgacatcacggcggcccgatctagaactcccctccgaggaatggacgcgcaagaaact

SEQ ID NO: 91594 - DNA, 484 bp, Glycine max
ggctgattcaggttcggttaaccaaccgggtttcgtagtatgcgagcatcgttgttggtgggcccccccccccccccactcaattcctaacttaaaacatcatgccgcgcaaggcgcaccctacctcgaactccctaccctcctaaaataaaactaaaacatccaatgacagccaaacaacagagaagaaacgccgacgctctgcacattgctacaaaccaagagcgagaaatgagcagaagaagaagaagaagaagaaattggccaccgcagaatcctcgttgcagacctacgagaaatgagcaaaaagatcgaaacccagagacgaatttctaacccaccggagccagacgacctaagacgccttgcatctaccatttgggaaaatctatataataaaatcggctcatctagcttactcccgctatctcagccgacgtccgatatcgccgcctctcccgcccaaacactgatgccctacaca

SEQ ID NO: 91595 - DNA, 445 bp, Glycine max
gctgattcaggttcggttaaccaaccgggtttcgtagtatgcgagcatcgttgttggtgggccccccccccccccccccccccccccccccccttcgataaatcacagacgcaattaaccacaattatacagctcgagggatgcatccgaactaaacaacataaaacagatggcctacaacgcggcacccattggaaacaaggcatcctgccttggaacagacgcagacgccgaagaggcatcagaggcctacgccgcacagggcgacctatgaaacgcctggaaaagagccgacgaacacacgcgcgcgcagcaccccgcatcctaagactccgccggcggaccaccgcgccgcttgcccgaacaccgcggcgacgtataccgaaatgaattcggaatcgattcaggcgaaagcgcaacaggcctcgacgagctcaacaccggc

SEQ ID NO: 91596 - DNA, 454 bp, Glycine max
atgcttcgtggctgattcaggttcggttaaccaaccgggtttcgtagtatgcgagcatcgttgttggtgggccccccccccccccccccccaaacagctgaaaatactcagcatacccttcccctcggaagtcgaactacgaacgatcctacgccagtccaacccaaaccctacgacccaagcctacgaggagaccccaaattgaccccaagccttctccacaccctctgcgctcacactgggctcccatcgctgcacccgctaacttccgctgggacgctcttcccttccccggtccgcccggcgcgcccgcggctctacccgcccctttccgaataatgaattgctactttcctaatacatgaaggcctgggagacggtacgatccacgagaagggcgccgcgcgggcgtcccacgatacttaacttaactcaagaacccgctggaccaagc

SEQ ID NO: 91597 - DNA, 428 bp, Glycine max
ttcggttaaccaaccggtttcgttgtatgcgagcaatcgttgttggtgggcccccccccccccccccccccccccccccccttagaaaaaaaactccacaacaactacctaagagtcaagagacattgcttccagaaaaactacctaaacccactagccaggaaggaaccaaggccctgagcctcgcataccgggaatatacataatgaagcctacccgctcagagatagacctcaacaccagaagcacacaccacgaaagcaaatagacaagcctgtatggcgaatgcatgggcatcatcaccattcgccgaccgcctaatacgaaccctaccgcgcgaagtcttgcccttacggagaacgcgatataaaagatcgggatagacgaagccacgagcgcgccctcatgcagcagcaatgcgccgtgca

SEQ ID NO: 91598 - DNA, 412 bp, Glycine max
ttcggttaaccaaccgggtttcgtagtatgcgagcatcgttgttggtgggcccccccccccccccccccaaatcagaatgaatgaaagagccttgactgctgacccccaaccagaatgcaggtacctattaaagatcaaaacactcaatgggcgtcccgaaacaaacgctaatctgaaatcagactggcgaaaaataaaaaaaaacttcagcctattaaatatattgggaatttataactcaaacctaatagaaaacaagcctaatagaaaaataaatctttaaactcccagtttatctgcttagctccaacctacacgccatcggtcttctgaaaaccggggaaaggggaccccgcagaacctctcaataactcttttcacccttagatgctgagcctgaagcctatcgcc

SEQ ID NO: 91599 - DNA, 417 bp, Glycine max
gctgattcaggttcggttaaccaaccgggtttcgtagtatgcgagcatcgttgttggtgggcccccccccccccccccccccccccccccctgacaaaccacaaccaccaccaaaccccaaaacacccatacacaattaacaaaacaacccccggaaaacgagaaaagactaacaagccccgccaagacacagactagactctcaagaaccatacaagaacctgcctctatcatgtaaatagaaatacatgcccgccggatgccgaccggcacccccgacgatgatatcaaatatggcctacccggcgcagacgccgacatgcaggaattaacactttatacgtgcgtctgaagccgcccttaaggaaacgaatctgggcccttcctggttctaaatggctcggcggctgcctccgg

SEQ ID NO: 91600 - DNA, 246 bp, Glycine max
cgttgttggtgggcccccccccccccccgaaaaaactataaacgactgggacaccaaaagctcccacagcccacaccgcagactccggacacgaaaagggcatacccaacctcagacccgagacgcccaatctttatataaaataatttcatataaactacatcgaattaaacctccaaggcctgcaggagagccacagcgctaatgcgagatggagaaagcgcaaaccggagaacccgcagcccc

SEQ ID NO: 91601 - DNA, 446 bp, Glycine max
aggttcggttaaccaccgggtttcgtagtatgcgagcaatcgttgttggtgggcccccccccccccacccggcaaaaagcgaagctcaaaagtgatcaaaatactcaagtaattaaccccgacggcgaactaggaacattatcccccttaaaaatataaacgagaccctcgccgaagaaatgtagatcgacaagcgccggcgtcatcatggacgcatccggccttcccacctacagaacatgctaacatgaacttacccggcctcatgattggacagcataccaccaataggaaatccaataacgatgtggatcatatctgcacgaaccgaaggctgaaagccttcccacgctaccgaactcctcatgacctaggactcccgctactagacacctcaatactggcggacttcctaattaatgcatccgaaggcgctcacgaaaacg

SEQ ID NO: 91602 - DNA, 299 bp, Glycine max
cttaagtaagtgatatccactattaaacaaggaatggaaagtttcaattttcaaacctggaatacacagagaaagcttattttgaacaaccttatgttacataatgctttaaacagcatttagaaacacggttattttcagaggttttctccttggaacattttcttggtttaagtttaatttcccgtttcgcttagtttttattaggtgacttccatttagtcctgtggagaaaaatgttcaggttctcaaagtttggctttctgttgatctaacttggctttggcccccaagtgaac

SEQ ID NO: 91603 - DNA, 383 bp, Glycine max
ggctgattcaggttcggttaaccaaccgggtttcgtagtatgcgagcatcgttgttggtgggccccccccccccccccaagtcatactcacagcccaccccagactgccccacagaccaaaattcgccacatactcactcacttggggactgacaacgcccacgcatgcatacgcaacgccccccacccaaaaaccaaccttacacatcaagaaacacacaaacaacaactcaatctcccgacacccgccacattgttcaactcgcccccaagaaagaaacctccaaagaccgcgaacaaaatcatattgcctcctcccttacaaaccacacggatacagtacgtactataactaatatcacaccgggcctccgtaccgagaa

SEQ ID NO: 91604 - DNA, 466 bp, Glycine max
ggctgattcaggttcggttaaccaaccgggtttcgtagtatgcgagcatcgttgttggtgggccccccccccccccccaaataggagcctacccggcccaccacacacacaaactaataccacataccgctcagggaaaatccacacaataccacattacaagaaccccaagatagccccagactctagacccttggaaaacagaaatattaccgccgccacagcttagaatcggcttgaatagccgatcacgtactcgccggcccccgacgggctgcttgaaccgggaacgaaacaaacaaataataccatgaatcacaatacggaactattgatcctggacaatgactgggtttgaagccgcagtaggatgaggaaacttaaccaagcgaaaacgcctgggcgttaaacgcacatcttctcacaataaggcgcgattgaaaaaccgccgctttcgccggacacc

SEQ ID NO: 91605 - DNA, 274 bp, Glycine max
ggctgattcaggttcggttaaccaaccgggtttcgtagtatgcgagcatcgttgttggtgggccccccccccccccccccccccccccgataaaggacgcacctaagctaattaaacaactaaccgactattgatctacaccggccagcagaaattgaagacaacatgaaaacaacaataatcctacatcgaggaacaacggcatgcatcaaaccctcatttaaccactgggccggctgctaaggaaatatactgacgccccgctgaaggagaa

SEQ ID NO: 91606 - DNA, 465 bp, Glycine max
ggctgattcaggttcggttaaccaaccgggtttcgtagtatgcgagcatcgttgttggtgggcccccccccccccccccccccggcacaaacccaacccaccatccctacgagccccggaccagactagcgagccccgatagaacccgctgaacccgccattctggcttaaataaaatcagcatcatgacccgggcaatacaacaagcgcacgaaggacacactaatattaaattcaatgagaatagaataagcaagacaattccgacagcattactacgcgaaaaataaaatataaaaacgactatgcctcagcacggccttaccgactaaagaaaagtccctagcaggctaactatccttccctgcccttaccgacgaggaaagcggaggggacttgagggccgccgacgaaaacgagcgaggagaaggagagggccgcggcggaagaagaagaggaatcggc

SEQ ID NO: 91607 - DNA, 331 bp, Glycine max
tcctttttttaatctcatttgtaattactttgacattaatttataagaactttgagataatcacactgtaatacttgttggcaattgagtttcaacgcacatccactaggatcagagtggtgatgaacaaattgtatcggatccataataaatactagaagaacttgcaagcagcaccaagctaagcgaacaacagtacagtttacagtgtaaagtaaggaagaactcttttgacgccaacacaagcacaagtaactaaatattagaaagacagtacatatttctacagccatacacaacatgatgctttgattttattgatcaacttggg

SEQ ID NO: 91608 - DNA, 283 bp, Glycine max
cttgggtttgtcaaattattacacggtgtatctagccgaagccttgcaaggttaatgaaacttaaagcaaagccctatggaatgctgaatctctgcttatgggtcgaccttagtgagaactaatatcgtgctcgtgtatctaaaatccttgctgcaacccatttaaagacaggttataatgaaatgcaactgattcttttgagggagtgcaaatgtaaatagtctaagatctggttaagaataatatatgaattgtgattagataactttgtcttgagggggg

SEQ ID NO: 91609 - DNA, 457 bp, Glycine max
gttcggttaaccaaccgggtttcgtagtatgcgagcatcgttgttggtgggccccccccccccccccctcccaggtctctcagaaaatcaccgaccaacagattctagattaaaccaccaggggggacgaatagaaatccaacgcaaacgcagaaccgacacaccaaccgccaaaggatacgctcatagcaccccagaaccctgagcgggccgaaaataacgatcctgacccgaccactaaggctcagcccaaactttctctgcatgaatttaccccatacatgaagtatagaagtacaaccatccgccgaagcaattcgtatggagacaattgatattaaccgatgacacggacatttgcccctgcccaatcccgacctaaggccctgaattgccgttgcatacagaggtctcaacaaccctagaaagggaataaatgccaagccgggacggtctc

SEQ ID NO: 91610 - DNA, 379 bp, Glycine max
atcactatcatcatcttcattaatcagccaataacggttgccaataatgtcatcatcccacaaggccatgctgctattgttgttgttgtcgtcgtctttgtcttcattgttgttattgttagtaatagtgttattatcattgtaattacaagaccattcaaaatctggtagctgcaagtcttcaagaaaattggttgaatttgaagaagatgatgaagaggtggtggatgaagaggaaggagcacaaggcattagaatctcatgaggttcaattattggaacttcatctgtgcagaaaccattcattagctccattgtgtcaaataagggtgttatgatttggtcttcctctttggcttcttcagtgatggttgatgat

SEQ ID NO: 91611 - DNA, 139 bp, Glycine max
tcctttttttttttttttttttttttaaagtatgacaaatttcggagcccctggcaatgtatactaaatatttgttacaaaatcacaaaagtatgggaatatgaataggcctatcaaacttcattactcaacttttttt

SEQ ID NO: 91612 - DNA, 105 bp, Glycine max
ggcaaaaataaaggagataatttggtcgccgattggatcactaggtataagatcgccttgggcgtggctcagggaatctgctatcttcaccacgactgtgatccc

SEQ ID NO: 91613 - DNA, 398 bp, Glycine max
gttcggttaaccaaccgggtttcgtagtatgcgagcatcgttgttggtgggcccccccccccccccctaataattgagttgccaaaacctaacctactttcaaaagaggggaaccgtaatgccccggaacgaataccgaaacgactgaaaataaaaaaatcaaaattgccccccccccccggccccccccgcgcgcgctcgcgccacgtaaatgccaacgagaaaaccaaaacgacgatttagacaccacccacataagcgaatcaatagaaagcggaaactataaagaaaaatggttccggcggacccgcccacggaagcgccgacggcgatcccagcgaagatgaattttgagatagcgttggaaccctgttcagcctatatgacataagacgcgt

SEQ ID NO: 91614 - DNA, 250 bp, Glycine max
ttcaggaatgactaggtacggcatgtaggtagggtagggaaggttagttcctcatgaagagagttcatgacattgtgctttgtcccaagcttttaggattaagtactgagtagggaaggttagctcctcatgagagagttcatgacattgtgctttgccccaagcttttaggattaagtactgagttagattattatcggttgttgtccattaagttggtgagaatcaacttatctcacatcattgtgta

SEQ ID NO: 91615 - DNA, 242 bp, Glycine max
gcctctgctatgttgactggtgcttctgctgttgcaggtacatttactcatgtatatattatgcaatttttaatcttaactgcctttttctctttgtttgtcctagtatggaaaattcatatcaaattgcatgtgttaacttggtaagctttgttcagttattatatgaatatatagcctttgaggattggtttcccatggtgtgtaattttgtctatctttttacttagtgatataattct

SEQ ID NO: 91616 - DNA, 248 bp, Glycine max
gaaagaaagcgtgttttggctaggagaaagagtagcagaccctttgttcagggcccatgctcaattcccttctgagatgattgaatttagaaaagggccagttctttgtgatgcaagaaaatcaccaattatctcccctcctacttggaaagtctgagtgcagcacagctcaccggcacatgatagccttgtcaaaggcgcaaatcaaggaaaccaatcaaaagtgtctgcaactgccgttgatcatt

SEQ ID NO: 91617 - DNA, 234 bp, Glycine max
ggcctcctccaccggatggtcaacagagaaaggagggggtctgcaattctcgatattttcacctagtgattaactcccatcgaaggtctaatgctctaaatggtgttaatattaatggatcctgagttgatatccatctagagtaaaagaggaagtttgcagctttttccagcagagatttcaagaaactatgagcagcagaccagttttgaatggcacctcttttcacaccat

SEQ ID NO: 91618 - DNA, 248 bp, Glycine max
  unsure (1)..(248): unsure at all n locations
ttttaacgatcggagtaagtggagaggcctgatnagaaaaactttgattgaaacattctatactattggttaaaaagacgggaagagagagagactttttcttgtttgactcacaaggaggaagaagaaatttagaaaataattcacttttgtattcttaaaatttggatttcaaaatataaataggagtatttattcaatacatttgtattttttaaaattatcacacctcccttccaaattttcca

SEQ ID NO: 91619 - DNA, 246 bp, Glycine max
agaaaattatgttgaaccatcaccaggcatcaagctttgggatcctgattccttaatcatagtacacgattatgacaatgacagtgatcacatggatactgatgaaggcagatctttcagactaagagttatgtgatgcagttggacgcagagacacttcagagacttgctactgtacgatcgaaggaagctatatcattgattgaaaagcaaactcaggccctgtttggaaggccagatattcgt

SEQ ID NO: 91620 - DNA, 240 bp, Glycine max
cagctttgccttctcttgtgctcgacaaggactgggaccccattttcttggcctacggggctggcctcaagaaagccgatgctattatagtaaattcattccaggagctggaatcccgtgcggtgagctccttctcctcccacgccatttatccggttggacccatgctaaacccaaaccccaagtcccatttccaggatgataacgacagggacatcctcgactggctagacagtcagc

SEQ ID NO: 91621 - DNA, 232 bp, Glycine max
gaacacttgatgagctaaatgggaacctcaatgatctaaatgatgttgagaagttgaaagctgtaggctcaaaatgcctaactttgttccgggagtgtcaagattcaataacgaaggtgcactggaaagcaccctgcttcagtggtgacggtgagtgggttgtaggtggttctgctaatgaaggggagcacaagatttacgtatgggatagagttgggcatcttgtgaagat

SEQ ID NO: 91622 - DNA, 239 bp, Glycine max
cattgagatttttgtcttgtttcttagggctgtctatttggtgattttgctctctccttgtatagctatggctcctttagttgatttttttggcactcaatttagaaaaacatggattcatgttgttcgagttacacttgaaaaagctggtccagcattcattaagtggggtcaatgggctgcaaccagacctgatctctttccaagggatctctgtgatgaacttgctgaatttcaaa

SEQ ID NO: 91623 - DNA, 235 bp, Glycine max
gattatgttttgtacactagaacaagctacactatggttttccccagaaaagcaaagttggcaattttctccattctgtaaaatataaagcaagaaagaattagtaatgaatatataatactctctccgtcccaaaatgactacagttttagtcttaaaaaaaatccaaattgaccgatgttctcattttttaatgagatattaaaacatctattccaattttacccttaataaa

SEQ ID NO: 91624 - DNA, 236 bp, Glycine max
tggctctctcgcacctctgtcgtggttcgaggaacctcttctcctcctcttctcctctctgcttcgcttctcttcccgccaccatcaggatttctttccaatcctcttcgatcttgttctcttctcccgatttcactgtttcgcaccgtcgattcggttctcgagctttccagaagaaacaaaagaacaagaccatcctccccaagaccgaagacctcgatctagaagccctgaaa

SEQ ID NO: 91625 - DNA, 237 bp, Glycine max
gttcagtcataccatccacactagatacaatttcagtaatctgtaactaactctactgacttgaaggacgctacaatgaactcaatagaatgcattgaggagctatgggtcatcttccgagggatagatgggaagccagagtgtgatcagaacacctgagcatacagataatgttctcgacaactaggcacggtgaatgagggtcgtatccaatgatctaaacatggctgggaatat

SEQ ID NO: 91626 - DNA, 233 bp, Glycine max
agaggctgtgggcgattgtgaactttattctggcaattgggttcggaatgacggtggtgatcaccaaggtggcggacaccagcgcaagatgaatcccgccgccgtgggtcacccctccgaaggggtggtggttgggtccatggttttctttggggttctcggagttcctcttgcggtaatgttcttctctcttctctctcgacaactacgcctaaatcactgcgtttttttaa

SEQ ID NO: 91627 - DNA, 231 bp, Glycine max
gagagagtagacagagaagagtgtgtgtgcgtgcgtgtgttttttttttttttatcacctgagaacccaaagggaacggttaactcggccatttaaacccccccaaaatttccaattgaactccttttaaggaggataaggaaagtttgatcttccaggaaaaaggacgaaggggaaaaaaatgggattttttttgggggtttcccaatggtaaacctggaaatccaaaga

SEQ ID NO: 91628 - DNA, 261 bp, Glycine max
aagaattattgagacattagatattgttttggcgtctaaacttttagaagccaattgatcattttcttcctaataacacccacatctcgagtttgtggtggatgaagcatgtgtctgaaatagccttggagaatcttagaattcggttaagaggcacaactgcacaagcatggttggtcatatagggtgggggcgaacacaggtaattcatcagaatgagcccatgttaaatgtgaaaaataaaataactgaatttccgag

SEQ ID NO: 91629 - DNA, 257 bp, Glycine max
cgttatctggcggcaacaatgtgattgatacctcgggccgtaatctaaaccttggttctgcttcttctcgtgcttctgcgcctgttatgcctgctgccatcagcactaatgcagccagttctcagcaacaaatgcagcgaaatcagcagcagcaaattcttcagcatcagaagcagaatcaatttgcagctgcagcagccgccgcggcggcccgcaacaagaccccatcaatatcaaaaaatactggtagcccaagg

SEQ ID NO: 91630 - DNA, 254 bp, Glycine max
gtattctatagctaaaatttattttagaataatatatttaaatcattacattgggaacttcacatcttgcattttttttctagactgcagatgatgtcgattcatttatccattttcccacttgaaatatattgattttttattttttatatttcaattaaatggaatacttggcatttggccaaatattgagcattaattactaaaagactgcccttataaaaataaagggtcttaaggctgtgcagagttaa

SEQ ID NO: 91631 - DNA, 251 bp, Glycine max
cctgcatcaacaccaatccagatgaatgattgatcacatgtcactttagatgaaactaagactctagttgtttggaatacttcatgcctgtcctttgggctttaggagtagtgtgcagaggttttggagataagaatgaagataagattttatgcagatttcctatgtttgcatagtagagtgttaggatttctaaatcagtttgtgtgaatgcaatgcttatggtagaggattttctttttggcttctct

SEQ ID NO: 91632 - DNA, 143 bp, Glycine max
tgttaaacctgctggactgtctcgtggaagaggaattgcttgctttagaaatttagttgagattcaggactatgttaagggtaaagagtcacagtgggttgtgcagaaatatatggagaatccattaattgtccacaagagga

SEQ ID NO: 91633 - DNA, 252 bp, Glycine max
gaaaagcacatggatcatggcggcaacggaatctaacagaatcaactaatgtacatgaggtgcatgatggactggaccatgatttaaactctgaaccaacagagcatcatcatgatcagaaggctgaagtaagctttgtgaaaggacaaacaaagcattttaatgactctggtgatattgatggttcatacaattctaacagcaataatgcagctgctttgggctcagctcctgttattaaagattattcag

SEQ ID NO: 91634 - DNA, 245 bp, Glycine max
gtttagatctactgattccttccttccattgagagtgcaatggagggaggagattggattattcccttacatggcagcttctgatgtaactaccgtttctgcaatgggaaataaaagtataaaaccacgcttgaaatccaaattgagaacaacaagttgtcacgtgttaagactttactcccttgtatattttggcttgtgcaacttcgttcaacttaagttgcattcttcagtgaaaattgccg

SEQ ID NO: 91635 - DNA, 243 bp, Glycine max
aattatctctgacatattccctaaaataattatttttatagtgaatcatttattaagaaaaataaataaactgaagggcttatttattagttttgatcggttatacttataccccttccttctatcagagagggtgtccatcattccccttttcaagtatgaacttaataaaatcagtcttgtcctagtagaattcagtgatttgtatcttggtaccagtggtaccccttttataatatattt

SEQ ID NO: 91636 - DNA, 243 bp, Glycine max
ccgagagcaagctctacgccatcttggacgatcattacaggatgatgtttggtgttgagcctgaggagacttatgatgaacgcccacagcagaacaggcctgtgagctggcatccctcttcaacacagttccaggcatcgcaggcaccttcctacttcgagtctcagcaagattggtcttccgcatctccacaacagtcggtgccaggatcagatttctactctctttctacacgcaattcga

SEQ ID NO: 91637 - DNA, 247 bp, Glycine max
acgacgtcgtcgtagttggcgctggcgtcattggcttaaccatcgctcgccacttcctcgtttcttccgacctttctgtcgccgtagtcgataaggctgtcccttgttccggtgccactggcgcagggcagggacatctgtggatggtaaacaaaacccctgggagtgctacgtgggatcttgcgtcaaggagtcatcaactttggaagacgctggtacagagcatagaagagcaaggtttggatct

SEQ ID NO: 91638 - DNA, 270 bp, Glycine max
gccacccaaagcgctcgttcaaacctatcagtataactggccatcgcagactgtcaacgagagagacttcgaccaagcgcttgctcaagaggagctggaatccggtttcgataatagcgcactggagcctactgatcccgacaatcttgataattggtctgcagatcccgaagctgcctctgccaacgacacaactatggctgttgatatcggcgatgcatgggatcttgatgaaccagacctcgttgcagccgatactcaagaagagca

SEQ ID NO: 91639 - DNA, 131 bp, Glycine max
ggcatttttatttttttagaatcttgtaatttcgtttacatgtacatccctaccttcctcctattgcttttgcacattccaatgtgaattcacttgtgtaaacatttgatttttatgaaatctttgacaag

SEQ ID NO: 91640 - DNA, 258 bp, Glycine max
gtttaggaaggtaacatggcattggaatcccaaccgcagaagaacaagtatggacacggggtgtttggagacgtctccagcatcatcaaagagatggagattgatcatcccaactctacctttgattttcaatttcaatttcccccaattgctgttagtttgccacagctttcttcaatgcttccttctgttcaaatattatattatttataccctctttgtatgttcccagtttcagaattttctgggctctagaga

SEQ ID NO: 91641 - DNA, 256 bp, Glycine max
attaccaactagataaagtctggtagcgggactaatctcccatgacatagtgaatcgatgttggaattcctgcgtgaccatgcctaaagtgagtttaaattatgcaatagtagtatttaataatgggagcgtaaattgtagatatgatttaattttgaagtcgcggggtccataggagggttagattagaaggcatgtgcgtgcctgcgatcccaataatgcataggaattgaagcataggcacccttcccttccg

SEQ ID NO: 91642 - DNA, 251 bp, Glycine max
gactaccgcatcaaggaagcgtcacagctgcttaagtacctatgggacaactacgtggagctcagcgaatgcactcacgtataccttatgggcacgaacaccggccatggcgcgatcatcaatctcctcaagaacaatcaagagacgttcttgaagaagtataacgatcgcgaagaagagaacaagctgttgaaggtcatctcgttcgttgaggacgtcccgcttatgtcgtgtaagtcgctcgtcaacgg

SEQ ID NO: 91643 - DNA, 250 bp, Glycine max
cttatttgcagagcattggagccattaatcctaccttcagaaactagccaggttgttaaggaacgacttttgaattttgtaagatcattatcaacagtactggccttcgcctattgtttgtcaagtgtaattcagcaagcgcagaaattcttagcagagagtactgatgcaagtgagacgagaaaattggaatcccatatttctcgtctcacttgcatcagtactctctgcggtatggatagctgccttt

SEQ ID NO: 91644 - DNA, 251 bp, Glycine max
gtttcttttcttttcacttcgctgtgaggttgacgcaaagactgaggtcaagccactaacacacactacacttggcgcgcatttttttccatgggaaaccgcttatccgaagtcgccgcaggcgcgccgccatcgggctaccgccgcgattttctcaatctggccgccgctccaatcgacgctgtcgagaacttcctcaggtcccgcggccaccacggcctcttctctcagatcgagttatcgttttccgc

SEQ ID NO: 91645 - DNA, 202 bp, Glycine max
ctttggacacggcgttcgtaacggtcacctgaaagtggcgcgtgcattgcgtgaccgcaagtagtacgtgtgactgccatgttgccatacctataggtgaagagggttcacttctaggtctagaggttgatggttctggaagatcttatcatactggattgatctctctgaaggataaaaggggttggagtaaagtggcaaa

SEQ ID NO: 91646 - DNA, 253 bp, Glycine max
gatcatcttatccgaagcatggttcgaccccacaagtatacaatacgacgtcgttgctcgtcaggaagtggaacgaggaaaaaaaaaatatcacttctagctcacacagaaagagaagagagtgtgtttatttgatttgtgatttgttggcccaagaaggcaaaacaatggttctttctgtatcccttatgcaactcgggtgtgtctctcttcttcacaataatccctcatcatcacctgtgacccttttgcc

SEQ ID NO: 91647 - DNA, 253 bp, Glycine max
gtgaaaacagataataataaaaagtgagatttcataaggatgcttaaatagaagaaagaatttcctaaggggccgtttggtttgagatttcactttgttccctgttttctgatgtatatacaagaaaaagtaaaaatagaaaacaataaaaagtcatcttttactgtactaacttttgaaatcagtaaataaagtgaaaacagaaaatattttctcaaggcaaacaatactttttcaaactggttactaatgt

SEQ ID NO: 91648 - DNA, 242 bp, Glycine max
caacaataataataataaccaattaggccttgcaattggagtggctttttgccatgttttgtgtgatgggttagcagccataaggttcattaatgcatgggcaaagcttactagaggggaagtgttggactcaattgaaatgtttccgtttcttgatagaacaatcatgaattccacatacccaccaaggactccacgttttgatcaccctgagttgaagcctctgcctctcaaactaggca

SEQ ID NO: 91649 - DNA, 189 bp, Glycine max
cttctaagagtgtgtttgtgtctccttttaaaatccatttaaacaccgatccaggcttacggcccagtcacgttgaggcgcatacgacagcgtgccaagggcgaacccaacatactctaagtggacttggggactgatttaggctaagtgcattgtgcgcagatgtatgatacagcctaaggattggct

SEQ ID NO: 91650 - DNA, 234 bp, Glycine max
gggaggttcaagtggattatcgtgttcttcgcgctaccccttgatattctcgccataggattgatgatacacttccgtcagccaggtacggacgttgggttcatcatcatgacgcagatcttcaccgccgtggcaggaggtagcatcgttatcggcggcgaactggctatgatggctccgtcagaccatcaacacatggccgtcattacgcggtgcttaatctcttctgctcta

SEQ ID NO: 91651 - DNA, 237 bp, Glycine max
ccgtatggaaagggcagctgagaaaggaaaagcaattgcagcagctgttgaaggagttgaaaaacactggggaacatcagactccaatacatcattcattgagactctgcgggagcaaatattcaagccatcattgtccacaatcattcccgagcattcaaaacttgtaacagtatcaccaacagattcagttctgacaacaacaaagaagaggttgaatttcgtgcaagttgtgca

SEQ ID NO: 91652 - DNA, 237 bp, Glycine max
gaaacagtctctgcacactacactgaatagaattcacagagagagataaagagaaagcagaagcataaagaagaataagagaagagagaaatggcgcatgctcggcaacagaacgaggctggcttcacgctctccagcaagatcagcaacaatggtagtaagagcatatacgacgacgtttacggaggtccacccaagttcggcgtttcgagctctcccctcgtttcgaagactacg

SEQ ID NO: 91653 - DNA, 243 bp, Glycine max
gctggattgacctctgtatcatgtgtatcagaattgatgccctcatgctcgacacatccttctgcactaaacaatccggttgactctgtaccatgtgtatcagaattgattccctcttgctcggcacacccttcagcaccaaacagtcaagttggctctttatcatgtgtatcagaattgatgccctctttctcgccgccttcaacaccaaaaaatcagtttactctgtatcatgtgtatcag

SEQ ID NO: 91654 - DNA, 228 bp, Glycine max
gaagaagttgttgggttgagttgggtttggattggatttctaatctaatctatacctttctttttcctatgcttttaaggcacaaatccttctcccttctctcttctttcttcttctgctcctgacccttattattattccttgcccttaccctttaggcaagggaaggaagaaagaataactatatgattatcattattgtaatctactttttatgataattatgat

SEQ ID NO: 91655 - DNA, 220 bp, Glycine max
aagaaggccttctacaatcatgggcgctaaaggggttgcttgtcatggtatatgcatgtgtagaatcaaattataattagatgaagatacatcatctatatgcaagcgatcatttctgctctatgcatcccctgtactgtcttatagctaacatctccctgacttttatgtagttcagaatgtaaaatacatgtccgttatcatgtaagcgtgataaatg

SEQ ID NO: 91656 - DNA, 256 bp, Glycine max
ttataatgctcgttgtctggaagaactgaagctatctctagagagttctggggcttgtaaggttgcattcaatccaattacattgaatactatgaagaagatactttttagaatatgccaaatggagcattgtgatgtgactgctgagtatgttgatctaattgcaaaaactagtggaggtgacatccggcatgcaattacttctttacagtttttctgcttgaaaccatctacctgctatcgtggagcattaaaa

SEQ ID NO: 91657 - DNA, 242 bp, Glycine max
ctcttccttcctatcactgttttttcctgcaaagaaaacgtaaaggaaacgccttgtgcttcctctctctctctctctttattcattcattcattcactcacattcagaattctctactttttactcatagcttcgtagaggaagctgcttctacaagccaagtattatttggtgtcccttttctttctttcttttctttttcctttctctttctttcatagagctaaactaaactaaacca

SEQ ID NO: 91658 - DNA, 250 bp, Glycine max
aaaaattaatagtaaaggataatacgaaacatccacaatatgaactcacgtgggtttctacttccatgctagccatcaattaagtttcacaaattttaaaacaacattttgaataataatgacaaagataccaagcaccgcaaataaaaatactcagtataattattattttcccaaatttcctagtagtaagactaagaataataggtaaaacattcattcaaatgttattactagaaatattgaaggt

SEQ ID NO: 91659 - DNA, 248 bp, Glycine max
atctcttgctactaatatctttcaaactacaccaatcggcgaggctagaagcgaaaaaatcgagtaggagagcatatatacatagatgatgtccgcaccagctaatttggagacggggggagaagagaagaaattagaaatagagagagagaaagaggtggagagtcaggtagaggtagcagatactgagtcaaagccatggaaagagcaaataacagtgagagggttggtggtgagcatggtgcttg

SEQ ID NO: 91660 - DNA, 251 bp, Glycine max
aaatgaagccttagcaattgagtgaattgccattcattgattggtcgattgattgaggtattagttaagattcaaactcattgtaccatagtttgccttgtccctcctccattttttaaacattattccaccctcatttatgctcttaaatactcaagagccttgtgatgatctctagagtgaatttctcgtagattttaatcatagtatttgatttaaaggaaaggatttgtttccttctaataactcta

SEQ ID NO: 91661 - DNA, 239 bp, Glycine max
aaaaattaatagtaaaggaaaatacaaaacatccaaaatatgatatcacgtgggtttctacttccatgctagccatcaattaagtttcaaaaattttaaaacaacattttgaataataatgaaaaagataccaagcaccgcaaataaaaaatactcagtataattataattttcccaaatttcctagtagtaaaactaaaattattaggtaaaacatccattcaaatgttttgactaaa

SEQ ID NO: 91662 - DNA, 255 bp, Glycine max
ggctcgagccagaatgatatcagactccgggatccatgctttggccggtgcagctggcggtgccctgtccatggccgtgacatatccgctcgtcaatctatcgactcgcgcccaggtggagacaaagaaacagggcaacgagtcgacgcttggagcggttcgccggatcatacaggccgaagggatcgcaggcctctttgacgggctcgagtcgagcattgtgggcattgcagtcacgaacggtgtctactatct

SEQ ID NO: 91663 - DNA, 245 bp, Glycine max
ctcgagccgtgttccctccgtttttgaggtgctgaaatttaagggagggattactatcattccacaacagagtgtgttccctctgcaaacagtgcaaacattattcaactttactttgaatttctccatttatgaaatacaatcaaattttgatgagctgacaagtcagctaaagtctggactacatttggcaccttatgagaacttgtatgtcatattatcaaattctgaaggttctacagtag

SEQ ID NO: 91664 - DNA, 246 bp, Glycine max
gggaaaaggaaaatgaagaggggttggctaaggaaactggattctattgcttgttttgttcataatcatgggtttgatgaaactaaatgcaaagactgtgattcagtggataggagtgggatacaaagagttcgagttcattcgtataggaagcggtttaaggagctttcctccctttacaccgaacaggagtttaaagcacataaaggtgttattttgacaatgaagttcagtcttgatggaaaa

SEQ ID NO: 91665 - DNA, 269 bp, Glycine max
ttgatttctcttgaccatgaccccctctaccaacacaaatcctcttctcctcttaattctgagcttcctccttctatccattcaatctatcaggtttaaccctgatggagagtttactattgtccagttcactgacttacacttctgtgaagaagctgaacaagatatgagaagtcagcaactccaaagaaatatccttgactgggtcaaacctgatctcgtcgtcatcagtggcgatggcgcttccgattatgctgacggctcataga

SEQ ID NO: 91666 - DNA, 169 bp, Glycine max
tgaagattccgcaacagagagtagacaagatggcgcggttgatcacagtggtgtggtgcgcggtggcggtgctactttgcgctcgcggcggtcgcgtcgttggtcgaggaggcggcgaacccgatacgaatgctggtcgtggtcgatgcggaggtggttcgggtgatag

SEQ ID NO: 91667 - DNA, 252 bp, Glycine max
aattatttacgtcacgcgtgtatgtttgttgatgtatgatcattgatatcaaacaaatgttagcacgtgtttgactaagtgttaattaattgttagtaaaatccattgacttcgaagtgatatgtagatatttttattgtcaaaagttaggaataaattttggtataaaaatattttttttaaatatgccaagaaataccaatcgtcctaaagttactgtgattccaactagattagtacccagtaaaccaa

SEQ ID NO: 91668 - DNA, 269 bp, Glycine max
atttcatccaagccctcttgtctcaacaaattaataataattaatcacgcccttcgatcttcgagtcatctaataataaatcttttgtttcccatcaacactagttcctgcaaattaatgggtatccctcactttctttgtataccatttccagttcaaggacatgtgaaccctcttatgcaattttctctgcttttggttaaacatggttgcaaggtcacttttgtacacactgagttcagcctcaaacgaacaaagacttctggtgc

SEQ ID NO: 91669 - DNA, 264 bp, Glycine max
gtttgagcaggattctaatgcccagattgggttctgctggggcattggcgttgatggttttgtagttatttttggaattctgggcgagcctgcaaaatcaagttgtgctaatatcatttgcaccatttccaactggttatgtaaatttgcaccatttctaagtttgtgctatagggtagtataaggtatctgctctagatcctgctttttgtatctagcactctcaaatttgtgtcggaaatgtgcaatttagagtacttatta

SEQ ID NO: 91670 - DNA, 258 bp, Glycine max
ccagtcatgaccgagtctccacttatgacactccctacaactttcctctaatatccaattgtcaacaatcaccattgcggaagaccaaaacaaatccatttcaccgaagaaccatgaccgttacaacagaattcgcagcagcgacaaacgacgaggaggtgccatccggcgtcgttttgttcgggaagtatgagttaaggcggttgctgggagctggcgcattcgccaaggtgtaccacgcgacgagctggacgacac

SEQ ID NO: 91671 - DNA, 233 bp, Glycine max
ccttgttgtgatctgctctctgcaaccatgcttctcagaacaggttcatttttctctctcctcaaagccaccgccgaccatatactgcctctctctaactcttcttcttctggtattattcgctactctccatctctggaggcaaactcggttccatacgctaccacagatcccaacaaacggcccttaaccgacgacgattatgaaccctttgacagacgtcaagaggtgct

SEQ ID NO: 91672 - DNA, 242 bp, Glycine max
ggaattggctatagaagcagtgagtcagggtggtacttcagacaacaacatcaatgaatttataaataatctgaaaagatcctaaactaaatatcccttttggtgtcaattaatattgattccataaattgtattagaattttattttcctcttgtctgtttagtagctattatatctttatgtcattctatgttaaatacttaaattattgtaaaaaaaaaaaaaaaaaaaggggggccgc

SEQ ID NO: 91673 - DNA, 229 bp, Glycine max
  unsure (1)..(229): unsure at all n locations
atttgatttgtatcagaactccatctattgagttcctttttaattattttttagacgggaaagaagcatctttgaatagtagtctgtaagtatacttacacattatgcaaaccagaaaaaaaataattaaaaaggaactcaatagatggagttctgatacaaatcaaattagatcttgacctattcgncgagctttggtgggagttgtggtcccttcttgattggtaga

SEQ ID NO: 91674 - DNA, 239 bp, Glycine max
ctcgagccgcgcgccaccccgatcacgcacaccggcactcgttcgattgcatacagtcacttttaccccccaaacgcgccacacgcctaaagatatcaccgccactctaactccccatcctccccctctgcccgacgccgcataccgcccaacatggccgcagtagcatacaaccttgtggaaaagtacgcgccggcgatcgaagagcacctcgttaccgttaatgcgactacggcgca

SEQ ID NO: 91675 - DNA, 234 bp, Glycine max
  unsure (1)..(234): unsure at all n locations
attaatattgctttttaaataggcaattccggtagatattcaagtcacttgttcacacgagttacatttagtnaaaaattgcattatattgtgcgaacttttatgaaagactgaccatctatgtctgtacaaaatattttgggttgttcaaagttctctgcatggctggtgtaatagctcttgcataatgtattgtgtaaataaaggactgtatactatttgcttttgatgttc

SEQ ID NO: 91676 - DNA, 233 bp, Glycine max
caagattgtataaaattgccattgatagcacataattcttcaacaggttcctggatctaactggcaatgtattggggaaaatttggattgggaatagtataaattggaattgatagaaaaaaaaaaaaaaaaaaaaaaaaaaaaaaaaaaaaaaaaaaaaaaaaaaaaaaaaaaaaaaaaaacaaaaaaaaaaacggggcccccccccctaccagccccccccccccccgaaa

SEQ ID NO: 91677 - DNA, 226 bp, Glycine max
atttcaagcattaggtcattctaccttgaagacaatcgttagtaaataaaaacacataaaggggaatttgggactctgaatcagaaatatcaaggtacaacacgagtcaaacgtgcttatttgcaaacattataaggagtttgaagtgctccacacccagaaaggagactgggtgaatgagtactttgcttgcactcgttatcatcaacaagatgagaagctaggg

SEQ ID NO: 91678 - DNA, 234 bp, Glycine max
acgaggcttcatcaactgcaatcagcgtgcgaactcacaacacacacacacacacgtatatatcatcactcacgctctcaagtgtcaaaccgacatcgatccacaccctacgcagtgacaaaattcgtaaccgttcacactatggttaaagaccacatggaagctggtctccggaagaactccacagcggtccagacggtcctagacgaccttgctcggatcgatgttgcggga

SEQ ID NO: 91679 - DNA, 214 bp, Glycine max
cttcggaggatgcaatttactttgagaaggtatagcctgagtctcatctgatgaagacaatgctgtgtaagtcgtataggccgaagaacgttgccgctgatgaacaaaacgttgaattggtggtgggcaatatcagtaaggacactcttgtgaacgaggagaggagtgaagtgaagggctcaagttcgggggctgttgcgaacaggaaggacgg

SEQ ID NO: 91680 - DNA, 212 bp, Glycine max
caattttagaaacaagttgacagcaattttcgtcacaaaaaaaaaaaaaagggggggccgccgtctagggacctggtcgcccggggattaattccgggccgggacccggagggggcacaggtttcccctatggggggtcgtttaaggtttgggcgaaactaggggaaaagctgtccccggggaaaattttttaccggcccaaattcccacac

SEQ ID NO: 91681 - DNA, 228 bp, Glycine max
tgtcgacgacgaagatgacgacgactactacgccaccaccgctcctcctgaatccgtttgggctgcgtctcccgtcactctaaacgacgccgccgctgctgctgctgctgaggaaagtgagagtgagttggaaggtcttgatgatgcagatgatgatggtgaggaagaacatgaaaatgacttagaagtgacagaagaagctgagcctgttctccagaagcctcctga

SEQ ID NO: 91682 - DNA, 222 bp, Glycine max
cttctttttcacgagcccctggttcgacgtggaatcgacggcgaggaaaagaagccaaatcttcagtcttctgagagtgagatcgaaaatgggaagcgatactagtttggttcaagaagatgcaactctgaaaccgttcaaatcgtacaagaagagtgtaaaaaagcttagaaaaattgggaatgcccttacaattgttgttgttgcaggatgctgttacga

SEQ ID NO: 91683 - DNA, 223 bp, Glycine max
ggaagaagcctagagatgtaataataaataatataaaagggcacgataactaaatcatatctaggccattatcttagaatcagattattttcactgacatcagtggaaattgtatcaatttatttgtaatcactttataacggttaacttagatgttgacagtgcaagtttgttcttttcttttgttatcttccattactccaaggaagaagcctagagatgt

SEQ ID NO: 91684 - DNA, 108 bp, Glycine max
tttaatttaactagttgatgattatgtggtcattgttatgtcccactttgtatgtcattattgtgtttgtgaacttctttgacaaataaggcttgtttggattaaaaa

SEQ ID NO: 91685 - DNA, 107 bp, Glycine max
ttttggcggcagcaagaatcaacattgatatttgtctctccggcgcagggtacgatacagaacagagcataatccagaagctacttccatttcaccaaacaccctca

SEQ ID NO: 91686 - DNA, 251 bp, Glycine max
cgttatcacttccaagctagccaactgcatacacaatgagaggagaatactgtatcgccggagcttccgtcttctcgttcatctcggtcgtgttgatggtctttgccatcatcggacaagtcaacccgacttcgcttcctaaatccatctatatggtcaagctcgatgtcgccgcctacggtgccggtctgcaaaacgccatgaaatccgcacctaacggtctctacatgaccaacggttccgctcccctg

SEQ ID NO: 91687 - DNA, 252 bp, Glycine max
gacgagttggcggaatgcaaactgccaagaccaaggaatagtgatcagattggaatatcgggaagcaaaccctttcgactcgttttgaagaatgaattgcctgatacaatttatactaactccaagatcaaagcaagaggcaacactcctcttgaggttgttctttttgatattgaatctaagtctatagtcgccgagggttcactgtcttcaatcaagatagagattggtgtccttgatggtgagttctgt

SEQ ID NO: 91688 - DNA, 255 bp, Glycine max
cgaccggcgacaccccatctccccttcgtcaattcacatcaagatgtctctcgctgcatcacgtgccgtattacggcaatcgacgttcgccgtccgccgcgctggcatccgcaatgcctcgacgaccgccgaagccaccaacaccgtaaaggaaaccgcgtcaaaggcacagtccaaggcatcagagggtctcaccaaggtcacaagctccgcgagctctgcggcgtcgggtgccggtcaagccgtcaacaatgc

SEQ ID NO: 91689 - DNA, 251 bp, Glycine max
aagaaacagagtgagtttagcatcactggttcctagttggaggcttgaaagggttccaaggttagccttatcaaataataataattcaggcgatgatagaaagacaagtgtcgtggtataggtatctgaaggaggagctatctctctccctcatggttggtcagcacaaaaggaagaagaagaagatcaaatctcagaagggttaaaaaaaatgaagggttcgaacaaccggttcttcacggtggggttgg

SEQ ID NO: 91690 - DNA, 244 bp, Glycine max
ggactatttgagtccaccaatgatctttccacctttaaaaatcacctacgagattttcttattcagtcaaaagaattttcagctcaggataacaaagatctatatgcagaagaggctgcagctcagagagagagagaacgacaaagaatgctttctattccagggcttattgccccaagcgaattgcaagatgaaatggtggactcatagataggctaaacagtgtgggagttgatagtaatac

SEQ ID NO: 91691 - DNA, 229 bp, Glycine max
tgctaccatgagatctgatgaatacttgactcggcccaagttcctgcaacaggaaactgctagtggaggaaatcaatttcctttcaaggaggccactgagcttgatcaccgatcagctgacattttggtcaacatcgactctcaagaacccagttggtgggtttgggttacagatgaggtggatcctattaatgttgaggaattgagtggaattgatgatgagagttac

SEQ ID NO: 91692 - DNA, 229 bp, Glycine max
ccagtaccaacctcaaatttaatgcaaaaagtatctttccttctctctcaaatgctttccataaccatggaagaagaagaagaacaagaaccaaagctgatccatggctccaaggccatgcgcatgcacactcctactcccaatcctaacccttcccaaacaatcatgagattggcctcacttgcgatcagcttcaacgtgcggttgaaatcatcccacatgcctcttc

SEQ ID NO: 91693 - DNA, 226 bp, Glycine max
aaccaacaatatccgcagcgtgttaactcttctccaattggtacaatgataccaacccctggtttgtctaattgctatgaccgctccagttgtgacgaaggagggtggcggtgaaggtgaagaagggaagaggaacaagatggtgactatgcagtttgttttgcctgctgtgtatgggaaggctgaggaggcgcctaagccgaccgatgagagggttgtgatcaga

SEQ ID NO: 91694 - DNA, 220 bp, Glycine max
ccattccaacagctgtctctgcactagtctacaaatgccgtcttgtctaatgggcaatgggatgggtggaatgaggtgcagagtggaaatggtttgggtgtggctgagcttttgagaaatgaaagacttggattcaataaattttactcaggatatgatgattcaaaatttcggatgccaaattctggggatctttacaacagaacatttgggatgtgac

SEQ ID NO: 91695 - DNA, 219 bp, Glycine max
acaaccagctcgatgcagagactgagcttcgtcagactaaggagaacacaattggtcagttggagcagcagatcctcggccttgagagtgatatcgcgacacttgagaacaacctgtctgacatgaccgatgctcgcgatcagctcgagcaggatcgtgacgtccaagtcgccaaccttgctgctcaactcgctgacctgaagaccaagtacatggcgc

SEQ ID NO: 91696 - DNA, 219 bp, Glycine max
tccgctcgagtactagatcgcgggcggacgctcgcgatctagaactagtcctcgagccggttcacacatctttaccctatcctaaaaagaatttccaaccccaggttcatatactcccgaactcccattgtgaccgccacgtctacaaatagcttcttccaacgttgaatattcaattcatgcatctgaaaaagaacagccttccatagcagcctaaga

SEQ ID NO: 91697 - DNA, 211 bp, Glycine max
ataattgtcagtgcccataaacttttccactgtcttcttgttgcatctcggtggctgctttgatagctgttgtgactacactcaaggctccggatatggtacctcagtgatcggccagtggagctgcaagtaagggtgggaccaacactcaagaagaatagaagattcacacgttgaagcaagggtcttctcaaagactgaaatataaaag

SEQ ID NO: 91698 - DNA, 222 bp, Glycine max
gtttgtattatcactgagaattggtctaccaaatcatattgttcaaggattatgtcgaatgcaatccagaaactgttgtatagcctattgtttattggttatatcttcaaaatgttgccgtaactaccagacagactacattaatttgctcaggattggaggaaactgtactcttaagtttatccttgaagctcatgatttactatattgacccatgcacaa

SEQ ID NO: 91699 - DNA, 241 bp, Glycine max
  unsure (1)..(241): unsure at all n locations
tgtaaggagtcgactagtcttgttgttacgagctgctgagcgtaagccgtcgttgcctagatttgtcgtctgcaaaggatttatccctacgcattgtgaaattgcaattcgtcagctcgaccccgggacttctacccggagccggtcgccaacctgctaaggttcagggccaaaggctattcgtactctagccgaatcggatcangtggtggcgctgttgctgttgctgttgatgttgtgg

SEQ ID NO: 91700 - DNA, 244 bp, Glycine max
  unsure (1)..(244): unsure at all n locations
ggctcgagctcaaaaatcagtatattctcccttgttcaatcaattactcttcttccttcccttccttccttccttaaacccaatcgaagaaaaataagatgttgttccacactccatcatatagagactnttaataacaaactcaatttatgggtttattatactttgattgctcaattaatccttacttcttagttagctggttcatcatgaatatcaggtcagacggtgttcggaacgtacg

SEQ ID NO: 91701 - DNA, 229 bp, Glycine max
acacaacaacgcaacgacgaacacgcaacttacgcttacgatacatacataatgcacgcaatcagaactatcattcttgtttcaacacttctctccgcggtgatcgccacatgtgatttctcaggatacatctccagtgctattggaacccggatctgctcaggatctaactcattctctctacaaggaactaactgtcctggatatgagcatgatgcaattagtttca

SEQ ID NO: 91702 - DNA, 226 bp, Glycine max
gaactttcgatgaaccgcgttcacaggtttccgcaccttaaaatctgagacaatagctatcgctacttgatttcaagagtctctcaatgtcttcctacttctttctgtactgtgtcttaagggatagagaatcactctctgtgctggccacagactgcgtgaatcgtatacttttccacacatcatacggatttaagacgatacgtgctgtaggatcaactttcta

SEQ ID NO: 91703 - DNA, 224 bp, Glycine max
  unsure (1)..(224): unsure at all n locations
cgtcgattcccctaaacgtgttcgagatttaatcacacacactaatcacacataacaccaccggagaaggaccttccatcaacccataactaatncgtaaattatttcatcgattctctcccttctctttctctctgcgacaccagatgatggagacgacggcgaaggagaacgctgtcgttgcgccaatcgcggcgttgttgttggtggtgctactcgcggcg

SEQ ID NO: 91704 - DNA, 221 bp, Glycine max
tgggaacacgtcctttagaaaagttaagagtcgctttctcactacacaaaactaacacaaatcacatggaaagggtcaaagggcatatacatatgaaaggaccacaatgcacctccctaagaataactttagaaaggtaacaatgacccaaaatattagaccccaatttgcatcttaactaactaacaacataaaacatttatatattatgtgaatcatga

SEQ ID NO: 91705 - DNA, 101 bp, Glycine max
gcctcagccatggacagaacagataacagtgagaggattatttgtgagcatgattattggaatcacattcagcataatagtcatgaagctcagccacacaa

SEQ ID NO: 91706 - DNA, 206 bp, Glycine max
gctagctaagcgaactacagaccaaactcttcagcagtttgtttgtgcttagcttcttcttctgcttttgctttctccaccaccacagccaccgcgtattctgccactgcctccaacactttcttccttctctcttgtttccttctcttctgtctcctctcagctccttcctgtgtttccatgttctctggtattgagacaggaga

SEQ ID NO: 91707 - DNA, 219 bp, Glycine max
cgggagatgaatcaggtcattcatatggatgaagctcattattttccttctgataggaaatttggttcttcaatgaagagtaatggggcatattcttcaggtttttcggtgtcttcggttccaaattgcgggcagggatgtatatggaaaacagatttaataataagctttggagtatggtgtatccacagtattcttaacctctcaattgtagaaagc

SEQ ID NO: 91708 - DNA, 221 bp, Glycine max
  unsure (1)..(221): unsure at all n locations
cattatcatccccgaagctgggaacaacactcctcaaaatcaaatctctgccatattatatatcagatgttgcactctcagtgccaccaccaccttctcttcccactcacactcgcaccccacaatcttaatncccctctctccattcttcctcctcttcaccacaaacccaccattctccactctgtttcggcttcagccattcctccatgggccgcgca

SEQ ID NO: 91709 - DNA, 220 bp, Glycine max
ctcaaaccatgttgctcatgtctagtgtctctagcagttattccgtggatttgaagaaagaccttttcctccaattgcagagtcaaagtttaaggcctaagttctctcagctctcattcaacccacttccatcatcaacttcttccttttcttcaccccgtacattcacaactctggccctcttcaaatctaagaccaaagccgctcctgctaagactaa

SEQ ID NO: 91710 - DNA, 217 bp, Glycine max
ctcaaggcaaccagttaggatctactttggtgaatgacttacaagagcaggaagaaaagcttaaacaatatatggagcaacttgaaaatgcggaggctgcaagggattcattgctttctcagcttaagcatgcacttcaggaacaagaatcaaggcaagagctcgttcacacccagttgctagttgcacgaagccagatcaagaaagtggttggtat

SEQ ID NO: 91711 - DNA, 217 bp, Glycine max
cagctgacgtctatggaagtaggatcacagtttcctctcagttgtatgcccagtaacatatctgaggtgcagtcttcacctgctgttttgggtttctgtagaagtcaggggatggagacagaaagcagtttattgaatcatgagctgaatgttatgggggctgatactaggaacatgggggagatagatatgatgtcaactgttttagatgaggcag

SEQ ID NO: 91712 - DNA, 210 bp, Glycine max
ttcagctgccacaattgcagcagcagttgatgctgtgtgctcaatggagtggtattggcttctggctttgaaaaatcagaaaaataatcacggaatacactcaacacggatatggaaatggaaaggatttcttatccagtattcagttgctggtgaagatggtcctgctattcttcttgtgcatggttttggtgccttttgggagcatta

SEQ ID NO: 91713 - DNA, 176 bp, Glycine max
attctttccaggcttcaacaagagccactttcctagtttttcactccttctcccagtctcggtgtgcccttcttctggggcattcgtgttgcccttcttcagctccacctccacacccgctcttggcccgagaagcttcactgggatcactatggtgggtgtgtgagagagggatt

SEQ ID NO: 91714 - DNA, 214 bp, Glycine max
gattccacaacagtgggagaagaatccaaaaagagagagtggaaaagatggcgcggttgatcacagtggtgtgctgcgcggtggcggtgctattatgcgccgcggccggtgcgtcgtgggtggaggaggcggcgaacccgatacgaatggtgtctggcgtggaggcggaggtggttcgggtgatcggggagtgccggcgtgcgttgaagtttgc

SEQ ID NO: 91715 - DNA, 210 bp, Glycine max
ggaagagtctgagtcgctcgtcagtcgctgcaacgggatgatgattgtagccaaatgcaaagccacgtggaccgcccatgccagcgcataggacagcctcgtattacaaaaaagggtttgccatagcaccgcgccggtaaagtgctggaaagggaatcgagtggatgcgattgcggcgagggcaaggttgaggtctagaggcgaggaatc

SEQ ID NO: 91716 - DNA, 254 bp, Glycine max
aacccgtctttgccagcagctattggctctggttctctgtgtagcacaaagcccaacaatgtcaactgtgtgccctctgcagcaagtatggccattgggaagcaatctcaaaaacacttgccaattgtaaaccaaaatgcttcacaagagaaagggtgggccgtgaccagcaatcctagtcttcatgctgccaaatgttctaataattccaacccaatggattctcctcatagggtgcagcttgtgctccagca

SEQ ID NO: 91717 - DNA, 251 bp, Glycine max
aactcacgaacatttgatcaaatggctgactcaggaccggccgatcgtggaggtgctggaagaggttttggaagaggacgagagagaggaagaggaggacgcggaggtcgtggcggcgacagaggaggacgcggacgcggaggagctggcggaggccgtggtggcagacgcggagacaaggaagagggaggagcctgggtgcccgtcaccagactcggccgtctcgttgccgccggtcacatcaacaagtt

SEQ ID NO: 91718 - DNA, 250 bp, Glycine max
tttagacccaccctttctcttctcttccctttcaacttcaactcaacaacccttctcttctcaaactctttcttgcctttctttttgttcatacttttatttttattgctacttactttttatttctatccaatcatccatggccgaggaaccccaaaaaccagcctccgctgaagaagtggtgcctgttcctgcggacacgccaccaactacccaatctgaagctgaagctgaagttgaagcaaatgca

SEQ ID NO: 91719 - DNA, 250 bp, Glycine max
ggaagatgtaaaagtggactcaaactcaagatttccatttgtttaaactattccagtcacctgatattctagtactttaaagtaaatcatttacatatgatcattattttcaggagctcagcagttgatggactgttaccccaagagcagtgacaagctaacattatagaggtggttttttattgataaaagagttgggtgacagtggacatctgataattatcattctgattggtactctatactcctt

SEQ ID NO: 91720 - DNA, 247 bp, Glycine max
caattttctgacttagtgatgatagtttaagcaagttgtgctgattttactggtttttccatgtttaattatggtcttgtgcctttatgtgcatattctgtggttaactgttgtaggaaatagtagcacttggaaaactaagtaacagtttttgcagcttatggctttaatggtaggcggtagctctagggaatgttaaaatgttgagtgattctttttagtgttaaggatttttgtttccatgagt

SEQ ID NO: 91721 - DNA, 246 bp, Glycine max
atttacttgttaagtggatctcatcatcttttctacaattagatatggacctttctcctgaaaaagttatcatttttctctgcaagcttttcagacattccttctcgactactatacatatgctgatcgctgatcaaataattggaatacacaacaagtttcaaaagctggaagaggtatgtcctgccatggaaaaacaaattactaagtggacaaaagttcttctaagtagtgaaaggcttctgg

SEQ ID NO: 91722 - DNA, 229 bp, Glycine max
  unsure (1)..(229): unsure at all n locations
ctgatatgaaaattgtcccgggaaaagcaagttgtttagataggtttgtatgactcttctaganattctaagtatctagaaaatgttcaacaatttgttggtagtgatcaggctaagcctagagtgaggagttcacagttatcgcttaaaggcactatggtggactcagcagattacgatgaacttttctattttcatgaaacaccaggacaggaatttggtatggatt

SEQ ID NO: 91723 - DNA, 231 bp, Glycine max
atctggattcaactaatttacctttcacaaccgaacttgaacatcagccaactgtggttccaaatcaagacgtgcattctgattcaaatttggaagttgattcacattctcattcacatgaagtttttgtgcaccctgcctcaaattcagaccctaatacagttacacctagtgaagtaagagtgcaatctgcagacacaacaaatttgtcgactcctttggagataaatt

SEQ ID NO: 91724 - DNA, 230 bp, Glycine max
gtactgtatgcaaggcataacgagatcgtcgtcatacatctgtggtcgctgcctgcggcctcggacaaatgcttccatcagtggagtgcgcagtacccggtttcaatcgaacgaggcgccacggaccgcaataaacaccgagtcggacaccacggagcaagagagaagacaagatggagccaggccggagcaagagcagggagcaatgtcacgaagactggaggagatgg

SEQ ID NO: 91725 - DNA, 223 bp, Glycine max
cgccaatcaggctcacatcagcaacaacaccaactacaattgtgatgctaatgtcgagaagaagtcacttgtactacatgtccttggtattgaaaacaaggaagtcaacgctagaatgctcttcaatgttttcagcaacttcggcaatgtcgtcaagctgatcttcatcaagactagagcagtcgctttggttgagttcgataacatcgtaagctcaattaat

SEQ ID NO: 91726 - DNA, 224 bp, Glycine max
ctccctctcagtgttatacatttcttgtagagctgaactctatgaaaattaaatcaaccaagtcgtaatgcgggtctcttcgaggtagtcatttcctggcattatctgtgttcggggttggtcatgattgtgagtccagttgccaatgctcaagactcaccaacagattacgtcaatgcacacaacggctgcagctcagatgtgagcgttcacaacttggcttt

SEQ ID NO: 91727 - DNA, 284 bp, Glycine max
cggctcgatatccgactaactgagaataaacattatggtgtcgacgttcgagaagaagaagtacctgagctagctcatcatcccttcatcttcttcttccccaaatccatccgcatcattcccacacgtcattttcagtaggtcccactccttcgtgggcccctctcctctcctttggtcccttctcgccacccctctacttctgctctcgaagagagaacgaagtctgaatgaagaagaagtgagaattgaccattttggtcccgactcccccaaaaatttgg

SEQ ID NO: 91728 - DNA, 255 bp, Glycine max
gttagtctctcacctatcaccgtcctcttctaacatttttttcaaaaaccgaaaatcatgcacatttttctgttacttacttgttgccttgatctatagcaccgatgaggttaataatcgtttgtttgcttcgttttaccgtcgtatattctttgttgtgattttgatgatggaaacggcgtgggggttttcaacccatagctgcggtttcggatgatgaattttgcgtaaatgctgttttatctttgtttttgt

SEQ ID NO: 91729 - DNA, 138 bp, Glycine max
gtacttttgagcatattcactcaaagaagagaagtaagcttgagcaccaaaagcttcaagacttggtttatgttaagtataaccaagctcttctagatcgctttgtgtgtcatgatgtggattagatcctagttgctt

SEQ ID NO: 91730 - DNA, 255 bp, Glycine max
gggggaaacacttctatatatgtttcatgaacctgttcttctcatcctttcttttcctttttggacaattcatttaaacttgtatttggataactctatgcttaatttctaagcattaatatgatgatacttctgtggctaaaaaaaaaaaaaaaaaaaaaaaaaaaaaaaaaaaaaaagggggggccccaaaaaaaagaccccgctacccgggaaataatttcgggggggaaccttgggggggaaaaatttttc

SEQ ID NO: 91731 - DNA, 100 bp, Glycine max
tcgagtgcatatcatattcagacaactgcaagttgtcatgcaatagcaatagcactttcattgatgaaggcatatccattggagtagtccagcgatgagc

SEQ ID NO: 91732 - DNA, 248 bp, Glycine max
ctgatgttttcgaatatgtcgagcgagcaaacggtacactcgagaggtatataccatggtctttcagtgttcccatcgtctttgaaaggcttgactgccattattaagggagcaaacggaatatctggaaactacatgctgcgggtattggtcgcaagatcccgaacgatggagcaagatttatgcttatcgaggcgtccttgggcgatcccaaatggtctgtccaagaacgccgagcatatgcttgg

SEQ ID NO: 91733 - DNA, 196 bp, Glycine max
gaggctgttgatcaccaacaagctggtggctggcctgctattgttgctggaaacctcactgaaacagttgatgtgggtgaggccaaggcagctagctctatttcgatgcagaaagttgaagtacctgcaggacgagcttggaaaccggctcctggtttcaaaccaaaatctttcttagaaattcaacaggaagaac

SEQ ID NO: 91734 - DNA, 108 bp, Glycine max
ctcgagccgcaatgtttctactttgaggcctccgatgttggtgggtgggtcttacttcactcaaaatggccaccggagtgaacagaaaaatttctgcagcatcagctc

SEQ ID NO: 91735 - DNA, 238 bp, Glycine max
tgaacccgaagtatggtggtggtgttgggaggaagcaggaggagtatttccctggtcctctgccgctggttcggttgaacccacggtcagattgggccgatgatgagcgtgacacagggcacggtttgagctcggaggtagggaacatggttttcccaagggggaagttttttgggattttgatattcctagggttggtggtttgcctcataagcatgagaagaggggactattgagg

SEQ ID NO: 91736 - DNA, 231 bp, Glycine max
  unsure (1)..(231): unsure at all n locations
gttaggcttaggccaagcaattgaagcactggaagtaattttcattccagtagattgagatcttcactcaatgctagagacttttctgtggatgattttgatttgttattacctgattatgatcatcatcatatcagcagcagcagcagcaacagttccttaatgagttatcatgcctatctccacatgctatgctttgcgntaccatgaaccgctctggtcgaatgaaac

SEQ ID NO: 91737 - DNA, 237 bp, Glycine max
gaagtggggagcgacactcatgaactcttttctgttcaatgtggggcttattcttctttgttccattagtgtgatccagttctgctccacagcatttgcctactatgctcaagcaactgcagcacaggaaatattggccacaccttggagtctcttcgtggaattaaatatttgtacaagtacaacgtctttcagattgcattcgttgcattggctggattgacttttgtatattat

SEQ ID NO: 91738 - DNA, 247 bp, Glycine max
ttcaggtattattactatgaattcttggccacacacacactatcttaaatttttcggtgtatatacatcataagataaatgttagtcatactatttttaatattctttattattgactaaatttttttagaaattttaaatttaatgaatttcattttttatttaattactccctcgatttagaggtagaacccacaaacatatgtgattttcaatcaatttcattcaataacagatagtgttaaaa

SEQ ID NO: 91739 - DNA, 193 bp, Glycine max
caaaatctaacccgctaatgctaactcgatccctcaaattatcttcacgcactctctcaaagtccacaaaatctgccctcttccctcagactgcctatgctttcagtcaatcatggaagcccaaggtccctaaacatgaattcctctagacaaatctacatatcgtttagctcatccgatctgggatcctaaa

SEQ ID NO: 91740 - DNA, 164 bp, Glycine max
tataaaattaccttctgtggcagtagtctctcagcgaaatttgtctctcaatcaaaacttcccaatacgacctcgagtagcagagccgaggcgcctagcagcacgcctcctgagctcgatcgctacgtagaggtccataagaaagtcgacgatgctggcggaga

SEQ ID NO: 91741 - DNA, 210 bp, Glycine max
ccaccaccaccaccagccgccgcaacactttccctctgtcatggcggattcccttaaccccgccactgcactcggcgtcggcgtcggcgtcattcctctcctcgcagccacgccgtttctcgaatccgacaacatcatcctctgaagtaggacacgtggcggcgggggaattcagctatggcaagaccatcaacaacaccatcaaagcca

SEQ ID NO: 91742 - DNA, 219 bp, Glycine max
caacgttggaatgtcgatttcccgatctgcttcactgctacaatcagttggttgtaaccttggattttcagctgattttgtattgaagaagatcgggaaatcaacgttggaatgttgcatccatcaggtggtagtgcttgttctggctatgaactaatacatgcttcttcatcaaggtgctgaaaatcagcttccaacaattcatcatcaaatggggat

SEQ ID NO: 91743 - DNA, 218 bp, Glycine max
aaaagagtgtcgatactactgaaggcgtacacatcactgatcctggaattggcaaggctgattcctgggcttctccaaagttcaagagacacttctccaaccttgaaaaatttgatgagcatgggaagataactcgtcacttgccggcttcaaagtcgaagtcttatgagaatgtccaggagttatcagcaatggttaatcttgtaaagccctaggtc

SEQ ID NO: 91744 - DNA, 216 bp, Glycine max
tgttaatctgtggtctatgggatgggagcccataaattttgagaggtccctcttgaggtcaagcctgagaggtttatgaacaataatgaagacaaacaacttgatgtgaagggacagaattccagctattgccatttgggactgggagaaggttgtgccctggtgcatcacttgcacttcagactgtgcctactaacgttgctgctatgattcaat

SEQ ID NO: 91745 - DNA, 216 bp, Glycine max
aaaaaatattgatggcagtgcactagcgttgatgttgaagaacacctatatgggctagcgaacaaaatggggatcactgttgttacttcctcacaagtaagaatatattattactgaaaaaaattaaaattttatcatggtaaattggagaaataagagcagttcactagtaagttattccttgtttctcactacaattgggatttggtaagcatt

SEQ ID NO: 91746 - DNA, 202 bp, Glycine max
  unsure (1)..(202): unsure at all n locations
ttaaaccttcttttatattctgagtgtagctttaaaggccacttgcccgaatccccggtttgtcttntgtgacacaccactttttgtccgtcacaggatacagtggaacatttaccaaaccaatactaaaattttttgtgggaaagcagaacagagcaatggtttgtgagtattcctcatcgcaaactgctttatcatccga

SEQ ID NO: 91747 - DNA, 215 bp, Glycine max
  unsure (1)..(215): unsure at all n locations
ctttgttgcgatacgtcattggtttggccctcatctcgctgcaggtatggaccattgcaagcatttacgaatccttgggcgaattcggctggttttttggagacttcttctttccacataacatacgaaggtatttatatngtnntanttatctatttttcaacaatactgagcgcacgatattatttgttggagtctggggcgccgcgatcata

SEQ ID NO: 91748 - DNA, 197 bp, Glycine max
ctgaattatggtaatggcattgaagatgtttccgctgctctgcgttctgtctctttttgctacctcgtctattatcaccatcactcattccaagactgttccacacaacataggaaggacaaggtcccacagaaccagtttcccgcaagggtgtgttttcgggacagtgtcagtgcatagcagtatgaaggtgctgc

SEQ ID NO: 91749 - DNA, 181 bp, Glycine max
tagccactgttccatccttcgcttcgtggggtcgcccttccctcttccttctgctcccggccaggtgccgcctttcctttctcttcacgcaggcctcgacggtctgcctagcttttgtctcgactcttttccttatccgcgcgcgcacgacggcgacggcgcacacgtcttccacacaaca

SEQ ID NO: 91750 - DNA, 201 bp, Glycine max
  unsure (1)..(201): unsure at all n locations
gtggaaaactccggaggtcaactcaagagtaagagagagtaatgagcattttattgtgtctcacacactctttgaattcatcctcctaatgaagacgactcttcagcctgattcttttcattgcgatccctgtgaagagaagattattagcataaaccctgatctatgtttttcttgtgcagggcctntggttaaccttcc

SEQ ID NO: 91751 - DNA, 213 bp, Glycine max
aaatcatggtacattcactcatgtcaatcttctctaagcatactaatctaccaatctcttcagggaagattgacatgagggaatgccccatgattaggtatttaccgaagtctgcagtgtcattgcaatctctgcagcttgtaatttgtgatgaggaggtactagatatgtggagtgatgttgagatgtccaactcaaatgttcttattcaag

SEQ ID NO: 91752 - DNA, 210 bp, Glycine max
gcaaaaacaatatctggtctagtgtgggctagataaataagttttccctatcagtctttgatatcaagcctatttgagctctcccattcctatccaatgattttgcttgatgagctctccatatgttttacgacccaatttgcttgtctctctaagaagatcaatggcatattttctttgagagataaagatgccttttttggagcaggc

SEQ ID NO: 91753 - DNA, 241 bp, Glycine max
gccatggacacaaaactcaagtgatcaatatttatatattatagcatcaaaaagctaatacaattttcctacttcttgtggttggttgactcatatgttttccctgtgcagttgatacttaaacatgtatgcagtgttttcttgtgagttttgatatctgacaatcttctgttttgcagatggacaacagtccaaccactggcagtgtaaacaccaccactgctgagaagcagcgtctagc

SEQ ID NO: 91754 - DNA, 237 bp, Glycine max
cgctcgagcgaatcggctcgagcgacggcgctctctcgaagacaggcgcaggcgctatgacgacgatgtagactattaacacgatatgagcgttgaccggcgcccgcaaccgccaccgccacgtcgacgtcgtcgccctcagcgtcgagacagcactcagtctgcatcagactaccagcccaaacctgagaccaaagaccttggtcctacgctaatgacgagtgctgctggtgcgtt

SEQ ID NO: 91755 - DNA, 252 bp, Glycine max
ataaagagaaatatttgcttactcataagcttgagccctttggtactatgtggctagtttcatacggactcaacgtcgctttgctgtaagatgttcactgtgactcaacagtcctacgactattatcttgtcatgaagactcaaagatcctctgtctttatgctttcttaggactcaaattcctctgtcatttacattttgaagacttcaatatcttcagtcgtttacgctttcaaaagactacaatgtctt

SEQ ID NO: 91756 - DNA, 191 bp, Glycine max
ctgacatgtacactgtaagatcgtattttatagtacaatcctacttgtgttacttacgtgtatgattatgcaacatataattcacgtaagtaacacaattatgattgtactataaaatacgctctgacatgtacactgtaagaatcaataattattttatcaaattcaaggagaaaaaaaaattatcacaa

SEQ ID NO: 91757 - DNA, 226 bp, Glycine max
agtttggatattttctaaataaagaaaaatatattattctttatcttaaatgtgctatattttatcttaaatgtgctatatttttttttagaaaacaaaaaatgaaaattaatcgatttttaattcctccaaaatgatcattttattaggattgaatcgattaaaaattgaagtgatcttccaatggatagtatggcaatgctaatgtccgactcgttatttttaa

SEQ ID NO: 91758 - DNA, 235 bp, Glycine max
gaaaatgcatttctctctctgtgcaacaattagggttttaaacctttaatcccatccaaaaactcacactttttgtgtcttactgtgatttttccacctcgcgcgatatgctgttgtccctttccatttcccattagcttctcctcacacccgttcatgagtcaacatcacaacaaccacgccacgctcaccgtctcaaccggcgatgcaaaccccgacaaccggctccaaccgg

SEQ ID NO: 91759 - DNA, 269 bp, Glycine max
ttgctttatcattgtcagtttttatactatgtatccatgaacaagcaattgaaaataataattaacaatgtttattaacatctttaataatatgtttaaagcgtgtttgacacctttttatgacatcaaaatctttttaaagtgtgtagcatatactagagcttaagcaatgatcagggtatcccataaatataatcggtgttatattatacaagaaaagtcccaatcttttctcataaagtaggtatatatggctttcgtattatgat

SEQ ID NO: 91760 - DNA, 147 bp, Glycine max
cacaagtgtagtcccctacctcccaagctccctagcaccatatgctaaggtcgttaacaacttcaatgggaattgtatcagtagcaccaactcagactgtggtgtatttggtccctcggtatcctccatcaatctccacatatatct

SEQ ID NO: 91761 - DNA, 258 bp, Glycine max
agcatatccatgtcctttgaaacttcagcgcgcaggactccagtgcagggcctaaacttcttcggccctaaggtcacggtttcatctggtccttgtcagttaaagaacacatgctgtagaaatgtataataaatcaatattggcaccgacacttctttcatcctatctcggagaatgccaatcatgtgaatccatacaagtaaagaaaatagaactctgacaatcacctgatgctgtaaaaatatgaattacattgtt

SEQ ID NO: 91762 - DNA, 255 bp, Glycine max
gagaaaatgcctagggaatttactattgttgatatcaatcatattcccgtatttttagtcctttccaatttactaattaaaccatcctcttacaaactatgatattataggatgagacacaaatcaaaccagctgaacaaggtgaaggtcctggaaacctggctgtggtggatgaatcaatggaagatgatgctggcaagaacaaggggaacagtgaagctggcaggcaaaatgaaaaattatatgccacagatg

SEQ ID NO: 91763 - DNA, 243 bp, Glycine max
atgcaattagagctggatgatatctgggcgagtcttgacggttcaaggtttcatctctaatcctctgcatcaggaggatggtcacactcaatgcatcagagaaaaattatttggggatatttctagaaatggcattagagaaatccttggaagatcaaattcaatcgatggctgtcattcaattcccagagatgaccaagaatatgcggaggaacttttggttggcctcccggaaagccatct

SEQ ID NO: 91764 - DNA, 235 bp, Glycine max
caattttacaataaggtctgttgttaatgttgatataattttctgaagctgtctagcacttcggaggaagtatttatatattgaactatattatgtctgccagttttggtggtgtaacacttgtcttaggaatgacctgtaagattgcagttgcaaactgggtgctagtgctactccttttgtgcatctcaaatctcataccttctattttatgagaagaattaatatggctgtc

SEQ ID NO: 91765 - DNA, 171 bp, Glycine max
gcatggaagagtctgagggtagtacaagtgggaatcacagttacagcagctgtggatcaccaatcagcaacatggctcaagactacctctttatattctcctcctcctccccatagatgcaatcctctccctatccatcacttgcaagagattcagggctctcacttccac

SEQ ID NO: 91766 - DNA, 233 bp, Glycine max
tgcctgcccatcacagatttcaagtttatgaagttgactgataatggtgagcagaaagatgttacacagtgggtttgggaatacatgagaaaaaagcgccagaaatgctgaatttgcttgcttgcactgaagtatttgatagtagtggtggtggagcagtgaaaatgtgcaatgatatgggggtaacctttcttggtaaagttcctttagatccacagctttgtaaggcagct

SEQ ID NO: 91767 - DNA, 235 bp, Glycine max
aggggttaaaacatgcttgatgaccggcaatcctgctgaagaagtggctattttttccaaatcatactaactctgcaagcttgcttatctttaaactcccaaataatattatctgcaagtgggtatttgtactttgtttaaatttttacttgctttttgaaaagtcaatttcttgttgtaacttaggtaggttagtacaaaataacacataatatattgattcaggacttcaatt

SEQ ID NO: 91768 - DNA, 189 bp, Glycine max
gtaaactccataccaaataagtagtcccaagaacaagaacaatgttcattttgtgtctttaggatattattggtgaaaaactaaaaaaaaattattggaaaacataaaaaaagttatagatagtataattttgtgcattcaacaaagacatttttcttttagtttattaacaaatgtccttatctggtt

SEQ ID NO: 91769 - DNA, 225 bp, Glycine max
cttcaaccttcttccctcttgcgtgacttgttgaggcttcatcaaaatggcgagatttctaggtctcagaggtcgtagtctagcgagcgccatcagcatcacgtgcggactttgctttttatgtttcggctatgcccagggtgttatgggcggtctcttgaccgttcagcagttcttggacagatttcctcaggtcgacattgtgaacgagagttcgttccacac

SEQ ID NO: 91770 - DNA, 234 bp, Glycine max
aagaggttaaaggatgaaaaacacaacttcaagtatgaattcaagatagatagtaataacaggcttgaacatattgcatggtcctacagttcatccattcaatcatattaggtctttggtgatgctgtggtttttgatacaacctatcgtgtagaagcttatgacatgctgttgggaatttggcttggtgtggacaataatggaatgacttgtttctttagttgtgcacttcta

SEQ ID NO: 91771 - DNA, 231 bp, Glycine max
ctcagtaggtcggtgctgagaaaaaggttacaacagtgaagccgacataaaaatacaacatttttttaagatctatcttaatttgtatctttagttacaagcattagaagttgagtagtggttgcattaaatattttgaatttttttcatcataataatccaacctgagtaaacccagatttattcagtttagtatgtgttttgtttaatgttaaatagttgattcggatt

SEQ ID NO: 91772 - DNA, 261 bp, Glycine max
gctccagcacaggatagaaaattgatccttctttacagggtcttcattcacaagacttcagtccgcgattcttagccatcttggagtacgatagcttcgttcactgttgatcaacgtcaatagaccatccatcaggtcgctcatcatgacggtcggcatcgcacttattggcagccgcattttcgctaaggaagaacatcttcctgccattcaaaacacacaatccctcagtctgaaggcagtttactcacgctcactcaa

SEQ ID NO: 91773 - DNA, 161 bp, Glycine max
  unsure (1)..(161): unsure at all n locations
cgaatttgaaaaaaatgaattaatcttgttgtggatggctgaagatcttttgaagaaaccaaggtaaggtaggactttagaagaggttggtcatgagtattttgatgatttggtatttagatcatttttccaactttcanacacaattagaagtagttggc

SEQ ID NO: 91774 - DNA, 166 bp, Glycine max
ggatgtcttattaaatcagatggtggatccatgaatttttgtttgtctggtctccatgataatgaagatagtgatggatgggagactgagtctgtggtttctgagtcgcgtgtcccggttggaaaatacctcgtgaaggaaagctttgctcccatcctgagatcca

SEQ ID NO: 91775 - DNA, 134 bp, Glycine max
atatcccccacgcgccgccagtgtcaccaaaccatcagcagcagcagcacgtgattcacggcatgacaaacatcctcggatccggcaattccgatgactactcccgaccgtccttgttcggagaaaacatcgcc

SEQ ID NO: 91776 - DNA, 243 bp, Glycine max
  unsure (1)..(243): unsure at all n locations
actgaatctactagcccccacaggttctaatgataacactaacgaaaatccgggggagggagggtaaagaaaaaaacttcatacaaatgcggtgtaaaatttcttcctgttccgttatatgagagagagagactatcacccactcacccagagtattcttattggcttattcagaaaatatcggcctgctcttccacacaacatagattcaggncgatattttctgaataagccaattcgaat

SEQ ID NO: 91777 - DNA, 245 bp, Glycine max
  unsure (1)..(245): unsure at all n locations
cgctgctaaggcagctataatgttgcgccgggctattcagcgtgctcggctgcatctgccagcgcccattggccacgataacggcggcggtggatcatccagcgatgaagaagattattctgtgagtcccagcgttgcatacaccagcctacgtgacgacgaatcagtccgtgatcatttccgcaagcgtccggaggagntttctggtgtgcatttgattattgcggaagaagcagcaaagacaa

SEQ ID NO: 91778 - DNA, 232 bp, Glycine max
ggacaaaggaaaaaatgttgaagttggattgtcatccccaaatacattggaaagtggatcaatgttagtaggcgtatcttacacttctggagaggaaaatgctagttggactgaagataaaaaaaatttgaaagtcaatacttctggcactcaaaacatggaattaccaatttcagtacctgacagagggccttctattgttggagaaattataagcattggtggatctgac

SEQ ID NO: 91779 - DNA, 229 bp, Glycine max
tatgtttatataaaccgttatagaagatgataaagaaaaaggtaatttcaatcagcagttactactctcaacagtattagctaattgaaattacctttttctttttcttcatctattgtatgtttatataaaccgttatagaaggtgttcatctacgaaggagttagattttttttttcttttgttgttcatttataaaattctcaccgtaagtgtatatgtacgtgta

SEQ ID NO: 91780 - DNA, 225 bp, Glycine max
  unsure (1)..(225): unsure at all n locations
aaatatgttgtcccatagctggtagatgtcntaaaagaagaattggaacaattttttggtaaagattctattgagtcataatcctatgtcaagaattgtgtctccaaaccagtttgctcggcttgtgaatctcttggatgaggataaggtatctgacaaaattgttttgggaggtcagagggatgagaagaaattaaaaattgccccaactatcatattgggtgt

SEQ ID NO: 91781 - DNA, 184 bp, Glycine max
ggtgcaagcaagtcgtttgagcaggctctcaccatggccgattagggacacagacgaccagacccagatagacgactcggctagttgaggactgtcatgccgactaccagtagtgcgcgaatacgatgtacagccgtacaccgagatcgactccatcgtgctggaacgaggaagacgcggaaga

SEQ ID NO: 91782 - DNA, 233 bp, Glycine max
tcgggctcgagggtttagtatcaagggtaacaagacttgtgatgtgtgcaaggaggaggttcggaacctccctgtcactctcttaaggatccgaagtgttcgagctcagaatactagagcaaggtccgaacagggagatgacttcagggcttggcaggaacttccagtgcttgtcattgtcagcatgcttgcctatttctgtttccttgagcagctgttggttggaagaatga

SEQ ID NO: 91783 - DNA, 215 bp, Glycine max
ggttctgctgacagtcgtttatacaagaagaagtgatgcatttgctgctcataaacgctatgataatgtacttatggatggtaagcccatgaagattgatattggtggtaccaattcaggggtgccgataagtgctcgggtgaatgtgactgaggcgaatgggagcaggaagacgactttgtaatgacgcctagaggtggccaagctggaggtgg

SEQ ID NO: 91784 - DNA, 172 bp, Glycine max
cagtttcatttcttggtgttttctatctgttgttcaatgtttatgggcaacatcaataatattatctcttactatcaatcttccttttgtttggaaatggtaatataatgatgttgattgctggacaagcaattgtagcttcttacttcaaatgtacctgacatttgaatct

SEQ ID NO: 91785 - DNA, 250 bp, Glycine max
ctttcttggggggtgagtagaattatgcaaatatatgctactgcttgaaatgaagttagctactaattgttacagcacaatatttcttattcaattgttctgaattttactatgtgtgccaattctacttctttacataggattaaaagaatccaacatgaacgtgaaatgagcaaattatagaagtgtacttgaaactacatgaaacaccaaaacctttatctttaataatatgaatcattccaacaaa

SEQ ID NO: 91786 - DNA, 252 bp, Glycine max
tatcgattcagttaaatatggctcgtttgctcttcccaagcctgaaagaagaagcaaatggagagtggttgatggggttggcgagaagcaatcagttaccaccttagcagcaactaccacaagttttgatgataacgacgttgttgactcaaattcggctgtggtgaggaatttctatggaggaatcaatgcgcatgacgtggattctgtagagtaccttatggctgagaattgtgtgtatgaagatcttgt

SEQ ID NO: 91787 - DNA, 244 bp, Glycine max
ctcgaatggccgaggcttgacgctggaggtggcgtcattcctcgtggaggtcctgggggcaagaaggcgcgtgcaggactgcttgcgagtcctggcgtacgcgcgggagcagggcatccgtcctcgcatccagtcgtactcgagtgcaattggctgctgctacagggaggaggagtttggccacgctctgcgtatgttcgaagtcatgcgaaacgatggatatatcccgcagaccgtgacgtac

SEQ ID NO: 91788 - DNA, 245 bp, Glycine max
gaaatttcgtccataaacgctgcagactacacccactatatagttatgcttcaaaagtttggtgtcactctgggaaaaccaactgagttgtagtaacaagcttaaaggctacataactggaagataaagctgcgatcaaagaattgctggaagacgaggaaaacccatatgataatactatgggatctactctactaagcttgagcctgaataactcagggcaaccccttaaccaaatggggatg

SEQ ID NO: 91789 - DNA, 239 bp, Glycine max
gcagattacgactcttcgtcccctaggccactgacttcgtggtacttcgaacggcagcccgtttaattccttgcctcctccgagcgcggtatcgaaaggcaacatgaatatcaatgaaccagtaaagggtcgcgcatttgcgctccccttcaccaaggctgccaacccaaaagcgaggttgagccatgacgaaatgcgtttgccgtttctcaacaaagtacctgacaatattcgcaacc

SEQ ID NO: 91790 - DNA, 241 bp, Glycine max
cggtctccaagatccagtcgagcggcagaatgtgccaaaggccagtccgcgtctttatctgcatccctcaccagcaattctccgatactcggctcttcgtccctttcatcaagtagagagcagcagtctcgtccgaggcgctcgctccatagagctccctctgcactcacgcaagccagcctgcccctccttccgatcacgaagcatgcacaccatactcgcgctcgcagctttcaatctt

SEQ ID NO: 91791 - DNA, 223 bp, Glycine max
ggctcgaggcgaggccaagcacctcgagttacacgagtattcgtgcacctgcaagcgccccgtcgacacgtgtgacgagtacaagacaaagaacgagtgcaagtggcagaacaaggactttgacccgcacacgtgctcgtgtgtcgacaaggtctgcgacgaatacaaggtcaaggcggaatgcaaagccaagcacctcgactttgaccacgaaaattgctgc

SEQ ID NO: 91792 - DNA, 236 bp, Glycine max
ccaagttctcattaacgtcatgccatgccatgcaagccaatgaaaatgagaggatgggcggaaccccagggagcgatgaatcagcaactatgcaacccccaaggtcgcgggatgacagatcatgcttcccaggacctacggtacactgctaagcgccgacatcgcgcctggtgcctggcctgaccgaacttcacagaagatcaacgaaaaaagagcaacaacgcgagtagtagtag

SEQ ID NO: 91793 - DNA, 233 bp, Glycine max
caagaaggaaaggttactcaaaagaagagaaaaggtgataagtctaaggatagagatcagagatcttctataaagaaaagcaaaaaattagaggatcctagccacggttgttatgatgttaatccagttagggatgatgccatggacctgacagttgaagatttgatggccatagcagaacagtatgttaaagattatgagaacaaggatcgaaaagaaagatcaagtagaca

SEQ ID NO: 91794 - DNA, 234 bp, Glycine max
gttccctcttcgtagttactccgatttcttcaatttcttacttaactctaaacaatcgacaaaacgtgacacggtgaaaagatcgtagttttgcaccctccactgtttcactacttttatggattctgtggtagtggattcagacaagggaaatgaagcagaacatagctgtctagaagaaagtataagtatatttggcggagttgaagttcaagagccatatgtgggcatgga

SEQ ID NO: 91795 - DNA, 229 bp, Glycine max
  unsure (1)..(229): unsure at all n locations
aaaagaattgttnttatgtttttaattgaaagctgtttcttttctttgtatgcaatgatttttctttccatttttttgtatcatgaaccatgttaggaatgtgagcatcctttggcaccacgacagagaaaatatgtacgagttgagttttttagatctggctggcaaataagagaagtacctggtagcaatgcctgtgagatcacaatgtttcatcaagaagatgctg

SEQ ID NO: 91796 - DNA, 273 bp, Glycine max
gaaatattggatgatattggcacacgtagcgtcaggtttcttgttcgtgatatgccttccgttttaggcagttctggcagtagcaatagctacttgggaggcagctcatagcatatgggatgtggtggacaacatcattgtgaaaattcaagtcatgctttgacaagatgatgctaatttttcacaatcttccaaaggctctgcaactggaggagtttgaatcataggcatagcctatgccaattgcaaagcttcttcgtttctatctaaact

SEQ ID NO: 91797 - DNA, 266 bp, Glycine max
aatcaactaaaatacggactacagaaagatcacatgggtgaaacaggatcagcattattggacgattcttggatttctgctgatagctttttgcaccatctttgcaaggtatttcactgatgttaactcaatattcagtgaacaaatttgatgtgtgacctacctttcttaattttaagaagctagattggtgcctattttggtcagttatggattttaagatcttgaaattctgaaagtggaagtcagaagttcatttcttcgta

SEQ ID NO: 91798 - DNA, 261 bp, Glycine max
ccaaattcgatcctattctctaaaatttccagagcagatggaagaaaaatgagaccaacttgtatccattttaaaaaataaaggacctaattgaacattttaaaagtaaagagacctaattgaaccattttaaaaaattacaggatctattgaaccttttaataataagtggaccaaattgaatctaaaaaacaaattagagaaccaaaatagtaatttaaacttttttaaaacaaggcaaacccaagtttttaaatttaa

SEQ ID NO: 91799 - DNA, 258 bp, Glycine max
gttaaatatttctcaagagtgaagcacaatttaacttgcattatcttgatatcctcccttttttttcaaaaaatgtccttctccctctaaaaaattattagatggttcatattattatgttcttaactaatctctatatgataagtaattaattgttattaactttttttgtaaattaaaatctttaactgttttttgttagcgctaaaaatggttgacgatcaaaatagccattttaaaatggctgacatgtgccca

SEQ ID NO: 91800 - DNA, 255 bp, Glycine max
attgaattacacctctctttcatgatgaaaaaatcaacaacaccaaaagctgttcctatgccgggtcatgcagtttgatacattctttgtaaccacagatataagttataagccatgaagaatgaggcttgatgagctttctgcagacagcaaccgtttgtattattggaattcaattatagattgtggggtatgtattgttgcataaactaaggcacttttaactaactagaagtgctttcttgtagatgaagt

SEQ ID NO: 91801 - DNA, 252 bp, Glycine max
ccaagggtaagtaaaatacactgcttgagaaggacacttactggaccatggtagattatgtgaatgtgagtcattgtttccaagtgacatctacacgaaggaagccattatgtcataagggctggggtatatatatgtatgtgagacgtgaggtaattgcagtccaaaactagatagggtggtagctattgttagtgttattatgtataggaactaggagagttgagttgtacattaaacttgtatctttgg

SEQ ID NO: 91802 - DNA, 258 bp, Glycine max
ccatttcacaagccaaagtgccaaatccatctttcaactttcccttctgtcttcactttcagcttcccattgttcccatttcaacactctaagcacacaaaaaacaaacctttttcacttcctctgcaaaaacccagaattctcagacaaattctgacttctggggtgtggttcaaattttcacctgaaacagaaagtctcattttttaaaacatgagtgcaagtgacgacacatggggtgaattggcacaattgaga

SEQ ID NO: 91803 - DNA, 222 bp, Glycine max
  unsure (1)..(222): unsure at all n locations
ctattctggaagcatagtattccactatactcgaagtacagttctagttcaggaatagtggaatactattcctgaaccaaaactatgcttccagatgactttgtgtgtgaacaaatattttaccttatccatcttcgcaactggattagctttgctgaaagatggagtgatattagcttcatgtcctcanagtagagtgatccatgtggaaatattatattg

SEQ ID NO: 91804 - DNA, 261 bp, Glycine max
ctctcctcctcgatcccaattccactagggattcaattccgatgcgattccgagcttgttagatccacgacaacgtttcagtttcccagattcttttgtaaaaaaaaataatcttcctttgcccaacaggtaagttggaaaaaaatggaccatgacaagactgggtgccaagctcctcctgaaggtcctatattgtgcatcaacaactgtggattttttggaagtgctaccatgaatatgtgttctaatgccacaaagaca

SEQ ID NO: 91805 - DNA, 257 bp, Glycine max
gcctcagctgcttcatcgtggcgctgcaggagatgagggagcccaaaagcctcacataacgtgaacaaggagcatgaagaggttctacgctccaaaccctctatccttgccctcagcgatgagctcgataagctccggcaacctctcgccaccgctctctccaaagagctccaaatcaacggcacatcttcttaaaaccctcaccatgagactgagaccgaaaacgaaaccttagttgagagctcgactcgattgag

SEQ ID NO: 91806 - DNA, 258 bp, Glycine max
aagtagctgtggtgaagcaaaaagccctattagtaatatatcagcgcaagaacaaagcagccaggatcctgcgggttcagggggaaagacgaatgagaatgtgacaagaacttccaaagctgatcagggggagaatccatctaggaaacaccatccttcccagaaaacaatgggaagacacattgggacaaactcaatggaagacatgccttgtgtatttacaaaaggggatggtcctaatggagaagaattgagggt

SEQ ID NO: 91807 - DNA, 246 bp, Glycine max
actcgagccgattcggctcgagggatgaatcaagccaatccaatagcattcaatatacagatatctgggctcagagagatgcaccggatttatgccatgaagagttaaaagagatgcactgtgaccaagctcatgaggcatcaaactcatcaaacatcaaggaggatagaaaaactgttaatgtggatgaacaaagtgatctcaataccaaaaagtcttcttcaaaccctgcacaaattgtgtttt

SEQ ID NO: 91808 - DNA, 249 bp, Glycine max
cagctaaagagggagaaagagaaacctatgtataacttcttcacggggcagtgaacgatttattagaaagtcaaggaaaagaatttgtcctaaatagagaaaaaataaagtatttgtaatagcactataccttgattaccttccatccgtagattcctttccagcatcatcggattaatctctctcttctaacactcccactgtagttcgatattattctatccaaattcgaaagttttttctcacaca

SEQ ID NO: 91809 - DNA, 244 bp, Glycine max
aaaaaaaaagattgcctctttgattcactgagtatagattaagtttgagaaacattgttatgatacttggagttgatattgttttgtgattttatttttttaatataatgaaggaattagcatttatgttatgttatgctaggcagaattaaaggaacatgaattctgatggttgttgtgcttattttttgtttttgctaggttttgatgacatggatagtatctttgctctcctgacgatttt

SEQ ID NO: 91810 - DNA, 242 bp, Glycine max
caaagcctcacaaactctagatcaatatcttgctccgaaagttcaagaaattctagttttagagaaccttcagacaacctgaccttagaggagccgttgaagttggatacagcagcagaactgtaatcaagagatcaacacttgccatcaaagactacttccactccatcaattttgcatttactgaaactgaatgctccagagtggccctatgcaatacttgggtcagtggtgcaatattg

SEQ ID NO: 91811 - DNA, 264 bp, Glycine max
cggtcatcctatgcccttattgagaatttgagaaattggatggagaaagggtcaaggctcaaaatatggaagcagtctgatataactcgaaacattcattaacttagctctctgttggttttccagttttcatcatgtcatcatttatgtgtgatctgtccattcctagaaaatcggtcacacacacacacaacacttttagaaaatcatatattttaaagtaatatacagtgggtttttgtagcaaggttattttatgttaaa

SEQ ID NO: 91812 - DNA, 255 bp, Glycine max
tacatacaaccccacacccacttcgtcacaatgccaaccagacccttctacaccgacgacctgtcccccccgctgcgcaccgcccaagtgctcggcctcacggctgccgctgctctagctggcaagaccttcggcgccagttacggcaccatccccgccttcctccaagccccagcgcccttgctggcccgccaatggtagacgctgtccgactcggacacactgctcgctccagtcatcagtctcctatccagt

SEQ ID NO: 91813 - DNA, 255 bp, Glycine max
gttagtttttttttaggttaatcattgttagcctggaagaaaacaatttctttttattattttcttctgaacattattaattaattgcatatatcatgcaccaatataaattattacatattttaaaggtaattctcatgacattttcatttgaaatatgactccttaataagattaataatggcttaaaagtaagcaatattctatcataatatgctcattctcctgtgaataacaatttcttaattttttctt

SEQ ID NO: 91814 - DNA, 258 bp, Glycine max
gattaattgtcacaaaatttatttaaatttacatgcgtattaaatatacattaaaaattttagtcttatatatagcaacatgatttattttagaacataattaacctattaatttagttggttaaaatgttatgctaataacctgaaagtcatagattcaattcttgcttggatcattaattttaaattaattcataacacgtttttttaaaaaaattaaaaaaataatttgggttgaacctcatatgcgatgtttca

SEQ ID NO: 91815 - DNA, 245 bp, Glycine max
tgggatttacctcatgtccctaaataagaaaagagataaaatattgtccaggaaaaggctcttgttcatatattttgttgatgatctgtcaggttagtagatggtcttgataaaaccaactggtaaaagggtgagaaaagtgaagaagaataacactcaagaaattgtagaacttaattaattaattgtatcccttagtcagttggggcatcccacaaatagtgggatttaacttctagttcatt

SEQ ID NO: 91816 - DNA, 249 bp, Glycine max
cgaacctgttctgttctgtcacgaggtggcactctcactcactcacacgggtgtctcataaagttttctgtcattaaacacttcgtggcagtttcctgctacaaacaccgtttcatttcacacttcacaaacaactacaaaaggatctccacacgcacactcgtccctttcttcattctcttctcttatgtcactcttctgatttctttttctcatctctcagagacccttttgagtcatgaagcaaaa

SEQ ID NO: 91817 - DNA, 265 bp, Glycine max
tttccaaactcccttcgtgtgaaggataagtggaatgtttcttttctccaaattttgccaactgattaaggcttacatcccaaacagagggatcgttttggccatagatttgggtttgttagatgttggagcgtatctgatattcgtatgttagggatgaagttagacaacatttttattggagattggaaattgaacgttcatgttaccaaaattgttcaaggggaggtgaaagtgcaacgacaggtcagtggatatggaaaga

SEQ ID NO: 91818 - DNA, 265 bp, Glycine max
tgcagtcataggaaccaaatgagtaattatacctattttgtatattatctcttctacactttgtttctctggttgcatgctatgtaatagtgtaagtttcctcaaaactgtttaggaagttggggttggagtatgtagatcctatttgattcattggccactgaggatgaaacctgaagccaaagggtaccataatatattaaaggagaatgtgcttccctcctttgacatgaaaggaatatgggaagctatggaagagtgttac

SEQ ID NO: 91819 - DNA, 260 bp, Glycine max
cgtcgatctcgtcgccctcgagcaagaagccaaggatgccgtcgaagcgtattcaagctctctgtctcaaattttgagcattgaagacgaggagaaaagtgatcgcaaggaatcagctcaatcacgcaggaagagtcacgtagaacaaaaattattcctgacaatcttctcccaagggttgcaattgttggaaggccaaatgttggcaaatcagcattatttaatcgtcttgttgggggaaacagggcaattgtggtgga

SEQ ID NO: 91820 - DNA, 256 bp, Glycine max
ctagagtagaaacacagttttagctattagcttaacttatttgttctgctaggtagttgcagtagttacagatgtaacagtcaattgataattaactgattgccagactggcattattcatgattattgttcagtctagtggttagtcaggataaatttaatctgaatcatctgtaaataaatagcattgtatccctcttaaaatagcatgatgagatcattctaatttgcttgaggaactctcctcttttccttt

SEQ ID NO: 91821 - DNA, 250 bp, Glycine max
gcaactccgcgacatcggtgcgcaggccgtcatcgacgccggtctagcggaccaaacacacattgagtacctatttgagagtgtctggtacccgtggatccctacaccatactgggcaccactaccgaacgctcctacatctccgtcacggcttctagcatggtccagctatcccgctgtaccgtgaccctccgcagtgcctccatgtctgatagccccctcattaatagcaattactatgccgacccca

SEQ ID NO: 91822 - DNA, 257 bp, Glycine max
gaattattgttcttcacttgcatcaaaacttgcaactatcacttggccttaaaaatggtacgagataggaaagaactagcttttgcacgagatgggaataacggtgaggagaaaaagggcggcatagctttgcatctcttggctcaaaatcaaaagcctttggatttttgttgtcattgccaccaacatcaaattcccgtcaagataaaccctggcatgaaacaacacgtgtttcttcaattggttaattttctctg

SEQ ID NO: 91823 - DNA, 209 bp, Glycine max
ccgcgatctctctatagcaggtgtacataagcataatattcgttggtagtgatacatccaagaggttttgactttgaatgcagggaagatggattctttcaatgcaacaggaagacaccatctctttgttccatggccggttaacattccggatcagatcatccgggccatgaacagaaacaacgagtgactaccgttctccagcaatt

SEQ ID NO: 91824 - DNA, 237 bp, Glycine max
ctgaaattaaagatgtagactgagtcttcacagctataacatgttggatgactacactgaacaccaatctaattaggttaaagaacaggccgtggcttgcattttccgttgtattgaagacacaatgaatgacacacattcaagagagaatagtgtgatgagcaaagtaacacattctagagaggagtgtggtgagcagagtaacattgcaattgtaatataagttttgacagtaat

SEQ ID NO: 91825 - DNA, 232 bp, Glycine max
caagaagactgtgcgggagaatcctaacgagtcttccgcagaaaaaataggaggtggaagccattcgctaactgagaaggaaaataatcaagttgaggcttcacctactcagaagccccaagtttctgaagatctacaggagaataatacatctaaagatgaaagaaggtcaactcctgaggtaaattcagtgactgatttgtccaaaaagggtgctacagctgatgttggc

SEQ ID NO: 91826 - DNA, 230 bp, Glycine max
atttccaaagaggttctgtagatgaattcatttttgagggtcctaaaattgcacgacttaaggctcttttggtcagtgttgaatcaggtcaggtcagtggcgcctaggaagtgtatccttaatggttattaattgtgaagggcaaccatctggaccggaagatggggtaccaacgtacactggcttccagtatgactttcagattgatgatgtgttgcttggtgagggag

SEQ ID NO: 91827 - DNA, 235 bp, Glycine max
gttgtacttgcatgttggcggtgttgcattctgcggtccgaatgccttggtggttacgctagagagggtgctgggaaacgagactgttgctgagctattgactacaaataagttgtccgaattggcgtggcttggcattgtatctgatgtatgagaaagagcaggggacgaaatctttctggtatccgtacatcagggatcttgatcgccaacgaggtaggggccaactgtctgt

SEQ ID NO: 91828 - DNA, 256 bp, Glycine max
tttagctcgtagtgcggctcgagctgttgtgggggtgagagattggggtgggtgtcatcagagagatggtggcacgcattgctgtttcttctccaaagtcgacactgttgtagaaccccatcgtgttgtgtgagtcaagttcaagttgggttggggggtcgttgaagggtctttgcttcagtctgaaacgaaggcaacagagaggagaattgaccaatttggttgttgcttcatccacctcaggtgttagaaatag

SEQ ID NO: 91829 - DNA, 271 bp, Glycine max
cgtgtagtagcgtggaattgggatcgagctctagaaaaaaatctgaaatgccatgtgctactgttgagctctattgatattgtcggtatgattcttcgtacgaagaaggcagttgatgagcagattggatttgggattatgaaaaaatggcgtgcaggggtatgcttcgttccagcattctcatagaacccagcctactccgttctttaaatttcaattctaacaaacatcacatagcttcactcaaccaatggtcttgccggtttcattc

SEQ ID NO: 91830 - DNA, 235 bp, Glycine max
ggagttcggcacgagatggtggacggccaagatgtgtaaggagaattgacagttgctactcttagcgttgtgattctaacagaggagatagagtgggtaatcgttgtcacatgggtaatgtatgaacctcactgaactgttttcagagtctgataatacgtccaataagggcgaattagatgtgggttactatgatattgcatgagtatatcctgggttttgatatataaatctg

SEQ ID NO: 91831 - DNA, 233 bp, Glycine max
cttatcatgagtggtttcataaaatgtacattcggaactaacattgaactcctattctgtttagcaaggatactttccttcttttacccaaaaaaatatatcatttcttaaacagacttccaaaatttatgaattatcatttttaatacctctgagaattggcttttactgtctagaaagttcaatagccgatgctgaaaatctcatctatccaatgtttatctgttgtatat

SEQ ID NO: 91832 - DNA, 253 bp, Glycine max
ctctctttttattgcagcaccatccaacccttctcttctaagtgaccaacttcatttcatttctcacacatggcgaggcctcttctcagtaatcttctactctcctccatgcccatctccacacttttcttagctatactctcagtcttgtgtgtattttccatcatcacttttctctgtggttctgacatactgaagaacctccacaaagaagcagagaaagcaacaacaagatcatcgaattcgaaggagc

SEQ ID NO: 91833 - DNA, 247 bp, Glycine max
gaaagacagaagaaggtcgagaggaagaattggaagtaaaacgagtagtagatacagggcaagaagttgttctccgtgcagtattgaaaatagttatgaagtgactgaggagaaatccgttggtgagaacaattccagacggttacgatcagttattactgttacaaaagaggcggaagaatatggggaattgtatagaaatgaaaccaaggaggagattgtttatgatcatgattacccttgtaga

SEQ ID NO: 91834 - DNA, 246 bp, Glycine max
agaagggataaaaagagactctaccaaacagttagaacatcacaatacaaaagaaatggtaatgatgaaagagagtattattgaagtgaagcttggaaggagccaaatgtctatggtagaaggtgagttccaaggaacatggggtgtcaagagacgacgaagagaggttgctgcagcagcaagcagccgtgatgataaccaccaccagcagtcaccacagcaagaagttggtgaaaattcttcaat

SEQ ID NO: 91835 - DNA, 240 bp, Glycine max
atactgtactatacatcttagtatacaatagaagagagaagcatatttgaagtgtgaagtgtatgggtttgaaacgatagaaccaaaaccctaatttcacaactttcccgatgacgaaggtttacggcacggggttatacgatttcgggcgccaccgcgtggcagagtaccccgtggcggcgcgccatcggagtcgaaagcggaagttccaaaggcaggcggcggcggcggctttccaag

SEQ ID NO: 91836 - DNA, 242 bp, Glycine max
ccagtggtgattatgtgtagggtcgtcgtctcgctctggctctggctctagggtcacattgtgctcttctctagacctctctttgtactctcgctccagcgtatggacgtcgcattcactgccttccggtcaccgctgatcattctccgaggaccaggcctcgcgtctctctcagctctgatcggttccactagtgggatttccagaaggcaactgttcagttcggtatgtaatctcgctct

SEQ ID NO: 91837 - DNA, 244 bp, Glycine max
cagaaattcaaagtcaccttagtgatgggactgatgaagatctaagaacttttcctgcgctagatccaccaattgaacaagatgattctaatacaatgtcagtggcagttggtaatgatttcgttgaagacaccgtactgtacgggcttcagcatattatatcaaaggcaaactttttctacagttagacatcaaaataagactctgcatcagagatagtttgttccggttggcacaaagtgca

SEQ ID NO: 91838 - DNA, 246 bp, Glycine max
cagtaggtagtgcagattctgagcaggagagcaactctggacctgatttggaacaagctattttaaagcaaatatcggatgaaaagctacaaatttatgatgaaatcttctctgaagcacatgctgaaggagaggatggatggcaatcagttcaaagaccaagatcagctggctcatatggccggagactgaagcagagacgggcagcacttggcaaagtttatagttatcacaagaatgtggaag

SEQ ID NO: 91839 - DNA, 236 bp, Glycine max
ggctgaacccagcaatttggatcaatcggacgtcgtatagatcgtattcgtagctaggacagggcagcatgcacgacgaacattcctttcccctcctcgcccaattccccctaaccatctccccctttctctccctcccaacctccacccccctcccctacacctacaaaaccctcccctcgaccctcccaccttcaatcctccgatcccccagcaacccttcaaactcctccgac

SEQ ID NO: 91840 - DNA, 239 bp, Glycine max
aaaaggcacagatccatcattggctgagttttattttcgtactcatcgaagaaaaaaggatcaaagttgggtgggtcctcatgcagaatctgcttatgataaatttgaacagaggaagactgagttatcttctaagagttcaaaatttacttcgggggaaggtggaactgatagtcaagctgatagtcaaccatctatgaatcatatgccatcagactttgatatttgggcagattcgg

SEQ ID NO: 91841 - DNA, 238 bp, Glycine max
tgaaccaacacccttttacttgatattattattgtaacgctactttaattaggaaaatgccggatgttcaagcccttgttaatgattttgtgaatctgcttaagaaacgaattgaagggtctcaagccacagcaaagcagacagcagtgttgctacgctcggtgatttcacagcagcgggtgccacacacaaaccaggccacagttctgattaatgcagtaagggcggtgggggagca

SEQ ID NO: 91842 - DNA, 244 bp, Glycine max
cccaaatgccacgaacaaacacaactccctagaagtgatacaacataccaagaattgttttttggctattttggtttccaataatattggctgctactcctactccattttgtttaggctacgcggggtgtgtcaaagttgaaaaaatcaattgtaatagagcaaggaccacgctgccaaagatagaaaatcaggatttggccgcgttcttgtgatcctcttctctctccatgtctttctcaaa

SEQ ID NO: 91843 - DNA, 242 bp, Glycine max
gcttgtttgattaattttgtttttataatgaataatctcattttttggagagcttctaaaaaggaagtaaaaatagtctatttcctaacaagaactaagtcctagtgagattgtagtgtccttgcagttgcagattattcttttatggctatgtgcttatgttccttgttctctccctaaaccaacccatttatccgaaataggaatgcttcccaagcctttaaaacttcagctctgtgtta

SEQ ID NO: 91844 - DNA, 251 bp, Glycine max
atcagacccgagtgccgccacgtacctctcgaaccgagcagcagcgtacatgtcctcgggcgactttacctctgcgctcgcagactgcaaagccgccgactcgcttgatccgcgaaacgaaaagaccctcctccgcatggctcggatccacacatctctcggtgatcccgacgctgcgctcaaaatcttcgacactctgccctctgacctggccgccaaggaccgcctgccggcaacaaacatgcagaatt

SEQ ID NO: 91845 - DNA, 260 bp, Glycine max
aaaaccttcatactccatttgtgacccctgtagctgaaacatgtttgtgttataaatttttagaatgagaaaggtctaatagtatagaaataaggcagacaatatactgtgagtctgtgacagaagacaaaagagagaagaaagagggtaacatgtattgtgatagaagaaaaacatacgataatgaggaaatgcttagaaaataatgaagaacgatatggcctcacttgaggcatgtgtgctgtgacaaacaggttgag

SEQ ID NO: 91846 - DNA, 199 bp, Glycine max
gctcccctcgagctcagatctgcgagatctacttctgcttgtgtgtgattcagacttggcaacatcggatctggtctcagccatagagatgtcgcgtagtctggtggtccacttcggcgtgtgcttgtggtcgttggcgactctagtctatgaggccctggtggtaagctgtttgagtgggcagccctacgcgctccat

SEQ ID NO: 91847 - DNA, 166 bp, Glycine max
aaaaaatggcatggaaatgaccccttctgatttatgtgccttgaaagagatattatgttactcaattcctccctgtaacatgaaagatgaatgcctgaacttccacttgttctgacttatgctgcaacatgagtttttaattcgtatgactaatttattctagtag

SEQ ID NO: 91848 - DNA, 248 bp, Glycine max
gcatgattctgaagctgtcaaagatttgggggatatagattcggatggatcaaatacatgctcatctgttttagaagagatttcagtctgcatggaagagcaagatgataatgataatgatatggctaagtccagtccttgtccacatttgccaaatggcttttcttgctttgacaaggattcttctgtttcagtggattatcaaaatacaagggaagattcaggccataaagatgtgactaaatgca

SEQ ID NO: 91849 - DNA, 179 bp, Glycine max
  unsure (1)..(179): unsure at all n locations
gaattcggctgtaggcaagtcggtctggaggatggagtggcagactagcgctggatcagcatatgnacacagaactgccgtggggaacgagaaatcgtgttacatacccagagggctgggagttcatgcagccgacagtcgtgaacttcaagcacagatgagggcagttagaatgatcc

SEQ ID NO: 91850 - DNA, 252 bp, Glycine max
cgtttttgtctttcttggagtggtgatattggctgttataatataccaatttgcattaatgtaagctttgtgtggtttgtatgagtctatgctaaaaaaaaaagaaaaaaaaaaaaaaaaagaaagaaaaaaaaaaaaggggtaggggagtaaagagaaccggtgcatcgagtaagactctccgctgtaagccagtggccgcgtgcctgcagactgccacaaaagacgtgtgagtacgcgccgcaggcttgg

SEQ ID NO: 91851 - DNA, 255 bp, Glycine max
cgctttagccacgatgaaggtagccttactccgatgactaaagcagattttaaattttaagatcaaatttgtaaccccacccctcccctccccccaaagtgtttagaggactatcatttttgtgcggaggtaattgtggggatgtgtattagtatttgctacttaagatggaattgataaagttcccctggctaaaccaaaaaaaaataaaaaaaaaaaaggggggccccccacttagtgaccccgtgacccggg

SEQ ID NO: 91852 - DNA, 253 bp, Glycine max
ttttccttatgtcaagtttaagtctttattactatggaattattcttatgtatgattatctattccttttctatatgtatgttctttcattaggaagatggtgggaaaaaaatagaactgaagccaggatttttgatggagcatgatgaagatgttggagcagttgttgttgggtttgatcgctacttcaactactataaaatccagtatgggacactctgtatacgtgaaaaccctggatgtcttttcattg

SEQ ID NO: 91853 - DNA, 250 bp, Glycine max
gaaaatttgattccaaaatgggatttcttcttgaccacaggttacccaaaatctgagttggttaagttccctcaatattttggatacaatttagaggaaagggttaaacctagattcacaattatgaaaaaatatggagtgaagttactgctgaatcaggttctttcactgtcaagcagcaactttgatgaagccttgaaaaagaaaatgaagaaaatgcaagttagttaggattctagtcatagcagca

SEQ ID NO: 91854 - DNA, 195 bp, Glycine max
ggagggttcttctggagtctctaagttctccgctcatgtatctcttacgggggcttctgccctgaccaaggctgagggcttacatcatgaactctaggtattatgcaatccgtgtgacgagtgtgtcgactctctttgccgtgtactgctattcctgtccgactgagtttggatcacactaccgctattgaccgt

SEQ ID NO: 91855 - DNA, 254 bp, Glycine max
tgcaagttgccttacagcgggtttacatcacatgagttggctgtcttattaaaaaagaaatttgtaaatttgacaagtttaaattttgactactgtcaatatttaacacacataccagatgtattttgtctcccacatttggaaaatttgtcatttcaatggtgtcaaaatttatctgcaattcactattcagttgggttcttggaaaaacttaaaatcttagacggagaaggttgctccagacttaagagttt

SEQ ID NO: 91856 - DNA, 245 bp, Glycine max
ctcaatcaacccaaccaatcgatcaaccagccaatatgtctggagacgaaggccccaccaccgcctacacatggcagatctccgcccaggaccaacagggcggccccggtctcgacaaggacatgaaggagcaggccaactggacacagctcgagtactggggtgacgacggcaagccatacctcaaggagtacgaaggccgaggactcctagagaacaaagccgtcctcatcaccggtggcgat

SEQ ID NO: 91857 - DNA, 196 bp, Glycine max
agatagaaccgtgctttctaatcttgtaattgtctgtgtagcttcgtggttaatgcttcgtgttactgtgatgcagctgttgtatttgtactacactcctatataagtataactaaagatgctaattaatattcaattggactacagcagatggctgatgatggacatatggttactctaaatgtgtatgacttga

SEQ ID NO: 91858 - DNA, 154 bp, Glycine max
tgtgagagagaagggattggaactttggatatctatagcgaaagtgtgacaacaacaaaaaccggactggttccaaattttttttttaattcttcaaacattcgaattccaaaaccctaccgaaacaaaactcaatcgaaattcttcattctct

SEQ ID NO: 91859 - DNA, 239 bp, Glycine max
  unsure (1)..(239): unsure at all n locations
tgattcttccattgagagcatttagttngctcttccttgcttctttgtatttaaacactaggttgtaaaacatttgatgtttatctgtattgcttgtgccaaaataatcatagaactctagtgttgtaggaaccacaactagggcatttgtggtagagccagtggaagggggtctctcctttcttttcacaatcattacataataaaacctgagtttgactagaaatctcatcagaaat

SEQ ID NO: 91860 - DNA, 218 bp, Glycine max
  unsure (1)..(218): unsure at all n locations
aggggaacattcaatgctttttgatctggtgccatctttgcaataccggcagtganataaaaacatattgagatgaagacacaaaataatgtagaagattcgattatgatctaaagtcactacctacctgggctagcagctatactctcttgagcagcatatttgttaaattgttaatatctgtctctctctagcacttttgaacattcggcagctac

SEQ ID NO: 91861 - DNA, 238 bp, Glycine max
gtaaaaataaaaaataaaaaattcaccttggccttgagaatgaacttgtctgggtagcctttttttttttaatttagcttgattgctcattgctggcattggcttataatttacattataaattattttagggatcccaacatgctgcgagacgtgctgctagttttgtgcgaggagatgatgtccttcacaagcggtttacagaactggcttatcggtacaaggatagacctggagg

SEQ ID NO: 91862 - DNA, 222 bp, Glycine max
tatacatctcgcaacaccagaagtctgttgtcaatctcgactgccgttgtagccaatcttacatcatgatcttccttcgctccatgtcgatgctgcgctcggcactctacggccgcgcactttcggcgggcctccgtggccgtggacaagtccgcttcgacgagctcagattacgcgcttccggtaactggcaaggcagctggagagtgatgacagtggcaa

SEQ ID NO: 91863 - DNA, 234 bp, Glycine max
ttacagccatgtatgtctctggaaatgacatgatggacaaaggcgtttcaatatatattttgaacttggcattggtttctctactttctgattctctcatcttcctcatatcctggggattttttagttttgtctttcagctaccaaagtccatgatgttgtacccttattgaagtaataatctgagaggaaagagagttgctgccattattatcagttcagtgatatttcttt

SEQ ID NO: 91864 - DNA, 157 bp, Glycine max
tgtggttgtccactattctggtaatactgggttttagttttgaggttgagagaactttgttttattacaccatttcaaattgcatgcgttttgtttcagaatcgcacactttcgagaagccagtaaagatttataattaggaaactggaattgatga

SEQ ID NO: 91865 - DNA, 236 bp, Glycine max
ctccaccttcatcaacccacgctagcttttcccttttccatgttggatcacaacccttctcacaagttttccccgattccattccaaccttaacaacaacaacacaccccactcagcacttacttccaccattaaactctatataatcccacaattgcatactaactcatctttctaacctcaaagtactttctaaacctgggtcctctctctccttccgatcttccttaacaaca

SEQ ID NO: 91866 - DNA, 229 bp, Glycine max
ttgaagtgtatgttttgtcataagcagatatttcacttctaatggatttcatttcattttggtttgtgactcagttcaattgatatattattctctttgttttcagcattcacaatgttcgttgctattaccttcccattcttcggtggtctcctaggattttttggaggatttgcttttgcaccaacaacatactttgtaagccaaatacattggtgaatttaatcac

SEQ ID NO: 91867 - DNA, 201 bp, Glycine max
  unsure (1)..(201): unsure at all n locations
ggatggcgacatgtgggcgcagaaggcgacgctgtccggaagcgcttactcttgggcatttatttccagcttaacttcagtgattggaaatttcgcaacactctctgtcaatcaggctgacttctcgcgttactcacgcgtgagcgtcaagtggcagatcatctacgtcnccttcttaccgcttgtgttcacgttcatcgc

SEQ ID NO: 91868 - DNA, 249 bp, Glycine max
gtagcataaacctaggtggtcaaactgctttagcattacgattacttttggctactttttcatcgaagatctcttcagatattaatcgcccttttggtgatgagtttcgtgctgatcggaaagcttctgaggaaattggtgcacaaatagttttaggagatcggccaattgaaataacgcttcaaagagcatggaaggctatgaaatggactcagaaactaagtttagtgttatcaattattcggggga

SEQ ID NO: 91869 - DNA, 247 bp, Glycine max
gcaagttgtaagtggtaactctttcaactcggccgtgcaagttttattggcagcgctggaaccatcttctcttctcttcacctacgtttttctttttctctttctctttctcttactctttctctttctcttactctcttcaacactttctcaaatcccttccttcttcgctcttgtcttctctttcaggtgcaccttccagttaagcaggagttggataattgttggacatagatgaaatagtgat

SEQ ID NO: 91870 - DNA, 244 bp, Glycine max
gttctcgcgtctcaatggctgcttccaagtacgatttcaagatcgagccccaagtcgacgcccaatttccagccgaaaaaggtcgttaccatctttacgtggcttattcatgtccattttcctgtcgtgcactcgcagcccgcaacctcctgggccttgaagacgtcatcagtctgtcggtggcacaccccatttttcagaagaccaagccgaatgacgccagtaacgaccacaagggatgggc

SEQ ID NO: 91871 - DNA, 250 bp, Glycine max
cttcgtaaccatgttgctcttggttgtcatttacttgcagcaagaggtaagtttttagccttcaagcattatctccgtcctgaaggattgcctccattacgaacatatttactgaagggattggctcccatggtttcagtatgcgaatataaagatagtttttgaattaaagctatgttagcatcttgaatcaagtgcaatttgttgaattaaagcaaaatcatctatgttggcatcttgaatcaagtgc

SEQ ID NO: 91872 - DNA, 249 bp, Glycine max
gtcctataaaaaatattcacaaccaccatagttagaatattgtcctaattggggtagttaacacaagtccctaatcattcttataatgcccatggatttagactctacacttgcttcataattgggtggttgttgttgttgaaaagtattgtatgtgtggtgcacagggcagagattaatataaagccatggcatattttgttgggagggttgaaagaagacactacgaggataccatggctgaacaga

SEQ ID NO: 91873 - DNA, 243 bp, Glycine max
atcaccactctgtgtaatgtaagcatgtctttgaagtcagcttgtttctatctacttttaaatttttagtaaattgagattgagggtgagggctgacacaacatcaagatttttatttttaaacatctatccttcctacactccattttggtaggagcttcgtgcagagttgcccatataaccatattataatcttctcttgttctttaaatcaaaggtggatacccctttactcatacacct

SEQ ID NO: 91874 - DNA, 245 bp, Glycine max
atcgcctgccaggctgccactgttcctgcgttctgttcgggtgcttgcgtgtctcggcgactctgctaaccgaagatccactctgtcacgcactcaactcacatcagggtctcggccaaccatcaacccacgcctttctgtctctgactccacgcctgctcagctgcctgcatggatgccggcgctatgcctttgagataggcgagtgaggcaggtcagagagcgacaatccacctcaacgcaga

SEQ ID NO: 91875 - DNA, 244 bp, Glycine max
gtgggtttaagaagcgtggctccttctctctttctctcagttctctcatttcttgccttctctatttattttaatttttaattgtccgatttcacagccatagcataatcctagcaacacagtattttttttattttcttaattaattttccgtccggattcctgtgtgtcatctctcaattttccagttttcaatttctcccaaattctttcaattcttcctcaatctttctagggttagggt

SEQ ID NO: 91876 - DNA, 241 bp, Glycine max
aattcagtccacaatttactttttccactttcccctaacctcccactcggaactcgtcgttacctatcgataatgaatttggggttacctcgctcacatccatcgttcgagtggaagcagcagcttgtggccgatgttgactctaaccccagcgtgtcgcagaagcagcatcagatttccaaggctggagaaaccgttaaggagaagattattttagtgcaagagaagaatattcgaagac

SEQ ID NO: 91877 - DNA, 239 bp, Glycine max
ccctgcgcgacctgatcgcataagtaaaataaggctacaatttaagactttcctttcagaagcaactggattttaccatgatcttattacgaaaatcagagctaagtatgatcttcctcttggttactttgacgattcagagaaccggattgtgatggagaaagatggaaagaaatctgctgcgatgaagaaaggcttagtagcttgtcatcgttgtcttatatacttgggtgatcttg

SEQ ID NO: 91878 - DNA, 260 bp, Glycine max
gggtgggtgtcatgttttggttcttctgattgtcttctttgttttagcttcttctggggtttgtggcctggtcttggaaattggttttgtgaagtgggtacaatgggtatcgataccaatttggtgaccactgtcattggctttggtttgagtgcaactttcattgtttttgtttgcgcaagaataatttgtggaagactacgagagcgaacacggactatatatgaaattgaagcaataacagatatagaacgggcaga

SEQ ID NO: 91879 - DNA, 111 bp, Glycine max
gttgatgcgcaaggatatcgtctccacactcaagggtctcgcacaacggcttggaaagcgcgaaatcaccgatgcggatatgatcaagttggccaattacatggcgccgaa

SEQ ID NO: 91880 - DNA, 253 bp, Glycine max
ggcgtatatgatgataagttcactgatgacccctccactgagaagaaaatgcttcaacagtatgatgatccagctgcagaagagggtttaactttggatgaaaagggacgattctcaggtgaagctgagaagaaacttgaagagctgcgaagaaggttaacaggtgtttccacgaatacctttgaagatctaacttcatctggaaaggtatcatcagattactatactcatgaagaaatgctaaagtttaaga

SEQ ID NO: 91881 - DNA, 255 bp, Glycine max
aagacccgcagcaagaactatgaaagtactcataacaggaggtagtggattacttggaagagctttgatgaaagcatttgagggttgtgaaacccttgggcttgcattctctcgtgctgatccttcgaagaatcttgttaaatgtgacctgcgtgaccctgctgatcttagagctaaaattctagagtttaagcctgatgtaataatacatagtgccgcagagcgtagacctgattggtgtgtccaacacaggga

SEQ ID NO: 91882 - DNA, 249 bp, Glycine max
tagacctaccatgaaacaagttacaaggtacttgaactttgatgaacctcttcctgatattgttgattggggacatggtgtttctgggagcagtagattgagttcaggtttcttagaagttacgtattctatgggaactgttgaaacattagggtatttgtcatccattagcatgagtactaagtccatagatgctggtaggcagcaaataatcatatagtaacattttacactttaatgtatatttct

SEQ ID NO: 91883 - DNA, 237 bp, Glycine max
cgccatacgtggctgcaaattttatcgcggccagagatggcacgctggcagtgcgacccgactcgctgctgtggaatgtcacggatcgtgcccgtttcgcgcagttcggcatcgaccggccgttcacgttcctcgtgtactgtcctgctatgtatcagccagcggtgattgcgctgcagctgcgtatcgaaacccaacagtccatgctggccttcaactcattgctggcgtcgcggg

SEQ ID NO: 91884 - DNA, 187 bp, Glycine max
ctctcatccagatcttgcaggaagatcactggtcaatagcaattctaggatcgaattccacgcgagtattccgtgcaattggtaactctggtgaaaatagccattgcctacgggagttgagcaagctaatcggccacggactctcctgctgcctcttcatggctgcatacactggtgactgataact

SEQ ID NO: 91885 - DNA, 231 bp, Glycine max
attaattcatcactgtatgcatattctaaacttgttgggaacggcaatagaattgaagcctctggatttggttcattggttctaaaggcttaattggttaattagtgggattagttttttggttcatacatccttttttctttttggtacgttgttgagatattgtcagatttgatctggtcactttttacttcccagaagattacacactgcgagactttctcaccccat

SEQ ID NO: 91886 - DNA, 233 bp, Glycine max
ttctaaaactgaaagaaaagacaaaccaaagcagattcttggactaaaatccaatggtttaagggtcttcatcaaaaaaaaaaaaaaaaaaaaaaagggggccccccgattagtaacctcttcacccggggattaattccgggccgggtccctgcagggtaaccattttccccaaaagggagccgttttaaaccttggcgaaaccagggccaaacctgttccctggggaaaat

SEQ ID NO: 91887 - DNA, 212 bp, Glycine max
gtaccatgccatcggcaatcgtgataaagcaagtagatggcaaaccaggcaaggtgtactaccctctcgaaaagatcagcatcccagagcaacagccacaggtaaatgatacggtcatatccctaacggcagtcgactcaatcaccgcgagctcttcattcgccaacacatctaccccggcacaaacttcggcgtgtcccttctcgccgacg

SEQ ID NO: 91888 - DNA, 233 bp, Glycine max
ccaaagatgaactggggaattgactagtgcggcgcgctcctattatcaccgtagacggcggaggtggcggtggtggtgtagacacggcgtgacggcgatctcttgagataaatgttggttgaaagaggaagaagaagaagagttgtattgtagaatgagccaaccaacggtgatacttgccactgcgagctatgatcacacaattcgtttttgggaggccaagagtggccgtt

SEQ ID NO: 91889 - DNA, 225 bp, Glycine max
gtatcttctcatattttgcttgcttgtattttatggcgaaggaaatgactcattttcaatatgtttttatgaaaaatttatctccaatatcttctattatattttcttgggcacaaccaaggacattctaaagtatctatacatagtgaacttgttgccctgcatttttaattcattcaactttgtcttttatttctttttgtgtttgtgggatttaaggaagag

SEQ ID NO: 91890 - DNA, 227 bp, Glycine max
ggctcatctacaggtgcttcttggtggtggaggtggtggtggataccggtcaaatagtgtagctgcagccgtatctaatgctgctgctactgatccattcctatcctcatttattttgaacttccctgcttgtgaagctgaagaaatttcaaaatctgtggtaacaagtgctgagaattcttctgccaaaaatgcgacgcctgaacatatttggaaatcaagttttg

SEQ ID NO: 91891 - DNA, 263 bp, Glycine max
aaaaaagtgtgcattaagttgaagataggtaaatttaagatgaaaggaatgaaattataagtgctcacatgtttggtagttgagagatttgggcagaaaaattcacttcaaactaatgttttttgacaatcactgtttcttctgtatttacaaactcaacataaatctggagtttgtgttcctattgtgatatatgcttctgcattctgattgcagctcatgcattataaaacactaggttcgtttttaagatagtgttactt

SEQ ID NO: 91892 - DNA, 267 bp, Glycine max
gttgtttttttcttcttcctattcaaatgttgcaatttttaatgagcttaatttctatgcacggtcactaacaaaagttttacactctcaaccaatcataaaatatatgataggtgtgacgactttcaaggtagttattgtaaggtttaattgttaagcaatcagaaatcatgataggtgtgacgacttgcaagaaggcatttattgtaaaaaccaacaaatttaccatttatgtcaaattctaattgaatgacatcgtaaagtgtg

SEQ ID NO: 91893 - DNA, 262 bp, Glycine max
ctcgagccgctcgagccggttctttcatcaaggaaagtcgaacttttattgggttattttgtccgctgtattcggaggctcagtgatttagagtcttcagatcccctgacaggagtagatgaaaatagtactgaagtagtgcctgattttgagaaatatatattggagctacaacctgctgaaaggggaatgcaaagcaaaatcattgaagcagatctggtattgtggactgttggcaccaagcctcctcttcctcagctgg

SEQ ID NO: 91894 - DNA, 266 bp, Glycine max
gtcacaatatggggttccgattcaagagtaatccgcaattacgcagagataccagtgcatggagttttgtttttcgatataataatgatgcattatgaccaagttcgttatgtagtacgaatgaaagagtaatgtgaacacgtgcatgcgtttttgcgtaatttgaactttgaaatacatctagggtttggctggtggggtctaacaatcgagcttctgaaagtgattggaaaaattagattgcaatctcttcgaatctaggtgtg

SEQ ID NO: 91895 - DNA, 262 bp, Glycine max
ctcgagccgtgttgctacatgactcccgtattactctctgaatcgggtgcgaacgctggcgataactgggatggcgcaaacttggttagggaaaacgcgtctatgaattcgaatttgaatgctgatagttctggtggctcctatggttatggaaatttggtgagtgtggaagagggatggctgcgagttcaagagactgattcggacctttctgcacccttgatggatcgtggaatgaatgtccagctcggtaggggggaag

SEQ ID NO: 91896 - DNA, 274 bp, Glycine max
tccggattcggctcgaggccagatctctccctaacaactcaatttaatgtgttacaatattagaggtttaaattatcagttggatttataggaacatgtagactttggtttgatagttatttgttggaatttggtttttttgtattattgtgtctagtagtgggttgcattgctagatggatgttatgattatccccccagatgatcgacgctgaacatactgagcgattttttctctttcgagataccaagccaataaatctgatccatttaa

SEQ ID NO: 91897 - DNA, 260 bp, Glycine max
gacgccgcgccaagcgacgaagagcgactccgacagacccagcttaactcgcaaggccccgagcccaaggcgcccatctggcagccccaagcacaggtcgccgacaagtggacgttgtctgtgccgccctccgagaagttccgcatccagtccaccgtcccggagatccgacctggaatcgtccgccggatacgcacgtcgcgtcccgagggcgagtcgttggcggacaagaacggcgaggtggatacgttgatcggggc

SEQ ID NO: 91898 - DNA, 228 bp, Glycine max
tgtggactcactacctgcaacagtcaaataacagcatgggatcatgttaaaactggctctcaatcatttcacgttgagttgtattccatatttgctaacaaatgtagcaatatcatgccagagaggatattaaaaaggacagacaagataaaactggatttctattttgtatgttatcaaagtgagacattatatattgcacttttagtgctacataaaacacataaa

SEQ ID NO: 91899 - DNA, 263 bp, Glycine max
gtttttgaaccaagtgtacaagcatgatgaaaaaaaacatcagatgggttgtactgatgtaggtgttggtaatatggcaaaaatcatatatacatgtatgatagcctcaattcatagtccttcaacaaatagggatattagaagagtctgatagagcattctgcaaaggtataggttggccttgagattcactgcactcaacttttttccttggtttttgttgttccattgggtataaagcttttatttttcaactgtgaaca

SEQ ID NO: 91900 - DNA, 245 bp, Glycine max
catcagcgtgccaaaatgaaagagttagccaagcaacggactaagcaactgcaggaagaggaggaggaaaggataagaaagcaaaaggctaaagctcttgcaaagttggatgagttaaacaggcgttctcaagcaggagatggatcaacagagaaagagtatgctacaaattctgccatccagaataagcaagaggaattacgaccttctgaatctacaactgcagcaggcaaatttgcacctgt

SEQ ID NO: 91901 - DNA, 252 bp, Glycine max
attaattaatactgtagtaccatctcttcaatgtgaataaaatcaatttaattaactatgttgactcttgataaagatttatatatgcatcaaggctcaagaccgccaagttaactttaattgatttctattctgtaaataatcaagaccatatatattttaattaatgattaggtgcaaagaagtgtagaagatccaagtgtgttggtaacaacttacgaaggggagcacaaccatgggcaacaacatcaa

SEQ ID NO: 91902 - DNA, 241 bp, Glycine max
ctaagttttcaaaaacaatatataaggtgtttggagctcaagacagattatcacattggttggatctgtctcaaacttatggaatgtcaatatgaactgcaaattgattcaaataccatagacttgaactttgaagaatgtgttaaaagaagtggaaagttgtagcaatatgtggatggctgtatataacctggtgagaggtatgatttccttgcagaagagggatttagtctcagcagaa

SEQ ID NO: 91903 - DNA, 238 bp, Glycine max
cagacggacataatcggcataccgaaacacgaacatgcgcaactcagctctcgtcatcgtcgcactcgtcttcgcccaggcagtggctctcaaccttcccagcatctactactactcttacacgttagtcaacaaggactctaacgcccccttcggccccagaggattcggtgaagaggatggagtgaactctcactacgtataccaagacggaacagactatcaagagtcatggagt

SEQ ID NO: 91904 - DNA, 239 bp, Glycine max
taaggacattgagaatgatcttgatgctcaatcacaggattgctacatagcagtggaggctttatgtgaggttttgcatcacagacagcctcttattgtctattttccggacagttcacaatgtttacataaagccgttcctaagtcaaacagaaatgagttttttcataaggttgaggagatgtttgaccggttatctggccctatagtattcatttgtgggcaaaacaaagttcagt

SEQ ID NO: 91905 - DNA, 234 bp, Glycine max
gacgagtatgccttctgattgatacaaagtggggtatgaaaccaagagatcttgaactaattgaattaatggaaagatcaaaaactaaatatcagattgtattaactaagacagatgtggtctttccaattgatgtggcaagacgtgccatgcaaattgaagagagcctcttccagaacaagtctgtagttaagcctgtgatgatggtaagctcaaaatctggagcaggaattc

SEQ ID NO: 91906 - DNA, 235 bp, Glycine max
gaactagcctaaaacccttcccctccgccccaaacccccaacaatgcgccctctgttccgtttcgctcaattggctcggcgccactacaaggcgtcgccaccaccaccaccgccgaccccaccgaagcccccgaagaagccacagaagttcagcttccacggcgcaacgtgggcggatccatacagctggatgtcgcagctgaacgacaaggtggcgatgcggcacatggacgtg

SEQ ID NO: 91907 - DNA, 250 bp, Glycine max
taaaaaacagaacaagaaacagagaacatagcaccctcctctgttttgaaacagaacaagaaacagagtgaacaaagaaccatcgccatgcttgatccaagaacacaccaccccaccaattcttttgaattgtacgacgcagcaccacacaaacctcacacatgggaagctacgaacagttccggtttgtggccttcgaaaccagctttcgaggaggtagaggttgatgattccggaatatgttcacctc

SEQ ID NO: 91908 - DNA, 246 bp, Glycine max
ccttcttcacggttcctcttcctctcttcttctctgttagaaaccctagcaaacactgtatttcgctctcgtttttctgcctcgttccgtgatcactgactctgccatggctggtcctgtttcctcgctcggctacgtcaatacggaaaggaaattccttaagcatatccgtgacaacgttcacggcaacattttgctggagccgatattcttgagctttatggacacggaacaatttcaaagact

SEQ ID NO: 91909 - DNA, 242 bp, Glycine max
gaatttgagggcacattctcattaagcatttttagcaaccattcgaggctcaagagtctgctaattggcaatatgtgagttcgcactgacaatccgccttggatcgcaccattgcagttggagcaactaacaattacctcttgcaagtgaaacttacccacatgagtaattccaactgtcctttcggatcagagtagcttgagagatattgatttatcgggtaacaacctagttggtaaatt

SEQ ID NO: 91910 - DNA, 242 bp, Glycine max
gaggggctccaaggctttgctcaatttcccagctgaaattgttgctgctgctactgcaacagagttatctttcaaaagtagtagtaataataataataataataataataacaatcccgactgctgtttctgattccagtgctggtagctcttgcacgaacaattccacttgggtaaataggaatcagtcagaaatcacaagtggcacaggttagctaaatggtgttgaagttgaacaatta

SEQ ID NO: 91911 - DNA, 243 bp, Glycine max
  unsure (1)..(243): unsure at all n locations
gattcaatcacgcagccacgatattccctgcgcacagcaccactactccctcggtgctcctccgtttccactccaccgccgactcctcgnctctctctctctctcttccaccaataacccgctctctntnctctctctctctctaattcgaagctgaatccgaattcaaaccgtggtggtgacgtgtttcgcatagnctctgcttctagtcgcggcaatgggcttagggttacggctacggtg

SEQ ID NO: 91912 - DNA, 239 bp, Glycine max
cacgtgattgacacagcaccatggactggctggctgagaattgctgcgtctttgctacagagcctcatcttccttaccaccatcactgtagttgcattgggggccacgtcctcggcagcaatcgaacgacaatgggatctgccgtatcttgaacagaccgggcaaacgccactgcctcagacctcatatacatctacgcacgaaatgaaagtacgaatccaactggtatgcttttacat

SEQ ID NO: 91913 - DNA, 217 bp, Glycine max
tcgggttccggtcctcgcactcgtcgttgaataggttttcaagtcgacctcgcactcttcccccactctctctgcagcttgctctctcgatctcagcaaaaccagatagatatctctgaagcgagcaaatccgagggttgctctcttcaaatgggttagccatagctctctcgtcacgtcgagctcaaatgtagttcacattcagcgcactgcgcat

SEQ ID NO: 91914 - DNA, 237 bp, Glycine max
aaattatgttgcttcgtggctcaggcaactgcattgtaaaatttatgtcgtaacttggggatagcagtgtaatctttttatattctcaattcctattccattcaggtagaaaataaatagattacactgctatccccaacttacgacataaatggaataggaattgagaatataaaaaaaaaaaaaaaaaggggcggccgccgattgataacctcttggacccgggatttaattccg

SEQ ID NO: 91915 - DNA, 238 bp, Glycine max
agaaaagaaaaaatttgtcttataactttgcaacttatggttcacttcttcttcttcgacttctgcattatcgtggtgctttgatattattctattgagtcaaaaaatgggagttccatagagggaccctctcgcactattgagcttgcctcctgggcttagggtctaccccacagatgaggagcttctggtgcagtaccgtttctgtatagtatcttgccatcattgctctcttcca

SEQ ID NO: 91916 - DNA, 241 bp, Glycine max
ggcccctggtatgacccagacaacctcttgccactggcttggcccctggtatgacccagacaaccaccaccaccaccacagagcagactcttttgaactctggactcgagaacagaagaatgagccagggatacgtcgagcctttgatcgagaacagaagattgagcagaggttacgaggagaccaccctcagctctggctcttactccaacgtagctggaaaccgcctcagcgtcacccg

SEQ ID NO: 91917 - DNA, 260 bp, Glycine max
tggctccaaaaaatctctttctgtctcctcatctctctcattctccttgttacttgcactgctttttccttccaattccatggcttccataatagtgaaagaaatctcacccgtgaaggggattcaaatgtcacacccaaggtatacttcagctcaccaaaagagaaaacaacattgttggccatgcattttataacaaacccatcaaaatattagagaaaacaaattcttcagtgccccaaacaaaattttcctccttt

SEQ ID NO: 91918 - DNA, 257 bp, Glycine max
ggcgacgaaggactgaagcttttagcatcagaggaagagggtgaaggagagagagagaaagtgagagaaagagacgaagacgttcaagacgacaacactcaagacgacaacgttaaccatgaatcctgatctcatgaggtcctaagcatgcgtcaaaaagaaatgtcgtaccatcaacttgcacgtgatactcggtcccattcgctcccattgccactcaagacaccgccgcactcactcgatctaatgcgtcacca

SEQ ID NO: 91919 - DNA, 254 bp, Glycine max
tcaccactacgagtttctctctctagaaccgccgaagcgaagaagagagatgagagatgagagaagagaatcacggttggctccgtcctggacgcggcatcgcagctcgtctcctgcggaatcgatcccttcctcgcgccacctctccttccccgcgccaccgccgctcaagcaaccttctcaacctccgccaacgctccagccgcgtcttcgccgtatccgccgagccgaaacccgcgccgccgaagaccgct

SEQ ID NO: 91920 - DNA, 249 bp, Glycine max
gtcgcttcattaaactctcttatcttcttctgccccttttccacttcaattaggtacttcgccgattcgattcccaatttgcttaaactcaattaagctttcctgcgtcaatcattcaattaaaggtgttattagtatcattcttttttataatccatgtaatcctcctacttcatccttagttatcttaggcatcaaaaccctaatttcacatccttcacgcgcttggtcttggtattttctctgcgc

SEQ ID NO: 91921 - DNA, 244 bp, Glycine max
actagatatgctaagagccagaaggatcaagttattggtcaaattggacttcccatctttatgggggcattcacatttgttggtctagctgttacttcatccacaaaagtgatatttggtcaagttattctgacccaattctgcttcttggtcaaattggtggcctcacaactaagatcgttgcaatccttggtataagccttgcaattatcaccaccaatattgctgccaatgttgtggcacc

SEQ ID NO: 91922 - DNA, 246 bp, Glycine max
aagcaattgaaatgcttacgaatgagtacataaggtcacagctagacattgtattaggtgaggagcaattggattgcataaaggctttattctcgggacaaggagaacgtaggaatgcaccatttgagggaatccgaatcttcaaatcacaagctggatgagcatgccagtgtatgaagcagattttggttggggaaagcctatgtattttggtttggcatatgtgtctgcacaagatagggcagt

SEQ ID NO: 91923 - DNA, 261 bp, Glycine max
gtatgacattgcagagtctgatgtgcaagttgcatgtgtggaggtggaggttgaagcatgcgtagaaaaggaattgaatggagaagaggtttctattgatgcgccgggtgaaaatagtaatgaatcatcatcagagattccaagttgggagtggattgttctagtgaacaagctcatgaggtgatgtaccttgctggcccagaatgtgaagaagtccatgtccatgtccacgatgaagtcttgcatggtgcaactgtactg

SEQ ID NO: 91924 - DNA, 266 bp, Glycine max
ctcttcttgttctcttgtgtgcgctgggtgtgaacagaaggtaagaaaatggaaagagggaaaagtttttcaaactcctcactttcttaaatcacttctctatgaaagtgaggagtttgaaaaattctctgcaagcttgacaggcttgtcacttatgcaaatttcaaggtaatgatgaagaaacgacacttaaggagacaaaatctgacgacaaatgtgcggagccattgaattctatgaggacacttttagcacaaattcataat

SEQ ID NO: 91925 - DNA, 266 bp, Glycine max
cggagaaggagctcagcaacagcgcaaagacgctctaactgcagctcgccgcccgctagcccgcccgcacgcatgcgcatatgctcgctcgcaccgccactgatgctcgaggtggcgatttgtcgtccgtctgttcgcgttaactcactagctccgactcggatacgaacgcacactctcacattgggaaaaaaaaaaaaaaaaaaaaaaaaaaaaaaaaaaaaaaaaaaaaaaaaaaaaaaaaaaaaaaaagaattcacaacaaa

SEQ ID NO: 91926 - DNA, 274 bp, Glycine max
cagttcgatcgatataagtctcattagcgttcgctccttcgtttgttgcccaggagcctttcattttctctatacccattggttaaactctcagactgttcattatcgatgctaataaaagcgtgtgctcctttgatcactggtcttcgtctggaatggctggagattcgatgtggagtagttggataagcagtcgagagttgttctcccaacgaatccggctaacgtccttccgcacgccggagtttagaccattggcgctagaaataaatag

SEQ ID NO: 91927 - DNA, 263 bp, Glycine max
cacggagccagagaatcaatgtgctggagcatgtgctaatcatccatgcccatctaaaccatgtaccaacgtacagtgtcgtctcctgcccggtaacgatgtatctatcaacggcagagtatgtgatgaggtatctaactgcctgagagtaataattgtttcatttatcaatgtctgggaacacccacgaatatcagcaatgattatatagcattacccggtccatatcaatccatatgtagtaatagcagcaacctctgtta

SEQ ID NO: 91928 - DNA, 257 bp, Glycine max
  unsure (1)..(257): unsure at all n locations
ggaacatccatgcagtgcagatgtggtgacgaaatagctgatgctccaactctgcgcagactggtctgccgcatacggcaagcaataaatgaaaacgagaacgcccccacgatccaggcccctaatcgactcgccgctaccctgctcgtcgacgcagtacacgagataanaacgacgacgaacgcgaagccactctcatccaagaagacgatggcccgacgagagcgactgcgcgcatcactggccngactccgggg

SEQ ID NO: 91929 - DNA, 259 bp, Glycine max
atgattcaatagatggcttggaggatggaacatcagatcatgcaactagatttaatttgcctagtcccaaggggagaaaagtttctccattgaataagtacaaacctgcaaacattacaaagaggagaaaagtgaaaaatggagtcagttggaagaggagactctaaggactgctgtagacaagtttggcaggggaaattggaagttaatcctagattctcacaaagatatatttgaagagagaactgaagttgatttg

SEQ ID NO: 91930 - DNA, 252 bp, Glycine max
ccattgacgacctctgcggcgattctgaagctgaaactccgctgctatcggagacgctatacggcgtcgtcaacttcaagggcctccccgtcctacgatctacctctggtggttggaaagctgctgccttcattataagtaatatatattcagtgtttatctcttcatcaggctgcggttgaatttcctgatcgggttctaatctagtccgattcccatgtcgaagtgacgaaacctacctggggaaggggc

SEQ ID NO: 91931 - DNA, 232 bp, Glycine max
cgataaggcaaaagcgcatttccgctgttgtatgtgtgagggtgccatgccaagccatagcaaccgtcagtctgccgccaccggtttctctgcgtccccctgcattcgcgtcgtccccgcctcagctgcccactcggtcgcagatcgctccggattcacttagacccgagctttcgtcgcatggcaatggcgatagtacgcggatcagctccaagctgagcattatgcccag

SEQ ID NO: 91932 - DNA, 260 bp, Glycine max
ttctccccatgcgactcacgtcattccccgccacattcctcacgctccaccactcacaccttccattcacaacctcacccaccaccatctccatttccatccggttctgaaaatacacataatccccaacccaatgcacctcaatggaccccaccacaccccaacaacaacaacaacaatccccttcacccattactaacctcaccaccatctccttcggaatcgctcctatttcctcacaccaataccttaaccctaac

SEQ ID NO: 91933 - DNA, 260 bp, Glycine max
aaccggcgcacaggcggccaatatcctcgaccccgactacgtgattggcgtgtgggcttcggctagccgcccagccctgcgcacactggtagcccccgacgccaacggcaacaccaccggtgcccaaactacgtcgggcgactacgtgcaagtgtcgcgcctaggcatgccgctcaccaacgaggtggtaaaccccatcggcaacaaagacgagtttaacgctcgcacgccttactcggagaacgccgcattccaagcca

SEQ ID NO: 91934 - DNA, 268 bp, Glycine max
atctcacattctgtgattcgggtaatggtgattagtggaggcgatgatgggcagaagaagcctgctctcgacccggatattggatgctccggaatgacccggatcacgagttcgactgaagttcgggtcgggttgcttgctggggtgctgagttggcctttcagcgagttgtagggtgaggtgaagactcatgttggatatactcagggtcacactccggatccgaattactgactggattgataccggagacactaaccacgttgaa

SEQ ID NO: 91935 - DNA, 257 bp, Glycine max
ctctgctgcagcagacgacgcaggtgcagattcgcttctttatccaagtcttgcagcagatgtccaagaatgtgcccatgtccggagttctgtcccctgcctcttttggagagaaggatcccatgacacagaagctgagcgatgccatgagcaagctcagcacgtgtgaaaaccgtcattccatgggtctcggtcgtcctccgccatccccgggtgctggaaaacgcaactcgggcttggagacatcccagatcaac

SEQ ID NO: 91936 - DNA, 254 bp, Glycine max
gcaaaaatagcgtagagatgctgaattagattccgatagggtttttgagacgtgaaaggggtaaaacacggtgaaaattgatttggacaagaagtttatagaggagaagtgtgatatagagtgagtattgagctgactttgttttacatacgttattggatgcagaggaatctgaaacagacagcgaggagtctgatgttagtggctccgacggagatgacacgtcgtggatctcgtggttctgcaatttgaga

SEQ ID NO: 91937 - DNA, 249 bp, Glycine max
  unsure (1)..(249): unsure at all n locations
cttgcagctgctggtgtacactggataatggcttctaaggagcacatcactagaattgttaaaccactcttgtttgtcctgcgatcatcgtctgcctcaagatatgtggtattgtgcaatatccaagtgtttgctaaagctatcccatctctctttgctccacactaccaacagaccancatatgctcttcagattcctatcagataaaggcgttgaagctggatatactttcttctattgctacggat

SEQ ID NO: 91938 - DNA, 248 bp, Glycine max
gccggggcgatgctgtttggattccttctttctaaatttcatcctgtaatctgcttaaaagttgcttctgggttaatgatggggcttctgcctgttacaattgttttcaattatttaaccaacaagctttccaccggtgttcttgaccgacctaaaccttcacaaacctgttgcagaacatttaatgaagattctgcattagatgccagcagtatagtgtttaaaggtctggaagccatcaagctcgg

SEQ ID NO: 91939 - DNA, 254 bp, Glycine max
atacttttgcgcatatccaatttgaccgagtacggctgagcgtcaaatccgcgctctcgccaaatcatttcgcggtcacgtcctcagaccactggcgcaatatgttggaccatacaatacccaactatctgttcatccgcggcgttatctttggcttccaagcagtcacacccatatgcatcttcatcgcgtccttcagcatagccgagccgccgcaatcgcccttccgccgatttctcctcgtatggagtctg

SEQ ID NO: 91940 - DNA, 242 bp, Glycine max
agcgatcgaagtttcacatcagccttatccagtttagggtttcggttccttaccctacctttgacgtatcgaaaccttaaatttgggattaggtctgagcaatctggttggtagaacctttggtcttagagagtcaagttttatgtctggattagacgatcaaattcctactgccttcgatccttttgctgatgcaaatgctgatgactcgggtgctgggtcaaaggagtatgtgcatattc

SEQ ID NO: 91941 - DNA, 242 bp, Glycine max
aattctattcacgcatccaccccgcaaggccgttgccatgatatctgccacctgagtgtcttcgctcacaaacactcgctgtcttctacagcgtgccgcttccgtacggcctttacctattctctcgacgtcacggcgatcacatagcaccttctctcaagcccaagcttcgcagagacttcacggcacccaacgacaaacagacgcgcaattttctaacagccagctgaagcatcatggct

SEQ ID NO: 91942 - DNA, 258 bp, Glycine max
atacttaatgcttaagccatggcatcctcatcctctctgcatctatctcaggcccttctggcacgtgctgtgtaccttcatctcctcttcttcttctgtccgtgtctcactctccttcccatcattctctggcctcaagtcacattctacatgcaaagcagcatcagccacgtcctcgcgtagaaggggtgcttgtccatccacacaacatacgacgtgcccttctacgcgtggtcgtggctgctgctgctttgcatt

SEQ ID NO: 91943 - DNA, 252 bp, Glycine max
ccatcatcgaatcttcacccctttgttattacctcaacaatggctcccgttacgaagcaatcatttctgctgtcggccttgctcctgactgcatctgctcaggcctcctggtggcacaacgacgatgccaggatgttgccacgtggaacgctgcccgcctcacgcagtggctgcgcgacaatggcatcgccactcctacctcgttcaccagcgagcagctctctgagcttgtgcaagccaattgggacgcag

SEQ ID NO: 91944 - DNA, 248 bp, Glycine max
agaacatctcttgctcttcccactttctctctctaaataatataatactcaaaatttatccattttgattgtatttttcttaaataacaaagcgcgtatagtctcacgcgcccgacgatgggttttccgtaggctacccggtgctgctggttccgaaaatgttcctcctcgcgctctccttcctcgcgtggctgcgctccctcgtcttcgccctcttccgcctcctccgcatctccgacctcctcgac

SEQ ID NO: 91945 - DNA, 255 bp, Glycine max
tctggatcaaatagtgggagtgctgggccttttgccttgaacaaaatctctgactgccggatgcgccacaagttttcaaacaatgttggtcccggtgctacttgtcggtctccaaacccgaattgctcacaggtggcccagctacattacgggtcagatgataatctcatgccatgagtccctgtctggtgtgcttaatctccagaaaatagtgtttgttgttaaaatgtgggtgcatccttgtatttgttgctt

SEQ ID NO: 91946 - DNA, 275 bp, Glycine max
caggtcaatcgacctggcgggacatcatctccgaagatgggaacatcgacatctgctgcgctatcgaacgagtatggatcgatgccgcgaccgaatggaatgccgagttctctcccatcacactccacgtcttcttcgatgtcgccaccccgcagtcgggcgattacggatcgatgccgcgaccaggatcggtatctctaaccggcatgccgaacgctttgggatcttctggaacggtcccgaggacgagttctccatcgccagggatgccaagc

SEQ ID NO: 91947 - DNA, 261 bp, Glycine max
ctgccttacgcttagggttttaagagtaagaaatgaaatggattgtctcttcttttttaaattttactggtaactcatacaacatactttttgttgttgttgaaaatacaacatacttcttttgcaactaacttgtacatttcccatgttatccgtattgcttccaatatagttatcctatcagtttattatttatttatatataaaagagtgttaacaatatattctttaacaccaccttaaaggacatatgtgatattt

SEQ ID NO: 91948 - DNA, 264 bp, Glycine max
ctcgagccggggtgagcaggaaagattccaaacagcaagaatcacccgtgctagaaggcgataatccaattggccgtctaaagcgggaagaggaagagaagcagcaacaaatcggcatgagtgtcgatgatggtagtctctcccaagctgatctaccggatgttgtcgaacatgcgcgaaagacgagtggtggtcccactaattttccaccaacaggcccgtttgcagtcgaaaccggcgatttgcgagtactaagggacgaaa

SEQ ID NO: 91949 - DNA, 257 bp, Glycine max
tgcatcttgtcattttcagattgtacaagttgatatacctcaatccttgtttgaggaacaaggaaggcagctttatggagccaacctattagaaatacaggtattggttgcaagttgcaccattttcaggccatcaggcaacttaaattccaacttttttacattactcgtgatttaatgcaaataaaaaaataaaagaaataaaaactctgctctctctcaggcaaaaatgaaactaaatgatcagcagctggcga

SEQ ID NO: 91950 - DNA, 253 bp, Glycine max
ggtactgattattaccatgcaaaagcattaatcaaagagatggaaacagtaggtctttcccctaatcagataagctggtcaattttgatagatatatgtggagcatcatcaaatgtggagggtgccattgagatttgaaaaccatgggtgatgctggaattaaacctgatgttattgcatatacaacagccattaaggtttgtgttgaaagtaagaattttatgcaagcattaacattatatgaagaaatgaa

SEQ ID NO: 91951 - DNA, 265 bp, Glycine max
gaggaatgctaatcagccctctaatgatgtaaataggcatcattctaggagaagtgatgatattggaagatttaattatagacagaatagaaagagaatggacagaagaaacactgggagtggtcaaagcagcaagcatgtacatgtttctcaatcagatcatacagctcaaccaacttctgtgttcattccatatgtggaccagtcatctagagcccatcctactgctgacattctgaccagaaggcaaaggaaacgtgaatca

SEQ ID NO: 91952 - DNA, 258 bp, Glycine max
ctgagatacccaagcaagggaaacaagctccagtgcttcatggtttgccagattttgctgaagtttacagtttcattggaagtgtatttgatccagaaacaaacgaccatgtccagaagctgaaggaaatggatcctataaattttgaaactgttttgttgttaatgagaaacctcactgtcaacttgtctagccctgactttgaacccatcaagaaggtattgtcaacatatgatgtcaataccgtggcagtaggaa

SEQ ID NO: 91953 - DNA, 99 bp, Glycine max
atcgcctgacttttagttagcatattgtcgacgagttcaagaatattgaagtttgcaccatgtataaacattttaaaattttgcttataaagttcgtat

SEQ ID NO: 91954 - DNA, 246 bp, Glycine max
agcaattccactgattaactgaatagccccctctcgctgatgcatctacagcagaagttttattggctgagcaagcaacttctgctgtaaatgcatcatctgtcacaagccattcagttaatcataatgatatgatccagagcaattccactgattctgttttgtctgaagtgttcacctcttctgggcagacagcttcgacgaatgccagacatcagagactgctctccttgatgagaaatcatt

SEQ ID NO: 91955 - DNA, 250 bp, Glycine max
ctcgagctgctcgagccgattcggctcgagcgaaagctaacgcatcaacttacacacaccatccacttcatctacttcatcatcaacaacaatgcaatcaatcatgaacatgctcggattctctcacaagccaccttcgagaagcctgtaaccaccactgaagtttacaccactgatcgagatacaacttacgtcgagtcttctctcgatgctgatcgaagagatgtcacatactctgagactgtcattg

SEQ ID NO: 91956 - DNA, 259 bp, Glycine max
attcgatctccgcgatccggtgcgtggagtttctctctcactctattagggttcaggcgttttgttctctctctctctctctctctcattcgattacttccaaattagggtttctgttcccgattcagcgcattctcccgattcgaattcgcaggatagggttttgttgttccgcgtctcgcttccgcgatgccgcgcagttcgaagcacaaatcgagcaagcacagttcgcgcgacgcgagggagcaaggaggagagt

SEQ ID NO: 91957 - DNA, 166 bp, Glycine max
ctcgggagatctagtaatgtggacttctgggtttgtctttgataagggagagggaattgttggtatggaaactgaccatggaattcttcgaataaaacttttgcctgaatgtgctccacattctgtttcctacattctggagctgttggcattgccacattgtgtt

SEQ ID NO: 91958 - DNA, 172 bp, Glycine max
attacggcaagaccaattctatggatttttacttggtcttgactcttgagctaacagcatttccatttttgacagaacttagtccacctgttagattgcagtctgttgaagcttctccgtgggatgattcgatagggaatgtccaagaatgaggggtaaggcgtaagaacta

SEQ ID NO: 91959 - DNA, 164 bp, Glycine max
ccctgctgtctttcttgatagcaggtgcattgatagtggggaacatgatgaggctggcatatgtgttttggcaatctcagaaattggcatttgttatttatggtttggtaatagtatcgaagaactgcgtaatgcaaaacccacaaaaatatccttatctttag

SEQ ID NO: 91960 - DNA, 159 bp, Glycine max
acaataaaaaagaaaaggagaagctttttcctctcattattcagaaggaacgtgtgttcgtttgttcggtggtgaattcctatccacacgtctcatcggaaacatgtcagcggtggttgctggttcctcctcttcattctctgccaccttcacccccat

SEQ ID NO: 91961 - DNA, 161 bp, Glycine max
  unsure (1)..(161): unsure at all n locations
atgggacagcttcttctgggctctgtctcctgtcgngtcccgtagcgcgcgcaccctaatggtcttcatcgccggcctcgtcgtctacatcctccgtgtcgcccaatggcacgtcggccgccgccaaacgctgacgccatttgagacggtcaagatatact

SEQ ID NO: 91962 - DNA, 165 bp, Glycine max
gaaattgcggttgaagactgtttttttaaaacgttggcattaattatcaatagtgagaaattttagtgggaaaaaaatgaaaattttagaggtgctacttgtggtcgtggtcatggttttgctgcaatccttgatattgtaggaaattgccaaatgccaaccaat

SEQ ID NO: 91963 - DNA, 110 bp, Glycine max
ctcggcttgcggtacgagctcacgccataccttaacagtcaccaactgggttgtctcactctctctccctgcgcacacaaatggtgttagcgttcttggccaatctctcc

SEQ ID NO: 91964 - DNA, 165 bp, Glycine max
acctaatctcccttgcaccttgcttctgccaatggccatcttcaggtcgtgtttgagctcttgaaagtggaccataatttgttaggagggaaggcttgctcttcattgtgccgcagtcgaaggaagaattcatgttatctcactgttgaaaccaaaacgtctaga

SEQ ID NO: 91965 - DNA, 160 bp, Glycine max
taaaattaactggagtaagttttattattgattttagtcaagactgttaatgaccattctatatatgttgtgactttttaattcttaaaaacatttttggaacttccttttgtcatattctcaatttgtattgggtaccgatactacacctgcatccatg

SEQ ID NO: 91966 - DNA, 164 bp, Glycine max
ccgcgtgacagcagccatgatatagcatccttcactccaccaacacagtgccgtcctgatcctagcaagtctgaggatgttcttgccggtttcgactgcctaccatccgagcccgcaatgccccgcgcatttccacccgtagagcaaaatgataaaacgaaacg

SEQ ID NO: 91967 - DNA, 158 bp, Glycine max
catgaatgggaatatggctgaacttgggattccttctactagtcagtccagatatttggttgcaggaatccaatccggcaattcctctataacagaagccattgcaaccaagggcagctttagcgtttttgttgtctgacagggggaattttttccga

SEQ ID NO: 91968 - DNA, 252 bp, Glycine max
gtttctaaacttcgccaatccctcaaactcgagaaagttttctgctttgcttcagacccatttgcagaagcgaaatcaaaacacataaaagattcaaacttgtgcagaaaaaaaatgctcactgctgctgcttcagcttctcggcaccttcttcaacgcgatgccagcatcggtgcttgcagtggcagtggcaatcgagttcgctctcttttgactgcttctgccatcaccacaacctacccaattcgcatt

SEQ ID NO: 91969 - DNA, 150 bp, Glycine max
ccatctatgcattctgcatgttggttctctgtagacagatactgcaaaagacgaataatgttgagtatgtggtcgggttgaatccctgggatgaagcgttgcagacatcacggctatgctaagagtgtcacgctctctcattcatgaccc

SEQ ID NO: 91970 - DNA, 219 bp, Glycine max
agccgatagtgtaatggactatgcaaggattaaagttaaactatacaggtaaatttccgttttttatggatatggaaactcactttttattgaaaatgatagcttcttcagctgttgttgctgtttttgttgacctttgtatagtaagtttcatgatgattgttcttggtaatagtagggataaaaactgttggctttgttatcattgtctactatttc

SEQ ID NO: 91971 - DNA, 168 bp, Glycine max
gaagcctccgaatcggaatgctgagatctgttccagcaccaacggcggcggaatcggagagaaagagcgcggcgacccggttagggtttccggcgatgatgacggagacggtcagacgatgaaggagttcatagatcttgaattgcggagaggtagaccacagggaga

SEQ ID NO: 91972 - DNA, 240 bp, Glycine max
catcgacagcatgaatttctccgatcgcaaagttgttttggagaccagcagcagatcgtggaatgttcatttaaggaccttctactccatcgctcaatacgttggtgcgacgatcgttttggcgggtctgggagtcagcatgagcgggaatttcaaaaaaggtgcgaccagcggcggcagcttcctcttcgaattgatattcttctccgcgacgatccctactgccatatcgggcgtcta

SEQ ID NO: 91973 - DNA, 166 bp, Glycine max
tgcggtctcgggtcgagctcaaaaaaaggttctagatggatatgactgatattgcgtagaataatcaagaagaatattaaattcaaatagattttaggtagaaaaaagacttaaagaggaggatttgaaatgcgagatctaaaagcatatctgtccgtggcaccag

SEQ ID NO: 91974 - DNA, 244 bp, Glycine max
gagacactcacctcctgttgcatcaacagttgctcccacaacatcagcatcaaacagaggatccaagtcaaccttaagctctgatcttgaaaaggagaaacggccgcctcagagacgaaagtttcaagaattgccagttggttcaaaagacacaacaaaactcaatcagagattgcaacctctaaaaactaatgaacaatctgatggtccggttgtgaggaatatatcaacaatgcctgcccct

SEQ ID NO: 91975 - DNA, 201 bp, Glycine max
tagcgtacacccaagtaactcgcctcattaattaacacaaacagtgatcaaggacacaggcaaagaatcttagaggtacgttgcaactggaaatccatggcaacgagtttgccaaaggcaaagcaagtgttggtggttgaaatcgacgacagtgatttcagcacttacgctctccaatggactctggatcacttgctagcc

SEQ ID NO: 91976 - DNA, 164 bp, Glycine max
gcggaatccatcgtcaaagcctccgccaccgcctctttcgggttcgtcgtcccctccgacgatggcgctgcctccgacgtcttcgcacccgacgactccgactccgccgcctggctcatcccgaaccccaatttcgggtccaaattcatggacgcccccgaaat

SEQ ID NO: 91977 - DNA, 238 bp, Glycine max
ttccctggcatgctgaaataattgacgatctcgatgatgggcttacgcttcttcgggcccaaacggacgttacaacttacaacgacgtcgtaaaacgcgggggacttaaaaaatggaaaagaggagtaacatgcaatgcatcatcacatctgagggagaggagagcattttcatttttcaacttgagagaagaagagaaggggaaaaggaaaaaaaggcaaaatgggtaaggatctga

SEQ ID NO: 91978 - DNA, 258 bp, Glycine max
tctctcacttggggttgaagatgagaatttgtggagcaggtatggtttgatattagatttcctttaatttatttggtggacttatttcctgcatgtttctgcacccaattctattaacaattcttggtcatcaatcagcagcagctacaccaccacgtccaattcccttttagtgtttgcttcctcttccctctccagtcctgcaaaaaccaagttcctgccctcactttctagattttctgtcaagcgtccgtactt

SEQ ID NO: 91979 - DNA, 256 bp, Glycine max
gccagacacaaacatgaacatagtctgtttcaaaccctgcattccttcctcattactatgccccagaaccagcttcagaaaattcccactaacaattccacgtttcagtcttcaagattctcagcagcagcagcagcaacaacaacaacaacaactcaacctctccgttcttcgcttcacattggggattccagggttggatgagtcttacttgcccagatggattggttatggctttggttcacttctgctcttg

SEQ ID NO: 91980 - DNA, 255 bp, Glycine max
aggaagctcaaccacatccaatacctcagaccacacaacagtgtagaagggagatttgaaagtgcatgtgaagaaacgcattagaagagaaaaaagatgagcaaaaaacagacggtgaaattagacgaggagcaaatcgcagaattgcgcgaaatctttcggtccttcgatcggaacaatgacgggagcctgacgcagttggagctgagttcgcttctgcgctcgcttggtctgaagcccagtgcagaccaactc

SEQ ID NO: 91981 - DNA, 254 bp, Glycine max
taagttaccaaataaactaatgcataattaaaataatagaggaaaaattcacaaaaacagaaaatatatagaaagcatatatagaaaagctttaaagagagaacagtgtagagaaagcatatatagaaaaccatggacgttgtatgtatactataaagtcaacaaaaagtactaataaaattgtggatgctgaaagagttagttaatataagcaacatagcttcttgtattgtattacatatttgtattgtatt

SEQ ID NO: 91982 - DNA, 252 bp, Glycine max
atccatcacacataaataaccaagtggagattgacctagtccttgacttcagaggatggacaaagaacaaggcaaaattctaaaaaatattatatcgttataattttttttccccaatgtaattaggaaagtgagagtacaactaattggaggagaaaaataatgtaatctgggacgatatgatttgtacatattattattgcaacattctacttttatttatcatgggtttttaatgtaaataactgatta

SEQ ID NO: 91983 - DNA, 251 bp, Glycine max
aaggaaggcaagacgagccatggcagctgctgcggcttctgcatcgggaaatggaacagtaattgtggaagctaagaaatctgtgaagggacggaacaagttgcagaagaagaaagagaagaagacaagaactgagggtgcagcacagatgaaaaagaagcggaagcttggagttggatcagcaaaggcatctcaaagtagaaacaagtttggttttgaggatttgacgttgcgcttgagaaagaacttgg

SEQ ID NO: 91984 - DNA, 251 bp, Glycine max
ctgtcatgtgataatacttgagctaaaaccaggtgatctcttagcatctttcttggattttgtgattaaagataatgaaaaaaatttagctcttgatttttttttaaaaggagctcttgaatcttgatagccagacacaattttaactactatcattttcgtagacgggaagcctcaatgaacatcgtcgtctacatttaatagattttgttaaatataactttaaagtacttattgaaaaaaatattaat

SEQ ID NO: 91985 - DNA, 252 bp, Glycine max
gccatgaccatgcttatggttggaggttgccatgtcttgatgccaaaatttgatgcagaatcagctgttgatgccatagagcaacatgcagtgacatcttttatcacagttcctgcaataatggccagtctgatttctataattaggcacaaagagacctggaaagggggagaaactgtcaagaaaattcttaatgggggtggaagcctctcacatgagctcatcaaggacaccagcatattcttccacaaa

SEQ ID NO: 91986 - DNA, 250 bp, Glycine max
caagttgcagtttgcagcacttccaacgagaaggcggtatgcataatcagcaatccaattccttaaatgaatcttttctgacataagggaaaattggctcactgatccttgtttcatagtagttggagtttcaattcctaatagttatagcctcatggttatgtattgacattactgtgtggtttttcaagaacgcaatccgggtaatttgagctgttaatgggtcaaacttcaaattattattaattat

SEQ ID NO: 91987 - DNA, 251 bp, Glycine max
ataagtatatatttccaatactgtgaatagatccctaaaaagattggatctgaacaatctaatgagatctggaaacaaatcaaagagaaagaaaagcaactagaatatacacttatattaacacaatcaacactaactcatatataagcatgttgtcagggtttggtttttggtctagtaaatgattttttttttcgttagaagagataaaatttattttaatgaagtttatgtatggaaagaaactaaat

SEQ ID NO: 91988 - DNA, 244 bp, Glycine max
ttcgagcgaattcggctcgagcagatttagtggactatcaacgctaaacaggtatgatccattcttgacgagacaaagcaagcagttggtgctaaggcaatggtggttggacatactcctcaaagtatagtaaatacaattgtagcatatggcgcgtagatgttggaatgtccagtggagttctgaattcaaaaccagaggttctagaaattatagacgataaagcaagagttataaggtgcaa

SEQ ID NO: 91989 - DNA, 245 bp, Glycine max
caaacatttttccatgaaacttgcatcttccattattattctatcacatccatggccacagttgtgaagctatctgttgtcccagaatgtttgaaccaacagaaaacgatgtcgctcaggaggggatttggctcatgcccttcccctggggtgcttggttttggccattattgtgatcggttctctgtgaaagtgtgcagggcttttaggactgaggatggtggggatgtaaaggagaaaaagtt

SEQ ID NO: 91990 - DNA, 247 bp, Glycine max
ggagaagtttacacatggggatggagggaatgtgtaccctctgggaaggtgtttggtgaatcattaactggggtaagccctgaaaaggatgtacccagaaggcaaagttcattcttgacggagcaagtgagccctcgttctcaaggttcaaaatctactggaggaactgcctctggtaccagtggagaagaaagttcaaagagaagaagagtatcttcagcaaagcaaacagctgaaacctcatcat

SEQ ID NO: 91991 - DNA, 247 bp, Glycine max
ggcggaaacagcatcttcgaaaccctcaccaaggacccacaaattcaaaaccccgcagcactctccaatcccttctgctccttctcacaacatgcagcgacagtctccaatccatgcagcgaatcgccgtccctctctcgcctcaatcagattcagactcagcagcatcccggattgtatggcggccagatggggcagagagggcacttccccatgctgttcggttctggaacgcagtttaatttac

SEQ ID NO: 91992 - DNA, 244 bp, Glycine max
tcgaggtgctcctggatcgcatgcgttgagtgatgtgttgtcagaggtcgtctttttctgtctcgatttctctgtgaataaggcaactgatggctccgtcattcatcgcttgtatgacgatctctggttctggaacaaagactacgataaatgcgaagaagcctgggcgaaggtcttggagtttaaagatgccatgaccgttaacctggacgaaaagaagactggtagtatccgtgtggcgaac

SEQ ID NO: 91993 - DNA, 240 bp, Glycine max
ctgcctcgatgcgcccctgttccgcacccgtcaccacataaaattcaagctctcctccgccattggtgttggaaccctgcctagccgtctgcagagtttcttcctcgttggctactttgcggtcaacattggcttctgtgtctggaagatcgactacagcatcttctcctcgggtgccggcgaacttctcagccgctcgggtatcatggctgtcatcaacatgattccattgttcctact

SEQ ID NO: 91994 - DNA, 237 bp, Glycine max
gttggttttgagttcaaactcacttcaatggatattgctaagaaacatgtgagtttttttagtggaacattaaagaatggaagcaatttcgataatagcccggttacattcagagggaagcaatcaaatattttgaaattcaatttgttccctcgaatatatcataatttacatgagctaaagctcatacagcctttatttcacgagttcctcccaggttcagcttctcgtgataca

SEQ ID NO: 91995 - DNA, 242 bp, Glycine max
aaagcatctaagtgacagtaaagcattagaaggccacttttcagatcattctcagtcacattctgtgggatcaggtgatggttgcctgtcattgttgaagaagagacattctggaattaggcctcatgctgttcgaaaaaggactccccgtgtccctatttcatattctattggtaaagatatgggataggtttttttcatctgccaggcaaggctccaaacaaatggttgatgctaatgat

SEQ ID NO: 91996 - DNA, 233 bp, Glycine max
gtttgattttcttgatgctgttttctgcgttatctatagattccttgatgaacgcgttgaaggggaggcttccccttgttgctgttctaaccgggaaatgctgaagaggaggatgaatgtgacagatgatgatggtctatcagatagcttgtatgagaggaaaaacacgtttagagaaatggggttccttcaatttgggagaaaatgtgaagattccaatagaaaccgtggta

SEQ ID NO: 91997 - DNA, 237 bp, Glycine max
tgaattaggctacagcaatgaatcatcatctaaaaccaaaggggagttgtactcagttgtctgcagcccaatagatgcagccttggtggctactgcaggcggtgatgacagaggatttctctggaagattggccaagcggattgggcttttgagcttcaaggtattttcatgacactagagttactgatggatgaatatttttccatttatcacctctagtgtcaaaatatttggta

SEQ ID NO: 91998 - DNA, 236 bp, Glycine max
tgaactttctgaatatgaacgggaggaacttgagtctaaaatttaagcaatcaatggattgactgtgatgatgaactttctgaatatgaacgggaggaacttgagtctaaaattgactgtgccttagatcagtgctttttctgtttatatggattacatctgagatctgatgcatcttatgaggatgatctagtggtgcacaataacacaagccgtggagattatcaaaccaagga

SEQ ID NO: 91999 - DNA, 230 bp, Glycine max
ccgattatggctaacttgtcactcactcttgctatgatataaccgagtcagtcaagatgtgagaaaaaggattgtatatagactagtacaaagtttgacagtgcaagggagattgaatataaaggtgattcagaacaagctttatgttctgccatggccttgtgtaagtgtctctcctttttactgggaaggaagaagaaaaccaggggacctgaggggcttccaccagg

SEQ ID NO: 92000 - DNA, 238 bp, Glycine max
ggtatcttctcccagcgagttcatcctccccttcgataacaccaacacatcaaacatcacaacaaaggacactaccaggatctccctcaacaagttcctctccccgacctccatcttcttcaaggactttgaagaggatgatgaggcccacaccgtcaacctctccagacctctggctcaatcagcacccgccatcacccaatcctccctcaaagccagcttcgatgccttcttccaa

SEQ ID NO: 92001 - DNA, 233 bp, Glycine max
gcccaagctagatcaagtacacactatgatccacaccacaatctacttgtgcatagtttctggctgcaaacaagttgttttgtggcctccttctgctagtccctcactctatccaatgcctatatatggggaggcttctaatcacagttctgttactttagaaaatcctgattactcaatttatccaagggcagaatgctcaatggagtttgcgcaaaaggctgttcttcagg

SEQ ID NO: 92002 - DNA, 233 bp, Glycine max
acggttatgatgactaagaaagactgatgtgaccgcagtggactgatatttaaaacaaatgatatatctgtggtcacatcattttgggaaatgcacgatgtaaagaaggggagatatctactttgacgttgctgttgcggccactctccgtggtgacacacatagcaccaggaagagagagtaataaaaaggtgatgaaggaaactgtggccttcaaatgatggtcgtcgtgt

SEQ ID NO: 92003 - DNA, 255 bp, Glycine max
gagtatagttgcatttccagtttgttttacggttctcatttcacgctccacacatctagtcccccgtgccttttgcatattcggtatcacttgcgagcagaactttctttggctattttaggtgtgaaaaatttggtagcctcttaccggccttgtccacagaagtgttttggaggggtatataattcaaatgtactttcgacaatttgtgttctaaattctaattatgtacacccttacaggttagtgtcttgt

SEQ ID NO: 92004 - DNA, 255 bp, Glycine max
  unsure (1)..(255): unsure at all n locations
cagtattccagcatctgtttctgctgcgcctcgacagactgctgtcgctcccagtgcaattgtctccgcttcgacgacatccaagtcttctaacccctcacgtgcgttggcaacgtcgagcaacaacgacggcagcagtgacgaggacggcattggggacgtcgacgctcagaataagaaggagcggcgtcgacagcaggttcgttacgcgtcgcgccgccggccanatatgcagagggacgtggagagtttcct

SEQ ID NO: 92005 - DNA, 266 bp, Glycine max
cttcacagcgccgtcgcagagaatccaactgcgccgatcctctgaaactgttcgcccggcgcgtgagaatatcccgaagtgagaccaaactacatagtaaaagaaaatgttcgagtttggaacttctgtacttgtgccttctgttcaggaacttgcaaagtgagccatcatcaatgttccagagaaatatcttcgtccaaatcaagactctcatgttatagtagactcaaccttaacacttccactcgattgaccttagcaaatta

SEQ ID NO: 92006 - DNA, 249 bp, Glycine max
  unsure (1)..(249): unsure at all n locations
gagacatagtgaagaattgtactcccacacagcatagtagttagcnagcgtnactatgtacatgatcaagtactaaatgctatatctataaaagatccaccaaggaagaggcttgttcttttaatttaataattagcaggtaggttagtttctattcagtacattctggctcttgattctggtttgtgtgactttcaatgtttatagacaatattgtgtatcgtatttgcaccatatgttgttgaaggc

SEQ ID NO: 92007 - DNA, 245 bp, Glycine max
gctcggcgtcttctccaaagccgaggagctcggcttgctcagcttgctcgaccgagccgccagcttctccccctccctcctcgcctccgccgccctccccgccttcgtcgctgccattgccgccattgtgctcattcccgacgactctgccaccctcgtcgccgtccaggctgttgttgctgccgcgctcggcgtcggagccgtcgggcttttcgttggctccgtcgtgctcggcggcttgcaag

SEQ ID NO: 92008 - DNA, 243 bp, Glycine max
  unsure (1)..(243): unsure at all n locations
aatcgtcaggctggtcactgagtatggcttgaattgccttctccgcccagtgaccctattttctctcaataactccacaaaacttccaggaccttntctttgaagagaaaagatagtgacacaacagtagagacacgagtttattgctctgccgctgctcaatcaccaccaccagcatggccaggaacagctattcccgagccttctgatttcaagacatgggatgggcaaaaacctatttct

SEQ ID NO: 92009 - DNA, 254 bp, Glycine max
atcccgtctctggtccgacgtccagccgctgggcaatagcaggcatgttgactcctaccgccctcttacagtctctgctgcattctttatcaagtcctgtcatgccaacgtgcaatccgtcctcgttcggaagagtggcaatctgaatcgcatagtacattccaagatcgccgtcactcggccagccactgctatctccaccccaggcaccgagggcgagggcaacacattgcgctcacgaacgcatcctggtc

SEQ ID NO: 92010 - DNA, 243 bp, Glycine max
caaaatctatcaaattttgtaatggcacgcatgctttgatttgcattaaacgtaggctaactaagagcagtaaagcatgcgtgccattacaaaatctatcaaattttcaatttaattcaattcacatcttgtaaataagtttgcccatctacgagatttcattgattaatgacttaaaaaaaaaaaaaaaaaaaaaaaaaaaaaaaaaaaaaaaaaaaaaaaaaaaaaaaggggggggccccc

SEQ ID NO: 92011 - DNA, 249 bp, Glycine max
tacgatttctttggcacttcgatactgtggtttcttcaaccatctgatgtgaatggttttttttttcatgttgattttttttcttagtgttcttttgtttctggtgtttaggggagttggggtttggtaattattttgtggggttttcattttcttctttaccctacaaaatttaaacaaaaatcgatttttttgttgaatttgctgactggtatgagtgtttcagcaatcagaagtacttcataagtt

SEQ ID NO: 92012 - DNA, 257 bp, Glycine max
gaagattccgcaacagagagtagaaaagatggcgcggttgatcacagtggtgtggtgcgcggtggcggtgctactgtgcgccgcggcgggcgcgtcgtgggtggaggaggcggcgaacccgatacgaatggtggcgggggtggaggcggaggtggttcgggtgatagggcagtgccggcgcgcgctgaagtttgctaggttcatgagcaggttcgggaagagttaccgaagcgaggaagagatgagggagaggtacg

SEQ ID NO: 92013 - DNA, 257 bp, Glycine max
tcgtgcatgtatacttcagatggcctgatcccacagtcggacactcttccaccctgacatcaccattcatcggcagaacgcacattgatgtgtgaaaatccttagtatattattgttcttcgtacgtcgcgttttcttgaagactgcttcatccttctggtgagagtgttattatagcaatctttgtcactcgaacgcacgcacgcacagtctgtagtggtaccgtgccggttcatttgcttcatgtagcacctcat

SEQ ID NO: 92014 - DNA, 180 bp, Glycine max
cgtgcctgagtctctaatgtgcacacacacattggaggtactacatgctgcgtgttcagcagcatattagtgtatccgaaggtcgagatcatcacaacgagcatggggactgcgtcgttgtactgtgattgtaaagtgttgagtatgcggcatgcttcatagaactcctcagtcgcatag

SEQ ID NO: 92015 - DNA, 254 bp, Glycine max
gaaagcgtgacggggttgattatgtgaaaacctgatttcattcaatgacaccattgttggcaagcaacagattctatgtgtaagttgacttattttctaggtctatacatctactgcaaaattggtatttgggtattaatcatgaaatagtttttctagtcttagcttataagtgtttaaccctttgataattttagggtgcatttgggcaaaaacagcttaagtaagcatttattcaatatgttagtattata

SEQ ID NO: 92016 - DNA, 244 bp, Glycine max
cttccttaaggtgaaaatggtctctgtgaaggaccaaaactactacttttttattttagtttaagaaccaaattaatcaaaattaagtatagagagtcttaaattaagctggttttagtctgagactatgcatttggtctgctttgtagtcttgtagatcagccttgctagttagttgtcacagattgctgtaattggctgattacataattcgataaatgtcattttggtctgttttgaacgt

SEQ ID NO: 92017 - DNA, 235 bp, Glycine max
atgaaataagactcgcataggtattttagctgcttggagaaaccattatttgttgtgtacataattcattcccgtgctctcttaggtcgtgctgcctctgattactaaaaaaaaaaaaaacgggcggccactgataaaagagctcgtacaacccgggaataagtctcggccgggaacctgggggcgaataagtttgcccatatgtgatttgatgcagtcattggcataaccatgg

SEQ ID NO: 92018 - DNA, 257 bp, Glycine max
catggataaatccgagtcagtaacttcaacgagtgtacttgatttaactcatttgtattctttgtgtcatatgcttataaactcacaactgttgagagttaagctcaagaatcaagatacatatctaatcaagatacatgcaattgtaatatatattgaatattgaatacattatttggtcaagatctatgcaataatccaacccattgttatgaacttctagtcttctaccatcaagtttgccagtaactcaattg

SEQ ID NO: 92019 - DNA, 247 bp, Glycine max
ctagtcctcttactcttaccattctatcctgaaaaaagattaaaagtgtctcccaagccgaatctcatactgatttgaatcttggtgatgctattgaaatgatataaaatctaagaacaataaatttctatttatagatgcatctatattccttcttaatgtgggtagatgataaccatatgagttcgaacttattattattacaaattggaattcatatggacataaatgtcctgtgaattaggat

SEQ ID NO: 92020 - DNA, 251 bp, Glycine max
agaatcgaaacatcatatataaagagttctattcttaatggaaacatcatatataaagagttctattattttagtatgatgtttccattaagaatcgaaacatcatatataaagagttctattcttaatggaaaatagttgaaaactacactaatttcgttattaccacaaaacttctgttgtcttcatgactaatgcctttatcagcagtgacttctttactagatgtttctttgtaatgcaattataca

SEQ ID NO: 92021 - DNA, 252 bp, Glycine max
tgccaatcgccgtctccggtcgggtcattttcaacatcatctgcttcgccgagcattcttgcagttagttctatcaacggaaacgtcgttgctcccacctccaacttcaaccaggctcgagtaaccgtctatggacagatcatcgcaggcaacttcgctaatgtcatccagatctaccggccctcatgcggatctactactggatctaactctggcactgtccctccaggaacgcagacgtcgaactctggt

SEQ ID NO: 92022 - DNA, 257 bp, Glycine max
atttcagggaatctaataacgtcctgcaccaaggtgaaagatgttttgtctgccaactggatggatcaatattcgctttatgacccgaccgtgactatagaatggtcgaaacctgactgcaaacactgtgaaacacaaaaccagaaatgtaaatggaagaatagtaccaaagttgaaactgaatgtttcgtttgctcaacaaacacgaccccacatcaactattgtactcattgctgcaggaggaatagttggtttg

SEQ ID NO: 92023 - DNA, 262 bp, Glycine max
gggtttcttttttgtttgatcaaattaccccatgtccgaatgttaaggtacagacgaaggttcttgtttggaggagaattttcccttgctttcatctcactcctcacctgctctcagggataatttgggcttgcaggatgaagacaacagaatgaaagcggagaatgggttaacttgtagtgaaactgatgaagaaatcatacatccttctagattgattttgaagtcaatgaaaggagaagggttattaactaccaagaaa

SEQ ID NO: 92024 - DNA, 250 bp, Glycine max
gaagattccgcaacagagagtagaaaagatggcgcggttgatcacagtggtgtggtgcgcggtggcggtgctactgtgcgccgcggcgggcgcgtcgtgggtggaggaggcggcgaacccgatacgaatggtggcgggggtggaggcggaggtggttcgggtgatagggcagtgccggcgcgcgctgaagtttgctaggttcatggcaggttcgggaagagttaccgaagcgaggaagagatgagggaga

SEQ ID NO: 92025 - DNA, 110 bp, Glycine max
aaaccgaattatgttcagttcttcttattacaaaacagttttgttagaactcagaagccatcttgtaacagtttcataattgatataattgacatgtcaatggttgattt

SEQ ID NO: 92026 - DNA, 213 bp, Glycine max
ccaatatcgtgctcaccatcaggaacctggaagtcggagagcatgacccccaatgccatgacatgaatgctgtgacagatcagcgtactatcggatgcgcacgaatcatgcgactcattactctactacactaaagcagtctggtccaactgctgccgagaataatgcaaatctgggtggaccatgctacatcactccgtcgttcgagcagtt

SEQ ID NO: 92027 - DNA, 214 bp, Glycine max
aattcttacatttagcaatgtgtttttagtcctttattggagactaaaagcacataattttaaaccaattgaggtcagatttggtggaaggggctagtcatccacaaagtagcaaatctagtaattattatcagtgtctttgatggccagacatgtctgtaattgttgcatggcacttccttgggccactggctatgccagagctcccacacaa

SEQ ID NO: 92028 - DNA, 245 bp, Glycine max
ggcaaatctcaagagagtgtgagtgaagccattaacgcctattacagcgtgtacctggtgggcaagtccttccaggttccagaagtggagcacatgggtcatattctacttgccttggagatccgcggtgcacagacgtactggcagatgccgtctacctctaacatttacgagcctatttatgcggccaacaagatgacggtcaagtcgctgccacgaaagtgtcttatacgacgtggtttgga

SEQ ID NO: 92029 - DNA, 243 bp, Glycine max
ctcgagcgaatcggctgagcggctcgagcggggatgtcagtagtaagccttgtgtcaatggctaatgctggcttctcagagattagagggaagcatttgaactattcaaagttttggaatgctaatccctctgcagaaaagcaggtcaagttgtctagcaaagctggcatgcttttgctgtacactcctgcttttctgctggccttgcatccttctggatctttcctcatcaaggcctcagat

SEQ ID NO: 92030 - DNA, 150 bp, Glycine max
gttgaggtgattgcatttaataatgtagagggtgatagatttctgactactatcttgagcagtagtgcgatagctcatatgatactctggcacaacattggatggatctgatacgatggaggtgatgagtaaagattttcttaaggagaa

SEQ ID NO: 92031 - DNA, 273 bp, Glycine max
attcagcctccaaaagaacactctcatcactctattggaatgttgatgatgataatgatgatgatgatcacaaacacttcaatttggacagtaatgggaatgtgagtgttttgaggactgaagagaataataataatactaatggtacttctggctcctttgccactactgcttaaccaacttccacaaacaccttcattgccccaaatagatgggttacttcgaacaccatatcaaatacaagggaccaattggtatggttaactccatttt

SEQ ID NO: 92032 - DNA, 256 bp, Glycine max
tgaagattccgcaacagagagtagaaaagatggcgcggttgatcacagtggtgtggtgcgcggtggcggtgctactgtgcgccgcggcgggcgcgtcgtgggtggaggaggcggcgaacccgatacgaatggtggcgggggtggaggcggaggtggttcgggtgatagggcagtgccggcgcgcgctgaagtttgctaggttcatgagcaggttcgggaagagttaccgaagcgaggaagagatgagggagaggta

SEQ ID NO: 92033 - DNA, 268 bp, Glycine max
gccaaaagaaaccctccatgtaacctaacttccctctttctattcctctgtattatttttattattttttattgacggtgagtgctgacaattgaaacagtgcagacgacgatatcatggagctgctatggcacaacggccaggtcgtggtgcagagtcagaaccaacgttctctgagaaaacttccgccggtgaccaactcccacgacgcctctcccgccggtccttcaatgacgagagagattcgaccgctggtggagaatttcaa

SEQ ID NO: 92034 - DNA, 256 bp, Glycine max
tgcaagcgacaggaggaggagattactggggcgagcacgagggagtcaaagccaaagtctatttcagagcctcggagtaccaagctgagggtcgatcctatttgcaagtagaagacttaaaaatggacttcagtgttaagagcattcaaatgggtatacaaaacgtttataacgggaacgcatcattgaggccgcattgaatctattcatcaactctaatgctcaagatctgcttcgggaaatgaaaccgtcgata

SEQ ID NO: 92035 - DNA, 253 bp, Glycine max
ttgaaggctgatatgctgctgaatagatccttgtaaacccttaattcctattcaattttttcccgttccttgtaaccctacgttcctccaagtttcgggttggggtgaactgcatattttagatgaaaaggctgcatacatgatctgtgttggtttcctttttactagtttatcattgactgggttagtatatcatgttctttcattagctatacagaaatacactttccattgtataatattctaattgatt

SEQ ID NO: 92036 - DNA, 249 bp, Glycine max
gtactgaataagataccttggagagtatcatgtgttatataattcttgcctccagctaattagctaaaaattgaaagaaacggttatacctccctaaatcaataaattttcctatataaagactgccttcctaaccagcctttctaaatgattctccttctcttgctcctctcttaacagaattgttatgtcctatgtgcgattgtgcctcctgattctggaagattcacctcctgatggttcttactg

SEQ ID NO: 92037 - DNA, 246 bp, Glycine max
gggtagacttgtaactgcaatacactttgaacatattaattactttcaggggtgtttatgaagaagttattaaatggtcctggactaccacttttctttgatatcgattaatctttatgtaacatgtatttaagattttaatttaagagaaaaagaattaataaaacttaattaaacatcttcaataatatatatatatatagactaagttgaacaattcggagcataactcaaactcattttcta

SEQ ID NO: 92038 - DNA, 251 bp, Glycine max
ggcagattccaacaaacatcaaataatgcaggtatgaactatcaaggtcccggaacaagagatgcattcaggtcaccactgccgaattggaatcagacaaggcatgcgccggtaaatgctaacgttaatccaagaatagaaaacaacaggcaagcttttacacttcctggatcaagacactcaatgccttcccatgagaatatccggagtcctcctcctaatgctcctaatactcctagacctggttatgg

SEQ ID NO: 92039 - DNA, 245 bp, Glycine max
aatgattttcataatccaaagttatcaggtcagggaaatcgaagacctcctgtatctcgtaaatttcagtatcacccgatgggggatctgggtgttgaagtggaaccttatggaattggaaacaaacatgtcataaattcacagcctatgccccatcaacccttgggagtatttaaaggtcaggaccaaagctatcttggacagtcaaagtatggtcattctgacaggaattataatgaaatgaa

SEQ ID NO: 92040 - DNA, 249 bp, Glycine max
aggccctatcatagctattcggtattctttagacacaaaggtaatagcaatccaacgttcaaaccatgagatacagttttgggatagagagactggggggacttttagccataagtgcaggccagaatcagaaagtatacttggattcttttggacagatagtcaacagtgtgatattgttcttgttaagaccagtggtctagacttgtacgcatataattcagagtcaaaatcactgcaactggtgca

SEQ ID NO: 92041 - DNA, 241 bp, Glycine max
ggatagaagtatgttttaactggtctgatgacttcatcaaactaggcagtccttagctttagcagcttatactgttctgtatcttccgagtataagctgctaaagctaaggactgcctagttacactcaagtcatcacaccagttacaaggatagaagtatgttttaataaaaaaaaaaagaggatagtagtatgttggaccatctcagcttatggacactgcgagttaagaccaggacaa

SEQ ID NO: 92042 - DNA, 246 bp, Glycine max
gtacacatatgagtattgtttaatattacaattgtctacattgtcagcgaaccatagtttcttatttgagattgaatacaacaattaatacagtttggattaatcgttgtaagtgaaaacatacatgcagcaaaaagtagcattgtattgctgaaaatatagaattgagtcagtgttttatacagtaccacattaaattattgtctcctcgaccccgactccccaacatgtccccatacctgtacc

SEQ ID NO: 92043 - DNA, 240 bp, Glycine max
cttaatctcccaatcaactcctcccttctaagtcataacaccaaaatttgatcacctttttgcaacctatcttgctgtgctgtggtagcttctttgatgtagtcaatcatcttgtgctcaataagactacccctttaaaacttgcttataaagttagtgctttgcctttaggtgacacctccatctcaagctgtggtgaattaaccatacaaactatccaattataccaaagcttgattg

SEQ ID NO: 92044 - DNA, 239 bp, Glycine max
  unsure (1)..(239): unsure at all n locations
aaccaggcttgggaccaatggtattcttggtacttcgctcgagtctttgttgccgttaaagaccttgtccactacaacaatccctccactgaggcgtgcttctgagaacatagatccttctgcagtatcaatttgttgcccacaatgtatgcagcgctgcgagcaagaagtagcagaatngttggtcgaaactaagaaatcagatactgagctcaaatcagaggcagctaaaccgtccc

SEQ ID NO: 92045 - DNA, 269 bp, Glycine max
gtttctgttgtattttctcaattacaacatcgtattctgcaaattcaaaccgggtcttggttttctgaaagatgggaggtggcaaggacaagcatcatgatgaatctgacaaaggaattttttcacaccttgctcatggggtagctgtgcagcacatggtggacatgggtacccacctggggcttacccaccaccacctggggcataccctccacaacaaggatatcctccagctgggtatcctccacaacaagggtatcctccagctg

SEQ ID NO: 92046 - DNA, 104 bp, Glycine max
ctcgagccgatttgtatctggtgttgtcaaacagacgcaatacgagagacaaatatgttatcatatggttcaatttcaagttttgtagggtcattttctggctc

SEQ ID NO: 92047 - DNA, 256 bp, Glycine max
atttttatttgctgcttatgaggtgtttgttgtttttgggagacctgtgaatagggatatttgaagttggtgcaaattaaggatttttgggttccctaaagttgaaatattgatgaatctcagttggtaaaggtgttgcttttgatgaacagagcaggcccccatatctgttgtgtgtgaaatacttttataaagttggagattttaaagaggggaattttgtgtctgttgtaatcctatatcagctttttagatc

SEQ ID NO: 92048 - DNA, 257 bp, Glycine max
attgcaatagagaaagaaagatagaaagaaagaacaacaccacagctttagcacccagaatcaccaaaatagacacaacacaacacaaaactctcctatatctcccttttctgcacgaaagagaaaaccctctcaatgctcaccaatatccctcctctaatgaatctgacagccatatcattcctcctcaaccgttgaaattgaagaaaccccaccaacccaaaggaaaacaaatggggcaagaaaaggaagatgaa

SEQ ID NO: 92049 - DNA, 255 bp, Glycine max
cattgtcgcccgtgtggagaaacttgttgctgctggagaaaggagaattgctgctcaggctcctcctcaacctgcttaggtggcttagaaaaataaacttgtacagctaactgaggctagtgagagctgcttctcggttgtgtagcgaattggaaataaagttgtcgattgtactgcagaactgtacattttgtagcttttaagtttatacaaagaatttaagcgagatgaggctcatcagatgttttaatgcac

SEQ ID NO: 92050 - DNA, 254 bp, Glycine max
ctcatggttctgatcgttgtacaaaacaagcttagtttttcaaggattgaatacatagtagatggccttgtggttttctcctttcttcttctaccacttgctgtggtgtttagagaggagataaaccaattgaagccaaaacgcaaggtttaactgattcaccacctcagttgaaagtagtcactgaagctattccatcttcaaacgtggtggagcaagatgtagtaccagcagctactacaagttcccacgag

SEQ ID NO: 92051 - DNA, 240 bp, Glycine max
aaataactagcatagaaatgactagctattatcaatcccgaggcaatgtatagccctggaaggtttagggtgcttccatgcattttagctagcattttacatatatcacatattaaaggcatatatagtatgtcctacttatgtttgctagaatgttacgttgatcacatttaaggtattatttatttttacacttatagatctttacgattttgccctttaaaatatgtctcagtaaat

SEQ ID NO: 92052 - DNA, 243 bp, Glycine max
tgcttccgcaaggaaagaattctacagtactcgccgataagataggagtacttccacacaccatgcgattttaaagacatctatttaatcactgtgaccaatttgaatagcagtgattgttggcaaagttttaaacaactcaacaagcttaatgcagaaactaaaaaaacattccaaacccgtaaaattagaacctattaggggttttccaaagcaggagcaatgtcttcctcttatcttcct

SEQ ID NO: 92053 - DNA, 247 bp, Glycine max
ctgttcttagcttctgcatgtgaagtgaattcttgcaatgcttccttttctccacgtgtgacccagatggtgttttgagtatttgtttggagattcattcagtattttgagagctttgtatgataaatatggatactttgctcaaacacccaacaagcttgagtttttgcacccacttcacggttactcggaaaaattgagcagttcaggttcctctagggtgcaaaatcagtattttgggtttggt

SEQ ID NO: 92054 - DNA, 252 bp, Glycine max
ctaagggataggctcaaggccattgaaggaggccaagattatgcctttgctatcctagaagagttgttcctagtacctaatatcatcacccctcccaagttcaaggtgccggactttgacaagtacaaggggactacttgccctaagaacatctaaagatgtgttgccggaagatgggggcatatgcaaaagatgagaaattgctgatacatttttccaagaaagtcttactgggacaactgtcacctggta

SEQ ID NO: 92055 - DNA, 249 bp, Glycine max
cagcatcaattcttcttaaaccccacttagaagaatcgatcgatcgagttcaaatatctttcttagaccattcagcaaattacactagtaattagctagctagcagtatggcaccaccccatggagagtctttgcctagctcattcctaagaacaacaacgttaacatgtcgaaacctccaaggctctcatctgatcatcacattcaaagaacaatctcagacatctcgtttgagctaaccaaggaagg

SEQ ID NO: 92056 - DNA, 247 bp, Glycine max
gcttgtagcagttgaaaatccaggttctgataatttaaaatcaatggtgatacctccaccaacagtcagagatcgtgtgctgaaagaactgtttattgaggggttccaagtaacataattgagaagctaatcaatatccaacgcagtttctttggggaggtgggctggaacaaaaaaggatagcgtgggtcaattgggagacaatatgtctcccaaaagctttaggcaggttaggcataaaagatct

SEQ ID NO: 92057 - DNA, 124 bp, Glycine max
caaattcatctcagcaggttacgatagttttgaaaaggagagaggttcaggggtttcgcaatgacagagctctcagtccacggtggccaaagggatgccgaacatctcgtccacaagcatgact

SEQ ID NO: 92058 - DNA, 242 bp, Glycine max
attttattaaaacggatggctttttgtatctacttattccgtggcactattgctctgttgtttgcgattatgaaccgcagaaaatgtcttgcctttttttgtttgctcacttaagatattattggattttattagataaacatgtttgtttttatctgttattttaagattgtacgaggctgcttgatttaattaatgtatcccatgatttccatctcataaaccctactcaaattgattgc

SEQ ID NO: 92059 - DNA, 235 bp, Glycine max
aaaacaaccaacaacgctttcgtacaataaccttttacattaactacaatggacgttgaacaacaatcacgttataacacaagatgtcatgataatgacaatcaacaaagtgccaagaacagatctcaacaatcagcaacaagggtagataccagtcaagaactagaaccccaagtgaagacagagatagtgatgactacaaccaaagaggtgaacctaaagtcaatgatggtag

SEQ ID NO: 92060 - DNA, 237 bp, Glycine max
cttactcgaatcgaatcaacacggacaacacgcgacttatcgtcgcttccgtttgaaggagattcgacacactcgaggaatcaccggaaacgatagcattgtttatctcactcaaccgagaatcctgcagcaaagaaagtatagataggacaccaggtgcattctcgggtatcactctcaatcgctcaatagccagctcgaactaagcactggtcagtatgcagacgatcaaatgtg

SEQ ID NO: 92061 - DNA, 238 bp, Glycine max
  unsure (1)..(238): unsure at all n locations
tggaacctattgattctcctgaaactccaactgacatgagatgtgttccatccagtgattccttttattctgntgcttcttcattccaattgatgtctaagttgtgttganggagctctggatgagaagtatcctggtacaaagatcgccacaagttggccctggcaagggaatatcaacttaaagattaggctgataaagcaagagtgctgaggtttggtgacaattctggtttgaa

SEQ ID NO: 92062 - DNA, 130 bp, Glycine max
tttcaactgtgggttctcttccgcacccaactagtacacggttaattgcttatgaagagcctaaagaagcaacaaccaatttgaagcagcgagcataccttggagaagaggggttggtagagtttttaaa

SEQ ID NO: 92063 - DNA, 247 bp, Glycine max
aataatgctaaaaatatctgttgctgcttttgtccttctatataattttcttaagagaaaagttaaaagacaactatacccttttgttgctgattcatctttgatataacaccgctattctatcataaaattacctccaaacttgtccaaaacaaggtcaagtcacagaaacacataaacatgaagacaccaatattttctttttctcttttcttttcctgcttataactgccttttgttttggttt

SEQ ID NO: 92064 - DNA, 254 bp, Glycine max
ggaaaattatcccttcagaagaaccgtcgcatctcatggcaccttgcttctgaccttgttgaagaagagcctgaaaagggtttggttgaagagaaggaagaaacagtgtttcagaagaagaaggttttgccttgcctttgcctgagggcattgtgggagagatctgtcagcttgcaaggaacttgacatgaaatctaactctggaggaggctttggctgagtatgaaggaagggttagtgagaaagattgttgg

SEQ ID NO: 92065 - DNA, 247 bp, Glycine max
cagatattggtgttagttttggaatttaggaggagtggagggattgagatttggatttggatcaggttgagactgctcagatttccgggcatgaatttcaagagctttggaaacgaggccggcggcggcgagggagacaggcggggaacttctcgctgacgcggcagccgtcggtgtactcgctgacgttcgacgagttcatgaacagcatgggaggttcggggaaggactttgggtccatgaacat

SEQ ID NO: 92066 - DNA, 122 bp, Glycine max
tagagttcgtacatatgcttctagcatattgggtatcttgactcagtaccttgccgctgttcagctaacagcgctgattcgagaactgtcaagtctagctaattcatcaagctggccaccta

SEQ ID NO: 92067 - DNA, 244 bp, Glycine max
ctgtggagacaggccaagcacaagcttccaggggtcaaactttctgttcatagaaaccggagttaaaaatcccagattggtggcagaggagatgatttttagagctttcgtgttgatcttgtacatcttcagttacagtgacaatcccaggaagggaggaatatcattgatacgacctcttatctcaacattttgaaattgagatttttgtataagttctaatctgctatttgttttggcattg

SEQ ID NO: 92068 - DNA, 163 bp, Glycine max
ctataagaagagactcacatgcccattcaccactgcacttctcttagttttgctttcgtttcaatttcatcatcgtgaagttctttgatcttccattcaagcaatgtcataacaagccgaatcctccgctcgaaatcttggaagaaggatttttccactgcga

SEQ ID NO: 92069 - DNA, 248 bp, Glycine max
caagttcttacgagacatcctaaatgtttataaaagattttttattttttctccaattataagtgcttgtttttcctctcttttcagtatttgttttctttgaattcagcgtcattacatttgctccacccttactactggggtactttttcttattgtgaatgtaaaaagttctttatggcagcgcaattttccttcaatttaatcaacagttacagcataacaacaatggagtctttagccagtgt

SEQ ID NO: 92070 - DNA, 247 bp, Glycine max
tcttgacaaagttgcaattaatgaaatctttgaggttgcctctaatcagagtaaaagtggtgcactcgtgttgttcattaaagatatagggaaggcaatgattggcaactacgaaattttaaaaagaaatttgaaagcttgccaccaaatgttgtggtagttggttctcacacccagttggataatcaaaaggagaaggctcaacctggcagtcttctgtttaccaagtttggaagcaatcagacag

SEQ ID NO: 92071 - DNA, 245 bp, Glycine max
gcgcaagttaaaaccagcttttggggaagctaatatgagaggttttacaaattaacttatacataagctaattttagcttatgagaaaaacttatttcttgttttcttctcttataagtattcatgacccagcagaaataccctgcattgcttttagattgtttcttgtgctgctatatataaactgctgaaccgtatttacgtttgtacgactcacatttgcttttgtgaacagccaagaggtt

SEQ ID NO: 92072 - DNA, 244 bp, Glycine max
gttgtggaatgcaatggggagatgctggttgttttgttatcagaattcttagaaattgcaactcttagggtgtggaaatatgatgaagctagtagagggtggcatcagattgcagcaatgcctgagcaaattctcatgagtggtatgggaagaaggcagatattaactgtgttggtgctggtaaccaaatcttcatatgcttgaactcccctgagctatgcacttatgttgtgtgtgatttgga

SEQ ID NO: 92073 - DNA, 231 bp, Glycine max
ggctcgaggtatgtcatgattcacaacagagcatctatggtaagtgacatgatatagaatgtatgtcatgacatacatgctatgacatacattctatatcatagcatgtatgcatgattcacaacagagaatctatggtaagtggtaacaatagttgatattctaaatcaccaagaacccaataagcatagattctctgttgtgaatcatgacatacacgctatgatatag

SEQ ID NO: 92074 - DNA, 246 bp, Glycine max
gcaacgtgaagatgcaggaaacgggttgtatcattacaatggatcaatgatgacttctctggagttggatgaagattactactggaaagaacttgcacgttctcttttaccgtcacccagctgttagtacttgtatgatatattaattagtatttgtgcaagtaataatcaacaaattgttgctactgcttccactggcagagctagcaaggtccatgagggaaccctatttccctccttattata

SEQ ID NO: 92075 - DNA, 244 bp, Glycine max
ctttcttatcttaaatcgcccgtcacgacctgagctctgcatgcactggatcacaaccagagaaatgcacgtgatcgtcttgtcgagcgccggggcccactgctgctccggcatcgacatctccctctgggatcaaccgccgcgaattcgggttcctccggcgagagatactggcgatgcaagacgcggtaacggccctggaacggtgccgtaagccggtgactgcaagcatacagggggcgtg

SEQ ID NO: 92076 - DNA, 243 bp, Glycine max
aaactgtgttagactcgttgatgcctgcttttacttctgttgactctgagactgcaagtagttcagcacctgttgacaaggataaattcatccgtccagaaagtttaaataactttgtaatatttgcaccagtgattttacaactgtttccaaagaagttcatgtgagaacacgtagaatacgattagttgggctagagggagctggtaagactactcttttaaaggctgtcttgcataaatg

SEQ ID NO: 92077 - DNA, 252 bp, Glycine max
ggatggttcagtgcagggatctaatgatcagactttaacagcaggcaatgaagggggctctcttgtgagagacaataacacaaaagcttcttgtgctgcaggttctagttcgaactaagcatatagaaggaattgcttgaactctgagatttgttttgtccaaaaggaagaaatagaattgcccattggggatgtgaaattccatggatggcattgcctattggctggcgcagaccaggcaagtgataatcc

SEQ ID NO: 92078 - DNA, 254 bp, Glycine max
aggacgatgcattggatagcttgaaagctatggggtcggcttcagtgaatgctaaggaggattcagcttcacctgttcaggcattgcttgggggaatatctgctggagttattgctcttattctctacaagtttgccactaccattgaggcagctctaaaccgacagacaatttcagataacttctctgtatgtctcatctcctgtccttctatatctgtatttattcttttttgttgcacaacatgttatttg

SEQ ID NO: 92079 - DNA, 254 bp, Glycine max
ttgacacattgttttttgttctgaagatctacctgctaaatttctaaaattcattcatgtgagttttttttttttttttttaagaagcaaaacatcactatcatacatgaatcggtactcaatgagagctcatgttcagtttcttgttgttttgctctcagtttccctggctatattctctcctctccctcctcctgtgtctcagtttgctggctagatacgtagaattgctgctgcttcttcaatggctcaaa

SEQ ID NO: 92080 - DNA, 252 bp, Glycine max
aacaaattggtctgacctgccagattcgagtttgtgcgggaaaaccgagtgggagcattggagaaattggccagcgatcaaggggagaactgacagagctgcaacgtgacattggcctcatcaaggacaatatgccagacatgaaacagatcaaagaattgatcttggagtgcatgctgagcaagaaaaaggaaacctgcatcgaaaaaaggaagagttccacaatgttcttgaataagaggaccaacactt

SEQ ID NO: 92081 - DNA, 147 bp, Glycine max
agagtatatagtttgatagtttcctgttcaaaattccactatacttgcatacatgattttgaacaggaaactatcaaactatatactctactgataaatcatgtgtgcaagtatagtggaattttgaagcaaaaaaaaaaagaagaa

SEQ ID NO: 92082 - DNA, 244 bp, Glycine max
ctcgagccggctagaaagaaaaaaacaatataggtacactatctttgggttggatcggaatccgaaccttataatttagtctttgcataccttcactactacaataaagtgctttaacgacacactaactacgacagttaagaagaaaacgttgttgaaagatacacggtgacattatagtaattttgacgaaaatatacaacgatggtcgtttaataaccaccttcattactagcaataagga

SEQ ID NO: 92083 - DNA, 125 bp, Glycine max
ttaatatgtaaataaacacatttgatatacaatatggagaatttgtttatttacatagcaatttagtcatttgattttatccgaaccggttctcgggcccaccgaggccgaattccgcttcctca

SEQ ID NO: 92084 - DNA, 254 bp, Glycine max
atttttgggtaaactatggttagtagctacagtttatcatgttggatttttttttatttagcattttttatttggtaaggctgatagttttctaaaggattgttgaagtttgtgttgttatttagttcattttacttgttaaatattcatttaatgtgactcttgccatctttatatttacttgattttggtcacgaatagaatcataagataaatgttctccagcacgcagttgagtgttatactgcttatgt

SEQ ID NO: 92085 - DNA, 231 bp, Glycine max
aaccgactaactgaccataaacaaaatggtgtcgacgttcgagaagaagaagaacctgagcaagctcatcatcccttcatcttcttcttccccaaatccatcccctcaagcccacacgtcattttcagtaggtcccactccttcgtgggcccctctcctcgctttgtcccttcctccacccctctcttcttcctcggagaagaagaagaagaagaagaagaagaagaatta

SEQ ID NO: 92086 - DNA, 132 bp, Glycine max
aattaggcaagtagtatattaataatactacgtctccctttgactatagacattatcagacggccatctccaattccaattctcgtgaactccattcattcattttcttttctttgtgctctgcacatccat

SEQ ID NO: 92087 - DNA, 247 bp, Glycine max
gatgactgctcatagaaaagatgggcactcgtctatctattatctcggtcgtagtgcgggccctgtgcatcatcgtcgccaagattgcagccattggtgtacgcctgtgtacctgatacatggaatgagctgctttatgcactgttgcttaaacatgaaactgctcacagagggaacttgtaacatgcatcagtatgatttactgagaaattcttctaattgtgttgtctggattcatcattcatgg

SEQ ID NO: 92088 - DNA, 248 bp, Glycine max
ctgctgcactgaggatgcccgctcgatccccccggcgcagacaaatgacctgctgaaccagccgggcttcgtaggcgccgacgcgcgcttctggcagcgctcctatgccccgactatgtcggcctcgcgctgttgatcatcggatacatcttcatccaattcctcgccgagcccttccaacgcatgttctacccatccgacctgcgcattgcctacccgcacgccctcgtcgagcgcgtctccgtcgc

SEQ ID NO: 92089 - DNA, 267 bp, Glycine max
atccagctcgagatgctgaaggagacggaacataaataatttttaataacagaaatatgaatttatatgctattatgctctcacacatatattaagaattttgtatgatcttatgatccttgctaggttccatgatttatgatctttagcccttcctgatcctaagcaggatcttgatttaatgaccttgtctagttccatgtgcatttagctcttggtacttcgaattcaatatgcttcttttttagctgtgtctagtgtaattgt

SEQ ID NO: 92090 - DNA, 251 bp, Glycine max
gctcctttttccaccatcattatgaattacagtccattttctatacattcagaggcacatccagatgttataccaagtgatgggttggctacaccggagggttatcgaaatatcttgcttacttgaagagcaaggtcttgtcatccaattagaatccacccattttatgtgttttttttatcagttctagaacataatttgagggaattcttttaatctgtgacttgcttgcttaaacaagaaggaaaaag

SEQ ID NO: 92091 - DNA, 258 bp, Glycine max
cagcgacttgaacactaccagcaccttcttcgttgcatcgcttccgactttgctgttctcttctttgattctctgtagtcgtcttcttctctcttcttctctccatgtcttcctcgctcaatccgctctcgccgagctcggcatcaacgtcgaggccaacgatccggttctcacgggcctcgactcctcgctgccctcttcttcctcctccaccgccgcgcatcccatctctcctcccacctccacttccaagctcga

SEQ ID NO: 92092 - DNA, 259 bp, Glycine max
cgtcttttcggtactttagagcgattatatcataggaattgaataatgaatgttgttttaggttttagctctatggtctagtatgtcttctatcagtaataacgtttttttctgaatattaccagaatgggcgtgttgcatcctggatctaaggcgatattttacatcgattcccctgtgaagtcgctcaaaaataacgataagaccgctaatagactccaaaattccccaataaacttaaaaatgcgaaaaagtaaga

SEQ ID NO: 92093 - DNA, 248 bp, Glycine max
ctcgagccgctcttctcaattctcatattccaatgtcaaatcctcaaacaaacaataaccgccaccagcccagccgcctgcagcgccgcgccccctcctccctgcaataaaccgcgccgtcgagtggaacgtcgccatccccctcctctccccgctcgcatcctctccgccgccgacggagctaaaaccgtcgcaagagccgccgcagcgggaggcggagaaggtcaccgtgtcgttcaagaagtggc

SEQ ID NO: 92094 - DNA, 239 bp, Glycine max
  unsure (1)..(239): unsure at all n locations
ggctcgagatacactggcatctggacccttagcttttgctacttagattcctggtctaccccagataaacaaactccactacacatgcgagagaggntgaagtctaaggatgtcgaggctggcaagggcccttcatcgatcccccactggcgtttggtatgggaccagggtctcatcactgatatggtcatgaactggaactacccaggctccggaactgaagaggacccgtatgtggt

SEQ ID NO: 92095 - DNA, 217 bp, Glycine max
taatgactatgatatacatagtggttaatgaaaggaacaagagaatattgaattgtatgccacatcattagcaaccaaagtataatttaatattctcttgttcctttcattaatgactatgatatacatagtggttgtgttggtcaatgtgccattgtacatgtctttcatcatagaacattttgttgatcaatgcacaagtctttgatcatttggt

SEQ ID NO: 92096 - DNA, 250 bp, Glycine max
tggcaaaggtcgatagattatttaagtgatttattatctattactattgcatattggaccggtttgtttaaacttagagtaagcaattttaaaataagcggatttaaaaaaaatgcttatttaataagcagattggatttgtttatcagaataatcagaaaactgttgttttaagcagaagtagtttagacatttacactaaaagttcagaaatctgtttattttatttaaataagtgttttttgtaacg

SEQ ID NO: 92097 - DNA, 248 bp, Glycine max
gtcaggatgcggacttttttggttgcagcgtgtgttattgcactggcgcaaccgccgtctcgcatactaaggacctgctgaagagatctccgttcttcgatgtgttcgccaacttgcaagacgataaaactggaattttccagggcgaaaagtatgattccggctacatcaagatcaaggaagcttttggccaagcaggtgaaatgttctactggcatttccctgcccgaacatctgcagaacaagct

SEQ ID NO: 92098 - DNA, 230 bp, Glycine max
atagtgccctggtttactgcatatagaattattctcagcggggaaatttactttctcatgcactatctgctagtgaattttccttctcaaggcaaagttaatttggcatttccttgaaattaagctggaaaaaaaatctaaggatgaatttttcatgtaaggggtcattcttaaatttttacattcgttttcaagagattaaactgaccctaatagatgtcattctagct

SEQ ID NO: 92099 - DNA, 247 bp, Glycine max
ggttgatgagtatttggaccttgttgatgactgcgacaaccaccactttgcttctgttgctactactacggaccattactctcatcagcaccaacatttcgcgtgttgtttctcacaagagttatgctggggacagtgttgttccggttcagcaccaccagcattttcagcttggcttggagtttgacaactccaaagctgccttcagttacaatgcttctgttaatcaaagtgtttcagtttcatc

SEQ ID NO: 92100 - DNA, 236 bp, Glycine max
  unsure (1)..(236): unsure at all n locations
ggctcgagtactttttcgatttgttacaccgcattacctgctaccacacttctatgcctatacannnngctggtgctgctttgggagaataaggtttccgagcaataaatactggattcatttgatgacttttaaagtcttcaattgtgtgagtttcttttccagtatctaaaatttaatgtgcataaaaatcttgttaggttgtgaatggtagcttcttcctccccaaatcaccg

SEQ ID NO: 92101 - DNA, 243 bp, Glycine max
cagatgttgttgagcagctgttttatttcaatcacttgttctgttttcttcttgttaggagcgtggtttctttcttctctgagaaaggacaattgttttgagaaaggaaactgttcattcaaactctgggttatgatggggatcaagcgtcttcaatgttggagattcaagtcatgacaatccttttcttacattcatacattgagaagtggaacttttgctatgaagtattagcttttgatt

SEQ ID NO: 92102 - DNA, 262 bp, Glycine max
aagttgtctgtggtggctaccacacctgtgtcctgaccagtaatttcatgctggtgagcgttatacttgggttcaaatgaaaatggctgccttggtattggttcctcggatgtcattcatctgcctgaaaagatcaagggccattcttgaagtcttctgttagccagctttcttgtggttggaagaatactgcagccatttctgggtcatggaagtgatgtcgactatataaatcctacaagagtttgctttggagaagacg

SEQ ID NO: 92103 - DNA, 258 bp, Glycine max
aagacgaaactccttggatcgagattatgcaatgtccatgatttccatgtctgcagggatctcctaaatgcttctttcacgttcatcgtcatgtttacccttcctccttcctggaagtagatgcccctgcaaaatgttaaggagtttgtttagaagtgttactttcgattatagaagacttttttatttttatttacattatttaacgcaacatatgtaaaatcatttcaaaaaagtgaagtacattttctaaaaaga

SEQ ID NO: 92104 - DNA, 256 bp, Glycine max
tttttcagcttgtgggtcgatgtcaactgtgtcaaaagatgacaacttggcgctttcttcggaggactcttcatgcccagaagagtctgagcttgaattgggtcttgggttgagcctctcctctggctcttcatcaaaatctcatcaccaccatcatgctagaatttacactgctaaggattttccttcttctgcagcagcagcagcagcagcagcatcatcaccttcctcttcttcttcctctcccaacaacatc

SEQ ID NO: 92105 - DNA, 156 bp, Glycine max
  unsure (1)..(156): unsure at all n locations
gtgaagacggaagagtatccttcttctatcatatttggatttcgcccnaancgacatcttcaaccgcgtcattcatttcaaccttcaagctacggaagagcgatgaactcatgatattgattagcatctaaaaatgtttattcttccacacaacat

SEQ ID NO: 92106 - DNA, 250 bp, Glycine max
ctgcgactggcaaatggtcgcaaatgctcgttttagaagatttccccgaatggcatactcgcaagaacaaggtcttttggcgtggatctactacaggtggaggcaacaatcctgctggacgtcaacttgattatcagcggcatcgctttgttcgtatgacttcggataattcgagtgaacccgttggcatcatattgccgccaaaaaacggcactagcgacctaacctacgtggaattgcctagtgcacg

SEQ ID NO: 92107 - DNA, 147 bp, Glycine max
gtcgaagcaggttcaaacctcaaggatgaaccgttcggctgttgtactcttcgcgctctgtagaggctctcttagatgcgcaatcaggggcattggtacaggtatccttggagttgagaacttgggacaattgaatatcccatacaa

SEQ ID NO: 92108 - DNA, 244 bp, Glycine max
gagagttttcttatcaccttagctcgaatcaatggcctaccaaaactccatccccttctatgaaaaatactggtacaagcacaattataaaagggtaacagatagcttgcttttaatcctcctcttatcgctgcttggttaccgcgttatctctatcaacaactactctttattcccttggtttgttgcctttttatgtgagtcgtggttcaccttctcttggtttttaaccctaaccactcaa

SEQ ID NO: 92109 - DNA, 244 bp, Glycine max
agcccacattcatcaacgacccacacctatacgcacctgaatgggcgcaaatcttgaccgacatgacctataccgatccatcgtaccgcgccaagagtggtctaacatcggaattcgattcattccctccgtacatggaccacatggacacttatcagttcccaccatatccgccccagatgagcaatgtgctcggttcgctagcagacatcagcgatctgactcagatcgacagcatggactt

SEQ ID NO: 92110 - DNA, 157 bp, Glycine max
aacagagacgagacgagcgtgcctcgtaataatcatagcataaattcatcacgatgagagtgtgctatagtgagagttggagatggatcagccgttgtggagtgtgttgcctttgctaacaatcctggtctcctttggagtgttcttctacttgcag

SEQ ID NO: 92111 - DNA, 237 bp, Glycine max
gaagaacagttgcttttaagaaatggtatggaagcaataaatagtaatatcaaagagagaaggaatgctttcctatactcttgtatagcatgtattggtagagaaagtaccaaaaaataatcaggaagtcaaggttaaatacactttatccattaaaatgcactagggaatcatattcttgttcaccagagaagttctctgcttctagttcaagattttccttaatgaagggttttg

SEQ ID NO: 92112 - DNA, 257 bp, Glycine max
caagaaatggaggagaacaatcgaaaaattagtatcttagaaactcaagtcgagaagtataatgggaaaaactcgcacgtgccaatatctctatctccattgacaaaatctacttcagcaactcaaacagagcgcatcagaacttacatatatatacctcagatgatatggtgatgattccataatctcaggactcgatctcaggattcgtgcgccagaaacgacattctcaatctcaggcggagacgtgaacagat

SEQ ID NO: 92113 - DNA, 260 bp, Glycine max
aaggaagagctctgctggttcttcgagaagatcgtatagcgagagtgaatcggaatcggaatcagagtctgaatctgaatctgaatctgaatcagaagaagaggaacgtagacgaagaaagagtaggaggaatagaagaaaaagaagtaacaggagcaggaagaagagaagatatagcgattcagatgagagagaagacagcgagagcgatgactctgatagcagtggcagaaagcagaagaaacgatcttcttcctcaa

SEQ ID NO: 92114 - DNA, 258 bp, Glycine max
gtattatcaaccctcatactagcagcagcttgctcaacagctagtgttgtggatctccttctcaacacccatgggtctttttgccctccaaagctttgtagcaggtacaggatatctgcagttatggcttttttgtcatggtttctatctatggcatcctctctatttaacctttggctattaccctctgtgattctcatttaactcccctgtaaagttattagattaatcattatttattttgtatttttgcccctt

SEQ ID NO: 92115 - DNA, 254 bp, Glycine max
atcccaaactcacttggtctgattgaaacgactttgcggtggctaagcggtcaatgttcggtggcggaggggaggacgcgctggcggcgtggctgggcatgatgccgccgtcgctgctgaatccagcgtcggtgatgtccggcgagatgtctccggcggttccggcggcgagggaggagagggggccggcgcagcgccagtggagccagcaggagacgcgggagttcatagcgatacgcgcggagctggagaga

SEQ ID NO: 92116 - DNA, 265 bp, Glycine max
ctctcttcaacaacaagttgatgtgctccaaacccaattggcactggcacaagcagaggttgtacacatgagaatgcgccaattctcaccactatcagatcaacaacaacaaccctcagtgcttcctgaagcctccaatgcatcatcagagaacttgtaccactcaagcaggctcttgtcttcacaaaccaagtccctttttagcatggacatggtcgttgatcaggccaacatggggcaatccttgtggtcatactagcttaat

SEQ ID NO: 92117 - DNA, 253 bp, Glycine max
acgaagccgaacgcgtcttccagaaatcgcgaaacgtcgtcgtcgtggagcgcaacggaactggcggagagatgattccctgtgttcgctccagcaaaggtgcactggaattcgccgctcagacgattaccggcgaccaaacgtcatcggaacttttgggttcacatggggaacgttgcaagtagattggatactatagttgagcaagtgactatggttctacaacacaaaacatctaaagagtttaaggagc

SEQ ID NO: 92118 - DNA, 153 bp, Glycine max
cagagaagtctgagtgtacaatgtttctcttcttgacctctgaaacagaagagaaacattgtacactcagagaagtctgatgttgttcagctggctcaaagaaattccagtgaacttgaggacacccatttgaaagagccgtctgcacaatta

SEQ ID NO: 92119 - DNA, 246 bp, Glycine max
cctcagtcttggggataagataactttgaaacagaagggagccgcttaataggagtaaatgcccgttttctctgatgtttcttcgcttatatcaactttactgtaggctcttgtggcggctaatttgaagcaataaccaagcttgaagttagccgccacaagaagctacacaaagttggttattgcttcaaattctgcggcttttggtggcagcccgcttgttagtattaattttttttttccctt

SEQ ID NO: 92120 - DNA, 243 bp, Glycine max
gaaagatagaaagaaagaacaacaccacagctttagcacccagaatcaccaaaatagacacaacacaacacaaaactctcctatatctcccttttctgcacgaaagagaaaaccctctcaatggctcaccaatatccctcctctaatgaatctgacagccatatcattcctcctcaaccgttgaaattgaagaaaccccaccaacccaaaggaaaacaaatggggcaagaaaaggaagatgaa

SEQ ID NO: 92121 - DNA, 243 bp, Glycine max
ccaatgtcgacaaacggtttgccattactgcccttggttatttgattctgatgcaagcttagctcatcaagttggtgcaaccttacccgtgagtgtgagtctatgcttcctccactcacctgcatgtataagtggcataacggtctatccgtcccaatgtgggttgcagactataatttgacatgccataacagctcacatttaattcaaaccttgaaaaagtaacactagtcttgtaaaagc

SEQ ID NO: 92122 - DNA, 225 bp, Glycine max
cggctcgagctcgaccgaattcggctcgagggatgccaaagcaactttgctggagatgaggacacgattgacttagtagatctttattggcattctagatgagaacatagcaatgcacaaagggcaccaggttcgtaattagcatgcgtttccttatggagtggaactgagactgtgagtggattgccaatattgaggctagataatgctagtatcactcagttg

SEQ ID NO: 92123 - DNA, 166 bp, Glycine max
aaagtaacaaagcaaagtccatgttgtgttgctctcacatcacctgactttgtcgtaggatatttgatcattgcttgagatctgcttttctgcttcttctgggtcttcccagattatgaacattgaaacaccatctcgagcaattaggagataatctcgtgtatgc

SEQ ID NO: 92124 - DNA, 177 bp, Glycine max
acaatatagagcagattctatcaatctagtgcttattccttgatgattgctcagcggatatatcgtataccttcactagatgcaggcacatcacaacttgacgatattgctcgtcaaaatccccatgtcaagagggtatcatcacataatactcttaaaggttgagcggcacaggga

SEQ ID NO: 92125 - DNA, 236 bp, Glycine max
gatgcatccacggatcagacccatcgccggaaaaatcaaatgcgcggcgagactcttctgttcatcttcgaagatcacgccggcgggacgccgtagcaaatcccgacgactctcgcgggtctccgagcccgactgacggagaaatcgccgtcgctatcggatttcgtcgcgcttaaatcggacagcgcatactcagtggaggtcaaggagaagaagaagccgcttccgaagccgaa

SEQ ID NO: 92126 - DNA, 245 bp, Glycine max
ttcctgttcaatttgatgaggaagaagcttctaaatgactccaaaccaaaaggtgagattagtgtgaatcttctgatgctttggttctgattactcgccaaatcttgagtcattaaggatttagctccacttttctgtgctagttacacttaacatctctaggctcctatacccagacttaatttttagtgagctgtcagtgatagattttttttttttgtctgttcgcgactttgcattttctt

SEQ ID NO: 92127 - DNA, 219 bp, Glycine max
ctttctattgacgtgcatcatggaatgttcccaatgctctgtttcaccacatgtactcatacgacgtaagtaactagatcgctattacacgcgctcaggacagggctagcattggcacgctgggaggaccagcagcatatgtgctatttgcacactcactcaggctaggtgactgtgaatgcagaagctgggagcgcattgttctattggctagttgag

SEQ ID NO: 92128 - DNA, 164 bp, Glycine max
agaaggcacgctcgggcacggaggaagagagaccatagacgtcgtgctcagtaccaagtttgaagagaaaacgttgatccgattccgaatttgcaaattagaatagaattcttcttccttccctttggtatcccgtatcagtatgcagagatccagagacgatg

SEQ ID NO: 92129 - DNA, 238 bp, Glycine max
tggatattgaaacttgagggtggcgcagaaaagcgatattctacctatatattgtttccgggcatgccacgtattcaatttgatcttggcgccacataacagaatttagcttgagcttgcatacaacaagtagaatggctctgaaacttgtaaatctagggtttcactcatcgatcccgtgttctccgaggcccttgaacgatcggttcgtggttcggtgctctaaagtggaacaaat

SEQ ID NO: 92130 - DNA, 252 bp, Glycine max
cataaaatttgacttattttgattttttatgattgatactagtgtgagcagttgataagagagatgatgatcaacgtgaaggaatcgaccatggtgcggccggcggaggaggtggcgcggttggtggtgtggaactccaacgtggacctggtggtccccaatttccacacgcccagcgtctatttctataggtccaatggcgcccccaactttttcgacggcaaggttatgaaggaggcactgaccaaggtg

SEQ ID NO: 92131 - DNA, 248 bp, Glycine max
gaagaatggaacttggagataatttgctgttatgtagtgataaataccctgaaatggctgtcgtgcatgatttacttttctgattgcaaggagaggaaaatgcagaagaaagttgatgaggaatcaggtaaagatcttgcaaaatgattcattgaagaatggaacttggagataatttgctgttatgtagtgataaatttgtttttatgtggagttagtgatgagaatttgaataatgtacaagatgt

SEQ ID NO: 92132 - DNA, 245 bp, Glycine max
tactgagcgtgagagcacatgccgggagctgctctttcgaaacgcagacgctttggctgtgaacgcgtccacgcgggaagaactttgtgagcgcttgaatcttcctgctgaatggattagcgaggcactggcggtgagggctatcgtaaagcaggagcgccacgaagaaattgcgcactgggtagctgctcggcactatgaagaagctcatacgtgcttgatttcgcatgtagcgatgcgctgct

SEQ ID NO: 92133 - DNA, 247 bp, Glycine max
gctttagcgagtcttcccctccgctaccgcagaagtagaagctgaggccgtgagggcaacctcgacggcgttgtgcaaggacgacccgaagttgctctcacggcctcagcttctacttctgctttagcgagtcttcccctccgctgccgctgcgccgtcgtgccacaccaacgtcgggtcatctttgcacgacaccgtcgaggtcgccctcagcctcaccctcaccctctacctctccattctcgaa

SEQ ID NO: 92134 - DNA, 246 bp, Glycine max
aacaacgtggcctatatcaaagcctgggtgtgattcggggtgtggagatgttcccattccttatccgtttggaatgaaccgttcggattgctatgcaggaaaatggtttgaaatagaatgcagaaacagtactagaccttacctcaagtctataggattaggagtggaggtgttatcctttgatgtgaatagaggcacagttgatctcaacaatccgatttaccgcagtaacaactgcggaacaaa

SEQ ID NO: 92135 - DNA, 238 bp, Glycine max
tttctttctcaccctgctgtaacattgcttacctagctagctaggtagggacatctctccctctttctatctatctatggagcacggagacactaccacagtgatcgaaacgtcgtccggtgaggctgtggcggcgcatggcggtcgcgaagtgactatgatggatgcgaattccggtgaagaagagaatcataatcataacaataaaggaaaattagaagagggtggtgcagaagaa

SEQ ID NO: 92136 - DNA, 245 bp, Glycine max
ctctcgctggtggataacgaaatttcttaggtaattctctcttctctctctatctgatctctccacgattattacggtttgcttcgatcaagttcaatttcgtttttcttcttcttttcgtttgtgttttgaagaaattgaagggaaacaaattccgaaaaatgaaaaatctcgagcgatcgtttttctttgctggtttttgttttgtaattctgcgaaattggtgatttgttgaatgatttgct

SEQ ID NO: 92137 - DNA, 267 bp, Glycine max
  unsure (1)..(267): unsure at all n locations
ccaaagcgcaccgtcaccgtaaacaaacggtggtccaggagggtggttgtatccagtggaggcttcaacctacgaacttgtccttataatgacacgctcacctacgcttcttctctctctcacaccccacacctccttatacacccttctcctctatctaacaacacccaacaaaaataaaagataaaaaacattagggttttcaatttggggaaataaaaatagggggaaacatcccagaganagtgtgtagaaatatgggtgtcg

SEQ ID NO: 92138 - DNA, 272 bp, Glycine max
cggctcgagcttaaattctctcttgtgtatttgttgttataaataattggagactaacaagttattcatcatgataattaataaaaaaaatatgcttaaccagaggcagtgttgttaaatagctgctacagtgctattgcattgcagaatttcttggacctgcaattgtggttccctccgctatcatggctgccatcaatgttgtggttgtggcatgcatcctgcatccttgcgagtctccagccaattgaacttttgagatgatattatgc

SEQ ID NO: 92139 - DNA, 273 bp, Glycine max
gaaagcctcactccctcaccggcgtctggaactggaagcaccgtcgcagtgattgagaacggtaatagtatttttgctttagccggataaagactttgaatttttcgataatgtgaaaggagaataatacataatgtttgtttgttggttggctggaatattagtgccttacattcctattctgtattggaaaagcaaaccctaatatctcttcttccccttcagctcagctcttgcttcttccaaagtttttgttaattctgaggtttagag

SEQ ID NO: 92140 - DNA, 267 bp, Glycine max
atccatcttcctcaccattattctctttttgctgaatagtcgaaactagtcgaccgttaccgtttgccgttgaaacctaccatacggctcgattcccgcttagtcgcaatttagtcctaacggtcgcacatcacgctacaacatcgtcatggccggtgcactcccagaaaagcagctccatgagctcctctcccgttctatggtcgacatctacgtcggaaccgagaacacacactggattcttcatgagaagctgctctgccatta

SEQ ID NO: 92141 - DNA, 270 bp, Glycine max
gcgaattggtggctgtggatgtgagtttcatggggaagacgcattttgttgtggaggagaagcgggttagggggggtgatgacgatgtcgtggtggcggagagcggatcgccgccggagagactgatggcggagatttaccagcatttcgcgaacccgcggagccccgggagtgatcggtccaggaggcagaggcggcgcgagaaggagaggctctacgggaggaagtgggagcctcagcattttgtcaagattgtcaactgctcgccga

SEQ ID NO: 92142 - DNA, 264 bp, Glycine max
aaagaagatgagaagcttaggaaactcgccaaatgcgcaaactttccactctatggtcactgggtatgctgccgttggagggaattatcaaggtgacagaactgtggggtgagatgaaagctcttgcttcttctatctccatgaagtttgatcaggaacttcttgattccgtgctgtacacgtttgtgaggggcggattctttgttcgggccaatgaagttgtggcaatgatggaaaaaggaaaaatgtttgttgacaagtaca

SEQ ID NO: 92143 - DNA, 263 bp, Glycine max
caaagaatgtgtgattaacaattcctggagccctggacaggaatccataacatgattcgaccccaaaatagcaagaatcagaatttgaggaaccctcgtctcatcgaagcaaaaattcttcaacacagagaaaataaaaagtgagattctattctaccattctttgtatcctctgacgttctctgttctcccctcaccgtactctcccgcggaggatccaccgtacgccggagaataccaccgcacaccatatccctctctct

SEQ ID NO: 92144 - DNA, 254 bp, Glycine max
catagaggatgttcatttgaatggtgacaacagaatcagcttaattgttgcagatttctgcatgggatgggctttggatgttgggagtaaactgggaatcaaaggagccctgttgtgggcttcaccagcagtttatttggccttctatacaacatccccaagcttatcgatgatgggatcatagattctgatggtggactaacactaaccacgaaaaagacaattcacatatcacaaggtatacctgagatgga

SEQ ID NO: 92145 - DNA, 260 bp, Glycine max
gcaaaacttgttctattgtgtttctgtgttaaactgcaggtggggattgtgctaatgtgtaaagtcacccaatacgtttcaatatacctcatgtacttgatcttgacatgttgtgatcattgcaagaaggtgaatccaagtttgtttctagcgcctcaagcgttagcagctcggcaactacagaatcaaggcctggaccaaagctagacctgagacgttttgtcttgcatcttgaaggtgaggaagagttagttgaggtg

SEQ ID NO: 92146 - DNA, 253 bp, Glycine max
tatcagtccacccgcaagaagctcgagacgcgtcgtctggcttacgatacttctctggccaagatgcagaagacgaagaaggaagacttccgcatggaagaggaactacgcgcccaaaaggccaaatacgagagaccagcgaagaggtcttcaggaggatgcaggacatcaaggagtcagaagtcgacatggtccaggacctgaccgctttcctcgaggcagagctcagttactacgaccgctgtcgtgagat

SEQ ID NO: 92147 - DNA, 229 bp, Glycine max
gccgaagcgggaagactcgggcgagtcggtcgacgaccaggaccgcgtggtgcaccagcaggagctcgagggcgccctgcgcgagatggcgctgtgccggcgttgtgtaaccaggcgacgctgtccagccgagcgaggacaacacgcagtgggaggccaacggcgaccccaccgagattgccctgcaggttgctgcgcacaagctgggccgcggcaagccgttccacac

SEQ ID NO: 92148 - DNA, 256 bp, Glycine max
ggcaatggaatggttcagatgccccgtttctgggcttttactccccctgtttttacttcttgctttcttcatcttctttccccggaaggaacaaaattatgttacccacttgcctcctccttcgttccttccactatcaaactcaactacacaaatataaccattttttctccctctcccttaccacaaccaccaccaccaccaccacttgagcttctttccatctttgctcctgcaaatgaaagctacaataaca

SEQ ID NO: 92149 - DNA, 129 bp, Glycine max
caagacgaaggttgtgtacacgatatgcgagttcatttaatttctttgtgacttctaacatgttattggctcccagtttgttagcttgtggaccaagaggtcgacaaaaacaaaaagaaaacaatttgc

SEQ ID NO: 92150 - DNA, 194 bp, Glycine max
caatacgactgttgtgtacacgatatgtgagctcatctcatttctatgcgacttctagcatgttcttggctcccagtttgtcagcttgtcgaccatgacgtcggcacccacaaagagcttacaagtttggacgttcaggttgctccgcctcaggccggcgaggtccgcgtccacatggtcttcactgctgtctg

SEQ ID NO: 92151 - DNA, 208 bp, Glycine max
  unsure (1)..(208): unsure at all n locations
catctccactccttgcctctgagaggtcccatagaactacttccaagctcaaagtcaataatgatgcaacttcatcacacgatgacttcgtcgcagccacatcttccacccttcacccacacgaaattccacacaacataagagggaaaaatctntgcaanactcatacatcagcttcaccaaagtattccatcagttctacacaaca

SEQ ID NO: 92152 - DNA, 244 bp, Glycine max
aaaaagtttagtggccatgggaatgggatgctccagatgctctatttctgcactattattccccctgtttttctttgtcctttccttcatctttttctttccctggaagaaacaaaaccatcttagccatcactttgcttatgctcctcctttggtcctttccactatcaaaaactcagacaaccacacaaatattagaacctctctttctccctcaccacaaccaccaccaccacgatttgag

SEQ ID NO: 92153 - DNA, 247 bp, Glycine max
tctcgagccgattcggctcgaggagcggtaatatggtgttccacaactgaatctcaactccactgttctgattctgaatgaatctgcttctgctgtctctgcacggaacacaaaaacataaaaagttcattttcacaatcacggtcgcttcctacgactatcgaattcgcgtcagcctcaattctcatggagtttgggattgatgcctccattaatggtgagacagtaggaaatgctactatagtgc

SEQ ID NO: 92154 - DNA, 172 bp, Glycine max
ctcgagccgttcttattcgtttattattcctaaggagtttattctttttaatggatgtggttttatgaaagtgagttgtttgtcggtaggactagctgcttttaattgtcataggtatatcatgcatgatatatatttcctgttcagtgaattttggaagagggttaccatg

SEQ ID NO: 92155 - DNA, 246 bp, Glycine max
tctgcttctcctctcctcttttttgaatcgatttctctctttcccttcacaacatacatagaaaatttacacaacaatcttttgtgctgttagtattctcctatagttgttcaaatgtcaagaaggagcaaaagggtgtgctttagccccgatgtgaaagacaaaccaaccatctttctcaaatactgtggtgatggtggcaacggcaatgatgatagagtttcaagaaaccggaagaggatcagc

SEQ ID NO: 92156 - DNA, 248 bp, Glycine max
cttaaagcaaatatggatgctgcttcattttggagtcagcaaccattaactgcaagggagtatgctttgagcactataattccagcatgtgctgctgttgccaaggcttcaaataatgcaaaggatctcattgagaaagaagtgtctacattttatcgaagtccagataatagtctctacatgcttccttcttccccacaggcactgcttgaggccatgggtgctagtggaccacctggccaggaagt

SEQ ID NO: 92157 - DNA, 243 bp, Glycine max
cctgccatgccacaacgccagggcgcccatggtggaactcccccctttttcgttttgtttttaaaatctcttttaagggttaacttcatacttaaaacatatcaggcccccatttcattacttgtatttgctccttctctcgtgaaagcgtgaaacctagggtttcacatgtcttctctcttgtgaacctcttgagctttggcaagcttttccaatgaacaaatctggcaacctataacttct

SEQ ID NO: 92158 - DNA, 222 bp, Glycine max
cacacctagacaattggctcataaccgaagaagagcaagcaaaaatggttctcacatccactgcgctcacacccagatgacgcaagagcagagcctaaactatacgtttacttccagatctgcgcgtgaacctattccagagttcccgatgccggagaaatccatcccagaagttgctgcttatcggataataaacgatggctggttgttgcatggtgcacc

SEQ ID NO: 92159 - DNA, 244 bp, Glycine max
gttcattttcatattggatatggcatgagctcggcatcatgccatcttctatttttccaagtgtcagatgtggcttggaaatggctatcctcaatgccattgctgatgcaaaaggctctaacatgctgaacatactctatccctcaataaatgggaacaataaatgtgaaaggtcattaaatgttcagatttgtgcattaattgattcaaatggatctccaactgaagttgctaatgttgctgc

SEQ ID NO: 92160 - DNA, 222 bp, Glycine max
cattttcataacataataaaatagaaacttttgagcttaaggcctcaaaccttatgatttttaggctggttgggaaaacggggttcctttgcaaatctatccccttggatcccatgggttaatttaaaaaaaccctttggagggtttacccttcggtggaaagtcctggaaccctttcccattttctagggcggaaaaagattttttccccaaaatttggaa

SEQ ID NO: 92161 - DNA, 245 bp, Glycine max
attggttttgctgttaatgagttaaaggagcatgttgagaactggcacctattatctagcaaagtatactttgttatgcaagttgaacccctgatatcaagaattcgcacttcagggctcaatattttccagcagctgagggattctcagaattgtctccctggggattaaggttcaaaatgtttagatctgtgtacacaaacacttgggctttgggggcatgaagaattctccccagtcattag

SEQ ID NO: 92162 - DNA, 242 bp, Glycine max
cggctcgagcggctcgagctcgagccgaatcggctcgaggaaataccgtgctttctaatctactaattttacacgtaccttcgacgttaattcttcgtgttcttgtgatctttctgttggagtatttacaacactcctttgtaagtttaactaaagaggctaattaattttcaattggaccgcagcagatggctgaggagggtcacagggttactctaaatgtttatgacttgagccaaggt

SEQ ID NO: 92163 - DNA, 242 bp, Glycine max
atttgtgtgaaagtgagacggatctgtggcaattttcgctttctttatgttattgtgctgttcaatttcgatgttgtcttgggatttggttggtgggtttttgttgtcaacttgttttgactatggatctgttgggattagtggttttcggcattgaaatcacgtgcatttagttcgtggttctgcatttgttgctagatctgcttttgtctgagtggtcaaattatagtcatgctgaagct

SEQ ID NO: 92164 - DNA, 203 bp, Glycine max
tgctctcaatgtgtggtttggaagtttgcttgcatgtaaattgtttcatgcagatgtacatgcaggaaatctgtggcttctacatgatggtcatattgggtttcttaacttcggatgttgatgctaagacctttgccagagatttggaaaaagtattctcatcaattaaggcaagtattgtaactcacatatactcacttgtc

SEQ ID NO: 92165 - DNA, 245 bp, Glycine max
agagaagcaaaaaatacaaagaaaatttgaggtggaaaaagcaaaatcgttaggtgggaatagcacgggcccaacgaatgacgtccaaaaattacgtaccatgaactgaacagaaattaggccgaacaggtaaacataaactgaataaagagagagaaacgttggtggccatgtaatgacagagaggccaacgaggaagagaaaaatgggagacacaaaggagagagctacgaagaaacccgcgg

SEQ ID NO: 92166 - DNA, 238 bp, Glycine max
ctttatatcctcattatttgaagttagctctagtaatttgatcgagtactatgaatcctagaggtttggagggagcaggaagaggaagaggaagaggaagagtcacaacccttctgattaagtgcacgttggcaggtaaatgggaaggggttatcgacatgtaccgtaatttcccaacgtgtcagatcacaaagatcaccgagtccctgggcactgcactgcacgtggccgtagacat

SEQ ID NO: 92167 - DNA, 239 bp, Glycine max
atttcttcttcaattcatatcatatcaattagatttgttttcagagtttgctagtgagataccatggacaactacaacagcaatgacttttggaaattcagtgaccagttgaggcttgaatctggtttggccaatctgtctctgaatgattattccatttggagcaacagctacagctccaagaggcctgatcagaggaggaactttgatgtcaagggcagtgatttcaacaactcatc

SEQ ID NO: 92168 - DNA, 244 bp, Glycine max
attcccagttccctttgtcaagtatggctcttaatcttctaaatctttcaatcttgttctttttactctttattgtgaatccatttccctttgtcgagccaagagccttacaattacctgtgttcaccaaaactctccaaaacctcaggggcgttcacaagggacaaaaggcgaacggtgtgggagaactcagaagctacctccaacattttggctacctaacaaacggtgattcttcgaacga

SEQ ID NO: 92169 - DNA, 240 bp, Glycine max
accactctctcactcttctctgatatgctttttctttttattttttgcattatttttaatctctctaggttctactactactctttaacaagcaaggaatgcttcaccattaccgtactcacaaccatcaagtgcaaattgcaaaacactagaaagaaccctgtcttctctttctttctcgagcccctaccttctttactatctctctctctacttgtgtgttgtagtcctgtagtaata

SEQ ID NO: 92170 - DNA, 239 bp, Glycine max
ctcgagccgctcgagccgattcggctcgagcatgaatgtgtagaattgcttaaagatataccaccaaacacgtttattagacatgactaaggtttatcatgctaagttttttaacatctgcaagaaacgaaaggctgtcaaagaagcttttgatttcattaggctcattccaaatccaatgctgagtacatttaatatgcttatgtcagtgtgtgcaagctcccaagattcagaaggta

SEQ ID NO: 92171 - DNA, 236 bp, Glycine max
gaacgacaaggttccattcaggatacaatggccacagtatacagacctgcaggtcaatggtgttcctgttcgtgcaactaacagacctggttcacagttgcttggggctaatggtcgggatgacggtccaattatcacgccatatacaaaagacggaattaataagatttccttaacaggatgcgatgctcgcattttttgtttaggggttcgtattgttaaaaggcgcacatgca

SEQ ID NO: 92172 - DNA, 238 bp, Glycine max
cagtgcacagcgttttttatttcttatttttgtttgatttgggcttcgttatttttgatgaattgtcacttggatgctgagatattctctagatgtacgatattttggctccttgctggtaatcctattagatatacgtgttgaattttggtacaggtttaactggagtagtgtggtaagatgggaggtggatttagagtgcttcatttagttaggccgtttctatcgtttcttcctg

SEQ ID NO: 92173 - DNA, 239 bp, Glycine max
gtccagcaaaatacgcaagtatgtttttggattctgttgttgtggtctttgacctcaaacaatgaaagcaaggagaggaaaacgctcagaggctttctggccttccattgtgatgaaaaaatggttaaacatcaagcctaaggtgaatgattttagtgaagatgaagttgacactgaaactgaaagtgaagatgatgcttgctcaattagaggctcaagaatgtgtgtgcgtgaagata

SEQ ID NO: 92174 - DNA, 238 bp, Glycine max
gctcacttctacttcgtcccggtaccctctctctctcaaccctaaatctcaccgtcgccccccaaagcctcccttcttcaatgattcttcttcttctccgtgttcacggcgtcactccattgatatctacctcaaatcgatgagagtggaatgataaaccgaattgtcggcgtgttcgcgaggagaggatgcaacatcgaatcgctcacgtttggcctcaatgaggacaaggctattc

SEQ ID NO: 92175 - DNA, 293 bp, Glycine max
gtttttgcccaccacttttgctttttctgctcaaattctgtgctcatcgccctcgtcgtgttcactttgtcactgctaatggcatttttgctggggaaacggcgctcttcgcaaaacgaattggcaaaacggcgcagagacaaatcgccagaaggcattgaattggaggagaatcccgaggtgttcaaaagttctttgctgaaggactccaaagaacacatcatcagtacgtactttcctgatgtgcgcacacttttcgatgctttccaacgcggtctcaaagctgccgaaca

SEQ ID NO: 92176 - DNA, 170 bp, Glycine max
gtttctctctacaagtccatatgtaaaatggataacagaaagaaaaagaaaaatcactttggtttgagaactttttaaagtttatattaactgtgttaaggttcataaaactgtagactgatttgtgtgacatgctccacagaaccttaaattttcctctattttgtcct

SEQ ID NO: 92177 - DNA, 287 bp, Glycine max
agaggtgaaaggaagacggtaatctaactttcatgcttacgtcaccaccactcactctttttctaccctaaaccattgaatcgatctaaatctctcccaaatcgcaaaccccttttgctcaattcagtcaattctctccctaagttccgctgtcggcgtctaggttttggagcatacgacaaaaacttgggtgagggagaacgtttccagcttgggacggtgggcgcgttgactctttctgtggtctcatctgtgtccattgtgatttgcaataaggcgctgatgag

SEQ ID NO: 92178 - DNA, 289 bp, Glycine max
caattccaatttcagtcacaaacaagtatacaattctagaacacaagcttctctcaaatttcaaagccaaaaaatgtcaaccaccattgatgtcccagaatcaagcaatgttgctaaagaaaaagtagttttagctgcaccctcaaggtctggagggtggaagaaaggggtagcaataatggactttattctaaggttaggtgccatagcagctgctcttggtgctgctgccacaatgggaaccagtgatcaaacactccctttctttactcagttctttcagtttgaa

SEQ ID NO: 92179 - DNA, 284 bp, Glycine max
tataataattatttaaaagttatatcaaattattaacaatcacttctggatgcttgatagtgaaatgtttttgtatgataagcatttaactcacaatacataagttgtcatatactataaactatgacttatgttaaatatgttaaactgaaaaccatgtgaatggagagatctacagtaacatattcttttttatgcttttatttactaatctcaccaattcaactgctataaactatgacttatgttaaatatgttacactgaaaaccaggtgaatggagag

SEQ ID NO: 92180 - DNA, 283 bp, Glycine max
agtcaacctaccaacatgaagctgaacagcaagagtttgagattgtcttgcaaatcccacaatcccgggatcaaaatctcaacttgcacactacccaatttcctaattcgaattctccttctgtgtctctgttgtttcttggtccctgcatcttgttcccggaagcccccacctcttccaattttgcccctcccaacgactttccagctccaatggcaacttgacggcatggccctcttcttccacttcggcaccaacaccttcacagactcagaatggggca

SEQ ID NO: 92181 - DNA, 286 bp, Glycine max
gcaaatcatatcagccattgggaatcgagataatgttaatcctcgtgtaaatgcctcgagctcgttgaacaagtctcaactaagaacagatggaggccatctacttggccacaatatgacttctggcagtacttcaatactaggaggactcccaatacatggtgggatgagtactcttttgaggtcaaatctgattaccagttctggttcaaaatcttcccaagcatccacagctgatttttctggagtaggagttggaattggacctcaaaattgtgattcttca

SEQ ID NO: 92182 - DNA, 138 bp, Glycine max
ggaaattaatgaaaccgtacgtgcgtgcgcgagagaggttgtcgatttttgtttccattactgcatgggaagccaacaaggagtagaaatttctatttttgtcttgaattagattatgcttacaagatttgtatagtc

SEQ ID NO: 92183 - DNA, 263 bp, Glycine max
ggaggttgaacaagaggaaggagcaactgacattttttggcggctttagccgccagtacctttatcttattaacgacattacctttgaatgcacggtagagaccaatttaaattattttaaatagataaatgattatattttactcaaaaaggtgatcaaattgaagtttttaaaaagaagataaagaactaaaacaataatttgatcttaatttaattatattttattacttatttattttgataatttttagcggttagaa

SEQ ID NO: 92184 - DNA, 262 bp, Glycine max
ctccgcttctgtcctccagctctctgaatgctatgtcaggcaggaagctctactttaaatgtgaatgtttacaaaaggggtgagaagtggatattttatgaattctacaaaatttagatgctatttttcatctcttgttttttggagttattgatgtactttaaattcgatcacacttttggctaaaaaataaagaagaaaagatgataacacacttccttgtgttgtgtattctgtgcccatcagtggagcttttaaattt

SEQ ID NO: 92185 - DNA, 158 bp, Glycine max
gttcgtggtcgtgtgtgtatccatcaaatatatagttccaagcctcaaaattctagctatatagtacgttaagcgtccattgatgtagctttgattaatttagtgtatgtttgatacaagatatttaatttagagaattaatagttttatttttatcg

SEQ ID NO: 92186 - DNA, 264 bp, Glycine max
gcttagttgagactaaactgaaggagggagatggacacaatgttctgaaacgctcttcttcctacaatgatgagaggacatttaaagaccagaaaccacaagaagacaaagaggaatcatcctcaggacattcaaaatgcattcctcgatcaattaaggcttcattgaccaagcatccccgaagtgaatccatgagatctcctgtctctgacgtaccacagaactcatcagatagaattgatggctcaggcatatcccctgtaa

SEQ ID NO: 92187 - DNA, 259 bp, Glycine max
ccaaaaaagacattgttgcttttcattttggcatcacagagtatcagagagaaagagagagagagcggttttgcagaaaaaatccaagtaaatttaaggagccaccactgttccaatcagcccctttcattttgcagtgcccgtttattttttcgtgtttgcattcaccgttccacagaaggcaaaaagcctgctttgttccatctctttctgtggtgtgtctcaagataaaaagctcactcactcacagcagcaacaa

SEQ ID NO: 92188 - DNA, 125 bp, Glycine max
cgcaactaaaactgcgtgtgaactttagtactataatttacaatattgggtgaattgttattcctgaaatagtacggatcagtcaaactggtttctgaaataaataaaatagcaaattagtttct

SEQ ID NO: 92189 - DNA, 132 bp, Glycine max
cgagtctaggtgccctccttataccaagaaacgtttgattccagattccactgtcatttctacccgccatgcctctttgagatcagcaaagaagcttattgaaactagaggaacatctgttgatgtagctca

SEQ ID NO: 92190 - DNA, 240 bp, Glycine max
atcccacggtaaagctaaactacgagagaatcataagatttaagccaacatacaattagaaacaaacacagaaaagaaatgacttatttctagctcctagttatttgttttttttttcatttttttaagaactaagaaaactagtcctatagaggacatgtaattatgttcaagatacttatgttgaatgtggccaactcttggatgaccacgtggaataatacttttatttattttttt

SEQ ID NO: 92191 - DNA, 280 bp, Glycine max
gatatccatctttgcttatttttttctctcccaacatttccagagaatgaaatcaaaatatattaaagagtagcttatatatttgttactttttcttttttttggagaaaatatatatatatatttgttacttattagtaagtcaatgtcaaacatgagacacccctcggttgtatgaaatgaaggagatgttacaagacccaaaaggttgattcaatagctcattactggaaataatcatatggtaaataatatatctttgttctattgactccctaaa

SEQ ID NO: 92192 - DNA, 274 bp, Glycine max
cttttcttacttaagacattgtggctatctgtgacatctcgggttctttttgtacttgtttttggacttgatactgatctattatttaattttttagaatgccttcattttggcttatgctcttttggatatctttgattaacttctcatacaaatgctgctccattaattaagtattgttttactcacattggtttcaaacatcgacttgattaattaccctctcctcatatagaaaagtatttactgtaattgtgtgttgtatcacacatgt

SEQ ID NO: 92193 - DNA, 266 bp, Glycine max
gatttccctcatactgagtagtgttctgaattgtgctttttgatatcttaagccatttcagcaacatgagtaaccacactcgcgcgctaccaccagcagctacccctaagatgcagcaaaggaaggagcgacaaaggttctccacttctgatgacagtgccatgaccaagcaagttcaggccactcatgcccctgatggtcgtgaaattgatgtcaaacccattctccaaattgtggatgacatatggttcggttcatcgctcgca

SEQ ID NO: 92194 - DNA, 265 bp, Glycine max
gcgtcttcaaattagggttagggttagggtttttttgttacaaataaaattcctattatgcttctgcttttgtgtgtgtgtttgtgattttataattattcataattgtgtgttgaaaatgaaagccaatttgcagagcaagggcgtcgactatgaatgtcgcatcttgccttgaaggttggcgaaaacaatgacgattctccgtgcctatcaaatttactctgttttgatgatggcctcgaacaagtcgcaacattctttttat

SEQ ID NO: 92195 - DNA, 283 bp, Glycine max
ttctaatgacctcaatgtgacctcttctgcttcggttaaaacactaagcatggacaaagtgtaaaactcactttttatggctttcattgtcttcttcaacttgttcctggaagccaagtattttccacccacttttgtgaaaacagtttcatcactttccttctttggatgacagagtgaagttcctgcatgctttcctttgatatcaattggcactccttagctgtactgcagatatccaagagcctcagagacacttctagaatgtcatcaacgcacttgt

SEQ ID NO: 92196 - DNA, 277 bp, Glycine max
aaagatcttccttacaaaagtttgttttcaaagtgtgttttgtttcccaaatcctactcttgtgaccacaacccttcctcctctttcttttgaaacctctttttttctattccccaaccaaacaagcaaacgctactcactcatcatcactgagatcatggctcctaatatcaccactgtcaaaaccaccatcaccgacgctcaagccaaggtcgccaccgatcatggtcgtgcctacgtcaccttcctcgccggaaacggtgactatgtgaaaggt

SEQ ID NO: 92197 - DNA, 274 bp, Glycine max
ccattttccaaatcgccaaaataacgatttcccccaaaccctgagcttttgggactgtgtaaagattgcagcttgtttctgctattgattcaaattcgaaactttgatttggagcactcatccagcactacaaggatcttaaagtcactttgcagaacttcaaatatgattttagaatgtcatacaacgtgaaaacaaattcctctatatgttttactaaagtaggttctttgtgttgaatgtacaagtataaccatttctgggttttgtgtag

SEQ ID NO: 92198 - DNA, 270 bp, Glycine max
caaattgtcaaattcacattactctctcttcactctttctccgtcatgactacggaaccagacgttgaatccaagtatgcccacaacggcaaggtcatggtgggcaccgccattctcctcttcattctcataataatcattattttcttccacacctacgtccgcccctgccgccgtcgccgccgcttctctcattcgcttccgaccaattcctccgccgccgcctctctcgacgacccgtgcctcgacccttccatcatcaagtccctt

SEQ ID NO: 92199 - DNA, 266 bp, Glycine max
ccgctcgagccgctcgagcggatcgagctcccttcaacaaaacacaggggaagggaaagtagtcagtagtagcagtagtaacgtacgaaacaccatacatgagtttcttgttaccattaccaaccctcttgttgtgtctccttgttgtgttaatttattccctgcaatcaaaggccgatgaatttgatttcgatgagtccttgttcaatgcaaaaaccgcttccagtggcagataacttgccggaagatgcaacttgttccgtggg

SEQ ID NO: 92200 - DNA, 255 bp, Glycine max
tgagaattgagagtagtgcggtttgccggtgagatctgttgtttaagttagtgctgtaatgtcatgctattgctatctcatagatttagatctaaaatctcccttcttcattgctgaacgcggttaaggctatgttatgaatgcgttctaattaagacacaataatgacaaggcaacaagcaagttccacgagacgtggcggtctttcaggagtcttgcattccaaatccacatcttctcctctactctccatat

SEQ ID NO: 92201 - DNA, 280 bp, Glycine max
ttttatttgcatgtgaaggacaaattcagaaagtatacataatagagatggtggccatgatggagaggttgcaaattcaaatcagaaaaatagtgagttatggttgtatttttcagttactgatgtgtaattatatccccattgtctggtaaagtggtaatacccagtgtgtaattctttgggaaatgcttttttttttattttttttccttttgaattcagaggacatgtcaaaagtacttggttcatgtggtcaacatgagggagggtaatcctccta

SEQ ID NO: 92202 - DNA, 249 bp, Glycine max
cgattgattaatttatggttggcctttgacttcattaattaatttatctgtctatatatcataatcataataatagcatgcgcttgtatggtctgaacttcggtcgttgacatgcaatggttcttaatataatatgtcgtggtgtcaactgtcgagtcatgaacaacaatatctgagattgtatacacctttcctccttaaacacaccgaaagaagtgagatcgtaatgtctatgaacccattttatgt

SEQ ID NO: 92203 - DNA, 222 bp, Glycine max
cttttggctgattccttcgaactctctctctctcacactttcctacactttctcgtcatccaaaccctaaataatggcgtcggaatccaccggagacgagaaatcatgggagcacatccttcgccgcatgctccccgacggcgcgccgcttgccgactaggagcacctcgattactccatcgccgtcgagtacgaacgtcctccggattcttacgacgttcc

SEQ ID NO: 92204 - DNA, 157 bp, Glycine max
cgaaagcacaaatcttgaatttctggagatcagctcttgttctcagttgcttagtatgaatccatctattttgtctctcaagaagctcgagagattgtcttctcatcactgttcccttaacacgctcataagcgataatcatttaacctcccttaaa

SEQ ID NO: 92205 - DNA, 158 bp, Glycine max
tcggtggtaagtgtaagctgccagatggtaagtgtaagctgccggatggtatttgtacatttgagcattggaagtgaggcagtgcctgaaggaattattgctagaatatctaacttggaaatgcagcccttatgggactctggtaaagataatagtat

SEQ ID NO: 92206 - DNA, 158 bp, Glycine max
ggcaattgttttaagttaacacggctgacccagatgtaaagcctaagtaccctgttcctgagcaggcccataagcccagaagcaaaagcttgacctaggttacacatcaataaattggattgcagagggacagagaaaccctagggaggaagcagcgg

SEQ ID NO: 92207 - DNA, 150 bp, Glycine max
ccaccagctcctaagaagccatactactaccattctccaccagctccagtccaccaccacccttacccccatcttgactcgcaggcacaccctgatcctccagcagctcctaagaagccatactaatatcattcgccgccaggtccagtg

SEQ ID NO: 92208 - DNA, 156 bp, Glycine max
attgctcgtgtggcggctatcaactctgctgctgataatgatgaagatgatgagtgaaagttcattgcagattccatgtcatcgttgcacaactaaaactctcttattttgcgttcagtcaatcattttatttacatgtgctgtttattttctagg

SEQ ID NO: 92209 - DNA, 153 bp, Glycine max
gttccgaaactgcctccaggagtcgttcgcggagattgaggaccagttgagtaaaaacaccaaagcggacttcaacactgtgttcagtgacgcttccttcaacttcatgttcaggttgttctgtgatggcaaagacccttcgcagaccaacct

SEQ ID NO: 92210 - DNA, 153 bp, Glycine max
gagaatctaatttgaaacaaaaatgaaggccggtgcagttgagtctggtgaaatttcaaaaggagcacccccaagaaaagggttgattagagggctctcaataatggactttattttgagaattgttgcagccattgccacactcggaagtgc

SEQ ID NO: 92211 - DNA, 152 bp, Glycine max
gagaactgaagggtggtcatttccacagtattgtggagataactgaaaattcagggaaatgtcttctcaacgaatacatggtcgacgaaccatcttgttcaacaccaagaaagagactcttcaatttaccttgtgtttcatccatagaagaa

SEQ ID NO: 92212 - DNA, 162 bp, Glycine max
cggaatcggctcgaggtacatgagaagaaacgagtttctgtgtccccatttccaatggtccaacctttgaacacaaacctgtccattttacccagaagcaccgaaaagaagaaagactgtgtgctgtacccgcgtaaaacaagacccttttgaaacgtttcg

SEQ ID NO: 92213 - DNA, 149 bp, Glycine max
cttgagtatgaaaaaggacaggtactggagttgcaaaaaaagacagctgatttggaaacacatgttccagattgcagcctcaaaattgcaaagttagtggcacagctggagttggctgaagaacagcttaagatatcagatgatgaaat

SEQ ID NO: 92214 - DNA, 175 bp, Glycine max
ctccaggagtgctttgccttcattgattcactgtttgatgattgtcgatgaaggatccgttgtttcctaactgaatccgacaatatctatttttgcatcgttaatactgtctctcagtttgtcttaatttaagataaaatgcaatcagataatggcaagttatttatcggtggaa

SEQ ID NO: 92215 - DNA, 149 bp, Glycine max
tgttcttccttttgacacgcatagtgaaagacaatggttgacaatatgaagagaagtagctttgaagtgttgggaatgtgctgtgctacagaagaagcactggttgacagacttttgaagcctcttcgtggagtcaaagacgtctcagt

SEQ ID NO: 92216 - DNA, 126 bp, Glycine max
tacgtcaccatcagatgcacccaggccttctatagtttctaccttcttgtcaagctggaggttgatgtgtagggtaacttgaggagtgctaacaacaggcgagctactattgattgacaactacaa

SEQ ID NO: 92217 - DNA, 127 bp, Glycine max
ggagagcagtgagtggctccatgtcattgattacactgtgaaactgctattgattgtatcattgctagtaactctgcgactttttcaaaaggtatggaagtctcgcatcagattgcaaatgcgtacc

SEQ ID NO: 92218 - DNA, 268 bp, Glycine max
gaccgtgtcttcgtcgtagagagagagagagttcatatccaatctttggttgggtgggtgggcactaggtacaagttatagagatcgttagagtgagtgattgaaattcttgagacccacatcgtgtgtgtttgttttcattcctcggaggatattctaaagatggttgcgagaaccccaccaaagcagaagaagctgttggctgctctcaaccctgttctgattaaagaaacactcaacaaggtggatcagtgcgtggctcggctgc

SEQ ID NO: 92219 - DNA, 269 bp, Glycine max
cgaggagtttgttaactgtgtccgctgcattaaaatactttctcctcaagaagttcaacaaatcgagcttggatggagattttggcaatggtggccttccatatccagtaggcagcagctctgatggtgggaatgctttaatggcatccaggaatctgctaattattcttccatgttagtaacttacatcgtttttaggacatattcatcagtgtcgtccaaaaggttgtggggtcggtcggcagatgattttgtcctgctgcagcagc

SEQ ID NO: 92220 - DNA, 190 bp, Glycine max
cagaagcagaattcggtgacggagcgcggcgttggtccggagattgatgaagatcacacccgatctgctattgcgcttgatcatcatcatgatgaaaaggagagtgaagaaaacaacggaagccacatggtgtttgacgttgatcagggtttggatagaaaagatgacgaggcagagaagagttgtgatt

SEQ ID NO: 92221 - DNA, 168 bp, Glycine max
tgggaaaacaaaaacaatctaagttatgccatttcaggctaaatagtctttgtttattgtaaacgtcaacatgtcatatagtagtaaagtatatttggcctgaaatggcagagcttagattgcgtctgtgaggggtataatgagccttagatggaaggagggaaggaa

SEQ ID NO: 92222 - DNA, 264 bp, Glycine max
gaatcgcaatcgcctcaggaattcaagttatcaaacaaaatgagaggcagaaagagttccaacttcaaatagatagctcaatgaaattaattgtagttctgctgtatttcatttttggtttacctttgtatcttcggaagcattacaattttatttgaaatgtaaaattttgtttttccatgtgctggacctttagacacattgttttgattcaggaaaagaatgaaaaatatctatagttagccaatatccctttctctccat

SEQ ID NO: 92223 - DNA, 155 bp, Glycine max
gctagacttagctattcttacctcttggcatgaccattcaaatgtcttctttactcttagcttctcttgctgtattctatttcttctcctccttggagaagagttttgcctttaaagcagcaagaaaggaggacacagcaagcagcaatcttcat

SEQ ID NO: 92224 - DNA, 261 bp, Glycine max
ccgagtacatagatgcgatgaggaaggctaatcctgacctcttatgggccatcgacaagaacaagagaggcatattttcgcatgcaattctcaatcgtagaaaagatgtcttccgactcataaaccgtgtcaatggacggaaggagatcatcaaatgtcgtgcagacgcgtttggcaacaacctcttgcacttggcagcatatttagggccttcatccgatctcgatcgtagatccggtgctgctcttcaattgcaaaggg

SEQ ID NO: 92225 - DNA, 108 bp, Glycine max
cgactatagtgagcaatcctgtttgtggttcatcaatagaaggtgaggctaatggttccagtgatggtgcaaagaatatggcccccgtgaattctcaatcatctggag

SEQ ID NO: 92226 - DNA, 117 bp, Glycine max
tggaagccatttacaatacaaagtccaatttgattaggtgaatacagaggatgacacagaggtaattcctattttaatagatgcacacatttcggctcttgtttggaattatctatt

SEQ ID NO: 92227 - DNA, 109 bp, Glycine max
cgaattgattcacttcgacgccggcagttagagtcgaattccccaatggcgggttcttcgatcatggagaacactattccatcgcacgttcgaggatctgatcaaaggc

SEQ ID NO: 92228 - DNA, 110 bp, Glycine max
ctctcagaaagaacttccttcaaccctttcgtgaccttcttgccagacttaaccgttctgccactactcccccagttacttgcttagtctctgattgcttcgtcactttt

SEQ ID NO: 92229 - DNA, 104 bp, Glycine max
actctagccgaatcggctcgatgaaagaattcccttcaatgaagaacgtgataatttgtccaccctttccaagacaatatctcaaactgataagtctcctaaca

SEQ ID NO: 92230 - DNA, 106 bp, Glycine max
ctctattcctatcacccttttaaataccgaaaatgcaccccgctactcagcacagaacgaagctgccatcgataacatatcacacttgagacagttatctttatct

SEQ ID NO: 92231 - DNA, 108 bp, Glycine max
caaagactaaagcagctgatggacccgagagcaaaaagatttctgctattgtgaaccatgataaaagcaagacagcagccctcccagaactgaaaatcagaacatccc

SEQ ID NO: 92232 - DNA, 108 bp, Glycine max
ctgattacaattgctcttccagcatcaaactcgaggataacaagactggaactgtatatacaaggcgtgcacaggatcttgcttcagcttctactgtgctaattggaa

SEQ ID NO: 92233 - DNA, 252 bp, Glycine max
aagaagggcaaccacttggagcaaagagagaagttaggattgacttctgcccctaaagggcagtcaaagtcacgtacaacactttctgaggcatcaaatgtgcttgaacaaagtgaggttgaaaaagggaagcaagatactgcattgtaagatttaagtgtctcttgggagaatgaaagcatggcattgacagggatctgaattggggccaaccagcctggatggttgacatgtatgggacatgtcgtcgcg

SEQ ID NO: 92234 - DNA, 256 bp, Glycine max
ggcaaagtgcatggtggatcagaagaagggagggaaggatctgctactgataaagacaaaaggtggtgaaatccctgttcttctttctgctgctaagggctacaaagacatgactcgctatctttactctcagactcagcttgaagcgttcatcgacaaaaattcccacattggggttttgcttcttgcacgatgcatcaccgctgaaatatctgatgtggctttgagtttaatccatcgcattccaagctgcctc

SEQ ID NO: 92235 - DNA, 279 bp, Glycine max
gccaatggttggagaacaagactcaacggtagagttgatttgtgagattcataatcataaattgaccaactcattagttgaacatccatgtcccaaatgattgaatacaactgaaaagacacttatgtcacgaagtcaatgttcgaaccaaaaaacatattgatgctccagttaaatgaatatgtcgctacactttccattcgaagtcatgtcggaacccaagacatctgaagtgctgatcagctgcgccaaagatacataccaaggttttgcgggcga

SEQ ID NO: 92236 - DNA, 278 bp, Glycine max
caaaaactcactgcatcaaaaccttctaattcaagtcgcatgttcttctaccttaaggcagaagtgaagaaccatgagccaacctacactatttagcagtggattcgagcttgcatcttctgtgacaagctctgtcgttcttcacagatcatggaatgttatcacgtcccgttatgccggaatcgttacaaacgtgggacacggagtatcatggaaagtttatagagaaccaggttcggatttgacgattatagcctttgaggtcaagctagattttt

SEQ ID NO: 92237 - DNA, 132 bp, Glycine max
gttggaggaattgttagcagtggacgaggaagtagcacgggaagccgaaaagggtggcgagaaattatccgaagcagaggttttgagcacagccgacgcgatcgtaattgacctcgtgagcgatgacacata

SEQ ID NO: 92238 - DNA, 279 bp, Glycine max
catcaagatcaatcaacaagaccaagaccaccatgtcagcgaaccccacgacaacaccaacaccaacaccaactttgacctcgacgccaaccacgccaaccatgctgccatacctccaaggccgcgtggtcactcgcctccagcagttcgtgctgctcccagaggcagcgcagcgcgagatcctcgacctcgaagtctacctgaccaaccaccagaccgtcatcttcagtcagcaccacgtgaagctcgtcaagagcgtgcgtcgcgtccgcgtcaaag

SEQ ID NO: 92239 - DNA, 276 bp, Glycine max
attatctgttcttttgttctatagttatgtttcttttgtctatatgatatataatcactgtattcatatagttctgtctgaagagaagagttatgatatattaaatataataagtggtttttttcttcttcatttccacgttccatcaaatgaatatgctctttacagtacagccaagtcatcataacgattaataattagctcatagtttttttggaagagttgtgaaaatgggacttgtggagctttttggggcggcatctatgcccgtgatca

SEQ ID NO: 92240 - DNA, 262 bp, Glycine max
tggacatgggcatgggcatggcaacattggtgggtatagctatgtgccagtgtacccggagcagatgcactttcacttgcatgcaccaccaccacaaattttcagtgatgaaaacccgaatgcttgttctgtcatgtgagtgacgctgtttctttccattcaactggctgacggatcgcgataatcatcgtgtgcttagagaactagactctagtatctagttctctaagcacaccatcattatcaccatccatcacccagt

SEQ ID NO: 92241 - DNA, 275 bp, Glycine max
agccaagcaagaagtgtgtatttgaacaaaagtttaatttttttttagccaaaacactttttaactcttattttgaagcaaaagaaacacacaataaagagagaaatattgcagtgatatttttctgggggttgagaaagagaacagaagaaaagacagaaagctcaacgtcagagttagccgtataaggttcgcttattgtgtgtttgtggttttggactagctgaggtttgtcctttggatcccagaaacctttccagcatttgaaaaaccaa

SEQ ID NO: 92242 - DNA, 273 bp, Glycine max
tctcgatttaccaccaaaaacagccacctgaggtttcaatttctctgagaaataaagagagctcctatctcttctctgcgacgacgccgtttctctcccttgaggccttttattcaagcatgggagatagcgaaccggtggtcactgaagcatctgctgctgaggcatatgcttcggctggttatgctgagactgggtcaaatcctactcccgacgcaggtgctgctgttgatcaatccgctggagaagctgctcaggccagctcaacttacg

SEQ ID NO: 92243 - DNA, 271 bp, Glycine max
caggaatgctaaaagaacaacaattgccaaacccattttaacacagattcataccatgcgaggactggcgttttgactttctcagaatgtcctgcatccagtacctcaaacacacctgaatcctttgctctctccctagaacggtgaccacgatccttgagtttgtccctctcagcttcctctcgttcacgctttgtcagaatcccttctacgatctctatctctggattttgttctgtccctgtcacgatctctatctcattcccaatcc

SEQ ID NO: 92244 - DNA, 271 bp, Glycine max
gtgaatcaaggggacatgacccttgggaacagtcacaaccaaccgttatgatccaccccagggttgcaaggtcaagagatgcgaatcaagggggcatgacccttggaaacagtcacagccattcagaataattgtgtccattagatgtaatataaatagaagtaaaccagaatgggaaagacactctggaattaggaagaatctgaattgtggagagacaggctctcgaaaacctgtgtaataaaatatctcaaattatctataaaaattt

SEQ ID NO: 92245 - DNA, 281 bp, Glycine max
atcacaatgagaataaacttactgtagtaaagatgagaatgcttctgtggaagagtaaacatactatacaaatggattctagccttaccactaaaggggaagggagactgggaaacactgtaggcaaaagcattaagaatgctttagaggtggttgtcgctttgtctactgacaagattcacaaatcacaatggaacactatagtatcatttgattcatgtaaacaatccacctccacctagtggggaaaagtttggctgttgtctaccattacccgtatg

SEQ ID NO: 92246 - DNA, 262 bp, Glycine max
tatatatatataatttgagcgtattgaagtttccagaaggataaggatctggtgaatttaagtgtagttttgtggtatcaagttttgatcattagcaacttgtatgttgagttgtctcattatgttcgatcgtatgtgattgtgcgactcgaggagttagaatctttgtattttcctgttaaatatctacaatatatcatataatattttaattgtcttgaattttttagaaacggaggcaagtgactgaataaaagggggg

SEQ ID NO: 92247 - DNA, 283 bp, Glycine max
cgctgtagctatatgcgcaaatctagaaaaacatacgttttgtttggtagttgggtttaatagttcacactaatcttttagctgagtgaagagaacacaagagccttaaggtactctgatgtttttatcacatgatcatagggtcattttgcaatctcactttttaaaacaaagtttggtaattctaatttttaatacctttttatttttgaatatcttattagacaccctttcttcttacattctttattattggaatatgttcaagtttgtcgtactcggg

SEQ ID NO: 92248 - DNA, 135 bp, Glycine max
gctatgactagatattgcaggtttttgctctttggttttgaggaggatgagcttggttttgagaggggaagtcacaagaagcctaagaggaggttgattactcaggacatagctgaaacgtttttgactgttcct

SEQ ID NO: 92249 - DNA, 301 bp, Glycine max
aattgcaggcatgtctagcattgaacttaacgtaaagcagcaaggagaaccaacccgggttcagcctgcacaggaaacagaaaagggactctacttcctttcaaacctagaccagaacattgctgttccagtgcgcacggtttattgcttcaaatccggttctagaggaaacgaggatgctgcacaagttatcaaggaagccttgtcgaaaattcttgtcccttattaccccatggctggcacgttgatgataagcttggaagggaagttaatagtggataaccctggggagggtgcggtg

SEQ ID NO: 92250 - DNA, 287 bp, Glycine max
gttataacttttccaatatatgttttcagtttaagtttggttacgtttgattgaataaacttaaaaaatattattaaggagaagtgaagtaagtttttcttcttaagttaaaagtaacttatacatgagataatttatagaaattcttatacaataacttatccaaaaatttgtttttaatttatacataagttaaatttattttgtggtaaaaatttagtttatttattttcgtatacaagtgtttatggaaaatttatccaaataaaaccaaaattgttttcttc

SEQ ID NO: 92251 - DNA, 287 bp, Glycine max
gttttgaatcatagggaagtatagcaaacagttatatcataaagtcaactgttcttgccgttgttctgtctttcagttatgtgtttcagctggccctgcccttggcctctggccccaagatatcttcaaacttcaaagtttctcttgttttgtcttcttgaattccaccttcatcaacctagagccccttaaaacttaaaagtgtcctaatttagttaattgatcccataccatagtctattccattaatgtcaggtggtgaagacactgagggctacaagtactgg

SEQ ID NO: 92252 - DNA, 282 bp, Glycine max
gtcgtttcaactcgcggcctctgaacctcttcgaaaccctcgttaaaacctaccgagactccgggtccgctcccttcgtcttcgatttgttgatcaaggcgtgtttggattccaaaaaacttgacccttctattgagatcgttcgaatcttgctctctcgcgggatcagccctaaagttagcaccttgaattctttgatttctagggtttgtaaaagtcgaggggtggatgaagggtatgcaatttaccgcgagttttttcggttggatgaggaaaacaacg

SEQ ID NO: 92253 - DNA, 281 bp, Glycine max
taaaaatttcaagccttatctcatagcataagcagagccccaagttacacccacgttcagtgagtgacattcctccgtttcaaagttttccaaccgcattcccaatggatcctcaagctccggcgacgggcaccaccgttcggagcgccgcggaaccatctcaacctcagccaccaaaaccatcccctcctctccctctccctccaccttccacatcatcaacccctccacaccctcccccaatccctaaccctaaccctaaccctagcccaggcccaggc

SEQ ID NO: 92254 - DNA, 279 bp, Glycine max
ggcgcagaagaacctcctgaaattcgatcgcttcattcattcacgttttgctttcttcagattttcgtcaatattagagattctacgttcgcacgattatgaagatgatgctatagcagcagcagtagaattcgttattgcaaaagaagaagaaaatggacgatagaggtagctcattcgttgctgttaggagaattcctcaaggagaaacctgccatccaaattctggaggaatgcttgcagaggatacagagacgtatagatgttccatctgatagt

SEQ ID NO: 92255 - DNA, 290 bp, Glycine max
ggttcttacacatgctagaaactttttcttttcacattcatcctgaaataaaaaaaaaaattattagatttatattctcttagctcagaacaagacttaagagttaagagggtcacctgttttacaagttttctgatgattaaacagtattgattggctatattattatggtttattgataacactggttattcactagaaatgaaaaagaaaaagaatactgtgatcaatagtttaatacttttgttaccttgcaattttgaaggaaaggagcaggtgtttgtctatcc

SEQ ID NO: 92256 - DNA, 276 bp, Glycine max
cttacaaaagtttgttttcaaagtgtgttttgtttcccaaatcatactcttgtgaccacaacccttcctcctctttcttttgaaacctctttttttctattccccaaccaaacaagcaaacgctactcactcatcatcactgagatcatggctcctaatatcaccactgtcaaaaccaccatcaccgacgctcaagccaaggtcgccaccgatcatggtcgtgcctacgtcaccttcctcgccggaaacggtgactatgtgaaaggtgtcgttggc

SEQ ID NO: 92257 - DNA, 275 bp, Glycine max
tgcaggaagaaatcatggaaatgcagaaaaataaggatttggaccctgcatgcagaccaagggtaagtaaaatacactgcttgagaaggacacttactggaccatggtagattatgtgaatgtgagtcattgtttccaagtgacatctacacgaaggaagccattatgtcataagggctggggtatatatatgtatgtgagacgtgaggatgatatacaagaaaacacaaaagctttttcgtgttagtaaacgatgcgtattcgtgttgtaagtt

SEQ ID NO: 92258 - DNA, 283 bp, Glycine max
cgcatatgcaaactatacgagacaaaaatttaaggaacattatataaggtattgtaggtttgtttactgtaatgatcttgttccgaggttgccctacgatgacaaggcaatgatgttcaagcactttgggacatgtcttttctttacagacgctatgaactcgaggttcttgaagagcaatggaataagaactacttctcactctggtgtgtgatacccatggcatacaacgcgattttagaaataataaggagtttcattattgcccgccaaaatggagctt

SEQ ID NO: 92259 - DNA, 276 bp, Glycine max
attcatccgaatctgattctgatgatgattcaagtgaagataaggtatttatataatctagaaagcagattttataatgaactgctgatgatcttgactcttgcatgatttgtctgatggtatatagtgaaatgaaatgctattaagaatttaagtccaaaatactaatgattggcctgacaaaaggcagaataataagtgttgattgtaacacaatgatggcattgtcattgctagatatatgagagatcgtagattgttgggcagtgaagcatt

SEQ ID NO: 92260 - DNA, 276 bp, Glycine max
ctgtcatgtggatcttttgctggataaacttgcaacctaatttttattgatttttggatacaggtttttatgagactcgaattgcatattatgcatggaggggtgctaaaggataccgcttttctgccatccctgattattaagtgtgacggtaaatgagaaatagagctatctataccgtgaaaacatagtaatgatcaaattcggttgcaacttgtatgcttcaatggcaaagatggaacaaaatggtagaaaagtgtaatcgtacttgatact

SEQ ID NO: 92261 - DNA, 281 bp, Glycine max
ataagttatgtatttataaaggttcttatatataaacattataaagtttgcagatcgtttagctgaactagattgttggtattacctactagctaagcattcatttattttgtaatttaaaatcgttgatgtataagaacctcttaagttatgtatttataaataattttgtgcttcgatccttgaagacagaaaaaaaaactcatacaggtaatctcatcataatatttttagtattcctttgaaaaaaaatcaacagttatataaactccatgtataat

SEQ ID NO: 92262 - DNA, 278 bp, Glycine max
tcataataacttgtacattgagagcactactacttggagaattatttacctaccaacttttcaatttcaaagccaaaaatgtcaaccaccattgatgtccctgcagaaacgacaagcaagaataatattggcaatggaattagaaagttccaggtgcacccccaaggccagaaggagggtggaagacagggttagccataatagactttgttctaaggttaggtgctattgcatctgctcttggtgctgctgccaccatggcaacgagtgatgagaca

SEQ ID NO: 92263 - DNA, 267 bp, Glycine max
gtccatatagtattctttttgtccatagaatcccaattagaaaacagagcttcagagaaggtgagaatggtctaagaagccttgcatggcgagccaaagaattggagacacgggtttgtctgagtcgggaccttcaagtcccatgttccttatggagttcttcatgggattagtacttcatcaggcctaatcaatcaagggtctgcttttgcttttggggagttggaagaggcaattgttctgcaaggcattaagataagaaatgat

SEQ ID NO: 92264 - DNA, 291 bp, Glycine max
cacgtggtctttctccaagtcagtgagcctcattctcattcttgctacttcagaaactcgcttcccttttccaaagcgaagacgccactccgtttaatgactacttaatatgtcatatatgccataacgtatgtacagtatgcataaacatggttgtaatgcatggcgtgatattgtgtttattttcctgtcactagtcttttgagtatgttcctgacatgctgtgttcagtactattgttactctgctgaactattccaacattgggaactgatctgtttctaagtcatc

SEQ ID NO: 92265 - DNA, 279 bp, Glycine max
caaccagttatttcaaaatttagttacaatcattgggtcttattctctaacattgatgtcttcattttttctatttttttggacatgcaggcctccagtcagttttctttgtccattgtttgtttctgttcgggtaatgaagagtgattcccggtccagcaaccagcgatgtctcgctttttgggttttgtattccttgtgtatgatcatggaaggggaactttcagtgctatttaactgcctcccatggtggcctcatgtgaaatccatagcaactat

SEQ ID NO: 92266 - DNA, 295 bp, Glycine max
cgcgaccggagctccgctctgccgcgtccgagctcgcctctgttctgaaccagttttgttttgttcctttgcggcttgtttctctgactgtgcgagctattgttccgaaaagcaatggcaagtgcattgagtagcagagttgaatctgttcgaaactccccctttctaagattttcgctcaacttcatcagagcccttagctcttcttcgtcttcttggtctgccgtttcttctgctgagaaccttaagaaatcaaagcgaaggaagacgaagaatttgttcgaggtggctcagt

SEQ ID NO: 92267 - DNA, 275 bp, Glycine max
ggctcgagacaagatcgatgaagactcttcacgttctcctagtttcacgctttgctttccaggcgtacttgcttggttctagtcctacagaagctacacgtttgcggacactgtcactgggctattcttcaagtactggagcaactctgaagaaagtgagtttaaggccaccaacacatccacgacgacactcgcctccaccaccaactcctggctattctcctgaacccggtccaggacgaactcgaagatctcctccgactccaagacctttc

SEQ ID NO: 92268 - DNA, 288 bp, Glycine max
gagaaaccatatagaatcaattctaataatggttttgccgacttaaatttaccatgtaagcttcaaaaagagacaggtgtgcagtctgatgattttggggcctcaatccctcacagaaaccatacatttcatgatatgcccgggagaatgacaccaggctctcataattttcccaatgatgtcatcctgaatttgaaaagaaaacaggatcatgaagcttacccagatctcccactatcaaatcacgggcagaaacatggatggctgccctcgggcacttgtgctggg

SEQ ID NO: 92269 - DNA, 218 bp, Glycine max
  unsure (1)..(218): unsure at all n locations
gttcactagacgaacacatgagagattgcgcctagtcagacatgtaaattgccatgtagttcagcaaattattacttggttgagattttcattgatggtttgagtgccttagtggacgaccccttaagaaagggttctncatgtatacatgtaatgataatatgggatctattgattttgagatatttganatgttagtctatccttaacttgataac

SEQ ID NO: 92270 - DNA, 284 bp, Glycine max
caacttgaattttcttgcaattgtggaagggatttcttttttgcagatgatggccattattattgttgtttaaaaaatttcatgcacattgttttaagcagtgttgttaaatagccgcaatagtggcgctatagtgctattgcattgcgaaattccctggatccgcgattgcaactctggtccactattgtggctgctataggtgttgtggttgcagcatgcgtgctgcatcctcttgttatctctgtcaagtctcctgccaattggacttttgagttaatatt

SEQ ID NO: 92271 - DNA, 288 bp, Glycine max
caaatggcaggataggaagactgcttcttggtttctaatttcacaggacacagtcatcctagaagattcaacaagattacatcactgagagactctgcctggtttactatttctcaagccaaaaattcacgtgaagcaaataacaggcgaatcatgtcattagttaggcttgctgatctagctcctacatcatatgaaaatgctaagctcttctcactgaaggggtgtgatgttagaccaggcctgtcctcccaaatttttgatcctgataagcataggagcatgtac

SEQ ID NO: 92272 - DNA, 282 bp, Glycine max
caataagcaaaagccaattgatacgtgcatatcacaaaaactactcttacacaccaaaaaaatcctctatcaccaaactcacctataccctcaaactcaaggccctatagtccaagcaagtgagtgagtgttacaacttacacagcatggaatatagtcaatatactacttattcagcagaaggtgttgaggcagaaacttacacaagtagctgcaccaccccatcaagatccaagacgggaaccaccaacaacacaagaaggttcagtgatgaccaaatca

SEQ ID NO: 92273 - DNA, 261 bp, Glycine max
ctagctgctaattatgtagcatcaactttagttctttgtccttgggggtcgataattgttgctaatacaactgctggttttgaagacgtcatcaaatgggcttctagtatcatcgccctacagctgtttagttttcttggggaagaattcgggctgctgtatgacaatgagaggacaagaatgtttttctgttatctaaaatgtattcttgttctgtcaaaattgtgagtttccaagttgctttgtgaaacctccaataac

SEQ ID NO: 92274 - DNA, 284 bp, Glycine max
ctgagccgcactgttctttctttgtatattgttcttgttcttcattcacaccccattctctctctcaaacgttcaaaccctgaaacctttctatctttttcttttgattattatttggtgagactgagacgtgtttgtactttctcggagcttttgattactttaacattttggtttgctggtaatattccttgttcgtcttcagttgttacacttttggcccctttttaggtttcggtgattttccggagacccaggttggaattcgcaagatctaaggtttt

SEQ ID NO: 92275 - DNA, 289 bp, Glycine max
ggaacagactgcatattagtcataggatatccttggtatgaaggccagcagactgagtcaagtgaacctgattctaggagtgaatctgattcagataaacagaatcactccagtcattcttcgaaggatgatctgaagaggaaaaagcacagaagaaagtcatccggaacagttgtgattcgtaacatcaactacatcactccaaaaaggagaaatggaaatgaggatggaggctctgatgaatctttagaagatgatgatgtcatcgatgacgaaaccatcaaacaaa

SEQ ID NO: 92276 - DNA, 289 bp, Glycine max
ctttctttgtctcggtcagactttctcacagagaaaacaggaaagccagaaccttcttaccccttcacctcttctctcttttcctatttctttctctcacgtttcgctccatcatccctcacacctcaccccaccctacccccatcccacccaccttcttctttctctctttcttcccttttccctttagttttcgtctgttcttcccttgtgggttctcttgtctctctctgatctcatgaagaagatgaaaggggttgtccccatggaacctccttatgaggtgtac

SEQ ID NO: 92277 - DNA, 169 bp, Glycine max
ccaagttcaagaattgtggacctcaccacagcacactcatacagagtacttagatctggaagtgcaaaggaagagacagttgacatcttggagaagcattctttcgttgaggcagagaccacgtaatataagttgtgattcatttgcagtgtcacgttctagtctatgc

SEQ ID NO: 92278 - DNA, 282 bp, Glycine max
ccgggtgctttaggggcagcgggtgctctaggggctacatattgtccaccctatctcactgttgatggtgcttatcatgcccgacaatcaggacaaacatctgcaacacctatttcaagcaaggaaaataatgtgaataaagctaataatgaatggaaatcaccacagaaatcagagcctgtaaatgatgagtttggacagaggcaaaataagccccgcagatactcggagatgaattttgggcaatgaagtattatagaatgcaacttgtttgaataaaaa

SEQ ID NO: 92279 - DNA, 280 bp, Glycine max
ggacaacagttttcccagatagaacaaataataccatcacttgctcggctccgttaacaaaacaagaccaaaaggagaatggagtaccaatcttttggaagagtccagagaccaaaaggggctaacataatgcaggcattgaaggtgatcctggttttggctgttggtgcatggctgttatatcaggtcaagcactcgagaaacgatacagagaactatagcgctcaaaccgagtttgatggagctatattgttggggcgtaaagggatgccatcacggt

SEQ ID NO: 92280 - DNA, 147 bp, Glycine max
tcgaaatgtccagtgttctcaggaagatgagggctggtggtgctggagacaagaagaaataagtcatatttactgttttccagattcactagatggacctgtgtactgatggacgagctttcatatttttgctttggttccattagt

SEQ ID NO: 92281 - DNA, 147 bp, Glycine max
gcgttgtgcaagtacaaaggcaaaagaactgtcggcgatgcaatggctccttattcctctgttcctaagaagctattcaatgcacgttcaatcacccacctctagcagaaggtgatagctaccatgttgtggacatcacttccacaa

SEQ ID NO: 92282 - DNA, 158 bp, Glycine max
ttcggctcgatggcatcactaccccaaatgtctaccacattaggagcttgcatgagctcaaacaagactatcaacccacgaccatgcattgcccaattaaacaacaacaacaacaacaagaggagtactcctttcagcaatttaattgtcaatcacca

SEQ ID NO: 92283 - DNA, 140 bp, Glycine max
caaaaggcaggtgattgtatggggcttgccaaaaagtgacagacagaggtaaagcagctatagaaatggaacacaagacaagtctccaagcatcctaaagtatgatggagtggatttttgttgaaggatatgattagaga

SEQ ID NO: 92284 - DNA, 144 bp, Glycine max
cacaaaaccgccttcgaaaccgagcttccggaggacggcgtggattgcgtgggcacaggccaagacgtggaatgcctcgttaacacggtagagcgacaatcggaaccatcatcatcgtcatcatcatcatcatcatcgtcatcg

SEQ ID NO: 92285 - DNA, 117 bp, Glycine max
cgagcggcatcgagcggctcgagtccagcgcttgtttcttgctacgtttcttcaccatgtcaactgctgggaacatcaccactgaaatcggggatcatgcaaccgctacaaagtggt

SEQ ID NO: 92286 - DNA, 134 bp, Glycine max
gcaggctttcttgctacttattattagcagaaagatggctcctactcttgcccttcagtttctttctcttttccttttgtccattatgaatggctaatgtcatcggagctagagatatgaaggtagacctgcga

SEQ ID NO: 92287 - DNA, 123 bp, Glycine max
tgtcaaaatcggcaccaattaatttggcgggagacaaattggaggacattctgagtgcctatgaatttgtagagaacccagttaattcctgctttttgggggaaataaggtttaaggcggttc

SEQ ID NO: 92288 - DNA, 135 bp, Glycine max
tggaaaagagaacttcttgctgcaatacctgttgaggtgagatcttttcacaattcattttcccgtgacttctcttaatttaactcaattcttggacctttattttcatttcagctctttcatcgttagcgttag

SEQ ID NO: 92289 - DNA, 112 bp, Glycine max
gtgaacaagtatttaggagctatcgacgaagactgtgatgttagcatgatagtcaggacaaagattgcactgggggtctccactggcttactatgcgagttacacgtgagta

SEQ ID NO: 92290 - DNA, 137 bp, Glycine max
cgtggattcaaccaaaatcgagatagaatataacgcaattggttgtattctccgaacctttttttcttgtgcgtgtccagttatttgtacgtgatagaattagagagaaagagacaaattgagttttgtgtttgatc

SEQ ID NO: 92291 - DNA, 132 bp, Glycine max
gcggtttttagcatatatggatactggggaatgtaccttcttggtgttcatttgggaaactatcttatcttcggaagccattcctctggatttagaagtagcagatgggtaccgatgaaggtttgggttctc

SEQ ID NO: 92292 - DNA, 148 bp, Glycine max
  unsure (1)..(148): unsure at all n locations
ggctaatctgtgcgtatcaggttttgctcctttcaattttctgtttatttcattcattccgctgctgaggtcaagccnatcacactgggcgcccacttttccatgggaaactgcttctccgaagtcgccgcaggcgcgccgccatcgg

SEQ ID NO: 92293 - DNA, 135 bp, Glycine max
cagggacttccagttatggtggcagtctgggatacgctcggatgagtcctttcaacaatggcaactctaacagatataccactcctattggcaatagcgggggcaatgggagaagcgattctcttatgaactcag

SEQ ID NO: 92294 - DNA, 124 bp, Glycine max
cacaaagcgggttactgtctgttcaagctaccatctctctctctctttcttagtggctccttggcaattaaaatgggccaaggaactttcccaatcaaatctcgatcagtggacgaaggggaac

SEQ ID NO: 92295 - DNA, 134 bp, Glycine max
gattttagtatcactgttgagagggaacgagttggactcggaggcgactcgggagaattgcgtggcggcgctttacgcgctgagtcctagaagcttgacgttcaagggtttggctaaggaagcgagagtcgcgg

SEQ ID NO: 92296 - DNA, 282 bp, Glycine max
ctcaaacattaattatttgtggtgcaagtgcaacttacaactctcattgataatttcttcagtcttcttaatcttacttttattcttcacttaaaatggaaacccttattggaaaaacattcctcacactcttatttccatcttcagttttctcaatagtctcgtcaagtagtggaccagctccatccagcaacatagattggtggtgcaactaaccccacaccctgtgccatgcaaacactacaccattactcaaatgaagagccatcatttccaaatcaa

SEQ ID NO: 92297 - DNA, 272 bp, Glycine max
  unsure (1)..(272): unsure at all n locations
cgcgctagtagtagtccttctcaaagtggaatttgaccctcatgagcatcatctacctaacgttatgattcccattcccatgagcaatattttgcatgggaaagtcaaagtatcaactacggataacgttaggtagatgatgctttgactttcccatgcaaaatattgctcaccganatggaatcataacgtacagactttttttattttatccaacccttcttgtgtagttgcccctcacatagcaacggtatatgtttaattgatcaata

SEQ ID NO: 92298 - DNA, 283 bp, Glycine max
tcggctcgagtagcaattaagcttccttttgctagtagctatctctagcttctagttctagccccttcctttgtgaactttttttgtttatccagaagaatatgacatcctggttattgggaaggtctagtaggatcttaattcatcaacaacaacagcttcacaagggaccatttcttaactataatagctcttgttcctcttttcgatcaactgagccatttaggtgccgtgatgcattaccgggtaagaactcgtcacctacccttttccgcttttggcg

SEQ ID NO: 92299 - DNA, 280 bp, Glycine max
tgtccagggtattaacttactttgtttgggagtcctgaaaagcaacaacgtgaacattataggacgtgagtattttaattgaagaaaaactaaattatatctgactatatatgatcttgaagctttcatttcagattactttgtcaattcagtgctcttatcaatatagcagccacaactgctatattcttattagaccttcttatgtttcttctgaaattctttagcattcgccaatgcctgtcttgtttgtctgtttttaagtttaacaaatcacaca

SEQ ID NO: 92300 - DNA, 278 bp, Glycine max
ctcagtcactcagtctctgcacttgttgtgatgaagaaactctcactcttaccctcggatttggacactaaatgttccactccctcgttgatgagcatgatgggcttttttgtcgcttccttcgtcctctgctctgtggttttctcagtctccattgttcttcgagactctccctcagatgccgccctgcacgaaccctcgtcactcgcagccctcttgcaaatcacacaaactctacgagatttggtcaatgaaacctctgattctgttgagctgca

SEQ ID NO: 92301 - DNA, 280 bp, Glycine max
gcgtgaagctctaaatgaaatattgggagaagatattgccaagcacgtaattctaaaggtcaccgaagatggatccggcattggggctgcactgcttgctgcctcttattcatcctaaactgtggatagagggtacacctgctataaaaatatatataaattgtttgatattttatatatatatatatgtatatatttatatatatgtacatatatatatataggcacacacgcacgtatagccatgtaaatcagaatttattcacatatttaatatctg

SEQ ID NO: 92302 - DNA, 278 bp, Glycine max
ccacagggcaaaaaccatcgatgatgtttctctgagtctgaggattcacgcgttactgttacttgaaaagagaagaagaagaaaaaagtggttttggagaaatggttgagcaatcggtgctggtgctcgaaaagcaaggggcaaatccagtgttatcagaaggaatccacgattgggtgtttgactgccatgggcttttgcacaatgcggttttgatcatcgcttctttgcttttcgtcttgtacttagcactgcaagctgcaaagagcttcctcaga

SEQ ID NO: 92303 - DNA, 286 bp, Glycine max
gttcggatctcgcgtcgatcttttttccttattgttgctatgattgtcgtctgtttagttccaaattctgacattagcataggagcactgtgattttggatgactatatggtcttccagttatcccttggtaatatatgtgactttgtagatgcataaatgttgtcgctccaaggtgtcttaatgacactgcttctctctgtgtttggctttgcttgtagttgatttaacatgtcttttgcccaaattgcctgataatcagatttcagatggtctatcctgtaaag

SEQ ID NO: 92304 - DNA, 273 bp, Glycine max
gtcattactatattttatgaccctgaaagagtcatgtggaactcctagctaataatctgttatgtaacaatagcacaactgagtgaaatttcgtatattagtatttctggcatatctagtgaagtctttgaattcttgctggacttatatgatgtgcctcatactctttcagtttttcattggccttgtattttttcttagcgacatagaattggtttcaacatttgaaagatgcctctgaagtctcaataagaatccaattcctgttaagta

SEQ ID NO: 92305 - DNA, 254 bp, Glycine max
ctcgagcgttttttttcaaaacaaaattaattttattggctcgaaattgaatggttgtttcctgtatcttgtttcctctatgcaataacgaagtacaaatagatgggtatacacaacaattctattttcatatttcataatatacaatcttacttcttttatggatacaaaaggggaaaaaaatgatttcacatacaacaattgctcagggattttgatggttggatatttgaattccttttttcaattcttta

SEQ ID NO: 92306 - DNA, 253 bp, Glycine max
gacactcacaagaacaagaagaagcatttagaatcgaaattggaagagaagcataaggagggtatgaatgattacaaaggaagagaaggagaaagtagtgttgttgttcggaagcgattcaaggagaagcagcaacaacaacaacaacaaccctttccttccacaagggccatcatcaaccaacaacaccgtcgctgtgcctccctccccaacaacactcaatacgaggaatctgaaacagatgtcgaagtgt

SEQ ID NO: 92307 - DNA, 270 bp, Glycine max
ctcggaacgcggctcgagcttgaggaaactttgtgatccataaataagtctcagaacacgaaattctcatcacaaaattctcataccacaatacaaaagagattgaagctagcagactcatcaaatggcggaaatggcagcatccttcgcacgagacaaattgctttcactgctaagcaatgaagcaaacctgctttccggcatccccaaagaatttgcagacataagacaagtactcagatgtcatgcaagccttactctaggatgcag

SEQ ID NO: 92308 - DNA, 246 bp, Glycine max
gggcatctatgactaggataatggcagggcttcaccagtctctagaaagggaagcttttttgccaagattaggagaatcttcaccaccctcttggtttaacaagttatattgagctgtctgattgagcatgattgaatgcttggggacatagatgacaagctcattggaaactgaaggggaggaagtgccatggatttagaaccattatgatgttacggtcgaaattatatacatttttcttggag

SEQ ID NO: 92309 - DNA, 242 bp, Glycine max
cagaatccgcggcaatgcaggtttgtgaagaggaaccgaagatgttggaacctaaacctgaacctgttatcagcgaagaggaaccgaagtgttggatgatgttatcaatgaagaggaagctgttgtggccgagacgttgaagggagaggagcctatcgtggctgagacattgaaggaagaggttgtggatgagatggcagaacaacccctttgtaaagaggaatcggagaagggtgtttcgg

SEQ ID NO: 92310 - DNA, 242 bp, Glycine max
taatcatgtggtttgtgtcatcccaggaggaccagcatgcaagtctaatctcttcaataaactaagttccttgcttagagtgaatgagatggatgtaatatgtgctgctttcagtggacagttagatctgtctattttgaaatcaccatgcgtactagtttcatcatcatgctcgacagatgagacaattgttgcagattcagatattgaagttgaaacagccacatcagtccgctcaaatg

SEQ ID NO: 92311 - DNA, 242 bp, Glycine max
cttttgcattgatcggtatcttttgagaagatgggaacagtgtggcaggatcaaagactgttcttgctgttggacctggaccaaaatcttctgtggattcggtgactgggagattgcccctgctttgacagcattcaagaagcatgtgctaatatggtcaaatcacctgagcttgttgccacttggtctgtgttctaacgcattatctagcattcgttggctgattcggtagttatagtcac

SEQ ID NO: 92312 - DNA, 240 bp, Glycine max
cttaaataagcaaggtgcattttagtggaaaatttttcacctttattggatcagctttgagggtaaataaaaagatgatgagagggtagttagaaactcgtaaatcagctagactctaagcgttgtttttcttgactaaacatcttactgtcaattttattttttttggattttgatttgagaaaattaattgatgtcaagtgcatttgaagacagtttataattattgatttaattaaa

SEQ ID NO: 92313 - DNA, 238 bp, Glycine max
ctttttcttacgttatcattgaaaattaagttacaaacttccgtccaatgtttctgtgtaagccgagtgacacagttttgtttagacaatcagaagacatttttggcgcgtaatatatctgggttttgttcagaacccaaaatcagatttgcttgcttaaaaaaaaaaaaaaaaaaacaaaaaaaaggggggcccccgcatagtgacctcggtcaccgggaatttatttcgggaccgg

SEQ ID NO: 92314 - DNA, 244 bp, Glycine max
aaaagaaaaaagaagagagaaaaatacaaaattaggatatttgttccaggcctagcaaggggtagatgacctcctaagaggaaaagcttcagcagttgcaactgaggaaaaggtgcatgaaaatggtaagcagctggtttttcaattgtaccaataatgtaatggtgttcgaccccacctggattataaagagttatttacatattgattatttcctttgttaaatgaacgagtgaagtgaaag

SEQ ID NO: 92315 - DNA, 242 bp, Glycine max
tgcttagaaaagctatgtttaaggggaaacaattttgaaacactacccagcctcaaggagctttccaaactgttacatttaaacttacaacactgcaagagattgaaatatttgcctgagctcccttcacgaactgatgtcccatcaccatcaagtaacaagctgcggtggacaagtgttgaaaatgaggaaatagtattgggattaaatattttcaactgcccagaattagttgagaggga

SEQ ID NO: 92316 - DNA, 238 bp, Glycine max
gggactaaaaggaaaaatgaagaaaatgagtaaggcatttgacgaagtgtttgaacaaatcataaaagaccatgaagatccttctgcaagcaacaagaatagtgtgcactctgaagattttgtggacatactgctatcacatatgcaccaagctgtgaatcagcaagagcagaaatatgtcattggtagaactaatatcaaggcaattatattagatatgattgcagggtcatttgac

SEQ ID NO: 92317 - DNA, 173 bp, Glycine max
ctctctttctttctctcaaagtgttgaacttgaagttgcagagagaaaatggattgagaattctctctcttttctctttctcttcccaactttccttccttgggatcattctgcttctttgctatggaagactcagattcagttgctacgctgatagattccacaacttctaa

SEQ ID NO: 92318 - DNA, 235 bp, Glycine max
cagcaagcagccatgccgtcggacgacgaacgctcgaacgccagcgactcggaggaggaggtcgaggagaccaaggaggagaaggtcgtcgaggacctgagcaactcggacgtcgtcgagcgctaccgcctcgcggccgagatcgcgcagtcggcgctccagggcgtgctcgcgcactcgcggccggcaaggacgtcgtcgagctctgcaagttcggcgacctcatcatccagca

SEQ ID NO: 92319 - DNA, 213 bp, Glycine max
atttagtatccttttcaatttcatcccattttttgtcatcacatgtgagatatatacatgtacaaatatttatatatatgatatgatatatcttactatttgtagctctaggaatctattcatagcagcaaaaagtaaacagaactgaacaactagtaatggaagatactagcttctttgtgatcttatcatcctttctgcttctcatagtta

SEQ ID NO: 92320 - DNA, 194 bp, Glycine max
ttggtaattcggttaaacactggacttatgtcatcaacatcatgcagcttggattcatgcactctttcacaaaggttctgaacatggtgaaagagtgcatgaaaccaagctgcatgatggtgatgaatggcacgagtgttggtaattcggttaaacactggacttatgttcatagacggcaaggtacacccatg

SEQ ID NO: 92321 - DNA, 206 bp, Glycine max
cgaggcttcaaggaaggagagcttgttattctctatcaacaaggaaaatgtcaggtgaagaggttgttgttgcagctgagccagctgctgccatcccaggcgagcctatggatatcatgactgccttgcaacttgtgctcagaaaatctctggcttatggtggtcttgcacgaggccttcacgaaggggcaaaagtgattgagaag

SEQ ID NO: 92322 - DNA, 212 bp, Glycine max
cggctcgaggaaagattttaaaatgttaaaaatattgaagtcaaatttcattttctgcattgggttggacttaggattgcaattctagtatttgcctacaactttctgctgagatattgacatggtgctttattcctaatttttgtgggggtggttctcagctacctaggattcaggtcacagatcctgttgcaagatattatggattgaag

SEQ ID NO: 92323 - DNA, 192 bp, Glycine max
agagtttgcagctgcatcatcgatcatcgtcacctcatggacggacacgattcacaagacccgaagcagagccctgctgacatgactgcctttgtgcaaaatcttctccagcagatggtgagttgtgtagtctaggttcttagagctgcattttctgacttttagaatatgtttcactgttgctaactggag

SEQ ID NO: 92324 - DNA, 191 bp, Glycine max
gcacaagttaggcagttctgaaactacatcattgttatcaagcgctgtctacttgtttagcatcggatccaatgattatcttagcccgttcttgacacattctgatgttcttaactcttactctcattcagaatatgttggtatggttgttggtaacttgacttccattatcaaggaaatatacaagagag

SEQ ID NO: 92325 - DNA, 191 bp, Glycine max
cttcgccaagaagagggggaagaagctgttcacactcccagcaccaagcaagccatcaaggctctcacttctcagatcaaggacatcggcagtgaaggcttctggggcatataagagctgcaggccatcttcaggatcttcaaatggtaacaggaataggaagtatgcagactcagatatggggtcagatt

SEQ ID NO: 92326 - DNA, 189 bp, Glycine max
agagcctagagtgtgggagtgatgaattgcctgttaaggtggagaaggacgagggtgagtcttttcctgctggatccagaataaggaagcatcatcacagggaagaggggggtgttgaagaaaatagaagcagcaagcaagccgcaattttctctgaacctacattgcgatcatccatgattgatataa

SEQ ID NO: 92327 - DNA, 186 bp, Glycine max
tttgaatagaataaattagagaagaaaaagtctcaaatcaggtggaatgggtatctgcatatcctctgaatcttcagcgattcatggagcccctgaagaggctcgtgatgaaaatgtgttagtgtttgaagcaaccaaggttctaagtggactttgctctgcttacactaaacaaggtagcaaagg

SEQ ID NO: 92328 - DNA, 172 bp, Glycine max
aacactgaaaatctaaagagaaagtgattccctcagcggtgacagaacgcttccttgagcagagaaacccaagcagatcgattactcttgagaaaacaagatgagccgccacccttctgtcaaatgggctcagacgtctgatgtactctacttaacagttgagctgcctgat

SEQ ID NO: 92329 - DNA, 178 bp, Glycine max
ggtatctcaaaccaagtcacgccaaaaatgtgatagaggttcctatttccgagctcttaaatacatctattttgtgcctttatctatctgcttgtttgttgcttggacaacgtgataactttagtgtgggtcattctgttgtcgtggtctatgactcctggagtcctggttttttgat

SEQ ID NO: 92330 - DNA, 265 bp, Glycine max
ctaaaaagcaatcacgcccgaaaacgaaagcatctccctctccccgaagcaaacaactgcccttaaccctcaaaaacaagccacccaaacccatccacttcaacccccccccccaaaatcacctccctctctcaccgggattgattctccatggacgagtatctctctctctgtcttcaattttacacatcagtaaaccttatttctaatttcttcttctgttgcttgctttcaatttcattgacacaggtcagagcaataccca

SEQ ID NO: 92331 - DNA, 266 bp, Glycine max
gctgagttgaccaaggaactccagtcagtccaggcacaacttgtggctgagagatcaagatgctttaacttggaggccaaaattgcagaactccagaagttgctggaatcaatgcagtctgtggaagatgaggtacaggctcttcgtgaaaagaaatctgctctggaccaggagatggagctcgctgcaacagctgagaggaaaagttctggttggcgggtttggtgggagtgaaacatgataaatatgtggccatgagggcaaat

SEQ ID NO: 92332 - DNA, 262 bp, Glycine max
gtaaaacttggcattagggttgtgatttgtggaactattggttgttcggccatagtttcatcaattttttgtaacattttatgaaagacttaaatatgtttttgacccctgatatatatactcgaattttgccataatcaattacaaagcggcattctatgttttgacaaaactcaagcgtttacgctctatgctagccaagcggatcaatattatcagcagtttctccttcaacccatgttatagattcctgctctaacag

SEQ ID NO: 92333 - DNA, 258 bp, Glycine max
cagccaagtaagctacaccagtgaggaacagaaaacctgagcaaaaaacaaaacaaaacagtaagctaagcttcactgccatgcctgcaacgccattctcgtgttcgttcctcactcttcaaccgcgcttcaactcctacgttaaccccatcttccgttcactcaccttccaactctcttcttcgccgctcccattgttcactaggaaagggagaagaaattaaggatcagctttattgttttgaagatcgaggcaat

SEQ ID NO: 92334 - DNA, 253 bp, Glycine max
  unsure (1)..(253): unsure at all n locations
cgggaattgcaaagaacaggcagatgctagactctggtaaatttaatcttagagatctttcgcgcaggcggccaccacaagttagncttgggtctaataacttttccagagtctagcatctgcctgttcttcatagttattagacccaaggctcacttgtcgtgtccacctgggcaaaagatctctaagattaaatttgcaagatacattgncanatggagattgtggaaacttcagagaaggaagttgtcat

SEQ ID NO: 92335 - DNA, 261 bp, Glycine max
cacaatacaagctggaggagtggacatattaattaagttactgacaactgggcagtctagcactttagccaatgtgtgctttttacttgcttgtatgatgatggaggatgcatctgtttgttcaaagttgttgacagcagagacaacaaaacaactcctcaaacttttaggccctggtaatgatgcccctgtcagggctgaggcagctggtgctcttaaatctctatctgcccagtgcaaagatgcaaggaaagagatagc

SEQ ID NO: 92336 - DNA, 105 bp, Glycine max
aattaagaaaattagaagtgttgacttaattgcaatttacaaaaatattcgatacacgatcttcaaattgcaattaagacaattagaagtgttgatttaacaccc

SEQ ID NO: 92337 - DNA, 238 bp, Glycine max
gttcgcgactaatgttacgattctcaccttttctcgctactccccctactccttcttccctctctttctcctccaactgccacgtgtcctcttccgctcaagcaacactacaacaacaacatgaacaacagccccttccgcaaagctcacagctggtggcattggaatatgctgacctcaacctctcttacaactcggatctcgctcacgtcaggctaccgcagcatgttaatcccct

SEQ ID NO: 92338 - DNA, 260 bp, Glycine max
cagattcggatagccgagcttgtatagccgaagcgggacgattccggttttggttcggttccttaatgcggagaatccgagcctgcaggttaacgccgtcacgacgattttgaacatgtcaatattggaagcgaataagactaagataatggagactgacggcgcgttaaacggcatcgcgaggttttgatatcgggtgccacgtgggaggccaaggcgaacgcggcagcacggtgtttagtttgtccggtgtggcggcg

SEQ ID NO: 92339 - DNA, 261 bp, Glycine max
attcttgggagataacagtgaggaatatactcctagtctaccaaagattatttttgctcaggctactggagggatcattgctggtgctactgcatcctgcattacaaacccattggatactatcaagacacgattacaggtgctgggacttgaaaagaaaatccctgtaaaacaagttgttaaagatttgatcgctgaggatggttggacaggtgtatatagaggattcggtccaagacttttcagcacgtcagcatgggg

SEQ ID NO: 92340 - DNA, 261 bp, Glycine max
aagattgcttgggttgatcattttagtccttgatagttgatattgtgttagtctttgattttataaagtgacactcatttagtgtcaaatgatagtagaaaataaagtaaaaaataaaaaaaccctgtaaagtgagagactaatagaggatatttaaagtcttagggattaaaaatgtagtagtactatgattctacaatctcgaggattgatgtgaagatttattccatttaattctcttgcacacttatctcgttggaa

SEQ ID NO: 92341 - DNA, 263 bp, Glycine max
tgtttccagaatagaatagatggctgcaattgtgtgccagtcaagattacacagacttatgttggcatccccaaaacctcctcctcaacaacccttcaagtcttgttgcttctgggaagaatccaattatgctaaaccacattatgacgatgaagacaattacaaagccgacgacaccccaacagattggagctccattcaagctctttcaagtactgtgactgtgagcaactctatatatgaggtgaaacaatcatcatcgc

SEQ ID NO: 92342 - DNA, 250 bp, Glycine max
ttgctcctcaatttcatcagaagtcaactgctggtggcgccgttgttgatttgccttctcctgattcagtttctaggtattctcgatttcaatttctctatctggttttgtctttgaattgttctgattgtaaattttaatgttaagattggattgtttatttcattagtatgttgaatcatgttattacttatcgggtctggttatgagtgtatagggttagtaagggatttggttcttggcgatggtt

SEQ ID NO: 92343 - DNA, 253 bp, Glycine max
ccgacttgcaaaatatttacctgactcctcatctgatggtatgtctatctgttttttcgttatttaaattgtttgtgtatatgatatttaggacttatttatttgttgtttttagtccattaaacattcattttagcctgatttctcctttagatttatttggtgataacttttaaaaatgttgatagaagggaaaaaggccgacaagaaagaaacaggggatatgctttccaatcttgatggttcatcgtga

SEQ ID NO: 92344 - DNA, 264 bp, Glycine max
gcgctatgatggttggagttggaacctccgtcttctttcgatgaattcgaggaaatccttttatacttaattaacacttaacaaacacacaatctcattttgtttctcttcaatccaaacgcattcacattcacattcaatcaatgatggctcagcttctccacactcccttcatcccctcctcctcctccgcgctccgccgcgccgccaccattccccaccgcaaaacgacctctcgcctcgtcgttcgggccaagatccggg

SEQ ID NO: 92345 - DNA, 249 bp, Glycine max
gcgatttggcattgctctttctttccctttgtcccctctgtcctcgtgcgcttcctccctgcaattcgctcttcggttcgcacctcaatacctgtctctctcaaccaaaccttacagatcttcttcccaaccatcattctttttcacgaagcggcgtttgtattggcccaatatcacatgagtcgattcattgcatttcttctctcctcttctcctgttgatgttagttagcacctaagaatacagact

SEQ ID NO: 92346 - DNA, 269 bp, Glycine max
agacaatgttccttgtgatgctggtggcagttgtgctaattatgatgctgatactgtacatgaagcttccattattcaaaagttgcctgtgcttcttcaacccgtggctgcaaatggcaaaaaagtccccctcggacaaagaaaactgatgtgtaatgatgactgtgctaagttagagcggaaaagggttcttgcagatgcttttgagattaccgctccaaatctggattcactccattttggtgagaattcggttgcttctgaattgc

SEQ ID NO: 92347 - DNA, 267 bp, Glycine max
ctctgatcctgtaacatcaatgggcctagtgcagcatgaaggcggtccctgtggcgtattggcagctattcaagcatttgtgcttaaatacattattttcttcagtgatgagttgaaagatgtgtcatgcatgtcacagaagggtccgggtgcagcatttaaaagtcagtctgttccatcaaataatttttcttcgctcactgaaggtgaaaaagtaagagctcttgtaaaaagtatgggtgaaattttattttcatgtggaagtaa

SEQ ID NO: 92348 - DNA, 270 bp, Glycine max
gaaatgcacagtaactaaacatgtctgcttcttctaatgccaatgggccatttgagcatcctagcttgcatgtaaatgcaattggtttacacaggaactgtgaattagacacagccccagtttcatggggggatgttgcttgtgataatgatgcttttgaaaaaaatgaatctgcttctatatctagagaacatactgttttgagcagcaacactggactacgatcccattccaactctaacttaaggactactatttcctctgatcatt

SEQ ID NO: 92349 - DNA, 282 bp, Glycine max
ctctgatgcttttgaagataccgatgatgatctgatgagtgatgactatgattcagatgctagtcaaaagagtcatgagacacgtaagacaatcaaatggtttaagaagttttttgagattttggatggcttgactgttgaacagataaataaccagaaagacagtggcattgtccagcttgccaaggtggtcctggagctattgattggtacagaggactgcagcccttggtgacacatgccaaaacaaagggatctaaaagggtgaagattcacagggag

SEQ ID NO: 92350 - DNA, 278 bp, Glycine max
gaacgagtgggtgatttgcagggtgtttcagaagagttcagctgggaagaaaactcatatctcggggataatgaggttggactcttttgctaatgaattgggttcttctgctctgccacccctttcagattcttcgccttctattggcacactaaacctctgaatgattcggcttacgtgccctgcttctccaatccaattgatgttcaaagaaaccaagaaggtgtcttcgattccgtcaccaactctatgtatgcggtttcttcaaatcctatgga

SEQ ID NO: 92351 - DNA, 275 bp, Glycine max
cttatttcttatataatataaaatcgtcgctcgtcacggttccagcagtgcttttccgccgtcgtcgcggttcaaacttgaaaataagttaaggatcttcagcagcagaaacaatggatgaagataaaacccaacaacttcccagaaaatgaccaggtcttcagcttcatcgtctccatccacttcaaataacatagttgcagcaaaagtaactagccttgaacctctaacaatcaatgaccttttagttgggggagatccatcagcctagatga

SEQ ID NO: 92352 - DNA, 172 bp, Glycine max
atcggaaaaaagatcagatatcttgagatcttattgatgagatgcatgataaaggtgaacctatcaatataatcaagtcacctatagttccttaattaatagacttgagaatgcacaacaggttttgatcatctattttcttattacctattttctttcaattttagtggtg

SEQ ID NO: 92353 - DNA, 277 bp, Glycine max
cgcaaaagaggaaaaggagcatccaactacgaagaggcccagctcaaggatgagactgtgaaagtggtagtggtcgagaaggccctcaaaaaggttaaaagccttccaaagccagttctgaatcacgaacacatcctcaagaagaactctcttttggggtaaacaatttaccctccactttttggagtactaagcctcagcaggaggatgttgccgtggacgcagaggaagctcaagtttaaaccttcacatattaacacttgcacttcacgtgact

SEQ ID NO: 92354 - DNA, 271 bp, Glycine max
taaactgatactttttggaacttaaaatttgaaaaggaaggatttttcattgtatcgttgattctagaaaggaggtcctaggttggttatcatgggagagaccaaacaacttgttacccttttgacacaatttcaagaggcatgaggatggtcaaggatatagtggaaaaaagcagatcgagtaaaacgagcaaacgattactaaggaaaaccctcaagaatatgactcctctactgcaggaaatcaatcaatacaatgaacacttggacc

SEQ ID NO: 92355 - DNA, 270 bp, Glycine max
aaaatctcgaattagggttctgattttaactaattttccgttttgatggtacttttcaatttgggtaatccgatgaatgatgatgattcatgatttgcatagtgattgtggaagctcaacagagggattggtactgtagtagggctaggagtccctgaaatgtatatgcctgtggctacctctgccacgctgcgcggcggattgcctactgacagtggggactctgttgtggcattagaccaagttcctcgatggaatgatgctgatcag

SEQ ID NO: 92356 - DNA, 268 bp, Glycine max
agagaagacatattgttgagggtattcttattgggtttgataatctggatggagtgattcgcataatacgttaagcttcaagtaactcggctgcagcagctggtttacgtaatgcattcagtctctctgagaaacaagctaagctcttctggacattagcctaagaagactgtcccttcgtgagagtggaaactttgtggctgaaagtaaatctttgatggaacaaatttccaagttagaggaactgttgtccagcaggaaaaatata

SEQ ID NO: 92357 - DNA, 125 bp, Glycine max
gcttcttctaatggccatagatcaccgaaatcagagttggaaactcaagaggttgagaaaattgcatcaggagaagttgaaactgcttctggctctcattctgtcactacttatagtgaacagaa

SEQ ID NO: 92358 - DNA, 248 bp, Glycine max
cggcttcggctccctcgagcgaatcggctcgagccaccactcactcactcactcacttccctcacaattcccaatcctcacgttgcctccttcacatgaagctcctctcgcgctccgtgttttcgctctctccctgaatcactcatccttataataaataaattctctctctcgaagaagaaggcgaaagaggttttcattgttcttgttgttgtagacgaagaagaagctcaagaatggagtcgacg

SEQ ID NO: 92359 - DNA, 233 bp, Glycine max
cactaacccaggttatgttaacgaagaaggaaggttaaggattttgccttaccatgacttcaacaaagcttcccatggctgcaccttgtgtcctccaaatatgtgcaagggtttaatcattgatagaaccaagattcaatttcacaagagggtaacaagaggatgatctatcttggtgatggtagtggtgactattgcccaagcttgaggctaaaagagagagactatatgat

SEQ ID NO: 92360 - DNA, 232 bp, Glycine max
gatttatttaattttaatgctaaatgtagttttggtcactaaagggtctaaattgatattaattcttcttttttaagggaaattgatattaattattgtatctttaaaaaagtgattttgctcttgtattttgtacttggtcaactcgaaataaagtatataggccagggtctaaatttcttttaattcttgtatcttaaaaaccattattttgataatctatataaactaa

SEQ ID NO: 92361 - DNA, 123 bp, Glycine max
cgtaaatctatatcaattgtactgttattagtttgatttgctacctagaagaagttagatgtttcttatgcgtcaattcttgcaacaacattgtttgttataaatagcagcttattcttttac

SEQ ID NO: 92362 - DNA, 233 bp, Glycine max
caaacagtctctgcagcagtgtggttcaaagaatggttcggatgatagcaggatttgttcttaatttgctaccaaaatgcaattggtgggaattagtgaatggccacactagccaacaccatagtgtgtgtgggtgtgtagaggggtgatagtgttgactgttgaaaaaaccttgtatgagaagaaagaggcatttttagttgacatgctgtagcattttgatggagtttact

SEQ ID NO: 92363 - DNA, 262 bp, Glycine max
gacgcgagataaaattgggggaagacatgggtatgggggcattgggaaggaatattcataagcaaaatatgttatttcttccctacacctcccataccactgtttttcctctatttctcccccttcccttgctttctgctgcctttccacatctcaaccttccttctcatctcataatcgtaatggtaatgatatccctcttcttttattttttctttcactaaacatataggtttctgcatgctctctctattatgtggga

SEQ ID NO: 92364 - DNA, 154 bp, Glycine max
cgcacattctcgcatcccatcgccacgagttgaacgcaacgctctaaacacaaaataaaaggtgggcaaaccaatagaaatgtccttctgtgttgtgatcttcgaacaagcgtgagctcaaacacacaacaacacctgcttctggttcagacaa

SEQ ID NO: 92365 - DNA, 141 bp, Glycine max
attttatggctctcggctttactttcagcaagtaaattgattttctttccactttatgggaacttaaatttctgtttaaaagggtctttcaataaacttgtttatgtactccctccgtttcataatatttgttgtgtaaaa

SEQ ID NO: 92366 - DNA, 267 bp, Glycine max
cttggaaggggttgttaatgtagacaaaaatggtgctacacatgtgaggatggaagttatgcatcaaacatgtgctcaacaaggggtgaatgaccttcaaatacgggaaaatggagaggcatatgaaagtcaatcgcaagatgacttacccagcagcactagtatacctgattctttgtctattgagaggtcttgtactccacctgcatcaatggaagtttcacagcaaaagcactacggggaagaaatttaacatcggggtgtgat

SEQ ID NO: 92367 - DNA, 262 bp, Glycine max
cgtctttctcttctgttaatactcttcttccatgatgcaccatccaactgattttctcctccaacccaatttcactcgtggggtatctgcttccctcaacctagttttgctacttatgcttgttgtgtattgggtatggaagaaagtgcaagtggacaatagtgagaatagtgagagaggaggattccataatagctgctctcttgaaatacaaacacagtctggtttgtagcttagttatttgtgtgttcaaccttttgtt

SEQ ID NO: 92368 - DNA, 267 bp, Glycine max
tttctacgtctgattccaaaacaacccttcttttgctcttccacgtcttcaccttttcgatctcttctgcaacccaattccacgccccttctttcctccctccatttttgatccattgtttctcacacgggcactaccttgggttctgtgcctgattctacttccacgtgctgggggaagtgcaaaattttgttctttagctccaactagaagtgggttttcgctgtggcttctataatctcaacatcgctgctaccataataggtt

SEQ ID NO: 92369 - DNA, 287 bp, Glycine max
caacaacatagtcactgccaccaccatgaattcacaacactcatcacgtgacatttccttaatacaaaaccagttacatgatttacatccttccacagtgagcatggtaaccacggacacgtgtcacacatcaaacgtgcttcaagggtttgggaatttttccatggccagtgacttggcctgtgtgaatcagcagcaacaaatagatgggtcaatgcgggttttttatggattggaaaccatggacgtggcaacaaatggtagcacaaacactagtacttcaacag

SEQ ID NO: 92370 - DNA, 281 bp, Glycine max
ccatattcaaacaaacatgatagcctttctactctttctactaactagtcttggtctagtaatcaatgcatcaacctttagtgcttgttcgaattgtggagactttgtagtcccatacccactcagcactaacgaggactgtggagacaataggtacaaagtctactgcaacgatggaaatttagagttcttgtcagcaacagggacttactataagatccttagaattgacccaagtgctaacaagcttgtcattagcccacctcctatactgcaaaaca

SEQ ID NO: 92371 - DNA, 152 bp, Glycine max
agaatattgaacgaggcagtgagcttcgttgctttctgcgtgctcgaccttgacgattttcttctatgttttgttttcaaagctgtggatttgtgggttgacgcagagttcagaccctgctattgttcctcggcgaaggcaccaataacgag

SEQ ID NO: 92372 - DNA, 127 bp, Glycine max
gagagatggaaaaatgaagctgatagaatcgacgtgcttcgtgagaacgacggacgtggtgcagcagcgagatctataagatcattgaagcgaaaaaataaaagctgttatgcaaatgaatctaaag

SEQ ID NO: 92373 - DNA, 181 bp, Glycine max
ctctttcccactctttcaaatgcatcatcatcgttctgctaacaacgcttccgctgctgctgccggcggactggcgctgatcccagacttcgccgccaccaccattacatccttcataaggacagggctccggacatctccaactttttggctgatgcttctcccagttcccccgctcagc

SEQ ID NO: 92374 - DNA, 284 bp, Glycine max
ctcgagccgctaaacaatgagcaaacagcaacagagttttgccgcgacggcggcggcgaaacggggtccttctccaccgagtagcgaccagattaaaaaaaaacgacgggaaactccgacaaccatactgtccctggaccccgacatcgtcaccaccatcttcgctttcctcgacatgttcgatctcgttcgctgctccctcgtttgtaaactctggaatgccatcgttgagtcccggtcgctgcgagaattctgtgagaggaagatgcacagtcttttgctga

SEQ ID NO: 92375 - DNA, 154 bp, Glycine max
caaaagttagggtgtgtgttcgtgaaaaggaaatggcgcgattcagcgagagattgacattgataagttgattgagggtgagattcaatgagaagtttaaactgatgagttgactgagggtgagattcaaacttcattcgtgattccgaagaag

SEQ ID NO: 92376 - DNA, 151 bp, Glycine max
ggcagtaaggtgagtcaaaatcaatcatgaagccatggtaaatgtgaagtaacccccatgattttagacacatcatggtgacactggttttgaggtagccaccatgattttaaaagatattcaaacatgattttaaaagatattcaaacat

SEQ ID NO: 92377 - DNA, 249 bp, Glycine max
aaaatatttagagagagagagggtttcatcaagtaaacactgaaactaatttttcacaaatatcgcggcaatgtcaaattatgatcttccaccaccggatactcattcggaaacatcggttccccaatggacaccacctttgccaacatatccaccaccaacgtcttatttttcatcaacatttgatgattcagattcatcttcatccacatccacctttggcatcatcgtaggagtcttggttggtgt

SEQ ID NO: 92378 - DNA, 147 bp, Glycine max
cgtcatagttcaaacagtatgtgcactattctcaatacatagactcatttaagctaagcctttgccttttgtcttgatggcatacaacatagcaagttctcttatactaatattttcgatctgattccttgtaacagcaacagccat

SEQ ID NO: 92379 - DNA, 169 bp, Glycine max
ttcggctcgctcgtctacctcgttggcatggtagtcctcgtcatactcttagtgtctttggtcgcttttgtatacatggatactcttcggggacacggcaacattggggccaactgcgcttacttggagtaccgcatggatgacttttctggctatcttcgtcgtaggg

SEQ ID NO: 92380 - DNA, 146 bp, Glycine max
ctctattcttggggataccatagactacatgaaagagcttttggaaaggattggtaagttgcaagaggaagagggtacaagtcagataaatcttttgggcatttcaagggaacaactcaagcctaatgaagcaatatttgatgttg

SEQ ID NO: 92381 - DNA, 291 bp, Glycine max
cgtcttttgaatttctcccatggcctaatcctctcaacactcttcatccactactctctagctgatgttggcactgctgcccaatatggccctccctttttgccgaccacatgtttcggcagagacgcatcgcagtttccgtcaagtaacatgtttgctgcggccggggagggtatatgggacaatggtgccgcgtgtgggaggcagtatcaggtgcgctgcatcagcgctgcggcacccaggacttgtgttcctggccagacgcttcagatcaagattgttgatcgagcg

SEQ ID NO: 92382 - DNA, 274 bp, Glycine max
catacattgcaagattttgcaatttttgttacacatgctctttagagtttccttcatttttcctccttccttttttaggtggtgtacctgcttattatgggctcatcttttcttgttttagcacttagtttgtgttccttgtcttgtctctcactcttggctgtgtttagcaagagtaaatacctagactttgttgcacttgaaatcagagagtgtgccaaattgtgtgtcttaaaattccacctaaagctttagtgttcgcatggcggctaat

SEQ ID NO: 92383 - DNA, 268 bp, Glycine max
catggttattgccgtcacatctctctaattccaacactaatgatgcgtatttagaccattgggttcaagtttttgttcactaataaagtcaattttcttgtctatttccacttgttcttcagcacactcacaaccacaacccaaccaacccacctgaactactgaacaacaacctcttcttcttctctctctctctttagcataatcattcatcaccacacaagagaaaaaacaaaaagaacaaagaacaaataaaccttttttttta

SEQ ID NO: 92384 - DNA, 127 bp, Glycine max
caccattctgttggtgccagatattgctcgagaattttaattaaataacccttgcgaatgttgattatagtgacactacgctattttctatgtgatgtggacgcaatccaaattccaatttaatttc

SEQ ID NO: 92385 - DNA, 99 bp, Glycine max
agacaacacgctcggtcttcttctccaatggcgatttccgatgagcctgaaagtgtagacactgctctacaacgactcttccctgcgccgccgtccctc

SEQ ID NO: 92386 - DNA, 286 bp, Glycine max
tcgccgtctgtcgccgtgaagcgatcggcggcggccaagctgaggctgttggcgaagaaccgagccgacaaccgcgctctgatcggcgagtccagcgcggtggctgctctggttccgctgctccggtgcagcgatccgtggacgcaaaacacgcggtgacggcgttgctgaacctgtctcttctggaagagaacaaggcgcttataacgaatgccggtgcggtgaaggcgctgatttacgtgctgaaaacaggcacagagacttcaaagcagaacgcggcgtgcgc

SEQ ID NO: 92387 - DNA, 270 bp, Glycine max
gtgggttttgcgaagatactgtttcaactctattggctaaattgaaagatggtgatcataagctacagataattgggacatcactgaaggggtgcaattcagtggagaagtatgctaagtgcaagagaatggtttcgagtatggacccttggtttttgacaatgcagagaaattcctggagagcacagatatatgcactgccatatatgccatgcaaatcttcaacagtggctgggcagcaaacctttctttcagattcttatggaaaca

SEQ ID NO: 92388 - DNA, 268 bp, Glycine max
tggcctatgacacgaaacatcttcgtgtcccagagatacaatggcttggagcttttccttctgattctgagagatattttgttccgaatcagtgtcaccttccattgactgctgaagacaaaagaaaagttgagccatgctacttagatgctaccttgaaagggaggtaccacaatggaggttggagctacagttgattctgcaaagaggagtaaagtttgagattgaagccttatctgtgcacgcactttcattcttgtcagagtct

SEQ ID NO: 92389 - DNA, 198 bp, Glycine max
ggaaaaggatatccatgcaggtggttttggagttatgaagtctaatctaatccttaaaattgtaagcattggttagtctagtcccgaccttaaaaatctccactttaatttctgactttgtaaaacatcgttccaatggtccttttcgatgtaaaattatagagttaaatgaagtggaaaaaaaaattacattttggg

SEQ ID NO: 92390 - DNA, 207 bp, Glycine max
acgttttctgagtttcataggaggaaaaaatgacagaagaacaaaccaaaacacgtgactcagaatcagtgacaccaccagctggtgctggtccttcacaggctcctccagctgctgaggctgaacatgttcatgaggctccaaaggatgtggctgaggagaaatctgtaattccagtgccttcttctgatgacaacctgatgggtc

SEQ ID NO: 92391 - DNA, 284 bp, Glycine max
ccgctactctcatctcttcacttcccttctatcactcttctcacttctgagatacttgtacgaaaagaaagcagcacttacttctgaaaaattcttttgcatcagttagcatgggagatgaaaagccatttgacttcctacgcattttatttgagggcgttattgcaggaggtacagctggagttgttgttgaaacagctttatacccaatcgacacaataaaaacacgtctgcaggctgctcgcggaggagaaaaactaatattgaagggcctttattccgga

SEQ ID NO: 92392 - DNA, 281 bp, Glycine max
aggcaacgaaggcaagctgctgttgcagctggagacgtggctcagccaaatcaccacaatgagcttggtgtacccgcagctcccatctagttatagcccaaatttgtaccttaggggaacaacacttgtatagcggtggaaataagtgcatttgtagataggtaggaacactcctttcgcaccagttcatttaacctccaaaaaaaaacaccacaaaacaacaaaagaagcatcagaacgagtggagataggtcgggcgcccccccccccccgtttttttt

SEQ ID NO: 92393 - DNA, 278 bp, Glycine max
cctcagtttggtggattttgcgtgcaacatgaattcatcttccatattgcacgcaaacatggaagatgaattcatgttttctccagcaacaagctcagtttctgagtccagtgttgtttagtgatgtacttggaattcagttcctcgttatgacttagtgtaatcttttcttaggtctccttattattattttttttttcaacagaacaaaaaaaaaaaaaaaaagggggggctacagcttatggactttgaaacccgggaatttatttcggtgaggg

SEQ ID NO: 92394 - DNA, 303 bp, Glycine max
tttggaaggaagagagaaagagtttctggttttcctttcaacgatgagaagtttgatcattttgttcgtccgtcgcttccgtggctggcagcttccgaccgaaaggtcatcaacggtccgaacgtcgccaacggatgccgcggcaaggagtccaccttcgacctcgccactcagggctgctgcggttctcgtgtttacaacctctcctctggcgagcaatgctgcggtgacagcctcttcaaccccgtcaacaacatttgctgcggtgtcggatccagcgcccgactcgcctctggtttgggc

SEQ ID NO: 92395 - DNA, 211 bp, Glycine max
gagaaagtgcagacagataagcttgaatgtataactcacgatttgtatcctggatttagtacatccgaatgcgcattcgtgagcttgcacggtgggaatgaccgctagtcatgtagcatggctgaggtccttgtgaaggatgaagtcagaaaaggtgttactaataagcctggaattgcagctaggctagtcagaatgcatgttcatgatt

SEQ ID NO: 92396 - DNA, 261 bp, Glycine max
agaactttgtgggacaatgctactttggaattccttgaaatgtagagtgaaggagcttggctagtatttcattgatgaaattatattttgcccagagcttttaatcacaaggagtgtaagggaaataaaatataataaaaattcagaaaagtacaagtcaaacccctctaattcatcagggtgaacatgtagtcgttcccttccctcctatttgaattacaaattgtccgcttaatattgttctttcaattttgctagtta

SEQ ID NO: 92397 - DNA, 260 bp, Glycine max
gtttgttagaaaaaggctacgaacttgtatctggtggaactgacaaccatttagtgttggtgaacttaagaaacaaggtaaatgatgtgatccttttctctgaaaatttcttggttatatttgtctcataaagaaactcagatagtgccatattgtgtttacatgtcaaatagacctgttcagagcagcctttctatgcttggtttaaatcatacattgagtacttggtgagaatggaaaatcagctattagtatggata

SEQ ID NO: 92398 - DNA, 262 bp, Glycine max
ttgatcatgacatgtcttcatcctccatatcaatgtgctatcagcaaagaagctactctttggttgagatctattaatgcaactctcttctctgatggtcatctccaatcacaaatgttgagcttctcttctccaaagtcagattctttgttgatagataaggcttcctcaaatgccacattgcctttttcttgccaccaattgtctagctacaccagaaatacaggttacaattcaggaagcataagcatgcatggggctt

SEQ ID NO: 92399 - DNA, 252 bp, Glycine max
caatttcatctccaaattgcaccccattttattgttgaatttcaagctctaccctcccttccctccactttcctccctcttcttcttttgcttctgtttgagaggtgaagatggaattgtaataaagctcggaatttaattggggaattgtgggagaagacaaaggaggaaatcatacacaatgccggagttcccctcgagctcgaagttggaaaaggtgccaaatagcgagagaaagagtggttctttggt

SEQ ID NO: 92400 - DNA, 249 bp, Glycine max
gaaaagatccttactgttagagagtttctcacacttctaaattattacactgcctagtttgctggatccagattgagaagtgtgacaaactctctaacagtaaggatccagcaaagctgcgcagtgtaataatttagagtttcttttacttgcaaattgttctgataaattgtcatttcccggattttagtaaaaactttcattgggacagtttagttcactgtttgtgtcaactgtacaggcatttag

SEQ ID NO: 92401 - DNA, 275 bp, Glycine max
tctctctctctctctctcggtgtgtctctatctcattcccgttgtagcagccacttcgcgacacgatgcataggcaatccctgggttctccctctcccaagctccccaagctagagacgctcgtcaccgacgaagacgatgctcccaaacctcaccgtctcagcctctccccggcggcttcaacggcggacaagttcgtccacctcattcctgtcctcactctcctctgcttcttcgtcctctacctcttctcccacactccctctccatcagac

SEQ ID NO: 92402 - DNA, 247 bp, Glycine max
attcaatgccaacatctgtccttgcaggtgctgttgctaatttaagaggttgtggaagggatgcagctgctgtactgttttgggttcatatttttgctatattctcaatggcaggatggattattctatatctaaacatactcttctgagactgtatatagcaatttgatccaattcattttgatgctagattagtggagaaacaccaatattttatacaaagagcctttatatgatgatcacgatc

SEQ ID NO: 92403 - DNA, 128 bp, Glycine max
ctctacttgagacatagtaataattgaggccatgtcaaaaatgtctagccccaatggtccagagatagaagagaagagagttacaaaggaagataaattcaaatctgctagaactgcaatgggtgagg

SEQ ID NO: 92404 - DNA, 274 bp, Glycine max
cctggcatcttcaatttggtggctcttatcctgatacatacataataaatagcttttattattgaaattggcttttgttttaagcaccagataaaattaaaaaaaaatagtgttgattttgagccacatgaatgactgggcttataattagaaatttagataatattcaaaggtaataacaggagtagtgtcagttgttaatttgagcatatatatttggccagcagaactgaatgtttcaatcaaatttgtcatacactgttgtttatttttc

SEQ ID NO: 92405 - DNA, 267 bp, Glycine max
cgcggcctcgagtcttttctttttctgtatcgtttttactttccatcacttccattttctcgtcatcatcggaggatgctgctgcttctgctaatggtaaaattcttcataaattattgccttttgcttctacttttgtttcccttatgcttaataatcgaccctcttcaattcttgtcgttagtgtgttcaactatgtagtgtaatatggaggcaaaaacagatcgtgctttgattacggatgaaaaccagattcaatgtttacat

SEQ ID NO: 92406 - DNA, 267 bp, Glycine max
gtaatgggccacctgtattttctgctgggcccatgccaggtccccaacgctttccggttagcagtgttccacaacattcagttggcactccaccaacaatgagagctcctcccggccctcctgttcagccccagcccccatatcccaatgtaactcaaggaataatgcagcctccaagttcaccttttggagcacctacttggcagatgcaatctcagcaggtagcaccacctcctccagttcctggtccttcacagggtcctcgga

SEQ ID NO: 92407 - DNA, 277 bp, Glycine max
cttttctcccccaaacaccatcctccctccgcctctgccgccaccaccaccgtatccttctcccacaaaccaccgtcagactccaacagcgctgccacccctcgccgcccctccaaaccccccaaagccacaccaataactcctccctcaaaccctctcgctaacaagctatggctcacaagcaaactctcccctcctcctcctcctcccccaccggcaccgccaccaccggaaattgacaccgaaaccaaaaaagagagcggcggtgaaggcgcgg

SEQ ID NO: 92408 - DNA, 258 bp, Glycine max
gatttgttcaccagtttcccaaatgctggccaagtgcttatatgatcatatatttagtagctgtcctcttattttgctgaccattgatattctttatgcctttggaaggttatggtatttataataataatattattattgttgttttggttgtagttgttgttattggttgtggttgttgttgttatatgtctctttaataactttttgttttattattcctaccattaaatatgtagatattgattcaacgatcac

SEQ ID NO: 92409 - DNA, 267 bp, Glycine max
gcattgcacagtgctttgcgtttcttgtttgtacaaagtggcacaatccaactattcatggaggctgtcatattacagaaccgtgttcatcatcaaataccataagatacctagacttgaggacaggaggcttagttgtttacacagatgaagatagacagcaaaatgggttctgcaatctgcaggatatcggcagccatattatgaaaattccattcattggtttccaaatacttctttttatgcatttagagggaacaccatcca

SEQ ID NO: 92410 - DNA, 272 bp, Glycine max
gtttgtttcacccaatttcaaaatcagttttttatcctttccctcctcaattactagaatattaattactgttcaaagtctggaggtcttccactgtcaattccgttttttcagcgtttatttgggatcgttcttacttttcgactgtaacggatttattggatcatctcccacgcccttttcaattattttttggggaatttcatttcgttttatttgtctcgcctgtgctttgaggcaaaagggttgtgttcacgagtgaacggtgttga

SEQ ID NO: 92411 - DNA, 144 bp, Glycine max
cttggctgcaactgtatataaggcaatgtattttcactttgaccgcactgatttggttgtccttgatgaagcatgtctgttgaaagctcacaaacaaggccttgcaatgacttatactaatgttacaaggccttgtttgtgagc

SEQ ID NO: 92412 - DNA, 270 bp, Glycine max
caggaaaagaagctgtgtgcagttattcaattaccatcacagacattgctactatctgtttctgacaaagccttccgcttgattgggatgctttttcctggggatatggtcgtatttaagccgcaattgtcgagtcagcagcagcaacagcaccagcagatgcaaaaccaacagcaacatcttccgcagttgcaacaacagcagcagctacctcacatgcagcaacaacaacttcctcagctgcagcagcagcagcagcttcctcagctg

SEQ ID NO: 92413 - DNA, 264 bp, Glycine max
atgagaatggtgaaagacagtaagaatgagagattaactttgcttcttgaagaaacaaataaactactggtaaatttaggagcagctgttcaacgtcaaaaggacaacaaatattcaaatggtattgaacccttggaagattctgaagctgatttactggagtcagatgcttctaagaatggagtttctaaggaatcacctcttgatgaagatatagatttgatagattctgatcataatggtgattctagtgatttacttgaa

SEQ ID NO: 92414 - DNA, 278 bp, Glycine max
ttattagattgcccactagacctttctgctctcatggccttctctcctgtaccaactgctctggactgcttgccagttgaagaaagctacaacactgaggccaatgctttttttgattcaaggtttgggtctgggaaaaggcagaaaattgaaaatctccttgatgctaaaagcttactttttgctgaaccttggtacaagactgttaataacttgcacctgtggaatgcctctttcattgatgttgtattaatatccagtccaatgggtattatggg

SEQ ID NO: 92415 - DNA, 268 bp, Glycine max
gtcactgtggatggtagcatgtcaaactcatttagaggaaatgaccaggtttcaaaaaaccagattgtgagaaagagaaagcagcctggatcctcatcaggtcctgacaatagttcaggaacggcaaatacaacaggtccatcaccaagttcagcaccctcaactccgtcgactcatacgcctggagatgtgatatcaatgcctgcactgccgcatagtggtagttcttcaaagcctctaatgatgtttagcacagatggtactggaa

SEQ ID NO: 92416 - DNA, 268 bp, Glycine max
cttagctttgattctatgttctctgtgatgatctgtatcgcgtattactctcatacacgaacttgaacaatgacagaatgcatagggcaatggatcagcaatggcttcaacagaatcactgaagcccgttcatgaccgtaatgttggaaagcggaacgcttccggtaagcctgggagaagtagtgcatcaaagaaggataagaaggccaagaaagacgccatcaagcctataagaccatccattgctttctatgtgcaccttgacgag

SEQ ID NO: 92417 - DNA, 262 bp, Glycine max
attcaatatgagtggcttaccttcactcagtgagaagttagaaaaattccttactctactgagatctgaagatggcaaactagaatcccagatagtcaatgtcctgcaagatattgtagaaattatcatacaggatgttatgtttgatggccatttgttgctgcaaacacctcagcaaacacctcacgaatatcatgtagagagagggcagaagtttgtcaacattgacacttcttttacacataatacatcggtgatggaa

SEQ ID NO: 92418 - DNA, 264 bp, Glycine max
gatttgttgcatgaagcagaatctgaagttgctactcttaaagagaaggtggaattattagaaatgacaattgggagacagagagcagatgttgaggattcacaacgccaactttgtaaggctaaggaagaaagtcttgaaaagtcaaaggaagttgaggctctgacatctgaacttgagagggttaaggaagagaaagcacaggctctgaacgatgaaaagcttgctgcttctagtgtgcaggccttattagaagagaaaaac

SEQ ID NO: 92419 - DNA, 263 bp, Glycine max
ttttgcttttccttctctctctgtgtctgtctctttcaagttcaaacctcaaaccctagccgtagccttttcaatctttcatgctccttctcggtgagtcactttgcatatgttacggtttttggggtctttcaattctccttcacgccgcgctttctgggcttctggggctatttcaggtttggtgttataatcattaaagagattcaaggcaaccaattgatttggtggagaactatgactgaagagaaatctggaggatg

SEQ ID NO: 92420 - DNA, 265 bp, Glycine max
gttgagttgacatcggcgagcaataacaagaagaatgatgatgctaatccgatcaaaatgcaaacttgtgaaaatgtgtggtgtttgcgtttgtgggtctctcgaaatgtgcatgtactcgacggaaagcgtggtggcgagtctcgaaaatcgcgtgtttaaggttggggatccagtgattccagtgagtcctattctgaagcagtgggtggaagaaggcagagaagtcaccaaacttcagctcgaaaatctcgtttaccgcctc

SEQ ID NO: 92421 - DNA, 264 bp, Glycine max
cggctcgagaacggctactgcggcgtcgaactcaacgacctctaccgtcatgtgcacctctacctcaacgccgcgaaccacgcccccgccgccgcgtgccgccgattaactctctcctgctcgccgtcgtcgaaccgtatctccttcgccgttgcgccgaaccacaccgtccacgacgccttccgcggccaccgcgtcgggtggacgcaccacgtggagactgcgcaggactcgctcgaggagaggcgcagcttcacgctccgt

SEQ ID NO: 92422 - DNA, 262 bp, Glycine max
cgcagagaaaatgtcgaccgacctgcaattgaagtcgagttgtagcggatgcggatcaacgacggatctctacggaagcaattgcaagcacatgactctgtgcttgggctgcggcaaaaccatggcggccaaacgcgccaaatgcgttgattgtggcgccaccctcactcgtttcattcgagaatataatgttcgtgcaagttcccccaatgataagaattacttcattggaaggttcataaacggtttgcctgatttttcg

SEQ ID NO: 92423 - DNA, 258 bp, Glycine max
tgcatagcttggttaggttttgtgtttgggcatcatcttggttggagttggaagttcatggaattagaaatgttgaaattcttctcatgattgagatgggaaaatgcgcatatctgttgatgttttatttagaaataataattgttcatcaatgtttgagatctaaggtggccggcatacttcttttttaaaatagaatgagtcagtttggaagtgtttatggagtaagaattggtggacttcttctgttgtttgggg

SEQ ID NO: 92424 - DNA, 261 bp, Glycine max
ctcttggtttctctgactaaactgaaaaaacctttgtacttattctctctcagtttcacataaactgacaccataattctttacttcaactgaaaaaattaagaatttatttcctccaaagtccaaacactgtcacagaaactgacttgttaaccattgttagttacattctgtttcttgccactttataagtcatcatcaccctccactggttttcattaacaaaccttcttcaaagtcccaccacttggttttcataac

SEQ ID NO: 92425 - DNA, 257 bp, Glycine max
ctttgattttgcatcctttggagtgagctctgatactcttggattagctgttcactttcagacttccaaattgcaaaggatgatgaagaagaatcagagcaagcaagttaactcgttgaccacgacacgtttgtcaccattggcgaaacccttcacgctcaaccgttctaccctccaaccctgctcaagttcccctttttcagggtacccttttcttgaatcgccaaaagaatgtgactttgatgggtttggggagg

SEQ ID NO: 92426 - DNA, 146 bp, Glycine max
  unsure (1)..(146): unsure at all n locations
gtttccgttctagattgcaaccttccttcgtactccgtgtttacgtcgttcgtgtgtggaaagtgggaaaagataacaccccaatttcgaagccccattgctctttccttctcccctaactccgaattgcctgncatcacacacac

SEQ ID NO: 92427 - DNA, 189 bp, Glycine max
aattggatgagaaaagaaaatcctttgaagatggattgaagaataaattggtggtagtgggaaagaaagaagctgaaatcactcacatggaggagaaagttgcgaaacggaaacaagccttgggaaagaaagcagagaagcttaaagagaaagagatagcgtatgaacaaaatgtcacagctttgaggg

SEQ ID NO: 92428 - DNA, 176 bp, Glycine max
gaaaggagtgggtttcattaggtgaaagacaaacaagttgaccttaaagttaaagtcttaaagtatgataaacgagatatagaaattagaaagcgtgaggaggattttgctggttttatacgcgccgaatgtgtgagagcgaagggagagctggatacagctaaatggctatggtt

SEQ ID NO: 92429 - DNA, 183 bp, Glycine max
ctttcttctttccaagattctggcagttactgtcagattcattatcaaagatgcagaggagaagaaggcctcttttaatccaaggccacttttcagattattcatcaactggcttctagatcttggttcacttgagcctgttactgatggtgcaaatcttcagattttaactgcttttgccaa

SEQ ID NO: 92430 - DNA, 184 bp, Glycine max
ttagaatgttatgccatgtggccaaggaagagatggatgcaaaaattcacataaactctgcatttgatcttttcaacaaaataaagaatatgctttgcaaatcccttaacctaatcaataaatttcaatctgcgggagtactgggagcaaaggcttcagatggagagggtagagagggttaagc

SEQ ID NO: 92431 - DNA, 165 bp, Glycine max
gtcaaggtctattcgggcaggcactatatggatcaactgctatgccatacttggcattgttagcactcttaattgcttccccagtgatggcactggagaagttcaagcgcactgaggcctcaattaagagtgctaactataccctgtatggcctaccagtaggca

SEQ ID NO: 92432 - DNA, 204 bp, Glycine max
  unsure (1)..(204): unsure at all n locations
cgtagtaagtcggattcngctcagccggtgaacaacgagaagacgttcgtttcctctgcttttccaagttttcatcgactcaaccatgctattcttacataactagggttaggagttagggcgttcttatcgttttcgctccgttaattacaacaacggccaacatggttgttctttcgctttcacctcccagcctctctaccg

SEQ ID NO: 92433 - DNA, 184 bp, Glycine max
tctggattagctgttcattaagggaattcatccccaattcttcacttctgaagagagttcagttttccctccctttggataagtctaagctagacactgtaaattggatttaattatcatgatttagttatcctctacatttatgtagagtaactattaagataattgtgctcttcagaagaga

SEQ ID NO: 92434 - DNA, 213 bp, Glycine max
ggctcgagtctacatttcagtaacgtactaaaacatcccaatacactttcacttctatattcctacttctcgatctctggtttctcctcttaaacatgaagcttttcgtgtttttacttgcatgggctatggctcttcttgcttcttcctttgattcagctgctgtagtggaacgcactttcaaagttcaaaacaagactatcaaacgcttgt

SEQ ID NO: 92435 - DNA, 214 bp, Glycine max
attcggctcgaggaaaccttgtcttaaggagattccttgctccactctcattttagtgtgctagtggtgtcagttatataagtaaggggtggtgaacgggatagttcccacttgtgaatcatcattatcattattaccaaacttctctacaaaaccaaaacctccaagcccttaacttttgagtcaaaatttatcatttcaaagcactctccaa

SEQ ID NO: 92436 - DNA, 197 bp, Glycine max
attcggctcgaggtctaattaacgacaaagtatatatgtattgttatttgtttttgtttttttttttcgtttttgggtcttatgaacgaaccacgtctatagttttaatttggatgacctttttgtatacaaagtcacatgtgacgtcttacagcttttgattattattaagatttaattatatgagtccttaactt

SEQ ID NO: 92437 - DNA, 195 bp, Glycine max
  unsure (1)..(195): unsure at all n locations
ctttttcttttagttggttggtatgcttccacgtttttctttatgcancaatgttagttgttaatattgttagtttttgttagaggggatttgaatctgtgtgtaatgctgagaatgacatgatgtggttgcttagtgtgtgtgtgtgtgtgagtgttgctgctacttgctagatagttccacatcttcttgagg

SEQ ID NO: 92438 - DNA, 276 bp, Glycine max
atttgatcatgcttcaaatatatctgatattctgcataaactgggagtttgtcaacgaagaaacctttggcttgcaatttttgttaaagacaacattgagttttgtgatgcttacagattttgagtaactatggcatctcatcctgaatggcttcattttgtatccagatttgcttcagtggtgatccactaactaattatcgtcacttatgtttttttatcagtaaatgttagtttgttagttttgttggaaatgtcagtagggagattcaaaat

SEQ ID NO: 92439 - DNA, 271 bp, Glycine max
gccatttattcctctcagcaccaaagcgtgacactatttgctttcttaccttccattctttcattctctctcttgcattacagcgacactgttcaaatctcttttctttctaaaaattaaaagcaaagaatttacgtaagagactgagattgagtgagtgaatggagtttagtaacctcactctggagatcttctccaaactggagcaaaaatggctctcacattgtaaagccaccaacaaaactcgcattctcagcattgacggcggagg

SEQ ID NO: 92440 - DNA, 244 bp, Glycine max
aattcagaaattatctgatgtgatggctacagatgtgtatgcatggagcactagtcacgtaggaggaatcaccatggactcagtacgggcatcagcattataagtgctgtcttgacaaaggatgtgcttaacctagtagtagtgaatgttgattcccagcatcttctgatgctagagattcagtcgatgatgaggcttagctcatgcattaggtgctactgaattcttcacctggacatatcat

SEQ ID NO: 92441 - DNA, 273 bp, Glycine max
cttacaaaagtttgttttcaaagtgtgttttgtttcccaaatcctacctcttgtgaccagaacccttcctcctctttcttttgaaacctctttttttctattccccaaccaaacaagcaaacgctactcactcatcatcactgagatcatggctcctaatatcaccactgtcaaaaccaccatcaccgacgctcaagccaaggtcgccaccgatcatggtcgtgcctacgtcaccttcctcgccggaaacggtgactatgtgaaaggtgtcgt

SEQ ID NO: 92442 - DNA, 259 bp, Glycine max
taggttatagtcttcctctgcagtctccttctcttctattctccgtcaattcgtggctccgacgatgacgtggcgctgcacgcgaagaagctcatcagggtcctcgacttgtacccctgcgctgacgtcaacatcgttcccgatggtaattgtaccctcgaaacccgcaggatcgtctagaagtgcctgatgttccagaagatgttagattcggattacgaggctacgggatcatgataggaggaccacgctggctatt

SEQ ID NO: 92443 - DNA, 242 bp, Glycine max
cagatttgattcagattatgctttgtcttcttccatctccttgtgccaattaagatacaatatgacacagatactacgatgaagagaggggacgacgaagacaagtccgggggggcccatgttcccaaggctgcatgagaatgatagcagagcaaggaggtgcaatagcactaccagcgtgcaagacggctctttatgaacagttcagtattccatctcagaagttccatccacgccttctt

SEQ ID NO: 92444 - DNA, 263 bp, Glycine max
aatggctctatccctgatgctcttcagattttcccgaattcttcctttgagggtaactctctatgtggattacctctagagtcatgctctgtagtctcctctacacctccatcatctcctgtctcacgatccactcctgcaagacacatctccaaaagtatactgagcaaggcagctatcatcgcagttgcagtaggtgggggtgtgctattgcttgtagtagctctcatcactgtgctgtgctgttcgaagaagcaagatga

SEQ ID NO: 92445 - DNA, 256 bp, Glycine max
ccctgagaagaagtgggtgtttttcttctttgctttcaatcaagtctcaaactttttttaagctcttgtggatttataaaactgtgaaaatgggtttctttctttttgtatggttttattgggttaagttgaatttttctattgcttctcaaaccataagaagaactgtgtgattgcaggtgttccttgttaagatctgtggtttggttttcgggaggaaacaaaaaaaggatagaaagaattagattattaagta

SEQ ID NO: 92446 - DNA, 271 bp, Glycine max
caggtaatctgttggcgatacctgctggaacactatcagagcaggcagcatggagctcatgctccgcgcatcaatggattccattccacgcgcagtcttcaccaattcctcttccttcgttcctttctgtacctacacggttcccgacgctagcaggcgtcgaaacggcaacaccggcagtcgttccactcacaaaatcactcctttgcgtaaggagaaacatcccaatgaacagaaattgaagctcgaccatcaaaaccaaaaccccttg

SEQ ID NO: 92447 - DNA, 264 bp, Glycine max
gtatgaccctagtgctgttcggaacgataccccgcatttactcactagggggtcaaacaatctaatgcccacgagctcatacatcacgtgactgttgctgaacaggagtgacattgctaaaagtggacctctcgagatataggggcagtctaaccggctttatgggatcgagcacatgctctaggacattatgtacgcgcttaagatggggcttgaaccgattcctgggcatagcgggcttggaggcgcttactatttcagaaa

SEQ ID NO: 92448 - DNA, 210 bp, Glycine max
tacaagataacgattttgacttgaatgcattggaaagccttaaaaatcttcccgcttctcagccacgtcagtcattcacctcatcggatcactctccgagacaaccgaggcaaatcaccaccatcaatgcctccgggcatctaaccgaaccttccttggaagcttcgcatattgacctatctcctcaacctcctgatcaacgcctctcgc

SEQ ID NO: 92449 - DNA, 180 bp, Glycine max
acatcggcatggatttcgacaacaacggggaattcgaaatcaccttcgacgaactcgacgaactcgacgacatattcatcccctccgacgccgaggatttcctcatacccgacgtcggtaactctaagtacgactccgcttcgccgccgatcgacgcacagaattccgattcgccggatt

SEQ ID NO: 92450 - DNA, 279 bp, Glycine max
caaaatttaataaagtgctgagggtttctgctaacgtgaacaatgcaggtaggaccaagtggccaggatatgcttgcaaattagtttacagctatttttttctttaaagtgtcagagctcttgccattttttctctttaccttaataatatattgacagagttttcaatttttgccattttttaaatataacgaatgcaatttgcaattatatatcaggagttacaaaaggtcatggccttttttaccacagaatcatttacaggagttttattttatt

SEQ ID NO: 92451 - DNA, 280 bp, Glycine max
ctcttcttcttcctcgcatctcttttgcctctttctttctcaaaccctttttcttattcctcgggatccagttcaagaaccacgtgtctcgttgcttctgttctatgtttataagtaacttgagttccttctatctcttctctttttgcattgaaatattgtgtctgatttggttaagttgggagatatatatactgtttagttaacttgcatcatatctcagtgtcaaagaccagttcatcatttttctgagacattaagggattttaatttgcatctt

SEQ ID NO: 92452 - DNA, 239 bp, Glycine max
  unsure (1)..(239): unsure at all n locations
gtaaatcacaaccaccgtgacgtgcttattcttccgccctcggtggaggctctgatcgagagcatctgccgcgaccagatcaagcctccgctcgattacagcacccgccaccgtctcaaactacagggcgaggaacaatcccttcgcattctcaacaaaatcgccgccacccgtatccgattatctttcgcaggcttcgtcaaccacatgctcgccgacatcaancaccaacacaataa

SEQ ID NO: 92453 - DNA, 273 bp, Glycine max
gcaacagaatggggcgataccctgattaaacttgttcctccggtccgctttcgcttcaaacactcctctgctctttcaaaaaccatttgtttacaggtatattcgacagaagcatctcctggcatagagagagttacacatgaagtcctgatagaatttctagccactgctgtaaatgtcaccaacattcaatgtaatagtctaatacggatatatcgataatatatgccaagctggatatctttcagttgccagtcaaatgctagaagtttt

SEQ ID NO: 92454 - DNA, 264 bp, Glycine max
gtgatgtggtgcgatgcctaatgatcaattggaagattgatcaatctactataaaccagaaagactgtgatgggacaacaccgttgcatttggcttcaaaaaatttatttcctaaaggcttgtactttattacacaagataggaggactaatatgaatctcttgaataacaacgggttaacagctcgagatatcgttaacaattatcaactggcgattcgcaagtttctagccaatcgagtgttaccagcatctggtgtcccct

SEQ ID NO: 92455 - DNA, 161 bp, Glycine max
ccattgccatgatcgtgcttggctatatcgacttcggggattcatagaccataggtatgcttataatctagttcgacaatattcacgagcgtagtcatcgaaagattcgagaagtgatctgcttatatgaataataggtctttcaagtatgcctggggtat

SEQ ID NO: 92456 - DNA, 244 bp, Glycine max
cgacaggtcaatctctcaagtgaaattcaaggatgacgtagggtgtgtttctgtaaaaagagtaattaagtgcttattgaataagtgcttatcatgtaaaagctttactgcaaaatcagacaagatgaaaagtcgagtgaggttaaaaggcggtgaaagaatgttaggtcaaacttgattcttatagtggctgtaaaccttgtattggtgctattgtttgtgttggattgaccaatgatagttt

SEQ ID NO: 92457 - DNA, 265 bp, Glycine max
cggctcgagattagctttgcgtatctgagaaactaagccatgtcaaaacccttttgcgccctctttgcactgtccatcatccttgtgacatgtcatgctcaaacccttaatacatcaacaacatgtgaaccttctaaatgtggtaacctcaacattagctaccctttttggaagatatccaacaccaacgttcaagaattttgcggttaccctgaatttggccttgaatgtttggatgaccaagccatcatgatttttccaactg

SEQ ID NO: 92458 - DNA, 247 bp, Glycine max
agatcctagaaataaggagattgatcttgatagttcaatgtatgagaaaattcctgacctaactgaggaagatatgaaaaaacaagaaggagattacatctaccgttatcgttacaatggtgggggtgcaactcaagtttggctaagctctggcagatttgtggtgattgacctttcggcagggccatgcacttatggtaagattgaagctgaagagggaagtgtctgttctagaaccctgccaaga

SEQ ID NO: 92459 - DNA, 237 bp, Glycine max
gctggctcaagtatgaacccctttctggataatgacgagtctggtaggcctcaagtaggcagccctaatcttagttctccttcaaatggggaatccgtaccttcaaatgggttgccaactactagcgattctatcaatgggaacagtgactcaagtccaacatctgtagcggtaccctcgctatttgaagaggatgtggaatttgtaggtgtagaattagaaggtacagagaaggca

SEQ ID NO: 92460 - DNA, 241 bp, Glycine max
caagtagcgtgtacctgctgtcactactccctaaggaaaaccagaacaacacagttgttcctattagaaatacgcccacatcaatccacgccacccctgtcaaaatcaatccccagataccattccccttcctataacaaacacaaaacaacccaatcattgtttgttcacatccgaatccacaacacactgttaataattattctgattcacgaaaaacaggaaaaccccaaaactctct

SEQ ID NO: 92461 - DNA, 232 bp, Glycine max
gagccaagcaatttgctattcactattgaactatgaaacctaatatgtagaccaagtgtttgttgtggtgggtaaattgtatctttcttataaaagacttggtcaaaatgattccccaacttaacctgttggaaaaattcttgttttgtaggtttatctcaagacacatgtgattgaatatatattgtctatgtttaaaattctatcttttgttactgcaatccaggtggac

SEQ ID NO: 92462 - DNA, 233 bp, Glycine max
attctttttccccattttttctctttctttttttttttcttttccttttttcattttcattttccccttcgcttcgtctcaacagttgacgccattctcgtctcccttttccaaaaaaccgtttcctcgggaattgagagagttccaattctgcccctcggggcttcgcgaatttaccaatccgagagtcatggctccagccaccagaaattcctggcccttggatcagcgca

SEQ ID NO: 92463 - DNA, 235 bp, Glycine max
aaggaacaaggtattagctcaagtttggacccataatcttgatagttgtgaaggagatgttgtacagtgctcagaacaagaggcaatgcctagttctcataagactgctcaagactaaattcaccgaacgtcctctcctacggtgatgattaatccttggaccaccattccagaaatcaaccccgttagagcatgctttgatccacatgattcagttgtgcaacaatcatgatgg

SEQ ID NO: 92464 - DNA, 244 bp, Glycine max
cttttacagttttcccccttcccattcatcaattcttttattgaacatgtttgcacaatagttaacaataccaaatagtggcattgagtgacgtatcccaaaattgagacagtgggtagtggattggttgctttgctgggatcatatattatatattcaagataaataatttcataatttgtagtatagaatacacaaatgcttaaaaataaaatattatctaaaattaaagatataatcataa

SEQ ID NO: 92465 - DNA, 243 bp, Glycine max
atttattcagctcatttctggtcttactagtttctgatttgttctcttatgccattttttgtctcttctttcaaaggggttactcttgaagttctataaagttcgattctttgttcgtttcactaacttggatgtgagtaggctcttagatccgagggatgaaagttggatatttttagcagtaacacaaatttattcagtgtgaagcaatatgggaaacacatgtgttggtcctagcatttc

SEQ ID NO: 92466 - DNA, 249 bp, Glycine max
atttagttgacagatgaagagagaaagtgagctgatgaaaagatcctgaatcaacaaagaagagacgacacgacacacacacacacaaaaaaaaaagcaaacaagctgactcggagttaaaatagaagaaaggattatcgagtcgcattgtcgattcagagaaaaaaaaattgaattcaatctgatagatcctatcacagcaaaaaaaattggattgaataaggtgtttccgatttcaaaaacaatcac

SEQ ID NO: 92467 - DNA, 199 bp, Glycine max
ggaaaggagctggttacacatcagagaagccacttgatgcaaaggttttgaatatgatacaaatacatacacatttatttataatctatgatatcaatattatatattgcaaggtatgtctttgtctttggatttttaaatgggaggtaagtcaagatattcttgtttggtttggattcagacactgagacgtttagct

SEQ ID NO: 92468 - DNA, 243 bp, Glycine max
ccatctctttctctggctctctccatctatcataagggtcactcacgaaactcctctgagagcacgtgcacagccatcggtaccgcggttagctccctgagtagggtcgatgggtggcgagtcacatgaggaccagctcggcctgtcgggccggagtcacacggtgggaaatccccggctctcagtgctcgggacttactctggaggtcctcgactgacatccaggtcttagacctcgatttg

SEQ ID NO: 92469 - DNA, 240 bp, Glycine max
caaggatgcaaaacagtgttaacttaactgaagttgatcttatgcaaccccctcttgggtaccctgtctcatccatcaagcttcatgcacatgaagctaagtttcttgcttctaagaggaattgggagtttggtgtggtgttctcttttatgaccgtctttacggcggtttaagcctatctgatgcaattggattcaaaggttgcagggaaattgaagggccttatgacgattaccttga

SEQ ID NO: 92470 - DNA, 241 bp, Glycine max
caaacattgcaattggtctgacagatgtgagacagcctcaacccgatgatattaacaagctgttccaattgattgctgaggaagagctccgaagaagacagccacgccaataccgagatatgacagaggagtctaaaaggatcttttgttcaagatttttgatgttgataagcaaagatacatttatgcccacgttgcagctttcgaaaaaagtgaaactgaaaagatgcagaatgctcaa

SEQ ID NO: 92471 - DNA, 239 bp, Glycine max
  unsure (1)..(239): unsure at all n locations
cgacagtcagtttctgcctcttattttttccacactctctttctcttactngtcttcttttcctcactttctctctctactttttttttctctttatttctagtcttctctgtctatcacagatcttgaactttctggcaagaactcagagcacttacttcttgcagcatcaaaatgggcttctctctgttaccaaaagcaactccttgcattttgttcttggctctgctgttttgtac

SEQ ID NO: 92472 - DNA, 239 bp, Glycine max
gatggagggtggtgttgtgattgggatgattcgctcatgagttgtttttgtgagtttcattgcaaagctacttttctctgtttggggataaataaaatgggttgcttttcatgtttcgattcgagttccaagaggatcacaatctccgtcctcagcaccaacccaatcaacctctcccttctcagatttccagattgccctctggagcagacaagttacggtccagaagtaatggaggt

SEQ ID NO: 92473 - DNA, 239 bp, Glycine max
gttcaactctaatttagcacacatacatatacaccatgttgtgaaaattgagaccttgcttgggattggaaggtagatgaaagattgtaagttggaaaatcgtaacatggattgtatgatctttcaaaatatgcaaaagttgtacatgtaattaagatgacataggtaaggaaaatatcctctaattcatcaacatccaactaatcttaaataaaaattcgtattcataagtttattac

SEQ ID NO: 92474 - DNA, 237 bp, Glycine max
gagaagtttcattagtgcttgatcgtatttaagatattaatctttcgcttacattaccaagcgatttaagttagttttcccaagtaatttttagtttcagttaaatgtaaatatttataatttcatatggaaaaaatgatttcaattgaatatgtgaaactgtgattaggataatttgttttgaactatgaactaaaattaatatatatttttttctgataaaataataaaggggtg

SEQ ID NO: 92475 - DNA, 234 bp, Glycine max
caaagacatacagaacagaacctgagaaacagaccctctcaaaccggaaagcgcaaatgaagcccattccatgcctaagcattcgcatacttctgctaatcgctatctgtctcttcacctcttcctccgttccaagatcggagaaacttgcgggtcagacaacaaatgcgacgctggactcagctgccaaacatgtcctgccaatgggaatacccgaaccagatgttcgcggat

SEQ ID NO: 92476 - DNA, 233 bp, Glycine max
gaaagcttcttgtatacttctgagattcttaggatggctcctaggacttctttgtttcaattggaggcagaaagccaacattattgtgaagatcattgggatgctcttaaaaatcagcataatgaagtgattatctggatttattgaagtattgtttctcttctgcatatatgctagcattactgcatgatgttcttgggattgctatggaagagaaaagccaacattattgt

SEQ ID NO: 92477 - DNA, 239 bp, Glycine max
catctctccatggcacacagcgcatccttcaacaataacagcctctcttcacaacgcagcctcgcttcagtcccttccctcaactcacactctcacctcttcattccttccactacctctcactcgtgcccaccactctcaaaccccacacttcctcctccgtatacatctcctgccttaccctcgccggcaacttgctctacactggctcctccgacagagacatcagatcctggaac

SEQ ID NO: 92478 - DNA, 233 bp, Glycine max
cttaaataactgttatggtgctgcaataacgtcatgcgtggcgtttttggaccccctctgccattcaccatctggtatttgccatcacatggagctgtccaccatggagcctgccgtggtgccgcagacccatcttaataagtggcaagaatgggtatgatttcaaatctgtgaggagatggaccagccaaaagaaattgggatatggcctacatgaatgtgataaaatattt

SEQ ID NO: 92479 - DNA, 248 bp, Glycine max
atcccaattaagtaataacaccatgcaatcatgcaaaatctccttattgtattacccctataacaactatgtattcaaaataaggggttttaagtgtatgctaaggaaataattaataaaatatttgaataaaattcagaaaagattgcccaaaaaaaaaaaaaaaaaaaaaaaaaaaaagggggggcccccgaaatcatggaccttgtaacccggggaattattccggaccgggaatttggggggta

SEQ ID NO: 92480 - DNA, 251 bp, Glycine max
cacagattcatggcttaaaaaaaaataatcacagattcatagtgatctcagctcctaaaaaacagattcatagtgatctcattctcaagtgtattgaattttgcaatagagaatcatcaaataaacagccacctgtaccaatgtcatgacgtgtctgaaaacaagacacgcacctctccatatctttgtcaccttactctatatagagccaccttagcatactgcataatcacagttttcattcaaaattc

SEQ ID NO: 92481 - DNA, 103 bp, Glycine max
gcgttcggcaccagcgaaacgctcttcgttatctttttctcgactccgcggcgtagatccgaggagttcgggaaaccctaactcatcttccttcacaacagaa

SEQ ID NO: 92482 - DNA, 273 bp, Glycine max
gaaaattttcatgtaaatgtaaatggggtaagataccaatttcaatgcttgctgtcatgtagcacaggaataggtcaaataattgaagtctcaacacaaatgtaggttattggtgttgtttattttaagttttccttttttttaagaacacccaactagatattgattttcatgatcataaattttcgtagcttgaaggataggaataatttccggtagttgtttattaattttggattatttagcaatccacttttcatttcaattcaaaaa

SEQ ID NO: 92483 - DNA, 257 bp, Glycine max
ggactcttccccgtcgatcctctttcaggtgcccatattgatcaatgaaagaataagcctcttagaagaagctgttcttaactttctattcttttttgtatgattatcggtctggtgactacgtctgttaacatttatcaaaaaattgtactttatttttagttttttctaaaatttgtatgacaggtgtagataagtactacattttcaagactggactttacaaagttggccgaacaggttgtgatgtcataatc

SEQ ID NO: 92484 - DNA, 270 bp, Glycine max
atagggtatcaaccaagaccaatcaactccaagtgaaagtgaagttcagatggttcatagtggcacaaaggatttcacaacaaactcaaatgcatccaaggaagggacaaatgatacaaaggaggaaactaatccttcaaaaatgttgcaatagtagtggataaacctattgaagcacttgttatactctcttcaggagaaaaggactatatgaacaaaaaatggaagagggtactgtggaaatcttgtgtttatgcaatcacactagta

SEQ ID NO: 92485 - DNA, 210 bp, Glycine max
ggcaatttggaggaatgtaatgtttccgatagcttatgtaaaaatggttggccccctgcattgtatttgggtcatttatctatcatgtgttgagtcaaagtttggtgatattgaatgcataatgtcattcattacactaacccaaattgtttaaagaacattgaatgttgtctctagacccaaaagaatgaaaagtgaaagataaaatgc

SEQ ID NO: 92486 - DNA, 135 bp, Glycine max
gtttgataacttgatacaacaacaaagcttcatcccattagacgaggtcgattacatgaatcacacgacaccattttgacacggttaaaacccaaagtttcagtatatcgaaataaaagtagacatttgtttttc

SEQ ID NO: 92487 - DNA, 266 bp, Glycine max
atttgctcttgctgatgtccagctacttcgtagctgcatcttgtgtgtttaggtttcaatttttgcttaatattttacttgaatatgcaatagatcatttatccgcttggattcgaattttcctagcctgccatgttcacacgaacggtgggactaggggtgaaccatatgcctattaatttatatttatttatgtccttttcttttatggaagtcttttttttcactaggatcgagtgaagggaatctgctagtctagttgtagc

SEQ ID NO: 92488 - DNA, 264 bp, Glycine max
gtttctataagtacagccatgtcaaatccattaccagttctaccattccctttaccatttcaaagtatttcaaataaccctttacatttacagggtggagcccatccacctttacctcctggtcgccctcctgctccatctcaaatgataccccatccaaatgctggtgcatttatgccaagccaacagccaactgttggatatactaatttaattagttctctaatgtctcaaggcgtgatctcattggctaaccagctgcct

SEQ ID NO: 92489 - DNA, 182 bp, Glycine max
ccaaatggaagtgaaccatctgaagaagaatcatggggccctgaattgccagattcggtggctaaactgaacactgaggataggaattcaagtgatgaagatcaggaagatataaatacaagtgataacaaatcaaaccaacaaggcgtgcgtcaatacaaacacttgattgcaatccatgg

SEQ ID NO: 92490 - DNA, 268 bp, Glycine max
aaaaatttgaaagaattcaccaccctttttgctctgtttatatttttaatttttctcctgctctcagctgctgtaagtaattgttgcggtgctgttttggcaaagagggagagagagagcgacccaaaagagactatgctcggggactcagctctgttgggaggtggaggaggagaaggtggtgcctccgccgatgtagtggcggcgaccgccacgcatgatgcgacaacgacgacgacgaccggaggaggcggtggcggatcaaata

SEQ ID NO: 92491 - DNA, 270 bp, Glycine max
atcgaactcgttactcatccttctctcacactcttcttcatctggattacagagctccccattgtgacccttctatacagtcgatatcgacaaaatcggaagcaatgcacgtacctgcgagctgttgggagaggggttctaggagtgcctgttggggcactactgaattttttaggagctattgctgtgggggcgcctgttacatttcagtatcttcccaagactgtaaattgggctcttatgatgtctgtgttcacaacaattccagcg

SEQ ID NO: 92492 - DNA, 267 bp, Glycine max
caaaaaggcagaaaatattgatggaaaaacactcaaggggatctcttgctagggaagatagagaagcaaggatgcaagaaaaggaaaagaggaaaaaaattaaggaaaatagggtctccaaaaaggattcagcaaggaaccaaagtcaatcaaattcacacattacaaggccacaatatcaacctcaagaaacaaatgtacccattaatccagaaaagccagaatttccatctcgaaattcaggtttatctgccaacataaggaaag

SEQ ID NO: 92493 - DNA, 277 bp, Glycine max
aaaaaacttgagagagagaaaatagagaaagaggctaggtagaaactagaacccgggtcctcttactacactcacccccaatttcccgagcctcagcttcgggacacccgaacctcattactcgggacgcgaataaaagccacactgggattcacactcccaagttccaaccctactctcacacactgcaacaacgaaaaccaaagaagaaaaaagagtttcttctttccgaaatccaagcagtagggttagggttttttccgatctcaatggcgga

SEQ ID NO: 92494 - DNA, 276 bp, Glycine max
caaaaactaaacactaacaacgttttgggctctgagcaacttttacatttgagacacagattaaattaatccactttaattaggtctgttgttcatgatggctctagctactccaggtagccctagctccatgcacatgccactggtgcaaacgtccaaccctagctcacaaaattctatgacgacaattaccgaaaggagaggaagtgtagtagttctacaaacgaaaagaaaacatgatggaggaaaaggacgtgatccacaaactaatagcat

SEQ ID NO: 92495 - DNA, 273 bp, Glycine max
ctttgactgctgccgtcaagccaaccaagggacatcaacatcgaattagaaaatagcatcaaaatttgaaaaccaatgttcactatcactaaaaaattgaagttccagaaccagtatttgaacaccaaggcgtcgcaactcccaacaacctggccgccgttgccgccaccgctcctgttgccgtcaaactcgtgcccacccttttgcttcagattttgtggtgctcgcggaccagctcaagaaggagagctagtgggagactctcaaggcggc

SEQ ID NO: 92496 - DNA, 278 bp, Glycine max
actagtcaacaaacataattctcttcctagtcttgtccttaaattacaacaactttcaatcctcaatctgctccatcatatatatatagtaataatagcagcaatggataatactcccagattgcttcaatcggtttcaagcttgattctgattctaagcatttcatcattggcctcagcatctctgaaagtgggtttctatagctcaacgtgtccatctgctgaggcaatagtgagaagcgcagtagagaaagcaatatctgccaacccaggcatag

SEQ ID NO: 92497 - DNA, 264 bp, Glycine max
aagaaagtcatctagaacagttgtaattcgtaatatccactacatcactccaaaaaggagaaataatgaggggggagtctctgatgagtcactagaagatgatgatggcatcgatgaagaaaccatcaaacaaaaggttggtgttgcacttgagtctttgcaaaaggtccataaagttgaaaaacgtgctaagggaaaaaaagcagcagcctggcacaatgtaactaaatcaagtgatgcgactgaggaagatctcacttataa

SEQ ID NO: 92498 - DNA, 265 bp, Glycine max
caaagatggcaaccaacgcggccagtcccactcgcagtccacgctcccaacaacctcccacccaaagcccaaggacaccctcgtcaaggcccacgctcaggtccacctctttctccaacaatccctccacctcctacagcggctccaccggttaccgcctctcctctgacacctccatctcaagcttctcctccatcacctccctccgcgacacgctccccgaaaacccccacatctacgacttctccgaaatctgtgccgccac

SEQ ID NO: 92499 - DNA, 216 bp, Glycine max
tttcttgtaaaacaaagattgtattctatttagcatgttagcataatcacaatatgctcgtacaagtaagaatttttactgcaccaaacattaacaaaccctagaagaacatcaaaacaaccagaactatacaacaatttaaaggagaaaaattcttacttgtacgagcatattgtgattatgctaacatgctaaatagaatacaatctttcttgt

SEQ ID NO: 92500 - DNA, 264 bp, Glycine max
ggccaactggtccaaaggagcaggataactggctaggagatgaatattgctagttctgcttcctctctcgttttagcgggaaaggaatgcaaactgattaaggtaatatctttatgtcctggtattagtatgtgttatgtatgtcattgtgggagaggtgaaatggagcaagacatcaacatcatcatcatcaatcaattgtaaagggggtgtaccttacatagtagcaacttatgtcattcttggtgacctgaagaactatag

SEQ ID NO: 92501 - DNA, 261 bp, Glycine max
cgaggatccgacccggatccatggggtgcgtgagtcgaagcaagcggtgtcggtgacgccggcgattgaccactccggcgcgttccggagcaatgcgggtggtctggccgagccggagaagaagaggagcaagaagaggaccgagtctggtggagcgagtcagagcgaggtaggtgagtcggggagaacgagttccaattgcgactcgctcagcttcaggctggggaacctccacaagtacgtgcagggcgaacacgtcgc

SEQ ID NO: 92502 - DNA, 266 bp, Glycine max
tgaggacaaaaacgaagaacggaaagccacagatggcaatgagaattgatgttccagccactaatccaactcgagcaattacagctatcactagcatgctgtgggaggatttagtcaagaatcccaccggagacttggttcacaagagcaagctccaatgtgctgagaaaatgattagaggtgcctttgtcgagctctataaaggatttggcctactcaaaacttacagctcactcaatatggtagcatttacaaagatattaaag

SEQ ID NO: 92503 - DNA, 260 bp, Glycine max
cttccatctaaccctcaaatgcttcatggaacccaaaacaatcttattcatactgataaattcaggttgggttgtctctaatttctttctttccaacacatacaaaccacttaactaaacttgatctgcatgcaggttcttggacaaggcttgtatcagagtggaacaagagggaaatcaggaaagcgcgtggagattatgcagtgttgcgcaagttgagcaagtgaagatattgctatcggtcattccgatattctcgt

SEQ ID NO: 92504 - DNA, 272 bp, Glycine max
cattgaagactctaaacgggcaggagtttgtctcctttctggagcagatacttgaagccttgaacaaaggagagattccatcaacaggctctcttgtggacgttttcaacaagaatattcttgagaaatgtcttaagttatacagtgaaaagatggcgaaattagttctacctcttcctgagaaatctctgcaaggggcccatgataggtctagagatgaagtcacaaaagtctttgatcagcagcattttggtcgtcaccatgctaagaaa

SEQ ID NO: 92505 - DNA, 257 bp, Glycine max
ttttctgatatgtaagtctatttgcctttactcttaggggcccccatttacggggatgatggaggatggggtgagttggaaaattgaaattttcatttttgcatcttcaaggttcagccataacgttaacaaaaagagagagagagagagagaatgttatgtatgggtttggtttcacattcaaggacatgggaaacatggggggaccgaagccaacatagttttgttggttatatatatacttggatgcctattga

SEQ ID NO: 92506 - DNA, 110 bp, Glycine max
ccaatattgttaactgaatatttcagactaaaacaacgagttgaaaaaatattttcatgtgttgaacagtaactaaataatatgggttttaatggaacggtttgtttttc

SEQ ID NO: 92507 - DNA, 258 bp, Glycine max
cattaacaaatattaatggttaaatttatttgttttttttcctgtgagattaaactcaaccattttttttccttcttttttaactattcaactcaatcttatatctcaaattaagtttattttttggttttcctagaaattaaattattctgagaaattaactatatttaacgagcgagagccatttcattggcccatattagttcttgtgcttaggaaactttttgggtagaaaaaaaacagtactaagagtttgac

SEQ ID NO: 92508 - DNA, 258 bp, Glycine max
gaatttgcaggatcatttagttaataagacgttggggaactctttgaaagaaaatatgtcaagtggactttctgttcctgcaattatgattcgtaatttggctattcaacttaggaaggtgtgtaaccatcctgatctccttgagtcagcatttgatgattcatatttgtatcctcctttggaagagatagttggacaatgtggaaaattccatttgcttgatcgattgctgcaacgtttattttcaaggaatcacaa

SEQ ID NO: 92509 - DNA, 278 bp, Glycine max
aaagcattcaacttttggcatttttaggttatcttgaatccgattatcaatggagaccccatcgtccaccagaagagtaataacaagatcacagactttatctgcttccaatgatgctctcatcacagttttcagtgagtgattttttctcttacaatttcaatttttctttctccaaactcacccaaaacaacattactcgtttgtcttttgcaggaaatattgaagattccgaaaagaacacatcaaagtcaaaaacaagggtgcaacaacaacaa

SEQ ID NO: 92510 - DNA, 271 bp, Glycine max
ctttcacaacataacatattgctctctaattattctagtgttgctattgtgttgtcactttctctttgacgccatttttctagctatttaagaaaatggcaattgagcagcacaaggatgtggagagtggatatttgcaacagcccttcattcaaccagaggaggctgctgcttgtgaagaagttggatcagataagagtgtggaaaatggatccattggaatggtttttcttagcacacttgttgctgtttgtggttctttcacatttgg

SEQ ID NO: 92511 - DNA, 270 bp, Glycine max
caagcacccactatcactccctcacgacctcatgacaacaattcccgcaaaaccctttaacaacaacatggctgcagcattcacgagaagcctttcatccacctctcaactaagctcaaaatcaccaaacattaacatgttcgaggaaaatggtctcctttcacctcacatgtccgccacagcattgctccaaaaagctgcagaaatgggtgcaacagtgaatagtaacagcaacaacaacagcatgatgatgagtggagaaaaagctta

SEQ ID NO: 92512 - DNA, 274 bp, Glycine max
aaagtgtctacagagaagagaacaacatagcagagagagagagagagagagagagagagagagagaagagcttatctacttcactttctggagagacatggagggtgctaactggaagataacagaggaagaagcagggccatcctcttcttctgggattgcttcaaataaacaacaaaacccacctgaaacttttcatcatcaacatcataggaaggaggctgcagcagaagaagaagacaccgaggaagagggagaagacgatgttgatcat

SEQ ID NO: 92513 - DNA, 205 bp, Glycine max
aattactcaaaagtaattgaatttgtccagttcaaagataggttgcaacactctagtcagtatctagtggctcgagttgaaacacccattttacaactaaagcagaatgcagataacattgaagaagaggagggtatccttcaaaacttgaaatgtggtattcacttccttgagctgtctaaggaggtagggtcaaagccttgga

SEQ ID NO: 92514 - DNA, 275 bp, Glycine max
gatgaatcaagtctcaggatccacggtaaagaggtggccagcaagttgaatcgccgtgattcagatcccttgtatgaccgtgaatgggaggatgagaagagacaaagagctgatcagaagcgaaggcaccgaaagtaacaaaccaaaaggggatttcaccagtaaacttttttgaaggttgttcattttatgcacgtgctataatgccaactttttgcgtgagttgaggtggtgggttcacaacacttttaaccgtcagccccctcatttttctg

SEQ ID NO: 92515 - DNA, 251 bp, Glycine max
gtgctttcgagcagtgactgtagtcttattcttcttctctaacaaaatggtcatcgtcgattccgattacgaaggtgccgccatcgaagccctcggttctctcttcaaggtcacccaagtcttcctctgggatgatggccttcaggtttcatcctcagctgaacgctggatattggatgaagctgatgacaatcacggctctgaccccgttcctgatttgattgaccttattacacccgaggatttggagc

SEQ ID NO: 92516 - DNA, 242 bp, Glycine max
gcaacagagagtagaaaagatggcgcggttgatcacagtggtgtggtgcgcggtggcggtgctactgtgcgcctgggcgggcgcgtcgtgggtggaggaggcggcgaacccgatacgaatggtgggaggggtggaggcggaggtggttcgggcgatagggcagtgccggcgcgcgctgaagtttgctaggttcatgagcaggttcgggaagagttaccgaagcgaggaagagatgagggaga

SEQ ID NO: 92517 - DNA, 260 bp, Glycine max
tactcgagccgaatcggctcgagatgaagagaatctaaagaaagaccaaagccaggctcaacaagttgtgttattgtatgcatgagaattgaaggagagaggtgaagactcattatcatcatcatcatatcatcgtcatgtatagcatggattcatcatcttctggatctcagttttctcagcacccacaactccctccagggtttcgattccaccccacagatgaagagctagtggttcagtacctcaagaaaaaagca

SEQ ID NO: 92518 - DNA, 250 bp, Glycine max
gcatttccaaaaacatcatacatatgtcttttctaagatccaccatgtcaaatgatcattctaaattaacctttgatgagctcagatgggtgattaacatccgcaaaactcttgaagaagaggttgaggaggatggtgaatttgctgtgtccatcttcagcgtgccaaagctccttatggcaagtgatccagactcttatgtccctcaacaggttgcaattggtccctaccattattggcgtccagagct

SEQ ID NO: 92519 - DNA, 251 bp, Glycine max
accagtaagagttgatgttgttcataatttgaaaacgtcaaggcagccaacaaactagcgggggttcttcatcatctgtcttgtatggacatgaagaagggatattcagtttccttgacaaaacaacaacataagaaagagccatttcctgcagttcatcacacaagaacgcatcttcaatgcatccaagcggatcttgatgctacagtaggtactagctcagggcataatcaatattccctcaaattggg

SEQ ID NO: 92520 - DNA, 246 bp, Glycine max
aaatggtgctgccaatggtagttctctaaaatcaaacaaccaactatgcagtcctcctgcttctagtgcaagttctgttatgaggcagttttcagctcccccttcatctgggccttcaaatgttagattagtacagtcacctaagataatgccaggttatccggagcactgaagaagaatgaatctaagtggttggggaaattccggttccttgtgccaacacctaacctagcacggataaaatta

SEQ ID NO: 92521 - DNA, 248 bp, Glycine max
gtaaaacagagggagcatgtcaatttggattcccccagccacgacgttgattagttgtaacagcaattgataataatcaggatgcaacaaatacgactccgcacacccagcagttaaattcattaattattttattgttcttattttattatattgtcattctctgcctctgcatagtttctgtttacttttcgctactcaaagtctcaaaaactcatcttccccgatttagtagtcattaattattg

SEQ ID NO: 92522 - DNA, 249 bp, Glycine max
aaagacacagccattgtttgtttactttccattgattgagcgtaagtcatgacatgtctgaggacatcatccagtgggaggaaggaagtctcaacctttagtcgaaagagcaaggatctgagtgagtgagcgatcatgtgtggtggtgcgattatctccgacttcattccagcgggtcccgacggcggggcgcacgcgtgaccgccgacatcctgtggccgaatttgaggaagcggttctcgaagtcgc

SEQ ID NO: 92523 - DNA, 266 bp, Glycine max
catatccttcaatttctcgaattggatttggagccaacccttcgcattttcaggaaactggggttggtgtatgcaattgttgtgttaggattttctctggaagatatgagtaggtctccttcgttttcagtgagaacagatgttagttcgagtgttgattcagaatcattgcaacaatgggttgttgccttttgtgctataaggtttgatcttgaacagggccagcttgtggaagagtgttatccacatgggtgtttttcccatga

SEQ ID NO: 92524 - DNA, 266 bp, Glycine max
caacaaattactaaggagagttttgagagatcaaatgaagcgtgagtcatcaattcagagcagactttagtaacattattaattcagtccattccctatgtctagaatacatttatactgggtgtgaggtctttggcgtgtaatcaaatggtgaacatttgatattattagtgggaaatccttcactttattaagtcgtaacgttgtttattgtcatccatgtttgtgctcttttaatgtcaaataatggaatatcaagtaggaag

SEQ ID NO: 92525 - DNA, 264 bp, Glycine max
gtgccaccgtatcccttatacaagcgcattgcttcagctctgttgaggtgcatggaatctgaaacattttgtaggataggcggcaatttagccatgaccaatgaatttgaagattcttccattcagcagaagcgtgatgagtggcacaaattgattgtagagaaggggtttgaaatagagaatatttgaagaatgttttctttgaacttcatgtgcaagagccttcttttcacagctaaatgatggcctaaaaccaattgaagg

SEQ ID NO: 92526 - DNA, 270 bp, Glycine max
attgatgaagagggataatgatgtctcttggaaatgggtcatttgctttttacaaatttttttcaggggagaaaaagggtaatctgtaaattgattttcccattgctgaagatgtacagactacagagttcatgtcaagctgattctgtcaaacctgctatttaatgcagttgacagattcagttgttctgaatttcatgctgtcacattgtataaattttacaaatatttgtcacatttggtgaaaacccaatgtgaacatttcttcag

SEQ ID NO: 92527 - DNA, 271 bp, Glycine max
gcatgtttttcttgatggattagagaatcagatagagactcggcattcagtttctctgtgcttgttcttttgccctattggggttcttagtcatgccatcaccaaagaaatgactaaaagtgccagaaaaaacaagcacagctctatagagggcacctacttgctttcccacataaccaaaaaagtaacttaatttaaaaacttgaacatgaatttctgaaactcttaaacttcatgttcaagtttttaacttaagttacttgtaattttg

SEQ ID NO: 92528 - DNA, 267 bp, Glycine max
actcgagcgaatcggctcgaggttgaatatttgtgaattgcgactcaccacacgaccaactccttctcgctttgttgacttcttggcatcttttcttgctacaatcattttttcaatcaaccttctcttcctcaacgcacttcaattcttcctttttcgcgtacgttggagtcttggagcgaaccttcaattcaattcttcctagcgggttttctaactaggtggtggttcttgttaaaagctgccatctgggttctgctaccgttg

SEQ ID NO: 92529 - DNA, 265 bp, Glycine max
atcttcctctattggttgttctatgtctgctcatgaactaactccctctcaatcccctacctaatccctttcaatttccccatttttttccccattttttttcctaataaatcagatatgtaaaatcctaatttctctaaccctaacaaaacccccaaaattcaaagaagaagctggagatctgcgcgagttcaagatcgtcggagggaggaggagatccagtggtgatggatgagagaaagaggaagccaatggagtcaaaccg

SEQ ID NO: 92530 - DNA, 277 bp, Glycine max
catacgctcgagctcgaaccgctcgagccgtgacgcccacgctcgcacggccgtatcacgccgcgcgtacgttacaggaaccacctctacggccagggaacggatcggccggtgaacggagcggtttgcggctttgattccggcgagctgcgactttttgtgtcagagagtgaaaatgcgacgggacttgaatccatttcgtcggtaatagaggaacgggattcgaagaagtttgtgtgggagaatggttgcttgcttcactgtgagcttccaatta

SEQ ID NO: 92531 - DNA, 262 bp, Glycine max
cgggggaagattttcatccctttggactaataacatagtaggccaacgggggaagattttcatccctttggcctactatgttattaggcacattctaaggaaaggtttgagtgaaaatcctaaaacaaagtttatcattacgggtcatagtttgggtggagcactcgcaatcttgtaccctacgatcatgttcttgcatgatgagaagttgctgattgagaggttggaagggatctacacgtttgggcaaccagagttggag

SEQ ID NO: 92532 - DNA, 256 bp, Glycine max
tttcgccattggatctgcccttccttccccttccggcaaaggtatgcaacttttttttgttgttctcttttttacttcttcgtattatattgttgttctgatggctgtgcctattttaaagttgttgactttcttcggtttcatgggtacccatttataatcatatgtgattgcacgttgcagtatatgtttatatatataatgcggggtgttaatgtataaatatgtttttttttttttctggggttatttgttt

SEQ ID NO: 92533 - DNA, 254 bp, Glycine max
agcagccacccgattgcatcgtcgccgactttctcttcccctgggtggatgacttggccaaaaagcttcgcatccccagacttgccttcaacggcttctccctcttcaccatctgcgccatacactcctcctccgagtcttccgattctcccatcattcagagtctccctcaccccatcaccctcaacgcaacaccgccaaaggaattgaccaaattccttgaaaccgtgctggagacagagctcaaagctatg

SEQ ID NO: 92534 - DNA, 256 bp, Glycine max
ggtttcaaggctagtggaggagcgtaggaggctgaggagaaaagacaggctaggctagaaaaagaacttttggaggaggaagagagaaaacagaggaagaggtttgaggccatagaaatgcagaagttgaggaagacggctacgaggcggtgtcgcaactgtttgaacccgtatagggatcagaaccctggtgggggtaggtttatgtgttcgtactgtggccatgtttcaaagaggcccgttttagacttgcctg

SEQ ID NO: 92535 - DNA, 260 bp, Glycine max
tcgctaacagtaacagggtaaagagtaagcgaaaccctacgcgcgtgttccttccggtgaaactatcttatcctctccgggatctgaatctgagaaatttaatgcactactacttcttctcgagaaggatccagaagaagaagaagaagaagagccacactcaccgccaatgagcaacatccgtcgctgccagaggattctcatcctctctctcttctttctctccgtcgtcgctcctctcgtcttcgtctctcaccggc

SEQ ID NO: 92536 - DNA, 247 bp, Glycine max
acagttgcaacctctattaccccattcaattggtggtatctccaggcaaattctctttcttcctggaacgatactaatagcacatggaacagccaaccaaaccctaattcttcctcttcttgtgaggaggatatatctgtttctacatctttcactaatgcttccaaccattcaagcctcactgttgagtcctcacgcagactcattgagccacctgctccttcctccaacgagttgatgggagaac

SEQ ID NO: 92537 - DNA, 262 bp, Glycine max
tgattcttggaatttgagtgtggaggttagcatggtagctcacttgacaaaggatgaactctaatccggctctccactatcaagattaattgctatattttcctttccatttatctgttggatagaatattaggcataataacaaacttgtcttagtgacattctttgttgcgggctaatattggactccatacaggttagagaaattgttgccattttggaccttgatgttcttttctatccttgtccaagaaatggccca

SEQ ID NO: 92538 - DNA, 251 bp, Glycine max
ttgggcttgtctagagttgctggtgctcctggttactatgctcctgccccgcaacctatgatgccttatggaatgccacaatttggaggcattgggcaacctggaggctattaccctgcaccttattattgaattgaagtgagggaggaacttgttttgagccaaactgtgttttttcatggtcttcaagctctccggaagatcggactctatttttctgtctttgcgtttgggatataaatgttcaaaat

SEQ ID NO: 92539 - DNA, 248 bp, Glycine max
ctattatctttatcttcatctttactttttacgtacaagcactctttgagatctcgtttcaaaatttcaaccaaggctttccctctcttttaattaatattatagtgaagattggttttgtcattttaattcttacaagtttttattataagggtcctaattaatttagtcctaacattcatctgatttttttactcttgtgacagaaagttgtgctaagtgtggaactacatgatgacaaaattaag

SEQ ID NO: 92540 - DNA, 212 bp, Glycine max
cggctcgagattaagagctgttcctgttcctcctagttgtaatttactacttagtgaaatgtgaaatgacttgccttctttcttatatgccatgcttacttcaagcgctggaacatatgagacagaagatagaggcatcaaccgagaaaattcgtgtggcaaagatacaggaagaacaggcgcgcaaggtgtgggaatcagcatcaaaaaca

SEQ ID NO: 92541 - DNA, 197 bp, Glycine max
atctttgtggggactgcggcggacatcgttggacctcacatattgacatgtgtcagttgaagcgcgttagtgacggaatctgatggacacacctttaaaaggaggcaagttgagtcccgtcaccctctttgccccgctttattgcatctcagaggccaattctttcgccgcttcttctctctttccaacgcttcccc

SEQ ID NO: 92542 - DNA, 199 bp, Glycine max
tccgttactggctttttctgtgtccttggcaaccctttttgctgattttcactgccacaatcacaatcaattgaagaaggaagaaataagaagtttctgggtaatgattcgcggttatatagcctgagctgtgccccattccatacgcaacttttcctccatcattctccttttttttctcaccttaataagtgatgga

SEQ ID NO: 92543 - DNA, 196 bp, Glycine max
caattaaacagttgagaaagaacctggtcgttaaggcaaaaccagtaccaagcttctattatgaggggccaccccccaagactgaactcaagaaggtactcttttttctatttcatctgccttttccaagtctcaggatgcatatgaattgcaattaagaatcttagagtatgcacgaatagatcgatggagtaat

SEQ ID NO: 92544 - DNA, 195 bp, Glycine max
ctcttggcatgaccattcaaatgtcttcttttctcttagcttctcttgctgttttctttttcttctcctccctggagaagagttttgcctttcaagcagcaagaaaggaggacacagaaagcaacaatcttcatcaatatactcatcttgttcacctcagctcactccttccttcatcttcttgcagctcttcta

SEQ ID NO: 92545 - DNA, 194 bp, Glycine max
gttcattcagacatatggcacacacataattcataggtatggctgttggaggtcaagatgtaatttgtgtcaaacaaaaacattcttcgaaggttccacctggtgatctaagaagacatttagaggatctaggagatattttgttttcagatttaagaagcccttctcaacaacaaaggaacaccccagaaggc

SEQ ID NO: 92546 - DNA, 193 bp, Glycine max
gtaaatatcgcttgcagtagtaatggataaccaaaatgccatcgagttctttgaaggccaaaaccttttgtacatgcagatatttggtaacctaagacctgtgtgtcttatgtgggcttgcgaactaggtattccagacataatatccaaccatgggaaacccattactcttcttgagttggtctcagccctg

SEQ ID NO: 92547 - DNA, 184 bp, Glycine max
gcggaggcggtggaagaaggagcgatgtcagagtcgagagtgaggaagaggcaaatggcgagggcgaagaatccgagagccatgacgaagagcaatgcgatgaaccagttctgcctccgcctccgccgcttcctccgaaggcgtcgaggtgcaggttacttacggcacggttctgaagcttatg

SEQ ID NO: 92548 - DNA, 196 bp, Glycine max
atttcacgcagccactttagcaagctccatctatctccctgattaaaggttatctctaaggtcctagacaatcctctttcaaaaacataccgagaagagtgtggaaatgacgacaccatcattggtagagtctctagttcttcaactccatgagatctcagctgtcaaatttggcaacttcaagctcaaatctggc

SEQ ID NO: 92549 - DNA, 187 bp, Glycine max
gctcgtttggtctatctgtgtgtgtctgtttgctcatgcatacactttcatatgtaaacaaggttgtgcatgaaataaaatctgctgtcaaataggattcgtttgagcagaggccagtacttaatacctagctcagcttggatcaagttaaaatgtattgagtttcttttgtaagttaaaatcaatt

SEQ ID NO: 92550 - DNA, 188 bp, Glycine max
ttttgattctcgttgcaatggcggatggtggtacgttgggattggagggtgtgagattagcctcttcatcaatactttcaactctaacaatgaaatcttccttcgcgaacttatcaacaatgaaatcttcatttcatttcattgcatgcttatagtcatcgtgggatgtgtgtgtgttttagatttgg

SEQ ID NO: 92551 - DNA, 191 bp, Glycine max
tcgtcattttcctctggaagcataataagtatatatataaagttgttgccacttgcaatactcatcaatcaaaatccaaacccaaagctttcttttttctccatcaaattctctgacctcaccatggggatgcagcttgttttcattggcaccatagccttgtgtttggttgtttcctcggctatgcttga

SEQ ID NO: 92552 - DNA, 187 bp, Glycine max
atgctgatggttatccttactattctcctccaccaccttatgaatacaagtcaccacctcctcctccttgtgctcatatggtggaggtggtggagacttgtagacgtaaggagggatatttggaatcaatgctgataagtgaaatgttgctgtggccatgacacttggttaccactccttacctgct

SEQ ID NO: 92553 - DNA, 184 bp, Glycine max
gatcaatcgccgccatcttcttcctcttcctcgtccctcgattccattaattctaacggtcccgccgttcaaacaagcgatatcgccgtgaaacctgcgtggaagaaaccggaggccaatggcgtcgccgaagttgggcctgtaatgggcgctcattcttggcccgatttatccgagtccacca

SEQ ID NO: 92554 - DNA, 182 bp, Glycine max
ggacgaaatggagtatgttgttgagccatgttgcttggcttggcttaaagttgaattgaagagagaggatctgatctggagtatgttgctgatgataatgaaatggcggaagtagaagatgacatgtatttccgtggtagagtgtttggtgattcagagtccgaatcagatgacgatgatga

SEQ ID NO: 92555 - DNA, 183 bp, Glycine max
tttagagaaacacaaagagaatataaagtcagctgaagctcccagccccatcttaaagatattgaaaagcgaatttgaatgtcttcctgcctacatgaagggactaacatcatgggaggatctagtcgtggctgttgataagattaattcaagcctaagcaagaagaccaatggatgcagcta

SEQ ID NO: 92556 - DNA, 180 bp, Glycine max
gtaactgccttctcacccctgaggaagggtgctagtaatacccttaaacttgcagaagtctctaagcttctgttgttgccacccaaggttagagatttctgcaaggaaaagggtattactgtaactgccttctcacccctgaggaagggtgctagtaggggtgctaattttgtgctggac

SEQ ID NO: 92557 - DNA, 182 bp, Glycine max
gtcggcggagtaacactatcaaattcagagcagctgcagagagaacagaggattctgtcttctctgttttctcctcacatagttacctacaaaggctgcaacataacagaggacaacaacaccctttggttcaacctcttcatggagtacatgccctttggtactctctctcaggaaagtca

SEQ ID NO: 92558 - DNA, 151 bp, Glycine max
ataatatcatagcagaggcttttatctgcggttcaaaagtagttttttggataagaccaacgtgtcactcatttattgacttcaaaatagatgagtgacacgttggtcttatccattttgaagtcaataaatccattttggcttccattat

SEQ ID NO: 92559 - DNA, 237 bp, Glycine max
atcatcacttgctgcttgttgttcaacatcaaataccctattggacttggagcttattagatcaatctctttcaaaaaaaaagttttcccatgacttcttgttcttctattacaatatcctcaaggaaactgcgctatgatctctattcctattcatacaaagaagactccaacaccccattagtgataaatgttctggcttcactcattgagaggagcatggctagaacacaaagg

SEQ ID NO: 92560 - DNA, 236 bp, Glycine max
cgaaaacgaaaacgaaaacgacgacaagtcgttcattccctgcgaaaaccgaattaccgaaaccctaatcaccactccgagaaccaaagattcgcccaatccgaagacccaaacctcaaaaaatcagaccatgaaaagcgtagaggtggccaagacggtgctcgaggtcgccgacgtggcttggaccgccgtcgaacacacccaccattaccgccaccgctgcagtcatcccgtcg

SEQ ID NO: 92561 - DNA, 231 bp, Glycine max
tggaagactaagagaattaagagttgttgatattctaaccgtttattatggaatagaaaattcttttctggatttagctcctaatgttgtgcagtggtagttgggatcttacaacacccagatacttcttatggtgttccttgcaatcgttgggatgctgttagctggtttctttggttaccatgctaatctttgccttaccaacactaccactaatgagacttttaagtg

SEQ ID NO: 92562 - DNA, 229 bp, Glycine max
gaagctgtagacaactctagcaaaagtgtccacagattagtatacacatgaagtccaattttgctgttttcgtagtcttctctcttctcctgattgccaacttgagctgtgcaaggaaagacctgggatggtattggaagaatgtgatcaaggagcaacctatgccacaagcaattaaagaccttgttgaggattcacaagcatcagctgcagggaagaaggatcgttt

SEQ ID NO: 92563 - DNA, 232 bp, Glycine max
gtttctatgtcttgtcatatgttctaagaaggcaatgttgggctactaaccccactctgctgacaattggcgtgagcgacatctgtagcttttatgtccacggaggaatcaatgcacctgtttttggtgggtcttgttcgtcttcaactggaaactattacctactttggtcagatcactggggctaaccctacaattcctggaatgtttccaaatatgtttccgttggcta

SEQ ID NO: 92564 - DNA, 235 bp, Glycine max
aacagaacggatctctctctctgtcaaatccaatcatttcctgagagacaaaaacaaagtcaagatcgcgttcagatacactcacacacaaacaaaaccaccaatccccaatctctaacttttcccgagaaaattttagtttccattttcatgtctccctcagattcccggaaaatatattcacaacattaatttcgcacgtcggcctctgccaactatcaagctccggcttcct

SEQ ID NO: 92565 - DNA, 155 bp, Glycine max
ctgttctcagcttcacctgtctttttatgtttcgaaaattttggcaaggaatctggaaattcactgttagcaacaaggcttataggtgacgttgcagaagatggactgaaaaaatgaaaaactatttcttagattctgaaacttaaaagtgtgtt

SEQ ID NO: 92566 - DNA, 238 bp, Glycine max
gctggacttgtgcaataaacgaacaacaaacagagacactggttctcactttacgcgcaagcgaatcaatcacgccacgccaagccaagccaaagccacaatttcacctatccaattattcacgacatgtaacaaaacgacaatcactttcgtcgttcgccaaattcgattgcagagttcggccatggcgctccgaaacgacggaagaaaaatttccttcgaggttctcagcgtcgag

SEQ ID NO: 92567 - DNA, 217 bp, Glycine max
cgctctactccttgtttgaggagtctctcagcggccttgccacaatccgcgccttcaactggcagaaagcgctgaacgacagaaactacgaactcctggatcgctcgcagcggcccttctacctcttgtttgctgtccagcgttggctcactcttgttctggatctggtcgtcgctgccattgccgtactgctgatggtgctagtggttacgctccg

SEQ ID NO: 92568 - DNA, 144 bp, Glycine max
ctaaactgtaacataacagagcttgagccttgatccttgtatctcgagtcacgagccaccctcagacgtagtcaccaacactgatcaacgcgactatggcatctgcgttcgacaagctcgtcgactcccccatgtaccagagac

SEQ ID NO: 92569 - DNA, 234 bp, Glycine max
caaagatggaaagaagctatctcatctaaccatgtgaagttggttgttacacctgattgtcaatcttctaatgcggacagatttaacattcttgcaaatacagagaaccgattgcctgcaacttctggagttgctaaatccaaacccaaaacaaagcctgagaagggaatgaagataaagtacattcccaaacaaaaagaagcaacctagtaagaagaaacaagaagaaattgg

SEQ ID NO: 92570 - DNA, 233 bp, Glycine max
cggctcgagattttttttcctatcattactttcagctttacagatacgcaacttcagtgtggccctggcttcgagcagccttgcgcttctaaatctgaaaatccaggtttgattgtttaacacagacataaagactgggtattatgttttggtacatacaaaagaatatgtaatttaacttgaagaatatgaactagaaataaaaaaagattagctaattagtagctatttaa

SEQ ID NO: 92571 - DNA, 276 bp, Glycine max
attttctctactgataatcgggaagatttctttaataatcttcccagtcctaaagctgataccccagtatctacttctgccggcaactttgctgttgtggaaaatgccaatggttcagagacaatccaagatgatgtggaagtggagggagcagtgatccttcatttgacgacagtgttcagcatgctttagttgttggggactacaagggggcagttatgcaatgcatttctgcaaataaatgggctgatgcattagttattgctcatgttggga

SEQ ID NO: 92572 - DNA, 277 bp, Glycine max
cctcaatccaactatgcttccttacattatcttacatctttctaatccaagttatccatttgttcgtctgtgtcgtggaagtgggttggttcataattccttcgctctctgagatcgtggagaatctcgtaatttgaagctaccaccattgccaaagttgagatttttacgcacctaagagtaatgcaagaccttttaagaaagattaggtactgggtatcttgtattccaactccatcaggatgttggggaggaaagagatatggccgtcgctagc

SEQ ID NO: 92573 - DNA, 274 bp, Glycine max
ggtgtctccatgttggatctctctcatttcttcttcaacttagtgttctccttcaacactctaactctaagtcacttttgtcttctccttcactctcttcaactcaaacctcacatgggttatggtgttgtgttgttattagcttgactcactcccaacgtctcttttctctttgttttgattgcaatattgtaacgctcgcattccatttattgcttcctttgacttggcttccttcctttgcaagagtttttctttttccttctcttctctc

SEQ ID NO: 92574 - DNA, 129 bp, Glycine max
tgattgagtcaccagaagttggtggaccttctattagctgaaagaattctaacatttttctcccatgatagataatttgttattgtttaccctttccaagctattatgatagtattttccctatgtaac

SEQ ID NO: 92575 - DNA, 274 bp, Glycine max
gctcaagtgatctcaatgtgggaacctgaataaaattattttatatactgtaatataattaataatcccagaatatttttatcgtaataattcaaggagagtcaatgaattggccttcctagttcaacaattttgtatttgacgttgtggaccatcctacatttttacatcttcagtatttttctactatctttagtgtatattatgtatatatttttatacattatctttagtatattaattaattaatctattaagtacgttttgttttatg

SEQ ID NO: 92576 - DNA, 172 bp, Glycine max
gtcattgatctggcttcatgaaacacaattacaagatggaaatcagaacttaaacaaattaatttctttgatttgcagcaggggaacaacaaaattaatttgtttaagttctgatttccatcttgtaattgtgtttcataaattcattgatctggcttcatgtttgttgcac

SEQ ID NO: 92577 - DNA, 272 bp, Glycine max
atcagcagcaacagcagcagcaacttaaaaacttgcctgttcagcagcagttaccaaatgtcatctctcctatgtctaagtctgcatgggaggagattgagactgggtacctgatgcaatctcctcccatgcaagccctagcttacattgtcagcagcagagctttcctgaacctatgaggaatcatatttccggttctgatgtttcccctatccagagtctactagggtcattctcccaggatggaacatcccagttacttaacttgcgtg

SEQ ID NO: 92578 - DNA, 263 bp, Glycine max
ctcgagccgctagacaacctgacatccaccatagttatggtttctctgttgcggaaattggaccctccatcagagtaccgaaagattcttggagctgttgttgtaatagcagcaaatgcggggggtgcatggactcctatggtgatgttacaactactatgctgtggatacatgggaaattatctacagttcaaacgtgaaggatttgtttgtaccttcagccgtttctctaagtgttccccttggtctctaatgtccctgac

SEQ ID NO: 92579 - DNA, 268 bp, Glycine max
ctcaccacctctagtttatgatatcttcatttctctctagttgtttcaagggaagaacaagtgctatttgggaaccacattgaagaagtgagaaagaggaagctccaaaagcataagaaaaataagactgaagatggaaaaagtctaaattactatgtgctacttcttgtacttggtcatttcctttgttcaggttcaagtaggacacagaaggaagcaccagtacatatgaatgtactaaggcataatgaagaaaaacaactaaaat

SEQ ID NO: 92580 - DNA, 266 bp, Glycine max
ccaattttgcatgtacaagaaactgtcattaatactatccgattttgcagagaaaaaaaatccttgtgcttgttaatcttttgttggaaaatcatgcttctaaatgtaaagcattaaaaatctatcagtgaccaaatcacatggtggtttttatgtttctgaatatattcgcacccgattctgcagctatttgcttttgatacagtacacaagaacctatccccaaagcctggagagcagtccaaaatcccaattcctgcatcttt

SEQ ID NO: 92581 - DNA, 242 bp, Glycine max
gtgacttcaaaggggtagctatgatcacaaccagtgaccccagtcacggtaaatgtatctttccaggaagtaagaatttaaccaacaagacaaaggaagtggtgaacactactcaatcaagcaatgcaggggataattaaggttcagaacctttagaagcatgaaaataagtgcaatcaacaacattttgcacaattactttgctgctttcaccattttgttgttattccttctgtgaggtg

SEQ ID NO: 92582 - DNA, 245 bp, Glycine max
ggaaaaactttttactgacaccttggctaaaaccatggtggaacctcggcgtcgttgtttcactttacctgctgttgatttaaggaaaaaagcagttggaggcattatatatattcgagtgatttcagcaaataactttctaggagttgctttaagacatgtaggaggcaaccaaatggtacatccaatggttgttcagaggataattttgatgataaggacctacaaacatttgtagaggtaga

SEQ ID NO: 92583 - DNA, 247 bp, Glycine max
tgctggtgttcacttatgactctgcgatactccaatctccagcctgatgctacgcatagtcacccctactatgatgtcgtcgtagttataatgacgaagcggcgtcgttttgactgggaagtgaggtttgttctgtctccaacaaggcgaatcgtgtggctgataggctcgccaacgatgctcggaaattggcttgtgatgatgtttgtgaggagtatcttcatcccccggctaactgtaaccagtt

SEQ ID NO: 92584 - DNA, 243 bp, Glycine max
attccttcttcctttccctcaaagctcaaactccaaaaacgctacccctcttgttgtacagtacgaggagaaagtcttcgagtttttagggttcgaaaaatccaaggtgaacaaatggcagagcatagagacataaggttgttgattcatctcaggtagctccagctacaagtagaaccatgtcatttcctctatcattccttgacttgccttatgcacgtcttctttatgtgaaacgtttat

SEQ ID NO: 92585 - DNA, 250 bp, Glycine max
attcgatggtgtcttgattcagattttgtcattggtttgtgctttttattttgtttcttaatctcgatttcaattcattgattttgtgttttgttcttgttattgtctctttggtgtaatagcatgttttagattcaaatattcgtgcacataaacacaatgctcccccctgtcggtggaggatttggcgtccctgccgttgctagacatggcggcggagaagcgaatcgaggggctggcgatgaaggtc

SEQ ID NO: 92586 - DNA, 242 bp, Glycine max
cacaactacacatatattcttcgacagtcaactcaatagcctatccaaaaaaaaggttgtttcagaattgagagcaccggtcgctggacggaaacgaaatggatatttgtttaattgacatgagaaagaggaaattaattagggaagaaatgtcatacagatcaaagttagtgccctataaatactaaccaaagcattgctctgcaccacaagccattgctagtttagttccatacatagca

SEQ ID NO: 92587 - DNA, 235 bp, Glycine max
gttaagggctgcactataccagactgtctcagggaattaggcagtgcatctatacctattgtggtcactggggtctcactactgtgccttttggaacgtgctaacgccgcaacttactccgttgaatgcccgggggatagacctcaacactaatgcatggcccaatggaaaaagatcacagctggtgatatctaatctacactatgactcaagaccacaatgtggttgctgtgga

SEQ ID NO: 92588 - DNA, 238 bp, Glycine max
ggaggcaagagaataactacaagagtacaagattctccctgatgatggggcacaagtatttgtggttggtcttttgcttgtgggctttaacatgctcacttcttccttctttctcctttggactaatagaattggtttgaagaagagagatctagatcttgatagtatcagagcagctagtatggtaagagaaaagccaagattaggcagacctgtgttgggtgcgtatgatcatgat

SEQ ID NO: 92589 - DNA, 240 bp, Glycine max
ctcgagccgaatcggctcgagtgaaggttgagtcttgcgtacacacaagcatgaaatgtcgacaatgttaatataacagaaaacataacaaagaaataagagctgaaccagatcaagctatttcagacttgagacaaattctgaaatagcttgatctggttcaactcttatttctttgttatgtgttctgttatatgaaggttgagtcttgcgtacaccaaagcatgaaatgtcgaaatg

SEQ ID NO: 92590 - DNA, 251 bp, Glycine max
cagaggaacactcccaaacaaaccatggacgtgggtcagatgcagagacagtggatcgactacaccaaatccctcttcctcgagggcttcctggatggtcagtttctgcaacttcagcagcttcaggatgagaacaaccctgactttgtggtcgaagttgtctctctcttctttgaagattctgaaaggcttctcaaagatctcacctttgccctgtcagtactattactatcataccactctcgttttcc

SEQ ID NO: 92591 - DNA, 248 bp, Glycine max
gtttttgtggaggtgctttttaagtgcagtaatttggcttcctagaagtgaaaactcatgctttcatattgcaggatttggacgtgtttcatctagttggttacctaactggttcctaatgtccatgacaggagtttcttcttcagggctattcctgactttccattttggggattcaagagttatggaagaaacacctaatttttctccttttcttttggttaatcggtaatctattgtgtattata

SEQ ID NO: 92592 - DNA, 180 bp, Glycine max
aaaaattgtagctgatgttattcatgctagctcttcaaatcatattatatcctataatctgctaccttgaagataacaacaataaggatcatccttgttatatgttccatctgtttgcattatgtttcttaataaagaatacaaataaatcttgatgcaaaaaaaaaaaaaaaaaagaaa

SEQ ID NO: 92593 - DNA, 249 bp, Glycine max
caaattctgatgttatggatttatatatttataataataataattttaaagtaaatagacatgaaggctattaatcttctcaagctgattaccccttcctcctataaaattatgatcttatgttcaaatcaattgcaataagtgtcatggggagttggagacagttgaagctaatgttgattttggttgactttgtctgagaaaccaaagaaaatgataatcaagggactaattgtgaggacctttcat

SEQ ID NO: 92594 - DNA, 251 bp, Glycine max
atagcctcaataatctgagagagaaacaaaaacaatgaaggtttccattgccaagttccactcccttcccctatgttttttccttctcttggccttcaacacaaaacccctcctagcagcagaaccagagccagtggttgataagcaagggaaccctttggagccaggagtagggtactacgtgtggccactttgggctgatgaaggaggcctcacactaggccaaacaaggaacaagacatgccctcttt

SEQ ID NO: 92595 - DNA, 186 bp, Glycine max
ttattattggcatttgctttggccctttggtcaggaacttagttttatgctgttcatattctatagcattgtttgtaattctaaatgaagatatggcgagaaacattgtatttaagaaatcttcctatgcatcaatatgaaaaaagtaatttgtatctaaaaaaaaaaaaaaaaaaagaaaagaaa

SEQ ID NO: 92596 - DNA, 243 bp, Glycine max
ggcaatcccatgattcaatgacagaaatgcactctgaaggaatgacttttactaacagacctgggcatacaagcagtaatgtgccatttcaagggtgggatgaccataatcaggatgctactcaccattcaaatataatgtcaataaactcactgactccagtcaatggggctgctgttcaagctggccatgcagcaacgaactcggtcttacacagaaacttggattttaattattgtgatc

SEQ ID NO: 92597 - DNA, 247 bp, Glycine max
tgttactaccctaacaagtttgacaaaccccaaaaaagaatcaaactttccctcaaattttcactcttttctgcaccgccagtgatgggagatgggtgcgcggttgagggcaccacggggaattccaattctaataacaataataacaataagaagaagaacaagaagaagaagaacaggggtgggagcaagaagaagatgacccacgaacaggtcttggccttcaagttagtgagtgagtgggttt

SEQ ID NO: 92598 - DNA, 249 bp, Glycine max
ggaaagttggacttgatctttcagccatttgagaagaatttggagctgcaaattccagaaagtgaggaatacaggtgggatggtaaatatgagaattcagcttatgctcttccaaattgagaaattcctatgtctgttaaatgttgcttcttttagaattcccccaaaaatatgtcatggatttctgtactttctggtatgcattaatccaggctactttttgagttcttgaacaaatttcaacagatg

SEQ ID NO: 92599 - DNA, 243 bp, Glycine max
atacaatcagaataacggccatccccatatttgctataccactacagtgtttttggggtcagccgctatgcttttcaataatgttatacagatgttgatgcaactttagttaaaatgtaggtcaggtgttgaacattagttatggtatagaaaactggaatggaagaacatatttttcttgattcaataggatgatacgccgaaaaatatacagcatgatattgggagcaaaaaaggacacag

SEQ ID NO: 92600 - DNA, 247 bp, Glycine max
gttatcttctcatatagtgcagagttagtgttgtagaagcaacctgtgtcttggtattttttttattcatagatacttataaaaagggaagcaactgagataaatttcctgaatctgtttctcattgagaagatggtggtaatgcagcattttgttgagatgggttcaggtgaaaagtctgcaagattttgttgtatgtcaaatgttatttgtattattataagaatatattgggggtgtttagttg

SEQ ID NO: 92601 - DNA, 261 bp, Glycine max
attttaaggacaactttttttaatgccaccaatattgttggctgaatgatatatttatgctcaatctggaagaaatgaagagaaataaaaatatcttcttcatgatagaaaaataggaggtacaagcagctgaatggatgaaattatgcttaatgttagccactattttctttctggaacttaccacaatcgtgagcttgcatgagagttgtaagaagaacttgtggaatacagaggatgtgaagagggtcataagtattt

SEQ ID NO: 92602 - DNA, 263 bp, Glycine max
cggctcgagggcgaatatgaacatgtacaacaacaccactccgatgggtggttactcttcgtttctgccgttatctggcgccgtcacggagacggtgcttccgtcctcggttttcaacaaccattctctcggtaacgccgtgaaatccgaaagcggcgttacctataacaataacaacaaccaccaccaccaccacattaacaacgttgttatgactcccacgtcgagaaagcgttcccgagataacagcaacaattacggtt

SEQ ID NO: 92603 - DNA, 264 bp, Glycine max
ggaggatatttacggtgtggaattgatggattgacattaatagatcaaacggtttatagtttccttacctgtgcaaaaagttgatttctcttgccgtgatggagcattataaatgacattctacatgtccatgttgacaacaaaataataaaatgagaatacgttttggacatgaagaagagattcaaattggttgcgcttttaattagattttagcatgagaatgttgtgtagcactgtaatgttatatttccatgagtatgt

SEQ ID NO: 92604 - DNA, 262 bp, Glycine max
caatcttcgtgattttagggatactctcgctgcatattccagactgctctcttctgctttggttttttcgttgtttcgtgttcgagttttcgtgcatttggcttgaacttgtgctgatctattctgtttcttcgtcatggcaaccggacaactattctcgcgtactacacaggccttgttttacaactacaagcacattcccatccagcggatgcttgattttgacttcctttgcggcagggaaacaccatcagttgctgga

SEQ ID NO: 92605 - DNA, 260 bp, Glycine max
caagtatctctaacccaccaaaatcaccaaaacgacaccttcctttaccttctcttccttcattcgaccaccaaacgcaagctcccatgcccgaagctacatttccaaacgacactgcgcactgatgtgtcccacctcgctcctcttcctgatccgttcctgttccgtctccgttcacgctatctgatgaataggtggatgactatgaagaacctcatgctagaggacacgggaataccacgctctgataggatgtgaca

SEQ ID NO: 92606 - DNA, 255 bp, Glycine max
ctattttcccccctaattcttcttttttgtccatggtacccccattctaattagcatgattccctaccttaagcaggttttcaattagattggattctggctgtttatgggtatctgttggtccaattttgctaggggaagaaatcgaagtagtgaagactaaagacaaatattgctatgggtacaaacggcaaggagggaggatctggggtaacatatcaagacatggtggatgatgaagctcaggacattaag

SEQ ID NO: 92607 - DNA, 256 bp, Glycine max
cccaaggccaaaatgaggaggttggcgcatgtcactactatccaataattcttcagtgacagggtgactgcagaattattggatagtagtgacatgccccaaggccaaaatgaggaggttggtgacgctcaacatgaagatggtgaaattgctgttgggaatgatgaggaatccaaagccccacagaacttggatgttactggtcaagaggcattacaaggtgacaaaactggaactttagaagagaatccggatc

SEQ ID NO: 92608 - DNA, 270 bp, Glycine max
ctcgcgcacccttatcctcgttgctttctctttgcacttcattcttggctttttcgacgactcaccacctgcttcaaaagatgctacaaaccggaagaagcactagtgctatagttatcattcttccaggggataaaatattaggtctggcaaaaatttcttgggtattggaatcccaggagatgccaaggacttcttcaatcaagtcgagtcattaggttttctagagagcaataggaaagtgctttactaaaaacaatcttattttaa

SEQ ID NO: 92609 - DNA, 104 bp, Glycine max
agcgctacatgtcaaaaacagggaaaagcttctcacatcccttcgacaacacctcttcgactcttctcgttcgctccatggattcgtcctccttcaaggtggag

SEQ ID NO: 92610 - DNA, 278 bp, Glycine max
cagtcctctgaagataataacaaagtagtgagtagtgagtagtccaaccagaatccagaatccaaagctttttttttttgtcaaatgccatgtctcggagccaccaagagcagccactattagcggactcgttcatagaagaaacgaggcgcaagagacagcctacgactcctccgagaagattgtggtggttggagtggacgagtccgacaacgaggacaattgggggagagtacccccattctcggaagatgctatggctgtatacagggccgggc

SEQ ID NO: 92611 - DNA, 272 bp, Glycine max
ccaacactctctcacctcgatgctgttttccattttcttattcttcttcttcttcttctcatggttcatggttttagtaaccctgatttcgacgctcttttgtccttcaaaaccgcttcagacacatcccaaaagctcaaacatggaacattaacagcactaacccctgttcctggaagggcgtgtcgtgcattcgcgaccgagtctcgcgactcgttctcgaaaacctcgacctagaagtccattcaccccttaacctctctgactcagct

SEQ ID NO: 92612 - DNA, 268 bp, Glycine max
catatctcgagagattagttgaagtgagaagaaaagaaaccttggaaaaaccaaaacagagaaaaaataaggcaaggttgagtgattctcttttgctttaaattttaatactgttttaatttttttatttgttgattctattttgtttttgggtggtgctaaattttgtttctttttggtgttttagacttctagtgtgtagtgcagatgaagaattaggtgattaacccttcttgctctgttattttgatgtttcagcttgttggaa

SEQ ID NO: 92613 - DNA, 247 bp, Glycine max
ggctcgagcttcacttttaattcgttaggttaccctaccatcactactcttttctatctatcccccctctcttattcctctgattccccgtatatttcttctaaatcttctctccttgtcctttttctccctacacctcacgcacacacgcacaattcttcctttctcctcttttgatgtcttaggaaccatccaatctgaatttgtgtattcatcgtgattgattttccttcttcctttttgttgt

SEQ ID NO: 92614 - DNA, 270 bp, Glycine max
actagattgcagccctcagcaaaaatcaatggctgaagggagtcatagttatggaaatgctactaatacctcaggcatagaagtaaatgagaaggttatttcaggttcttgggcgcatcaacagatgctatcatccctaatagtaggggcgacccattcaatagatctaatggatggaatgctatcaaatcatccacacccagtaacaattctagtatgaaaattcgtgaaaatgaaagtgttgcagcctcatcatgacaaagctatgca

SEQ ID NO: 92615 - DNA, 253 bp, Glycine max
cctcacttatactatcagttttctatcaaccctccaacccttctcatcttcctctccacagagaatggttctccgtcgtatcaaagtatcaactatagatcaaggaacaaggaatcataaaattttataatattatttttattttattttccccatttctcttaaaacaaactatatcacatacaactttttttttctcttttttaaattattatttttccctatctatcatatagtacttttttcctctaaa

SEQ ID NO: 92616 - DNA, 119 bp, Glycine max
attttgctacttcccaggaaacaaatctaaccagtttgtcgacaaaccacttggtttttatgcttatgcaattcttcttgattctgacaatttattttgaaatattatcctgttttctt

SEQ ID NO: 92617 - DNA, 282 bp, Glycine max
agacttttgattccatacgatttcttgtttctgaatattatcaatcaaacacacataactatctgtgaggaaataaatcacttgcattcacacttccgcgtcgtgactcagctaattaattgtatttgttctgtacctataccattgatgatactacggttctgatttgatcgacaaagctcagattttttttatcagaatggtttcggttgataatgggattgggaattccaaagatgaaattgaggaatctaatgggaataaagtgaatgagtttacatc

SEQ ID NO: 92618 - DNA, 285 bp, Glycine max
tctcgagcgattcggctcgaggaaactactcatcactcactccaagcccaccacaccaccactattcatatctcattctcagcacctttcactattccctctcattcactctctagctagtttcctcatcatcgtagaagaaccaatacttagggagaagaagtggtgagaaagcaaggacaaaggggtgttgatggagataaatggtacttgtatagctgcttacaagactgtaaatattggtgctgtaatttaatacacgagactagcagttctttttcgatg

SEQ ID NO: 92619 - DNA, 275 bp, Glycine max
acttgagaaccttcttgatggcaatgctcacgctggaaacaacgttgtcatcagggcatgatgaggatgtctgtctgtcaatgactcatgaaggaaaatcggtgttttgcaggaactcaaaagtggagccagctaaaatgtagaagagataaaaatgtccggacagtattaatttattgggtacaattgaatgattgaagagtgtaatttttgtgcttaattattgggcatctgatatgctgtaagtaattatggtgtatagaaactcccctttg

SEQ ID NO: 92620 - DNA, 294 bp, Glycine max
atcgacggttatccttgcgtgcgcctgatgaatctctctggaaccatcagttgttcaagaaatactttgatcctggacgagataaggttgtggctccgattgtaaggttcgaaaatgttgacataatagctgagccttctgctgtattggtgtcactggatgagttccaaactctctttactaggatgttccaaattcaccagatcctttcatgaatttggctacagcacagattaaggcaacactagttgagaaatataggcgttcaacatatgccacaagggcaaagaacag

SEQ ID NO: 92621 - DNA, 273 bp, Glycine max
gtaaaagctaaaacctttttttcctgttctcaccctcttcgccgaattcgccagtaagaagagagaatagaaaagagggtacccagaagagtcgaatcggaaagttcaaatctttgtgctttcaattccagattgatgggcgatatggaagaaattggagctgatgtctggtgtgtctatcatgttttgtgattttcagaacttcaattttgttccatgttttactgtcatatgtttcgtggttttctcttgttagtcttttcagatttgttt

SEQ ID NO: 92622 - DNA, 285 bp, Glycine max
atcttattcattttccctgcatttctatgcttcaaactattcttctttttttgtctaaattttccttctgtctttttttctgactcaaagtttgaacttttcctatgggggtaccttgaattgtgtagaacatcagttttttatgtgaaattttattctagttcaagtatgggctggtgttcttatttttacatggatttcagtttctaggatttttttctgcacaaatcactaatggcaacatttgaagcaaggagtgatctcaattgagtacatttttatgaa

SEQ ID NO: 92623 - DNA, 286 bp, Glycine max
ctggattttgaaaccattcattccgtttccgtattcaacgtagccctcaaaaatgctctccaagttccgaatcctaagcctcttcactcaccgtctttctcctagaaccgccgccgccgccgccaatggctcgcaccacttcctctgcaccatggcggagtcaccggagctccctccgtggctcaagttctccgacaccccgacccctccagacgctgactcagacgacaacttcgttatcccttcactcgctcactgggtcgacacccacatgctcatcaccaag

SEQ ID NO: 92624 - DNA, 158 bp, Glycine max
tgatgtggtgtacagttcaatctggaaaaaagagagtataaaacaggccttgaaatggggatatagagggactagattagacaataaagcataatatatatttttaaaaagaaaaatatcagcaagggaatgaatgattcgaggtttattccgttagc

SEQ ID NO: 92625 - DNA, 150 bp, Glycine max
cttacttttcagtcgaatttaaaattagccaaagatttcttctgaggcagaatgaaaagattaaaataacaatgagacgtccaacatcaaagtgtaagaaatctaaagaggacagaaaatcactctctgcgctggccacagacttcgtgc

SEQ ID NO: 92626 - DNA, 262 bp, Glycine max
gaaactaaagatcaaaccaaaggggacaagaaaaagccaatgtcgagaatgaaagagctacttagatgggctgcttctgccaagacagagaaaggagggaaattcaatggaagaaaggttttaatgttcagaaggcgtggaaccctgaaagcagttccagatgatgaccaaggttgcactgactcacccaagatcagtttcagatgggatgtggaaagttgctccaccacttcctctgtctactctgctatctcaatagctt

SEQ ID NO: 92627 - DNA, 256 bp, Glycine max
aacaaaatgtgccttttcctcttcctgttttttatggaatgctatctggccacggcaatgggaattgtggtgctacaaaagtcagaagctgcaatcccagtgacaacattgtcaccacctgaaggcaacactacattcattgatggcacaacttggtgtgtggctcttgctggtgtttcccaagctgacttgcagaatgctcttgattgggcttgtggacttggaatggcagattgcacagccatccaacatggtg

SEQ ID NO: 92628 - DNA, 146 bp, Glycine max
caatgattttggtgttctatttattgatgcatcagcagactgtgaacatcttcctcattacgcttatttctctttatattggttacaaatacatgaacattgattatagtaagggggaacggtcttactcaacgcgtgctaacaga

SEQ ID NO: 92629 - DNA, 197 bp, Glycine max
ttcagccttctttctctcacacacactctctctactaaagtcgcaaacacaaacactttgtgaagtgaagcaatggagtttcagatttagatctcgtgctaaatcatcgatccgagagagagaaagagagaggtgttggattattgattcgccgaagcatttgagggtttatcacagactcattctcaaacccttcg

SEQ ID NO: 92630 - DNA, 130 bp, Glycine max
gcaagtcaaccaaatggattgagtttttacgtgtgtttagagatcttgagacacaagaaacgccttgtcctaccttgacatctgttttaaattactgtatccttgtactacaggattactcttattcaga

SEQ ID NO: 92631 - DNA, 269 bp, Glycine max
aaaataacatcttcacaaggttttttatgtggtccatatattgaactggccacaatgatatctgaacatttcaactacttcacgaaagtaaattatggtatgtagcttaatgaatttaagtagagcagttcagttaccgacttcaatccacccagaaagatcaaacctttgagatttgcaaacttgtgcttgttgcaaacaatccaacttttttcatcagtctctgtgtccattttcgttcaaaagtctaaaaattttccccacaattc

SEQ ID NO: 92632 - DNA, 207 bp, Glycine max
gtttttcttcttcagaaagattgtgaatatctaagtcgccatgaggtgttcctcaggcgtgctgcctctgccttcaacaactttgcagaatctactgaaaaatcatgccgtgaaaagttaaccaccacttgtccccatttgctacaaatttgtttctatatggcaaatgaattttataatgaaaaatatataagtgaataatcatga

SEQ ID NO: 92633 - DNA, 122 bp, Glycine max
tcgagccatagtccccactgaaactggcgctacatcagcttttaactcaactgcttctcaaacaaaagattttgatccaaccggatgggagcttgccctggtcagcactccaagtactgata

SEQ ID NO: 92634 - DNA, 262 bp, Glycine max
gcgcagggttaggaaatctggccaagatacagatcaagctaagaagcaacccaggcccaaaaaaccccgaaggccaatgacaaaccaccagcacaatctgacaatgaaatttcacttgttgagccaagaagcaatgggctcaatatgaacccgacagaagcacaaatgggtggagtccagattcatggaaatgagcagagcaatgagacagattctgctgcaaggccactggaaagaggacttgaggtgtctgcacaactac

SEQ ID NO: 92635 - DNA, 133 bp, Glycine max
gagacaacaaaaactgcccacccctaccaacccattaccatcatcgttcaaccaaccaactaacctcatcgcatttcatttgtcaccaacgatcccatttttctcttattcaaatcctctctcatctcttcct

SEQ ID NO: 92636 - DNA, 254 bp, Glycine max
atttgcatgtttaaaattatgcaaaatggttgagtttgatgaaactagatgaatttatgtctggatatttgcttatcgattgatagatgggtaacattctattgacttgccaattgggtcttgattcgtcattgtgttttactgctaaatttctacagcatatttgaattcttttgtaggtcgaaacctgattatggaactctgactgtatcaagtttaatggtaacatggatactgtagtagcatgcatttgg

SEQ ID NO: 92637 - DNA, 264 bp, Glycine max
  unsure (1)..(264): unsure at all n locations
aaccaatcacatcaaattccactcagtactactaatttctctttccgttgttgtttgtccccttaagagaagaaaacatgagtgtggaaattcttgacggtgcaaccatcgtaggtttcgtggaggacgaggaagtcttcaacgtgtgcgtgagcgacctcttttctcaactggacaccgacaaggacggtcttctctcttacgcggagatgctgaaggagttgcagaggctgagggtgttcgagacccacncggcgtcgacgt

SEQ ID NO: 92638 - DNA, 255 bp, Glycine max
ctctctctcagttcttcatctcttctttctctctctctctactcagtacttcatctcttctttctctctctctctctaccctcacaacacacattgagaaaaacaaccctcactccctcgatggggccttccgacaacgagccacttgtaaattcccaatttttcagttgaattttcactgcaattggtagattacgatttcccctacctgaaaccctagccatttgtagatgactcacttgtaaattcgcaatt

SEQ ID NO: 92639 - DNA, 260 bp, Glycine max
agggagctctgatctaccagagaaatagtaataattgaggccatgtcaaaaatttctggtcctagtggtccagatgagatagaagagaagagagtaacaaaggaagaaaaaatcaaatctgctaaaactgagatgggtgaggtgaaggaagaaaatgagagattgaagatgatgctggaaagagtagaaaaggactaccactcccttcaactccgtttctttgacatccatcacgaagatgtttcaaagaagggtttagc

SEQ ID NO: 92640 - DNA, 259 bp, Glycine max
agccatcagacattgttcctgaagtactatggaacaccatgaacaatattgatgcattaacattgcaatttagacagctaaacttaaacgcagaagccagagaccttgcatttcatgaggagaatgcacttgtcccttataaacagaaaaacagccttatccatggagatggggtcatcgttccctttcacattaagaaacagcatctacgaccaaaggtcaaccttgatgatgagactgatagagtgtggaagctttt

SEQ ID NO: 92641 - DNA, 249 bp, Glycine max
ccagatcttgccaaggctgctgaatatacagaaaaacagcttcttataaatgtatctgcacagctcagtcttactggaaaaggttatagtaatttttctgtgctttttctggagggtctttatgatccacatgtgggaaagttgtatctaattggttgcagagatgttcgagcaccatggaaggtcttatatcagagctatgaccttgaggctggaatggactgtttgattcaggtggttgtggcttat

SEQ ID NO: 92642 - DNA, 254 bp, Glycine max
gcacaatcgttcattcattcatctctacaaaacccacaatcctctccttcaacaattcacgatgatgcagatcagctccaccgtaccagcccacaaacttcacaagttccaggcaataaggtgccccagcttcagcttcagatgccaacaagcttcctcttcctccctcaaacaaccttcaatttttcagacgaagcccttcatctccaccgagtcaactcgcctgcacctcgccaacctcgacaagctcctcg

SEQ ID NO: 92643 - DNA, 258 bp, Glycine max
aaactgggttcattcttgatggattccctcgaacaaggattcaagctgagattcttgaccacattgctcatgttgatctggtggtgaatttcaaatgttcagaagaggagttaatgaaaaagaatctaggaactcgaaaatttaatgcttaccaagaatatattcttatgactagctccaggtcaacaaaacaattgcaggatgatcatgaccaaagtcatgcagaggagtgcaagctgttggaagattactacagga

SEQ ID NO: 92644 - DNA, 245 bp, Glycine max
gtgaaaaatacgttaattacttctgtagataaccaacaacttctcggtactgttgtaatccagtcaaaaagtatttttcactggattacaacactaccgaggagttgttggctctctacagaagtaattaacgtattggatatactcagatttttttggtaaattatatttgagatttaatgaggttttgtgaggtacatttcatttgattattatttaacattctcggataattttattgttga

SEQ ID NO: 92645 - DNA, 252 bp, Glycine max
atcaaaacaaggcacagcaacgctcaactgcgccgtgagtggggttccgaggacgggagtgggattccgtggcacaaactcttcttctcttgcacgttcagttgcgcgaacagcgtcaggctctgcaaatgtcaatggtggatttggagggcaaagaaggttacaggccttccacggagtacgtggaagacagcaacgaaacactcattaacttgactgactcaaccgagcttttgtttcttaagttgcctt

SEQ ID NO: 92646 - DNA, 248 bp, Glycine max
gttgcaaactgaagccactaatgttggaggcaatgcaaccataggaaccggaggaaggtttcccgactttgtacgcattgctagtggcaagcaagatattggaagttctggtgaaggccgaggaggaagctctagtggccattctggtgatggtggtgaaacccttaattacctgaaagctgctggtgatggaaactgaactagccagggagaatggtaaaagtttccttggcctttttagccgttta

SEQ ID NO: 92647 - DNA, 251 bp, Glycine max
cctcagtaatctgagagagaaacaaaaacaatgaaggtttccattgccaagttccactcccttcccctatgttttttccttctcttggccttcaacacaaaacccctcctagcagcagaaccagagccagtggttgataagcaagggaaccctttggagccaggagtagggtactacgtgtggccactttgggctgatgaaggaggcctcacactaggccaaacaaggaacaagacatgccctctttatgt

SEQ ID NO: 92648 - DNA, 251 bp, Glycine max
aaaaaacagaagcattaagttggaaggcaggctgtgttattgttgcaatcaatacaactagctggtgacatgacccagtatattgtttgtatttggttatcattattatttttgttattacatacttctttcttacagtgtcatttttctagtaatgatcacccattgtttgctccattttcttgcaatctactcatttgactttttatgcacgatataaaatttcttgtttctctgggtcacgcgtgcac

SEQ ID NO: 92649 - DNA, 177 bp, Glycine max
ctaattaaatattcttctaagatcttgtgtcagcttagttggtggaactgggacatgcaacaaggatgcatgggttcaaacttcataattcactccaccccttttcccattggggcttcccctggggtttgtctcaatagtgggtcctccctttaactaaaaaaaaaaatctattag

SEQ ID NO: 92650 - DNA, 186 bp, Glycine max
gcggtttcttacgatactattcttggttgtcttagccgagcaggtctatttgaagaggctgcaaagcttatgcaagaaatgggttcaaaaggattccagtatgacctcatcgcctactcttcagtaatcgaggcagtcggaaaggttgatgattgtaaaaaggtagtcatgagagcaatctggttt

SEQ ID NO: 92651 - DNA, 182 bp, Glycine max
tctcgagccgaatcggctcgagctgatatccttcaaagaaccatacatccacagttagctcccttgaatggtggattaaaaccaccaaatcagctgcctgatgtatgggaggatgaacttcacaatgttgtacagatgagctttgcaacaactgctccccttactagccaagattttgatgg

SEQ ID NO: 92652 - DNA, 190 bp, Glycine max
tggggattcggcgcgtacatggacaagaaacttcagagttgcaacaattcctaaagagagatagaaacaagaaagagagattggagaaaaagataacacgctctactaaaaaaattcgaaactcttcagtttcaattttgaatttgagaaggtgggtgtgcatggattaaattagcagaactagatttca

SEQ ID NO: 92653 - DNA, 175 bp, Glycine max
tcttcttcttcttcttacggcaaaggcatgtacgttattccgtttactttgctgttagcttcagttcaaattaagtatacagaggcagtcaccaatcccttcctatcaactccagccatgccccttttgatcgcctctatcacttgccatgggctggcatccatggcagacacga

SEQ ID NO: 92654 - DNA, 179 bp, Glycine max
ctaaaccttagctactagctggtgcagtgtcatacctgaaggaacaactattcagtgtttgtaacttgtgctcattccaatggcgtgtctttcttttccccagtttctcttacttcataggtaccacatgacttggtcctattgtttcacttcttttaacacagtacaacttgggaaac

SEQ ID NO: 92655 - DNA, 179 bp, Glycine max
aacaaaaaaacatcatcatcatcaaactcattcacatttttcactattatctcgttttctactatttcctcatgaacactaacatcctcggcgactgcaagtccggaaacagtgacatcgggtgtcccccgaatggcaccgtctcggtgatcaagaactccgtccctgccaccacaaac

SEQ ID NO: 92656 - DNA, 189 bp, Glycine max
agggcccaagacgcccactggtccatgggcggcctcagcttcaagcgcctccgtctccagggcaaaattgaaggcaatgtcgaaaggcttcgctcccagcgcgagaagttccaggctcaaagcccaagcccaagcccaccggcacgcgccgacctccgcagatccaaaagagctgcttcccctctgact

SEQ ID NO: 92657 - DNA, 198 bp, Glycine max
cgaaagatcctggggatcactttctttgagtcccaaggaaaatggatagcgcaactactgtctgggaaaaaagttttgccatcatatgaggaaatgatggaatccatcgaggagttctatcattcaaatgaagtagctggcattcctaaacgctacacccatgtggttgatgcctttgattatggtgacaaatacgga

SEQ ID NO: 92658 - DNA, 163 bp, Glycine max
taaatcttgagttgagcctgcgcaaaaaccctaaaccctgtgaatgaagaagacgaagaagagtggcgaagaaaatgggggcaagctcaagttcaagggcgcggagacgtcagcttacttcgcacgcagagaggcagcgaaggttttgaaagtgattctcgaa

SEQ ID NO: 92659 - DNA, 300 bp, Glycine max
tgtagtttgttccatcatttagacctaggcggccttggctatgtacaatgttgtttttcatatttaagacttgggtcagcatttttttatttgatttgtggtatgtatctagggttttctcatcccttctgtcttctatgtttctcttggtcattggcaatgtcaatttttggaaaagtacctagttattttattagattttatgaaaacttgtgtttaatgtagactacacactacgtatttatacttacatgagtgggatacaataataaatgctgataaagtcctaatgacatgtta

SEQ ID NO: 92660 - DNA, 281 bp, Glycine max
ctcttgttcaatacaatttttattttttttcagtggaaaaatggctagttagtggaatgtggagttgtgaattgtgatagtggcaaacttaaactccgtaaccgtgactgcttaccattgccttgagaagatactgctgatcaagccgtgcaacatggttgtttcagacttgtctgagctctaacgtggcctagcgaaacatttgaggccatatataactcatgtccgggacaaaataaaaaacctgaaacaaggttgtgggttggtagtaaaacaaactg

SEQ ID NO: 92661 - DNA, 298 bp, Glycine max
tatggtaaaggtgacaagttagcgggtgacaataatggccgtagcatcaatccttaaatacgttttcttcttcttcggagcaattctaactaaaacactgctgaacttcaaagtgtggcagcagatcctgctcttcttcttcaccatcagaatcctccagaagaccaagcctctcctctctgcaaataccagcgttgtcagtggaaaatgcattatcttcttttaacaagacagatggtcctatattgatatcaagtccaggttccagtagaggactgcccccaaggccaaattcagc

SEQ ID NO: 92662 - DNA, 245 bp, Glycine max
gatacacacaagcactgaagaaacagagtgaagtagtaaattgatggcttcagaagaagagagcgctgtgaaggagcctttgaatctcatatggcttagcctcgacgagcgtatctacgtcaagctccgttctgacagagagcttcgcggcaaacttcacgcttatgatcagcatcttaatattgttcttggtcatgttgaagaaattgttactactgtggaaatcattgctggcaaatttgaat

SEQ ID NO: 92663 - DNA, 292 bp, Glycine max
tcttccttcgatggcccggccttgatgggttcttcaggcttttcgtgcgttgtgcttctgtggtctaacataatccgagcttcgcttcataccctcatcttctatgtaccccacccttcgtgttggcgaccgaattattgtcgaaaagttgatactatcatattgaaaggtaaagccttcaagatattttacattaagtgtcatagcttcatattacatcaggagtccagctatacatgatattgtaacatttaaggatccaacacagtcctctggggaaaacacagatgct

SEQ ID NO: 92664 - DNA, 155 bp, Glycine max
  unsure (1)..(155): unsure at all n locations
tcggctcgaggaaatatgactttnaacctagtatgacacttcgttttattgtacgcaatctgtatgtggcattcacaatgttcgttgctatatacctacccaatcttcagtggtctcctgagattttttggaggatttgctatttgcaccaacaa

SEQ ID NO: 92665 - DNA, 273 bp, Glycine max
gcaaagaagacccgataaacaaaaaacgagctctgaactctgaactctgaactatagctactctacccattacattacacacttagctcaacaacaaccatatttccaacggtgcatggcaatggtgatctcttctgttcatgccacactatttgccagggcctctttcttttgccaaagtagtggcctaagaagctttagatcgtgtttacctttctcatcttcagctgcttctgtctcctctcacaatctttcacggaagaaatggaggca

SEQ ID NO: 92666 - DNA, 262 bp, Glycine max
aggtcccacgccgtgttgaagtttttcaaaatagaaatgttttgccgcctgattcagtcatatcagctggttctgtgaattcttcatgtactgcaggtggagggcagttgtatatgtggggaaaattaaagaacactggtgatgactggatgtatccgaagcctctaatggatttaagtggttggaatctacgatgcatggattcaggcaatatgcaccattttgttggggctgattcctcttgcataagttggggcttgct

SEQ ID NO: 92667 - DNA, 254 bp, Glycine max
gccaaacccacgtcaagagcacttgggttcccgcagccaagcgccgcgaacgacaccaacaactcgctgcgttgcagcaacaacatcaacatcctaaacgacatcacagagacactactactactcaacttgcctccgctccacaacccatcatagggttagagctgggacaattcccacctgaagtgagcacttcggcggtgtttcggtgtgtgagagtgagcgcagtggacgcttcagatgaacagtggggt

SEQ ID NO: 92668 - DNA, 202 bp, Glycine max
aatgaattcatttgtttatcttcttctcaatgactaacctagactgaccgcatgtggaagatgaacctccttttcttgtgtatgatccaaatttagaagtacggaaaattaccattcacatcaaattttcctatcataggatccattttgaaatttttttaagagtagtagctatatatttccattggaatatggtcaaggt

SEQ ID NO: 92669 - DNA, 255 bp, Glycine max
cgagtatccactcaaatacttctctcaaaagtggtgctttgtgacactaattatgccattccattgtctctcttgtggttagttgtgcacaaattttgtatatttaaacaccaaaaaagagatcatgtgatcttaattattaagttacgttgattccatgcgttgcacacacaacttctatcgcaagatggttccattcgcatcttaactactggacttgtgacaatagtgctcctggacccaccctttatttct

SEQ ID NO: 92670 - DNA, 267 bp, Glycine max
cggcataatctggtctttttgtccactccacgagcttggttattgctggttggtacgattccttccaatatattaaattaatgcctgctctctgtgttttgatattctttctttaattcttattttcctaaaagtgaacgctgttaatcgatgcttctcgttggtctcacgtgtgtttcacctactccttattgtgatcttctttctcccttatgtttttattttctttttccaattgatggtgggtttgcaacactggtttgtata

SEQ ID NO: 92671 - DNA, 148 bp, Glycine max
cacatagtacgctatgcaaagatagccctacagctacagcagaaaacggttcgtgatgtagcactgagagtcaggtggatgaataagacagaaaatagcaagagaaggaaggatgatcataatttaactcggaaaagtaaagataaaa

SEQ ID NO: 92672 - DNA, 227 bp, Glycine max
gctgaagataactgattatatttatgtgtcattgtgtcagttcttacacaattatgtgcagcatgtagttttctttttttgcaaatatttattgttcttggtcctttgcatgacatgtagtgaatcctaatgtgtgatgtggtcatgcgcctgtattattatgtgtataaatttttatccagttggaagacatgaatatggacgaggactcagagaaagtggcagtg

SEQ ID NO: 92673 - DNA, 106 bp, Glycine max
caaaacttagggttgagcctttttttgaggttttcagcgcttctttctcacaatggttcttcagaatgatattgatttgctgaatcctccagctgagttggagaag

SEQ ID NO: 92674 - DNA, 257 bp, Glycine max
cgaaaaaggatagtgtatctggtatggtgcaaatggccatttggtgggtgtgttgaacttgaattatgagtaagaatattaggacctaactaagtttttttatattcaatgttagtatattggtttagtcgtggctattagcaaatgtgcaaaatgataaactggtctttgcatcataaataattgaagcttaagacttttatgtcagttttccaagtgtacttaaatttggtgtaagaggatcctcacagggttat

SEQ ID NO: 92675 - DNA, 168 bp, Glycine max
agaaaagttagggttcacaacttttccttttccttttgcttgcgaatctgaatcacataatcaatcatccattcattattcatcatgacgtcggcgaagaaaatcacgctgaagagttcggacggcgaggctttcgaggtggaggaggcggtggcgctggagtcgcag

SEQ ID NO: 92676 - DNA, 164 bp, Glycine max
gtcatgcatgaagagtgggttatttgaatccgccaagcctcttctggaaacatatgttaactctgctgcaaaagttgatttgatactttacacctccattttagctcatcttgttaggtgtcaggaagagaaaaatgagaagcatttgatgtctatccttagtg

SEQ ID NO: 92677 - DNA, 161 bp, Glycine max
atcgagtgttcgactttactcctccgaccacctcgccgggaattcccgcggcggcgctccttgtgcccggcagcttctctctctactgaagccctagagagagagaatcataaaccctaattcccctgtcaagctcgtagcacagtcacagccatgtatgg

SEQ ID NO: 92678 - DNA, 155 bp, Glycine max
tggaaaataatggaaatcctagttgcttcattgttgatgatgaggatacaagcaaatggattgaataattataactggctttaacttagtttttggtttgtgacttgacatctgtctgacctggcaagccagcattgcaatctgacacagaattt

SEQ ID NO: 92679 - DNA, 155 bp, Glycine max
cttctctctagtcttccatggagttcgttgcaagctctgtgaacgcatctttttctcttcgttgctctcacaatacccctttccctgccatctccattcctccggtgtcacagtggaagtgtttttcgttaagggtaatagaatctcggtttcca

SEQ ID NO: 92680 - DNA, 150 bp, Glycine max
ataggaactttgcattaatatttagtagtcgatggaccatcatatctagtcaaggcacgaaataccatgccaacattcttcttccagaacaatatacaaactaaatatgatggtccatcgactactaaataggaactttgcattaatatt

SEQ ID NO: 92681 - DNA, 287 bp, Glycine max
tagcattgcatccctcttgatttgtagtttgttttgtgctttagataaaagttctgccaaatcaagaggggttttaagatcatagtgtgtgttttgcaacaatggctaagttctttgctgctatgatcttggcactctttgccatttccatacttcaaacagtggtaatggctgctaatgaacaaggaggccacttgtatgacaacaagagcaaatatggaagtggaagtgtcaagagttaccaatgcccatcacaatgctcgaggagatgtagccagacccaatac

SEQ ID NO: 92682 - DNA, 201 bp, Glycine max
cgcaaattgaaagcaatgccaagaagatggaacaactggaggctgagaatgagaaactggggaacgagctccaagaactgaagctccgaatgaaagaagagaaaacagagaatctgagaaaaatacaagctttggaggatgagatagcggactcaagaaaacggcgtcggatcgcgtttgcaaggcgctggtaaacacgag

SEQ ID NO: 92683 - DNA, 286 bp, Glycine max
cattcatgtaagattttttctgttgcttttgatgaagttgtatgttacataaacatatctccatggtgccgccatcttaactaaacttggctgattcattgggttacatggttaaaggttatagaaagccagactacgagatgatggaatatgaatcactagagttatattatatgcatcatctatttcattttcttcatttgaagtttgcaccaaaaaacaaagaaagacagttttctttcaaatcattgcgatcctggttgtgctagattcttccttcttttgt

SEQ ID NO: 92684 - DNA, 165 bp, Glycine max
gtcagatagtactagaaaatgggtcatcgctggaatcccttcacgagcgccattgaagccaatattcaccaccaaagaagaagaaaaagatgaagaaggtgacttggaagagtgttcaacgacaccaaaaggggaagaagcaaagattccaaccacgttgaagtg

SEQ ID NO: 92685 - DNA, 183 bp, Glycine max
gaaaattgaatcaattcgaaatggtaaatcttgggatgaaattgactcgaattcaaatcaggattatgacctagtgaaatcttatgtgtcaaagatccaagatctggaaggtgaattgcggggtttgaaaaatttgaatgcgaaatctagacatgttgactgggttgattcagatgatagtgg

SEQ ID NO: 92686 - DNA, 230 bp, Glycine max
cctttgtggctcattgtattcgaacgaaccctaacaacgtctgtggctctgtgtgagactgcgagccacgaacccaatctccgacgacgacgacctcggtccagggacgacttatctccggagacccacaacttttccggcgaccaaccgtgcgcaggtgcaaggataagtgtgtgatctatctataaacgcaagatgtcagctgggcctggacttgaatctcttgtaga

SEQ ID NO: 92687 - DNA, 283 bp, Glycine max
gaagaagctaaaaccctttccatggtgttgctgcatctacatcatcgtagctagctgagagccaaatcatggcgggtcccattcttcgttctctctggtcctccaccaggaaatccttctcctcctccttctcttcttcttcgtctccctctgctccgttttcccactcgcgcttcttctcacgcaccttcgccgccgctcccgccgccgccaccaccgccaccaccgcctcctccctcgaccccagccacctccgaaatgtggcggtgatcgcccatgtcga

SEQ ID NO: 92688 - DNA, 277 bp, Glycine max
gaaatggacagcgacatttcccagtgggtgacggagttcctactccgcagctccgtccccgattccctaatccaaaaaaccctagccgccctccctctctctaccgcctccccccgcctcaagaaaaccctcctcctccgcaccctccaaaccctcctccgcacagccacactctccgaaaccgcgctcgacatcctcgaactcctcgaacccagtgcccctgtttccgatgcgcaccgctgcgcgtactgcgcagtcgccgtggagtgcaccgtaa

SEQ ID NO: 92689 - DNA, 273 bp, Glycine max
ctgtccccactggagaagatcagcctcagataaggaaacgaaacataggaatcgctttctttgctctttcccaacccaatggctacttccattaacagcagcagtgctctggggtggaaacattcctccttgttcgtacaatctaataatggctttaacgtggcttcgcctcctttcaaacataaaccgccacgctcctccaagttttctctcacttgctctgccgcttcctcttcttctgatccactattggttaaggctgctaggggggat

SEQ ID NO: 92690 - DNA, 270 bp, Glycine max
tggtgcaggagaatgcaagaacaaaagaatcgtggtcgcttctggaaatgagattcagtttcattgcaagttgaaaagaaatgttctttgttgaggcaagaaaatgagatgtcagtttaattacaagttgatcgatcagttcaccaaagattttgaagtcactgcaagttgacaagtgattacatgaaatagagaaaatgtagattttgttttacgcaaaccttgcaactcatgtcttgaaacatttttttcttttttgcctattgtaat

SEQ ID NO: 92691 - DNA, 271 bp, Glycine max
cagatcttgagctcttgcatctctttacttgttttttgtttgtgtttgcttctattttcaagtgaaaacctttttactatcagtcacttgctattttccttgtcctcttttcgtccaatcctaataccatcatggaggatgctgctacttctaatgctgcagaggatagagaaaacaagttcctaactatggcaattgaagaagcatataaggcggttgaaagtggccatggtcgcccatttggtgcagttattgttcgaaacgatgaaat

SEQ ID NO: 92692 - DNA, 104 bp, Glycine max
cttgctacattgatgaacccgattgatagccatttgagtacttttgtgcatcgggaccatggggatttaggttatgttgctccctgaatatacaaaaactttgg

SEQ ID NO: 92693 - DNA, 271 bp, Glycine max
caatcctatttggggccgcaaaaacaaatctagtggtaaaaacttgagtgctacacctgcataagctgagcttttgcttgtttccatgcttatgtcatttttcgtgtaggaaacagttgagaaatatatgtctgtcccttgttgcagatgatagaattttgtactggatcatgtttagtattgttctcatttattagcttatttttcttcctactaggtactataaagaatgtcttgttcaatcaccagcatgattctcctctggtttggg

SEQ ID NO: 92694 - DNA, 230 bp, Glycine max
ctaaaagtatattaaccaagtattaagttaggttttgacagaacaaatatttaatgggatcgaagtaaaataagctttaataaaaactaaggtaaaaagataattaagtagcaattaaatagaagagtactatataaagggcaagtagtactaaattcctcaaaattagaaattaggaggagaaatcattcacatgataagtagtcgttaagtattaattctttttttat

SEQ ID NO: 92695 - DNA, 263 bp, Glycine max
ggaagacaataggagaagagtgctccctgaaaaacgtggcaaagtcaaggcttccaggaagaccagtgtccccactaccattcgtccagatgatcaggacataaccaagaattttgagcataggattgacattgcaggagcgggaggaggagatgagaagtctgatttgttaggatatgtcgttttctctggaaaactcattttggataagagaaaacttgctacaaatgataatgctgatgcccaacaaacttcggagatta

SEQ ID NO: 92696 - DNA, 253 bp, Glycine max
gtatttacattttattcaatcacttcgcatggtatgacaacatttgctaattaagcattgaccgttcatacagttatctggttcttcagatgatttgccagttgttttccccatttccttcagttttatcatgtacctattttcacttaatgaagtagcactttagatctagctaggaataggtattcatagtagaaacttttaatccttagaaagttcaattttcattttcaacattatataattacttgcc

SEQ ID NO: 92697 - DNA, 244 bp, Glycine max
ctaaacttcattccagagccctacacgcacaagtgtttggcgggaatggaagggagtgagagtgaggccgtgtttggtgctctttatctgaacccgcaactcttctgtaacgaagttctcaacatcatcgacgatgtgctccaagaagctttcaatttcttcttccaggacgcatcgaggaagctcaacatcgaaagcacccaaaggtcccagcttctgaaaaagggtgttgattgcgttcggc

SEQ ID NO: 92698 - DNA, 259 bp, Glycine max
atcttccatttgaattacttgtcccaatggatcctcttttagtcttgttctgacttgggtgacaacatcttggagtctattatagcattctcaataggtgctacctactctgactttctcccaagtacatttgttcctcttcttttcctgtttcaggaatcacgcactacaatctgatctctcctactgcttttttgctcttgttggaatcctgcgcaacattcagtgcctctatctcttgcatgttctaaaatatcta

SEQ ID NO: 92699 - DNA, 257 bp, Glycine max
gctggcatgagggaggaagatgctcaatgaacttcatcacagaaagctgcaattttggtacttcttacaacaggcatgggaactaaaattgaatattccataaatcttctagcatcctcagtagacagcaacaacttcattgtgggtggtgtggatgtctgggagcattatcagaacaaaggagagactaacaaacattgtagtattggagtgaataaattgcaagatccaatggataggatgcttgacagaaacaa

SEQ ID NO: 92700 - DNA, 225 bp, Glycine max
cctgcgtgtacctagtaattagcaacgttggagaatgtggacattgacattcgtcctgtttctgctccataggctgaataaaaaatgtggttaagcatgtgtgaatgcttctaggacgttgaaagcatcttgagattgaagacataaaaaatgttattcgagttgaacaatggttcccggttgcaaatagtggagcttgaaggagaagctgtgcgggcaaagtgc

SEQ ID NO: 92701 - DNA, 238 bp, Glycine max
cttttattccaaaaaggggaagttattgcagatatttttgtatacatattgttaaattttacatttctaaaatgataatagttttattatattacaagcatgcaatgaggatagctctacaatagctaagatactatttgtggactttttttccagatttgagaatataactaagaaacaagctaacaatgcaatggtatattactataactctgaatgagggattttccaacaagac

SEQ ID NO: 92702 - DNA, 253 bp, Glycine max
tttcagagttatttaatctactgctgccacaagattcatgatcgacatgatcgtcggctttgagattgggtactgttcggaacattctgaatgatcagacatattttggattgtgatctctatgtgactggtggattacgaaaatgctacagttttgtcgttggagagatgaaggggccggcgcctagacaatgcgatagttcatgccatgcttgaaaggatggttcatgccataaagctggagaaatatgaa

SEQ ID NO: 92703 - DNA, 235 bp, Glycine max
ctccggttattcaatcgaacagggctgatagaaaaaatttgtagaaaaaagtgttgtgtaggtgatacccttcatatggatgatttagaatgctagtgtaggtgatacccttcatatggatgatttagaaaaaaattatagtgtgagaatttgaagtttcgcatcaaatagtttcttaagaaatcaattgcaaaatgaaatatatagatagatagattgagatcaattatgcata

SEQ ID NO: 92704 - DNA, 279 bp, Glycine max
cctgtctgcttccgaaacgttgagatggtgaagaagtaaaggaaggatgccttaaacgtgcgttttagagagagaaaacaaaaccaaacaaacaaacaagtcagaatctcttctcttctctttctctatcgtaactctcttctctgctctcagatcttccaaaaccctcctttccttcattactaaaatcacttctcttcaaagattctttttctctttctttctcagcctccacttcttttttctttcccgcgccctccaaccgcttcttgctccgtt

SEQ ID NO: 92705 - DNA, 275 bp, Glycine max
ctgtggtgtgtggactgcgttttcctctctctgttctcttgtttgctacgctgagcactggccttttccgcaaaagggtcgcacccggtttccctgtggaacagtgaagatggtttcttttttatttttctaattgatatgttgtgggatttggtgactccttctagtgggtttctttctttgatcttcccaatggtggtggaggtgggtgcatttgttgttgttgtgtataataaagtaatggactttgctggtggagccttttgatttgatgc

SEQ ID NO: 92706 - DNA, 273 bp, Glycine max
aatctctccgcgccctccatgttggagcggacactctcctcccgccgcgtcaactcctacgctgacgacgacgccgacgccgatgtagacgccgacgaatccaagactaagaagaaccaacacattctcttccgcatcacaccagagcctccaattacctctcccgaatcgccggttccggctccttctacctcccctgcgtcaccatcgtcctcttcgtcttcttcgctttctccttcctcttcacatctcgcggcttcgtctgcatctcct

SEQ ID NO: 92707 - DNA, 266 bp, Glycine max
cacctactaagcgacgtcgttgggaggcgtaataatgtcgatgacgatggttatggaggaagatgaagaagacgtagaaatagagcacgtgtttattgctcatgaaattgacctcgattacgagttcgacgctgcaagttcttcgatttcactcgcccggagactccctcggaagctcacgaagcccaactctggtttcaaaatgccgctggttaccctccttcgccttttgtgagaaggctgctagtggcgagagaggatttgtt

SEQ ID NO: 92708 - DNA, 270 bp, Glycine max
gcgcattgccaaatcggtcatcttcagggattgaaattgaaaacatgttgagataactttgttccatcaaattttattctagcaggtggaaaaggcctgtgaagagcttgctgttgctgtggctgtagcttgatggtgtgtatagtttgaagaggcaggaacagcccacatcctatatacataccgggaactctcaaattgagagacttgggattacacaaattgagggaattcaaagcaaagaaataggtaaaacacctgcgtgagttg

SEQ ID NO: 92709 - DNA, 268 bp, Glycine max
cctttctcctctccttattgtgaaccaaaaacatgaatagaaatgcatacaacaaggaggaaaaaggatgttgctatttccacccaaaacaagtggttgttggagtgtgccccttgtgcttgaatgagaggctctcatactggctgcaaatcaagaccatcatcaccatcacaggcttcaaagttccactcagaggaaggcttcagcttccattcacaagatcttggctcttggttctcttttcactcgccaccaattaaaatctcaa

SEQ ID NO: 92710 - DNA, 258 bp, Glycine max
atttgaaaatacaattctcaacttaaatattgtgaataagtcatctgattccactaaaagtgttacaaatcatctcatccatggatctgataatagatctttgcagttatctgatgtgaggattccattggtcttatggttttattcaatgttgctttttttggaacgggaaattttgcaagtattgctagttttgagatttcatctgtctatcggttcattaccatctttagtcccttcctgatggcagcgctactc

SEQ ID NO: 92711 - DNA, 110 bp, Glycine max
cttaaatactggttttatgattttataacgcccgcttgcacatttaggttgaatgaatgttttgtcttgcactactatcttcttcgataggctaacaaatagtagttgat

SEQ ID NO: 92712 - DNA, 105 bp, Glycine max
ttattgttcgttgtggcagtagcaaaacaacacctttttgaaacccgaggttcagagagaaaagaaacattttccagattaatggggcgttggatgaaaccagag

SEQ ID NO: 92713 - DNA, 167 bp, Glycine max
atttcttcgtcactccgccatcttcctaagcatttcaagtctctgcgcttcaaactccaaacaatggcgttgttccgcttctctctgcttttcacactcgcttctttcttccattctcttgtcgaatcactcagtaaaatgcggcgaccgtgacgaggaagatgatc

SEQ ID NO: 92714 - DNA, 281 bp, Glycine max
actttacgtaattatcaacttggcattcaacatgtccctgcttagtgcagtaaaaacttcgtctgcagttgtggcttctcttctggtagtgttgtcagtgccaatttctgtttatattctttcccttccattaccatatcttcccgagggaacaagcctgagcccattttttttgtttggcggtgcaattcttctgtgtggtctttttctgtacaacacaacgcggcctgtaaggaacagttctgaagatgactgaaacagttgcagttcatgaaaccaat

SEQ ID NO: 92715 - DNA, 150 bp, Glycine max
ctttgttgttaataaagtttgccgattcatggagaatcccttagacattcattggggggcagtcaagagagatcctaaggtatcttaaggacaccctctcccatggcgttctcatgaaacctgttgttgttgggaaacctttatcaatta

SEQ ID NO: 92716 - DNA, 195 bp, Glycine max
tggcgctagtcaaccttcaagaaatggcacagatgttcttttggatctattatctattggatcagtttctgcatctattgaatcacctgtacaaagaaactcatctacaatagacattgtcccccaaaccaagtaaaccggcaccactttcaccattagatgatctatcatcactttcactttcttcaagatcaa

SEQ ID NO: 92717 - DNA, 179 bp, Glycine max
tatatatatatatatttaaataaaaaaaaccttgtgatttgaattcaaggttattgtgtttgaaatgtggtactagttagcgttccatcttgtatccttgatatcttacattcccggatatgtcattaatcgcatatgaagattatttaagcaaattagcattttagtgatgcaccatg

SEQ ID NO: 92718 - DNA, 189 bp, Glycine max
cacagacaaggatatagcagcaagagttattgccaaagagattagtcttgaagagacaccagtttccaaagtcatgactaggaatccggtatttgttgcttctgaaactcttgctgcagaagccctccaaaagatggtgcaagggaaattcagacatttacctgtggtggagaatggagaagttttggc

SEQ ID NO: 92719 - DNA, 193 bp, Glycine max
tatggtaagcatgtaaatggcgcttaggacgtttgaacctgtaaaccagctccaagatacgatgaattaatccagcaaagtaatgcagttgaccttgaaatttcctttgctcttgttcctcgattgactattcagtctggagttgagagcttacaattaggttggacttgtaatggtcttcaattttttcctt

SEQ ID NO: 92720 - DNA, 191 bp, Glycine max
tggattgtctacagtcttgtgagcgaaattctcttatagcggaatgacagcttgagagagcaatggcatgagagtgtggaggtcccaattccagtagttctggaaatacttcaactagaaattcaggaattcctcatgagttccatgagcatattaagactcggaggcagattttatgggaatctagagaa

SEQ ID NO: 92721 - DNA, 185 bp, Glycine max
tccacttctgcagagtctgaacaagttggttatagtgaaacaaacaacatgactagtggtgttgatgctgacttaagtgaattgacgccagtatcctcttctttagagtctgaactagtagctaatgatgaagaaacagctcacctcattgtggatgacttcatcaatgcaagtaaaatgggaaa

SEQ ID NO: 92722 - DNA, 203 bp, Glycine max
tgatcacaaaccacattaaaaaaagactcccacgttctcttctctctccgtctctctctctctctcttcatttctcattgactctctctttctctctctctctgcacagtgccaatggcggatccaatcgcgaaggctctgatcgcgtttgcgctcttagcttcccttttgctgtgcttgcaagcttcctccgatgtcccctt

SEQ ID NO: 92723 - DNA, 202 bp, Glycine max
cacacactctcatagctgtagcggcgacactaagatcggagaaagaatggcgaaaacgacgtcgttgctgctctttacactgctcctcttcggaaccctagctctcatccaggcgaagaaatcgaaggaggatttgaaggaggtgacccacaaggtttactttgatgttgagattaatggaaaagaagcaggtcgtattgta

SEQ ID NO: 92724 - DNA, 190 bp, Glycine max
tgctgttagaaagggtgttgacacgggcattgcagtcatttttagagaccatgaaggtgaaactttggcagctgcaacaaagtttcatcagagtggcagaagctctggccttaagatgttgtattgaagatttttgtctttgttgtctgaatctagcttggatataagctagataacctccgctaagaga

SEQ ID NO: 92725 - DNA, 188 bp, Glycine max
tagaaagtgatcgaacagcatgttcaagcttttggttagtagagcagctagggtttcaactccacacaaccacaatgcctttgcttctttcgctttctctagaagcagaagagatatcaggctctagggctgctgaagttttgaacctggtgcaaggtaaatgggtaggatcttcaaattggaataca

SEQ ID NO: 92726 - DNA, 171 bp, Glycine max
tctcgagcgaatcggctcggggctcgaggttattacatgcagttggttgatagattagttattggttatgctgtaacgttgattccatttcatgtttgtagttcaattgatgtcctcactgatgtcctcaactccatctagacctacaggatgaatttcctctcctgtggc

SEQ ID NO: 92727 - DNA, 100 bp, Glycine max
ctttcttcttccactgctctaatctaagatgggcaagtcaagcgagaaatcagctctcaaggtcgacgctgctccagctgtggttccgccatccaagtct

SEQ ID NO: 92728 - DNA, 187 bp, Glycine max
cgacccagacaagtcaaaccgtgcccacagacacgggaagttgtctccttctcttaagccctaaaaccctgtaagcaattacttcaactcgccacttggaagaaacctcaccaaacattgcctccaagatgaattttaacaatgtgaatgtcccaaaggttcctggtggcggagtcgctgctttgct

SEQ ID NO: 92729 - DNA, 286 bp, Glycine max
ccgctgttggttttgattataagctgttttcaacgcaataagctgatctaaacacgcgcttagtgtctcttcttatgaatagtcttagaactgattttcggatcacttttggtcaaacgcctctgcgtcatgttgtgaatgagagggatttgcgattcgaagtgatgttggagaaaaaaagttattgttattattcgtttttcacattctgcaggaacctgagcccattgattgggattactatagaaagggaattggcactcgtttggtggatatgtacaaggag

SEQ ID NO: 92730 - DNA, 282 bp, Glycine max
cagaatggggcgcaaagagaagcagaacacgaaggcaatagaggaggaacgcgaccaagacaattttaatggcgcttcaacgccgccactcgttttcagcagcgacgacgacgaagccaaccaagatctcagcctcaagatcatcaaaaaggccatgcgaatgcgcaccgccaagcacgccccaaacgacgacgtttcgtctccgttttcgcagaaacctgatctcgcattgcccccaagcggcggtgtttcggatgggcccagcgcaatcgctgattcaga

SEQ ID NO: 92731 - DNA, 274 bp, Glycine max
gagttaaaggtttgatctttgaggtgaaggtccagtggtttgagtagccaaaccttagttatggatgttgaggcagagattgatcgcttgccaattgacctgttggctcatatttttgttctgttcacttccttcactgatttggcacagtaagcactaagcatatatgagtgtttcatttcattgttttaatatataattcattcaccaatcgtttcgtgtggatgtggtgtttgcaacaagggcaagtggtgtttgcaagaaatggaaacaa

SEQ ID NO: 92732 - DNA, 148 bp, Glycine max
cttctagagatcgagcaacacaagattcaacatggatgcaattcaattgtgggtttcatagcacaagctagccacagttgggggtctgtgggcctctggacattggggcatcgcttgtggcttattcacgtacaaggtctcctatgaa

SEQ ID NO: 92733 - DNA, 127 bp, Glycine max
gtgagtcattatatctactgatctacatatttctttacttcttgtcttctcttaatcatcttatcatccatgtgctgggcagcagggtaggattcgtaaaggaagtacatagtttaatacaacataa

SEQ ID NO: 92734 - DNA, 272 bp, Glycine max
gcagttgccaaaacggtcttgtcagctacaagaaagaactccttcaacccacccaccaatgcatgaattccaaatggataatttgaatgttgcattcggctgcactacattgggatatcttagcattatgacccaatattggaagttatcatatatgtaaatgtatttataataatatagtagaaggctttgggtttcacaagtgagagaccacatatatataccaatctatcagttaattacatgaatgcaagttattcacctttctttct

SEQ ID NO: 92735 - DNA, 271 bp, Glycine max
aggacatatttggcgtgagatctatcaagaacaaccaccgtgagctcatagcagttgtttatcttcaagtattgtaagtcaggctttcattgctacacagtcaaggagctggacttacattgaaatggatagccatgatcatagctgtgtatgtgaattggggctttgcaaggattgaatggagtcaggttgctttcacctcaaagaaggattatggaaaaggagggagagagagagagaagcacaagctgaagctcaacacagtttacat

SEQ ID NO: 92736 - DNA, 276 bp, Glycine max
gtttttcttcttcagaaagatagtgaatatctaagtggccatgaggtgttcctcaggcgtgttgcctctgccttcaacaactttgcagaatctactgaaaaatcatgccgtgaaaaatgtatggaggacttggtaagcaccacaagatatgtttcatggtctctccacaataagagtcgggctgggttacgtcagttcttagattcatttggtggaacagaacattcgaatgcttgtaataatcctacagcaactgttctatcacaaacgagtgca

SEQ ID NO: 92737 - DNA, 101 bp, Glycine max
aattcagacactgactgaaatctcgtctccctcttacttgtcttattgactgccatgtatcttcaatagcctttagtggtgatagacaaaggtgggatttg

SEQ ID NO: 92738 - DNA, 224 bp, Glycine max
gtgttcgcagtgcactgcatatccgtaaggtgtagttgatgcaagtgacagtaattttccaacatatagttaacatataggtggagaattcggctgcaaattcaactatgtgatgactggatagttagctcgagccgaatcggctcgagtggctcgagctcgagcgcgcacaacaaaagatatggagtatgaagcaggatacttatcttcatgacttaagggag

SEQ ID NO: 92739 - DNA, 230 bp, Glycine max
ggcgaagaggatggcaagggtttcagagaggagcttgcgactttggcgaaggaagtggctaggttggagacggttcgtgtttatgcagagacagcactgaaacttgatacattggttggtgatattgaggatgctgtatcatttaccatgagcaagaacataaggaaacattctagtcaaaattcacaagaaatgcatatgcttgctattaaaacactgaaaacaacaga

SEQ ID NO: 92740 - DNA, 221 bp, Glycine max
gtctttctgtaatcactgctgatgttagttagcatttgtatggggttctatgctgcagttgatgtatttggatatttttacttatttgggatcaagcaaggttttaaattacgattgccgtcacagtttcatcgtgttacttggtattgccgaaaattgtagataagtgcagctggaattgtggtcacgatgcagtcgtcaagagccacggttttgccgca

SEQ ID NO: 92741 - DNA, 266 bp, Glycine max
cgttagtagtgtgaaggagacaaaacagagttgttgaataaacattaatctaggccacagagttttgatgcctagcaacaaggatttggatagtgagatggggaccaaggtaaagaaagctatgaagaatttgaaaagggcaactactaataagccatccgaggatgctgactttttggtggtcctgtttgcaaacaacccgaacagaagctgctgaagaatactgcaactgttttgtatgtgggtaggattccacatggattcta

SEQ ID NO: 92742 - DNA, 112 bp, Glycine max
ggcagcagcgaaatctcctagtaagcgagtttctctttgtcactctctctgtcaatgttcacatagtcagcgaaaacaatgaaagctattggagacttggagcacgatgaca

SEQ ID NO: 92743 - DNA, 258 bp, Glycine max
cttgattcagtaacaccaagagcgagattcttttgtcatacttgacattttaagagctagtttaagatacaacatacgtactggagcgaacaagatattgtaccaaatacgttgttttcatatatatcttgattactttaatggaaagtgaaggtgggaaagtgaaggtggcacaatgaaagattgaaccttgatattctacctaagtgctacaaattgaggcaagctagtgtggctcatcggccgttgttgatatca

SEQ ID NO: 92744 - DNA, 261 bp, Glycine max
cgcaaatccccaaacaaaaccctcaccaccctccgtcgtttcgcaacaaccctagccgcgaaacccttccccgacgaccccaccgccgcctactacgaccagcttgccttcgccgccgggactcgggcgacttccacgcgctccgacacgtcctcaacaagcgcatacaagacggcttcctcaacaccaagattaccttcaacttcctcaaagacaccaacttctccccctccgtaatcgacaacctcgtccaaaccctct

SEQ ID NO: 92745 - DNA, 112 bp, Glycine max
gtacacgtgggcgcggctgttcccaactccctccgtcatatacagtcatttctcccacccaaattcatcgccctcccaatttgggaatttttcggaagcctagaaagatgaa

SEQ ID NO: 92746 - DNA, 273 bp, Glycine max
caaaaaattatactaagttttactcttaacttgagtttataataaaacacccaaacatcactttaaaatcaatttcaaccaaaattaattttattaatgcccatccaaacatgcactaaatggtatcacaaaacaagctttgcttgctagtactagaaagatgtttgccatctaaaaaactatagggatgaagctaacacatttcttcaatttgattggcagctcatatctttgtctgagaagaaatggtggcagtagatccatctattactg

SEQ ID NO: 92747 - DNA, 257 bp, Glycine max
caagttcagtgttgggatcattcgggtttttgttactcggttcattcgaatggcgacatccttgtcaaacgtgtttttgaagggaatcgcagctcgttctctcagcagacccgcgttatgtgtgccagcttcatccttgggtttttgagttaccccaaattgattttggagaagttaaatgggttgttttattgcacaagatactcgaatactgtgtcaaatgattctgacacgcatgatgacttcaagccaggtaa

SEQ ID NO: 92748 - DNA, 252 bp, Glycine max
cttcaaagcattgataaattgaagattagtagctttctgcatgtctttcttagtgaaaaccagcagcagatggaacacttgggtggatttttcagtgatacacgattaagggaagggctgcaatggctggcaggtgaatcacccttgcaacccaaccttggctgtgtgaaaatacgagaacttgttcacgcccatcttaattctttctcagagatgctggacattgccattaactccaacgtgggtcctaat

SEQ ID NO: 92749 - DNA, 264 bp, Glycine max
cgtcatcttgtcattcaccgagaaagtcgtactgattcctcttcatctttcgttaaagcgagtacttttcgttcttgatctgttggttacgatgtcgtattcaaggagatctaggtattctccttctccttctccttctccatacaagcgatacggtaggtctgtgtccaggtctctctcaatatcaagatccagaagccgttcaagtttcattgctgaaaattggtgaaagcaagtaaataaggagtttatcaagagatgcag

SEQ ID NO: 92750 - DNA, 253 bp, Glycine max
caatacaggtgctcaacccaatcgatggcccacatggttttctaaaggctggcaaagccttatatgtgtttatgcacgtatttgatggttgcctctggtagagcatctattttcatactctgagcaaacgagaagactattatagaggtatcctatcaatttttaagtttataattggatggataatttacgtagtgatactttttttatttggtcttgtgtaggtatgggaccatgctgttggcattatatg

SEQ ID NO: 92751 - DNA, 259 bp, Glycine max
gggaagtgaacttagcaaggagacctatcgtcgcactttcattaccatacacactcactctctcgtctctgacccttcgctcaaacactcaaacctaacctaacctctcaacaagacaacttacctcattcagcccttgtgttgttgtgaccgaactgttatgctctcttttggacctttggtgttgtcattgaaagaattttgtagctgagaggtatagacatttaacagttacaaataagagttgttgaagggctat

SEQ ID NO: 92752 - DNA, 256 bp, Glycine max
gtttcagttcacagtcctctggcatcacaatgatgacaccagaatcagcagaggacttagaaaaacatgcaatctcaggtcatcatgtgagggggaatagtgaatatgttagacttgccatatctgatgaactgagggttgtcgaaaccgaaatgctacagcctctagcagagtcaagaatgaaatctttcaggtggtggataaaagcccttttatggtgctttgtcattgttgtacttggtcttgttatattgaa

SEQ ID NO: 92753 - DNA, 259 bp, Glycine max
tttgccatgtgtcacccattccaactgtcctttacttgagaatataatttcgttgcactttgattgtattttcaattgactgcagtttaacaaatctatactcacatcacaggtgatgtagtcacctacacttccttattagatggtttatgcaaaaaccaaaaccttgacaaggcaactgcactattcatgaaaatggaggaacggggaattcagccagatatgtacacatacacggcacttattgatggattatgta

SEQ ID NO: 92754 - DNA, 256 bp, Glycine max
atctcaccaagactcgtatgacgtcatgattgatccactaatggacaaggagctattgctgtctctgtcaaatagtttcaaattgctaacttcatgtaatcttctgtctgtaattctggaagctgcccttcagtatatgcaaacagatacactacctaaatcagcagaaagaaaagggtgcattgtggataaatttgttaacattttgatttgggaattaagtaatatgattgagcggatgcttttacatagtcca

SEQ ID NO: 92755 - DNA, 255 bp, Glycine max
gttacactggctctctgaatccttttaaataataacatctttttcagctcccctcttcatgtcatggtattgtggttatgtttggcattcactcggtcaatttttcatttaaatagttcatagttgagccataaccttcatattgttacttgttctcttgtgcttactaagttctttgcctttgactgttcacttttgacttactatgattttgggtttatgcgatgcttgatgccaaatcaactggcaagatac

SEQ ID NO: 92756 - DNA, 182 bp, Glycine max
tttgctggggtttaactttctcattttttcttcaaacttccagacacatatggttcccatttttcaaaactaggatttcaaaagcaagattggaaggttgtgcagagtttgttttatatcatgagttctgaggccatgactatcattatttttaatttatttttagtcaacttgtctaccgc

SEQ ID NO: 92757 - DNA, 257 bp, Glycine max
atgtttataagtttttgacaatcacatatcatgtataattccaaaacttataaacatcaaagtaccagccaatatatgtatggatcacatgactatactaaaaattgctaaaatgcgcatcatattcagtagtgaagctgatgcagaatgagctgatgatagaaaaacagcattgtacaacccaaaaaggtttacaaattccaatcaactttcatgagtgcacttccacgtgattaaaacaccttgacatccatcca

SEQ ID NO: 92758 - DNA, 250 bp, Glycine max
gcgccatccttcactgcaaaaggtccttcaactccagagaaggatcaatgtattcggtgaggaaatcatttgatggtgaacatggggaaaaagtgtaatcttgaggattttgttgtgaaagaagaagctcaagctgatacaacagaagagaagagaaaaaaatgttatttttttgtattatctatctagtgcattgtaaagaaaagggaaagaggggagagggatagttgtgatgattagtgagtgtgtg

SEQ ID NO: 92759 - DNA, 260 bp, Glycine max
taaaagtttgggtttgacttgtttagctcatttaaaacttaattattttttaactttatcaatttagtatttaataaattattttaataataattctgtcaaaaaatatatattttaataatatcaatttagaatctatgtaattttaattttctctctaaatatacgagctattcaagagctgctaatgtcaaacttggatttgcttcatttaaataattgagcccaatctcaagcttgagtttgtttatttaattaaa

SEQ ID NO: 92760 - DNA, 260 bp, Glycine max
gtttagtttcgaaccctttccttttccttccttctccgcctcaccaccctaacccaaccctctctctttctctctccaaaatctctctccctcccaccgttatttagggtttggcagatctcgatccgtcacaatggacgttcgcaagcgcggaaggcccgacgtcaaccttaacggcgccgttaagaagaccaagcaagtactgctggctgcccatttggtgagggctgccacttcttacattatgttccagtggttac

SEQ ID NO: 92761 - DNA, 258 bp, Glycine max
aggtttgcctaatggagttgttccagagaatggtctagatcgccgtgcaggaaaaaaacataaacggaaaaattcttccagacaagttgatggaaagtttgaacctgtttcatcaggacaagagaatattgaagatacacatactgattatcacctgagagagcaattcaaacttaatagcaatcaagatgttaataatgtgtggcaaaacaatggatcaaaggtgatgggagagttgcaagtagaagatgcagagag

SEQ ID NO: 92762 - DNA, 269 bp, Glycine max
cttcaagagttgattgaaattctggccaatcttcttctgaaactttccagactatgtttgtcaaagacaaatcagggagagtacgttgccacgggagaactacgacacctactctcttgaaaagaaataaagaaatttcagaaattgaaaaaagacatgctgaagaggtgaaagaattaaatgataaaatccaagagatagaagaaaaatgcaatagagaaatggcagcagcagaggaaaaatgctgtcaagaaatggcagcaatggag

SEQ ID NO: 92763 - DNA, 264 bp, Glycine max
caaaactgtggaacgatccatggcagtaagttgttgtggtttcgttaatttctccgaaagagtttcgattcggaagaaagagaaaaaaaaacctaaggaattgaagaaaatacatgtcaagtagcagtcacttacacctaataaaagaattcaaaaatactatatttgatgaaacaagatataaaacatacccaagtaatggcatcggcttgagctttaaaagctcttagaactgaactgtatgcttcttgctcaagctgatga

SEQ ID NO: 92764 - DNA, 257 bp, Glycine max
tgattcttctctaccatttccaaagcacaaagatgaaaatgcctccttttcttcattcttttcctcctcgttcattcttcttctgttgcttccttctccttccactcttgctcttgctcttgctcttggtggcaccttcttcttcaggtgctccaaatgaaaaggtaaccgtgtcactctattatgaaagtttatgtccctattgtgctgatttcatagtgaaccatcttgtgaggctcttccaaacgggctcatct

SEQ ID NO: 92765 - DNA, 256 bp, Glycine max
atccagcacaaggtcatgtcaatcccctgatgactctctcacagaagttggttgagcatggatgcaaagtcttttttgtgaacacagactttgaccacaagcgagtggtgagttccatggtggagcaactagatagccttgacgaatcactactgaagttggtctcaatccctgatggtttaggacctgatgatgatagaaacgattagagcaagttatgtgattctttgctgaacaacatgcctgctatgcttga

SEQ ID NO: 92766 - DNA, 268 bp, Glycine max
cttcaagaaactatgtagtttcctgatctgctaggcccccatattgtgatttccaagttggggtggtgttttgttgttaaggggactttttaactggaagtcttttgtgtgatgctatctgatattgggacatggagagggttgcagagccgacggtacttcctcgaaccttgcctatcctggttgaggtatcgaactcgtgcacagttgctgctagagattccagtcagagactaaatcgccaggaggtttcgggtgttggtgggat

SEQ ID NO: 92767 - DNA, 266 bp, Glycine max
atttgaagggatttcttattatcctagagaaatattgaccaaagatagggaaacaagtctaaagagagtcattgaaaagaaatccctacttccacggatgatctatctttcgattaaaagtgcttcagcatcaatcaaggagcatgttgaggtcaatggttctgttaccccagacatcacttcagagctgaaattgttgctggagtgctatgcacagtttttgggcttttctctcactgaagcaatagaagtggtcatgggttttt

SEQ ID NO: 92768 - DNA, 266 bp, Glycine max
tgagcccatcataaggtaaaatgatatgaaaaatgttgatgtcgccaaacaagccttaacttgccctggctattaaatcttgtttggcgacatcaacttttttcatatcattttacattgtttccaaaacccatgttgggttgttttgagcccatcataaggtaaaccaaagaaactagtactatctgtgaaatcttcttatgcggcaccggtaaggaggacccagttttggaatacctacataattgctatagggttttgtagct

SEQ ID NO: 92769 - DNA, 271 bp, Glycine max
gatatgcgccagagctgaagcgagaaggaagggtccgcgcgccatggctggcatcaccatctcccccttcaaactctctcactttccgactctcttctctacttctgattccagactcttcggccttccactctccaatccctattccctcaaattcgaccctgcttctctatccactacctctctctcctacgtcaaagcccgatactacggaggcggcggcggccctcctcgctctcccagcgaatcacgcttccgcaagtcctccgat

SEQ ID NO: 92770 - DNA, 267 bp, Glycine max
cttgaaaggcttaagttggagtacatagttcgtggtgagaagaggaacatattcgagcttattagcaaaatagcttcttctcaagggttgagagggttttggaaggggaacctcgtaaatattctgcggacagctccattcaaagcggttaatttttgtgcttacgatacttatagaaagcagctgcttagattctctgggaatgaggaaactaccaattttgagaggtttattgctggtgctgctgctgggattactgctaccatt

SEQ ID NO: 92771 - DNA, 267 bp, Glycine max
acggttttcagctgacagcttccttggaaattctgtgctatgtcggagattggtgtaggatcaatatgttgcccttatgtacgaaaatcaagagagatatcttcgagagttgatgttgtatgactcacgcttggtattatgatattgttggccatggtatttggagcgttctgcagatccagctaatcgaagcgattgagaaaaggatccagctgaactgggcaaggtcctccacaactggttatacttcacatggatatggctatc

SEQ ID NO: 92772 - DNA, 264 bp, Glycine max
aaccattgcaggcatcgacgtcaatgataacgcaacaatcaaagcatcaaagtatctcccaagaggtggctatgctcaatttctaaagaaagatggactgagaggaaagagattaggtgttgtaagaacattctacggttttggaaatgacacttttatgcatgatactttcgaactgcacctgaaaacaataaggcaaaaaggagcagttttggttgacaatttggagataaacaacattcaggaaatctttaatgaccaaag

SEQ ID NO: 92773 - DNA, 263 bp, Glycine max
ctcgagcgcgctcaagaagttggcgtttgatcatgttgttcatagtataaggcgtatgaaccaaaagcataagaacgaagctaagaacagagcgcttcagaatgtcttgtttgacttgcttcagaaagaggctgaagagccagccaagagggtactcgtgactctatgtgagcttcacaggagaaaagtgtggtttgatgagagaacagcaaatgcaatctgcactgcttccttccatccaacatctaggattatgatagcaa

SEQ ID NO: 92774 - DNA, 269 bp, Glycine max
gtgagggtaagaatgtttctggggttaattcagcctgtcagggtcctcatggcttgttacattcagaatcttctactgtagataatgtaagttatttgatatttgagttttgcatctcatggttccccaggtttttaatgctaataactattttttaactgtggtttttgaccttatatttccaaaatcttgttttaatttttctcttgatatggtaaaaactggctggttgatctattctgaaagaacaaaagcagttggcatcattt

SEQ ID NO: 92775 - DNA, 263 bp, Glycine max
attacatctctagcaaacacaaacaacagagacaaaaagaaatcttcaatggaactgagctgcccaatctctcaacaaatatatgtactggttgattcaaattgcaaagggagtaaaaggagggtggggagagggaaagtgaaggttcatttcagtatggtaactactacagagaggttgaagatctgcgagctgtagttcaacacttccgtgagcagaaatacgtaattacagcaattgttggtcacagtaaagggggtaat

SEQ ID NO: 92776 - DNA, 267 bp, Glycine max
gtaagaagagcaagaatagtagagtataaagttacaccgtgtaaggcaaaaagtgccacaaagatggacaaaggatagcgtaggatttacatgttggcttcttgccaagccataaacgtgttggtgtatctatccatctgggtgcatttatcaagttgcccaccagctagtgctgtatgtgttgtttggtgaagagttaaagatttgggaagctcaatttcgttatcatttgtacgatcagacttacacgtcaaacaacgatgtaaa

SEQ ID NO: 92777 - DNA, 266 bp, Glycine max
cttccacttcaattcaagagcacttcttcaacattaaaatcaagagtgttcatacgatgttgtcctgagtacccctgaattccaatctccatccttccaagttatcaacaaaactatccaacaatgttgttttccacttccaccccaacacacaagtgtcttgctctttctttccacttcaaatctggaaatacccagcaccaactacacccacatcatgagtgtggtaacagcacaaccacaaacatcaccaaccgctgaggtga

SEQ ID NO: 92778 - DNA, 275 bp, Glycine max
aagagaagaaagggtgtttacacttgacttgagtgagacggagagagagtgcgagtgcttgatgttctcaattaattaaatctcacagagaaagtctctctctctctgtttttgttgtgttctctttactacctcttgaaaccaaaagggtcactctgtgctgtggcctctgttttcaaaggaaacccttgttcttttccttgcctttctttcctagcactgtcttctaacttccaactcatataattcattttccctagtcttctttgttttca

SEQ ID NO: 92779 - DNA, 268 bp, Glycine max
tccagttcccggcgatgacgaacaagagaaaaagatcccagaaacataccccaccacctcctcctccctcaacacccccaactccacaaacccaagcccgccactccctcaacaccgcaaaagcccgggcctgggcccctctcagcctcacccgccacgaactctccttacccctcaccttccccacgggccaaaccttcctctggaaaaacaccgccccttcacaatacaccggagtcgtcgggccccacctcatttccctcaagca

SEQ ID NO: 92780 - DNA, 277 bp, Glycine max
gcgattttggaatcttccgcgtcactccgtcgccgccgccgaaagccaccgcaatgtcaaagaaaaggggcctctcattggaagagaagcgcgagaagatgcttcaaatcttttacgagtcgcaagacttctacctgcttaaggagctcgagaagatgggtcccaggaagggtgtcatttctcagtctgtgaaagatgtggtccaaagtttagtggatgatgaccttgtttccaaagataaaataggaacttctgtgtgcttttggagtctacctag

SEQ ID NO: 92781 - DNA, 260 bp, Glycine max
gcattttcttctttctttgttttcacaactgccctctgctttcaaacatagatacactcattctgcttcttcctctctccatcaaacatcaaacatcaaacatcaaacattttgggatcaacattagactctcatggcttcagggtctggaaaggacggtcctggcgtcccaaggaagcctaaatttaaaccaagagccccacctcgtcgagtgataaagcaagaagttaaagctgaagtggttgatgatgctgatgcag

SEQ ID NO: 92782 - DNA, 275 bp, Glycine max
tgggtgaatcatctcctctcctctcttctacgatggccatggacagtgtttatgcttcgtctttaactagcaatttatatttatagatatattcctgccatcttcatcttcattttcaaccacccgcgccatttctacctcgcagtcgataggctccagttcaaaatgtgattgaactggtggatctggtggctcgacgtccatgcttcctcatcgtggtctgctgcagcacgcgcaacgacctcgactctctctgctctccccttcctttcgtc

SEQ ID NO: 92783 - DNA, 257 bp, Glycine max
aacaactaaatgtgccacaactagagggagctacttctcaacaattcacaaatttgacgacttaattgttatcccctttcaactctctacactcttcccatttctagccaatacccatctcatccttcttgtgacaaccaaaagatcatcaaatccaacttttcttttcataacttaggagatttcatcctttcaaacatggatgaaattgaaatccctgctcatttcctctgccccatttccctccaactcatgag

SEQ ID NO: 92784 - DNA, 267 bp, Glycine max
gttttgttgtctcgacaattggtttttgcatcaaatgcaaagtacgtgttcaactcgttggattggattggatttatattgtatgtgctagagtttgaggatgtgggtggagcaagttgtttaacttagatattagagagattgtatatggttgacttgttggcaatattttgatgatattgtaacttgtttggggttatgcttttttgcattatgctcttgatacagatacttttttcttcgatatagcattcctttgtctgcctc

SEQ ID NO: 92785 - DNA, 274 bp, Glycine max
aagagttatcatgggatcagcttgttgtgttgctgcaaaggatcatactattcccagcactagcagaactggaggtgaaagtttaaatagaaatgctgtatgttcgccatcatggagttttcgttgggatagttggggccgtgttgctggtgaaattgaatcaccagagattgcagaatcttcaataccaaatcgttcagtaccttcagttttctcaatccctacgacagatccaatgactaatcataattatcacaatcttcctaactcaaca

SEQ ID NO: 92786 - DNA, 264 bp, Glycine max
gtgagtggttcactgtgttttttgctttttgggttccccatttgttcctgctacataaattgttttttgggtttgatcccacttttttttttggctaattactcaaaaaatatcctactttctattttggagctggtctatctatcccttccttgaaatttgtctcctttgtggtaaatttcgttgcttgctgcatctccacgcactcactcaatgtgtttcacattgggttttgaacattgtcttttggattttcaattcaac

SEQ ID NO: 92787 - DNA, 262 bp, Glycine max
ccagaatctggattctggtcaaagatatatcacagaccactacttgctcttcacatattcagatagagagagagagcgagagagagaggaaggttttgcttcttagtactagtactttttagtattttttatgttgtcttcccctaggtttaatgatgtatgaaaatttgatgatttagagatattatcggtgacagagtggttggaagtggttgctattattattgtttgatagagaagtatttatggggaaaaagaagcg

SEQ ID NO: 92788 - DNA, 262 bp, Glycine max
aatttccattgcatgcaaagcaaatacgcattatattactagttttaatttgttttgtcgtttgcttctttctttgattaatgatgactagctttaaggttgcatgtgtggttgcgatgatgtgcatggatgtagccatgagtgttacacccatggcacaggccgcaatcacgtgcgggcaggtcgccggcgacgtgtctccgtgcctcagttatcttcgaagcggcggaaaaccgtcggacgcctgctgcaacggagtgaa

SEQ ID NO: 92789 - DNA, 264 bp, Glycine max
gagtgttttgttaagagagaaaaaatgaagagtatggaaaatgatgacaatgctgaccttaataatcaaaacaattggttgggtttctcactctctcctcaaatgcataatataggagtttcttcacactcacaaccttcctctgctgctgaagtggttcctacaagcttttaccaccacactgctccacttagtagctatggtttctactatggacttgaagctgaaaatgttggattgtattcagctttgccaatcatgccc

SEQ ID NO: 92790 - DNA, 207 bp, Glycine max
  unsure (1)..(207): unsure at all n locations
aattaagacaatgattatcaatcttcatttaaagctgctttttgagaagattgagatgagctcattggctgtccacgtcactagggagagccaatgagctcatctcaatcttctcaaaaagcagctttaaanttaagacaagctgattatcaatcttcattttgtntgaatctttcagtgtcctttctttttcacataagtgagatt

SEQ ID NO: 92791 - DNA, 211 bp, Glycine max
cttaacagcttttggaccaacctttgattcctccaacattctgttagatagtgaatacaaggaatactttcaacttaaagcagcccaatgaggatcatcttcaaatgctgtagtccataccagtgactgcttgtgccaaatgcaactgcaaaaagggtagaaaaactttagaggaagcaaaaatgaagttgattaatcccccaaaggtccc

SEQ ID NO: 92792 - DNA, 207 bp, Glycine max
ctcgagcgagccggtacctaaaaaaaatcaagcaaatatttatcagctattacggagacgaagaattatcaaatatactgatgtcagcatgcttctcttgggacgttccatctctggaggtgcttccaggttgatttcttaggcaaatggatgtaccgtgcctacaattttatgcctagttggctcagttgcatgtttagattggta

SEQ ID NO: 92793 - DNA, 203 bp, Glycine max
cagagggtttccctcgtctaattatcgaccaagatacttccctttctcatttcaacaattagcctccatcattttggtcaaattgcggattatgggcgaagcgaaaattccggtttgaaccaatgggttcattctttgtcaataattctgggttgtctggatcacaaaaaagcggaagcatgtagcatcacccttgttccgga

SEQ ID NO: 92794 - DNA, 213 bp, Glycine max
ggcattgaaataaaatattgcttaggatgtttatttgtacctatttactgttttcttatctatatatcaatggcattttgaaaatatattttggcatctcttgcatgccctttttgctttttgtgttgttgcttggcattttggtgaatactttagttcttctattattcttattattcttattattctcaaattccattaggaaaatgcggc

SEQ ID NO: 92795 - DNA, 205 bp, Glycine max
ctttattggctagaaaagaacgcaggaattgaaggaagaggaaccctcaatgattccaaacctggtgggaggctgcatatatctctggattatgtggaaagggaattcaaccatgtaaaaaatgatggagaattggtaggctgggtcacagatgggcttattgcaaggccattgccaaataggatttgcataggcgacactgcac

SEQ ID NO: 92796 - DNA, 202 bp, Glycine max
gaacactttattgggtggtagtattggcatggaatccagtgaggtgggttctgaaaggagaaggggacggcccaagggaaaaaagcatcctaattataaagagttggaagatgaaaatggagagtattctgaagcaaattctgaagacagaaatgaagattctgcacaagaaggggaaaatggagagtttgaagatgatggg

SEQ ID NO: 92797 - DNA, 187 bp, Glycine max
tcacaatctcgtatcaaaagagatgaattacgcccgtctgatttccggcggaggatggcttctccggcgactgtgcacggcggctgagactcccgcgaaaaagccaaacctctatcgaatgttatcggcgctggacatcaccggaggcaccgtgtcgcaaacgttggaccaatatataatggaaggc

SEQ ID NO: 92798 - DNA, 206 bp, Glycine max
caatttttctctcaaccggcccaatttagcataagcccagcatggccaccgcaacagcagcagccacctcgtccttcatggggacgcgcctcctggaggcccattccggggcggggcgggtgcaggcccggttcgggtttggcaagaagaaagccgccgccccgaagaaagtttccagggggtcgggctctagctccgataggccc

SEQ ID NO: 92799 - DNA, 204 bp, Glycine max
atttgcacttcacttctatttcttttctgttctgcgatggaacttgtcccttactctgaccctaactctgccaccaccaccccaccgtggcacgacatgttccgatccgcatccctccgaaaacccacctccgatcctcctcctcctcctccgccgccgtcaaatgccgaccaaaaagtcaacccctccggcgactctcagtct

SEQ ID NO: 92800 - DNA, 253 bp, Glycine max
cggctcgagcagtgacataattttgcatttgggtcacaatttgcccgaaatttaacgcgcatttcccgtagttgggtttgtcctacgttggtgtgtcccacaagtgcacagtgtccatcacttcctgttcctggtttctataaatactcaaacccattcttcctcattccttgcttattttaatttttctagctttgcttaggttctgttttgcagacagagagagagagagagagtgtgtttcagaatttag

SEQ ID NO: 92801 - DNA, 253 bp, Glycine max
tgcttcttctaaaaaccccactctgttatctcaacctaaacctcccaaacaccccatccatggcgggagcaacaggcagaaccctcttcaccctctccctctcttcctcctcttccctcacgcgcctctctctcatccccaagcgcgtcccactccccatacccctccccctcttccgccgcttccgccctctctgctccgtctccgccgccgcgccggaagctgccgacgcgaacactcaatactcctcgag

SEQ ID NO: 92802 - DNA, 254 bp, Glycine max
gagaattacgcaatggagattaagtagggaagggaaggaggaaagggaaaagttgctgcttagatatcttgtttgttaatcttgtgctaaaggcagactgccttaacgtttctgtagtactagtaactagtaagtaacatgatgcatgctttatttttcttgtgtaaagttctagtcataaatgtcagggtcacaagttccttccctttctgttctgtttctgtatgcacacttgttggccaagatggttattt

SEQ ID NO: 92803 - DNA, 251 bp, Glycine max
tggagttattttctgttcattggttcgcagttttgtttttgggacttttgatggttgaggtgcagtggcatcttggggtcttagtatagttgcagaagtcatattttagagaaagaaaaacagaagaattgaacaaatggtttcctactttatcatttgtaaaatctgtacctggaaatatattttctctccaatgcccacaattttgcctgatatatgtagcattaaacttgtaagttttgataatgaga

SEQ ID NO: 92804 - DNA, 247 bp, Glycine max
gttcaaatctcacccctttccttttctactttaatattattattttccgttccctttgaaacaactcaaagcatttactcccaactagctagctagacctaacccaactcagattgcatcatttctaaacgcttccttttcattcttttctggaactccttcttctgtcatattctctactctcttatatatttgctctgtgcaaaaccaaaaacccactatttttggttcaaggtggataagatct

SEQ ID NO: 92805 - DNA, 263 bp, Glycine max
atcaatttgaatcccaaaaccctaacgtgaccaaccccagtttccggcacacacttcttgtctcttgtctctctcactttctctctctataatttgggtttcattgttcggtgctgaagcaaatttgcggtgtagcagaggcaatggaggttcaaagtctcagctttgaggagaacactttgtgggttggctcttttgtggaggctttggtgcttgacactctccttgccactgccaaatctcttgcctgctttctcgtcgtg

SEQ ID NO: 92806 - DNA, 268 bp, Glycine max
atcagtttgttccactatggagcttgtaagatgtcaggatttcctcattggggaggggtaaggggttcgttcattcagccacagatggtatctaatataggaaatagttcttcactgaagttcttaaaatgggtttattcaaggtgatctgaccttttattgatgaatgacccttttgaaattcacggcttataggttgttgtcctttatttttttctggaaccaaatattcagagcattatatataactgaggcatatatctgcgca

SEQ ID NO: 92807 - DNA, 262 bp, Glycine max
attcagcagttaatagaagcagctaagtcaattggggaaactcaacttgaggcaaagtttgaagaagctgtgtccaagatcaagagggacattgtctttgctgcatccctgtatttgtagttccttctagaaattatttatttgcatacgcacagttatgagaagcaaatcatgtggaaggacaccgattacatgaaatcgctcttgtttctcaccttggttttgatctccactaacacctacaaacatatagaacaattgt

SEQ ID NO: 92808 - DNA, 250 bp, Glycine max
atttgccttccttgcagatgtgttcatcggctatcaaagaatctattgccagtgtttttggagacaagctagatggtttgacgaggaactttgaacaatctttttgtagcaccttgagtactcttcagttaatttatgaatcatccaagagcaatgaaggaaataaattaaataatacaaagatggaaattatgagttctaaattgactctcaataaagaggaatgctcaggtgatattgttacagaggt

SEQ ID NO: 92809 - DNA, 131 bp, Glycine max
aacaggcgcagacgcaaacgcaaacgcaaacgcaaacgcaagacgatagcgtggtccattgacggagatggtgcagcgtctcacctaccggaagcggcacagctatgccacctagtccaaccaacacaggg

SEQ ID NO: 92810 - DNA, 265 bp, Glycine max
caaaagaaaaaaaaaactaaaaggaataatcatatataaattttggatttcgcacgtagctagctacagaagacaaaggggccttgagtctcgagatcttgtcagatcggaacgcaaccgccaccgagatcgttttgtttgtggtgcttttctttcttcctcactttttctcatacctctgcaatgtgcctctcttattttcctatttcggagatctgttttgttcttatttcaatgcttatgtcatgttttaatgttccagttt

SEQ ID NO: 92811 - DNA, 258 bp, Glycine max
gaaacagagactgagagaaacaaaactgattgcgtggctctatagtggttttgttcttatttccacaaattgtcatttcttccttttaacaagttcgtaaaagaaactcactcacctacacatacagacagacaccatcaataatctgaacataaagtttcgttttttgtgaagattttggaggaagagggtggtggttgagtttaattcaaggtcttgcaatggcacccagttttgactttgcttctagcctccttt

SEQ ID NO: 92812 - DNA, 267 bp, Glycine max
atgaagtctatgtaaaccatggtatgttttagttatactttagaaaaaataataataattagcttgcatatgttaacactcaacaataacaaaaaaaaacctcattcatggttcaagtttctcaagtatccagtgagcacaaggcaatgtgggcgggctgagtaatgctcatattcagtattcaggtttaataggtttggctctgcaacaagattgatgtattcgtgtttaaattcacaagtagttttgttttcctcatcacttaga

SEQ ID NO: 92813 - DNA, 256 bp, Glycine max
gccagctgaatttcttggaaggccactagtaacgggagagaagacacttccagtgcgccctggcatgtttcttgagactgtctccaaggtcttgtctggtttatatgctggaacagattctggcatcactgcacaacatttggagtgggttcatcggaagacacttcaagtgcttcaggagatagcatatggctagttctctctccttttttcttatggtgaggttaagcacaatggccattttgtatccactgtt

SEQ ID NO: 92814 - DNA, 243 bp, Glycine max
tggagaatttgagaatgttagtaggaccagcagatacctgcactatgctgtacttggaacctggattttgtttgacttctgcatggtattgtgtagtctatggtgtagatgaagggtacataattgatacttgaacatgtatagttctaatatagagagattcgatttatattactaatttgctaaaggtaactgaatccagaatttcagaaaataaatgttatctatatcagcatgttcagt

SEQ ID NO: 92815 - DNA, 258 bp, Glycine max
atttccttggatggaaaatagaggtgagagtgccgatgctgagcttcaacttgacgctgattttgtgccggttcctgcccagacatgtactggaaatgaaaagagtaataaggcctcccggattcctcagtctagacgacctaatttatcctcactgcaaataccagcatggtcactagatattgcattatctacttttgcaaagactgatggtccttcggtttcacgatcaagtcctggttccacaagaggacttcc

SEQ ID NO: 92816 - DNA, 254 bp, Glycine max
gcctatacttgatgcaacactggcatgatacgacatagatacagaggctggtgaaaagcggaaagaggaagagatgatagaacttgaggggcctctgggtaagagtgatgctgtcaatcatgaattggtttctttggagagagagttgtcaacacttcgcaagaatggcaaagttgatgcttttggtttgtacttatatggtcttgtgctcaaacagaaaggcagtgagaatcttgcacgtacagttcttgtag

SEQ ID NO: 92817 - DNA, 295 bp, Glycine max
gaaaaagtacgggaagcaaagaaagctaatagagaggcaagggaagctcgaagaaaagccattcaagaaatgagtgaggaagctagagctgcatttgagaatatgagattttataagttctaccctgtgcaaagtccagatgcacctgatgtatctaatgttaaggtaggtgtttgggcattctaactgaactttttggagttccaattttcaaattatcttaacatcttagtacaacattaatgcatcaatttctgtccttaaaaatggtaattcttccgtggaacatttaaga

SEQ ID NO: 92818 - DNA, 269 bp, Glycine max
gtagtgcatcatgatctacgaataaaggtgccgatgataaaacgtaaggctatcagatagcccgtattgatcaaggggaatcgggcagtactcgaggtctcaaatgtaccacaagagcgggcagttcggctatctaggccacaaacggctgcgttttcactcgccacggcgctaaatcccagcctgaaactcccgctgagaagtcaccccctttttaccctgctgtcgatggcacgaaactccttgtcaactagcataaattctaaccc

SEQ ID NO: 92819 - DNA, 267 bp, Glycine max
cttgatggctccttgtcaaaacattaccgcagtttggaagggttagtgctacgcgacccacaccgtggtttcggcatcgaggtttggccttttttagtttgctgctttgagggtttcagcaccgttgttctaggcttcaacccattctgcaacattgaagtttctgttaatgtcctaaaaaatttggggaagctgtcagctttgtggtgttctaatctggaactaagttgtacactgttggcattgaagaacgaagagtctagttct

SEQ ID NO: 92820 - DNA, 255 bp, Glycine max
cttgcactttgattcatattgattgagtcatctgacagtacatggttgcgaataggaattggcaagcactacaattgcaatccaaattagcttcattttatggtatccttttaccttctgaagtacgtaaaattatagtaccaaccaaaacaagaaaaaccagaacatacaatgtaggcatggcaatttttggtgatcttattgtgaaggtacaggactacaggcgtgttagaaattaagcttttgtgtttccat

SEQ ID NO: 92821 - DNA, 266 bp, Glycine max
attcatcttatccctcggaaaagtggtgattttgagaagaatgatgagatatatgatgcaatggatgagaaggagaaggaattgaaacaaaagcttgacttggacaaggagaggaaagacagaagccttgaagagatgagtcaagaggcagatgaatacagaaaacttttcttatagcatgtttgctaacagtagaaagtgaattctgtgtgcattgtgcgaccagattttctgagtgtagacaatcttaatgcacttccttgtag

SEQ ID NO: 92822 - DNA, 131 bp, Glycine max
ctccccggtatattccgcagccaaaatcccaaagtccagacattggcggagtttacgacaaaacccttcagaccccacatccaaatcgtcgtaaagtttgaaccgttgataccacatttcgattcagacct

SEQ ID NO: 92823 - DNA, 259 bp, Glycine max
cgatgttgctggttcttcacgttggttgcggtaagcgtgcataaacttatctatttattaatactatattagtatagtagtaattcatgtactagtatttgcttatcattatcgatcttttgctgtttcaagtgccctataacctgatccttatctactcgtgtttttttctactatttcttttccatttatttctgatactgaaagcgtgactttttatagtactttccttgatggtgttttgaacacgatatccaaa

SEQ ID NO: 92824 - DNA, 159 bp, Glycine max
cttttacaattcacttttttgcataattggtaatattaaatttgtaatttgtataggagttaaaatattcaggaactaataatgttttaatccctatttaactgacactcgtccacttgacgaccatgacaatgcttacaaaataatgcaatttttaac

SEQ ID NO: 92825 - DNA, 261 bp, Glycine max
gccgcccttttttttttttttgggacagaaccccatatttgggtttttaataaggcaaaagcaaattgcacacaaattcccaaaaaaaaacatgcttattcaccccaatttggttccatatcccaaaacccaacaggatgttttccccttaaccggtcccacccattggaacagaatttctagggaatttaaaattaaaaaaggctaaatttcttctacctcaattctgaaaggtctaccaccaaattttcaaaaaaggga

SEQ ID NO: 92826 - DNA, 255 bp, Glycine max
accaccgctgttctgaagctggcattgcattgccagggttgcctagacaggattggcaaaactgtgttgaaaaccaaaggttagttaattaattattattattattatttagtttgtctcttggtttggctaattgggcatgaacttggacatgatgatgcaggagtgcaagaaatggccattgacaaggaaaaggaaatggtgactgtgaaagggacaatggatgttaaggctctggcagagaatctcatggag

SEQ ID NO: 92827 - DNA, 255 bp, Glycine max
ttagcccactaggctcctcatggaattaaaacagtttaaaacttccaattaaccaaacaattctgttcttgaaaaagagaaggatcacaatcaatcttgcccaaaagccattagtctgattgccaaaataactttacatgagaattgttgagagaaaagaacttctttaagacttttacaatcaccaccataccgggcctattctttgtttgaagaagagccttgttggtcttgacaactgttaaggctgtagta

SEQ ID NO: 92828 - DNA, 289 bp, Glycine max
ctctaggcctgccctctctccctagggtttgtttcacttatgccttcccaactcctcagcctcagtctttcagaagttgaatgtagatgatacggaaggagagaagttgccctgtcctgtcggtggctctgatctctgtaaatgctcaatgctctccatcttgatttttgtttggtagaatagtttgtttctgaaagtaaggtgataaagcatggagtttttgaaaatcaaaaagttcagaaaatctcagaaagcaaatggagaaaaggatttggcagacaaggcagtg

SEQ ID NO: 92829 - DNA, 147 bp, Glycine max
  unsure (1)..(147): unsure at all n locations
ntgtcaatttcattgtctctgacataggtcagtttttaaaacaagtattgacttatattaaagaatggacttgtagttacccccttttagttatagctcattgggggcaaatcttaaagccactcactaagagtatttttattgaca

SEQ ID NO: 92830 - DNA, 291 bp, Glycine max
cttcagcgcaactgaggaagacgatcacggagtgatagttagtgagttaccgagttagggttttcaatttcaactcactgagtcaatcttacattttaaattttttattttctctttttcaccggagaaaactctgctccgatcccttctttcattgttttcgattttccggcgagtttttacgtattccggtgacactaggggaacataaatcgattctttgattacgtgactcggttttgacttcaaaagtctttactgaaattttctacttgctagattggctttgaa

SEQ ID NO: 92831 - DNA, 295 bp, Glycine max
gttactacaaatgcgtagcccgggttgtccagtgagaaaacatgttgagagagcttcacatgacattaaaagctgtgattacgacttatgaagggaaacatatccatgatgtaccattaggacgaggaaactcaagctatagcatgaacagaaattctctaaacaacacctccaacaacaccaacaccagcaatgtaacagctcctgctcctataaggccctcagcactgactaactattctaactcagcaagtttcacaaactcacttcatgacacaaagcaaccaacatctgc

SEQ ID NO: 92832 - DNA, 143 bp, Glycine max
gctagttattgaggatggtgaagtagttcatctcaaggatggtggggtttctattttgaaatatgagaatgacattgggagaacatggcgcttctctttccagagctttctcagtgcgacgtgcattatctgttctagagatg

SEQ ID NO: 92833 - DNA, 164 bp, Glycine max
gtttgttttgtgctttagataaaagttctgccaaatcaagaggggttttaagatcatagtgtgtgttttgcaacaatggctaagttctttgctgctatgatcttggcactctttgccatttccatacttcaaacagtggtaatggctgctatgaacaaggaggc

SEQ ID NO: 92834 - DNA, 156 bp, Glycine max
caagattcctgtgcatattcaggggaaaaagcctggtctaatatgcctgtaacaattccaattccttcagcccaaggggcgctaaaaggaaaaggactggaagagggacttcatctttctctaaacaattatttggtggatgcacatgtttacaac

SEQ ID NO: 92835 - DNA, 214 bp, Glycine max
ctcaaatcccagataccacatcacaacactacactttggtcgtgtttcatcttcttctccgagaaagagtcactccacggttcactttcactttttattttctgcattgggaaatgatgccattgtcgtccctcgcaaagcaaaactccatcatcagactcaatccaatctcgcttgcctcttccacccttttgggcacgtaagaatcctccga

SEQ ID NO: 92836 - DNA, 146 bp, Glycine max
gtttggattgattttagggtatgatggcatctacatccacatttcgttggccgatgtgggagctctcgaccgtgtcgtcgtggccaaggacgttggcgtcgtacataagtcatcggtggtccccacggaggttactagggtggtcg

SEQ ID NO: 92837 - DNA, 168 bp, Glycine max
aggatagagaagcagccgtttaaaatgttggtatatgaaggtggtgaagagagaagaagaaggagaatggtgacggaccaggatatagcgaaaggggtggagtatatgatgcgtcaatcagaccaaaactacctaaatacggttaaaggtgtcgttaagcagatggag

SEQ ID NO: 92838 - DNA, 215 bp, Glycine max
tccgctttcgtttatactccgaaaacccctagtttacacatcgctcttcaacatgaacacggcgtagatcatttaacccactccgaaaatgtagatccagggcagcgccagtgataaaggcaccgaggcggaggcgtcgacggcgagactgaggatgcggatgaaccataacaaggagaaaaagcaagatggatacgaggacatgacattggatt

SEQ ID NO: 92839 - DNA, 278 bp, Glycine max
gcctgctatcctttcttgttactcattccacagagtgtatatttcttggctactcaacaagtcaacaaggctacaagtgcctttcttctgatgggaggctataaatttccaagaatgttttattcaatgaaatcctgtctattcctctatccctgactttatccccaaccatcttccacttcgtcatctcttccttttccaccatttcttctcattctcacattgttctgcctccctcttcttccactgcctcttctgattgtcaggatgtcctcaac

SEQ ID NO: 92840 - DNA, 147 bp, Glycine max
cccaccgcccaaatctgatatgaacagtggattttactttaacaattccatggtttttctttgaagctccaaatccaatggcaaccgttcgatcaaactcgattaccgtcttcttcgtggcattcattatcctcacaacagcaccat

SEQ ID NO: 92841 - DNA, 99 bp, Glycine max
gcctgtgaatgagaggtgttgcattactacattgtaatcgtcatctgctgagttgttgattgccaatcctggtggcatacagctgaaatcatagctgtg

SEQ ID NO: 92842 - DNA, 289 bp, Glycine max
gagagaattgtatcgtgcagcttctcttgcttttttacaaaaggaacgggaaaccggatggtggtgcggcattgcttccataaccctggttatttttctaatctttcagaaagcagtagttctggttgacatagttcctgaacaagtctgcagaataagagggttggtgattcaaggcacgttggcgctgcatctgtatgccctttattattattattttttctctttcttttttaccttttcacaagtgtgggaaaagagcagaaacttatttgttaacttttaggag

SEQ ID NO: 92843 - DNA, 259 bp, Glycine max
aagaatgaatgagaactaattataaattttctgtttatctgagacggtaaatggtcaccggacacaagtagaggagaccatgaacattgttagagaggagatgaacctcttggttgaagcagatcaaccagggaatcagctggatgattacataacaagactaaatgccattctttctcagaaggctgctggcatcctgcagttgcaaacccgtttggctcattttcagaaacgtttaaaggaacataatgttttggtt

SEQ ID NO: 92844 - DNA, 283 bp, Glycine max
tgtccaacacaacaatgtttgttggaccttaaccccttgcatgatatcatcaatcagcatgagtacaaggagaagtactttaaaagcttaattcctctcggccttaaatatgctgagctttttccatggggagggaagctcacaagtgagtccataaattttttttcaccaattgtcatctggacaaagtttacctcaaacccagaaaaatatgatattctgtattccgcatttagggaatattacaaggtatggttgaaattgatatgcaaagcagataaag

SEQ ID NO: 92845 - DNA, 268 bp, Glycine max
ggaaaaagtggcatgaagatggttgttctattcatgagattgctaactttccaggtagatcggctcctataaaagaacaaagtgttgctgaatatctgctggaagctgctcaagaaggattaccttttgattgggctagatttagcgagatgataggactgacacaagggatcatatcagaaattcagggtgctatttcaaaagttggatctacagataagctgaaacctataaaaaatgaattgccagaagagataagttatcagca

SEQ ID NO: 92846 - DNA, 269 bp, Glycine max
gtttctgctaagttagtctgcaagtattttaaagatacaaactaatgctagttttactccctaaaccctaatcaaaactgctttctccaccaagcttcagattcttagggtttgaaattttattaatgattactcatcacttctgcttctattccctgtatgtgcatgcgaaaattggggatacttcagatttgaagacacagttgtattgttgtgtcttctattgttgaaaccaatgttcaacttggtaattactggcttttggacga

SEQ ID NO: 92847 - DNA, 270 bp, Glycine max
gttctctcggtttcctggtcccagatctggacctggacctcgtggcaagaggtgagctggtctactgaagacatttaggttttatgctggtcttccattatcaggggtgcgaaatattcatgaatcagtgttcacatgcaaatttagtctctccctcccagtcctggctacaatcctagttgtagagctcgcgatgtgcacatagtatttttacaggctaatatcaaactacaattgcattatgagcaaaatctaacatggagatttttg

SEQ ID NO: 92848 - DNA, 271 bp, Glycine max
attattttgggtgagaaacaggattttgctccaagatgtattttacattctatgctaacatcctcagttctactgtaaaatttgatatactggtgatttcaaactattaaatatgtcacatactttaaagtttgtatgctcacctattgtttgtttctgtgaatagaaaggctaactatcatattcaaaattcggtactaagttagcatctgtatatcttcatcaatatcactttcataaatttaattggtactccaggaacaatgttgtt

SEQ ID NO: 92849 - DNA, 259 bp, Glycine max
gaaagtggaagaaggtgttagggaaaatgttgagagatccaggatgaatgagcaagaagcaactcctagttggcatccatctcaagaaaaacagaagtttccgccgagggacaacttgtttccagataatagatttccatttagtgcatcagacaattatttgagcccaaatcattctttgaattcaacccgtgcagatggaatggctactcttcgtaaccaacatatgtacaaaggatatacttccacacttttgagc

SEQ ID NO: 92850 - DNA, 173 bp, Glycine max
tgtgattcatgtgaatctccaactgttcgcggaactcggggttggaaatgggttggtcgtggccggtttcatctaagcggttgtagacactgatccagcggtcgtaattgttgtagctggtggaggcgcacgacggcgaggaactctctccgacgccttccaagtccatttgc

SEQ ID NO: 92851 - DNA, 268 bp, Glycine max
caaaacccaaacccaaacccaaacattccattatattacactttacatgcaatggcgagtgcgtgggtgaaatcgtggcagtgcaagtcaagagctttcgaagacgtgtaccacccacaccccaaaatcctgagtgcaagctgcagaaagaccatggaaagcataaaagaaatggtggaaatacccaagcccaggcccaggcccaagccaaagacacccttggagaaacatccgagctccaaatacccatcatcagccaccaaacctg

SEQ ID NO: 92852 - DNA, 141 bp, Glycine max
attcaatcccttatctttccttccttccccatacccatttcatatcacttccttcaaacttttcaacttcactcttcaattcagttcaatttcaaacatgctttgcgtcaacactgccttcacctctttcttgcccagaaa

SEQ ID NO: 92853 - DNA, 263 bp, Glycine max
gtagcctgattttgctttcttagataagttcgatttgagaatgacctaaagttgactaggaggataaccagggagtggtaagaggatatggtgatttaagttgaggatcatgataatagtatggtatataaaggggaggattcttgtatgtatgaagtatgaagcacaaaataatgtatagagtttaggataatttgaagtggacctttgtggtcgtgttttctttttctcttttttgtgttgtgatgtggcttattgtataa

SEQ ID NO: 92854 - DNA, 136 bp, Glycine max
aattaccacaattgatcacctcaaagaacttcattatttctcaaggtgtacttgtttagattaagcttttatagtttagagaatgttatacttaaactaccgaataatttttggtgtaaaaatccaaacattcagg

SEQ ID NO: 92855 - DNA, 171 bp, Glycine max
ggcgagtgccaagttggtgctggcagtgattatggccgcgacgcaaaccttccgcaaccaaaacgacgaaatcgcatttgccgttcactcctccttcctcacctccggctatgtcttcaccgctatatgttcccaggccctctgcgacaatgcgtttgctgacccatccaa

SEQ ID NO: 92856 - DNA, 126 bp, Glycine max
ttttcaccttcaagtttcaattcttctattcacgcctgtgtcttctgattctccattatccattttattggttcctgctataatatttttagggctgcaaacgggattcttggcaaagaagcgaca

SEQ ID NO: 92857 - DNA, 262 bp, Glycine max
tggaagaatgactatggctatttgtgataaagaaaaggtaccactcaagcgtaaaggaacattttatcccatagctataagacttgctgtattgtgtggtatgctaggcagtaaaaaaccaagagaacaaactaggtatagagatgataatgctgtgttggataagtggacatactagacatgataggattagaaatgaattcgttaaagaaagttggggtaacacctattgtagagaagattttaggcctacttgtatttt

SEQ ID NO: 92858 - DNA, 128 bp, Glycine max
agctcgcgcttttacggctaatttcttgtgggcttgttgggttctgaaagaaggggcaaaagggtgtctgaagatagtgttgaattgcgatttggttaagtggaggtgtcatcatggagtgggaagat

SEQ ID NO: 92859 - DNA, 288 bp, Glycine max
gtactaactcggaatcggtcgagtatctatccgaggtcgtcggatctagaacctcggatcacctccatataattcacaaactgacacaggagatgaatgatcccaaactataagctaataatgttagaaggttgatggctactgaggtatttatacggtttctctgagaaaaaattcaatgttttgctactgtacggttaattagataattaagaaggatataggtgttcacctattctatagctggaggcagtctttactcgtgtgtataaattggtactgcataag

SEQ ID NO: 92860 - DNA, 277 bp, Glycine max
tgaagacatctcacatttggatcccttgttgtacatatactcttgattatcactttttctttctcctattctcaggtccattacttcacaccctctgtactgcccttattgatctggataaacaaacactatcaattattgaatgaatccataaaaaggagatgtttcacatgtttgctctatctcccctcaaaagtcaccatgattctaaagcagcctaaagtcattagaattgcagaagaacctgttactgcagttcctttgttatgctggttca

SEQ ID NO: 92861 - DNA, 208 bp, Glycine max
cttttctctgtatctccccttctctctgactctctctctctcttcagctcatccagcaccgagtcacatactcatcgatctcccgaatctctaccgtcttcggtcatcagctcgaaggaggcacacactcttcgtgagacgggatgaaggcccgcaaacggtatattgctgcagcgctggaacctgcagcattctcggatgcagtggt

SEQ ID NO: 92862 - DNA, 99 bp, Glycine max
aatggcgacgaatccaatcgaagcggggaacggcgacgccgctccttaaccctatacgcgactaccagaaccctccgtctacctccaagacacggaggg

SEQ ID NO: 92863 - DNA, 265 bp, Glycine max
caatcttctactcttaactcagctgctaaaggaccaaaggttgatttgggggacgatggttttggagattttcaaaatgcttccaaacccagctccgctgcgttcccatccactgcttctcctggaattgatatcaattttactagatctactgctgctgctgcttccaatcagggatcaggtggtggtggtgatccaatggacatgtttttcacgacgatttcttcctcggcctcaggtgaaggtgctgctgcggcctctgatg

SEQ ID NO: 92864 - DNA, 216 bp, Glycine max
accaggagtttatcctcgattaaattttgtaaaattagtttaatcagtgtatggtatatagtcatttcaagcaatttttttcttaccaaattctgccataattcaagtagcagaaagaaatattctttggtagtggtaaggcaactcaattttgtattttctaaagagtgattaataattagcaatggaacaagttgctcattttgatgtaatatc

SEQ ID NO: 92865 - DNA, 180 bp, Glycine max
ttcataaatagtagattagcgatgaacaacttttgacaataatccattgtatactagacacctagcaacagagcaagccccaaagatatactagttgacaatggattattgtcaaaagttgttcataaatagtagattagcgatgaaattttgtacttgattataaacacgactttccct

SEQ ID NO: 92866 - DNA, 281 bp, Glycine max
ttctataccttatcagtctacgcttctaattatctcatattttctctctcaaatcggggcacacttcggcggcgtgtgaggatttccatcggcgcgtaacggtgttagacgcgcgttattccaagttccccgatgacctatgcgttgtccgacccacattggatatttcacgccgcagagatggcggaatctcactggcacggccgtgatatgacacctccatggcttccgctgtccttacgaatcggaacgaccctatttagcaacggtatagaggcggt

SEQ ID NO: 92867 - DNA, 161 bp, Glycine max
accaccaccaggcaaagcttcaacagcaaatgtgtggaagaggtcgtggtactggtggtactgttaatgctcctaagaaaactttgctaaaacccctacactgggtgaaagttgctcgagcagccaagggaagtctatgggctgattcacagaaacaggat

SEQ ID NO: 92868 - DNA, 161 bp, Glycine max
aaagaacattaatcgatagagcaattgatccgtgaattgaaaggtaaggagatagtgcgtttgaatttttgaaagatagataacaacagcaacaccattatcactctaaaaaagcttcgttaccctgtggctgtgaaatccagaagattctgaaaacggat

SEQ ID NO: 92869 - DNA, 260 bp, Glycine max
attgtgccaagtgtcaggtctgaaggaatacattgcagccaatcctgcactccaccatgaaaatggcaccacaattgttcattccaaattgtctgatgcttctatttctagtgctgaatatgaggatgaaatgcaggatgagttttatgatgcaattactgctgattcatcaacatcagacgaagaaagtgatgatgatcagaagcttgttctgcaggagccaagagtcaaactaaagaatatttcatgggcaatcacaa

SEQ ID NO: 92870 - DNA, 170 bp, Glycine max
aatggattctcaggcaacagcaagaaggatctagggtggccaccattgatattgttacccatttgcaggttttattttgttgtctctgatatcattttttttgtattacttattcaattattcagtagattttttttttaaatcggcaaaagtatcatctatcgatctat

SEQ ID NO: 92871 - DNA, 169 bp, Glycine max
gtttctgaaaggaagaggccaaagttgcaccaaagcatgttaaagaagactttgtttaatgtcccttttatgcatagaagttactcttctctcaagtcacaaaaagagaatggcagaatgaaatggactagtaaattggaaaatgctaatgatggtttcatggagaaaa

SEQ ID NO: 92872 - DNA, 147 bp, Glycine max
gcagcaacaaacaagaggggtttgccttgtgccgtttgtgttgttttcgggacgaagaagaagatggtgtcaggttctggaatctgcgcaaaacgggtggtggtggacgcgcgccaccacatgctgggtcgtctagcctccatcgtg

SEQ ID NO: 92873 - DNA, 155 bp, Glycine max
ttcggctcgaggtttagttggtttggtattttcgttgtcattggcaatacttctctaccccagacagactgttacaagcaaggaagctcaggcatcagtagacaatttgttaggactatcattcacgttatgactttggcgatgccgttgtgttg

SEQ ID NO: 92874 - DNA, 141 bp, Glycine max
tcttcttcttcttcttcttcttcttcttcgttgaatcgcgattgttctgtgcgagagagagcagagcgagatcgaaaatggcgttggctttcgacgaattcggacagccgttcctactcctgaaggagccggagcagcagc

SEQ ID NO: 92875 - DNA, 196 bp, Glycine max
gtttagtcacggtggtggcgtgtgctaaaatggcgcgcgcgagcatcgatttcgtaacgtaaccctacctataagaagagaagtacgatgtggaagtggttgttctctcgggagccagcgccgccgccgccgccggtggttctggtaccgccgctcttcgacttccctcccctcgccgcgcgcaaccgcatgctcc

SEQ ID NO: 92876 - DNA, 199 bp, Glycine max
tctcgagccgaatcggctcgaggaaagtctaacagctccaccagaactggtgacatttccaacttcagtggcttttcgaatacacgaggcaatacatttctgtgctggtttcgacaaggtaaattcttccggggtaagtgattttgaaagggttataaagatacatgatgcctctaaagctgtgatatttcgtagctgc

SEQ ID NO: 92877 - DNA, 199 bp, Glycine max
atttttaccagcttcagatacctgaaaagagaagagcgagatggcgtcggtggtgaagaacgtactcaaatccgtcagagaaaagggtttcggcgctattctcagagagctcaaggatgaaggctacctgtttgtcccttttctttccttcgctcttaaatttcccccaactaatccattcaatattttgcgaatcttt

SEQ ID NO: 92878 - DNA, 184 bp, Glycine max
ctccaaatcaataagccgccagctttcttcctgcttgaatactgaaaagctacatcgttcatgatagtagacaggctgctgctgcttttgctgctcctctagtggttgattctttccaaggttcatgataagcatgtcaagatgctccttctgtatgttgtagatgccgtttatacttaaggtc

SEQ ID NO: 92879 - DNA, 184 bp, Glycine max
ggcactggtaaaggtttcaatctcattgttgccagcttttgtgtacatgctagtttataacaacttttaccaccttcttttaaaccaaaaccctccagaacaagcttttttccctcattgtctcaaagaaagaaaaaaaatggccccttctggaaggacaacaacagcatcaacaaggacaact

SEQ ID NO: 92880 - DNA, 179 bp, Glycine max
attgtcttaatgttagcaatgtcttcctctttctccatccatttcttcctcctcctctcaatagcccttttctcagtttgttgcttagcagcatctcaagctcccaccaccaaatcacacccctatatccttcccattaagaaagaccccacaacaaatttgtactacacttcagttgg

SEQ ID NO: 92881 - DNA, 268 bp, Glycine max
tgacatgcaagatgcaatgaagcaaatgccacctcttccttttaagatcaatgaaacaatattcaactccatactttccaaaacaaatcaacatatgcaataacgatgcttgctcattcattatgatacctgggcttgcttcttccatatttatgcttgcattcaaattgacccagcattaaagaacaaagaatggaataagttgaccaccacccagctgaattagccttcattttttgtaactttctggtttccctgctcttgctcg

SEQ ID NO: 92882 - DNA, 224 bp, Glycine max
cttttcttgtcaatatgggcagttagtctaaaaaaaaaaaaaaaattaaatgaaaaaaaggtcagtaaattgggacaaaagaaacaagaaaaagcaaaaaataatgggggcggcccccgctaatgggcgcgccctccccggctttggtttcggcgcggtccctgctgcggttcccctctctccccgcggggtctcttctatgcgcctcggtccgcgaagtgctc

SEQ ID NO: 92883 - DNA, 268 bp, Glycine max
atcacattagaacaattacatattagttcatggacaagctcttactttagagctgggcaccaccctcctttacttctttttatattccaaatgtcctgtgtccgtgttcccacaccttccctcccctgttcaaaataccattaccatatcaaaaaccttaaccccattaattcataccctccccaccttcccccccgacacataacagctttcgaaccaaacctgttccttcttccttaatggccacaaacatcctccaagcaaaatg

SEQ ID NO: 92884 - DNA, 264 bp, Glycine max
gctcggtttaggatttgcaattgctgaaactatgctgtctggcgacattgacacctcaaagttgttcaatgattgcaaggagtacatagttaccacttctcaaagtgacggattccatgagaaagtcaatgaacttgttcaggtgggtaccaatacactaaagctatagtgactaatttataaagttatactgtagctcccgatagtcttttgaaaggtctctaatattgattctcaccttaaggaagaattttttttttcctg

SEQ ID NO: 92885 - DNA, 265 bp, Glycine max
aaatttctgtattggtgggacctttgagttttgaagcgggaagaccgaagatgaacgaagcagcaacttacatataagtaacgctccttcttctacaagcttctctctctgtctctcactctctctctctctctgccttttccacccatggctcgaaacaaggaagcgttgcttttgctgcttgatgtgggcccgtcaatgcatcccgctctttctgaaattgagaaagtctgctccatgcttgtgcataagaagctgatctata

SEQ ID NO: 92886 - DNA, 250 bp, Glycine max
aaatatgccatgactcaaagattccactaatggaaaacataaaaaggtgcaggtgggcagttcttgaaactacgattgttcgtttttgttggaatgaatcagtggttaataaaattgtcacccttgttctggatagcaattattaggcaccattaaacccaatgagtatgtttgcatcctccaacattttcagtttacgatagtgaacagtatgcataagaaagaatgttgtgtttgaacccaggctttt

SEQ ID NO: 92887 - DNA, 258 bp, Glycine max
gtgttatttgatgcaatgaacagcggatgtgttttctgggaatcaacgtgaaggggaagtacatttgggtgttttgcaacagtggtttgggattcactggtggagttctcgggaatttgctctgttggttgtcttgttcttaattttgcttccattggtcttgtaccgtcgcgtaggtcagtgcccactacatctttatttgcgttttgacttctaatttgatcctatcccaggacccagggtgattgatgtttaggt

SEQ ID NO: 92888 - DNA, 258 bp, Glycine max
aactttttcacaacctcaaaattctcagcacaattctgctcctatgcatgtttcctcactcactcaagtgccaacaagcatacctcaatggcactgtctatgactgttctgataacccttcagtcccaaaaggttacctttgcaatggccttcagaagtcatgcacttccttcttacttttcaggtcaaaacctccctatgatagccccgagaaaattgctaccttcttggctctgaggcatcaaccatagcctcaat

SEQ ID NO: 92889 - DNA, 257 bp, Glycine max
ctgaagagagagaaagaaagaaagagagagactttcttcttttctttctctcatttctcaatgaaaggggaagtgaaaatgaagtcaaagatgaaatgggttggtctgctcggccttgtgctctcggctttctctatcttcattcatttcctccttgctagattcactcaaatgggtgttgcagaatatgagtcctctgttacaatcttctcttggagaccgtctttgagaaaccaattccccccacaaatactccc

SEQ ID NO: 92890 - DNA, 258 bp, Glycine max
atcttttcccacaaaatttgtcatcatggactacaaatgggaacagaactaggtggtatcgaatatttttggggtgtgtcaaagtttgtgaaggaacttgaagaagtaaatgcatggatcgaggggaccaaatgacattacctggctctgcatcttactatatgcagagaggaatacctggtgctggaaaccaacctgtactgcacaattcacctaatattgaccattgtctaaccctaatctaccatgtcaatcaag

SEQ ID NO: 92891 - DNA, 261 bp, Glycine max
accgattagagagaaaccagttagatctgttcagtgctgccttccaagcttggcttcttgtcgtagcttcagcgagaggaagaggaagacaagtcctgcaatagcagctaatggaaaagcatgactcagatgagcaatgtaccttcttagacataatcatgatggaagttaaagatctatgaattgaatatgataatgtacatctttacagggataactttaagatgtacattatcatattcaaagttatccctgtaaaga

SEQ ID NO: 92892 - DNA, 251 bp, Glycine max
ggaggattgtgcagcagcatgcaaatcaatacaaaagaaatgcttgggcaaagattcttcagtgcctatctattcagggccttacctcatcaggtggtgggagtggtactgctggtggtgacagtggaactggaagcagtagtggtgcttcaagagcaattgtgaaagacaggtttaaggcattcaatattatgtttgaggaactccatcagaaacatcgcaatggacagttccagactccgagttgcgag

SEQ ID NO: 92893 - DNA, 249 bp, Glycine max
ctcactttaaaaagcccagtagccgaaacctcaacaaaagcactgtcttccttcaaatccggctgagcgatgtagatattagggtttttgagttcggtgcggcgatcctagcactctcttctgcagctttcgccgacagcttcattcaccatggctgagcaaaccgagaaggcttgtttgaaacaaccagaagtgtttctcagctcgatgaaactgggaaggggaagagacccggaaagggtggtaacg

SEQ ID NO: 92894 - DNA, 267 bp, Glycine max
gaaaaagaagcttttacaacgcacttttcacgtcgttagttcgaaaaatcgtcttagaagaatacaaatacacacgtcctacatgggtaacatatgcagttcagatgatcgtccttcaagggtcagtccagctgaatcgagtctcgtagactcttcttcatgccatgatcgtccacttaacttggaggtcactactgctgaaagagagcacgaagacatgatcagtggaaacattggttctgtgaataagaaaattacttgggaggt

SEQ ID NO: 92895 - DNA, 261 bp, Glycine max
caaagtgtctgctcacattacagtcgctatggaatttgcaaatttggaccagcttgtaagtttgaccacccgataaacttgcagcccgtgatgattcctggacttgagcaacaatcctactcaaactcagctagtgctggggtggctgggataggtggaagtacaggcgtaactgatgcgacaattcagcaatctgtgtaaacatgtttgtctgaggatcttcttgctttgaggatgcatatcaccccaaattgttttctt

SEQ ID NO: 92896 - DNA, 260 bp, Glycine max
cgcagaccagacacgacatcgaaatgtggtgttcatgctttgtaggaaattgttatgatcatcgatcttggatgcgagtattattatttttgcaccatcttgcctgtcagttagtgatgagtagaacatgtatacagtctatagacatgacagcttaggacttaacaaaataaataaattatattgcttattgctgttatatctatactacagttggggatggcaaaggagtcccaaccacctgaactccccccaacttt

SEQ ID NO: 92897 - DNA, 240 bp, Glycine max
ctcattctctcttcctctttctctttctgcgtctctttctgaatatttgaattttttcgtttcaaatcctcagcattgaaaccaaaaatgatcttcaaatagcatcgccgaagactcaaatccaccccaatataaagggctctcacaaaaaggggtgaaagaaagatcgaaacttgaacactgaaaccacgttgaagttgaaagtggctgaaaggggttatggagagttccgttggggga

SEQ ID NO: 92898 - DNA, 258 bp, Glycine max
cagggacgcgtcccttcactgagtacaaataaatctgaaccgtttgaaaatctcgcacctaatttctcagtgtttgagaaaatctctctcagttctccgtttggttattatctctgagaaatggataagaggctcaatggacccaccgtttcgtccagctctaacggcggctccgccgtgggacgatcttctcctacgcttcaaccaaactacagtagccgattagttcaggaagcattggaacacttggcatccatt

SEQ ID NO: 92899 - DNA, 146 bp, Glycine max
ggcgttgttgttttcttttggtgaggtatatgtttgaaggccacatgggacgaaaatgaagaccattctccggttttgattcccaatttcattttgattctctgaagttgaataatatttttttattattcccattatgtaaacaa

SEQ ID NO: 92900 - DNA, 134 bp, Glycine max
caacgtctgagtccctttgatttcccaaattccgtgtcatcactcatcaccaccaagaatcgaatcagaatttggaacaatcaatgaattgagttttcatccctctcatctctacctttctccgttgagtttag

SEQ ID NO: 92901 - DNA, 272 bp, Glycine max
gccctgtgcctgctaaaaatcaagtggttgcttcgaatttgaactcagcatccctgccattttacccttcaggctcttccaacaaagatgatgatttggcacaaagaagggatgtgcaaacaggtggcagtagcaggaacattagtgctgttgttgtggatgacggttttccagttcaacaaaacaatgcacagcttcggggaaagaatgttgttgattccattagcatggcaaagttgtatatcgatggatccgtccctcctccatctgtt

SEQ ID NO: 92902 - DNA, 271 bp, Glycine max
ctagctctgagatccttttcacattcatagaatgaatactctattgctgccttttctaagagatccttttcacattcatagaacaggcagcaatagagtcaccattctactacagattctggaaatcaaggttccttttctgaacattgatgagaacacaattcaagaaaacaagccatttactgacatgcaattagcaaagagtgtcagctcaggaagtttgagctcaatggactggatgcgtggagctgcaatgaagcctgctttcatt

SEQ ID NO: 92903 - DNA, 206 bp, Glycine max
acattgtccacgacagaattagaaggcattatatttagattttttttttattttaatgatggggttaggggcgaaaatggcgatgctgattgtcgtagggggcgtattatcctttgatgggtcaagatgtttgggtttgatttattgagacatgcatattggaaaattttgcactgaattataattatattaattatatcgtgcca

SEQ ID NO: 92904 - DNA, 255 bp, Glycine max
gagaatcacaatttatgtatttttctttttaatatttaattaaaataaatttcaattcaataaaaaactaattttataatggtcaacgataattatttgacagtcaaagtattgatttggatggagggaccaaaatcacttttttttaaagggggactaaatgtctcaatttaaaaatagggggaccaaaatcacttattgacaaaaataaggggactaaaattgcattttagcctttatatttataaatcattc

SEQ ID NO: 92905 - DNA, 267 bp, Glycine max
ctctttgaaactcatcagagccaaagctgttctcttttttcatctgggtatgcaatttccttcttgttatcctctttggtctcctggattccataatctgtgttaggaaaacttccacatccaaggtttttatttaccatcatcagcataatcgagttcttgttttgttttttagctttgtaatttcttccttgtaaattaatgaagttctctgggtgttgtcgtttgatttaatttgtattgggtagatcttgtgtttttgctgac

SEQ ID NO: 92906 - DNA, 255 bp, Glycine max
gtttcatcttctgttctgggtagttccacttctccaaggacacttcacattgcttatccccaacaacagtgtactatagtttctcttccattttccacttttcccttccttcaccatgaagattgcgtaattttgagacaagggccaaaaggggttctgaatttttgtgtggttgtggtggttttggttgttgactcgttaaagtcagttcctttataagcatagtggttagtgaagatgctttatttttgagac

SEQ ID NO: 92907 - DNA, 158 bp, Glycine max
aatttcaccaataaaggagtttgtgggacacactagaggtgttattgcaatgtcgtggtgtcccaatgatagctcttatttgcttacctgtggcaaagatagccggactatatgctgggacatgatttctggagagattgcctatgcaattgccagct

SEQ ID NO: 92908 - DNA, 250 bp, Glycine max
caaaaccttcggaactctcagcctcaccccaaatcaaaaatagggaaaaaaataattttatctatttcatcccattactgaaaaattttgtctacaatttagcacaattagagtacccttttggaaattggggtttgccaaagactgaattttgggcctaattggttgaggtttatagttttataggttttggcggctgaaaccctgttcgggatattcagttattcggcttactgtcagtggctatggc

SEQ ID NO: 92909 - DNA, 147 bp, Glycine max
gctttggaattttgcaagggaatcgaacacggttgtcaatcctttggtcagcttctcgtcacttcattcgttccccactgacttattatttcgatattcttttctcgagagaatttcactttcccggaaaatcactccgctcctcct

SEQ ID NO: 92910 - DNA, 244 bp, Glycine max
ctcacttcgtgcaggtaacgcatgctttttttttttgttactttccgatcgaaggaaatgctgtttcattagatggatagaacccacaaattcaactggcttatcaccttcactattgttattactcctcggtggctcttcccagcgccatgaaaaattccaattaatgtactatcaacttgaaaatttgggctaatcccttctttttttcttctgggttttctcttgtagattgcaggagcat

SEQ ID NO: 92911 - DNA, 189 bp, Glycine max
tgaggatattagcaagcaaagatgacttgatacagttattcgcatcaaagaacctgctagtggagtagtggtagcgagtttagcgtacttttgcatggcatctatctttgttctatcctcattcattcctcacttatttataatacaattcgttaaattgttgcttcgattcgaagcgaactacgtgtt

SEQ ID NO: 92912 - DNA, 244 bp, Glycine max
gttgcacctcttaataacatcaactcattacttgcttccttcccttcctcttcttctgctcattcatttcctttcttcttcgtttgcagaacaagcagggaggctggccttggtattaggagaggttacaattagcggttcctaagttaagcatgataaaacagtcgtcaagtaggaacaacagatccaaaggcatcaaggtcaagcatgttctgcagattattctattgcttggtgtttgctt

SEQ ID NO: 92913 - DNA, 243 bp, Glycine max
gaaaaagatctagacatttccacacatatatgttaccaccatgtccatggcctccacgaccagggacgagtcctccgacaacgacagcacctgctcctccataaccctcgccgactccacccgcagctggctcagcaccttcagcttccgccgcagcagcagcagcaacagcagctccctccccctctgcgccgccgcccctgacaccacaaagtctgcatcatgggaggccatgcggcgcct

SEQ ID NO: 92914 - DNA, 197 bp, Glycine max
gcagatcatatggttatgctttgcaagccacaagaactattcgattccctccagcagatagcgactaaatatgcatgaattcacgaagcatgttttaattagttttatttcttgtctttgagtttgacttgtgctaaaattttaagatgtcgttttaaaccacgagacaaatcaataaagcggagagatatattgcc

SEQ ID NO: 92915 - DNA, 236 bp, Glycine max
gccacaaacattgaaattctgtccaaaatgagagtcattattgctgtagttatggaagaccctataaaatgtgaaaggtatttcctttattgaggaggaagtgcctacctttttccattattttaattatgacggagggaaatgtctttgcttcaataatgtttggcatgcatagagttcaaggccgagattttggctccaatttccttgatacacttctgttgatgcacaatagc

SEQ ID NO: 92916 - DNA, 231 bp, Glycine max
ggacatcttccaggaatgcccgttgaacattttgtgctctgttttattgctggcagctttttgggagttctttggtactcttcccagtttacgttctagaattatttttgatactgagttcttaaatttattatcttattaatacttacgaagtcctctatttgattggggaacatgccaaaacaaaatttgattgaatggattgcatatggtaatcgaagtttcaattag

SEQ ID NO: 92917 - DNA, 231 bp, Glycine max
ggggaaggtaatgatttagtggagagctttcatatgctctatgctatgcatcagaaaagtgtaaactccgttgctgttatataagaattgttttttccactgcattagagcaatgataggccaaaactctgtggtactagttttgtgtgtcaagtgataaaagaaaacagcatgcaaagataattggacttgtcatcgataatttatttaactatgcatgtgttgctgcac

SEQ ID NO: 92918 - DNA, 271 bp, Glycine max
gttccagacttcccagataagcaaatggttgatctgaaatctctgcaaggaaacaagtcaaaaccaaggaaggctttatccgatattgataatttgttgaaaggaatgaatatgaataagaagacacctcttaaaaaggctgtacagtgccctgggcagcaattagcttcacccacccctccaagaagtccatttgcttcgttgtcattgttgcagaggcacatttcacggtcaaaacaatcagtggatcctttttcggctcatgaaattg

SEQ ID NO: 92919 - DNA, 264 bp, Glycine max
gagccatttagttcctaaaatgcttgaatttcaatgacaatgtgaactccaatcacatcattgcacactgtcagagctgctaagcataaacacagtaccacagtggccataaacaacacattctgaggtgattagacttataagtcagtttttccagcttatgcaaataatctgtttcactgaggttcctcagtactagttgaggcttcagaacgccttctctttgcttcattgtcacccagctgcagtgaaacacacaaatct

SEQ ID NO: 92920 - DNA, 261 bp, Glycine max
gaagggaatcttccttatcacatgcactttttttattctgtctatgtttattggtattttcggacatactttaggttgtgtctaatatccttgttgttctgtctccttcctcttactcactgcatacttgcatactatatatatatatatatatcttaaagtttttttttcgtcttcgagactggggctagaaatattttttttggtattattatttaaataaatgaaaggctgaacctccgaacactgagaaagctgtga

SEQ ID NO: 92921 - DNA, 265 bp, Glycine max
gagagagcagaacgtgaagcattgggaggtttgcccctatatcaaaataccttcatgaaatacttgatgcactcaaggaatggatcgttggtactttctttgcagtatttccctgccaaggttagatggtgaaccatttgaattcaagccaaggttttgaggagattgatagataattattctggcgagcgagcaatgtatcaaataattttagttctttttttcttttatacaaggattcagactgcaccttattatattgaat

SEQ ID NO: 92922 - DNA, 144 bp, Glycine max
gttgatttttctacacatgaagctgctgtagcttgtgttgatggcgtaaataaatcagaattgggtgatggggcatcaaagataaaagtgagagctagactttcaaatccgctgcctaaaacacaggctgtcaaaggtggtatg

SEQ ID NO: 92923 - DNA, 267 bp, Glycine max
cttactatatatctcacttgctttcccttcaaacccgcaaaactacacattttcccttcccctgctttctctctcacattcacaattccatgcactttttctctgtagctatctaacaacttggctttagaataaaatgggcaattgtcttgatctttgtaaacccagttcagggtcttgcatcgcaaaaaaggttaaacttgtgagggtggcaaaacgagatggtaagatcctagagttcagcaccccgatccatgtcaaagatat

SEQ ID NO: 92924 - DNA, 265 bp, Glycine max
gtgaaaacggattgagaatctctctctcattctctctctattttatattttctttcacgtcaattagggtttttttgctggcgtgattctgaaggcttggatctggatatcttctttgtttctgattgggactggatattctaaactaacctttcgcgaagactaaggagcaaatagagcttctttgctatggaagactcggattcagttgctacactgatagattctactacttctaagatacaacagctgcagaaggcatttg

SEQ ID NO: 92925 - DNA, 264 bp, Glycine max
cacatgcatataataaagaatgttttatctggttgcttgcttaccaacccaaaaagtgactatgacataaagatctccttatttgttttaaagatcatgatattttgatacagttttctttgttgataactgatgtgtatagatactgtatgtaactcggtagaggcttttctattaaatgatttaggattttgtaatgttccacaacaacaacaacatcaacaattcaaagcttttgccactaagtggggttggctccatgca

SEQ ID NO: 92926 - DNA, 263 bp, Glycine max
aatctgtaaaccctgatttttcttctttgtagaaattcggaatttttatgtgacaaagacgttatgattatctagtttttttctttttctttttttccccctgtacaacgatatctggctattttgtcaccttcacctattcttgtatgtttgattctctctgcttaacgtaactttatcatttttctttagagattttgctgcatttgacagttgtttctttcaattccgtccaacatttgggattcgtcgtttacttgagg

SEQ ID NO: 92927 - DNA, 264 bp, Glycine max
aattcggctcgagatcgtatacaagctcaaatccaaaccctaaaataccaccgccgttctcatctctcttcccagccctcacctcaacgctgcatcttcacgtcgtctcacgatatttgaaggtttcagtacttattcactcgatcccctttaaagttcaattaacgtcgtgttaaatcgcataagcatcttggtgttgatgcagaggtgcatatagtagagagggaaatgagtcgaggaggcgagtagcagcgcgaggggaaa

SEQ ID NO: 92928 - DNA, 259 bp, Glycine max
gcatcatgcaaaaatttatacaagtcaatcagcttccactttcaagtcatcacttttccttcagtactgatgcctcctttgaaaactcaccctgacctccacatgcatattcctgataaggaatagaatatctaaagctgtttgtaagagctgttaacatgcttgccgcatttgtcagttgaaagcaactatgacagttaatgagtttatcttcgtctctttcgtggcagtggtttattgaaagacaagtcaaagccca

SEQ ID NO: 92929 - DNA, 257 bp, Glycine max
aattaatcttaatctctgaatgcttccatctccgtccattttaagtatcattgtcgtcatgcgatattatgctttattggaagaatctccaggtgaagaaagagcatcttagttgctttttctgattatccgagctttgaaaatatttggtgtttgttgctgtccaaatggagtattgattgtggtcagtggctggttttggaagtggatggcccttgatgaaaacagttagatatcgcaagtcattttttttttgt

SEQ ID NO: 92930 - DNA, 263 bp, Glycine max
atcaaatatcaatatggagaagaaaaatggtaatacaatcctattttttctctctttatgtcttggaattctaacatggaacgttagaataaagggtttcttgtcttttttgttttacttcaaggttgtgttcatttatgtctctcaaacatggaaggcatggaccaaaactagagttaataactcaaattgtgaacatgtgaagcagagtttggactacattgagagaagtgcaagagtgagcaaagaagacgtagttctgg

SEQ ID NO: 92931 - DNA, 237 bp, Glycine max
aaaaggaacaggtagatgaggcagaaaaggatcaacggcgtaaagagaaagcagaagctgaattaaaaaagaagcgtagtttacaaaagcaagcttcaattatggagcgctttctgaaaagaagtaaaaacagtccctctccatctgagaaggacaaagtttcaactaaatcaactgcatctgatttgttaagatgcaagattaaaagtttgtttgagtcagctacactttcaatgg

SEQ ID NO: 92932 - DNA, 263 bp, Glycine max
atcactatgaattttctgtttttgtaacaaaagtaagagaccgagggattcccagttgacaccaatgctcaatcaggtgaagtgtttgtgtgtgtgactgagaagagaaagagaagtcgaatcttttgctgtctgtctctcatatcacaactcacacctctcttttgcttgaagtattcaagggttaggatttatcttcattgctgttgagaaaagtttcgtcctttcttgctcttctgttcattcgttcattcatcttttgg

SEQ ID NO: 92933 - DNA, 141 bp, Glycine max
gttcaattgacggaaatcattctcctgaaatgcttttagatagatgtttagttacggacatgactgaatcgttgagaagtgttgtatgtgcttccatgggtttccggggtagtattgcttctgctgattcctcgtgcaagt

SEQ ID NO: 92934 - DNA, 233 bp, Glycine max
atattttatcaatcaaacataactctttgaggaaatcacacttccccggccgtcatgagtcagctaattaattggtatgtctaattttcaccaccaccttatcgggtcttcaaaatttaatgctattattctcagatttcttttcttgttcctacattctgactttgcatctgtcactgttctgagaactgaattttgttgaattattagaaaaatagaaatagattcggggt

SEQ ID NO: 92935 - DNA, 158 bp, Glycine max
gggttttattaaaagcaactgaggaagagaattaacgaagagaaatagtgaaagattgcaacgacgcacgaaaatggcgaccatttggaagacaaacgcagcgagaaacgcagtgcgtagtttgacgcagtccttgccattcactgcccgcacacctt

SEQ ID NO: 92936 - DNA, 244 bp, Glycine max
aaaaatatcactatgaattttctggtttggtaagagaaaaagggattcccagttgacaccattgctcactcagggtaggatttttcttcattgctgttgtgtaaagtttcttcctttcttgctcttctgttcattcaacgctggtttggcctctcttgagcttcttcgttcatcaaaggaagatgggctaatcgagcatttttatatatcttggtgtttggatccatttaagtgttcacgcagc

SEQ ID NO: 92937 - DNA, 245 bp, Glycine max
aaagctgcctcaattcaaggacatgaagctgcccaacccgaacccgaatccgaatccgtaagcggttaagttcagtttgcctgaagatgatttatctgatgatgaattagacgagtatgacgacgagttcgacgacgagtttgatgacgatgatatggatgatcctcagcatcctctgaataagatgatgatgatgaagccccctatgggtgctaagcctcctattggtagtgtccctatgggta

SEQ ID NO: 92938 - DNA, 246 bp, Glycine max
ctctctctgattcagtggagatgaacacttgccagttccggctcttgaactctttctccacttagtgtgccagccaagaaggactcttcatggctgcaaagcgcgtgtaccaagtttggaaaggaagtaataaattcatatgtggagggaggttggtattcgggcccgatgctaggtccctgtttgtcaccttgttgctgattattgttccagttataatcttttgcatatgtgtagcaaggcatc

SEQ ID NO: 92939 - DNA, 244 bp, Glycine max
gcagcctatggctctagattgtgttgtgttattttttttcccagttgacctctagattgtgtgtgtgtaacttcatgaatttccataccatatgtttagaagttagaaccatagatgacacagactagttgatcagggattaaaaacagaaattacacgtgattatcctgtcaaactccttgatgatgtgacaagtcacttggttatcaatgctactataatgccatcaattaattttattact

SEQ ID NO: 92940 - DNA, 237 bp, Glycine max
aggaaacgcctttcctgagaagtcggaaggaagagagtgagagtgagagtgagagtgagagagatggagtttggatttttgggtttggggataatgggtaaggctatggcaatcaatctgctacgccatggcttcaaggtcactatttggaacagaaccctctccaagtgtgatgaactcgtgcaacatggtgcttcagttggagaaaccccagcaactgtagtcaagaaatgcaag

SEQ ID NO: 92941 - DNA, 239 bp, Glycine max
cgcaattgtgctttctgattctcgtgcaacaaggagctctttcattttgaaaatggggctctgaagtctgaaaaacgagaaatggagacggagaaaaaacgttccaagggaagcttccttagcttctttgattggaacaccaaatctcgaaagaagctggtttggaacgatcctgaggtttcaaagcaagggaaggaaaatgtggagaacttaccgaagtcacggctcactaggtgatg

SEQ ID NO: 92942 - DNA, 235 bp, Glycine max
ctttctgattgccttcaaatcacacactctcttcaatttctagggttttgctattgctttgcctccgttccccctttctcacaaaaacaacgccttttctcttctccttcgtatctattctttgcgtttggtttttggttgattgaaggcattcacagcgtaattcgttgctgcattttaatcgatttatctaaccaggactgaatgacctaatggagtctaaatatgggaaaaa

SEQ ID NO: 92943 - DNA, 239 bp, Glycine max
cgttattctcttattcatccttctcttctgaataatccagatctctttctgcccttttctccgtcacgcttttcgtgaccggatctgtatggatttgatccagatctacacgccgatggtggttttggccgggtctttcatagatctggtgcgtagaggctcagatctacggtaccgaggtgtgtgattcatgttcgtcatgcttttggaatctgtttcgtagaaagtcgtttggtctt

SEQ ID NO: 92944 - DNA, 233 bp, Glycine max
ctttcagaacactactgtactttgttgtgatcatggagaagagctattaacgttgtttttggacagtacttcggagcttccttaacttgtttgttaattggtttcaggaaaatagaaaaagaaaaagaaaaatgattggaaacttcatcgacgacattgactgcggcagcttcttcgaccacatcgacgacctcctcgaattccccgacgacaacgccgcgccggtcgctcct

SEQ ID NO: 92945 - DNA, 233 bp, Glycine max
attcaaaaacgcataatttataattaatatatattcattaaagttttatctcactaatttacctaataaaaacttactaattagataaaactttctaactagataacatcaccaagaatcccctaaaatggttacatctaaattttgtagtagtaaggcactgctattttctttgaatggaaatgaggattacgaatacaatttgactattttaatgatattcggtgcattga

SEQ ID NO: 92946 - DNA, 234 bp, Glycine max
aaaaatacacagtgagctctcgcttctagccctagggcgctgctcccgattttctctcttcggattgatttttactcagcttttgtgattttagagtgaattgtgaaatgggttggaaagctgctgagaaactcattaggcactggaaagttgtcagaggggataatgttatgataataaggggcaaagataagggcgagactgggactattaagcgtgtcattcgctctcaga

SEQ ID NO: 92947 - DNA, 233 bp, Glycine max
gaatgaacatgtttttttctctgtccattggttcttctgctgcattgcccctcagatgcacctccaagctcacttctttcagggttgttgctgatgcggatggcttcccttcatttcttcccagagaaattcacaacattcaagacccttttgccagaaaattcgccttgcgcattcagaggctacccgtgcctgttaggttctcagaaaatcccatcatgagtagttgtgtg

SEQ ID NO: 92948 - DNA, 272 bp, Glycine max
aaaacccccggtttacagggaaacatcactgaaagatttcattgcttactatgataataagggacttgatgggaattcagctcttgaccattttatgatatcgcgttaaatatggaagtgtaagtctgattattcattggctttcacaatcagttattaagttgtcttaaattgcaatgatcatgcttcttatgagcaacatcaaccggttacagacataattttgaatgtaaatttgtgcacactttgacatacaaagtatcttctaaatg

SEQ ID NO: 92949 - DNA, 268 bp, Glycine max
cggctcgagaaaattattgaatatcttatctagacagtatggattgaaacaatgtatccacagtgcaacatcttagagattgaaaatgaagacagtatggattgtaggcatattgaatatcttatctagccaagatataaaatgaacaaaacaaaaacttccaatcttaccttgtagcaagctacacaatctctccatccatcagattccttgtgaaatgccttacaaaaggttccattttcataaagagagctacattttcaaggat

SEQ ID NO: 92950 - DNA, 260 bp, Glycine max
ctggagagaaaataacagtagaagagaagacaagagatcaagaaggcatgaagatgatgacaaatttgaggggagagaaaataacagtaaaagagaagaaaagagatcaagaaggcatggagatgatgaatttgaacacaagtcaagagaagatgggtataggagagaagaaaaaggatcaagaatggatgattatgatggtatggagcttgagccaaaagatcaacgcagaagggaagacaaaaggtcaataaagccag

SEQ ID NO: 92951 - DNA, 251 bp, Glycine max
gaaaatccatttcactgatgcaaaaccctaatccctttttctctctcaatgagcacagtaccctaaggtaaccacgagaagagatgcctctccaatagcactcggaaccccaaatccagtgccaattcttcaccctcccctccttttcgcagacgaaggcgcattctattctaacgttcacaagataggaaggcaagactaaagattccaccacctgatacatgctagatattcgaggtttgatatggctg

SEQ ID NO: 92952 - DNA, 262 bp, Glycine max
agttgcttcaagttaaaatcagttttgaacttagaatcaattatttgacatgagatcaatcatttaaacatttacctaaaattgttggctggtagactcaacgtgaaattaaacatgcacatagacagggagtaaaagtttgtgatgagctactagaagtttctgtactataattgaacttctacatgcttatcaagcttggaataagttgaactgtattttttaagtcatggttttgcattttacaatgttgataagcaaa

SEQ ID NO: 92953 - DNA, 250 bp, Glycine max
tccagtagtacgtaaagataattgagttgcatgcgtacgtggcttgctttaatttggagctacttatatgataataataaccatattaaggttaatttcttgactggatacatgcatggcggtatttgtaattgcaagtgagctttttaattttcttctgcatcgtgtgcacgaatggttggggggaagacggagatccctgaagtgagaaaaaacaggcaagtgcaagagcttggaaggttcgcggtgg

SEQ ID NO: 92954 - DNA, 257 bp, Glycine max
gaagaaatttctctacaaatggaggatgtaacaagcaaacccatgccttctgtacaccaaggatatgaaaaggaatcagagtttgcagacaaaacttcttccattcaaagattagagactacttctccccctacaactgtcagcaaaatgttaccgaattctgctggtagtaatagggagtccaagtctgaaataattggaggcaagaagactcctaagttaaatggttctgttaaaaaggggaaggttcatgctaa

SEQ ID NO: 92955 - DNA, 263 bp, Glycine max
gacgcagtgcagtatacagtccctgaatgtagagacatgccaatgcagatgccagagtctacttgctctttcaacactttccctgtacaaccaacagacaattccaggaatactgatggtgctactatgcataataaaggttactcgataccaccacctcaccatgtgccatccaatcagttttcttttgttcatggggaacatcgtatgaagccacaaagggaggttccgccacccccttcatattccaatgggcaccattt

SEQ ID NO: 92956 - DNA, 256 bp, Glycine max
cttcaatggccacttcacttcttctacttctcttcatcactagtttctctcttctaccatcttcttatagttattcctctccttttccaccttctgcttcctttctctatgaacttcaatctcagtgctcccttgccacctcccctgaccctcctcttcaggtggatgggaatttcatagaaggggttttgtctggcagaaagagggttggatacatttctatactcttctatgcttcctggtgtcctttatcatg

SEQ ID NO: 92957 - DNA, 252 bp, Glycine max
ctcttctcacttctttgtaggtgactgtgtgcagcagaaaagaaagcagaaagaggaaaggtaagataaagcaagaatggcagcaacttcaacaaaccaaatcaaagaccaatctctttcactcaccaagagactctttccatggaccctctatgctctaatccccatagctcttctacacttctaccttaatcctctttcatttcctccttcaccagaatctgaactccctcattcgctcacttctcactt

SEQ ID NO: 92958 - DNA, 264 bp, Glycine max
ctttgtttgtgtttccgccgagtcgtgaaaacagaaaagaagacgaggcggaagagatcgcaggttgcgcgcctcggagagtgaaagccaacgcaacgcaagagaagagggtcctgctaccataccaacatccacacccttttgtaatttttatcgcaaacccttctgccatcacaaaccctaactcattatttctttcttttaatcttgttatttctctggcctcttttttttaattttcgaaacaatttcatccataaccca

SEQ ID NO: 92959 - DNA, 242 bp, Glycine max
cgctgtggggggttttgttcaaaatttcagaatcgtaatggaaaactcagacaacgacgaacccgaaaagaagatgcctcatctcacgtttggttcttcccgcacgcctcgaaactccatcaacactcctgccgccaacaaaaccgctgacccaggagtcttacagttccagaatcagcagcttgttcgacagatagacatccaaaaacatgctttgcatgatcttgacaaaaaattagaga

SEQ ID NO: 92960 - DNA, 261 bp, Glycine max
acatgaagccagaagatgtggggctaagtagagatctgcagttcttcaagcctggaaatattgtcaaagagaaccaaagggtcacttatacaaccgtgtacaagtgtgacaatttctcagtaagtgtttcattctcattactccctaatcaccaacactcaccactgtaattgctacttgctgctttgtgtgcttaattcatttatggggacattttctctatgtgcagctctgcatctttttcatacctgaaggaggagt

SEQ ID NO: 92961 - DNA, 244 bp, Glycine max
taaggatgttagcaatttaacaatttattagtggtggtgttatgttgatttgaacgtttttgtacccttttcgatggttttaacaacgtttggtaattacttgttatgtttcataaatattatgtttggtttcataaatattattaattcattatgtttcaaatggtgggaggagtttaattgctgatcagtgattattttttatcggctattacttgttagtgttaccaaaaggatagtacga

SEQ ID NO: 92962 - DNA, 261 bp, Glycine max
gttttgacttcatagagaagaagaagaatcatggtgtggggactcttccccgtcgatcctctttcaggtgaagataagtactacattttcaagactggactttacaaagttggtcgaaaaggttgtgatgtaataatcactaaagataaaggagtgtctcgggttcacgcagaaatagttgttaatacagtgaacccggtaaatcctttaccaaatgaacgctctcatttgtcaagcagtatacatattagagattgctcc

SEQ ID NO: 92963 - DNA, 258 bp, Glycine max
accacatactgttattggactgtggaacgccgatttacaagaaccaaagcttcaccagtctgatccgtcagtgacagttgttaatcacactactagtactctcttatactgtgctctttctccttgctctttctcctttcctgtaaggttgtcaaactcaagagttgggtaaactcatggagaaaagtaaacatgaatctaattttgtagaagtttacatgcattaaaaattcatttaggaaatatatcttagtaccc

SEQ ID NO: 92964 - DNA, 274 bp, Glycine max
tgcttttccctctggaggaaatgtaaaacatcaccacactgctgagataaagcctgagcctgactttttgagatgtggtttctgagcctcagatcacactgcagagcatgtctagtttagttctctgtttcatgtcagaatatccattcttattattatttcttgttatctccaatggttcctcccttcttctagggttctcttccacttgattcatttcactctctgccaaggtggaggcacttcactggctcatgtaggattttgacttgag

SEQ ID NO: 92965 - DNA, 174 bp, Glycine max
ctctctaaagaatatataaaacaacaacaaaactcatccattttggtccctctctaaaaaaactaagcgcgactaatctcacgcgccgacgatgggtgttcccgtagggtacccggagctcctggttccgaaaatgttcctccacgcgctttccttccgcgggtggctgcgctc

SEQ ID NO: 92966 - DNA, 268 bp, Glycine max
ctaaaccaaaggacactctttgcgaaacccttgatctgaaaaaaagtaccaatggggagtccctccaagacgcaggtttcgaacgaattttcctccgaagaggaaaaggaggaggcctccgccgccgccgccaaccacgagatcgaagatgacgacgaggagctcgaagcggtggctcgctacgttagctccgatgacgacgataattcgccggatgaagccgctgaagacgacgacgaggataaacaggatgagagtaatgttgatc

SEQ ID NO: 92967 - DNA, 253 bp, Glycine max
ctttcactctctcactcaaggttagactcttttgaagaaaaaaatagctctgtgtagaaggccttatgcttactcaaaggtggacaaggaggaccctgaagacataatccatagaagggcacagtttttgatccacaaagtgttggagcaagcagattcacgtagaaagccatcatgccttagaatcagaatctctaagatgaaggtgaagattggaaaaaggttaaggaggctcaggaggagattatgtccg

SEQ ID NO: 92968 - DNA, 134 bp, Glycine max
cggctcgagcaaacatgggtgcatccagactcaatcaattgaagcatttcatcgaacagtgcagatccaacccttggctcctctccgatccttcactctccttgcttccgggactatctcggaagtctcggggg

SEQ ID NO: 92969 - DNA, 275 bp, Glycine max
tccctaacaccctagtgacgaggcacctcccttcccgtgatgatgatacctccttcttgcaatgacatatggttcaccgcaacaattcctccttcttcgacaccacctctttccccttgtaccttcctcacaacatcgtggctctttgtttgccctctttcctttgtgcttcgctattgatgagatcaacacaacaaagatattggaatctccatcatgggttgatcattgataaagcttgaagaagtattgatctgcatatcaaaggtgtattc

SEQ ID NO: 92970 - DNA, 274 bp, Glycine max
cttgaagggtacaacaacatacaagtgcaatggaatggaaaagccttccagaagatgaagaacctgagaattttgataattgaaaatacaaccttttctacaggccctgagcatctaccggatagtttgagatttctagactggagctgctatccttcagcatctttaccatctgatttcaatccaaaacgagttgagatactcagaatgcctgaacgttgccttaaaatcttccaacctcacaagatgcttgaatcattgtctataataaact

SEQ ID NO: 92971 - DNA, 270 bp, Glycine max
atttccaaggcctcacctgaccagcatgtggagagtgatccagcccctccagccaagtaagtttactcagcttttcaagaatcatgtttttatttttttctgtgtttaaggtagttatgataaaaatcaataaatttatcaaaagcagtagtttgtggttacatgctatcttcagccctttgccgtgtccggtgtccgacatgtgtccgtgtcagtgtccgacaccgacacgcgtccgtgtcagtgtcggtgtcggtgcttcataggtta

SEQ ID NO: 92972 - DNA, 279 bp, Glycine max
gattaccaagattggattagattaacaaaatcagattaagtcgttgtagacttgtggttataattcatgagtataggacaaaaattgttgactacctgcacttcaagaagctggcttttgaactctgaaaaggaaatagtattaattgtttctgctggatattggacctggatgactcaacagcaatcataagttagtaagccatgtcttatctgtaacaaccgtgatcacatgaatcagacagcccattgcagaggatataaatgatagaacaataca

SEQ ID NO: 92973 - DNA, 267 bp, Glycine max
atttactaattctcggtatactgaatgttaatgcatttaggaaacagcggatcacctgctttatgctaatcctggatctggaatgatacatgaacaacatttccaatttttccacttccttggtactcttcttgcaaaggtatcccctctcctccgcctttccctttctaatctcttttctaataaagtgggactttgcattgaatgactgaatctacttcaaaatgctattctatcttttttgtcacgtggtttgagttagtctgc

SEQ ID NO: 92974 - DNA, 267 bp, Glycine max
gttttatccgggttgagtttgacacagtgacacgtccgaggatagtgaatatataaatcgaaagttctagatagttgtcttttgactctttcttttctttctaacaagcaccgcctccactaatggctatgagatcgtgggtgagtcgaggatccgtgactcgtttgatggactcagcaaatcgaggggctttcagtcgcttcttcagcgacaagggtcgcgttctcagcgaggaggaacaggccatagaaaacgtctacatccaga

SEQ ID NO: 92975 - DNA, 258 bp, Glycine max
atttgaggttatttggtttttgagtgctaggtaaggttttgagagtcaccattggtggtcaatgcaggtatggatattaaaggggttgttgctgaaatacaaaaggacaaaaacactcctttagtgcagaaggtggtgatgtgaagcagataacaatcaaaaaccatctatcagatatgattgaggtcttcactgctgagtattctttgatatgcagaatttctgattacaagaagccatatataagcttcatggatg

SEQ ID NO: 92976 - DNA, 268 bp, Glycine max
cttaacccctccgtaaaccctagtatagctggaaagaagcagtagctttgccgctctgaatcgaaattcctcagttcagtcgctgccgtcgtctcgtcgttttactccagaagaatgatgaagaaagtggacgagcgaatcagaactttaattgaaaatggcgtcagaacaaggcataggtctatgttcatcatcattggcgacaagtcccgtgaccaggtctttttatattatagattgtaaatctacactacatgcttagcaaggc

SEQ ID NO: 92977 - DNA, 270 bp, Glycine max
aacaaattcaactcagaagagcgatacacacactgttctgtttttgaacatgtccctttgcaagatagcagctcccttccctagcaatgtgggatcctgcttatacctcgttatttttatcattttccgcgttctgtagtattattattccctccctaactatttgtatgtaagtattcatcctacctatagcaaaaattaaaaagtaaatacatacaaacaaaagcatataggggcttgcatttatatggccaacaaacttttggaatt

SEQ ID NO: 92978 - DNA, 255 bp, Glycine max
actctcactcattcacacacacaaacaaacccgctttctctctctttctctctcacacacacaccggtctttctcaaaagtctaataaaacctattgtagcagcaagaagctgtgaaatggtgttcccaaaatggggtggttaacacttaagacacataaaaatgaacacactcttgttgtaccttgaagcctttaaatacaattttcatctttcttctcttcccactcctcaacctgctctgctggcttgaatc

SEQ ID NO: 92979 - DNA, 258 bp, Glycine max
atttattttacttgatactgataaatcatggccttccaagccatagcttgaagtatatgacacaagaatctgcataagttaatctttaatatctgaaaatttactaatgttttagctgtgcgcataaatttgtgttacagcgaatagtcctccaccaaaaccttgggaaacagcaggttcctcttcgggtcccgcgcctttcaaacccccgtcagccggcaacacaagtgatgtagttgaggcttcagggactgcaaa

SEQ ID NO: 92980 - DNA, 207 bp, Glycine max
tgacaactccaaggaaagagaaaaagagagaggctcgaagagaagagaaggccgaaaaagcagctttgttagaaaagtctattgaaaaagagctattagaacgccttcaaaaaggagtttatcaacaaagtgatatatacaattatcctcttgaagagtacaataaagttcttgatatggagaaacttcaaattgctgatgaagaag

SEQ ID NO: 92981 - DNA, 271 bp, Glycine max
  unsure (1)..(271): unsure at all n locations
aacgaatccatccaagagccctgatgccccaactcatgttaagaaaataataatcaatcaaagttcactagcaacaccatgtgaacccacccttagagacaacttttttcttgtgtttctctcccctatataaactcactcacaagtgacgaaaaacaaaacaacgtacaaggccttttcttatctctctctttctttctcatcttttggggcctcaaaatagtaggtgccactacacaatatgggttccanagtaaagaccttggttttg

SEQ ID NO: 92982 - DNA, 206 bp, Glycine max
gccttctgataactccattgtttctgagaatccatctacttccacagataaatttcaggaagctccttacaagcgtgccataaacgagcttcctaacataccagtcaggactcaggaacagctgaatcttccctgcacaagcaatcagccagggggtgttggagtgagcataggtggccatgccagcaatagtgtgtcactcacac

SEQ ID NO: 92983 - DNA, 112 bp, Glycine max
ggctcgagcgtgctcgagctgctcctgagtacgtcatgactgggcatactgacagctagaagtgatgtacatggtttacgggtggtgctgcttgaaatgcttattggtagaa

SEQ ID NO: 92984 - DNA, 251 bp, Glycine max
gaaagggaaaaaggaaaggcaggaaggaagaaaggttggtggaagggtgggtgccaataatgagaggaaagggagaaaaaaatggtattttggacttttggcaattcttagtagggggactaaagcaaatctgatatgaccaatatcaactccccacaaaaactgttattattgtccattggacttcaggcggcgcaaaacttcacactacttcaccaaaactgttggtccataaagtgataccctctctt

SEQ ID NO: 92985 - DNA, 210 bp, Glycine max
caatcttctcttctcacacaatctctgttcaacaacgctagagaataatatctcaagtatcatgtgatgagatgaaccaagcacaacaacttcaagaagcttgaagtatgaactgtctcaaacatgttctcaaagcttcaccacacacagcacagataactttcatctctgtgatgcaagtcgagacatcagcgacacggtgctacacgc

SEQ ID NO: 92986 - DNA, 299 bp, Glycine max
tgctaatcttgcaagctggagccctttagatggacaaaggcattggcctacagacaaggattttgtctttcgttttggatctgttctctctgccaagggcattcttccttctgaagcagtgcagtgcatcctcattatgaagtttagagtggttcacattgaagaagagggtgttcaaacaaatcttaaggcaacagagctgagtatgcagttggaagacatggaatgtgctcatgttaatgggaggaacagtttgcttattcttaaggaagcacttagctgccgaaggagcaacaatt

SEQ ID NO: 92987 - DNA, 256 bp, Glycine max
tgttatgttcctttaagtattctgttatgttcctttaagtattctaagtctgcatatcagtatttacttcactagttagcttgaattctgttattgaagaaatctaagttccttaacgaaaacacttcacatgtagtagagtaggtaacatctgcaagaagtcttctccttcaccatgccaccaaagcctttagactatgggtcaataaatgaaaacgtgaagaagagtcaatatgctgtcagaggtgaattatac

SEQ ID NO: 92988 - DNA, 300 bp, Glycine max
ccaaccttcagtctcaaatacttgaagcccttggggcaactgttgaaagagtgagaccggtgtccattacccacaaagaccattttgtcaaatcgcaagaagacgggcatctgaagcaaatgagtttgcattgaagcgtacaaattcacaacaattgaatggcaaggaggacaccgagaaaataaatggttatgaatctgatggatgcagttacagctctctgtttcctgaagattgccaaggtggcttttttgctgatcagtttgagaacctagcgaacttcagggcccattatgaggg

SEQ ID NO: 92989 - DNA, 201 bp, Glycine max
gtttacattggaaaagcacatcaactgattttcaggatcccaaacctctgagtgaaattctcaaggtcaaaaggaccatggatcagtgagattggcaaaacctgcaacaattgaattatgagattaagatgactaatgatttcaagagactaatatttttaccgaagataaaggataagttggctggagacgggtgctatc

SEQ ID NO: 92990 - DNA, 277 bp, Glycine max
cttttgggccatgtcttggtcagaaatattttaagttgtttatgtaacttctttatttggtggccattgttaaattgtttttgtatttgttctttaaaatgtgactagcacggattttccatcaaaattgttacattacttttgatgttttggaagggatgactggaaaacaattaaaacataaatgctagttttcccctcaatttaaatacccttaactaacttttttagtttttacttaaatggtgacacttaagactcagttattaattttgac

SEQ ID NO: 92991 - DNA, 275 bp, Glycine max
gtgcttctgatccaacgatgcgggagctgcattcagtcgtgactgtcacgtcttggactgaaggggcctcttcgtctcctacatccttcactcatacatacttgcttttcttcaggatattgttttctttttaatagcttagttaatgttattgtagtgtacgcagtttttgtgtgaaattttctaacatagatactaagagccgagctatatatttacagaaaagttcaattgattaatttttgcattgtagaagagctgaatgttacattatc

SEQ ID NO: 92992 - DNA, 203 bp, Glycine max
aggatcccaaatcccaatcgcttggagggatatgccctccatgtgaaaggatttatagggtcatcaagaactcttcagcatcacaaaaggtgatttataatcaaaaagcaagggacagacacacagaagttgttatcttgaatcagaaaacatgatgctaagaagctcttcaacaccagttcttggatccctcctctcttcct

SEQ ID NO: 92993 - DNA, 292 bp, Glycine max
agatttgttcaacgctctcttcatttcttgatcaatcctcacactcttctttccactgcgaaacgaaacctatcattccatgatgcacagctttttgatgaattggtgattggtgtacggtgtacgtaaaatgcgttgaacaacaaacaaaagttttgtctttctgagtgttgagttgtgataggctgaggaatatgaacatggatatggctggtagtttgccgcaatcgagagtgttgcatggaggtgtggggacgagttacaaacgcagatcagtaggtcagttaggttg

SEQ ID NO: 92994 - DNA, 278 bp, Glycine max
gtgtgaaagctcgcacttttacggcgaattttttgtgggcttgttggattctgaaagaaggggcaaaagggtgtctgaagatagtgttgaattgcaatttggttaagtgggggtgtcattatggagtgggaagacgagtgcagaacgccgaggttggtgcagaatcagattccagcggttttcatctgcccgccgccgccgccgcggaagaagccggtggccggaaagcgacgaccgccgccgaaggaggggtacttccagccaccggatcttgattc

SEQ ID NO: 92995 - DNA, 269 bp, Glycine max
ctcgaccgaatcggctcgagctactactaactcttgtttatagtagtgtgtcatcacactgtggacggttctgtgtacaaaacaaaccaacgattttgaaggtttgagacagcaacatgatgatgttgcggttagtctatgctcttatcttggggtttgtggctttgaattgcttgcaagtgtttgaagaatccaatgctcaacgcataccgcgagatgaagttcaagtttcgttcttggtcacgttgatgcagaacagaatctccaga

SEQ ID NO: 92996 - DNA, 269 bp, Glycine max
gctaaaggtccacttgttgaagaccatgtactgattataccagtcgagcatatgcctagtaccttatccatgtcttctgaatctgaaatagagctctctaggtttcagaacagtctcaagagttactgcaagagccaagagaaggaagtcatcttttttgagtgggtctccgtacgtggcactcatgccaatattcaggccattcccattccatcttccaaagcaattatggccgagaaaattttcaatttagctgcacagaagttggg

SEQ ID NO: 92997 - DNA, 258 bp, Glycine max
ggctggtgtcaagagggtggcctcaaatgtggtcacggatgtagagagaagaagatagagaattctccaggcaaaaaggggacattctttttatcctatagtatatatatatacaaaaaagaagaaagacaaagacaagcaaaaaaataaaatagtagtattaaggtccggaagagtggagagtgtttggtgggtcatgtcatgtcatatggtgtgagtgaaagaaaattgctcttagtggccgttgttagtttttgc

SEQ ID NO: 92998 - DNA, 263 bp, Glycine max
gtgagctaaaataacatgattgtaatgcagatcttagaaccatactgaaagaaaatgcaaaattatacttaaagcatatatgtgtgcataaaaaataataacatcaaaatcacattatttaactaaacaggtaaacttaaatttgaatattcatacccataaattcatgtacaagtcataataagtactgaaagcaccaaaactcagagaagagagacctgataactagagaggttggaatcagaatacaaggcaaacaaaca

SEQ ID NO: 92999 - DNA, 263 bp, Glycine max
atgagaaagttgcatttcacacaaaaaagggccgacataagttgcagttattttataatttgcatgtggccactgcagttgacacattctttccaatgctcgaatcaggttgtatgtactttggtagctgtgattttgtgtttcagatgcatttgcaatctatactatgaataaagtatacattttatgataagtatgactatggtttggtcaagtcttgaatctgagtcaagatgttgaatgttctttagttgtgatggaag

SEQ ID NO: 93000 - DNA, 263 bp, Glycine max
tgttactgttcatcttcttccttgttcttccaattgttcccttttttgttgagaactcttttcatttattaccgtggcgtcttcatctcaacaaaactctctagtagagcaacaagatgcttcaattaacattgagggaagtaatcaaatttcggctacaacggtaacgacacatagagaaaggggttttgatttaatctttatacctgggcaagaagaagagtatagaagagtctgggaaactcaggtattactttcaacat

SEQ ID NO: 93001 - DNA, 259 bp, Glycine max
gcagtcctcaccagaagcaaaaagactgggttttggcgttaacctaagcgaagagagagagaggttgaagaaggtgaattgaatggcttcctcatcctcttatcctcggacggtaattaccgaaaactttgtatgaatttcattgctatatatatatatatattttataaaattagagtcgcagatcgagggaaagaactaagttggatgattgatgagtgatcaggaaggtgaagaagagtatgggtctgaatcggga

SEQ ID NO: 93002 - DNA, 167 bp, Glycine max
gcgtagactggtgtacctggtgccaatggtgctgtgagaccagtggatggagtcgaggaggacgtcagagagagtatgttttattgttaagacatgaatgccatagattactgttaagaccttgtttagtggagtgcttttttgctttcagagtttctccagcagtg

SEQ ID NO: 93003 - DNA, 257 bp, Glycine max
ccgttttccgatccctcttctcccacgcgcctctcactcccaccttccccacgcgaacttggcgttttctagaacacacttcgtttttttcttctctctttatgacaatttcgttttatacgaactgcgagcgtgttgtattccacgctgagatttgaacttcgcgagagattcagcgctttcttctatccatgtttcttcttggagagttcactgtgtagggaacaaactcggttattggctctgctgtgaggtga

SEQ ID NO: 93004 - DNA, 255 bp, Glycine max
ataaggaagtgttgatttgcctaaattgaggatggacatggacaggaggagttggctatggcgcaggaagtcgtctgagaaaaatccgggtgaaattgagagttcaggctcaatgtcgtctcattctgaaagattttccgatgatctggtgccatctttttagctgcatacattgttaattccagttttgcatgctatcatggtttaattatatctgtttccatcattttgcattactgaacaagggggagtggg

SEQ ID NO: 93005 - DNA, 261 bp, Glycine max
tagagtacagggacacttggagagtatatgatgatgacttgatgagttgttaatagatgttatggcttacaacaaagggatagtttgtcttttcttcttcccccattttctagtgtcttaattttctgtgttaaaagacatttagggattgtgattaggatttttctttataatggtacacactgtaactgtagtttactctggtattgcaccatttaatagtccacatacacatacccagtccatgtttgaattgcttgc

SEQ ID NO: 93006 - DNA, 155 bp, Glycine max
caaattgaccgcagaccagagtactgtagaacactgcgactcttgcactttttcttttctgcttcttctcttgttgctacttcaaaacacactgtgaaaatatgggcttctcctcctttctgggtcgcgtcctctttgcttccctcttcatcctc

SEQ ID NO: 93007 - DNA, 189 bp, Glycine max
ggcatcggctcgaacggttttcgggtgattggatttgcagggggtgaggcagaggtgtaggtgtttggttgaacaaggtaatgtttttgtcggaggggttattaaggagcatagggtgaagagggagaggggtgactgtgtgaaggatgaaggagctgaggattttgttgatgttttgcttgatttgga

SEQ ID NO: 93008 - DNA, 122 bp, Glycine max
ctgaggatgtagaaaagtcatcctcaaaatggtttatatcaaaacatgcagtggtttctgggactaggctcgtgggcatctgacaatggattacagacgggtctggtgcagaatcttcagct

SEQ ID NO: 93009 - DNA, 110 bp, Glycine max
tcgagatattccttcttgatcaaccggacattcccagctcttgccttgcctgagccatagagtgcctcgattgcttgccatgtgctgggaatgtccggttgagcaagata

SEQ ID NO: 93010 - DNA, 254 bp, Glycine max
catctggcaacaatcaatcaaatcatattgcagaaactagagacagagattcattttctagggcccgcaacaatgatgctgaattagacaaccaacctaagagaagtgatagacaagagatgacaaagcggtggcatgatgatgatgatgataaatttgagggaagagaaaataacagtagaagagaagaaaagagatcaagaaggcatgaagatgatgacaaatttgaggggagagaaaataacagtaaaaga

SEQ ID NO: 93011 - DNA, 252 bp, Glycine max
gttttgggtcaggaaaaactgtgcagcatgctcaaagatgtgctcaagagtgagcccaaagtagacgtaggtaaacttcagaggtcaggtggagttgtatctaggaatgcaaaagtccgtcagaaggccagaagttataggataagggaatacttctatggcctttcaaatgatctttctccacattctaatattgcaaattttagtgatttgtttgtttatccgattgggggtgggccacaggccccacgc

SEQ ID NO: 93012 - DNA, 256 bp, Glycine max
tcagcatccaacaaagtgttcctcacttgttctgttcaatgactcagatcttcaaatgtgagtgttgtagcatcattgcatgagtcacccatcaaacattgttcaagtaactgtttttagtttattttgtaaatgagggtgtggagggttcacccacaagagcaaaagctttgtccaaatggtgttttgaggtgggttttggtttggatgagtgtttgttttcttgtgttcacggttggtccaccgtctcgctcga

SEQ ID NO: 93013 - DNA, 195 bp, Glycine max
attaagagaaggccggagaagaaaaatgctaagaaacttgatgatgtgggtgtgtttgcgggacctttgaataaacctacatgcagtgactctgatgttgaaacagctaatcaagaggagaaaggtaaatgtgaagtaccacatagaagtacaaatttcattccaaaggttcaggaagaacaagacatatatgtg

SEQ ID NO: 93014 - DNA, 248 bp, Glycine max
cttgcagaggccaaccggggggtttgtctcagagaagaaaagaatctcgtcgtcggaaagaagagagaccgagagcgaagatggcttcgccgtcgaccacgggtgacacgaacaagattgcggttcggtcgtcgctcgtggaatcgtttcgcggctgcggtatttccgggatccgaatggacaaggaggagttgaagaagcagctgacaatgccgcagtacctgcgctatgcaatgcgtgattccatt

SEQ ID NO: 93015 - DNA, 246 bp, Glycine max
gaaatctctcacggaaaactcctagtttgatgcaacttgtgtacggggaatctacaattaattccaccactataaacagagataatgataatagtggggatgaggaaagtgatgatgacttttttaagcccatagaagaagtggaaaaagcaaaacgtgagagatggattgaatgacgatgggatggtcaacactgaggattgttccaagtgtacacaatttgtggatcagatatgggatgagaat

SEQ ID NO: 93016 - DNA, 242 bp, Glycine max
ggagaacgagaagaagaagtgcggttgctgggctgtcctcaaacgcggcgttagagcaaccgagacaagatacttgaatgctagcaatagagaactatgccctccaaatgaagctcgattatcttctgataatcctgatcccccatctcaggagaataaggttccttgccagctccttcaatttacatttcaagaactaaaggctgcaactgggaatttcagacccgatagcattcttgggg

SEQ ID NO: 93017 - DNA, 244 bp, Glycine max
ggaaaaagaaatgagtttggcaatcgaagatctcgtgccacgtggcaagggcaagaagtccatgtggacgcgcgggcttgacatgctcgcgtactcgctcaactccttcaggctcaccaacttgaagttcgtcgacgcaaaaaaccccaggttttcgcaagtggttaggttgcaactcaaccaaaacgacaccaaagaagttctagcagggtgcaagttgagtgggattaaactgtgtggggca

SEQ ID NO: 93018 - DNA, 263 bp, Glycine max
tcgaatcgagcgaattcggctcgagggagacagaagttgttgccattgaaactggtaccaactgggattcagaacaaccaacacaagaaaatgtggaggatggaggaaatgacagtgagaataataatcaaaattgcttcagttatgagcagtaaagaccaaatctggtagtgttgtgtctggaattgatcttaaacggagagaggcctatctgtcagacaaagagttccaagctgtatttggaatggccaacgatgcattct

SEQ ID NO: 93019 - DNA, 274 bp, Glycine max
caacaaacaaatgcatttcatattattatctatctctaaacgaacagtcctcttcatcatcattaaagttggcgctcttcggtgccattgatgatgatgatgatgatgatgatgatgatgatgtttctttttgcaagctctgtgttacttccatcagaattatttaagatcgacttttcaagcctccggagttagggtgcttctttttgcaacttttcaggcttttctttttctgatcagttactacttcccagctgtttgatgcatgatgttg

SEQ ID NO: 93020 - DNA, 269 bp, Glycine max
ctctccaatatcagctttggttctattgtaagtaagaaagaaactgaggcggtttagcattaaccaccactttgaaatctgaaatcttttttgaggtttgttgcatcatccatgttccatgccatggtgctgaagtccaaggcatgttcctggtcctcttggtccttgttgtgtgccaactctcttgtgggttgggggaggattggtctactaggagactcagtgggcataataataataataaggtgattcctccaagctgtggagag

SEQ ID NO: 93021 - DNA, 263 bp, Glycine max
cagaacataaccttaacccaaccctagatcttcatccttcaacagcgcgaaccttcttcctactcttcaactcaacaacattacatcacacttcattctcagatcttcccggacaagtctcattccttaacaattttccacctttgagcctcaaaccctcttaattttgcattccatcttgtgggatccacttgaattacactggatttgaagccccactaaaaaaagtcacattttttttcaactgggtatgttttgcatgg

SEQ ID NO: 93022 - DNA, 153 bp, Glycine max
cagaggctatgccccttctgtgtatatatcgttgtactaagatgtattgatatgaacatgtttcattgtggactactgtgtttgtctcttgtaccgaggttcctgtttatgaatttcagagtttaacactttcggtgtacggcaagctttggg

SEQ ID NO: 93023 - DNA, 137 bp, Glycine max
cagaaactgatggggaaaaagatgagctcaatttgcatatcgaactgcatcaacgacgcacgtgactcacgtgttcccttgagggcttcctacgtgaacctctacaagtggcgggaatcggatgccgagtttgtgag

SEQ ID NO: 93024 - DNA, 160 bp, Glycine max
attttaacttttaggctccttgtatcgtttgtcaacatttctttttgatgaacttaattaagggtgacatcaaattgtccaaggacatgggttgtttacttgcttctgagttccaatatggcatcttaattctaccatgttctttcttggtggtttgttg

SEQ ID NO: 93025 - DNA, 256 bp, Glycine max
gaaagagggatttgggactcgtggctcgtgggtgagtgcagagagtgaacagattgccgcttcgggtttcatggcggtggacggaaagcggcgatggtgtctcacgatgacagagggcgacttgcaatgcccgcgagtggccgtgttacggtttagggattcgcagaggtaaggaattcgtgtggtggtgttacaatctgatattcacggtggtgaattgcttgtatcctgcgcgaaaggcttcgccgattaacgg

SEQ ID NO: 93026 - DNA, 200 bp, Glycine max
agctctgctcccaatttgaaaggttaaacctccaaaatatgttagtgagaatagcatctcagagttggacatcaacgataaatgctccttcaaccgacttatctaccttctcatgataattcaaaagtgtcaaatcccactgatatatgtcaaactattcaacccctcaccattatctacacttacccgtctccacccat

SEQ ID NO: 93027 - DNA, 258 bp, Glycine max
gctcacatctgtgtctacgaggatgtctcatcctacggtcgttatttgtgcttcaatcacatcataaacacccatgaggacgctgttcagctcgcccgcaagttgacgcctggtgcatcttcctccttgccgcaaaggttggtcagagggcgtttttggtcattttgacttgtgtttttctttgaatgttgactttgactttgacatattcaactcttttttttttttttaatgcagtgatgcctatgggaagagttt

SEQ ID NO: 93028 - DNA, 257 bp, Glycine max
catcactttcggatccaggataaaggctttgggatcacttcatcactatgggataaagtttttggaacacttcctcctaaaatggatgccaaaaatatattatgcaggcccacatctttcctgcaaccatttgtgatgaaatagagaagctttgctgccattttatctggggtagcacccaggatcaatgtaaagtgcatctgatatgtgggaactctatgctcgctgaaaggaaggaggactgggctttagaactc

SEQ ID NO: 93029 - DNA, 238 bp, Glycine max
aaacaggtcagtaaataaaataaaatataggaataccataacaaacactcgagtcgagggttacaacattttataccaaagatgcccctagaccttcagcaaaaattcacttgaagaagaagacattgaaacttaaacaactcaagcgcaaagggaagaacaaaagaaaatctgatgtgccggctgcggatgtttcagccgaggcaatgggggaataaccgggaaaagctaatattcg

SEQ ID NO: 93030 - DNA, 144 bp, Glycine max
cccggcttcgccaacattgggctgctgttaagattcaagccgcttttcgtggctatttggcaaggagagcactgcgagcattaaagggattggtgaagttgcaagcattggtgagaggccacattgagagaacacggacggcag

SEQ ID NO: 93031 - DNA, 105 bp, Glycine max
cagtgtattacttgatcaccttttttgagaaaagatatatatcaatggcaactccgagtgtgttagaagtccgccctcctgctttaacttccatctctgaaccac

SEQ ID NO: 93032 - DNA, 160 bp, Glycine max
ccatgttcagggacctcattgaattataaatttatatatccatgttaaagtaaagagctattttagtgaaagcacgttgttcccaacttctattttatttattttatcgtgtcctgcatatcagaattggtttctgatagaacataataacatctacggg

SEQ ID NO: 93033 - DNA, 131 bp, Glycine max
ctgaagcaaatgcttccatggctatgaatattcgcagtgtatacggtgcactgaaaaggttcactccgcttcactcctcaaattgggtttcgaagaagaataagggtttctcctgcaagatgtcaaccgag

SEQ ID NO: 93034 - DNA, 258 bp, Glycine max
atataatgcagattttggataagcatgccgcaaaacaacgtaggacaagacattagtattacgtggagatgaagcagttcatcacacacaacatgcactctcatcataatcatccacgcttcttctggttccaaagtcaacggattatgttccatgtttttgaaatccaacggtgttgatcttaggtgtaggaagtagcttgtgaagtgtttgcagattaagtccttctcttcagttatttatgggatgtgtaaagag

SEQ ID NO: 93035 - DNA, 260 bp, Glycine max
gagttcagtggagtggccaaagttggcgcattgattagcattgaaacttgcatggaaattatggatcttctgtacgaaaaagaggaaatgtcgattctgtttaggtctcctcactccattgctgcatcaatcttggtatatatattccctagttatttcaaagttccaagtaatatctcatataagcaatttactatttcaaagttgtaatatacttttgcagtgcctcatatgtaatgacagtccctaaacagaaatgg

SEQ ID NO: 93036 - DNA, 135 bp, Glycine max
cgaactatccccctcccccaaaaaaaaccccaaagcggctcggttagggtttagttttgtaccatttcgtgtaatctaatttttcatccgtaaaaatctaattttgaggcggcgagatggcggagattcaggtgc

SEQ ID NO: 93037 - DNA, 279 bp, Glycine max
taaaagtggtgagttgctgagaatatactgcacagattcacagtagagttatataatgcagaatctagatgaatctcctctacttctctttttgcttagtttcatgtttcacttctttgatgtatccacctacctgtctcttccccattgcttctcaagatatgcatttatcttctgttaatcgatatgaacttctgggtattagaacttggacccttccagatttatgacatgccatctagctagtttgaatttgtgatatcaaaagtgaatttagta

SEQ ID NO: 93038 - DNA, 289 bp, Glycine max
gttgaattgccattgatgtccattcatgcgagaagaagataaagcattcaagggagatacaagtgatggtagaaagagaagtgcagcaactgattctgatcattgtgttgatcaaccttgtggaaacaagttgaggaaatctgaagtgtcagaaatgcttgacttgaactgccaataccagagagacattgactcaagtgtgaaagaaatagatttaaatttcagttcaagcttttagggacaataaagatgtgtctggttatatcaaagagacattgactcaagtgtg

SEQ ID NO: 93039 - DNA, 177 bp, Glycine max
cagcatatgtctcaaagttccacggttcctcactcctcttccatagcctgcggccttcactctcatctcctggtctccagtgagatgaaccctagctccaattggtccctttaatcaattacctcttcattagtaattacttaatctcaattagcctttcactctcccacacaacaa

SEQ ID NO: 93040 - DNA, 268 bp, Glycine max
acaaaaacccattcttttgctcactcattttcttaacgtagattaatcattatgtgtggcggtgccatcatcgctgacttcataccccgccgtggaggccgccgcctcacggcctccgagctctggccaaactccttcgccaaagacgatgactttgacttggattactcccacatcgctacccaacaaccctccactctcaaaaggtcccaacctcccaaaggttagtcttgttcactaactcactcgttcattgtcaccctgaaat

SEQ ID NO: 93041 - DNA, 155 bp, Glycine max
aatgaatcttatacaaaacccctctttaagtttgctactacacttgtatttctttctgctttgtcttcattgcacaagttcttatcccacagccatgaactgcaccgacacaagtcgtgtttgcacttctttcttggcctttaagcctcatcaaa

SEQ ID NO: 93042 - DNA, 255 bp, Glycine max
ttcaaaaccctgttctcatggcttttggagaagttaacatagttgaattaagggatccagtagctgttgtcaatcatgaacctccacctcatgtacctactacaaaacctgaaaatggaccttattgtcagccaaatgggtttggcaatgtagaagtagacaggaaaagtgcactaaatgaaggccaaaatagcaatgctacattaggcaagaataatttcgatttagagtcctcgtgcacacagactagtttag

SEQ ID NO: 93043 - DNA, 258 bp, Glycine max
caagaatcaagatctcctaatccgactgcgatggttcccatgtttttattcttgtaccatgccctttcagtctcacccacaattcactgatcaaagtcccttatttaatcaacttactaatctcgcaccaaaccaaaccactcatttggatccatggcaatgttttctttctagacagtgacactgtcacatcacattcttttcattcatactcaccaaccaccagatctcaataccttaaatatttatttacactct

SEQ ID NO: 93044 - DNA, 262 bp, Glycine max
cgacgtagagggcagtgggggcagtgctgctgtggctgatcggtgttaacttcatcaaaccccaaactcaaccatatttccctcctcttcctcacttcgctccctcacccctcaaaacgcatcccaattttgagtctcttcatcataacgaacaacccttttcttctgatgctcggatttcacttgagctggagcatatagtgctggatggtgaggaagaggaagatgagccggtttttgttctaactgacgaatggaggga

SEQ ID NO: 93045 - DNA, 180 bp, Glycine max
  unsure (1)..(180): unsure at all n locations
gatccaaaaagagagagtggaaaagatggcgcggttgatcacagtggtgtggtgcgcagtggcggtgctattatgcgccgcggccggtgcgtcgtgggttgaggaggcggcgaacccgatacgaatggtgtctggcgttgaagcggangtggttcgggtgatcggggattgccggcttgc

SEQ ID NO: 93046 - DNA, 268 bp, Glycine max
ggacattggtgctcatgaagttcttccccggttattaaaagaaaatctgccccattcttagtgtactacttcattagtacgtggtgtatttcttaaggtaaaaatgtcaggctcacacgaaggtttgcatgttcaacgaatacagacgcaatatggtgccgatgttttgtcgtcttaggatgtgaaaaatgctggcaaaaaggatgtgtgcttcataattttgttagatccgtatatttatttattaaattattttaaatcatccaag

SEQ ID NO: 93047 - DNA, 266 bp, Glycine max
tttgaacaaaaatcctaaaccaacctcttcttgctacgtctccattcacagttgctgttcctcccggtcgttgtttgcacaaactcagcctcaatccaatacgatctaatctgataaaatagatattctgatagaccaagctgttgcctctattgttcagtctcagctgccacagattgagaagactgtgcaagtccctcttgttggaaaagccaaagtggttctttctgacatcactatcaatcatatccaagttaattcttcat

SEQ ID NO: 93048 - DNA, 187 bp, Glycine max
taaaaaatgaaaattttaggagagtcgtgtcaagcattgggagccttgggcgatgagttttcagtcaccgttctgatgggttggggttggtgagttgcgtcaatgtttatccaaatgaacacaaataagaaacgacccaagcttcaatctgtgtcctttcattgcctttgctttccacatacatata

SEQ ID NO: 93049 - DNA, 140 bp, Glycine max
cgggcattgagaaagaaagactcaaaatgttttgtgaaccccatcgtgtaactttcagtattggtgaggatttttttgcatatcaaattgatggaattggcaaagaaacaaatgaacagacattggcaaagaaacaaatg

SEQ ID NO: 93050 - DNA, 274 bp, Glycine max
cgagagcaacacactctcactgttgtcgcctcttgctactttgcgcgttctttcatctgaaaagttagctcctactaactgttacatccttcgttcatacaaccattttctcaaacacttttcctcctccaccactaacctcaagctcggaactccacaggccattctaaatacttctcctatagccccttcagaggtcaccactcccactctcagagaattatgccaatcgcatgttcccgaacatatactgcaaaggatggaagagattggt

SEQ ID NO: 93051 - DNA, 270 bp, Glycine max
taccggaacagcatttgaacagctggactctttcattcaccaaccagccaatgagtgagtcattcaagataaaaggggtttttttctcctctaaaaattatttacttttttaattgtcattatgtttgctttgttttgattgcttacatatgttctactatgccaataagtttacatgtctttgtaaatttgttgtatctgtggtcaactatttcatcatgttacatgtacagaaggggggaaatcatcctacttttggatatactttat

SEQ ID NO: 93052 - DNA, 248 bp, Glycine max
gttttaacaaatgaaagaagtcatggagtgtgttattaacaaatacacttaatatttaaaatatattccccttgatttggaagtattattgctagatatgttggtgtgtgaaactcacaaccataagggacaacctgaatatcaagataattaaaattcactataattcttcataagaaaaaaattgacgatgacaatgctgatatagaacaatatagaaaaaaaaagattgcacctgagcttactta

SEQ ID NO: 93053 - DNA, 276 bp, Glycine max
gtaggattgactcgttagagacttgttgataacaatgttgtgtataatatatatgtgcatatgtatgtagtagtcattgcagaatatggtagcatagctgtctagtctgatagacatgtagtgttgccgcagttagattcacagtttgaccgtttccctttttgttttgaggttaaggttagttttctgtcttggttagtggtgttaacacgcagttaccctgggattttgactgtcactttaccacttgtgctttgttcccatgtggttttgttg

SEQ ID NO: 93054 - DNA, 276 bp, Glycine max
ctggagtctgtgtatgatgggaagaacaaagatcacaaggtaagcagctctcttggcgatacaaattcctcagaggacgattttcctcataagtcaggcgaaaagtctaaaggtgtggctgttgagggcaggccacatccagaactgacacaattttgtgagcaaatggatgcaaaaggtcttctgaattatattatggagaataaaaaaaaactgtctgttaattgtgaagaaatttctgtagcattacaaagtgcaactaatccagcacgtttg

SEQ ID NO: 93055 - DNA, 273 bp, Glycine max
cgtagtaccaagaccaaaagataaataaagcaaaatgcaattctggaatgagtttaactttgcagagtcattcatctcaatcaagtttgaagagaatggggtggcatcgtgggaaaagagcacagtgtcaaagaaggtgtcgtcgtggaaccatcaaaacaaggagaacaagagagtgatagagcatgggaagtcacgtgacacgtttaggtggcgaaagaggatagggcacatgctccagctcattcggtggaagaagagcggtggtgtgtg

SEQ ID NO: 93056 - DNA, 271 bp, Glycine max
atctctaccccgtcatcatcaatcatcacctccagtgctgcctcaccctctttccttctcctcctcccaaaaaaacagcaaacaaagaaaaaagcaagagagactcagtgagtttctcagagcaaattaaccaaagcaatgaagaaactaaaacactactattcccaccaccacaactcctcagaacaacaaagacaatgtattttcccagtaataaccatgatctctcttttcggacagttcttcctcctcctcttcgctctcacactaa

SEQ ID NO: 93057 - DNA, 269 bp, Glycine max
gaaacctaccccctccatgttgatactagtgcttggactagcttcagctacttttttagtgtttgttgctgtttatttgttctatagcaagagaagggtgtcaaagtataatgagagtaaagacattgagagttcagaacacaaggaggatgaggaaatggctcagaaggaggatttgatgatctttcagggtggagaggaccttacaatatgtgacattttggatgctcctggtgaagtgattggaaaatccaactatggaacactgt

SEQ ID NO: 93058 - DNA, 297 bp, Glycine max
caggtccagaatacttatcacgaactagcaaagtagcaacacacatcatggccatacattatacaaggcaacttcttcgttaatttcctcacacatccctatacagctttctccctctcttactctctttctctttccatcactcacttttcattcccaaccccaacccctcctctcctcagtgccataaatcaattctttctatctatctctgtccacaattctctttaattaattttctttcatttcatttcatcttttaagttgatctgtgaaaatggcttcatcttcctccaa

SEQ ID NO: 93059 - DNA, 285 bp, Glycine max
cacgaagccattgccacgagccttctctccaagcgctggaagccgttgtggcattccgtccccgccttcgacctcgacgatgaaccgtttctccaaaacgacaaaccctactcctccttcttgacgttcgcctacgtcgccattctctctcgcaacccctcccactccatcacgcacttccacctcaactccagcgtgtgccgaaaccaaaacgacctcctccatttcaacatatggctaattgccatcgttgttcagcttgatgtcaaacacctccaaatcgag

SEQ ID NO: 93060 - DNA, 282 bp, Glycine max
atcaaaaatagataatttagttcagcataggagattatgtgactacggaaggaagggtagcagtacgagatcatttatccatcatatcaaagcaagttgtgtaaccaaggacatcaaagagcctggggactatggtggctttccagctgttttaattcaccaatggcggatacaagttgccagtagatgtcagactctggtatgaaggaatccttaaagtcagcaaaatatattttgatatgtagttagtacttagtggagtctaaatacttgcctcatgaa

SEQ ID NO: 93061 - DNA, 280 bp, Glycine max
acgcttagaaaccgaggaaggaggaactctcaactctcaactctcaactctcatcgtaccaaatcaggaatacctaagtaacatcaaattaaataccaaacaaaccgtcctaaggttttaatttggatgtaaatagtttgtgctttgtagcataatctatggttttctgaatttcttggtagaagattaaaaatcagatattggtgttagttttggaatttaggaggagtggagggattgagatttggatttggatcaggttgagactgctcatatttcc

SEQ ID NO: 93062 - DNA, 155 bp, Glycine max
agatcaatcaagttgtggaaataatcactagttgttattcgctacaactttgtatagtcaattttgtgaaatatgtagttctctttttccttctttttggatgattttaatctatacatccctgcctttgtttaggctggagttggtttattaag

SEQ ID NO: 93063 - DNA, 276 bp, Glycine max
ctcttctgttcaaacttctaaatccaagtcgcagttgcgaaaccgcaacacaaactgcgatagcgccgccccgcaccggggcgatagcggacgcgacggccgctccttcaatcctccccgcagcagaggaattttgggccacggttggtagtcctagcaggactgtctacagcataagcttttgtccgaagccttttcgtgttaattatgggatgtgacatggaaagtccccactctcagaacagtccaagaagaaccctcagtctgtcgaaaaag

SEQ ID NO: 93064 - DNA, 260 bp, Glycine max
aaatgaccttcaaatccacaccctaatattctaacacaccgacgctcgataatcacactgtgctgtgcttatttggcgtacttaagagattcgcaatagaaagtgaaagctaatgagtcgaggaagtgcaactgctgcgaagggcaagaagaagggtgcgacattcaccattgactgcgccaagccagtggaggacaagatcatggacatcgcgtctctcgagaagttccttcaagagaggattaaggttggtggcaagg

SEQ ID NO: 93065 - DNA, 275 bp, Glycine max
caaacattttcagtttgaggtcatcaaaggatgcgcggtcatccttgagcttcttgccattgaaaaagagtatcagcaactcgttgtggatgctggagccttgccctgtcttgttgattggttaaggatgcaaaagatcagtactattgctcaaccacttattgaccttctaaagagagtagctgatgcaataaccagcctagcccatgaaaatactggcattaagaccctagtcaggatggaaggtggtatagctcctcttgttgaattgctta

SEQ ID NO: 93066 - DNA, 263 bp, Glycine max
gatttatacaccatttcttgcctgagcgataatttgtgtctataaatgcttgccgtggccttcaattttgttctgcttttcataaatttttgtataatctttgtcgtgtgaattctttggcttttgattcatgattttcatgcttttctaggttcatatatatatatcaaacatagttctagttttatgctctggcgttatctagaagaaagaaatacagatgtaatattttgtaaagaatcagtgctgtcttgacagggaaa

SEQ ID NO: 93067 - DNA, 264 bp, Glycine max
gaaaatggagtcggaggatagctttagcgaccttattaagatggcaaagaagcttgagtcagacatattagccaagattaacttctcttctgcacatgtcattgatctagacagactcctttgtgatacctttatcagacagtgtccaacaccacttgattatgacaatagaagagatttggttcacatcttcaatacgatgacaaaggaaatatatgggaatggtgatggctcccctgttgtggaggagtatggatcatttgt

SEQ ID NO: 93068 - DNA, 271 bp, Glycine max
agccactctacatgaaactaccgcagcaggttgagttgagatgagatgagaggaatagcagcagcagcaagctatggcggaagaacagaaagttccaccaccttccaatcctacgttgtcgtttgatcctagtcgaagtgagtatctctctttctctttctctctcatcgtcacatcttacgatttctgtttttcattgaaattttgagtttagggcttgataattctaattttcaattgttgttgaagcggttggtattatcaagaggaa

SEQ ID NO: 93069 - DNA, 259 bp, Glycine max
aaaggttccaagagcaaagtttctggcctatataccatgggaagcagaggagtaattgcggacaagtggtccatgagaattctttgggcatgtgctattggaagtgccgtcagcctgtatatggttgctgtagaaaggcaagcacagaataggcagaggatgctggctgaagaattgaaagcaatggagtcaggggaaagcaacggcaaagatggatgaactgtgttatgctataattttatgaaaaatgtgtagtatc

SEQ ID NO: 93070 - DNA, 259 bp, Glycine max
ccagaagttactttctctctttcttttctctatgacgaattaagtgtcaaattgaatgaatcacacagacccacatgttaattttgcattttctcttggtttgggtcaaatgggtctcatttttctgagaacccagtgaaaacgcttgcacctttgactccaaaagctgcagagtagagggagattcaccacaattcctcacaaccatggaaatagcaactgagttccactctgaagaaaataaattgtctatggagaa

SEQ ID NO: 93071 - DNA, 144 bp, Glycine max
cttcattgccaccccaatttcaataggacacatatctttgatctttcacagtttcactcacctttcaaccaataataaacaacaatattactagtaacatgaccatgggagatcataataactggggaacttctgaacttagtc

SEQ ID NO: 93072 - DNA, 256 bp, Glycine max
cctcaagagcagcagaggtgggggaatatgcaagacatccatcagtagcatcttcaacattagtagagttaactactcgtcttgactttttcaaggaacggcggtcccagttgatggaacagctccataaccttgatttgaattatggttctacaacttcccaagactttgtctataaaccgtcgtcgccatcatggagttgactggccaaatcataggtgcttcataaaatccgtggggaagaattttggctgac

SEQ ID NO: 93073 - DNA, 253 bp, Glycine max
tgcaactaactttattggttttagtgggaatagctctgtgggatctccttccaacaaatcaatatattggtctaataggatggaaaataacttggaatctatttcagctatagctcttaaagaagctggagagaagagacaaggcactggaaatggctgtagactctttgggattcagctacttgagaattctaatgcagaaggaaatctacaaacagtcactttgtcaggaagggtgggtgatgataggtcg

SEQ ID NO: 93074 - DNA, 252 bp, Glycine max
attctgttaggctggtgataacgttggtcttcttctccgtggtctgaagcgtgaagatattcaacgtggtcaggtaagcagcagagatcaagcctgtcctttttgttagacatcaagagataactgtattattatctgtatttttgttcagtaaaatttgtagacttttgaattctaattactgaatttgagtaaccacgttcttatgctgccttctattaaaaaggtgattgccaaacctggttctgtaaa

SEQ ID NO: 93075 - DNA, 251 bp, Glycine max
agcggcggtactctcaaattgatcctctcagtctgagttatgatgttatgttgacactgaataggaaggaagacggtgcgttcgtaaaaagtgaaaaagaaatggcagaactgagtttgggaattctaattgatattgttgatgaggaatggatgagagacactctccctgatgatgatcttccactgcccccaacactggttgtaaggacagatgatactgaggactcaagtatgtttcttcattcacca

SEQ ID NO: 93076 - DNA, 248 bp, Glycine max
ttcacttcttaagcccaaaatttatcatatttttccaaaccccattattatttcctcctccaaaaaactcgttcccgttttcttcattcgtcgcgttattttttcgattcttgaggcgcgtggccgatctctggcggtgcatggcggcggggacaatggcgacggcggccggcgcggcggtgatgctctactacgtgttgagccggcggctggcgcggaaggaggaggacgaaggcgaggatcacggc

SEQ ID NO: 93077 - DNA, 248 bp, Glycine max
cttcgctctcaatttctgaacacacgtgcggcatcgcagcaatcttcatcaacgttaggcactggcgatttggtgacgcaatgcaccgtcaaagtaaagccccatttgctattgaagagttagactgaggtgactgcctgaacatgctcagagcagaggtttacggcggagcataataatctctgagtttatcttgctgcaactatttgatacttgctgtgcttcactatgttctgtcatgtcaaatg

SEQ ID NO: 93078 - DNA, 251 bp, Glycine max
cacaaaatgaaaatagttctgaccaatatataggtggttacgacagtcaaaggattcttgattcattagccaagatggagaaacgtagggagcgctttaagcaaccaatgacaatgaaaaaagaagcagaagagagtttgaagcttaacaatgattccattgtagatacaggtgaaatgaagcaacacagaccaactcgaaagaggcgttgggttggtaattagcttttattgatggctaaagtttctttc

SEQ ID NO: 93079 - DNA, 246 bp, Glycine max
gaagagtgcaggctctatcagagcagcgacatggcccgcaactgatgccacaagcaggacaaaatcctcgaacatcaaacgtgcagcgtccaggtccaggttcaggttcaggtttggctccttccaaccacagtcaacctgtggtgcaaaatcaacagaactcaaatcagagctgaattgatgtgtttgtggcttctcttaacactaggggttgcagctgattgattttcattctagatttggaag

SEQ ID NO: 93080 - DNA, 244 bp, Glycine max
aaacgattgcggtggttgcagggcaaatgtggtgtttcctctagttgaattgtttgagaaaatttcctcttttcacgttaaaaatggtcctatacttttgtacagttaaattgactgcaaggagtgatgttagttgcaaattttactaatttgattttgtgcttaatgcctatactactgagtttatgaatttggaattttgggtgtaaaaacagcactttgttttcgaactattgtatgactt

SEQ ID NO: 93081 - DNA, 235 bp, Glycine max
gacctgtgggtttatggaaggataaataataaggggagatgatgggaaatacagtaactacatgtccttctacctactttgaccattttcattaagcctattattcgtctttctcctagaaaaaactagcaatattgagctctcttactaaatcatacttcaaggctgagggcattttgtgttttaggccccctaactatgtgtctgctacataactgggctgtactagaatcgc

SEQ ID NO: 93082 - DNA, 240 bp, Glycine max
agcgatagtacccttgacgatcagaagcgtgggtggatttcctccaagtcgatgctgttctcacttgtcgccaattgcaatcggctacaactatggagccccataaggcctttaatttgcaggtttggcccatgaacttctttgcttttgctaattagttgagaactgtgctccccaatttcacatggcatctatgagagaattttccagagtcatactatctcacttgaaagaacccca

SEQ ID NO: 93083 - DNA, 248 bp, Glycine max
tagctttcttgcacgtattctttctcgttcgtgatactcaatagattcaattcaatctttattcatttctttctgtttttattttaatttcaatttctctcattccaatcttccaccatggatcccacccactcttcgaaacaaaaccaccccactcaattgaagactccacagtccaagcaccgtctcaacttcaatgccctcaaatcagcgccacaaacacacccttctcccaaccctaattcggt

SEQ ID NO: 93084 - DNA, 246 bp, Glycine max
gctctatccaaattctccaaatttttctattacaacatgggtgatgaatcacgaaatttatgatcttattttcttctatcacacttgagctaacaaatcaaattatgcattttggcacaatggcacccctgctcgttgagatctcatttttagcctaatataaccgactgaagattttatattcatggaatattcgtcaaactttcttttctctctctctctctctctctctatatatatatatag

SEQ ID NO: 93085 - DNA, 181 bp, Glycine max
tggttgattgcagttcgaatggtgtaagacctgttctcttgaaaactcccaagacattttcattgtgtaccagactgcgctcatttcaattttaactttaatttcgactgaagcgagcatgtctccaccagcgacagtgtgttatacctcagcgtctgacctatgttacgcacatctccct

SEQ ID NO: 93086 - DNA, 229 bp, Glycine max
caaaaccagaaaccaacgtggcgtttggtcgggattaggacaaaggaaggtaaagtcgaaaactttccagtaaaaaaccggtgcgattcgcccattccattcgtgttgcttatcagtattttactattgttttttcaactcacgattcttgagtgatgacaaattgaagaagcactaccattagtcttaaactcttaattaaagagacacaccattcattcatccattc

SEQ ID NO: 93087 - DNA, 209 bp, Glycine max
gcgaaaccaagggtcaccaaaaccatcatcataacccaaacccaacccaacccaacacaacacaacaccacctcctatcacataataacaaccttaaccttaaccttaaaccccccaattttcatgtctcggatcccgtgattcggatccccaacaaaaaaagaaacctcgtatttgttattttcgtcggatcgggttgggaacgctca

SEQ ID NO: 93088 - DNA, 229 bp, Glycine max
agaattcaaacatcaatgaattatttcaatgttaatttgaaggggattgtattgctaaatgttagcttgtcgagggaagtggttccatcctttgcaagaatccttctgcatacctcacttggaaagaagcatttggttcgccctctattaagaacagaaatcacccaagtggtgaatcggcgggcttggtacgattctaccaaaatgacaccagaagttttgactctct

SEQ ID NO: 93089 - DNA, 238 bp, Glycine max
ctgtttctctctcttactttctcactctttccgtcaaagtttgcaatttttcttcccaggtttgtgtagagtatagcttggatttgacgttaaagctgagatttttggacgattcaagtgggcacaaagagcttgaaatgagtgtcacagaaacaccaaagaaaaccggtgccccccaaattgttaagttggacaaggcattgaaattggcagagttatgggtaaataatatgagcaa

SEQ ID NO: 93090 - DNA, 260 bp, Glycine max
ctttgttgttttccatcctccaagtaactctctctctctctcttcctccaagtaaatctgattttggacaagtagaatctgcttcatatctctggcattgaagtctagatcttttctataactgtgttgggatttgtgtttctatgtttggactttgatccttttgtagtacttccattggttctctcattattctctgctttcttttccatggtttataattagtagccatctaaaaaggatatccaacccagaaatgt

SEQ ID NO: 93091 - DNA, 260 bp, Glycine max
aactcaagcattgcatccctcttgatttgtagtttgttttgtgctttagataaaagttctgccaaatcaagaggggttttaagatcatagtgtgtgttttgcaacaatggctaagttctttgctgctatgatcttggcactctttgccatttccatacttcaaacagtggtaatggctgctaatgaacaaggaggccacttgtatgacaacaagagcaaatatggaagtggaagtgtcaagagttaccaatgcccatcac

SEQ ID NO: 93092 - DNA, 256 bp, Glycine max
ataaagttcttgatgaatctagcaggaagattctttgctgtgagttctccaagataatgcaacaggtacttgatagtaaactacactttctgttagtttgggcttttggtccttggagttagtactggattatgtatgcttgcatagaaatgagtaacatctataatctttctaaacataatgatgtgtaaattttgaaaagcatgatgagtttggtgtttcaaaatctaggatacatctattccaatttgcttaa

SEQ ID NO: 93093 - DNA, 252 bp, Glycine max
cccaggggagtttaccatgttagagcttgctcaggtatcttactcttcttctctactctcactttcatttgttcattgtttctgtttacaattatgccttttccttatttctgtcagaatatgctatgacatgtgtattttatttttattcattccttaatcaatagcctaacagtaacatatagcaaagtagttgtgccttttacagtaagggcacacttttggcgagtggagtgagattgaagttacttt

SEQ ID NO: 93094 - DNA, 253 bp, Glycine max
ttatttcccactttctgttgttcaaatgttcatctcttcaatgatgaaaacaatcactttttgacccaaacacagtttcaactcccacattacccatgcaattcacattaaccccaacatcagcaacagaaacagcaacttcctcgaagaaaagatctcactatcaccgcatttcattctcattattcttattcttcactcatgcctagggtaaacgaatctgaaaaagatggatctgaaaccgaaaccctaa

SEQ ID NO: 93095 - DNA, 252 bp, Glycine max
gttagtatgttcttagcgtgcccctgtacatttccctcattcattgatgttcttgggaattgttttgggagcatgttcgtttagcctttggttggtttccagaactgctggtttggatggggtaggacttgattgaagccgggtgccagctaaatcctttcaggtcttccacaactcactactaagaataccattatgatatactctctgccttgtttctcatgcttacgataggtcaaagatgcctttgtc

SEQ ID NO: 93096 - DNA, 252 bp, Glycine max
cattcatgggctctacgatcatggtaaaaattatggattccaggaccatttatgtatgctaatatatgtatgcactttcagattatatatgactgacaatttcctcatatgttgccatattgcagagcatttccatgggtttaggaccggatggtgagctacgttatccatctcacccccagctgctgagtaatggaaaaactcaaggtgctggggaattccagtgttatgaccaaaacatgctcagctttc

SEQ ID NO: 93097 - DNA, 251 bp, Glycine max
gccgcctcaaccacggttctccctcacccctttgcttcttctgctcagtctggcagccgagtccctcattcatatatagtgaaaagaggatagttgaatgaaaagtgcactgtttatagcttgagagagtgcaatcaatatacctgaacaactaacatgggacatatagctactctgcaacataatattttcagcttccattctttgaatggtctgcatatttgtaacaaacaagagagctgtattttggg

SEQ ID NO: 93098 - DNA, 259 bp, Glycine max
cacagatagaaagaaaagaaatttcaccgtaccagagaacaaggaaggatagaagaaagtgaaagaaaatggcgttgtacatggacgaagaagagatttggaagtgtccgaagcatccatcaaagagaagaagaagcggaatttgccctacttgccttcgagaccgtctcgtaactctttgccctgactgtgctaacgtgcgcccctgttcctgctacgccaccagctcctcctcctcttcctcgtcttcctcctcctt

SEQ ID NO: 93099 - DNA, 253 bp, Glycine max
ctcatgtcatctacatgatctaccagacttgcatatactatcactaaattaaaatgcattttggttaattcattcataccagccaatcctcgtatattttagttagtcactactcgatctctatctatcttattggatttcacatttcacgtctttagctataggatataggaaacaacatatatcaaacatggttaccgcagatattgcgcgaacagtagtcggtatcataggaaacatcatctcgggctgc

SEQ ID NO: 93100 - DNA, 257 bp, Glycine max
ataaagtataaccttaaatataagcataagtaataattatatttctcttatcctatttaacaaatatataatttatataaaattattgttttaaacattaatattagatcatatatgattaaaatcattgactattatgaaatataagtttggttaatggttgtgatagttttaagtgaactttagatcaacaacatggagttaaaattttgatccaaaacttaaatatttatagattaacgttttcatcttttttg

SEQ ID NO: 93101 - DNA, 264 bp, Glycine max
aaaagagctatggccttatacttgattgctgctcatttggatccaaaagagtcacctctttggaaaacgatttttacctggtccatagaacaaggttatgttgatcaagccggttattgtcttttaaaagcaataaaagcagatcccaaagatgttactcttagatttcatcttgcaaggctttatgctgaacttggacattatcaaaaagctgctgtgacatatgagcaagtgcataaactctgttgtgagcgtattgatgca

SEQ ID NO: 93102 - DNA, 260 bp, Glycine max
agtagatccctctgctgaaatcacacaagaaatcaaagaccctcaagattcaaaggaaatgtcttcagccaaatctctccaacagtcgctcctcatttctggagaaaagtctgtttgtgaagaatttggtccttcaagtaaaggaagtaataggcttgataaagttagccggccaaaacttatgtgcatctccactggtgatgacaaattcatggtgagggaaagactgtcatcagtggatgaaactgctccttcgatta

SEQ ID NO: 93103 - DNA, 251 bp, Glycine max
tcatactcactataattaaatgcatgagcaaaggggataggtgagaaggaaatatttcaaccagaaacaatattgtttttcatcaaactttgcgggtctttgtagagtagatgatatactcaatggttgattttaattcatatgcataatgcctcaaattgacatatcaatgtgtgcgtctgagaagttatctcacttaatttatatagtatatgctaaattgtacgagtatatttaactagatgtgttca

SEQ ID NO: 93104 - DNA, 139 bp, Glycine max
cttcactgtcacttttcaaacgatgggacattgggtcactcaatggaagtggtagatatgaagatgatatttatgatagaatatggtcccccttcaattcctcatcctgggaatctgtcagcacttccacacaacatag

SEQ ID NO: 93105 - DNA, 248 bp, Glycine max
cttgtggcttgtagatattcaggcgtagagacaaacaaagatccagtgtgcacttgttccaatccaacaccatactctctctctgagatattttggaaattgaatatgttgtatttttttgtctcttgcttatttcgttgtgtgttgtttttctctaagatattctggaaattcagtgtgttgttgtattttcttgtctcctgtttacttcgttgtgtgttgtttttctctaagatgttatggaaatt

SEQ ID NO: 93106 - DNA, 253 bp, Glycine max
gtttcatacattcaggtctcagtttaaatcataggaccattgtgttagggtttaacttttggcttccagtactatttttccgttttgtcttatttgcatcttattttgttttagttttcaataagtttgtcattagatatgcttcacttagacattaactactttatagtatatttttcttggatttattggttaatcctttgcattctgttggtaatttatatacattcttctttcctatgaagtattctaa

SEQ ID NO: 93107 - DNA, 247 bp, Glycine max
caaggatacatttaccagcagaagtttagtctggtgaacataaagttgaaatgggtgaaagataggacattggatgctgttgttactggtcagagggatcttaaggcagctgggattcttgtctccatcatttattcttcttctgaatgctgccttccaatataccatctttctcgccaccgtggacaacttggtcttcccagtgacctcaaactttccacctttataagaagatatcccaacatat

SEQ ID NO: 93108 - DNA, 250 bp, Glycine max
ttcagagccaagtttcaatccagggcaggttattgaacagagcacaaaaacattggacaacaaacctaatactactgattcaagtcaggaaaggacagctcagggtcttgagcaagaggagtgtcagacgttgcgtgaatcagcggaggtgcctgatgtgattggggacgactccgttgctggcggtgttgtctctggttcacagaacagttccagtgtgtatgaggttcagccgggtgtagaatcaggc

SEQ ID NO: 93109 - DNA, 244 bp, Glycine max
taaaatctccaacacccactccctctttctctctctatacaaatccaaacgccgtgatcatgaatttgatccgcaaatttggctaatcaagtgcctcctcctcctcactcttttccttttcttcttcttctcctccgcttctttctcacacacatccacacacactctcatcaaaaccatttcccatttctccgacccagatctcctccgatctccgatcactctccggctacaaacccacttc

SEQ ID NO: 93110 - DNA, 123 bp, Glycine max
cgcatacacgcgcacggaattccgctcgacgtttctacttatggtggcgaatgaacaaagcgaacgaggaagaagacgagatcgaagactgggagctagagtactggccgcacagattttcct

SEQ ID NO: 93111 - DNA, 136 bp, Glycine max
gtcacgatttgctttcacagggtacaagagttacacgccatctccttcgaaaagatcagcacttttaggagtttgcgctgcacctggtggaggaagtgattttggaagagaatcagaggttgagataagctgggaa

SEQ ID NO: 93112 - DNA, 266 bp, Glycine max
caatgtggtcctctaatggtaaaggagttaaagttaggaagcaagttgtgttagatggtcctgttagctgtgggaagagcattgtgcttgcaatgcttgttcagtgggctcgagaagaaggttggctggtcctctatgttcctaaaggcaaggattggactcatggaggatttttctataagcacccacaaactggtttatgggacacacctgtccaggctgagaatgtcctcaaggattttttgaaatacaatgagtcctaccta

SEQ ID NO: 93113 - DNA, 272 bp, Glycine max
ttccgacgagtggtggtgccactgagggggggtgcttcgttttgatctgagcgagtgagcgtttcgcgatttctagtgcagttcggggttttaattttagggctttgcggtgtggatccgaactagggtgacgcgtttggttttggtttttgttttatgcagcagcaagaggacgaggaggttctcgtgccgcacgcggatttgcctgcgaacaatcaccaacccatggaagttgtagctcaacctgaaaatgccaataccgtggagagtca

SEQ ID NO: 93114 - DNA, 262 bp, Glycine max
gatctgcagcttattacatcggtatatttatactgtgattctctaacagaattgtgattatgtgctagggaacattacaataacagaattggttatccttatctcctagaggtagacaacaatattctgcagatcccttgctgccagctctgccataacaagcaacattcacacataatccctcaggtacgcaggctttgtgattgttctcatggttcacacatctagttgcacccttgtcatccattcttcactagaccca

SEQ ID NO: 93115 - DNA, 265 bp, Glycine max
agaggagataaagaagcacccgagacagcaccactgcaacaccgtttcttccaaccccttctttctaccaattattattcctatgtcataacgatggtaaacctacaaaaggttgaacaacatgttacaacagaaggtcaaaggaaaaagaataagaggaagaagcaagttttggttcctcgtcctgcatgctcatgggtgtattttagtaaagagtttatcaaggagtacattgcttcccatccagagtcaccaggccttaaag

SEQ ID NO: 93116 - DNA, 187 bp, Glycine max
gcatggcttcaccatttgattagctctgtaaaatctagacagaataccttgagaccaatgcctacacggtctcctccaaagggacacgaacttcagtctaagatgcgacagttattaattctatctgtggatagtagcaacaagccgttgggaactcaaatttctcatgaggataggagattattgg

SEQ ID NO: 93117 - DNA, 266 bp, Glycine max
gtgttacgtcaggtattcacacagtctgatgtgtttgaaatggcacttgacatgagaaatcagtttgatgaagttgaaacacttaaacacatagaagttttgaacccatctatgttgtgtgacagtgaagggtggttgttaggcaaccccatgggaataaggactgagagagagattcatgcagaacatgaaggtgcaaaaatctatagaagattgtaccagaaaccttgtccatgccagacataaatggagtggaacactcatat

SEQ ID NO: 93118 - DNA, 278 bp, Glycine max
attcaaaatggggttgatggtttgaagattgtggatggtgttgaggccatgaaaatggagcctgaattgcaatgcgtgaaagctatactatcacctctcactgggattgttgattcccattctttaatgctttctttagtgggggaagctgaaaatcaaggaacaactttcacatacaattcgacagtcattggtggccatcttgaaggaagtgagatttgtcttcatgtgacagaaactgaccgtcttacagaatggaaagggacatcaattttgcc

SEQ ID NO: 93119 - DNA, 105 bp, Glycine max
gtcaccatattctacgattgtccccccttcacatatctaccgcctccacacagcattacgtgcgggtatgctgtccccagtattggggagggatttcaggatcca

SEQ ID NO: 93120 - DNA, 150 bp, Glycine max
gttgtgaaactgagatcaaactccaaagcaaaatggggtggtgatccttcataacattttcattcaaaaccataatgatattgttctttttatctacttccaatatctagctttttgttttctctaacattcaatacctgatgcagtgta

SEQ ID NO: 93121 - DNA, 160 bp, Glycine max
ggatccaattacatcatggccggctcgagatatagaaatgatggctttggttttgcattccctttaaactccaatctcaccactcacttttcgagagccatcttgaaggtgactgagagtgagttaatgaatgaaattgagagaaaatattttgggaaga

SEQ ID NO: 93122 - DNA, 269 bp, Glycine max
ctttaccccatattcttatatttttttttatatagtacgacgctgagaaagttttttgctttttaatcgatatgggattctccgagaaggcgcaagtagaaggagcgtttgattcagataccagcaacaataacaataatcgaaaatgggtcatcgctggaatcgcgttgcgtgcaccattgaagccgatatacactactatgatccctacggagaaggaacaaaaggaagaggttgaaattgaaacgacagaggagtgttcatcatgt

SEQ ID NO: 93123 - DNA, 269 bp, Glycine max
aagatggccaagcaaaggaaaagaggagtacaagagaacggccaaagaagaagaaatggtataaccttcacttaagagttgataagagaaaggcttgctaaggaaggctttgctaaagcaacaacaaccaaatgaagtggaaggtttcgtttatgtctgtcactcaagcatgtcaaaaatgacaagtcctcattgtttatgtataatcccccttctccccttttttatttgtctctcagtagctcattttcagaatcgtactggtaaat

SEQ ID NO: 93124 - DNA, 123 bp, Glycine max
gaaatagttgtaacatgtaagactaatgaacctgcatgttgtgtatccgaagtccacaatatttaaggctagatacgatcgttttgtattgtttgtgaggttgacggtctataatttgtcatt

SEQ ID NO: 93125 - DNA, 267 bp, Glycine max
gggaactctcacgaaactcaactctctctctctctctctgcctcaccctcttcgctcgcaccccatcccccatttcatttcagatcgaacccttctccctcctcgcactccctttcccattcgctgcggagttactcacacccacaccttgttaggctcacattcagactatagtcgtgaatgctgcggtggttcgtgttttctcagaactatggctagtccaactggagaattgacaagccataacgacagtaccgctgagccgat

SEQ ID NO: 93126 - DNA, 295 bp, Glycine max
tgagaggtacattttttttgtgttgagattatcgatgattgcatttcaagcacttttgagctactactgtctttctctctactaattgcattcctggaccgttgatttcaacagcaatggtctccgattcctgcatatgtaaaaacaacaattttgggagatggtccttttctttttagttagcctataaaatgaacttcaattcaattttcccaataaaatgatttcccccaaagctggaagtttaaaagaaatttttgtatttatttcaatattttcttatgaactgttttta

SEQ ID NO: 93127 - DNA, 290 bp, Glycine max
gtattccttatctgctacgtgattatgaacaacaaaacagtaatattttatttttgtctcttgaatcagcatattattattttatacacaagtggatgaaatttgaatgataagcgagcaagtgatgagagtttacttgggattatgagaagctcgtctattgcgagcgatgtttatcctcatacttccatgactctgatgctcttatggattgttctccttcatccaaacacatatccgtagcgtacactctattattttattgttagaaaaatccagtagatggaatt

SEQ ID NO: 93128 - DNA, 287 bp, Glycine max
tctcactctggggcctttgctcgacctggctccctcactctctctgctccgccgccacggaggttgatttcggccaccataggccttgccttctgattttgcccaatccaagctgcgaccatcaaagctatttccgcccaccacgatacatttcataggtgagaaggagacgtgactgaaaggaggagtcatatgacaccataatgttggaaaagtatggagaagactcttcaaagcatccattggttgattcaacagtgtgggcagatgtgtcagattcaaagaag

SEQ ID NO: 93129 - DNA, 277 bp, Glycine max
attcactcgtatatagtacttccttgttattatacgtttgtatgcatagttaatgtttttctagtctacgcatgcagtttcttctaacatagatattaagagctgagctatatatatatatatttactgaaaagttcaatcgattaattttgcgttgtagaagagctgaatgtttacatggtcctaaccagtcgttctcttcattcttcaagaaccatagaataataattagctaactacgactatgagcatgctgattagtctcttagtggttcaa

SEQ ID NO: 93130 - DNA, 234 bp, Glycine max
tgactattgaaaatgttctatccttatatgagatacttggagctacaaatacagtttcttagtagatagtaagaagttgaagctagattaatttcttgtagtaacaattcaagcaaattttgagctaataaaaaaatttcccctttgtatttagtatggtaaataatatccgcatatatcccagacccattgaactgtatgaaatttatttgaaattgtgatataattgaaaaa

SEQ ID NO: 93131 - DNA, 177 bp, Glycine max
ggtggagttggggttcaacctatgaacggtggattccaaaacatgggtggtggtccccacgttatgtctgggcctaatgtggggcccatgagcatgcctatgcccaacattcccgccgttcaagggcttccggccggccccgtcaacggcggtgggttcttccaaggcgcaggtccg

SEQ ID NO: 93132 - DNA, 165 bp, Glycine max
attttcctcaataatttttgcagaatgtcagtgcagcagttgaaccacaagcagaaagtactcacaatcatcttcagtttagaactgtggagggccaacaaacagaatatccatggaacggactctgagctgtggccttatggctacaaatatgaagtttgactc

SEQ ID NO: 93133 - DNA, 281 bp, Glycine max
gttcgaggtcctgaggatacaccagggtattgggtggtgactggggcaaagctgtgtgtagagggtggtagaatgtcaatcaaggcaaagtattccttgttgactatattgtcggaagaatctctgctgtagtgagaagtcatagcaagttagttaatactgttattgtcttgttgtaaatatcttgtaccaatataccatttatttattttttttaaaaaaaaaagttataggggggagtgtcgtctcgtgctaagtggcctgagtatggcaatttcatt

SEQ ID NO: 93134 - DNA, 166 bp, Glycine max
gcttcttcgccgtccggaccggatacgccgatccgtcgctcaccgacaattccgccggtgatgttgccgacgaaaaggacaagatgggtcagtctaaagtggattctcaagccagtttggcgtatctgatcaagttagaactgttggctgccaagaatcttgtcgg

SEQ ID NO: 93135 - DNA, 170 bp, Glycine max
gaccttcctaacttggtgggtaaattgttcttgcatcaactctgctttggactttagtactacgctcctagctgcacaagcatctgcagcagcttaagagactaacaaggaggcaagagaataactacaagagtacaagattctccctgatgatggggcacaagtatttg

SEQ ID NO: 93136 - DNA, 159 bp, Glycine max
caaactctaatcctaaatctaaggagagacaaaatttcacaagataatcagcaaataagatttgtcatgcattttgagtaattcttagtttagaacacagtgaaggacacttgagtctagaattactgatattagtttgattctgtcgagaagcttgag

SEQ ID NO: 93137 - DNA, 134 bp, Glycine max
ctctattccaagtctttttttgagccttagcttagctatagcttgcccatttccattttcttgagcctttcttagccttgtcactcatccattatcatttataacttttttgttcatcaccccacaaacatggc

SEQ ID NO: 93138 - DNA, 104 bp, Glycine max
gtccaccagtttcatatgatgtaccaagagttgagccctttgacgcaaactcaagagcaattcccactgctcaaccactctctggatcacaaagatcaagtact

SEQ ID NO: 93139 - DNA, 275 bp, Glycine max
cgctccgtttggttacagaatacaaacaaacaaatagaaaacccaaaataaccgagaaaagaaaattagatagagagaagaagaaagcgtatctggaattttcgtttcgttggtgtgtcgtgtgcgtgtggaggttcttttctttgagactttccttcaaattctagattgcttccctttcttttctttcccttataaccaccaacctctccctttcccccttttcatttcttcctcgattttccatttccataaccttagtcatcctcttcttt

SEQ ID NO: 93140 - DNA, 192 bp, Glycine max
cttgtaagcatcaataatatacctttgggatattacatgaaattccacattttgtagctaacccccatttcttgtttctcctttaaaattaaaaattatttgctagagttgcatttctttgcttttctcctcccaattctgttacctctaaactttggttacttcctaatcagaattcttagtatatgagat

SEQ ID NO: 93141 - DNA, 305 bp, Glycine max
cttttgcagccgtgtctttcaattcacagatttattcctgcaatgacaaataagctaagtttatgtgcttcaaatatgttactttgaacatttaggacaaagtgcttttgtttctagcataaatagatcatgcattcagtattggaagcaaatgggaatctaaaatgtatatgtcacatgattgttcctacagtttgatgagcaaagagatcaagtggcaatagagcaaattctgcgggttatttttctggaccctgaaaagcctagtcctgtcctggataagcttaaacgaatgttggctgagg

SEQ ID NO: 93142 - DNA, 292 bp, Glycine max
attatttcccttttgtgttcctttcgctcattgatatgccttgtgactctttcacttttctcgacactttttctggtttctttatagcatcatcgtattcctcacctcggcagcccaagtcaaatgttttttctttcaacttagtgtgtgtaacataaatttttatcatactaattgattcaagattgtgttttgacgggattctaaccagcatgttttatagagttctaaaatgaatcagtgaacttcagatatattcatgcttgcatttattgatattgcatagcatctt

SEQ ID NO: 93143 - DNA, 276 bp, Glycine max
ctttcattggtttttttatgctgtggcatgacacttgtgcttattgctctttttctatcccaaatggttaatggcctcttgtgtgccgtgcttaatgaatgtaaatagttgcatacagattgtgagcatgttatataccatgatgttgaaatttgaggaattgggctaaaaaatgtgttgcattgtttcactttcatatgcagggtcaggttcaatctggaaggcttcggtataagctcaaacagggaacctctggaagagatgttctatagagta

SEQ ID NO: 93144 - DNA, 281 bp, Glycine max
agcaaatctcaacccaggccacagtactgcaactcatctagagaaatagaacaagtcaccattcatcaccaaccttaagtgtgatagaaaagtgatctagatattgatcaggaagaaaaaaatggcatcggagaaagaggttgaaactgtaatagttgggaactacgaggaaatggaaagcgaagggaagcctagggatgcaaaatccaggttattaagtttgttgtggcatggtggttctgattatgatgcttggtttaactgtgcttccaaccaggtgg

SEQ ID NO: 93145 - DNA, 279 bp, Glycine max
agctaattatcttgctgttgattattacaagaggagtgaaggaggaggttcgtttcaagccgtggacactctgaatgggaagctcttgtgtggttgtaatgatgtgcatgcgtgtgtgcctggatctacttcacaagctagctcagcatagaaagcatagcaacgagcttcttgaaatgtttcatcccacgcttcctggttctgaataccatattttatgcagccacagggttaccaaatgtatttgattgacaactatgaatgcgttggttatagtta

SEQ ID NO: 93146 - DNA, 294 bp, Glycine max
ctcctcctcgttggggcgtgagtgatgaatatgatgtctgagacaactcgaagcttttgcaaagccaccagtccctccaataccacttccattattgaagctacccattcccaagttcgtgtctttatgaggagaaataagagacccagaaatatggccctcaaacttgaacaaagcgatcatcaggatctcaaggttccggttacacacaagtttggcctaccagagattgaagaatttgcgtattgtggagcaaaggaattgactcagtgtgggaagtctgaaatgggatca

SEQ ID NO: 93147 - DNA, 287 bp, Glycine max
  unsure (1)..(287): unsure at all n locations
gtcgttttaatgaatgccatttgattttcagctttgaccctcccaacaactactacgactacacactttaactgttcccgcacctaataccatcgtgttcttcgtaattccattaaatatcaactgcaataatttttgttcgttttctattcccaacaacaatcgacgccgttgttcgttccacatagctagggattcagnaaatgccgccggattcctccgagctagacctcgacgatcctgacatcgagtttgttgaggttgatcccacgggtcgctatggtcgg

SEQ ID NO: 93148 - DNA, 291 bp, Glycine max
ccagtagtgacaaaagtcacaaacagcatatgtgtccagagattggctgtggaaaggtttttagatatgcatcacagctacaaaaacatgaagattctcatgttaatttggaatcagtagatatggtgtgcttagagcctggttgcttgaaacatttcactaatgtccagtgccttcaagcccatgtgaagtcctcccatcagtatatgacctgtgacatttgcgggacaaagcaactgaagaagaatattaagcgccatcttcgatcacatgaagctgaaggcagttcat

SEQ ID NO: 93149 - DNA, 269 bp, Glycine max
gtttcagtcatgggtgggtagcatgcaacaatagtgcgttagtaaactgtttgcattccattttcttctatgcttctggttctggcattgcgttagttcctaagggagagaggaacccgttttgtgaacccttttgttttgtctttgtttttggtttttctcaccaccatgagttcttcacagctcttgaacaatgttggtgaagatagcagcagtagagacatgagtttctcccctccttcttctcgtaatgtgggttcctcacaaac

SEQ ID NO: 93150 - DNA, 288 bp, Glycine max
aaccaaaccaagccactcaagcctagctccaccaattcaccttccaaaaccaaacccagcgacactgccctcagcaagaagctcaatagtaagaccaagaagctcaacgtcacatcaaaatccccaccctcaaaacccggcaccaccgtttccatttcaagcaacaagaaaacattggatctcgcgagacccactaacaaaacaacaaaagccaccgccaccaacaagcaagccaaaacaacaacaacaacaaacaagaaacaacaaactcagaagaaaccgacgaaa

SEQ ID NO: 93151 - DNA, 281 bp, Glycine max
ctctcccctttcacttcacatcagtgctcattttcacttcgccatactctcccttttaccaatcttccctgagaaaaacccccctagagtctcccgccacttttcactatcttatgatataccttcccctgttcagcttcttctagagtaccctcatactacattatttttttctcacttttcttccatacccatttcccataattctattttatcctcgaatgtatcaatagttcctcgatcagactcatttgttcactaaatgtctcttctttgcttct

SEQ ID NO: 93152 - DNA, 200 bp, Glycine max
agaaattcttacgagaaattctttgtcctcttaagcttaatgttaagctactttgctatcaatttaacgcgtcacgtaattgtgtatgtgacactatgtaattgtatcgcacttttattttatcataaattaatcttgaaagttttttttatacataatacttgtatatcttaaaagttgtagacgttttctttcatttg

SEQ ID NO: 93153 - DNA, 134 bp, Glycine max
ctctgccgacactccgatagcgaacaagtaccgagagggaatgacgagggtaaaaaaatactgataaaattgagatcactacgaaaggtaatggcagggaattggattgacgccattgaaggttttaatttaaa

SEQ ID NO: 93154 - DNA, 288 bp, Glycine max
gcaattgaagcattgcgcacagctgcaaaggggcactctttattttcataaccccctaacgtagattaaccgaacttaccctcttattcttctccttcttcttcttctgcatcctttttccaccatgaccgattcttacgccaatcacaatgacccatctctcgctaccgataccgatgcacccaatgatgctgaagatgaggtcaagttgaggtctagggaccaaagactgggtcctgcagttttggagtgcaaacaagcactgctttgcaggattgccaaatcgtc

SEQ ID NO: 93155 - DNA, 275 bp, Glycine max
aattcactttctcaaaaccacaaataagaaccaacttcttttcaattcattcccgtcattgtctccttcttcttcttcttcttcttcttcttcagacaagcatttgcttttgggtggtaataactcgtacccacttttccatccggaatcgggcactggtagcttagctcgtgtaaatgtgtctctggcgctggaaattcatgagtaaaattaatttgtgagatcgagagctttgagttgcgaagatggtggctaattaattgactttgaggtca

SEQ ID NO: 93156 - DNA, 283 bp, Glycine max
  unsure (1)..(283): unsure at all n locations
tcaatctcaagatcaccggcgacttaaccaacgagactttacagcaaatctcgctgccgcggtgcggcgtccccgacatgaactttgactacgatgtctccanagacaacgtgtcgtggcctatgtccagataccatcggagatggtttccggacagaaacctcacgtacgggttttctcccgcgagcaagatcccgtccaacgcgacgaaggcgttcagggacgccttcgcacgatgggcgggatcatgtgctggtttaaacttgacagagacgaattacaa

SEQ ID NO: 93157 - DNA, 308 bp, Glycine max
gtagtaactcggaatcggctcgacggtcgagctcgaccgattcggctcgagaaagaatataagatagaagattacggttaggaattgaactgacgcaatggctggcaccggcatccacccataccaccagcaatgggctccggcggctgccgctcctcctcctcctccggcagccgcgggcggtcctcctcctcaccctggggaggaggttcgaacgatattcataactggtcttccggaagacgtgaaagagagagagctgcagaatctgctgagatggctgcccggtttcgaagcatctcaactga

SEQ ID NO: 93158 - DNA, 277 bp, Glycine max
acaacactttctatatttattgtccattctctctcacgcactccataattgcttcttgctttgatcgattcattcggtgatcggtgatcggtgatcagtggtttggtgttgttgatagaaaaatgcattccagccctttgcttcttgaggaacccattaggatggcatccattcttgagccatccaagcctgtcagcatttccttctctcactctttcgtgttcgtttctattttcatgtgtgacgtgttctaacttgtaagcactgtgatcatgag

SEQ ID NO: 93159 - DNA, 162 bp, Glycine max
tggattttggctagaaaatgcttaacaaaacattaaatatatacaatttgattgatgaaaaaagacagaggtcctcttaacaaagattaccccgttgaaggagaaggtggaagtgattgaaggagatgctatggaagagtaacaatcgttccaaaaaatatt

SEQ ID NO: 93160 - DNA, 284 bp, Glycine max
cccttctctccgtgaaagtccggacgacatagtgaaaagaatggtatcaatggttgtgcgattagaagagctagttgtatacggccccttctccccttccggccttgcttcgtggctatcacttgttggtatgtctctttctcagcttgagcttcgaatggacaatcttgctgacaaccaagcctcccatgaaagcccttcaaaattggattgcattggtgcagcaaggaatttggaatctctaaaactatggggtgtcttaatgatgcattccccaaaatggg

SEQ ID NO: 93161 - DNA, 148 bp, Glycine max
tcttgtgcacatgctcaggacagcgcctccattgcgccaagatccaagttgttattcatcccattccccaaaggctgaacttgagggaggagttgccactgcttctggattcttcatgcctcgaaagacagcggatgcactcgaagag

SEQ ID NO: 93162 - DNA, 160 bp, Glycine max
aaagaagcgagcatcatctatggataagattatgaacaagctgagattggctcagaaaaaagctcaggaaatgagaagttcagctttagccaaccagcctcatcatgttcccagaactcctcacaaggctatattatttagtagagccagtcagatgggt

SEQ ID NO: 93163 - DNA, 151 bp, Glycine max
ttcacaatttccatagtttccttgtttccaattattgcatgccaatcatgtacaatttagagaagccacagagagatgataaacagtttctaactccctctttctcttccactctcctcgaccaaatttatcgttccatcgacgagggtga

SEQ ID NO: 93164 - DNA, 257 bp, Glycine max
  unsure (1)..(257): unsure at all n locations
aaagtcgttgaacgataacgagggtactgttccattatcctaaaaaaagaagaaatccactgagagtggtcgtgttcagaaatcaatcaagggttatatttgtttgctactgataaaggatgacatcaagtgaatggcgtgttgaaagaaggcanagctcaactaatgaatcccctctatcgagggatctagaacatgcaactgaaactgggtcactctccattgttgtgcctggtgcttcgggtgacttgctaaga

SEQ ID NO: 93165 - DNA, 151 bp, Glycine max
agcacatggcattggtgggagctcaaaattgaacaccattagtgtatgttgtgttgcaattcttgttgaatagggcttaatattggtagagtggtttaggttcagattctggttttgatctgatttttataagatgtgaggttaaatgatc

SEQ ID NO: 93166 - DNA, 150 bp, Glycine max
cacaatttcccattttattcacctccatcgtttcacccactgaatcacagttgtcttctcttcgctttctaacaaaaatcgcttctgcacacacaaggattcagaggcagaaggaaacaataccttgaaagtagatagatgtcgtcggct

SEQ ID NO: 93167 - DNA, 228 bp, Glycine max
  unsure (1)..(228): unsure at all n locations
gacctatggaaatacacattaaattaaaagagagtgggggtggtgaagaaaactcacggtctaactcaattggttgaacaaggtgcatgagttgttgaaaaacccctgacattgtcttcgattctcacggatanaaagaatctcacgtactgaaagcccattataggtgccactgtcaaccatgctcaagtgttggctgtggaaccaccataatccttgggacgagat

SEQ ID NO: 93168 - DNA, 143 bp, Glycine max
gaacattctcattccagtacaaaacaagggaataatgacattgaatctggcactcaaactgtcacttcttctcaggttgctagctgttctgcaaattctaagagtggcttgaaaacatctgttttgaaagttgttgatcagtt

SEQ ID NO: 93169 - DNA, 201 bp, Glycine max
gccagttcatttccgtttccttattttcagcaccaaaaccaaagtactgcgcatattctccctctttgccatttctctctcactctgcactttcttcttgaaatttgatctcacttctcgcatctttcaacatttttctctctcaatctgctgtttcttcttcaacatagagatggttaagatggaagaagagaagaaaga

SEQ ID NO: 93170 - DNA, 197 bp, Glycine max
cgccaccagcaccttctgcctccgccatcgacacctacgacttcctcaagatcaaactcaaccctgacggcaattccctaacccgaaactaggtcattccaacagttcccccttcggccaccacccgctcttccgaaccagctctctcaaaagatatccctcgcaacccaaccaccaacacctccctccgcctcttc

SEQ ID NO: 93171 - DNA, 125 bp, Glycine max
ggcacaagcgtcttcataaacgtcgcccttgacttctcatagcctatgatgcattccatatcgtttctagggatgggcttactttgcgcgagaaaatgagagggtgacatttcgagccacattgg

SEQ ID NO: 93172 - DNA, 194 bp, Glycine max
tgaaagtgacaatctgagcaacaaagaaaacatgggtggttgttgccaaggtgttaatggggtttcttgttgcagaagtgcaagtgttgagcaaaacaacgagattgaagaaacacctgaagcacaaaagaagggtagcaaaatctgttctaattggcctcaattgcagcagcgtgatattctcacagctgttg

SEQ ID NO: 93173 - DNA, 209 bp, Glycine max
ttcggctccagctcgagggcggagaaggttggggtgcttcctctctctccggttagggaaagaaacgcactttttggttttggttttggatttcgatctcactgcattgccttctgctactgctaggtttgttctctccattcacttgcatgatggttgtgcagaactttgtagttgatttgaataaggcccttgttttccaggttggg

SEQ ID NO: 93174 - DNA, 195 bp, Glycine max
gtgacttgtttttctccaggccataagttatattcacggttattccggatgctgaaagtttacttacacatccaagctttctggtgtaaatatttctattcaaaatttacggttaggttgtatgctgtcactaactaatagtgaaggaagtgaatatagtgatagaaaaatctggtcaatagaaagaaaattttc

SEQ ID NO: 93175 - DNA, 194 bp, Glycine max
gggaattagagtccctctttcttctccctcccgcactgcgccattttcaagtacgctcactcactactcttcccaaaaccctaaaaaccgtcacttttttttttgtttccgatggccggtggcatcgacatgtccctcgacgacattatgaagcgctcagccgccgccgtagcctctcgctgccgattcagggt

SEQ ID NO: 93176 - DNA, 190 bp, Glycine max
caagccccgaaaattgtaaaacaggcttttcatcgccacgttcctgttgttgtgagggcgttagggcaatcttattctgaattgctccatatcatatctgatccaccacaaggaagtgaaaatcttctgacactggtactgcaaatattgactcaagacacgacgccatcttctgatttgatatctaccg

SEQ ID NO: 93177 - DNA, 184 bp, Glycine max
atgaaactgttgaatctgctgaggtgagtcatccttatgtttgtcttctccatgcttctgtaattatcaaagactaaaattggaaaataatctgctacttgctagatgatttttgttggtacttgagtgggatcacaatttattttgttgggcatcttttcttctttgccattatctggtatga

SEQ ID NO: 93178 - DNA, 227 bp, Glycine max
gagattcggctcgatggtctggggcatatgctaaaacagatgtcagacatggatactgtagagaacagcattagaggcaatggcgagatagccgagaaagaagagcaccaacaccataccagtaagacggagcatcgacgaggaggcatcagaaccttacccttcatccttgtcacgctcaccaactttaatggaacttctagcttcactcctctctttggagctct

SEQ ID NO: 93179 - DNA, 201 bp, Glycine max
agagtatgacatactggtaccagtttcagctggtgtggcacttctttgcctcttgtgcatatttattggattcgtgatgctcaaatccaaaaagaagaaggcctaatggctaatactgtcaatttgttgcacaatttgttctaatttttgaaacagtgaatttattaaatgcattttcgatcatttcgttcgaattattag

SEQ ID NO: 93180 - DNA, 200 bp, Glycine max
tgtgctgatggaatgaccctatcaaattgtggtctactgcacaggcctcttccctgctctatgtttgaacattctagaccactgccctacgtttgaatttctctggcttcattttgttgtggtatgtttgatattaggtcatttgattttgacagaaagtgccccaaagaaagttgtttaatttcaggtccttctgtata

SEQ ID NO: 93181 - DNA, 198 bp, Glycine max
tatgtttctgcacctaccatgcctccaatgttacctccacctggtgctccccaggcatcaggtcaactaaataccataccaaggcccccttcattagctccccctccagcagttcctggaagcactgctgctccagcttccaatggtgctccctctatggtatcatcagcaatgtatcaagccaatcctccggcacca

SEQ ID NO: 93182 - DNA, 199 bp, Glycine max
tccaaaataaaagtcatagttacctcttcgccttcctttgcaattgtcatttgtcgccaaacaattattgcttagctctcacaagcaagctttaacaacaatgaagaaagtagtgttaaagttggacttacatggtgatagaatcaagcaaaaagctatgaagacagcatctggcctttcaggggttgaatcagtttct

SEQ ID NO: 93183 - DNA, 259 bp, Glycine max
ctttcttcttcccacttcccatttcaaaccttctataattacaatgcatatttctctctcgctttaaaatttgagacacccaagaggagattgatcgatcgaattaatcgggcaagggaaatgatgcatcattgttgtggaagctcccaggggcacgtgatgggcacgtgcacatgcggcatgtatcacagcgaaaccagcgcttatggctcgatgctgttttccgtgcccaacaacagcgaatatgacatgtattcgt

SEQ ID NO: 93184 - DNA, 279 bp, Glycine max
cggctcgagcggctcagctcgagcgaatcggctcgagcggcatgagattgctctggatggctatactccagcatcaatggtgatctgttggcatgtacagatggagcagttcttcccgtcagtcaagtgtttgatgcaattagagagcttgggaatggagggcttgagcaatgggatcctcttgttcttacttctgcctcactcttaagcaagttgcctgtggattcttcctctgttgattttgtgattttaatctggctgtcaatcgattgtcctgtg

SEQ ID NO: 93185 - DNA, 274 bp, Glycine max
ctggaatggggggataggagcaaaatagaacatgatcatattgtagctatatttagaactgaagaacaagggatagagatatgcaagtcaaagagggtagagtcaccagagtgttagccattttaggtctagtaattgtagcagtactcaggaggagtctttgttacttttcttattctcatcatttttcatttttttttctttaatttctgtttctaaaaaaaaaaaaaggaaagatgtgaaaaaagaaaaaaaaaaaaagggggggccccca

SEQ ID NO: 93186 - DNA, 275 bp, Glycine max
ggaaccagtgcgacaccagcaatggccaaggatgtcagtggactggtcaatatgtatcgtataacaggagatgactgggatacatggggggatgtcaaagctcattttgatataacaagggatttttcgaatgctaatatgataggagcaaaaggtttaatggggaactcctggcctgatctggacatgctaccatttggatggctaactgatcctggttcaaatgaaggtccacataggtatagttacctcaatctagaggagaagaagacaca

SEQ ID NO: 93187 - DNA, 258 bp, Glycine max
acagggagatcctagaagaccaatgacaatgtgtttagatatttaaaattttcttttgtgcaagtcaagcttgctccgaatatccattgttttttatttggtatcaagtaattttgggttgagaaagggaaagaaataaggaggcgtggggagcagccatggtagaaggactggaatggtaaataacatgagctgatgatgttcaaaggtacgagaaattgttttccaaacaacattgttacagctagagtcataaca

SEQ ID NO: 93188 - DNA, 263 bp, Glycine max
ctttggttctactcttgtatatggttatcaaaatattgcctttgaggtgatgaagaatggatatattgcaacaataactctcttccaatcatgatgatggtacacttcttttattgtgtgttcttctatgaaaatttatagcttattcacatagcaagtaatgaccttaatattttttctttaaatctcacttattagttcaatcttaaaaacccatttttaattcctagcagtcaatgttagatcattgtcttcatttgtcc

SEQ ID NO: 93189 - DNA, 206 bp, Glycine max
tatttttaagtataagactgggatttccaagaaagggtgaaaaataatgtatataaatgcagaacagacacattctaaaatgagttagtgttgtagttaagttcaacctaaatctaaactttaaaatggaatcagaacctataacagttgtttgcagacattccggcttgcaaattttaaactttatgttgaaacttggaaatgct

SEQ ID NO: 93190 - DNA, 207 bp, Glycine max
tgagatactgaaagcacaatttttacctttgttctcactacaatgatatgtaaacgttgagaaggtgtgagagattttgtaattgttacggcatccatatcaggaaattaacagttatttctgaggccaaacctgagtcctgcaaagttgaaaatgttgttcacattgatcgtgtgtcaaatttgcactatcttttgcagttatgtg

SEQ ID NO: 93191 - DNA, 130 bp, Glycine max
aattaactaagctgaagaattagctgcagctatggcagcaagtaagcggacatctgcacaaactgatgatgattcagtgagcattagattgctgtttttataagttgattactgttacttttccacacaa

SEQ ID NO: 93192 - DNA, 305 bp, Glycine max
caaggtgcatcttctttttgttgttctctcaaactttaataatctcataaattagcagaacgaagaggaacaaaaacaagaagaagaattggattcgaaaatcgtagcgtagcgttggtgcgattgaacgatacgatgggaagaggaaaattcaagagcaagcccactggtcgccgccagttctccaccccggaagatatgcttgctggaacctctaaccgtcctcgaacttttagacaggttttattctgcatcctttccccctcttcattttgcacctctctctcaaagcaaacccatgtgat

SEQ ID NO: 93193 - DNA, 131 bp, Glycine max
gcggagagagaaattgagtttccgagatcaccagttttctctttgattcatcaatggcaactgcgaggaccgtgaaggatgtttcgcctcacgatttcgtgaaggcttatgcttcccacctcaagcgttcc

SEQ ID NO: 93194 - DNA, 297 bp, Glycine max
  unsure (1)..(297): unsure at all n locations
aggctcgagctcgagccgaatcggctcgaggtcaatactaatcaatctttataactttgtcctcgtgncaaccacgtatgccaaagtttgtactaaactcatcaactagctttctgcttcaaattgttatatttgggcaagggtaatcgataatttctcttcttttctttttgctttctttttttgatgttattgtctagtgagttttgaacttctaatttacacttgcaacatgaacattcattggatttattctatagtgtgttgaataagttgcattcatagtcaacattccta

SEQ ID NO: 93195 - DNA, 267 bp, Glycine max
cagggctacacctgttactgccccaacagctgctcctgcacctgcacctgcaccagctgctccagctccagctcctgctcctatattttcaggctcttctgtgtaatattttgttttctgttatcattggaattaccttttacttgttagattcctattttgaagatggaacattctttcaattcctatttctttgttttaaatttcttgttaaaagaaactttcttgaagcaggccagagtctgatatatatgggcaggcagcatc

SEQ ID NO: 93196 - DNA, 266 bp, Glycine max
aaaaaatactgatttattctctaaagacatcttctcagctaagaacaccagaaaaaaagaggaactgcaatgagaagaaatacaagaagggaaaggctttgaagatgggaatcacaaaccccttcaaagaccaaccctctccctcacaaagagacttcttccttggacactctatgctcttcttcccatagttttacttcgcttatacttttacccactacctttccctacatctccagaaactgagcttcctcattccactccca

SEQ ID NO: 93197 - DNA, 258 bp, Glycine max
gctggctgacaggaatgttgtatttgttggttgagcagactgatgcttcaacaagtgacatttcggaagtattttgtcgcttgcctcttccatttatcagtgaggagtttaagattgacttcacttggaagacatggacaataagatggagcagccatcaccatatgtacacataagacgcaatatatacttagtaaagaagaaacgtagtgatgcggatgatggtgcagggtgcaccagttgcagttctacttctac

SEQ ID NO: 93198 - DNA, 251 bp, Glycine max
gtcgaagcagcctaagaagatggaagcaggatggggaattttctaggttcctatgcactcttgtccaaggtgttctaatctcaaatacgctggtagatggactcaatgtacgcttttatgagtatggaaattaaaccctaaaccggcaatgtatgcaggtgttttaaactatataggactattctaaagattgatcctgactagttcatggtaacaatattgcaggttggtttataccattacctgtgatc

SEQ ID NO: 93199 - DNA, 173 bp, Glycine max
agaaggcgccaatggttgtccaaattgaagctgtgcgtgtgcagaaagaaatcgcagcagcagagtttcgatggttattgtgagggtgagttagttaaggtaacgctgtctgggaaccagcaacctgtaggacggaaattactgaggcagctatggaattgggatctgaaaaa

SEQ ID NO: 93200 - DNA, 263 bp, Glycine max
aacaattttggacacgtccagtgatccaaggactctggctgttgcttgctatgacctttcacagtttatccagcatcattctgctggacggatcattgtgtcagacctcaaggcaaaagaacgagttatgaactaatgaatcatgaaaatgttgaagttactaaaaatgcactgctctgcatccagctgcttttcttaggtgcaaagtatgcaagcttcttgcaggtttaatgctgtttctgtggggtggtcaagatgcactt

SEQ ID NO: 93201 - DNA, 250 bp, Glycine max
cttgaatgtgattacaaattcatttcatttcttgctaatttttgttgacttttctcattggctggctggatgtcttactgagttttgagagaatatttatccaagaggccatccctgatgccatacttccattgtctgattaggatactggatggatgggtacgggtattataataaccaccccatggatactcatttatttgtctattaaatattacatatatattatgattttttgttatttcataat

SEQ ID NO: 93202 - DNA, 249 bp, Glycine max
tgtacattgtattaatgttgccaatgtattgagattgaaatttagggtattccctcacagtaattttactcctgaatcgtagcttgtctaacaaatatatacagtcttccccgccttgtattttgcttgattgcaggttcccattttcttatttgcataatttatcatgattttttgaactgttattgtcctgtacattgtattaatgttgccaatgtattgagattgaaatttagggtcttccctcac

SEQ ID NO: 93203 - DNA, 254 bp, Glycine max
caaaaaaaaaaagaaggaaaaagagacgccatgagaggtagaggcagagagcttcttggcctctcttttgctctaaagcacaaccctgtagcaaaatcagcatcaccatcctcttctttctgtcgaagtagcatcacattctcaacctcttcctcctccgtagcccctcccatcaaggaaccaaagacttcaacttcggcatccaagtcacaaagggactcgctgattttcgaagggttcaagcaaagaaaact

SEQ ID NO: 93204 - DNA, 251 bp, Glycine max
cagagagcaaatgaaagtagctgattggactttgggtccgtttgttccttcgctttgtttgcttcagatatttttcttttttacgttttttctgttgcttcatcccaaacagagatatttcggtaaccaaacattttctcttccccaccaaaacagaacaaacacgttcgtctcgtttcgttcccatggcggtctccgtttccgcgtcctccgcgattgcttctttgaactccgaacgctccacgcgcttg

SEQ ID NO: 93205 - DNA, 246 bp, Glycine max
tctcaaatgcgttcctcaaacgagttcacctcatttgagtgcatgaaatatggaggagagatactttttcaattgaagtaatgcaatgcaaaatgaacttgaggctatcattctttggaagttggatgatcctgtattgttattcattgccttatataaaccgatgttggtttaaggcacaatcaattttgtaatactgccatttctttttatgaaaattggttttgattattttgaacgaatata

SEQ ID NO: 93206 - DNA, 247 bp, Glycine max
atgaagctgaaagttggcgaagaacagcagccaatgtcttgttgaaaagtggaaataagaatttactaagtgtactttcagattctgcagcaaatggtgttccaagtttagcaagagctagccttgtaacaatttcatggatgagcagctaccttcacttagttgatgatagaaagcttccaccaatggcattatcaatcctcatgccattgttgctaaaatacttgaattatgacaaggatgttga

SEQ ID NO: 93207 - DNA, 253 bp, Glycine max
gtctatgcttgacacaactcctcgtctctgcaaaagacaaagaaatactactaaaccacaaacaaataagaaacgaaactgtttcgcactctctctgcaacttcacacgcacaaacccaaaagagagagagagagagagagagactggcgaccgagcgaaccgaaacaaacagacaaaaaagaaaacttgggagacagaaagcaaagacaccactttaatatgtcaaacacaaatccctcctcatcaacatga

SEQ ID NO: 93208 - DNA, 250 bp, Glycine max
ctcgagccgctcgagccgcgacaacatcgtttcgtcgtcgtttcgacctcccttgccgtttgatctcaaagtgctgccgtttgatgatgctgccgcggatgatgatctacgccgcaccgcgctttgtctctgatgatgattatcgtgcgatgatgatttttaatttctcatttttttacttgatttttttgttattgctatgcagaagaaatatatatttaaaatgatgatcagatgtaagattatggta

SEQ ID NO: 93209 - DNA, 276 bp, Glycine max
tccaaacaaaacaacgagaattgcacaatgatgcagacagaggcaccatcttctccaagtttcagcttccacaacaactcttccgactccttccctcacgtcgacgatgacttcgagttctccttcgttcccagacacaccgactcctcccccgtctccgccgacgacattttctacaacggccagatcagacctatctaccctctcttccaccaaaacgcagtcgttcacgcttccgctaccaccgaaacggcaccgcacgagcctcgccgtcgt

SEQ ID NO: 93210 - DNA, 180 bp, Glycine max
cccagaactagatctagggtttattttccttttcattttgaatttgaacaagttttgcgtcttcaaagaaataggatgggagaattgaaagacactgaggcttacgaggaagagctcatcgactacgaagaggaagaagaaaaagctcccgattctgctaaacccgttgctgaatctggc

SEQ ID NO: 93211 - DNA, 262 bp, Glycine max
aaacaagtatgcagggtggtgcggttgatgtgtctgcttatgacaaagacaattggattagtggcccttcgagcatgctttctgatcaaagtgaagacatgggtatgatacaaagaattaatcgggagatgattgaatcatggcctgaatattcaggttttcaccccttaaattagggaaatacccttccctttaattttgacacctttgtaggagacagtggtgaatgtagtgaaccaactaattgatgaaagatattatt

SEQ ID NO: 93212 - DNA, 265 bp, Glycine max
gctcaatagtaattcaactccgaaccgcgtttctatgtccgactctctctctctactcagtaagaatgtatactaatattggtatgccaccgggggtacctcagcatcatcctcaacctccaacgaatttccaattggcacaacagatatcaagcttacacttaatctgaaggagcgtggtgtacttagatgccatgaacacacttcaatgcttgatcagtggaagctcacacctaaacagatttagttggttgggaaagctggt

SEQ ID NO: 93213 - DNA, 263 bp, Glycine max
aaagcatttgttcactcacaaagtgagcatgtgatttcactgacacttgtcaactctgcgttgtatatatatataaagacaacgggcatttcagttcaatagtattgaatcatgcatcaatcaatgaaaatgaagaaggtgttgaggagcttgttccaaattgcggtttttcatgtgttgttaaaaccaaaagcgggattggggagcagccacgactaaggagacgcgttgtcgaaggcgattattttcttcgagggacagcg

SEQ ID NO: 93214 - DNA, 258 bp, Glycine max
actctctatacatttcttgttatcttcaactcctccatttgcgcttgcagcaagcaaacacaatggtagaaatgaagggcatatgtaatgtgttgcatgggttgaaaccagtgttgctgatggtgttagtgcaaattgcatatactgctgtcaatgtgcttttcaagctcgccataaacgacggaatgagtgtaaaggttgccacagcatatcgcctcacttttggatctgctttcactgttcctctcgctctcattt

SEQ ID NO: 93215 - DNA, 208 bp, Glycine max
agcaatataaaggatgtagactaagttatatcaacatttgttatttgtatactcttagaattgttatttcttttgctccacattgtcctcaatcttctggattttgcattgatcttgacaaatggaaaatggcttctgtctctttttatcttgttttctctgttctttattggatggggatattgcatatctaatagtgcaaaacata

SEQ ID NO: 93216 - DNA, 207 bp, Glycine max
tgaacagctaagcataaactcaacacaaggtactgcacagaggagaattcgtttgtcaatggctacacatggctcaaataagacggtgaaaagtgaaagttgtgcacaagaagagctttatgcaaaaccagtcattgctgtggtaagatttttgtttgtttagcctgtgtgtccaagaagattgtccttgcttgtgaaaggagattt

SEQ ID NO: 93217 - DNA, 285 bp, Glycine max
catttccttgcatctattttttctttctcccatcttttacgttagtttcacgcttcaacatttttccatggaattcaaatatcgtgccgtccaagatcgaaggacaccgccgccgccgccgccgccgcaccctctttccaccggcacctacgtcttcgacagcccattacgaggtaacactttttttttttgcttttcctaatcttcgcgttcctttcaccaagagacccatttgttgttctgtcccaatgagtccgttttactaaccatacactgtccagggta

SEQ ID NO: 93218 - DNA, 275 bp, Glycine max
gatacatagaaacgggaacagtgcacatgcactgcaagtttcttcctattccagagtcacagatgattctggacctttggatggggtgacagatggtgtaccaggagaggaatgtgttggtgagaagcaaagagctcgtcgtttgctggacgagcaatttgatttgctcgaacgccaagaacatggaactgatgatgatgatggtgattactatgaaaattatgaagccgatgaagatgagtaccttgctgagaagctcaaacactctcttaaca

SEQ ID NO: 93219 - DNA, 278 bp, Glycine max
acagagcgtatcggctcgagggctgttattacagattgctgcctgcctgcttcttttagcaaattgtttgattgctttattcacaacataatctgacatatcagttgtgttattttattgaattttttttgttgtgagatttttgcacacaatgctttattatattgggttgcagctagacacatttgtttctataatatctttcaattagtttaaaaagatactaattatgcatttttaattttttgaatgtgccactggattggatttgacttgtg

SEQ ID NO: 93220 - DNA, 269 bp, Glycine max
ctctttcttctctctctagtctctcccctcgcacagataccagtgacagtgtgagtgaacaacaccaagcttcatgttcgttgctctcacataatgttgttaaattacagaccacttcattttgttttcctgctcacatttttcttgtccgcttcctatctcttgtcacaccaggcttcagggacagaaaacgagggaaaaaacgttgttggcctttctcggttgtatgtatttgctgctgcaccgttcgagagctcgccctttccctt

SEQ ID NO: 93221 - DNA, 270 bp, Glycine max
aacggtggcgcctaactaaatttcaattgcactctacattgaatcttgttagagaagagagacggtcaagcacttcactcacatttctagggttccattttgatctttgcgatgcagaagaagctaggattcccaatctctaaagcctcgaccaatttagattgttgtacggttccatttcggcaacttcgaagccattatctttgttccttcctcggattcaacttggaagttaggagtttcaccaacctgaagctcactgcaactttc

SEQ ID NO: 93222 - DNA, 269 bp, Glycine max
cttatgttggttagtaagtttcagaacatagctgctcaccagtgcgtggtggctgaacctttgctggtcttcgtcatctcacgaaatgcaagttctttgttatgtgcatatgtgtctaatatgtagactcaaataaacattttatatgtagtggtgtcataattgcatatatctgggatctcgtgtttggtataacagcaggttttatgttggttgccaagggactaacacaaccctcctccttaacccgagcttgggactagatatga

SEQ ID NO: 93223 - DNA, 266 bp, Glycine max
gtagactgttgggtagcgatggaacagtgggaaaagaagacatgtaaggtaatcctgcactagtaacacccttttccacttattttgattctgatactctttcagcattgagtgacggccaggagcaatacagcccaggagaaatcctctctggtgtcagctcttcactggaaaccaaccattatatgtataatagatcaatctccactttggacagtttcccattatattctgatcggaactctcttctacagaatgcgagttct

SEQ ID NO: 93224 - DNA, 288 bp, Glycine max
aaaaacggtccaaattctgtatctcgtaggcactcactcactctcttcccaaacacagcgtgttgttttcccggttcccgcccatagttccattttcgctctctcggtcgctctcactccatcacccatgggaaattcatccaaggacaacgactccgccacctccgccgacgcctccgccggcgacgttcagccctccaattccgccgtctactccgagggcgagaaagtcctcgcctaccacggccctcgcatctacgaagcaaaggtgcaaaaagccgagatcag

SEQ ID NO: 93225 - DNA, 286 bp, Glycine max
ctggtacctgtcacgatagtttggatttaggaccaaatcctttatgattttctgtaaattagcatctgaatgaacttcctttctccaatacaccaaccccttgacattcacagtggtgatagctgaaaagttcattttccttgagagtgcatctgctgctctgttttcagtcttagtttatattgaatctcaaaatgatatccaattaactttgaggcccatttaaattgtagttcaatcaccagtttctgttctgtcaagaacttcaaacttatctggtctgtta

SEQ ID NO: 93226 - DNA, 273 bp, Glycine max
agagaacaacacaacacaatacagtgacacattctcgttggttcaatacattacacttgcacagttccactgttgtcacttttgcaatgaacacagggctcgttgcaggtgcagccttgcttgcactcttggctatcaccttctccttgttgaaccctcaaaccctgttttctccgcctcatgttccgggctcgaaggatcaccttcacgctgctcggttgctccatgtcaccggagccgtcgggccggagagtcttgtcttcgacgccgacg

SEQ ID NO: 93227 - DNA, 280 bp, Glycine max
ctcgagccgcatatttatatttatttattcaagtctatgctttgagcgcattttatactacaataaaactttattagatgacctcttaaaacttgtccatgacttttcatgttgaggtatgaaactgggttttcgacaaattttcttggtgatgactggtgagggaggaggatggggggcaaaaagagcttcgcattgtacatatttatatttatttattcaagtctatgctttgagcgcattttatactaaaaaaaaaaaatcacaaaaaaccacagac

SEQ ID NO: 93228 - DNA, 279 bp, Glycine max
aattccaatcacttcatcatccactcaaacacttgacctgtctagcattggcttctcttttcccactagagcaacactccaagagctagaatatggagcagtaacaccaattgatgaggaactacttcatgatgatggagatgaactacacaaacttggaagggcacaaagggtgtgtgttgctagctcagaggatggaagcagccatatggtggctatcacagcaagctttttcaagggtgagtttcaggatggactgaggctttttggagtgcacaa

SEQ ID NO: 93229 - DNA, 266 bp, Glycine max
taggaataaaacttgagcatggaaaaggcattgcttacattgaaagttgtacaaatactctaactcaatcttatgcaacaggactcaaaggtagtagttgcagagtggttgaaggagcttatgttgattatcataggaggcatgtgttgcttgaagggtgtgttataacaaagggaaccacatgtcatttggatgaaaattgggctaaatggcttggaaattttgaagctggctctgtggttaattgtgcatttggtagtgagtgc

SEQ ID NO: 93230 - DNA, 273 bp, Glycine max
caagctcgtttttttcttcttaccatcttcatttccgcacttgtttactcctcaattctcttttatttcttcgggatctcaggtctgtgcctcctcttatatgtaatagctagtttccgagacaagaaaaaaaataaaagtaaaaagagaacatggattatgaaaacaacagttggatttgggagggggtaaactactacccgtgtgtgtttggcggtctaatggttacagcagccttgctgggcttgtcaaccagctacttaggtgggattg

SEQ ID NO: 93231 - DNA, 270 bp, Glycine max
cttttcttgcgccgaaacctcctctcaagtctgaaaacctttaagctattatgtcgcgctcttgccgtcgctgctctcgctgttgatcctcccgttttgtctgtgcttctcagtttgcctaagcctcttggtttgtttccttcctcttggttcgcttgagcttatcttgtgtgttgcattgtgcaggaactcaccgatccaagttcactttcatctacaactactctgatacaccgtgaagccaacggcggccaagacttgtacggcatt

SEQ ID NO: 93232 - DNA, 194 bp, Glycine max
gcgtgattgtctttggttaaaagatcgtccctttccgtagaaaaacgttgtctgcactctccagtgcttcatcttctcttacaatggtactttctctctctacattagggttttcttcagcactttcgcgcctaaacttcttcccttagccaccaccttctcttttctccgcactcaccactttccgcagaaac

SEQ ID NO: 93233 - DNA, 280 bp, Glycine max
tggaatttgctgcacgcggtgacccaattcggtttcagttcatcttctcttttccgcaagcaaaaccccatattcttcttcatgaaccctaattcactctttccattccaaatctcaatcacctttctgattcaatctttatctcctcgccaatctcttcatttgcctcgcaaatcaagaaaaaatatgatgtaacatatatgattgcgagatggagatgtaatcaaataaaggtatgttctttacttttcatgcacaaaaggagaattgccagatggag

SEQ ID NO: 93234 - DNA, 247 bp, Glycine max
tgggaaatgaagtatgaagtgaagagggttgagagaggaataagttttgtagagccagataaagagatattgaaaagattgtgcgttgattttctaaagggtcgattgtgactgacaattcaatatgaatagacaaataatatttttgagatattattattgtgtaagagggtttttattaattagaagaagcaacacttgggctgcgtgtggcctttgcctaatgttagccatgctattgctaggt

SEQ ID NO: 93235 - DNA, 273 bp, Glycine max
ctaattttcacctaacaccttgaatggaaacattacattattgttctgatttttttaatcaacgtgaaccaattcctagcaatttttttaagttccattacatcaatgttttaggtgcatatagtttctctttcaaatactttaacaaaagtgtgtaatttatgaagcattgagataaccaaattagcagaaattaatagatatgtatgtgaattggttgctgtgggagtttatgtcacatgtttactatgttttgtcaagatttatgtggct

SEQ ID NO: 93236 - DNA, 269 bp, Glycine max
gtgtgacataggaaaaatcacagaatgtccataatctgtaacaaatataaggattcgataagattattttgcagataaacaacactacagtatcattggttgttacagatgcactatgtcaattacttatttacttaagttgatagtagatgtttgttggattaggagtatcttgttattggtctttttcggtcatcttatttgttagttggtatagtcaccacagtgtaattatgttcatatcatattaatagttgaggagggtttga

SEQ ID NO: 93237 - DNA, 267 bp, Glycine max
ctcgagccgctcgagccgctgctataaatggagagtcacattgatggtatcttgagggttaaaagaaatacagacagaatttggaagtgtaattggaaaatatacttttcattggcggcagaaatagaacaacacaggcaagtaccagcgaagtttcaagattgaggaatgtagtataatggagtcatttatgttgctgatagtttgttattgtttgccttaaaccagtcttataatatggatatgtgatatgtaatatgattgttg

SEQ ID NO: 93238 - DNA, 267 bp, Glycine max
caccactttctgccaccgtcaggtttctgacttggttttagtaaggattcaccttttcttatatcagttggtggaaactataaattgtggctggagttggataggaacggagcagaacagaactatagtatctcatctctcttgatagtagaagtggtgctgactttcttgtgatcagtgatgctggtgaaatctctctcacttcattctcatgccttctcaagttgcagtttttctgcaagtgaaattggaacaaacccaagttgg

SEQ ID NO: 93239 - DNA, 260 bp, Glycine max
gtgcttcgaaatggaaaagacactagctatcaaaaatggcaatgctggtggacttccttgacatggagtatctggcagcataggaataagattgtttttgaagaagaaaggtttaatgctagtaagatcttgaaggatgccatattcccctgctggacctggtttaaaaatctggttaaaggttttgacatgccttttaatcactggtccagcaacatgaaggaggcttttacaggatgagggggggataataattatag

SEQ ID NO: 93240 - DNA, 204 bp, Glycine max
caacactttccacttgtctccgaattagttatcttgagaaacattattcccattgctatatattatggctagcatgaaggttacatgggtggttgtgatcatgtgcatggccgtggtgggtgcaccgatgatggcgcagcatgacatgcatgatgtgacggtgaacatggcacagtgctatcctacctgatgcagggaggaaca

SEQ ID NO: 93241 - DNA, 254 bp, Glycine max
cttgagacatttaaaaatacttgctcactatggtcaaataatgctggatgatgataatgctggatgcacctaacaacttccggtacatgtagtagacaaaaagaatctaaatccttattatgttttagaaaggcacgtgaggagtgttacttagtctacaaatcacgtgagtccaatttgtccaagacccgcaagcccaaacatcagtcatctccttcacaggaaacctagatctgagacttaccttgactccg

SEQ ID NO: 93242 - DNA, 264 bp, Glycine max
caggtatagttgatttcctgacttgtttggtcagaaagatgctaaagaaaatgaaaaagcaacctctcttgtttgtggaactccttttctggaagactcgaagggaatgtcattacatcaatgctgaatatttgttgagcgagcttggtcatttgaagaaagaaagtgccaattggaataactctcaaggagatgaagaaattggttcatccccaacaaaggtgtggacacgtagaagcatagctgatgcacttggtgaggatg

SEQ ID NO: 93243 - DNA, 325 bp, Glycine max
tttcaattttttattgggccaccaatctaggtgtacaggagaagaaaaaaatgacatacttgagtatacaaaaccacgcttagcaaaatggactgcagacataaggagattagagatggtgttgtgactcttgtgagtcattcaagggaatgtgaatatcaaaaaagatgagggggcactatgaggatgggtgtgcactttttaggaaaaggtttggggtgtggattctgccactagggcaaaggagctttcttctccgacatcttttctttttctgaatttcctttctatggttttatttttttcaaatctcgtattatcagtt

SEQ ID NO: 93244 - DNA, 306 bp, Glycine max
ttcggctcgagaaagttcacttcctctcctctcttcttctcccttctctctctttctccattgcctaacacagtaacactctagtactgttactttactctctctctctctctcgccacaaaaaatgtcaacaaaaacaacaacaacataagcatagcggtacaagacaaccttagtttgcaacaaaaatggtggtcggagagcagaccaatgggtggccaccaatcggtgctcctctgaacgtccacagagacgagcattggaccaactttgacagctccgtcaacgccgtctccttcggcttcg

SEQ ID NO: 93245 - DNA, 284 bp, Glycine max
tcaccctccctctcactctccaccgccaacaccagcgccactgccaccgcctcaggttcaacctcaacctcagcctcagcaagaacaacaaccataatagcagacacaacaagggatggttccatcacaggcgtcgtcgttgtttcagatactgtctttgtctgtgccgttggggtgtttgaattcgtagctggcatcatatcttctgttgttgtcgaggcttctattttccccaacttcttgttagttaaggtttccacagcttccgctttcgcccactgtgc

SEQ ID NO: 93246 - DNA, 279 bp, Glycine max
  unsure (1)..(279): unsure at all n locations
cttctcttngtttttctttctctctctttcatccttgtccatggcttcttcgttctctgtgtgatcgttttggttttttttttagaaccctaattcggccgcgacgatctctcgttttacacagattctagtaatctagacagtgtagatcgtttgtagaagctttttcacttggtcacattcttgctccttctccttcttctgttttcgttgttcggcggaaaccagcgcggttccttccgagaacttcttcgaggtttttttgggccattttgggcg

SEQ ID NO: 93247 - DNA, 195 bp, Glycine max
cacgaatagacacgtgctagcctaactttttttaagaacacagatatcaccgccgccgccgccgctttctgccgcaaccaccgtcgttagaaaatggcggccagcaaatgcaattcagctactcctctcatccccgtgccccctaaatctcttattttcttacatgaatggtggcttgtcaagcaacgccagggt

SEQ ID NO: 93248 - DNA, 274 bp, Glycine max
atttaatatggttttacacgataatgcaggtattctacgtttcaatcttcacgagagtagtcccaacaacgtgagatgtgactacctagcaagttgtgaaatcaagttgaggcatgttgaagatgattcaacaattatgtgggcaataggacctgattctggagtcatagcaaagcaagcacggttttgcggagaagcaattgcaatggttgtacccattgaggggtccaactcaagagagttgaaggtgagccttgtagtcaaagagtggcca

SEQ ID NO: 93249 - DNA, 256 bp, Glycine max
tcttcagcttcgcttcagttctatcaacaccttcgtcaagccccacaccgctgaattcgaactccacgataatcaatgggagcaacacagaagacgagagagaccaaagctatgacagtagtaacatgttgaaatttgaaatcccagatattttagatgtgaatgagttcatgtaatgtgatcagatagatcttcaatgattaaatcgaccaaaacggtgatcggatatatcacagtcccccaaatgttttacttt

SEQ ID NO: 93250 - DNA, 273 bp, Glycine max
cgcactcatagcttcgctagttcagttttctttcctcgattcctctttcgcggaacacacacctcgttttttctttccatgttccgtgttggattggatttcttttatatatattttgaagttatttcttttttcctgattgttactaaacagtttccccaaccctaatgtatgcttttctggttaatcatcgaaaaccaattctatttgcatctactattctaaacaaagggttaaggttgtccttgtttaattctgtttgcttttgtcatt

SEQ ID NO: 93251 - DNA, 259 bp, Glycine max
taataacagagtggataatgaaggtaagccctccttgcttcaacaaccgacgtgcagcaaggagggctttacttgaataataacagagtggataatgaaggtaagaggattgaggctgcggatatagtggatgggaaagttcttctttatcagcaggcaaaaagaataaggtgctggtgagaatagtttgagagtatttattggatagcttagtattctttggagtctgtctatttgctctgtggttttgttgtacttt

SEQ ID NO: 93252 - DNA, 257 bp, Glycine max
ctttttccttgttcagtcttctgttctgttccctctgcctccacggtcactttcccctgacccacactctctcttcaatacatcatctgtaactaatgcaaaatttccaaataaccgaaccacactactaatcacaacaacatccattcccattcctctcacatcaaattcacagtgccatgccatggacctccccagccacaaattctttcaacctccatctacattggcaccacatggggtagcactactcactg

SEQ ID NO: 93253 - DNA, 264 bp, Glycine max
gtcgaattcgggtttgtctgtgtctcctgttgttgttccggtgagtgaagaaggcgtgcctgaaacaggaggcacttctgcagcagctcaaaattggaagctcagttaatggtgttcaggatgttgggtggcttgaacagattaagtcaacgctgttggtgcccgtgaaccagaggttcgtgcttgatgtcactgggagagtgacgattgaaactgtgaggtcatttgtggcgtttttgctgtggagaatatcagatggattca

SEQ ID NO: 93254 - DNA, 262 bp, Glycine max
ttcgagagtgtgggaagggccgctcttggtggtaatgtattcatttgtggtgcttatagattccatgatgagtgcagttttctatttcagttgtagatcttctaacatggagatctcagatgttgaaggcaagtcaattttagaaactatggccatttctgctgaatcaatgggcattcaatgacattgccggcatgatattgactgtatgccgattgaatgaataagatgcagagggacgctgtaagagattgttcccaga

SEQ ID NO: 93255 - DNA, 266 bp, Glycine max
gcctatatctcatggtgggagtgagcagccagcagcttatggtgaattggtgtccattggtggtcttagccctgacgtgaacaagaaactcagtgctggcattgcttcaattctcgaaaacaagttgtctgtgccgaagtcccgattctacttgaagttttatgacactaaggcccatcagagtcaagaatatgcacaatgtttgcatgctttacaccagcactaggtcatggttccaattttggatggaatggatctacattctg

SEQ ID NO: 93256 - DNA, 273 bp, Glycine max
caacaatagccattggctgctggaagggtagagcaagtttgactgtaatggttggtgcattggaatgccaagaactgctcgaaaggcttataatgcgtctagaaaaagtaacagaaaaggactcctccatgcataagaacagaccgtctgataacaagggagatgaagcacaagaatcaaacggtaaaaatgaagatgttgaaattactgggtgttaaaaattaataattaacggatatttatcactgattactacgagtagttaatctaggt

SEQ ID NO: 93257 - DNA, 263 bp, Glycine max
gttcaggcaacatctatggaaaatggccctgcaaatcatgaggcaatggcacacacctatagcattgctttattattttctcattctaaggtgagtttggtgcttaccaagtgctgtcgttgcttatagattatgattagtaaagactaccaaagttactttgctcattttgtttaatgttactcatttataattacaattgtttaaagacaaatgataactagtgtcttttaaaaaaaaaaaaaagtagaaaattttattag

SEQ ID NO: 93258 - DNA, 162 bp, Glycine max
gaaaataaatcccagagaagtttttgtgcggacctgaggaaccatttattctggttccatgttttttttaatttttttttatataacgatttgccttagtgtattaggtgcatggtctcatgactaatgctcacctcaattttttatttatgaattaatttt

SEQ ID NO: 93259 - DNA, 246 bp, Glycine max
atttattgtttgtagaggaaatgaaacattttggaggaatctttactaacaatggtttgtgaattggaggaaaagttttccttagtagagtagtagtgactagtaaggtagatcaatcaaagcattaatcttgttaaaaatgaatgattattattaggcattcatagttttattatttatgtcatcatacctatgtgttaatgtaaaacaatttattttagtaagttttttgtatgctccttgagt

SEQ ID NO: 93260 - DNA, 241 bp, Glycine max
gcgaaatctccatgtacatcctctacctattcaaactgaaccctaatcctaataatatcctctcttcttttctccatagatatttgaatttgaattgttgaattaaggcaacaatgacgacggaagcaacagtaaaagcattttcggattcggattcagattccatgaagcccaactacactctttcccaaaccctaagcggccacaagcgcgccatctcggccgtaaaattctcctccaa

SEQ ID NO: 93261 - DNA, 239 bp, Glycine max
caaggaatgagtgccttttctggtcttgttaacttggtcaagttggatttggagagatgtcctgggattcatggaggccttgttcatcttcgaggtttgaccaagttggaatctctcaatttaaagtggtgtaattgcataacagattatgatatgaaacctctttcagagcttgcaagcctgaaaagtctagagatttcttccagtaaagtcactgattttggcatcagttttctaaa

SEQ ID NO: 93262 - DNA, 238 bp, Glycine max
tgaaaaagtgtttcttaataacccagcaaaaatccatgcctctgattcctgaatacacaccctcccttcaatgccaacacaccaataccatcttgatgattacgattgcaatttgtttctgtttggtggggggatcttaaaaatttgagcttggatgatgcaatgtgggttggattaatgcagttataggtgtcctacatgtcagagtgagtgaccctcttggatcttccacacaaca

SEQ ID NO: 93263 - DNA, 239 bp, Glycine max
gtcaaacgtttccaatgacaccccgtactacagcaaactgtgtgtattgcagaactgacgacaatcgaatttctgtttgttgaaccgtgaaataaagttgcttgcgggcaaattctgaaggaccatttatccttgatttatgtcataaacatagaattcccgagtgggttcccgcattttgttggagtcttagtgtagctgttaggggatatatattttattgcgggggattttggtta

SEQ ID NO: 93264 - DNA, 232 bp, Glycine max
gtcagtccccacaattttcataatgacacaagatcttgatactgattttaccttcaataattgttttacctactgctatctacaagttacatggactgattaacttcccaactattgattttattcttaacaagtttgtttgtgttacaattattctttttttcttttgatgttaatgagctaacctttgatgcttgctattaggctctcatcattgctaagctactgattc

SEQ ID NO: 93265 - DNA, 135 bp, Glycine max
gttcgcgcaaatgctctctttgcttgttggaaatttcgtgacatctgttgttctctttagacttcacgattatcattgatcttcactagcctggattgagaacaagtccttgatcctgaagattggttgaaagcc

SEQ ID NO: 93266 - DNA, 134 bp, Glycine max
  unsure (1)..(134): unsure at all n locations
aanagttgcaaatgtgatcttgcggccagtgtctggtggacggaaaatacgaggaacttaatggcgtcactgtgaatctgcccatggacattgtggtggcccatgtcccgtatggggcaaagttataatgccag

SEQ ID NO: 93267 - DNA, 263 bp, Glycine max
gccttgacattcaggaaagtacaaaggaggtcgagttgattacagtagcagaaagatcaggggagggagggttacagatttatgaatttgaatacaaggttgatagtacccggggagggatgaagaggatattttctgcagcttttgtagcctcaaagaagctctatcttctagatattgttcactctgataaactagagattcctcttgacgcaaataagagaatgattttagaacaagttcttcattcctttgatgcagca

SEQ ID NO: 93268 - DNA, 138 bp, Glycine max
caggcaatggcttcagttgggcaagcagtagtacgtagctatagtctcctagctagtggaagcacattgatatcctgcctgctaatggtggaagcctttccaggttaatacactttattctgacctagtagaaactag

SEQ ID NO: 93269 - DNA, 128 bp, Glycine max
cagttattcatctctttattactaacatttcttccattcttagcttttgggtgtcccatgcaatttttcgaagatgggcacagagaagtgttgcggctaattctgcttttgagagtactagcttggct

SEQ ID NO: 93270 - DNA, 285 bp, Glycine max
caggtattggctctttgctgcagttaaacttaggtgcttgcttgtgaccaatgaatgaatgcgagatcacatattttgaattcataggaagaaactttttaaaccagtggaaagaaagacatcaggttcactacacttttgtgaaaggaaacctaaaacttcagatgccaccatcatattcattggttatccaggaatcagaaaaaggttattggcatgtacccctagtatcaggcactagctgtgagtccacgagatgttggctctgcattactcggccaagtg

SEQ ID NO: 93271 - DNA, 154 bp, Glycine max
tgctggcaagccttattgacaacaccattcatggctgtgtcaatgaggaacccttcccaagttgagatcagcagcagaagatgaattatcttccatttctgaactcgtggatgtgagataatgccaaaggcccacggttcctcactcctcttcc

SEQ ID NO: 93272 - DNA, 122 bp, Glycine max
ggtttcttcaatcggaatcgcgaacaacatggaagtgagaattgggcaaagggtgtctcgcggaatgctccctctcctcgctcttcacaccgtcagcgagtattacggctccgaccacaaac

SEQ ID NO: 93273 - DNA, 245 bp, Glycine max
ggaattcttggtatttttgatggagaaatggagaaatgaataatatgatagatttatattaccgcaagaatactattgttatttgctcttctgaagggaagagggagccaagattcttgccattgaactttgatacgatatcatgtcaattatctggtgtgaaacatatcgttgtaatagacttcttaataccacccgtttacagaattaaaaaaaaaaaaaaaaagggcggccgccaattagtg

SEQ ID NO: 93274 - DNA, 255 bp, Glycine max
tttctttcttctttgtttgtttctgaaaggtctctttctcaatctgaaatcctagtaggtgattacattgatttcatggactggccttcaaattaatttctagttcccttaaagtctcatgtattgcatccatgattttatggttgtcagactgagatattttttcatgttctaactggactttttttgccttttcattcatcagcaagtcagaaattcacaagtgtctggttttccgaattttgaagtaaatca

SEQ ID NO: 93275 - DNA, 251 bp, Glycine max
ctcctcaaaccttttcaaaccaaaaataaaataatacaaagcctctctctgcaagaacaacacaaacgcaataaacgccccttcatttttcattatcattcccttaaaccgcaacctcaaacaacaacaacaaaagaacaacattttggcattccgttacctcatccgacgtcgttttggcattccgttagcggcgccagtatgtcgtccggcggccccaccacgacctcctccaacaccagcccaagggt

SEQ ID NO: 93276 - DNA, 253 bp, Glycine max
tatgaggctcagctggttcacgaggcactgttggttctcttcgtggcattcttacttcatgaagtgggcatggttctatgctatagtagagagctttctccaaagatatggctttgaagatgctgcacatttgatgtgtgttccaattgaaggctaaatcgttcacttgtctctgttttgatcgagaatgaagagaggttattggccatatatggtgacactctttgttatttttgaaggatctatctagttt

SEQ ID NO: 93277 - DNA, 258 bp, Glycine max
cgtggacggagtctttcacgttcaccagtaaggtcacgttctcctcgtcgtggaagaagcagggatcgaagctacagccgagaccacagctacagccgatcgagatctcctgtcagaagagaacgaagcccagtttctgaagatagatcacagagtcgtgagcctcccaagataaggaggcatagtgcatcacctgaccaaagcagcccacggaagagaggtgacacatctcctggcaatgataggttggccatcatc

SEQ ID NO: 93278 - DNA, 247 bp, Glycine max
ggcaccagttgcagtagagattccgaaagatacacaagcaggtaatttttaatggtggcattattgtggacctcactattgaattaattgatgtatcttgtttgtctgtttatgagcagatgaaagaaatgttcccccatccttgcccgagcaaggacaaattccagtggataatgggagtaagaccagtagttcaagcagctccagcagtgattcaggctcttcgtcaagtgattctgatagtgat

SEQ ID NO: 93279 - DNA, 252 bp, Glycine max
ttctcttctcttcttccttaaccatccaacccataatctcccttttctagttgtaattatttcttaggagatgggatcgaacccgtgacctttctcctctttccttctcccttaaccatccaacccaccttaatagtaataaccccttttttctagttgttattgttgtgactttgggagtaattgcaggaggatcgaccgttatttgttcagttctgtgccaacgatccagatgtgttgttggcagctgca

SEQ ID NO: 93280 - DNA, 245 bp, Glycine max
gtaggatagatgatcctgaaactccaggatatttgttttcgccggacataagtgcggccatcgagaagtacagccaagaagtggcagattgcgtgttagagatagccaagaaattgtgtaaagatctccaaaacgtatgttgctcatttgtcccacttgacttgttttgttttgatgataaagtgtagcgtgtacgtagttttgtcttgacctatatgcccttcgagattcaacaattatctatc

SEQ ID NO: 93281 - DNA, 282 bp, Glycine max
tggatttcttatgtcactaaaagcaagttaagcaaagaaaatgctgaagatggtccctcctgataggattttgttggagacagatgcacctgatgcactaccaatgtcaaacatagattctccttattttgttgaaggagatacttctctcaccgaagagcttcttgcccaaacaacaacttcatcaacttctggttcttccctcggtaattcatcccatgtcttggcagatgcttcgatgttgccaaaggaaacactcaatcatcccgcaaacattcataa

SEQ ID NO: 93282 - DNA, 274 bp, Glycine max
atccagtgcaggtccacaggatattcagactaagcatttcaccccttatggcttggttccaccactctaaggggctggtctgcaacctatcccgtgtgaagctgttgccatcggtagggtatgtgctcaccacattttgctgttgtctggcttgtttttgctctatacaattttattcctacacaggttgcagagttgttggggtcatttggataggtttactgtgattcccatatttggcaagcttatttatttgtaacagcgagacttatag

SEQ ID NO: 93283 - DNA, 201 bp, Glycine max
ttgaggttgataacattacaggcattgaacatttaggccctttcgtacctgatacaaacattttaggaaaaatcccaataacttccttctgtttggagaagtgaaattatataccttctttttcgatgtcgtacactggcctcctttaatggaattggattagtctccattttgtgagtattttaaatttcaaatttccca

SEQ ID NO: 93284 - DNA, 277 bp, Glycine max
tggcgaagaagcagagcccgggagtgaaaaacgagggtaatggcaccaacagtgatgttttcgcttcgtgctcattctccagccttggacttgagtccaatttatgtgaacaacttcgtgagaggttggggtttgaagttccgacgctggtgcaagctcaagcaattcctgttattctctcggggcggcatgcgtatcctttttcttctttttaattttaaattttaaattttatttttgtgtttcatggtacgaggttgtcttttttaccaagaaa

SEQ ID NO: 93285 - DNA, 278 bp, Glycine max
catgcaacggtgagcagagtctgattaaaggatgtgaacaaaagaataattgatgatgaatggtacaagaaacataatggcatggttttcccacatgtcaccgttttaaagccttaaaatgtacatagttagccacgtctcaagagctagcaaacgtagcatgttgttgtgacgacaagaagatttggttgtcttatgagaactgagaactcaatgtacgtggcagttcggggctgttgttgtctcagttgttcagggatcaatcaaaagcttattta

SEQ ID NO: 93286 - DNA, 277 bp, Glycine max
cacacacagagagatatatatcctcaggcacattaattcaagccttcaagcacaaaaatggtaaccattgtggcttcttacaatgtcactccaaatcaaccaactcccaaggatcctttatggctatccgatagtgacctaatcggcaacctaggtcacatatccgtcatctatatttacaaagctaaacacaacaccgacaccattgagaggttgaggaattcgcttagcaagattttggtctacttctatcccgtagctggcaggttgaacttga

SEQ ID NO: 93287 - DNA, 275 bp, Glycine max
caccgccctcctctctactgtgtcatgtcagagttttcccaattcacctccctcctcgccttcgccacatcccttgccgcggatctattggaccgctcctccctctccattctcggcgtccccaacatctacctcgtcgccgacaatcacctctccccggctgtccttgccgacatccttcgctacattcctccggttcctttcctggtccccgacctttgcactctctacccctctagcaagctcattaccatgctccttcaaaccattggccg

SEQ ID NO: 93288 - DNA, 168 bp, Glycine max
tctcgagccgattcggctcgagaccaatttgattcttctctctactgtcttcttcctctgtttcgtcagggtttccttactctcacttggagctcccaattgaaacccaatttcgtaatccctccacactttctcgttcggaaaactcgcgaattggaaagacatcga

SEQ ID NO: 93289 - DNA, 163 bp, Glycine max
ctcgaccgattctcctatgtcaatggaaaaacatatttcaactgggttcacatgataggatttctgtgcaggtttttggcatgagcctaaggttaatacatctccatccattcggattaaattttgaagatatattttattcatccagtgctttgatggtatt

SEQ ID NO: 93290 - DNA, 259 bp, Glycine max
tgtaacagcccttttaaataccaaacactgacacacacaaacgacgcatccttctttctctctctctcctcctcgatcccaattccactagggattcaattccgatgcgattccgagcttgttagatccacgacaacgtttcgtttcccagattcttttgtaaaaaaaaataatcttcctttgcccaacaggtaagttggaaaaaaatggaccatgacaagactgggtgccaagctcctcctgaaggtcctatattgtg

SEQ ID NO: 93291 - DNA, 247 bp, Glycine max
cacaattcacttccttcatagagagtaatagagaaagagaaaagagagagaaaaacagcacaaggatggagctttctcaacttggttttctggatgagctacttgctccaagaaaagacactagttggagtagtgctttgtccactgggttgaatgagttactactccctagtggttggagctttgactcttttgatgagaaccaaggtttatccacgttgaatccctcatttgctgcattttcaac

SEQ ID NO: 93292 - DNA, 235 bp, Glycine max
atacggggcaaccggacctagcccagccccaacccaaaccacgctgttgaatcgcgcaaccgcagtgacagcaccggcgtgcataaaccctaaaccctactatgtccgaagacaagtacggcgtgctcctctattacaagtacgccgaaattcccaacctcgacgacctcctcaccttctaccactccaactgctcctccctcagcctcctcggtcgtgttcgcctttcttctca

SEQ ID NO: 93293 - DNA, 285 bp, Glycine max
tgcacttcttagctcgctatctctccacttttctttattgctccctccctcctctctcccacacgcttcttcttatcctcgttcccaaattttcccttcaattccatttcacatcctaccttcaacttccactattagaaagtgcacgtatgcaacaatgcttctttaccagccactcaaagaagaggtagaaaccaccatcatgatgaagggcgacaacgttttggatctgaaaacattaattgaggagcttgagtcatcaacaattgaagtcccttccgtttt

SEQ ID NO: 93294 - DNA, 284 bp, Glycine max
taatgttgtaaaatttatgttatagagtatcctgcgacggcgctgctggcccgcggacttacgcgagtcgcttagttgtctccacttgttgtagcaagtaatactataggtagttctctgctagtcgacgagggcgccagttcttaatcgtgacccgtcgctgactccacttgttgttgcatgtaataactatatggggggcctctgctactttacttctttgaccgggaataatatttgcacgtcccttaattagggaaacgagtttccccaaaggggggggg

SEQ ID NO: 93295 - DNA, 263 bp, Glycine max
atataagtgaggtctaaagtgaagtcatctactaatcaatcctgtggtgaatgacaaccatttttgtatactcctggcagctcagtagtttgtttggtataatttttgttttcatttttatgcattttgtagctttatacatcctttattattatttaatgggattcgttccatctttcgggacttgagtggataaaaaaaaaggaagaaaaaaaggtaaatgaagaagaagaacatgatggaataattgaacccgatgttga

SEQ ID NO: 93296 - DNA, 243 bp, Glycine max
gtaagatcagagctttcaatttttgccttgtttgaggttctgaccaagtgaagcggggttattcctctgtcaaaatcaaaactgcttataatggaccgttatgagaatggttgatgagaaaaagaagaacacggcaatttacaccctgtgtgaaatatctcaaaccgtttccaatataatttttctaatgcaaaagttttggctgcaacttaaaaaaaaaaaaaacgaaaaaaaaaagggggg

SEQ ID NO: 93297 - DNA, 276 bp, Glycine max
ctcgaatactcactcactctcccagtcccatggcatttttcatacccacctcctcaacacatgctttctgctctaaaggtttggggaaatgtgtggtgcctggcacaaggagtcgatcctctttcgtaacacatgaaagattttttgtcgcttgaaggtattgaagttatggtttaatataccttaaggttggaatagggaatgaagccattggtcctagtagtttaatttatatgaaatatatattattgaattttttgtacattatttgatgta

SEQ ID NO: 93298 - DNA, 276 bp, Glycine max
ggggaagtggtaactctaaaaagcatagaagatagcagtactattgtcatgcaagatatgcctatgcaaattcttgactttatgaagacaatattactgcttgcatttgtgaatggctgaagacttgaactctctcattcctttgaatattctgtgagtagccactgctacaaagaaaatatactgttaagtttttcttatttctattttggacatatagatttttatgctagattacatcttttactggttgttccaaactagaatacagaaatt

SEQ ID NO: 93299 - DNA, 288 bp, Glycine max
aggctgcttcttcttctcgccactcccctcaattcacccccattcaagaggagcgtgaattggacccaactcaccctccaacccctattgtccaccccaagaaaaacatatcagatggctccgtctcttgcaacaagtgcaggcctcactcccgcgacaaaatcttcatcctcccttttgatcactcctcctcctcctctcacaaacactcttccttgctctcaagccccaacgggattttcaggtcacttgtttccaagctctcccgcaagagccccatgtcttctt

SEQ ID NO: 93300 - DNA, 285 bp, Glycine max
ggcgattcagtgccactctcactggtcgctcgttagactcccttcactctcagatgtatttaaagttaccgggggagggaacgatcggtgactggctgtgttagggcttttgaatcctcttctgctaaacccatgagttggtgtgatagcgttcaggaaccacggattctcgtcgcacccgatcctggtactgatggaaatggtctgggacagatgatatcgctccgccatcccaaatctggaaatgcaacacaatatctgtttgtaaatggaatgcttcaggaa

SEQ ID NO: 93301 - DNA, 241 bp, Glycine max
cctcaacccctcgacgacgctcttggggtgcatgcttctccttgctcgacgtcgtagatgcagcgaccggtactaccacggcgctgagacgagaatctccataaagaacaaagtgagggcaaaacggtcatttaacggtcaagttagggacatttcggtccgatttcgaattttcaagatctcagtgattaaggtagaaacagcaacgaacgagtagagcgagcgaattagattggtttct

SEQ ID NO: 93302 - DNA, 262 bp, Glycine max
cttctctgtcaagagttttggtggattactaccctttagctgggaggttgatcaggagcagcatttgtgattgtgaggatgatcacaagcttgaggtggattgcaaaggagaaggtgctgtgtttgctgaggctttcatggatgccactgctgaagaattgcttgaatcttgcaaggtcccaaacgattcatggaggaagctcttgtacaaggtggaagctcagagcttcttagatgttcctcctcttgtaatccaggtgac

SEQ ID NO: 93303 - DNA, 273 bp, Glycine max
attggttgagacttgagcaagggaggttagagttgtgagagcagagaggttctttcagttcagatttgccagtaaaaagttgaaatggggaaacttagttggatgttggacaagttctgtatttcttcttgttcaaacacctgcttctgtgtaaattccatggaatttgaagatgagtttgagagtaagcctttgattgcaagtgacagtgatcataaactaaggatgaaggatgtagttaatggaaagcagacattggcttttcaattgaaa

SEQ ID NO: 93304 - DNA, 225 bp, Glycine max
gaatttaacagaccaacctaaggaagttcaggagtccgagaaaaatggacaccccacagaaaatatgggctctggggttataatcaataatcatgaggaggaaatacagctgcagaataacgtaggaaacatgtccgaggttccagctgaggtgcacgatggaaaaaccgtggataactctgctgcaagaggccgaggaattaagcggaagaagaaaagattgaa

SEQ ID NO: 93305 - DNA, 288 bp, Glycine max
cttgagaccatgaggtttaagagccactctgttcgccgccgctgtctgcaacttgtcaactctacgttgttctccgtcgaccactaacacaaactagaatgatatcgtacgcgcataagctcttcacctctatgaagcgcgattctctcagtaactccgacggcccttgttcattgcaatccccaattagctagctccattgcactctcaccggacccacggtcgcggtccaccttcaaagttccactcttttgtccaatacccctcacacgcacttcgcgattcggc

SEQ ID NO: 93306 - DNA, 254 bp, Glycine max
atcaaggtcggtcatgtaaactatcattaccaatgagtgaggatacaaaaacaatggaatctgtgtgaggtatgtgaaagtggtaagtgattccctctaatcttctgcttatactacaatgtcatttatctcgggttctttggctggtaatgaagcaattcatatgtgcatcagacattacattacatggcatacataatatttcatgcattatgatgcggctttaagttgactcggtattttcttgatcttgg

SEQ ID NO: 93307 - DNA, 255 bp, Glycine max
acgagatcctttcttttcctcagccaaaacacaaaaccaaaacagaaaccttttgatataaattatacttcttattgtggttctcttccctttctgttattcacttccttttagacaccacactaatccagattagacattgtacaaatgggttctctgttgttcttgcttttggttattgttcttccattgtgttattgtgttgatgctgcttgctctaatggaaactgcaaggtaaatgatgagtgctcgtct

SEQ ID NO: 93308 - DNA, 255 bp, Glycine max
taacagaaataggatccgaagagtgcctttcttgccaacttagacttgttctcacatggacttgtcgttcgcaactataaccgcacggcagcactgacatccctgtttcaagtttcaatcttcaagcaaaaagttctaaaacaaatctttgaacaaccaaagggcaaaagtgaaactccatgtctactactactaaagggtcaacaacagagcaaccaattcctccacaagtggaagaagaatcaagtgtttgta

SEQ ID NO: 93309 - DNA, 250 bp, Glycine max
gaaatttttcaatagatagcttctgcagattacagtgatggttgtgacaacacatgaaggagtgccacaggaattttatggagccaaattaattggatcttggagctttccctgccctttgtatcagaaggtacccctctccttggcacttagtccaagaataatttcggaggtagctcggtttaagcctgacataatacatgcatcgtcaccaggcataatgatttttggagctcttaccattgcaaaa

SEQ ID NO: 93310 - DNA, 271 bp, Glycine max
actccgaatccagctctagccagaatcacacgcacgccatcatcatttatctacgaactcgtcacacttgatgactcatcacaacgtcaccaccaccgcctaatgacgtagagcaccttctctctcctccaattggccattgcttaagttgacttgctgcgaaggttgctttgatcattcgaagcgcctgagggttttgttcttggaatccgaaaatggccgcagttcggaggcgggtgtggcagttatcttcaattccaggtttcggggc

SEQ ID NO: 93311 - DNA, 248 bp, Glycine max
gtgacatgaggttatctttaaagttttcaatggcaaaaaatacctcaacaacataaggccactttgatgaatttgtttcttttattggggacaaatataactttatcaattattagctttgtacttcccgatgtgctaatagatggtttcactatttactgctggtatgctaagaagacatgagatattgtttcgttaagcaatttaatggatgcttgtctggtcactattatcttgttggttttgtg

SEQ ID NO: 93312 - DNA, 246 bp, Glycine max
ggtaaatttagtgaaaatattatatttgtcactttctcaaaaacgccccagttgaagattattgtggagagattatttgaacactgtggatgtcaagtgcctgattttcaaagtgatgaagatgccgttaatcaattgggacttttgctgaggcaaattggtagaagttcagtgttgttggttctggatgatgtttggcctggctcagaagctcttgtcgagaaatttaaagtccagataccagaa

SEQ ID NO: 93313 - DNA, 246 bp, Glycine max
ctccgaactgcgaaatccttttttagcaaaaaaaaaaaaaaaaagcttgagagagcgtgagacagagagagtggtcatcagtcatccccgttgtttgtttaagatgcggcattcaagcggctctgattcgtccacgacggagcaaaaattcccgccgccgaggcattccccggcggtgtcgagcccgcagcaatggctgccgttgcagtaccctgcggcggcgatggtaatgccgcaccacttttt

SEQ ID NO: 93314 - DNA, 175 bp, Glycine max
gtgattttgtcttcttttcttagggggcgcggttgcgtttatttatttttatgcagtgcctttatgttgatgacgacgctcttcactatttggagagagggcttgttttgattcaccagattttcttgtgctctataggactcattttaattttttgttatatatattctttttt

SEQ ID NO: 93315 - DNA, 242 bp, Glycine max
acggactgcgctctgaagttttcttcttcataattcggcgcttatctctctctaattctagggttttaatcttcccccttccactgtattcagtgtcttcggcaataattcactccctatcggtggtatcgcataatttaagataccctattcggatttattacaaatcccgggttattattcgatttctgttggagaacacccggagcttttagggaaccttcacaatggcagatctcaag

SEQ ID NO: 93316 - DNA, 245 bp, Glycine max
attttgggtaactagcattgctgtttaagtctataaaaatggtgatgaggaggttgcaatgttgcttctgatgcagttagcctacttatggagttattattacctaatttatttattttttgtttttgtatctattcttttgaagaaaatgtttaggaacatacttatgtaatgaaattagacttctcttcatcttactgcaaaggtgaacattctatctttcttgtgtttactgaatgaaaaat

SEQ ID NO: 93317 - DNA, 263 bp, Glycine max
cggctcgagcggctcgagctcgagccgaatcggctcgagcggctcgagattcgctctgcattgcaacactactccacgaatggcactcagacccatcgacaacgctcttccgacaacaaccccagaaagacccaagacacaacctaaaatcgctggtgcaacccaaaaacaacaagatcgtgcttccgtcaacggcgaaaacgtagttccattgccatcatctgaggatgccactgttgactatgtctcctccgacaacctta

SEQ ID NO: 93318 - DNA, 263 bp, Glycine max
gatcaaacggatagcaccagccaaagtaatttacccctagtttacttttgcctcttataatgaatggatgcaacaatacatgggtgccatataggaagggatgaagaagaactcagagcttgtggctaatgttgaaaagcatgtccatggaaactggtgttcagttccagccaaaaagcagatgtagaaggaccggagctgcagactgaggtggattaacgacctcaaaccagagataaaatgaggaaactttagtttagcag

SEQ ID NO: 93319 - DNA, 261 bp, Glycine max
ctacagtgctagcagcagagtctcgccgtagagcattccagagacgggaaaaagaatcttacaggttccaagaactgtggtgcatatttaatattcttctggcacaccctctctttgggggttggatgccataggtagaaacagaattggccaaagaaagaaactggattctaatcagagaaatactgtggagacatttgaaagaaagaaagtttgaatgcagcatctaaaaccttcatcttagatctaactcgggggggg

SEQ ID NO: 93320 - DNA, 262 bp, Glycine max
attttctttactaattttaattgctagttggggttttatctaaattatttgtaatacaattaggaaaatgaaaaataaatctctaattaaaaaaaagataccttgttattagaaaagattacctccccttactatgtcattagggtacaaaataagataacaaataatctttgtgaattatattattcaaatataaataccaaaagattgaacacaataagagtattcctatatcttgtggctacaacaacaaccaaagcct

SEQ ID NO: 93321 - DNA, 164 bp, Glycine max
gttacattctgcttcgcgtggactcgcacgttctgtaagatcacattcaatggaccccgctcagctctcagccataccctcgcctaactctagagcgtcggtataagggcctcatcttcggctcgttagcttgcttcggccggcaaactagcatcggaatctct

SEQ ID NO: 93322 - DNA, 249 bp, Glycine max
tgtccgaatgacatatggccatgaaaggaaacgagggagttcaagagagagagaaattcattcattcattgccattgggttcctcgaacaacctcaaagtttcaaatccagaaaagagaataaaaccaccttcattcccatcctttctatctgtcaaattgtacattaaattacatgacatggcataacacacaccacgccaccctctctgtatgtatcacaccctacccctcagattcggacacccag

SEQ ID NO: 93323 - DNA, 259 bp, Glycine max
gttaaactgttgctacccactcactctcacattgctcctccacgccgcaaacttcgccattctcgctcgcatctcaacccttttttcactctctcggaaaactttaaatgaagccatgtttttgaaatacaaccttatgtccctacttaaaagggttgcatccaggaaggaggaggttcaatagaagggttttagcaacatgggtcactttgagaaacccatcattaaggtggagcctttggatgaaccaattaactct

SEQ ID NO: 93324 - DNA, 262 bp, Glycine max
acgacctaaccccgcggatggcgccgaatctggacaggcaccttgtgttccccctcctggagttcctgcaggagcgccactgtacgacgacaaccacatcctgaaggcgaagatcgacctcctcaacaacaccaacatggtcgactacccatggacatccataaaagcctatatcacaccgaggaggtaccccacgacatggtcgaccgcaggccgaggtagtcgcccgcctcaagtccctcgaggaggctgccgcccccct

SEQ ID NO: 93325 - DNA, 189 bp, Glycine max
gttcgtggtggtgactctgatttgagaagaagaagaagaagaaaggatggcgccaagtcgattcttatggttcacgttcggattcgcatccacatactttgttgttgtgaagaacctcaggcgtaagtgtcacgcgctcgcttatcaatggaacgcgattttcgcattctcgaagccagactctccaac

SEQ ID NO: 93326 - DNA, 258 bp, Glycine max
cgtgtccttgcctccatcaatgagtgaaggtccaagtattgcaccgggagccttcagtccttcaaatgcagatgctgcgaatcctgcttcaagtcctaactctgcttctagtcctgcaggtgggctaggcccttcgtccgaggatgctgctgccagcccttctcaaaacaaaaatgaagtttcagccattcacccttctgctttgactaatttcttttttggccttttcactttatttgtctctgtattcttctgatt

SEQ ID NO: 93327 - DNA, 265 bp, Glycine max
gaaagagtccaatattatgtgggaagaagcaactaaatacttaagtagtacgaaatcagatgttgaatctaagagatctgctacagaaacaaggcagaaaaatgttgaggctgttttatctgaggtggatgccataagtagtaaaattatatcagtaaaagaagctggagcagttaaagtggcactgttagtgcgcaaatgtgaagagctagtagaagcgtttcacaactatgcgaatccgattgcacgcgtgattgaatctgag

SEQ ID NO: 93328 - DNA, 256 bp, Glycine max
atcagaggtaggtagggtcgctccatgcttcatcttctccattcctattacatcatgcttttcttcattcattcattcaacaaccttcatcgctttccccatagctgccaatgctagcggcggcgacggcaacggcgactgtctcacacccccgtcggctccgcccaggccgtcggttttcctcggaagaccctccgcactcgcattccgttccaatcttcgcttctccactaagttgagcatgtcagtgtcgttc

SEQ ID NO: 93329 - DNA, 250 bp, Glycine max
gtcccagttccgccttcagcagatgtcatctgcaaatcagtcttttagggatcagggcatgaagtctatgcaaactgctcaatctaatccagatccatttggtgcactgggcttgttcagtgtagtccatataagtgatctaacctgaaatatcttgctcatgggattgatcttacaacacttgggttgaatttgaattcaacagaaaacctttacaagacttttcggtctccgtggtctgatgaaccgg

SEQ ID NO: 93330 - DNA, 255 bp, Glycine max
gggaagtgaggagaaagcgaaagaagcaattatttactcatataataaacacatcaatggcttggctgcgctacttgaggaggaagaagcagcagatattgcaaaaaacccaaatgtggtgtctgtgttcttgagcaaagacataaactgctcacaactcggtcttgggaatttcttggactagacagtaataataaggactctgcatggcaaaaggggagatttggtgaaaatacaataattggtaacatcgac

SEQ ID NO: 93331 - DNA, 284 bp, Glycine max
tcattctaaagcaaggaatgaagtagcccgtatagcaagaaggaagggtataggaaatgcaatgaacttcatcgtaatagatagatcataatttaatgcgtcgaactcgtctatttagagtgacccctctatgcctactctactatgacggcatctaattaataatatcgtcataagtaaatagtaggcacgatgccaattccactccattatgagctttcctaattctcctagttgtgcctaatgatccgaggaatgataatgacggctacgaagtaagccga

SEQ ID NO: 93332 - DNA, 281 bp, Glycine max
ctttgcagtagtcggcatgcacagccacttgcatagtcggcaagaactagctggctcgtcccacaggctacacacgctcacgaaggaacgggggaagagaactctaccactatcagtgcgacggcatcagggacagcatactacctaccgaggtacgtggcatgcaatggagacctggaagtccctttcagaatcagaatgatgcaggccagcttcgtggaagaactgaaatagcacctgatcaaagggaaaagtttttgcagaagtatcagcaagtgcaa

SEQ ID NO: 93333 - DNA, 276 bp, Glycine max
caaagacagccactttttttttctctctctctctctctcacactaatatatctgattttctctttcacttcttctgttctatgtaatgggtgttggaggtgcttagtttcagtgtgcaacacaacaccatcaacatcatcacaacaacaacaacaacagcaacatgtctcagacagagaaggatccgggtatcaggctatttggaaggaagattccggtgccggaatgtcagattccggccaactctggacccaaggatgcttgcagcagcataat

SEQ ID NO: 93334 - DNA, 279 bp, Glycine max
ctcaaaatgataaggagatgctctgacccagaaatctgcaattgccgaaaaatgtataatcttgataaactaccctggtcaaacaggttttcacatactctgaagcagctaagtattgcaaggtgcccaaggattttatgctccagttgaaaagagtttatatgaatgtctttggagagctagtcaaactgcaggtaattgaatctctgacgtattggatttgtctcagcttttgtcccaccccctcccaaaaggaaaagaaaagttccccagacctaa

SEQ ID NO: 93335 - DNA, 278 bp, Glycine max
cttcgtcaacgttacttttccacctctgattaatctttgtgggtgattgaatttggctggttactgcagagggattcaattgagagggaaagggactgatggcagacaacacacagtcttactgggaaggctacaaagcgtttggtcagagaggttttcctttttgagcaactattcgaggttcatcaaccgtgataaacccatcccttcctggtcaagctctgatgtcgaggagttcattgcttctgatcctgttcatggacccgtcctgaaaagtg

SEQ ID NO: 93336 - DNA, 267 bp, Glycine max
attcactcgcattgacttttgctagttgaagaccttcattggtgtcaaattcagaccagctcaatttgttgcaaaatatgaagctgtggatgtaattgacttattgatatcaacattgaaagttttgtttcttcctgtgttggttggtgcatttcttaatcaatatttccaatctcttgttaaatttggcatgcagacatggaagaccatgttagtaatatgtatgacgtggtgaatatgccaattgatggggcagcaaataagtct

SEQ ID NO: 93337 - DNA, 177 bp, Glycine max
cagcatatgtctcaaaggcccacggttcctcactcctcttccatagcctgcggccttcactctcatctcctggtctccagtgagatgaaccctagctccaattggtccctttaatcaattacctcttaattagtaattacttaatctcaattagcctttcactctcccacacaacaa

SEQ ID NO: 93338 - DNA, 256 bp, Glycine max
tgccgtttagagccgtcatagttcgactcctcaagttcctttcttttcctcatttttcaattccgcaatgcaaagggtgtctccaacctccacaatttggaggaccatagtctccaaggccagaaaaaacgtgtttttcatcaacgacccttttgctgcgcgctccttctctgcggttcccgtcgtgtcagccgccaagaaattgcatcaaccagagattccaagcgatttccagaaatggggttcggttggattc

SEQ ID NO: 93339 - DNA, 252 bp, Glycine max
tagaaaatggaagatttggtagataacagcaacaatcactatttggaactttagaaatgatatgatctttaaaaatcaaccgttcgttatctctaagttggtggataatgcaatctttcttacctggtcttggttgatggggtgggaaaaggactttgctgttccttttcagcaatggtcctcatctatgtctcttgccttcacctagtgtgggacgtttggctgggttttgtagttttacttgttggggtg

SEQ ID NO: 93340 - DNA, 247 bp, Glycine max
actcgagccgaatcggctcgacgtcaataattaacccatcagagagagagaggtaatcatgggactgctacaggatggcaccaactcatgggttctaccggaacctcaaggatttatggtgcactatcctgcttatccatcatccatctctcgagctgttgatactcttgggggaattcaagccacccagaaggtaaagcctagccaaatttcattttattcattcatctcattgccagtttctgtt

SEQ ID NO: 93341 - DNA, 280 bp, Glycine max
gtagtgacaatcttggataatggggcaatctttgttaacatcaagaacacaatatatcattgcactttactaatgcagaacagctgagtaactgtagctgttctgcattagtaaattgcaatgatatattgtgttcttgatggatacagaattgaaaaaccaagtcattagtgtagtgacaatcttggataatggggcaatctttgttaacatattttcttttgctaaattaagagttattattttaataaggattatcatcctctgcaatgcaggaata

SEQ ID NO: 93342 - DNA, 276 bp, Glycine max
caaatattttcaaaaagaaaattggcatcggtgtatcagtgtatggaaaatgaaaatctagagataagtgaactggattaacgagatggtcttggcttcatataaacatgtaagcatagtttatagaaatttcgttgatttgcgttcagttcaactccagtacaagctttgtttcaggattgctcaggttcaggtatttgttaaagagccaccttgaagtgtttagtgcatctccactactttccactgggaaaatattcctacgcttttgccatt

SEQ ID NO: 93343 - DNA, 266 bp, Glycine max
gtaccttttgattttgctgaatgtaaatgtctctttattgttttgatcattttgtttcatttgttttcttttcgtgtgttacagtatcgatgacaggtccaaccagaattatatgctctgcatgcttcccttgttccgaagatgtaaagatctttattgcaataattgtatcacaagcgcgatttgttgttttccagaccaagaaataatgtttgaatgtaaatttgtaaagaaatcgtggtgaatggaaaccgggataaatagag

SEQ ID NO: 93344 - DNA, 268 bp, Glycine max
attttcttcttcttcactccactgtcactgcgcaaatccagttctccccttaccccctctcccttgctcctgatcttttcccgcgcttcctttaccctgattttgaatactagccgttggatctgccatttttattttttttaccgttgctctcgccggagtgaacgggaaatgtctgcgtccgaagcggagaagaaggtcgaggaggaagagaagaaccaagaggtcaaagggggagaactcttgttctgcggtgccacgtgttggg

SEQ ID NO: 93345 - DNA, 269 bp, Glycine max
gctaaacctttctctcacataacacaaggaaaataaaaaaggaacatattcacttcatttcagttacttcaccacaacataacactaacgttgttgttgtccaagcagtctcttatgctctgacagacacactggttggttgacatggattccaattccaaggccattttggattatgctttgtttcaactcactccaaccagaaccacgtgtgagttgttagtgttttgtggaggtgttcatcagaaaatagcttctgggttgtttga

SEQ ID NO: 93346 - DNA, 141 bp, Glycine max
attcgctaaacccaaaacactattttattatcttctgtcgatctgttactttgcattcgaagaaaattgtcctttgaaattgaaggaaaaccttgaaattcggattggtggaacacgaaaattaaaccacaagggaatttt

SEQ ID NO: 93347 - DNA, 121 bp, Glycine max
caaaacggtgtcgccgcttagttccactgttcccctcatcgataagcttctcaaacttccgtttgttaatactctcgtatcgttcgttaattccggactcaagttcgttcggtaagggttc

SEQ ID NO: 93348 - DNA, 126 bp, Glycine max
ataacatttcatttcacttcacttagggtggtgcatttgcaaccctttaatttcctcacaaaaatggaggaacgtagtttgtactcactagtgtttcttgtgcttgctttggctattgtgaacaaa

SEQ ID NO: 93349 - DNA, 99 bp, Glycine max
atttaacttaaattttgtctttcaaaacttgaaataatgtagattcgcgggaagatggcatcacttcatgctaatgtgacatcagttgtttacaacagt

SEQ ID NO: 93350 - DNA, 233 bp, Glycine max
tttcataattgctccatgttctctttctgtgacctaattcagctcatgtttgatctgcacatggcatctacatcctctggttcttttgggctgcttattaataattagaatttgataacaagttggtgttagagaaccgttcctctagacaacgggctggggaacggtatttaagtgatggagtcggacaaatctcctgatcttgcttgagttatgcatcgcggtgtagactg

SEQ ID NO: 93351 - DNA, 256 bp, Glycine max
tgttccttgttgtatttttccatatatttattttcgctctagctagcagttgattccttctttctgcagtgtagcttccacagcactagtgagcagtgagtgaggaccattattcatttgttaatatggttataaaaatacagtgagcacgtacgtacgcgtaacctctctctttgcttgcatagcatctgcaaaacctgacagtgaaaaagagtaacaccttttttacaacctctcattttctctgccatccaaa

SEQ ID NO: 93352 - DNA, 269 bp, Glycine max
cagcacctggttacatacctggatgtatatatcttcaaagatgtagaaggaccggagctgcagactgaggtggattaacgacctcaaaccagagataaaatgaggaaactttagtttagcagaagatatatcataccattaaaatactccatgctcttggaaacaaatgatcaatcacaacatctcacagcttgtccaatacaacaaataatgagatcaagaattgttggaacaccaacatcaagaaaaagcttatgagaaagagaata

SEQ ID NO: 93353 - DNA, 111 bp, Glycine max
gcatggagagtttggaactggattcaatccagatatgtctgattccttaccctcttggctcacagaagatgatcatgcctagtaagtccccaaattcggggaaactgggct

SEQ ID NO: 93354 - DNA, 255 bp, Glycine max
attagttatattgagtcttggatttatggtttatagtgtaacaaaatttgatgatctggcatgtcttatgttgttcttattgtaatatgattagggtgtataattaataaactactgattatcatgtatcttcttaccatattaatgtagatcaactagagtgagattagggcttataattaattaattattaaactatttattgtgagatccttagttccaatacatgtaattctttataaattctaactatcc

SEQ ID NO: 93355 - DNA, 221 bp, Glycine max
gatccagatcgaggtatcatttatccatcaagatttaaccgatcaagttgccattgatcaactcttgcactttcttgatattcaatgacgataatggagcagtgtgaatgagagattaaattatgtcttctttgcatctagaggcttttccgggtggttatatcttggatttacattttgaatatcatagttatccatgtttgagagaacctattatcttt

SEQ ID NO: 93356 - DNA, 136 bp, Glycine max
ggaaattcgaggtggcactcaattgccggagtcagatatagttaaatcttgtcgaagggttagtcactatttatttatttattcattttcacatggaaactgggttataactggtagctggtttgaagctgaacac

SEQ ID NO: 93357 - DNA, 255 bp, Glycine max
gaaatatgatttggttacatcatgagagttcttcgtttattgattggaaaagtagaggattggttaaaaacccttgtgacaatttcttttgtataaaagaaaggaaagcaaaaaattggtttgatctatggcattttgaagtagcttattcagcgcgatggtattgcgaagaatttcggcagttgcttcctctatcccatgaattgcttcctgcactgcaccaattcggaacctttatggaatgtaaccttttat

SEQ ID NO: 93358 - DNA, 280 bp, Glycine max
aagatcttctcttcagaagatgtgtaacaccctcaagttcaacccctttaagaaccgtttgctaataatgttcatgcgggttctttctctccccttcaatgttcaatcccaagccaaagatagtgaagaacagaacctggcagaactccctcaaacggttcatccaagcaagggaatagtaatagcagttctctccacaatgtttgccataacattactcttacttctctatgttaaattctgccgaactatccctcatgaactccttaggcaaaactca

SEQ ID NO: 93359 - DNA, 275 bp, Glycine max
ccttctccacgcacaacacactcgtctcttacgtttcaaaacctctctctttctctctcgagatctctctcgctttctcgctctaactttctctctctagcttttcccatgcacgccggttgcgttgtgtagatcttccaccgcatttcatggatccagcaaccgagcctcctgcattgtcttctctctctcctagggtttcgtgattccttcttctgcttcgcgcttttgagctatgcgttctttctccaccggctcggcctgctgccgtctcc

SEQ ID NO: 93360 - DNA, 276 bp, Glycine max
ctcgagccgcttgtattttatccatttggttgatgctgttcaagatgacaaagatccttattcttctaaactacaaagaataaggatctttgtcctcttggacagcttgtattttatccatttggttgatgctgttctttttccttgtattttgaatttttttatgatgtatttagttattattataagatttacagtattattaataagagtaaagttatcataaaaaaaaaaaaaaaaaaaaaaaaaaaaaaaaggggggcccccctctttttt

SEQ ID NO: 93361 - DNA, 277 bp, Glycine max
cttcatttgaaaggaaacccctactccctcactcactccgcggcagccgccctcaccgccggcgcaaccatctgaaaccgggggccctgtgtcgcagtggtagcactgtcacagtcgttgagaacgggtcattgtgaaaggcctcctccacctgagccctgagctcttcgttatagccattttgcaaagcaaacattcttgtccaatatttctcaggaaaatttcatttagtgttcatctacaatggccagatgggatgcaatcctatctcttccag

SEQ ID NO: 93362 - DNA, 276 bp, Glycine max
atttatctgtgccggagggagtgatatgttttgctcgtcgatgacggcgcaattcctctaagcagtcatcaatgagctcttcattcctaccgttggaaaaaacaagcctgcagggtttcactggagttgatcctcaaacacacttttctcagtgcaacaataactttcaaagaaggtaagctagttaaatatttgtagctacctccaggataactgctattagtatctagttatacttttgtagactgcaaaatggttgtcagtaagtatcctttt

SEQ ID NO: 93363 - DNA, 276 bp, Glycine max
aaagtatcagatctcatcaatcattctgctcagcttttgcaaagaagaacggcctctgatgcagagagagcattagaacatattaataaggcgttaataataagttcatactctgaaaaattgcttgaaatgaaagcagaggctctcctaatgctttgtaggtatgaggaggtgattcagctgtgtggcaagacccttgattctgctgagaagaatgcctgtcctttggatgctggttgcaaagtcacggatctggataattcacaactctcaaaa

SEQ ID NO: 93364 - DNA, 269 bp, Glycine max
gggactttgagtccttctgttgcaaagttggattctcttgttgagataaggttgggaggtaatgatatcagtggtgggatacctagtaattggactagtttgagatctttgacattgttggatctgagtgggaacaacatttcaggtcccttgccgagttttaggaaagggttgaagcttgtgattgatgagaatcctcatgtaagtgctccagatagttctcttccttcaccagtgagtagttcgggttccggttcgggttcgtggtc

SEQ ID NO: 93365 - DNA, 273 bp, Glycine max
taatggagcacctgctgcatccagtccgcagccagtccaacgagcgtgggttcctcctcagcctcctcatatagcaatgacagttactgagaagcgatcagacgcccaaagcaggtagtccaaaaggaagtgacactggatgatcagtcagcagctcattcttcagacctcactaatggatccaaatccgaagatgcaatagaaggcaacgttgtcaactcacttgtcagctctggtgagatccaaaaccatgaagttggttacgaagagaaa

SEQ ID NO: 93366 - DNA, 268 bp, Glycine max
ctcatagaccttttggcttttgctcattcacaccaaagacctgtaattgctttggatgccatctttagtcccctctccccctattatagtcttataataataattgaaaaaaaattgagggttatttttagttaattatgttgcaagtgtgaatgggaagtgaagtgaagaatatctgctcttggttagtctgtttattaattactattagttattattattatttggggattgttatttccaggaattattttttctttctgcagtg

SEQ ID NO: 93367 - DNA, 211 bp, Glycine max
caagaaacctaagattattggtacactctaatgaaaagagttccatttctcttctcttgccattgcagcacccacttgcattattgttattgggtgctgcaatggcaagagaagagaaatggaactcttttcattagagtgtagcaagaaacctaagattattggtgctttgtagcgttacgttactttttttgagttttttttttttttt

SEQ ID NO: 93368 - DNA, 255 bp, Glycine max
cggctcgaactcgaccgaatcggctcgagcacaaaccttcaaaagccacacacaacacaaccacttacacccgatggaagagacaccgcgacaattaagctactgacttctgagtaatgcggggacggcagagatagggattgttttggctgtcagattactttcttttgaggtttatgatcgtgttgggttttcactatgagtggtgttcctaagagatctcatgaggatgctgttcatcagtcttcaaagcat

SEQ ID NO: 93369 - DNA, 256 bp, Glycine max
ctcaagcgcagtcctgtctgcttccgaaacgttgagatggtgaagaagtaaaggaaggatgccttaaacgtgcgttttagagagagaaaacaaaaccaaacaaacaaacaagtcagaatctcttctcttctctttctctatcgtaactctcttctctgctctcagatcttccaaaaccctcctttccttcattactaaaatcacttctcttcaaagattctttttctctttctttctcagcctccacttctttttt

SEQ ID NO: 93370 - DNA, 249 bp, Glycine max
ccccatcccaagttcccaaccataacaagctttgaagtttgagctcgaagtccaacattccaaaaacttgcatagagagatagatacatactacaaggagttcagattttcggggggagagaaagatctgtgggggtgtaactgtgtaagtttgtgctgttttgtttgtggggattgttttcttgagaaaagagtaagcggtgtgtgtgtgtgtgaaaaagtgtgttaatatgagtaactggttggggt

SEQ ID NO: 93371 - DNA, 247 bp, Glycine max
attttgtatttatttcttctaaattaaaaatattaattattagtaattaatgatgaaagataatgtttgaaagagtgagatggacggtgtaagtggggtgagcgttgaagtgtttttgaactattcacgtgaatgggtcgcgtgggtggggtaaggcagcgtttgggagtcaacgatttcggtagtggtgcagttaaaatgaattaaataggtataccacgcatgatagcgacaaaacagcataggg

SEQ ID NO: 93372 - DNA, 268 bp, Glycine max
tgcacaatgaatcctttctggaaagtctccatggcatgctttgtcaaaatcctttagcaatgtgagcgccatcgtgcaaatgcttccgccatcgatacttgttgggcacttcgaagctctctacgggccgtgcgacgacgaacgcagggttccccggtgtctccatgtcgcggccgaccatggacgaaattctgcagatatacgaattgctattctcgtaactcaccttcaatttcagacctatcatcaccgatctcaccatcattgt

SEQ ID NO: 93373 - DNA, 265 bp, Glycine max
acaggatagtgggtatcttctaagagtgctaattaggataacgtacctattgaactatggggggtgaaacagtgaatgggacatggctcagtgctttttggtcagtgtcacgtaagagtgcatcagatggcaaggaagtgattggagttttggcatttgaagttgcgggtttgatgtctaaggtggttaatttgtggcgttctttgagtgacagggaaataatgaatacgaaggcatggataatgaagtcggttggggtcaaaat

SEQ ID NO: 93374 - DNA, 264 bp, Glycine max
aactcaaaactataataatgggttcttcttctcctccggacactagcaagagcataaagctagagcgatacaacagctacatcaggagactcaacagcaccaaactcctcaacgcctcctccaaactcctcttccgtgccactatcttagtcgcactcatcctcgtcttcctcttcaccttcaactaccctcccctcgccccagacttcacctcccaccgccacctccactcccactcccacttcctctcctcctcctcctcct

SEQ ID NO: 93375 - DNA, 272 bp, Glycine max
gcaaagtgtaccgaagattcaatctgttgagggcttgaatgatgcaaccctttctctttggacattcaaaataatggtttaatctatttttattctagtttttggtaaatcacactggcgcctaagggcaggaatttttaacctgtttctttacctttctgcttaaacagggagacgggttgccactagtcactagtcactagtcagtagtcattaaatgtctaggatgcattaatggtcctcctgctttagtctaccttagcttattatat

SEQ ID NO: 93376 - DNA, 257 bp, Glycine max
tgcagttgtggtcccaaaatattcaagaccttgggatatgcaaagaacttgtttgtcaagatgattttaacatccctgatgttgacttaactttccaaaactatgacgaactatttggaggagatcaagatccaattagaatactgcttgatgatcaagatgtctcctgctcttctttagagaaggataagtcagttgacaagtcagttattgacaatccaagtgcaatggaggaatcttctgcagctgcgtccatt

SEQ ID NO: 93377 - DNA, 254 bp, Glycine max
ctttccaacacacactttctctctctatctctctctctctctctctctggttgtctttcattttgttcattgttgttgatgatgtcacgcgccgccgtgttattacacgcgcaggaggaggaggaggaggaggaggaggagtgtagtacttcgacgtcgtcgtcgatcgggaggaacagcgacgtgtcgtcggagagatcaatggaggaaggagaaaacgaggtggaaagtgcctaccatggacctttgcatgc

SEQ ID NO: 93378 - DNA, 323 bp, Glycine max
cgtgtacattcggctcgagcgccatcaccaccttcgacccttccctttctaacgttgctgttgttgttgtttccaagaagccaagcattcactttagggagaaacaaacaccctcttcttttttaagcttctttcgtttctcatgtttcttcttctctgctcttgtaacttgttgatggtgtttgctcactagtccttttcctttcctctcctttcccttcaaacgaacgtttcttcatgtcggactcggccaacaagttgcgattggtgcgttgcccaaagtgtcaaaatcttcttcccgaactcgctgattactctgtcta

SEQ ID NO: 93379 - DNA, 293 bp, Glycine max
cgacgcattccaaatttcttccatctactactaccagtctcccatttcttggttgttacacacaaaaaagcagagtctgcagcactcaaacgaaacgacagtgaccaaaacagaaaaacgacattacccagagagcgacgatgccggaagaaacgacgtcgatcgactacgtgatggaggctgcatctgggccccacttctccggcctgagactcgacggccgggtcccgtcctccgccaccgccgcgtcctccactcccgattcaaccctaaccctcgattcccttcccaat

SEQ ID NO: 93380 - DNA, 293 bp, Glycine max
ctttcttgagcaagcaaacacctgctcttgctgcaacagaattcactcattcattcataatctcactctctcattcacaatcacaactcaccactcataactactacttccaagccaagctgcaaagttcaactttttccccttccacttctgaatgaactactttccaacttagacagtcagagatctaatggagtacgagaggatagagaaagttcaggctggaataatttcccccagtaaactgaggatgaagttattaggacctctccatcataggaagaaagatggat

SEQ ID NO: 93381 - DNA, 296 bp, Glycine max
agggattatctcctccaatgactggacctcatcctggatcgtcacctaatacaggacagccttaccaccctaatgcatctgaacatcatcctcacgtgagcagggtagccccgcaaatgacagcgcacattatacaccatctggaccttcacctcaaatggcaggacatcagccttatggaacaccacgtgggccccaacaatgggcagaacgacagtatccgccatcagggttgtctcctccaatggcaggacaacatcatccactagctggaccaactcctccaatgtcaggat

SEQ ID NO: 93382 - DNA, 288 bp, Glycine max
attactaccactctccacccccaccttcacctcctccaccttacaagaagccatactactatcactcaccaccccctccttaccactattagctagcatagctctatggatatgaagaatatgtgcaacgaataaaagaaagcgatagaaaaggaagaagaagcgcttcgcgatgcacgaaagagaagaattggaagcaaagtttcggcgttttgtcttatataaaaaaaatgttaaatcattataattttctatgatagggattggtttcttgtcttatatcttttg

SEQ ID NO: 93383 - DNA, 285 bp, Glycine max
aacagctaccaatcagaaattgaagattcaggagttggggctgagcttctggacatcattctccccaaggttattttctgtctcaatcttcatgttgaaaagagttttttttttctctttaaaattgtttaattttttcccaattttttttaaatgaaaaatatatatgaaaaaattggttggttcatgtgattcttcaaatatgaagttttggtgttgattgctatagggaatagagatgacagcatctctatcatgtggtttagatgttgctattgttgttga

SEQ ID NO: 93384 - DNA, 153 bp, Glycine max
aaaatgacatgaggaatcctacagttgataatagaaggaagagaaagtgactgtataatacgacatgtaaattgattataaaagcaatgcaatgtggttggatcaggcaatcagtttatttttccttcttagttgaaagattgaagtggtgat

SEQ ID NO: 93385 - DNA, 284 bp, Glycine max
caccgttctgatgtttcgttcccaacgcttcaaaccccttctctatctgaagggactcacaacaccaccatcacttcaaaccccgaaacccaattctccttttccctcaacactctttccgaaacacatctcactcacttcacagcaacactcatttgcggcttcctacctcgtaaacaccttcggcctctccccggaaaccgctctcaaggtctccgagcgcgttcgcttcgacacccctcagaagcctgactcagtgatcgcgttcttcacaagcaatggat

SEQ ID NO: 93386 - DNA, 283 bp, Glycine max
cttgctggtagacctcagaatgaggatctctccctgatagttgaggcagcttattattctgctggaacccttatactttctgatgcatcaccttctatcatgccttcactccttgttttgaacagggattctagcacgcaatcatcgccgtcaggcaatctatgcacaagtacgatgagtccccgggcattaagggagtccgtatcttccttaccagttgaaggacgaatgctttctgtggcagatgtcttacctatgccagataccgcagctactgtgcaat

SEQ ID NO: 93387 - DNA, 283 bp, Glycine max
attcctttgaaccgcaatttgtctttcacgcctaaattcacattctcaacatcactctccgtcagatgctaccaccctaaccttgtccaacccaagccattcccaccactgccacaacgccctccagttgcagaattgccacagcaaagggtgtacgtgggttactccgtttacacgaggaagggcgtgctcaccgtgactcctagacctccggaatttgaatcgaaaagttctggggcgttcaaagtgtccaaggaaggttatgttgtgctccagtttgctc

SEQ ID NO: 93388 - DNA, 251 bp, Glycine max
aaaaaccattcactagtttgctggcccatgtggatgtgctcatttgtattctttcgataaatccatatttgtaagtcaatgtaattagtgagagatcatgaaaaccctcccgtttagcatttacttgtaattatttaatttacgtttttgtatcttctacatactaacaactcctagcttgattctgacagtagctactatgttagattgtaacaaattattaaatatgtagaagcaatagtgctctgttt

SEQ ID NO: 93389 - DNA, 259 bp, Glycine max
ctctctctctctctctctctctctctctctctcttttccttaggagtgtgtttacagattgatgacaagcaaccccattacgtggaagcctaagaggagaagacgacgaagaggacaaggttaactgaatcgccgcttctgtgtggcttcgttctttcgttttagttttcacatctttatagctttagagggtaatacattctttaaaaaaatggaggttttggtgggtcccgctttcaccatcgacgttccttcgtct

SEQ ID NO: 93390 - DNA, 265 bp, Glycine max
gcatggcttaactcagggaatggtggctactagttcagtatctgtaaatcctaatttgatggataaccctcccacttcatctggaaggaagtcttctcctggttccccactgtcgtcctcaccccgttttatagaggcttgtgaaaagccagtgatgttggatgtttactcaccagatcggttggctggggaactgtttttcctggattcttccctagcattcactgcagaggaattatctcgagctccagctgaagttcttggc

SEQ ID NO: 93391 - DNA, 240 bp, Glycine max
ctccgagattccatcgcaaaggttgtttctttcactccacactttctctagcttcctctttcaagtttgaatttgcgccaaggttgtttcttcgacacaacactttctctctctaacttttaattctgtggaaacctactctgtctatacagctgttgagttttcatttctttgattgaactctggaggagtcaagaatgtctaaagaagttattgctactcaatcacctgctccttttg

SEQ ID NO: 93392 - DNA, 257 bp, Glycine max
tctcgagcgaattcggctcgaggacaaaaggaaggtgttgggctgaagaagcagtcaaaagatgaaagacctgcaagaaggaatgtgctcgaaccccaacaaacttcttcttctaaaccttttggcattcaaaggaaaaataaggaccttatcttcgactccaaggaccagcaggttgaaccgagtgctttacaagattcggctttccttaatgctgttgtgaaggtatactgcacccatactgccccagattattc

SEQ ID NO: 93393 - DNA, 251 bp, Glycine max
gttgaacctcacttgatgattgtctatcatacaatgattttgttacttgttttccttttttttttttcgctctcacaataatatgtaatataagtgtagtggtaggctttcatcacatctataatttatgaattgtttccttttgaattgaaattttgatatcatattagatggagctatttattttgaatgtttaaatgtcccctttcattggaaataggagtactacacagtttgagggtgctgtttta

SEQ ID NO: 93394 - DNA, 256 bp, Glycine max
cgtgttttctctcttcttcttgttacaagagagagattcaaggatctggtgccccttcttccttccccttgtgttgtgttgttgggaccaattctttaatcagcgagagagagggggcgcaatagtagcctttagcttctttattattattgtttagggatgagtgaggtgaatgaatgagaacaaaaactccgccatcgctcttgtctctcaccattgactctgccgtccttaatctccccgacatctccgatct

SEQ ID NO: 93395 - DNA, 252 bp, Glycine max
tccacatgctattattagtcaccattccaattactacttttggtccctttgtttgatacatgatcagcccctaaagccgtcatttaaacaagcattgatttatcttgaaagaaataagcactcccattctaacaatgtgtatacgccaactacttccttatcaggtagtggggacacagggatatgctgctccagagtatgttgaaacaggtcatctcaaaattcagagtgacatatggagttttggtgtgg

SEQ ID NO: 93396 - DNA, 256 bp, Glycine max
tcctaataatggtggataaagtatgcaacgaggtgagagatacaaagaagaagtcggttaaaactcaaaaacaagagactcctcgagaagcatcttcatctgaaccacgtccaccacctgattttcgtcagcgactttttccagcgattgctgaaaggaggatggatgacattagttcagacgatgagagtccatagattcaaaaattgacagtgagcaatggttacatatgtatttcatgaatgatggaagtggc

SEQ ID NO: 93397 - DNA, 259 bp, Glycine max
gtttgctgcgttgttgatggaacttgcggcacaaacatcaagagggataaatcatgttacatctcatgttgaagaacaattgtctcccattagaaaatctgattccaaaaatgaaaacaagactgatgagattcagaagactgaacatactccaagaggatttccaaagtcatctactttagtgaagcttccgttttggcccatacttgaaggactctggcttatattgtcatcaacctaccttttgcatgtgtcattg

SEQ ID NO: 93398 - DNA, 254 bp, Glycine max
ccaatttgcaaatgcctaaaacctgaatttggaagaaagaagatataaataaaatggcgagcgtgccttcaccttcttcttctcctcctcctcctcctccacgctccggcaacacctcccccaacaaccaggtgagtcaattcacgctattcaacttcacgcatgcacacgcgcgcctctatgctaattattctcagtttttcccccctaagttggaagctgttacaaataatggggtttctcacgtcgatgat

SEQ ID NO: 93399 - DNA, 185 bp, Glycine max
gcattacgagtgatgattgagatatcagaacaagtttatattacttgagaggaagcataagacgaatgatgaaagtcatgttgcggactctggtaatcatgtgtctatccatacatctaatgatgatcataatgatcatgagtcttcactttgggctgatcagcttttccatgtgagagtagaag

SEQ ID NO: 93400 - DNA, 252 bp, Glycine max
ttcactctcactccctctccttctcttctatccactcctcttccttcttgttcttcttcttccacccatcatcattcatatctacacccccgccactcctccttccacactcaacctcttcgcttaagcaacctccgctaccacacccatttgccatcaacccccaagacactcaaagtgaactgttccaccagcgagcctctgaaggtcatgatatcaggtgcacctgcatcgggcaaaggcacgcaatgt

SEQ ID NO: 93401 - DNA, 251 bp, Glycine max
ctctaatctcaacatttccattttccaccttttattggaagtttcataccagaattcactgaacttgcattagatgagggcaaaacatgcgagcaaagcaaaaatctgatccctaatctctgtttttgctctggactctcccaatacccacccaattgaaaaattgaaatcccctttttttgcgttaaacgaaagcaacgtattcacccaaaccctagaaccacttccagatcaaaaccaacgcgattgcg

SEQ ID NO: 93402 - DNA, 257 bp, Glycine max
ggaaaatagatcaaagaaaaactaacgtggaaaaatcaatgaaagttgaagattcaaaggaacactaaaacgaattgatacacgactcaattaaaaattcaaaggaacattgagacgatcctagcgcactccggccaaaagatccgttgatgtttgttctcaggttcacattgcctttttacattttcgctgcacttgttgttccaccattctcttcataggaaaatctttgtaggcttgtgctggaaatgctctgt

SEQ ID NO: 93403 - DNA, 264 bp, Glycine max
cttcagcgaacaaaaatacccctttatcaggctcccccattaaatgactgtttgaggataggatacccttccgaaataactattccagaatataatttttcatattccaaaatacctattctaggataggttttcgaagtgattctattttggaataactattccataataagatatatttctagaatagttctttcggaatatagttttcatattttgaaataactatttttgaatgtagatttccatattttagaatagtta

SEQ ID NO: 93404 - DNA, 253 bp, Glycine max
gtgaccaataggctacctggttatgctcattcgattgatgatcggtttacgtattgcataacttgctccttcttttgtttctaatgccgtattgcccgatgtatcttctaccgtttttcttcgccatttttaccttttagtgtttcttggggtttatcccttttttccaacaataaaaagggcaaaacaaatttaccaaaaaggacatagagggactttgagcaatagcgtagaatttcaagtgcaagttgga

SEQ ID NO: 93405 - DNA, 255 bp, Glycine max
ggcaagaaaaaggttatttgatagcgaaatttcagcagacaatagactcgtataagaaacccatgatcaaaggccgattttctaatgacatgaacaactctccatgaatgagaaagacttcaagaggcttggagtcgtggttttaagagtcaatgatttcagattctacttatgccatatcgattatcaggagtaccaatatgttccacccctctgcagtaatcatcaaaagaattcaagcacttctctgtttaa

SEQ ID NO: 93406 - DNA, 254 bp, Glycine max
gctacacttctgcagttgactccaattgatgttgtgaagtggtctgggatattatgcatcatagctgcagccacaaaatggactatgaatatgcttttcagtcccttcttttggatgtattttagctggacgtggttgttctggccttggatggtggccatagggcttgcagtctatgggttatattgctttcggaaacatctgcacagtgaggcaaacatatttgagcaattggctattgttacatcagtttt

SEQ ID NO: 93407 - DNA, 257 bp, Glycine max
actcgagccgaatcggctcgaggcttcctttgccatttccatggatacagaattcttaggcatactaacatttaagtgatttaacacatctctgccactgactctgctgaatagcattgaataacaaaggccatttctttagtttttgaagatagatagagtcaaagagagatcaaggggtagcttaaatttttcagcttttggagaaagagacatcactcacgcaccaccgagatccattttttcaagacagttga

SEQ ID NO: 93408 - DNA, 253 bp, Glycine max
ttgcgacttgcgaatacatcaacaaatgggtactttggttcgtaatggtgctcttgcagttcatgctttgctgctcgcataaaataaaatgagagagatcgggtaatccaacaagttgcagttaagctagtttttgacgaatccaacgatgcttgctggaaccattgctacaacaacgaggaggatatcaacttctcctcctttctctcggagattaaaacaaacaggttctactcactcgctaaaataaaat

SEQ ID NO: 93409 - DNA, 197 bp, Glycine max
ctttgttcgaaggaaaaaagtttcaattatgaaaaagaatgtttacaaattactagttcatgaataataatgtctcagtcatatatacaatgaattacactagaataagactaagccgggaagtatccctagtgtaattcattgtatatatactgagacattattattcatgaactagtaatttgagcacattcttt

SEQ ID NO: 93410 - DNA, 281 bp, Glycine max
  unsure (1)..(281): unsure at all n locations
atgagttgatgcaggaaaagcaaaggcgacgcttcctgtagtggaaagtgtgtttaatggccacaacagcacgagaatcagaaccttgactttaggaaaatattgaatatattgcaagagattatttatttagtgtagtgttgaaanggacgaataactaagtagtggcaagtggagcagtcactaatgctaatgcgtgggattgaatgattcgcatttcacagatgacacaactatgacgcacggcaccagaagaagaagaagaagaagaagaagaggtg

SEQ ID NO: 93411 - DNA, 143 bp, Glycine max
cagaatgttctattcagattccttctttttatgttttatttcctttattttaagacaaaatgatccccccttagctttggttgtattgctcacatataaattaagttatattacttcctaataaatagtttcttttattgatg

SEQ ID NO: 93412 - DNA, 284 bp, Glycine max
agaaggtgttaacatcacggccaactcagtccacccaggggtgataatgactcctctcatgagacactcttctttactaatgagtacgtgatttgtccaaaaatacggacaaataataatcataataaaacaaaaagcatttaatgttcttttcattacttatatacttgtctaagccaataatataatttgaagcagattttctgaagatgttctccttcatgatatggaagaacgtccctcaggtatatattcaattaatttgtcttcctcattgtggctaa

SEQ ID NO: 93413 - DNA, 280 bp, Glycine max
aaatattgcaacgcaagtgtaggtggttgagttatttaattatctacctgaagatcgaaaggtcgaagccagtaaggttaatccgactctgaatcaaccccttcaaatcaaactcgtcatgcttgctagttgctacaccccaaaccatcttgtacacaatttcctccacaaagatgagcagcatctcgctaaggtcaatcacctcgccttcttctttctgaagaggagactacccgtgtgggacctgtccgaggcggagggacatgacgggaccgtattg

SEQ ID NO: 93414 - DNA, 277 bp, Glycine max
attccattgctgaacagcacacataggagaacatataattccattcccaaaaattataactatatttggaataccaatagagctaaaaatcagatcgagcagttttgaaatttgcaagaaacttcaagttttcttagatagaagatagatacacactcacagaaagaaataacattgttagatttctatttattgtactcaatttgaagtgagttgtcagtatcttttctagaatttattatatttatactttatctcattaggataaactaagaga

SEQ ID NO: 93415 - DNA, 274 bp, Glycine max
ttatcacaggacattttgttgatcatgattggaagttgcagaggcgaattctcaatgttgtaatggaaccatttcctgattcagattctgcactcacccatgctatagctgtttgcctttctgattgggggttggagggtagctgttttctatcacttgcaatcaagcactgagtaatgttgcccttgaacatctcagaccattactctctgtgaagaatccacttatcctcaatggtcagttgctagttggtaattgcattgcctgtacttta

SEQ ID NO: 93416 - DNA, 277 bp, Glycine max
ttctttctctagggttttaaccttagggtttcaaattctgtgtttcactctctcttgcggcatagctttgccatggataggtaccagaaagtggataagcctaagcccgagtctcccatcaatgagaacgagatccgaatcacgacgcagggcgctattcgcaactacatcacctacgccagttcgcttcttcaggaaaaacatgccagcgagattgttttgaaggcaatgggacaagctatcagcaagacagttgccattgcagagattttaaaga

SEQ ID NO: 93417 - DNA, 271 bp, Glycine max
caggtttctcccttaattatttgttttcttcttctgttaacttaattgcgtccctttttctttcttattccccagtgcaaatcgtggaaacgtggacgcgacctaacccgaaccgacattgaagtcggcgacgatacgatccgttttttgtggtttctctttggcagaagcaaatggggtccatggtatcagccggagatgtcgtcttgttacagaatctcaagattgcgaagtatggaaacgccgttgaggcaagaaccgttccatggtc

SEQ ID NO: 93418 - DNA, 273 bp, Glycine max
gcaaaaccttaacctcactgctcaacgcttcaattccctcaccgtccgcgccgactctttgcctccgatccgaacatgtcgccgtcgccggcgtttccaatttcgactctctcctttcgctgctcgagttctcgtgcctgctctcttccgccgtagcgtccgctgctgccgccgtggtcgcgggttccaagaacgagctcctcgtggggatcggtaccagagctgctccgttcggcggtgcgttgcctgtggtcggggttctagtcggcgcgt

SEQ ID NO: 93419 - DNA, 280 bp, Glycine max
cgacatagttatgattctgattatgaaagaggtagtagaagagatagtaattggaggcaacgcgaatcacgtgatcgggaaagagataagagaggtcatagtcgggaaagagatctgagtccacataggagacgtgagcgttctcgttcccattctcgttctcgatcccggtctcattcccattctcattcccgatctcaatctcgtggacatgatgaccatccaagatctaggtcccctcgaggtcgaagccatggtcgaagttataaggcagatagct

SEQ ID NO: 93420 - DNA, 274 bp, Glycine max
ctggaacataagtgctaggtgctgcaatgggagcaggagtgggcattggtacaggtgcaacgggatagcctgcatatggatcatatggaggcggcggtggcggcgccatgtatccatgtggtccccacacaggaggcggaggaggatgaaaaggagacggacttgtatagccagtgtgtgtataatccccggctgtccttaagcgtttactttgatcaaaagcacccgcatcagctccgattcctacaagacaatatggaggacggacttggtg

SEQ ID NO: 93421 - DNA, 275 bp, Glycine max
cgcagtttgaggccacacacaaaaactcaatcgtaaagccatttcacttcaactttgcattgcacgtaaatctcaatccaaatcaaatggcctcccttcgtattcgtaaccttctccgtttctccatacacgggacgctgctttcatcttctccacttcgaccagggttttcgggaagctctcgaagctacagcgtcgttgaatcttcgaaacattttctattgaagtccgacgatgaggagatattcgctctccgtcgcaaattcgaagctgcc

SEQ ID NO: 93422 - DNA, 289 bp, Glycine max
cggctccagctcgagattgaccacaacgagatcgtgaatgtgattaagagcttgcacggtttcagatacgttgatgcgcaagatattaagacagacacatgggtactcactgatgaagggaaaacgtatgctacttcaggagatcctacagtagcatacgttttcccttcatcagtgagtacacatgtttctctctgatgacgggaaaacgtatgctactgtaggatcccctgaagttcaactttttttggccgttcctcaagagggtatctctaaggaagagcttcag

SEQ ID NO: 93423 - DNA, 241 bp, Glycine max
gtgaaaatgacaattaagacattttttttctcttgccagtcacttttctattttgtaggtaaaatgtgtaggatctctggcatcagtagattcccttctgcgagtttgcaattcttcaatgctgctattatattatttttgttgcccctcgtcccctttctctcggtgtgttttgctgctgaatgttgtaaaaagaattttcatcttttgtggatacgataaaagaattgatttctatatg

SEQ ID NO: 93424 - DNA, 272 bp, Glycine max
atcggaaactatcctttctgcaaaaaatgcagacttattgctacaagctgtaaaagacattccaatgttggtcatagctggtgctgaagattcacttgtctcgatgaaatattgtcaagcaatggcctccaaatttgtaaactctagactggttgcaatatccggatgtggccatctaccccacgaggagtgtccaaaggcgttgcttgaggctatatcacccttcattaatgataaactcttcttctctgtatataactcgcaaagccaat

SEQ ID NO: 93425 - DNA, 183 bp, Glycine max
caaaatttcagaaaaaatagaaataaaacctgatatttttagaaacgtcaaaaaaatatcatatctgtaaactctttttttaaagttaaacaaaaatttattctcaataattgaaataaacactactagaaagttggtattctacgacgtggttttgacaattgttttgcaaaaaccatcgtt

SEQ ID NO: 93426 - DNA, 215 bp, Glycine max
cggatccaatccgttaagtaattaattggcatattatcgctcctaaatcctaatccgacgctgagtgagatacaaggaacagacaagacaaggagtgagtgaggaccgaggaacacacaaagacaagacaaaggttcgcttttccatccctcccaatcacaaacccagaaccagaagaagggccttcaccttgacaatggcacaaaccccagtta

SEQ ID NO: 93427 - DNA, 139 bp, Glycine max
tactgttgtgagtttattactagtctcctcctgtgtgtgtttacttattgagaatatattgtgttgctgttaatttgcaggaaaatggcaactctagttgaacctcccaacagatttaagccaaagggcaagcattatt

SEQ ID NO: 93428 - DNA, 237 bp, Glycine max
tcgatgggatcacattcattatcccgtgggccgtagttcttggattaggcgcatgtgagtgtcaactgattcctgaggtttcagccttttggcagtggtcctttaagattccttattgtgtagagaccactttgaggtcaagaagagactaattgcagctggctgctttacattttggtggtgggttttacatatttggggtaagtggtcaagtatcgaatgatcaagatgtgtttg

SEQ ID NO: 93429 - DNA, 217 bp, Glycine max
gtacgtaaacgcaccaaataaatttataatcttaattacgtccattcttatttgatagtaattgatatctacttaaccttgttttagaactgtaggttaattaagcgagtataaagtactactatataaactagtataaagtatctttattaactgtgttagttggatattgtggtggggtagtttactttttgaaggagtggggaaaggttaaaaa

SEQ ID NO: 93430 - DNA, 127 bp, Glycine max
tggtaatcttcaaatcaactgcaacaacttcaaaaggaacaagtcattgttccttttgaagttgttgcagttgacttggtaatcgtcaaattcgttgattcgttggagaattggatgctttactctc

SEQ ID NO: 93431 - DNA, 274 bp, Glycine max
gacatttgaaagatagaaagaatgaatgcagcatctcaaaccttcatcttaaatctaactccacaggtggccacatgtaagcagagagtacatgagtttattgtgcctagcctgaattgtagacatttcggtctttcatggaagcttagacatggtgcaagaacatattttaagaagggaatacattaaatgccttcctactgctgatgtattatcagatgcccaaatttcttctgatcagtttgaggacttctctgtctctgttgctgacaac

SEQ ID NO: 93432 - DNA, 273 bp, Glycine max
attctttatatatttggaggatcatcaaaatccaggaccttaaatgatttatattcacttgactttgaaactatggcatggtcacgagtaaagatacgaggttttcatccatcacctagagctggttgttgtgacgtcctttgtggtactaaatggtatatcactgggggtggaagccggaaaaaaagacacggagagactgtgatatttgatattgtaaaaaatgaatggtctgtggcaattacttcgcctccgtcttctatcactacaaac

SEQ ID NO: 93433 - DNA, 226 bp, Glycine max
agccgatgaatcgtgagcacatcattttctcatttgcttttcccgtttctctccgcattctcttctctttcaattttccctcctttatatattttctgttcctttgcattttcctcgtcgcattattcattctattctcttctcctcatggcgccgagcaccggagacgtgcaacttaattcccccgtatccggcgaatattcagacgatctcgaagacgttcgcc

SEQ ID NO: 93434 - DNA, 269 bp, Glycine max
gttgatgctgaatccaataaagaattggaacagtggaatgaaatgcttaaaagtgatgccatcaaactatgccaggagaacaatttcaacccaggattttttgagggtcagacttgagcatattctcgagagaattgcattgatatcagacgctgcaagtactgagaaaccttcagcagtgacaagtagtctgttcattggtggagcactggctgcaagatctgtatacacactgcaatacttgggaatcacaaatattttgtgtttgt

SEQ ID NO: 93435 - DNA, 268 bp, Glycine max
gagcgatgcaaatgaaatggcaacaagtcgcaaagatgagtgatatcttctgctgcagataggaccaacaattcttttgttcttttctttctgttttccccaaattaagcataagattgcgtgccatagttatttccagcatcatcatcatcatcatggcattgggaagagtaatatacgttgctcacaccgtatgtatcagatcagagcttcaacccatggcacctgaccgcattggttcttcctcttcttctcgccaaagggacct

SEQ ID NO: 93436 - DNA, 264 bp, Glycine max
ctggaatgcctggtgaagctgcccgcgttaagaaagttcttgctcagaacctgacattgggtattacatcatcaaagaaatcttatcatgaaaccacaaatgaaagtatacctgttgctgtttagtgaagttctatggcaaagtgcaaaccagtggattgacacagccttccaccattatgccttgagtacttggtgcaggtgtctccagcttgtggatcaaaggcatgctatcattgggcagggtgtctcttgtttctggaga

SEQ ID NO: 93437 - DNA, 263 bp, Glycine max
gttctcagctcaagaaggattcttgcctaagtcctcgtttttttatcggtgaattattgtgtctctcacttgtcacttttgtttttttgtgatgcttcagaagttccatgttttttttatttcatgactctgtgtcattttcctttccaagtgcagcagatggtgtgaaatcatttctcccccctaaagtatattcctttcagcttgtgattttaattttctaattcattgtttggttttgcttcacaggaatggtagatttg

SEQ ID NO: 93438 - DNA, 295 bp, Glycine max
tggagtattccaactgtgattcaagatgaggaattgtatagattaaagctgaagtcagatatttcgtgaatataacttttaactgcgtctccgaggaccctttatgtgaggagcaaaacagattaggttcaatgcctcccacttgccacaacaagtgcaaccagtgtcatccatgcatggcagtgcaagttccaacctcgcctaaccatgaacgagttcacccaggtcttcttcccccaactgcttcaaggaagttttctttctccaaggtaacactaacaggtactccaattac

SEQ ID NO: 93439 - DNA, 129 bp, Glycine max
ctttcattttctctgcatctgtactctccaaaatgccgtccttagaggaggagctcttcccttcaaccccaggcaagttcaagatcgagcgggcccaccacatgaaccgccagctctaccgctgcttcg

SEQ ID NO: 93440 - DNA, 130 bp, Glycine max
gtccctcattgctgggtgatctataatctcattgaaggtggttgtccttggccttagaatggggagagccttaatcaccctaaacttttaccaatcaaaaaggttaaccattctgtgtctgctttccctc

SEQ ID NO: 93441 - DNA, 162 bp, Glycine max
tccaaaccgacgtcaatggcagcctcatcctccttctccaccctcttctccttcctcctccctccaaagccacaccctcctcccatcatcactcgcttcccactccagaagctacgtgccaagcatcaggaccaggaccaccactcgtcggcggagctgtcc

SEQ ID NO: 93442 - DNA, 290 bp, Glycine max
actcgagccgaatcggctcgaggaacgatgtataactttggctccaaagaggactcctcccacaatcgaaaataaaccactagggcacaggtgtctacgacgtgaaaatcaacatattggcaatgaagatttgatagtttttcgtcgcaaattagatatcatgaaacgacatgagtttgtgtgggagccttacacaacaaatgttatgtcactgttgcccccaatttgtttagttggagatgtaagtggtgtgcggtggtgccactaatttgttttcaagttattgagtg

SEQ ID NO: 93443 - DNA, 284 bp, Glycine max
ggaatctggtaagcaagatgcagcttctagacttgtaaaaaattgcagctttataagagacattgttcagccagaggatttcagttttttatatcaagtatttatgtttggacgtggtgaatgacagaaaggaaaggatttcttgtagcagctgtttggagtatctaagatgattaatattgcctatgcaatttctatcccagcaattcctgaacagaatttgatttgatgcatgaaaaaattctatcctttcataatttgttgggaaagggtataaagcatgc

SEQ ID NO: 93444 - DNA, 153 bp, Glycine max
aggaaaattgttattatttgtgtgtcatatttgttggctatgaccaagttgaagtgcttgtgtattaatggtttgctcataggcaatgtgacctgtaagagatacatactcgagtaaaaactaattctgtaatcctatgcatattaatcttct

SEQ ID NO: 93445 - DNA, 125 bp, Glycine max
cacaactctctttcactgttccctcagtcttccttccattcttacttcctgtaccccaggtattattggataagattaaacaatgactagtccctatccaggagccgtgactaataacccaactt

SEQ ID NO: 93446 - DNA, 252 bp, Glycine max
cttgctacctccataaagttcttactaatctgtgtccaggaacactaaaaataatatagacaagtgcttttctagtgaaacatagatggtcgtggttacaagtgttgtttcaatattgtaagtgtctgtaggatgctagagaagagaatatgggaacagcatttatcctcaagggttgttatcttactgttgtcattactaacagtttcatttcttttcttctctttctgtttttttgaatactttactttt

SEQ ID NO: 93447 - DNA, 247 bp, Glycine max
cttcttcagccttcttccctatctcacttaccactctccaccttctttccaaaacactccctttccctttctattcacttcctctactcttccgagatgatgtagatagagaataaaaagagaccagtgtgcagtgagcaagattccccactacttgtgtggcgctgtactgttctgtgtgttggaatttgttcatgggtgaagatggagcacacgcgtcaagagagaaggcacaatacatgggagt

SEQ ID NO: 93448 - DNA, 246 bp, Glycine max
gtgcttatggggcaggtgttcctatagtgttgaatgggagtgaatcagtgactcagtattataacgtctccttgtctgccattcagctgtatattgatccgtcaaagccctccacgcggctaaggaaacccagtcagaaagtgactctgaatcagctagagagacaagcagtgatagtagcagtggctattgtcatgaaagaggagctaagagtgttcatggtagtaggaatcatcttaatgttat

SEQ ID NO: 93449 - DNA, 242 bp, Glycine max
aaaaaatgtttaatttcagctcaaggtaggtgggtttatgcattgtccatgctactctcacatgaggggacaagttagaagtataatgccattcatgtgtgttcaccttgtagcttaagcttttggagtagttggcaaattttgttgaaaatattagttggccagctttgggatttgtttttattattccaaaaggtattggcttctccttggtggattttgcactcatgagtcatgactga

SEQ ID NO: 93450 - DNA, 271 bp, Glycine max
aacgtagcagtttcacaaggcaccatccacttccaaaagctttctttctggttcgcaactcgaacttgtccaccgggttaatttccttcttatctttctcttgtagctccactccactaaaaaagtttgaaaggttttaagtccacgaccgcaatttccactacataagtcaaggtttttggaaccattgtgattgtaattgtggttgcatcgactgtatttgttcgcaattttttacaacatcaaggatcataataaaacctttaggact

SEQ ID NO: 93451 - DNA, 275 bp, Glycine max
aggctcctccactacaaaaaggcatcaaagatgatatcacaaagtttgttcacaaactaacagcctctgtgcaccctacacaacacatggatgacaaacagtttagtgtcataactttggctggtgacaatagaggagccacaatgcacttaggttctgagtcagctaagaaagagggttcagttcacatacaccgagcctacaagagtgatcctgaagataccaatgaggtgaccactgatggagaagaaaacactaatgaagaagatgaagag

SEQ ID NO: 93452 - DNA, 257 bp, Glycine max
tttttgttcttctccccaatttggtttttctgcttcctccgattcctaactgctgccctgaatcgccgccaatgaacttttccccattcggaaccttctgagattttccgagggtttttgcgagatggccaacgaaggaagtaatgccgagaccttagctcctgcggagccacatctgttcgagaatcggcatgttgatgctaaccaacatcatccaacttcctatgttcccactacaactgggtctgaagctgcgc

SEQ ID NO: 93453 - DNA, 284 bp, Glycine max
ggctgcgttcgcggcggacgtgcgggacttcgatgcggtgaagcgcgaggtggacgatgctggccccatcgacgtgctgctcctgaaccacggcgtgttcgtggcgctggagctggagaagatggaattgagtgacgtcaagttcaccatggacgtcaatctcatgggaacgttgaatctcatcaaggccgcgctgcccgcaatgaagaaccgcaacgatccgctgcccgcttccattgctcttgtttcctcgcaggccggtcaaggtgggaattatggttatg

SEQ ID NO: 93454 - DNA, 287 bp, Glycine max
atcctttttaatggctaaactcttctactgtattcgtgttgcatgcccttcattgaattgcttgtaggaataactcaatcgatgctttgataaaatacttttgataccaaaaccttttcatcttcaaccttactgtgcttcgcctctagtgcattgatatatcaattaaacaagaagtactatagtagaagtttgttggtatgaacacaggtttctctcctgttgaggactgtgactcaatgtgtatcaatggattttactgttggttttgccattggaatgtgtta

SEQ ID NO: 93455 - DNA, 146 bp, Glycine max
caatcctgtgattgctgttggctcctattctatttggtaagagtatcgacttccactaattggcaactgtttagattggttaattaaagcactcaatgttttcaggattttcatatttaattgaatgaaactctacatggtaattt

SEQ ID NO: 93456 - DNA, 276 bp, Glycine max
gttcattgagaatttgagttaattgataaattcgtagatataattcttcaaatatattagcggtgtggtgtgaccaatatgctattattagttttatagcatcaatgcaaaatgtgagggccatcaaggcgatgctgaggagtttggagatggtttcaggttgaaaaataaattttgcaaaaagtcaatactgcctcataccttaactgctgtttgttgacctacttgggtatccccattgaggcaaacccaaaaagtagtgtgccttgggatctt

SEQ ID NO: 93457 - DNA, 137 bp, Glycine max
tgagaatttgaaaataatgcagacagatatcggtatctacatagaggctatttgttttggaatttgtaataattactaatgagttgctatatgataaattttattcttggaaatttgaaactcgttgatatacacgc

SEQ ID NO: 93458 - DNA, 281 bp, Glycine max
cacaggcatcttgcataggcattcaagatagtctggagttttacatgcatgtacgaggatacatctgtatcatgcacctcctgaacttgtgcctatggcgggaacagggaaacattgtttcctgtttctgtttttaaatccttgcaactatattaattttgtgcttattttgatgggatttttttttctttttatgcatctaactctccagccatatcaacctgggtatactgcccccccacctcgtcctaatcctgaagaaatactattgatatacgagg

SEQ ID NO: 93459 - DNA, 279 bp, Glycine max
aggagacaactaatccaattaagagaacaatatttaaatctgaatattatgcaattacattccaagtggacaccaaaactgagggcaaagagcaaagatggctgactaggattttatgtaacatgtcactgtcataggcattccagatgaaaaattatcaacaaactacaacttgtatgtttgccaagactgcgactggtccaaaagccaagaagcctgttgaatgggatgatgaagatgatggactatggaagcccccgaagattcccaatccagcat

SEQ ID NO: 93460 - DNA, 268 bp, Glycine max
caagtttttgcagccactaacatgctgcaggaggctttgtcacattatcaggctgcattaaggcaggttaaacccccagaatgaagcagcaaaacggggtttagagcgattagagaagcaaatgaagggagtggatcctgatgcacctgaagaagatgaagacaatgatgttgaagatgcagatggagatcaagacgagactgaacttctgtgagtagcagtgtccagagcaagtctatttatgatgagaacaacgtggaaatagtta

SEQ ID NO: 93461 - DNA, 269 bp, Glycine max
ctaaaccaaaagggaaccataggatagaagccagttaccgctgtagcaatggcatggtcactcacactgccaccgccttcttccctttcttcttcttcttctccttcttttcccaccttccaccaccaccaccactctctctttttcaatggagtagtagcgttcaccaggctccgccatcgccgaaactcgaacaccctttcccatgttccctctgtggggaaggaagacactgaccttcgtgtctcttctcttcaggaacagcaact

SEQ ID NO: 93462 - DNA, 278 bp, Glycine max
ccgtcttatgatgtgatagagagaaattacagaagctatgtaacaaggcatttgccaaacgactcgaaatgaatgctgcatttttctctgagaaatcaaatgtctttctcttccattaggaagacgcaggaaacctcaagaatcctctccatactttcattctctctgaacctcttccccgtttcaccttactatttcctacatcaatcttttgccacacaactaatccctcagcacaaagtcgattcattcccttcatcaccatccaatcactacta

SEQ ID NO: 93463 - DNA, 283 bp, Glycine max
gctgaatcattaagataatcatttgaagaggaacaagtgtcgaaacagaagtccaatgaccaacaacagttcacagatgccaacagttcaaacaacagtgcaaatctctttaaccaacaacatcttacagatgcagataatagcaagaatttacttttgttcattaatcttttggaaaagtatgagttgatgtgtagtcaagtctctaatgctctccaaacatttgctaaccctactaagctggtgctagatacaataaaaggtttttacgcttctcattcaa

SEQ ID NO: 93464 - DNA, 267 bp, Glycine max
aggaaatagagagttaagagccaaggatgactatacaactaatgaacctggggatggtaattgtgatgaagatgatgctcgggaagatgatactgtaaccccagatgacgtagaagatggagagaatgctgatgacatgactatggacaaagaagcagcacattcagatcctactgggttgaagcctgatgagctggatcaaactttggatatggatttggacataaatgaagatacagatctcatggaagatggagaattggatga

SEQ ID NO: 93465 - DNA, 264 bp, Glycine max
gtccgacgccaacgacatcgagtccctcgacgacgatttctacagtggcgagcccgaggacgctcccttggactactacagcgactacgacgccgacgattacttcgacgacgccgagaggatcgagtctcgccgccctgaggtctctctctgactctcttcctttttcgattttgttacgacgaggcacacaccaaagtagagaaattgtgacccattctaatcaatttagtctttgaaattgtaaaaggccaagtttctgaa

SEQ ID NO: 93466 - DNA, 263 bp, Glycine max
ataatgtctacaactgttggaggagagggtcagttctagtgctactcgtagatttgcttcctcagaactgtagatgatcatatttgcatacatatataattcttttaataattttttattaacgtatcgaagacctatcgtatccttaattttaagatatttgccatatcgctgtatccgtgtcgtgtggtacccgtgtcgtatcccgtgtctaggcttcataacacagtgtaagattttgacataacttgttgttctgagaa

SEQ ID NO: 93467 - DNA, 254 bp, Glycine max
cttctgttaattcttatcttcttaataccttataatcttctatagttctatccatgtcactttaattctctttacaagaataacacacacaactagatagttaataatttttgtaaccaggttctttggatggtttatgggttatttagttgtgtgtgttattcttgtatacaccattaaagttacatggatagaaccatagaagattataaggtattaagaagataagaattttccgaagaaaaaaaaatgta

SEQ ID NO: 93468 - DNA, 256 bp, Glycine max
tctgtttgtagataaggaagttttgaggctacacactaaagttgacctcgtggtaactcttggtggagatggcactgtcctatgggtatgtgaaatcaatttaaattaattttctacataagaaagcagtctagcttgctattatacaatggaactgggtatttccttgattttagtataggaaggaactatttctgatccaaatctagtaaatgatctattcaaagtgaaacctgtcaactttgtcacataaaat

SEQ ID NO: 93469 - DNA, 252 bp, Glycine max
ggctcgagtgatgatttcgcaactgtggcaggtgttgtggtacttcttgacagtttttatttttgtgttttatgttgaatttttatcatctgcaaagttgatgtggccttcctctataaaccatcttcatgaaaggggtcttcaattgtttaacttaaatatttatgtgctgttttatgcataacatttttgtttcatagggtttgctttcgtctacatggaagatgaacgtgatgctgagtatgcaatcag

SEQ ID NO: 93470 - DNA, 214 bp, Glycine max
tacgcattcctctccttctgtagcagtgttcagttgcagcgttttcaagatttctatttattaatttattcctttagttagaacgaaattagggcttaaattgagaaagagacaattttgttacaattttttttaaaattatttatcctatctattttttatgtttgtggtgcagtagataatgaatcttgctctgtattgttttttttttttt

SEQ ID NO: 93471 - DNA, 267 bp, Glycine max
tatggcttacaatctttgctcctccccttcttctctcttccatgaccttccttccatttcttcttcttcttcttcttgtcgtaagttcaaacttcgaaactcgtcctctttctttcaaccctctccttctcccaccccccattccaaaacccttctccatgtctccttgcacgaacccattcccgaacacctaccaccccacgcaaattcctcgtcttcgtcgaaaagtaattacatctgggtcaacccccgaagccccagggccaa

SEQ ID NO: 93472 - DNA, 268 bp, Glycine max
taggcggttcccaatttcctacacatatatgattcagccgtggttattgtgcaatcaatactgaagacatttaatgttttgctaaattcccgttatctaaaaaagggaagatttgaaaaagtaatgcctgataaaaagttttttttatcatgaatgatgaaggttaaaaaggtgatgactctcctgtaaaaaatgtggttatttttacctttgtggtaaatattgtttttggaaactatttttttcagccccctgccctccaataaat

SEQ ID NO: 93473 - DNA, 253 bp, Glycine max
cgctcatcctctctctctttccttcattggtggctttcaacccaaagctgaaatcatctaaacatggcaaaccaaaccgaaccaaaaaccaacattcctaatatcaacgccttcccccaataaggagagtaaaaatcaacaagtacatccttactcagatctctctttcaacaacattccaccacacactaacaccaactccaactccaactccaagtcttcccctaactaacaccacttacaacaatctctc

SEQ ID NO: 93474 - DNA, 256 bp, Glycine max
aatacctttaccctttctctgcagatgtgcgcttcacccctcatccacaacaagcagggagtgcatcaacaccaattgtattttcccctcgatagatttttaagcaaagcaacagttcaagcagtttatatatggagggagaccatccgtgaggaagaaggtgaatgaaatgagggtaaaaataaaagccaaatcttgtgaataaaaagctcaaaagattcttggatcttgccgttcaagtaaacacacatacttt

SEQ ID NO: 93475 - DNA, 252 bp, Glycine max
cttttgtgtttttcccttttccctctttgtgcttttccctagctgtgttttgatacttttatgacttaataactaagcattgaaactggatttaaattagagttttgttgatttgtagctctttaccctgctaatacttgtgagttgtgacatctgactagagtggattagtggaacgttttccgttaagtggtgttactcacattaattttttgggctgttagtgtattgtagcaaatgtccttccgcagt

SEQ ID NO: 93476 - DNA, 134 bp, Glycine max
gaaaaactttccttgcctggcctctttcccattgcaatacttccttcatgatcatcatctcgctttgcttgacttttatgattattcattggtgattcttccacttccaattctttagtcaccgaattccacaa

SEQ ID NO: 93477 - DNA, 287 bp, Glycine max
gctgctgcaaaagcaatgctatttgtttctggcatcacaatagggagtgcatattttgactgtctcaacatgacagagatgccagttgactgttctggaaacatgcgtcatctgatagttgaggcttgtattgcccgcaatctactggaccatccgcatacctatggccaggttatgtaaacggacgtatcaatcaaatacctcagtgtatgccagctcaagtacctggctggtcatcatttatgaagggaaccccatttacttcagtgatggttaatgctttggtt

SEQ ID NO: 93478 - DNA, 140 bp, Glycine max
ctcgagcccttaaactctggtgaaagcagttggcgcctaactttacatcctgggaggttgggtttgtagctctggtggcgtaaggctgacatagggaagttggcatctaagttagtagacaaggtttatgctccggagga

SEQ ID NO: 93479 - DNA, 154 bp, Glycine max
gttaattctggctccaaagttgtctcaaaggacaatgtcagggtcattattgaagtatctgtcaaagttgcaggttgatgaagagccagcaattagaacaaatactaccatattattaggcaatattggaagttacttaaatgacgaccaggaa

SEQ ID NO: 93480 - DNA, 291 bp, Glycine max
gtgaatcagaagttggagtctgacatggggtacctacgtcaagagctaggagtcactaaactgatggcgaagacgctatgtgctgaagtacttaagggaacaaatgagattgtacgatgggagactcaggcttcaacactctttgctgactgcagatttcgtgctgacaatgaaacattatttgaaggaaaggacttgtgagctagctgatgcatgtgagaatcttgaacgtagaaactactccaaagacatggagagtgagcatctgaaagacagagtgagcgagctgga

SEQ ID NO: 93481 - DNA, 271 bp, Glycine max
caacttgcatgattgaagctagatcgaaagacttggttccgattttcgaccatattcagactccaaaagtaccacaaacaaggactcctgctatggatagcaagacaaatgaacagctgttgcatcgcagttctaggctggccgaaatggcaggatttcacccaggactattttggaatctcctgagagtgtgactaaggctggtgatgctgtttctgaatttagaagtggaattgaaggaactgagtgggataatcatttggtggctctg

SEQ ID NO: 93482 - DNA, 277 bp, Glycine max
cgagaaatgagaatgaagaagctgattttaatactcatagcagcatttaccttcgtttctgtggctagatctgcgtctgatcatttcttcgaaaacgatggcgtttcactggcagttgctgcaacgcccggacctccacctctcatggtccccctcactcttattcagggagctgcttccaaagggccggtgaaattatttcttttgcatttgtaattctttcttaaagctatgttctctgtgttgtaatgatttaaatgctgccttcaccattaag

SEQ ID NO: 93483 - DNA, 180 bp, Glycine max
ctcatcgtcccgtggaaccagcaacaacacaacagtgctgtgttttttaattttattttttctcatttgatccacaaaaaaagcaaactttaaggagaaagaagcgaaaaaaagtgctccttttcgacacccagatttcagttcagtgattgtgggacttggaaaggttatttggaagaa

SEQ ID NO: 93484 - DNA, 274 bp, Glycine max
tagatatttaaactttttatgtaaaatgtaatgtctagtaatgaaaaaaaaaaggttgggacatgtttattacgtaataattttattttctccaactttttcattttatttttcaccccaccttaactgagtcagagcataccctctttaccttttttattttattattttatatacaaaatctagttcaattttcacctgtacctgtattgtacatacctagttctactaggacaggttcagttaagacattgtttagaaaatgtctataaaa

SEQ ID NO: 93485 - DNA, 275 bp, Glycine max
caccaatcccctaccgcgattcaatgccgccattacattctccggtcaccggactccgtcgcgcccttcgtcggcgccacccgcagcctccgctttcgatcgccacgcgcgtccggcaacgccccttctcaaggcttttgcccgcgccgccgtctccgccctgctgtttctctgcttcggtgttcgcatgtgcttggcctcttcgccgccggcgccggctctgccgacggttcaggaggagcaaactgttcaagatgatcatgatggaataaaac

SEQ ID NO: 93486 - DNA, 274 bp, Glycine max
aaagggatcctcccagatgagatatttctgagtgcactaatagatgttgctggtcatgctaaaaagctggatgctgcctttgatgtcctgcaagaagcccataaaggaggaatacagattggaataatgtcatatagctcattgatgggtgcctgtagcaatgcaagaaattggcagaaagcattggagttatatgaatatcttaaatctcttaaattgacgataacagtttcaacagttaatgctttgctcactgcactttgtgatggagatc

SEQ ID NO: 93487 - DNA, 274 bp, Glycine max
agcagtgttagcttcactcacttcatgcacttcaaaaccgatcaacatatacccttttgtcaagcatgtcaaataaagagttcttccttctcaccaaagatgacaaagaagatttgagcaacttcgagattgtgaagagacctatgttggagttccaaagtgagaattgtaatgaaaccctttcaagcagttccaactctcaccattcacaaaaagaagagaagaaaagcaatcatcaacagatcatagaagagtgtcaacgacagatctgtag

SEQ ID NO: 93488 - DNA, 159 bp, Glycine max
taggaagtgacttggtatattccataaactccaatgtcagaattgagataaaagcaaacatagaacttatttaagccagatgcaacaagctcgttcaatgtttgcttttatttcaattctgacattggagtttatggaatataggaagtgacttggtat

SEQ ID NO: 93489 - DNA, 274 bp, Glycine max
  unsure (1)..(274): unsure at all n locations
gctactgagggtacagccattggaatctctgctgtatttgtcttttcataatgttgcttcgccatctgcanagacaaatacagcagaggctactgagggtacagccattggaatctcttcacttccaggaaatgcaggtttacttggatgggctatgagctccttgactcttaagggtaaaccttctgatcatgctccagttgcttctgtcagttctagtgcacgtactccaacatcttccaatgccagcccagctgtagatgctccttcaaca

SEQ ID NO: 93490 - DNA, 276 bp, Glycine max
actcgagccgctcgagccgctcgagcggctcgacaaaaccttttaagtcttcatagttttacttctttcattctttgtgaaaaaacaaaaagtccaaaccatggctcagaaaaccgagaaagaagaaaccgacttcaaggttcccgaaacgattacgctttgcgttaacaactgcggcgtcaccggaaaccctgctacgaataacatgtgtcagaagtgcttcaccgccttcaccacctctaccgccaccacgtccggcgccggaggtgccggaat

SEQ ID NO: 93491 - DNA, 271 bp, Glycine max
cctcaattcaactcttttcactactccccctctcaatcttttcccacttcataatataacacaaattagtgaaagaataaaaataaaaacaaaaacacatgcacttcattttttagcttccctttccaacaatcttttttcctagccatgatataccctcatcacttaatttctattactcaacagaaaaaccctaactagtcctcgaaagaacaacttgatttaatttctatatatatatatatatatattttgcagggtagcgatggat

SEQ ID NO: 93492 - DNA, 264 bp, Glycine max
cagtttgagaggtacattgcatttacaatacatggattgtctctacatgaatcctcaggaatccattgaagcacgtgtgaaacaccttctttctcttatgactttgaatgaaaagattggtcaaatgacacaaattgaacgctcagttgctaccccttctgccatcaaacacttctccattggtatttataaaatttgttgtgcttttattagttgaatgtgttttgattagttgaagcctattcatttgctttttatttagta

SEQ ID NO: 93493 - DNA, 261 bp, Glycine max
ctgagttgctcgctctagatagtttatagagattcatgattgttcaaaggcatggttttggttttcaagatgatccttttgtaaaatatttccttctcaatatttactagtactaccccaccctttgtggccgtgtttaattaacgatgagcatcttctactttgtttttgttgaaaatctcgcagatctgtgccctggtgttgctcctaaccaaagtacgttgaagaccctaaggtaagacagctttcttcagtccactc

SEQ ID NO: 93494 - DNA, 213 bp, Glycine max
ccgaactcgaatcttatttccaagcacaacagcacgctttcttccactcaaccatgtggtcactcccggaaaaactatacgccaatcagtaacggtctgcacgccgactcttgttcatcatcgtatcaagcatacgacgtcgtcgtagttcgcgctggcgtcattagtctaagcatcggtcgtcacttcctagtatcttgcgacctttctgtc

SEQ ID NO: 93495 - DNA, 270 bp, Glycine max
aattcatagagtcatctcatatatctcctcagaacataactaactttctctcattaattttccaagccaaaaaaaagaatgtcaaccaccattgaaatcccagagtcaagcaaagttgctaagggaaaagctgttgcagtagttgcaccagcaaggccaggagggtggaagaaaggggtggcaataatggactttattctaaggttaggtgctattgctgcggctcttggtgctgctgccactatgggaacaagtgatcaaacacttcct

SEQ ID NO: 93496 - DNA, 226 bp, Glycine max
cgtaaatgcacacccttctttcacagcgtcgcagctccaagatgggaagatctcggcccttgattccaccgcttctatcgcctcgggttctgccgcttgccgctccttcaagggccaggcgccttcttctgcaaatgtgtcttcttcgtgaccccgagtgagtgagaacgaaaatgatgactatgattgtcaaagtgaggagggtgttgaggctttggccgaagaa

SEQ ID NO: 93497 - DNA, 274 bp, Glycine max
cgcattccctcgatatctcagtcatccaattgcctcagttaatcccttaattgcaagcatcatgcgtgaggacgtctcaccaccaccatttccaccaccacaagggcagatgatgagcatggcgatgctcgttacaagaacgaggacgatgtaccccaagcgtcttgagcaccttggggtacttggtgcttcggttgccggtgctcatgccttgcatgagaggcatgaggccaagacagacccagcgcattttgataggcacaatgtaaaagag

SEQ ID NO: 93498 - DNA, 278 bp, Glycine max
atagtgcatatcactttcttagtttctctccattatttgatgtgcatgctctcgcattcatacctgtttccgacacatacacctcaccaccaccactgcgttttaaagttgggcatctcctaccagaaggatagggcacaatgattcaaagaattgtgtactttcccagtttaaggaaattgcttcttcgggctggttctaattctgcttcgtccaagatcggaacgaacaattgctttgcttctcagccctcccctcttcggagtcacagtgatgac

SEQ ID NO: 93499 - DNA, 117 bp, Glycine max
ccctctttgcattccaaatggccactgttgtggttgcacagccaagatccaaacactgtgatagataatgaaataacgactgatgtaaccaatgttgatggaactagcccagaacat

SEQ ID NO: 93500 - DNA, 167 bp, Glycine max
atactaacttgcttgagaatttacctccctgaaaagtttgatctgggttgggaacaagaacaaacttttcagggaggtaaatactaagttgcttgagaattctttttgcaccttgtacattggattccccattcatgtcacaactttgaatctatcttttatttgca

SEQ ID NO: 93501 - DNA, 167 bp, Glycine max
tttcattctcattcgttcactgtcactttacccaatcctaacactttcttctctctgttttccttcttcctcgcatcaatggagtcggacggcgttctcctcggcatgtgcaaccctctcctcgacatctctgccgtcgtcgacgacgctttcttgcaaaaatacgg

SEQ ID NO: 93502 - DNA, 168 bp, Glycine max
  unsure (1)..(168): unsure at all n locations
atgaaagaaataagtcgctccttcatctggctgataattactgtgaacttatagctggtagcatggaagtgcatcaacttacgngaagncaagtcattatggtgaaccctgcaataggagtgtttgacattctggttgacgatttggaataggctgtggagcttacca

SEQ ID NO: 93503 - DNA, 157 bp, Glycine max
aagcgtcagtggacaccagccaaccactaacagaaccaaacttcccatcatcgaagatcttgattacccatcccttccttccatcatcccttccccttaaaccgcatagcggtcttcttatcccttctcacagactcgaaaagcccttacactcatt

SEQ ID NO: 93504 - DNA, 189 bp, Glycine max
tacgtacagtacttaggctcgaggtctgtgaatttcctcatatatctataatttgcagaatatttaagaatggagttcaccaaaacaagttccctcctaatattcttgctagtgtttgtctcaagcttgatccatgctaaggcataccaaaatctatactgtggcacaggaaccagatgctatggaaag

SEQ ID NO: 93505 - DNA, 183 bp, Glycine max
gtaagtcggaattaggctcgtatgtttcttaatgacgtttacgacgatgatcacggcaacttcaacaagattgttgacgtcatgcagaaaatgcaagaatgtgggcagcaaccagatgatatcgtccaggatgttgatcacgattgcgatttagctagtcttggccggctatctacagtgatg

SEQ ID NO: 93506 - DNA, 268 bp, Glycine max
cggctcgaggtgggccctgcaggtcctacccctcggccttgaagctccctcgggctgcggactctgcctcctgggtctgagcattagaaccaggagaggggtgtccctgggcagagccaggggtgcaaacagcctgcagccatctggccttttaagtatagtgtgtcgcatttccgggtaggaaggtagcatttcaagttcaaagagaggtcaagtcctgcaaccatctttcctccagcacttttggggtaaggaggacagtttttgt

SEQ ID NO: 93507 - DNA, 270 bp, Glycine max
cggctcgaggcacccctgtggccggggtcacgagagttcctgctgggccagtggccagcctgtctccaggtggccagacagcagcctcctgagggtgtggcctgcaggtgcactcatggctcttcagagcctgaaccacccctatgagttgaagtctggaagcgcagctgggcattgtttggaagtaggaggactgtgagtgtgtgtgggcaggtgaacccttcctcttcctcatggcgagtgtcgaagagggaagggagctgtgtcctg

SEQ ID NO: 93508 - DNA, 270 bp, Glycine max
ctctgggactcacagtcgtgatgtctttcaagagggaaggagacgattggagtcaactcaatgtgctcaaaaaaagaagagtcggggacctcctagccagttacattccagaggatgaggcgctgatgcttcgggatggacgctttgcttgtgccatctgcccccatcgaccggtactggacaccctggccatgctgactgcccaccgtgcaggcaagaaacatctgtccagcttgcagcttttctatggcaagaagcagccgggaaagg

SEQ ID NO: 93509 - DNA, 230 bp, Glycine max
ctcgagccggtttatctactagggctctgcataaaacttcatttgacaagttcttgcctccacccctcccttcctcaactgaggagagggccaagtcaaccctggggcccacacgaagtcgtttctcggatttgctccagtctctttgtaaagccaggcaggagagtgggcccatcccacagatacacacccgtcaagcactcttgggcccctccagagcctaaagctgc

SEQ ID NO: 93510 - DNA, 266 bp, Glycine max
ggtttccccaggagcagttttggtttcagacggcgccgtctcccgcgaaagtcctgagaggagcccagccttttccgcctgccgcccccggatgggatggttgaggccggggccacgccccctctgcccccctgcgagggcatcctgggctttctcccaccgctttccgagcccgcttgcacctcggcgatcgccgactcccttctttatggcgtcgctcctgtgctgtgggccgaagctggccgcctgcggcatcgtcctcagcg

SEQ ID NO: 93511 - DNA, 263 bp, Glycine max
ctaccacttaagggtttctaaatgaaatttttttttctgttcacagatatttagtcagatattttcttttttaggttggtgctaggtgtaatatggttatttaagcacataaagtatgtgtatgggttagcattttcttttctttttggtaatttgtaggacagccttgacactaggctgttttacttttcagaatcagatttaattatgtgattaattttaaatctacaaagacttgttttttgtttttttttttgagagca

SEQ ID NO: 93512 - DNA, 264 bp, Glycine max
cagtaatgtagtttgttaatgttttccttctcattcaggtattgtcagcagatctcatggatagaggtttaaatggcctctggtaatagtgacaatgcaagggcgagaaaggttccgctttcttttttgtgtctctcttttagatgtcagcatcataattctgccaactcagttagctaagtatttggctagttattttcattctcagctaaccagaatgtgttttaccttttaggtttaccgacaagactgtgaaactttcgg

SEQ ID NO: 93513 - DNA, 252 bp, Glycine max
  unsure (1)..(252): unsure at all n locations
gtgggaatgatgagtaacgaattcaggatagtgataacttctcggaaggcggcaggaaaagaaaccagacaggcgctgtgtggggtgtcacttgggtgggggtgggtccagtgtcttgagcttctgtttgtgtgcctgcagacctcaagctagctgctgtcactgaacccgacagaagcctttccttacctgcagccccgctctttgccaccttcacgtctattcncacggggttcctttggctgactctca

SEQ ID NO: 93514 - DNA, 272 bp, Glycine max
tctggactatactcagatttctcaacaatcaatctgttactctttctaccaagtcacacatctagggtttccgggctttgatcttctctatgcctctgtgctgatacgtaaagtgggacacaggattgggagtggggagactgacattaattctgactcaatgcgaattgcttggataacctcgggcaaatggtgagtcctggctgcttcacttgttttaatcttgcttcaccaagctcttgcaaggtcacgtacgatggcctaagtctggg

SEQ ID NO: 93515 - DNA, 258 bp, Glycine max
gtatactattaaaaccagcacataagtattgtaaatgtgtgttcctcctaggttggaagaaatgtctttccttctatctgggtcctgttaaagcgggtgtcagttgtgtcttttcacctcgatttgtgaattaatagaattgggggagaggaaatgatgatgtcaattaagtttcaggtttggcatgatcatcattctcgatgatattctcactttgtcgcaaatctgcccttatcgtaagaacaagtttcaaaattt

SEQ ID NO: 93516 - DNA, 250 bp, Glycine max
catttatgtctaaacaaataataattagtaaatttgcatgtgttcacttggaatgtatttcctctcctgcaccattatattttcagaattaaaaaagtcacctttgtagttcagtttaaagcaaataaataccgtcatcaagtttagaaagtattgattcaaacagtgttgttttaaattctttgatttttaaaattaaaactaaaataattaataaaacactaaaccaaactattagtataatcatgaa

SEQ ID NO: 93517 - DNA, 292 bp, Glycine max
ggaattctgctcgagattaaaacaaatggccaataaagccaaacagacactgagtcttttgttggtgtaaattcctttacacatttcataatgtcttctatgatattggtttacttttgggaattgaaacctttacagaaaactatcagtttcactaagattttaccatgaaattatatattagatcatcttcatttatttaataaagtgttaaacacaaagttatttctaattttatttgggttttctatgttttaaaaattaagactgtgtattctttccccgacaaaat

SEQ ID NO: 93518 - DNA, 228 bp, Glycine max
ctagatgttagcaatgatgaatcataccaaatcatatgaaaatggagaggagagctttgaggagttgcaacaactttttgaagacatgttacaagcggatatacgcttggatggcagccccactcttgcttctacggattcctcaacttcatctgcctacatgacctacactgataaggcgaggtcgaataaacgcaattccactgagatgaatatcgggaaggcaga

SEQ ID NO: 93519 - DNA, 275 bp, Glycine max
agggtaggaaagtggaaggtactaaaaaggaaaatgtagttttagtttcttctctaagctaaacaactggctttactactgctatattttactaccacatagtagtgtagatgtagtataacttgcttaggaatgctttcaaaaaggttacctccatagtcaaaaaaagggggagtatacagctgattgttgcatttatgaaactgcatttcaatatgctatgctgttactgtgcttagacacttccttacgtttgagttctcaggagagagagt

SEQ ID NO: 93520 - DNA, 270 bp, Glycine max
ctccaagttcttcttggtgctgagggctgtaggaattattgaaagcttctgcctcacttagtatcgtctggggcccagcacccagcaataactctaataatgtttcttaatggtatagcctcctgagattaaatgtaaaatcaaaaattaggaaatcttggagggagtcctcaagttgtattgctttgctgtgcttttggaagaagggacgacctggaggacacaggctcatgtgtgggtcttcatcctgcctgaccggcagatcttcct

SEQ ID NO: 93521 - DNA, 276 bp, Glycine max
cttagaaactgaaggtactttctgaagaagcatttaccttttttactactcttattttgagtgacttttcagtgactatttttcacgatgtacatctttaacatactgcccttccttccttcatattgcatccttttgtattacagttctgtgcagtcagggccagccgtggggctgagcctctgtgcacctacagctcccaagtgagctggttgagaaggaagcgtccgtatttacatcttggcaacatgcaggcctcctgaggtcctaactatg

SEQ ID NO: 93522 - DNA, 283 bp, Glycine max
ccgtaaattcacttgaattgctatctgactgttacctttctaagtcacttagaattgcaagcagggtctccaaacagaatacagattgttaaaagtcagatagcaattcaagtgaatttacctcagattacttttggagagaaaaggaagggggagaagtagttttacagacagaccatatactgaaccggagaagtgttttgactagacatttactgtgacatgtagtcagaaaatagtagttcccaactgtggttaccattccccctccccagaaaaagaa

SEQ ID NO: 93523 - DNA, 273 bp, Glycine max
cgcaaaggaaggctcgagtgtgtgtgagaccgcggtgggcctgcttgtgctggtgggatgaggggtgtctgggtagttgagtgaaagaaaccgcgtgcgggtcagattggtgtgtgtgtgagagaagtgaggtcaagatgtgtgcagctttgggcgtggggaggtcatattgagtgtgtggaggtggggggggcaagatcgtgtatggatctgtgtatgagtctgtgtaatcacctgaatgtgggtcctgcgtgggtagctgatactatgact

SEQ ID NO: 93524 - DNA, 264 bp, Glycine max
ctgcctgggggacagggacccccggtggtcctatggcaggatgagaagggagggacttggctcctccagagcccggtggaagctactgttctctccagtgtctcgagcgtaccaaaataaggttgggaggctcccggcctgtctgctgtggtctgagctggctgcaagccaggtgggggagcgagtctgggaagattggctttgactctctgttgccggaggagatgccatcccagcactgcccccactgtagtccaggctcgt

SEQ ID NO: 93525 - DNA, 273 bp, Glycine max
caggcatgagccactgcgcccggcctactctacacttttttcaaccctaagaattaccactacagtacatgtagtggagtgggaagagtgcctggaatcagaagaccctgttgaggctgaatttagctgtatgacctcatgcaagccatttaaactctgtgcctcagcgtcctcatttttaaaaggaggcttgatctctatgtttacttccagctctgattctgggattctaatccacaggacttgggtgttagggtggaactagaactgtgc

SEQ ID NO: 93526 - DNA, 273 bp, Glycine max
aggccaggagtgggctggagctgctgaggcccagaaggcccgcatagttcctcaccaggagggtctccctccagcacaggtcccgcctgctcagtccctgtgcttcccaagtggagggggtgtcagctcggtcaccaagagaagtgacttcccaggagcaccagtctcctcacagaggtgctgtcagcgaggcctccttcggtccaggcagaacctcaggcagtctctcctggtcctgcatgtgtgcaactccagctaataataggtatttta

SEQ ID NO: 93527 - DNA, 269 bp, Glycine max
tagaggcaggaaagttctggaagtctagaaaggaaggttatggttctgagattttttttttcatgaaaaagtttaattaatttcctcttggatatataatgatgaacccaattagtgagattttatgtagaggttaaaaaaaattaaataatatgtgttttttccccctgttagtatttagccttgcaggacctgatgttgctttctcaatattctccttcacgaagacaagaagttttcagcctcagccaaccaggtattgctaaaag

SEQ ID NO: 93528 - DNA, 100 bp, Glycine max
cggcacgagctttaaatcaatgatagacataccttgttgatgggatatgagtcaagcctatcttctacaaactgtaattcacgaggacatggataatatc

SEQ ID NO: 93529 - DNA, 259 bp, Glycine max
attatattatccagaacagtatcatatatcaattgatgttgtggatcatattctagtcttttctcagagttagagagtatatcagagtgtattgctgtctttaaaattactccatttggataataccacgcacttttatgagtcagaatgagtactccttagtcgttcatgtcaacttgaatcatatgaaaaatgttgtccatggccacttcgtaaatatgtgtgtgtgtacttttcagggaccattgacgattatgga

SEQ ID NO: 93530 - DNA, 191 bp, Glycine max
cgaaactcaaaactggaacccaaccagaaggcgttcctcaagatggctgactccggaagtcattcccaactgactcatggaggctaactgaccgaggccttctagtaattactgcagcgcagatgctacatagggtgatcatgaatgactcggctgactcggactcggacatgctcgcgaaccacttcagc

SEQ ID NO: 93531 - DNA, 265 bp, Glycine max
ccgcgcgggtgctagctagtcctttctcgtcgctgctcggctcgcggcccgtggggtcggccccgccaccgttgccgccatgcccatgaagggccgcttccccatccgccgcaccctgcaatatctgagccaggggaacgtggtgttcaaggactccgtgaaggtcatgacatcgaattacaacacgcatggggagctgggcgagggcgccaggaagtttgtgtttttcaagatacctcagattcaatacaaaaacccttgggtg

SEQ ID NO: 93532 - DNA, 263 bp, Glycine max
gaaaagccttttaaaaagtattctccaggtttgtcagggtcactctaaagataaaaatgtaactaagtcttctgtgaaatatcatccatctaatcttgatgctgttgcagatggtggtgacacaagttaattgacaaactactgccaaatggtgcatcatattttgtataaagtacccagtagccccatttcatacaatgtacctaaattatgcagtaacttggcatcatcgttccctccttgttgctgtgtaattagtcagt

SEQ ID NO: 93533 - DNA, 241 bp, Glycine max
cttgcttaaaatacatatatatgtaaagttatattttcttagaaacatggatgtttacagccattgctttcaaagagattattactgtgtattctccctgttttacaatatgttttcatgaagactatgttacaccagaggcttctgattatcaaagtgataaccagttttaactgccggtatgtaccagatttgtgaactaatttaaaaaaccacaaactatgaataaaatggggtttgc

SEQ ID NO: 93534 - DNA, 263 bp, Glycine max
gtctgtgagatcacttaacactacaggttacccaggatgtaacagatactgatccacaatgtacctgaagtgtcttgggcacccataagcaggtgacttctggcttagggcaaggttcatgaggatgcgcactcacagtaactctcgggtctccagagaacatgctatggttgtggcagcctatggattcgcggctattgtaggtgaggctctgtatgtgttatccaacgtgcgacagcaggagtcagagctctgcctcatgg

SEQ ID NO: 93535 - DNA, 259 bp, Glycine max
ctgccctcccatgggcccgggctcagcgtcagtgcccgcctgtccccctggcctacccccagcccgccaaggctcgggcctcagggcagtgggaggagtgaacgagccctcttgcagctcagccgctctggcctggcatgttgggagtgatgaatggcaggttccaggcaggcagagagggaggtgcgagggcagggcctacgccgtcactgctgtctctgcgtcaagaccttggggaggccttgtccctccccagctc

SEQ ID NO: 93536 - DNA, 264 bp, Glycine max
gtgagtttcataccatttcagtagtgtatttctttcttaatctgaataaaccagaatgatactctcagcacagaagaataaagggagcgagtcattaacgttttctttttaaacctttatgatgacttccttatgaattactgaacgaacactggaatgggactcaggtatcctgaggacatctctcactctggccttagttccccctctgtaaaattagggtgccaactaaatgatctacaaggtcccttccagcgccgccat

SEQ ID NO: 93537 - DNA, 262 bp, Glycine max
ctcgagccgcttgtcacctttgtggccttaggcactttgtcagcgcctcaatttcttcatctacagaaaggcagtatgactgcatgccatgtttttctgaagataaaagatggtcccactaggtcttcttagtgctagtcactctttgagaggatttggtgtattcatttgttttcttattaattatctatttgcccctaaaatgtcagctctgacaaggggaggacatagatctgtccagtttacccaatgcttagattta

SEQ ID NO: 93538 - DNA, 304 bp, Glycine max
ggacgcccaaggcaaagaccagatgtggtatgaggctgccttcggcgtctacgccaccactagtcagttcgtgctacctagtcagtgtggatagcgcatggtagccagtgaggatggacgatccagccgactgtaggtagctcttagcaactgtcgctcgagttaccctctaggttactcgatgtgcgatcacctgttgcactcacagagtgttggcagtgactcagtggaacgccatctgagcggggcatgacctatgacgcactccacgtatttgactggatcatatcgagaagtggtgaca

SEQ ID NO: 93539 - DNA, 260 bp, Glycine max
atccagcagacatttccaagatccttgaagcttggcggagagaggcctccaaaagcgttccgtctgcgattgtcagctgcctagaggaagtcagtgccctgagcacagaggagcttggctgacctgggatgccactgaggcttgagaagtgccttgacacattttgaacacatatagtttgatagctttcagaatacgaagggaggtttcagaacaccaagacatataatagataacacagaccagacgctctccttatt

SEQ ID NO: 93540 - DNA, 257 bp, Glycine max
cttccaggctagttgccttccaaacgcaggtagccgacctgcaggagggcctacaaacggtgccagcaagagctgggcaacagctggcttgtgaaatgagacaccttgaccaatatgctttgggtggacggtctcctacatgttcagtggaggccaccaggagcatccatgagcggggaagggtccacacccttacatggcaagttgatacgatggggtgcttggtggatgggccatggaggtccgtgagctggaac

SEQ ID NO: 93541 - DNA, 259 bp, Glycine max
cggctcgagctaagtttatatagtgaacagtgagccgcatggacacaggtgactgttttctcctttttgaacccctgcttactccagagtcaccacctctcctggctttctgccaatcttcttggccacagtttctcggtcttcttttctggcttctcttccttggcctgaatgctacatgtaagtgatgtcagcttcagttttcttaacctctcttctcttaagttgctatcatcctcatatctttaaatatcatcta

SEQ ID NO: 93542 - DNA, 262 bp, Glycine max
gagaacttaaagtcttagaatggaaaaagtaaagacatatcgacttccaagttggcaagtaactcccaatgatttagtttttttccccccagtttgaattgggaagctgggggaagttaaatatgagccactgggtgtaccagtgcattaatttgggcaaggaaagtgtcataatttgatactgttctgttttccttcacagtatagagcttttggggaaggctagtattgaactgggggttggtctggcctactgggctga

SEQ ID NO: 93543 - DNA, 259 bp, Glycine max
ctctaatggagctttcactgctcttaatcaaacaaggtatcaaaataacctttgtgaacaccaaagacaaccatgagaggatcatgagtgcattgccaagtgggaatgatttatcatctcagattagtctagtgtggatatctgatggattagaatcctcagaagagaggaaaaagccgggtaaatcatcagaaacggttttgaaggttatgccatagaaagttgaggacctaattgaatccatcgatggatcagaaag

SEQ ID NO: 93544 - DNA, 265 bp, Glycine max
tatagttgtcccgattcaatattccaaatcatgtttctggtatagtttgtatttatttttggcttaaatataattttcatatttaatatatatccaaattttatattccatctctaataaatttttcctttacataatatactctttgtctaccaaatatttgataataagagtatttattttaaaattaaattcaaagtaaaaaatatatactgttctctcaaatctgaatggctacctccaaattaaaaccctactttctccg

SEQ ID NO: 93545 - DNA, 258 bp, Glycine max
ctgaatttgaaggaggaggtgaagtgtgctcaagtgtgaagaacgattagggtttacccgtttggatagaagagggaaaaaatgggtagcgaagaggattcgattgagcaaagcgttgcatcccgtcgcgaaagactgctagctctcagagccgctcaggagttgtccagtgctgccgaacctgaacccaaggacaacaacgacgatgataatgaagaagatcaagaacctcaagaaatgaagttccgtaactacgtt

SEQ ID NO: 93546 - DNA, 225 bp, Glycine max
actcgagccgaatcggctcgaggaatattattaatgaatggatgtctatgaaaaaaaaaaaccgtgtgaagtttgacgagcagaatgcttagttatgtagatccttcctttgtatggaaaataaacttggatatgcatgtcggtgatatcttgaagtgtgttaaattatatttggaagtgctcaatgtgatgcatgggaatattattaatgaatggatgtttatg

SEQ ID NO: 93547 - DNA, 264 bp, Glycine max
caaattttgttttctttgaaattgaaaatctgttatttgctgggagaagtagtaaaatggagtctggagcccacgtgtcgtccgagaaagaagggcagcaaggagcctcgtatacgtactgggttaggaaaataacggaagatgcagcgcctttgcctgtgcctcgtaagctcaacccagaagatgttcccccttgtcattctcaatctcaatctcggtctgccacgcttggctcagcttggaatcgcgctgggacatgggagg

SEQ ID NO: 93548 - DNA, 263 bp, Glycine max
tcgaatttcattgcagagtgttattttgagtatcagcatcaatggctccaattgcactgggaaacgtgattccagacggcattttggcctacttggatgaagagaacgaaccccaaactgtctccattcagtctctcgccaccggcaagaaagtcatcatctttggggttcccggtgccttcactcctacttgcaggtctttactttcccttttcaccataaactagactgaaacagattcatgggtacttgagattcagcat

SEQ ID NO: 93549 - DNA, 267 bp, Glycine max
ctttctaccattgctgtgcacctctttctccttttgtcaaattcttctgttcaacaggtctttgccaatggatactaagtcggctgtagaattaatggagtcttccgcagaggttcatttttctggatttcacatggatggttttgagcaaagaaaggctagcatagaacaaccaacaacctcagaaactgacatgtataaacaaccttttgtcataggtgtctcttcttatgacaaactgccaaataagttcacatgaggccttca

SEQ ID NO: 93550 - DNA, 267 bp, Glycine max
gttataactagtatgctgagggatactctatcctatatgagctatttcttttctaatactggcagtgaagtgcattcttatgacccccaagcaatattagttgaacatattaactaataagtagtttaccaagtgttcttatgattcattctaatttctgatgcaagttctgattttcttttttaatttaaactgtaaatttatggaagtgattgtggtatgaccagaattaatgtttactcaggtgctttaacggctaagccatat

SEQ ID NO: 93551 - DNA, 260 bp, Glycine max
tagaaataacacaggtgatactcaggtattaccaaatgtgactcatcgtatacaggtttgattagactagattaggtcatgtcctaaagcgagatacgtggttagaatataggggctacttcagtgtgctgcatgcatacacactactgtgacatgtatctggtacctagcctgggaatatcatagtaatgtgatggatagaacttggataacccatagaccattatttcgaaaacaaactaaaattcctccatggtatg

SEQ ID NO: 93552 - DNA, 172 bp, Glycine max
cagtagtgtcagatgtgaactcgccaagccagggatctggaaaagtcatcccgttaaagatgagtacgcgtcagagtgatgctcgcgaagaggctatctcaggtatcgtgacatcgtgcgcggacaagacgatggaatttgtggagaccattgtactctccattaggcggat

SEQ ID NO: 93553 - DNA, 263 bp, Glycine max
cggattctatctatgctaaattgaagaggacatctttcagtttcttcggttgttctcggagaattcgttggaaatctatatcatctaatgaacaaggaagtcaatcagactatgctgattacacctctcaaaggcccatgatgaagactcaaactctaacttgttcctctaatcgtgaacctcgggtgccatcatttgagtcctacaatggaatgcaggtcgtgacaactttgagaagtagtgaaggacatttgctaagctca

SEQ ID NO: 93554 - DNA, 263 bp, Glycine max
tcgagctcgagccgctcgagccgcaaagcgagagcgtgtgaaaactataactcgaaccaaacagagcgcaacatacccgacgtcgtatgatcctactccacagcccccggggtcgatgactgcagagcagctctgtcaatctgtcacaggaggggaacgagtgcggtgcacagtatagcgtcaggggcttacagaattgcaggacttatgaacgagatcatgatcacatttggcgtggtctatacagtataccccctagcagc

SEQ ID NO: 93555 - DNA, 261 bp, Glycine max
gcttttgtgagtaattctagatttcccaaagagtgagaggaaccaagatattttttcttttgtgagaagtgagaagccagattacttcagatgctaaaattgacaacgaactactagttttgttcatgaggaaatagaatgatctagttagtttagtacactaaagagttcgcatgtgtatgaaatgaaaggaagcatggatttttctttaattaaaggggtgaatgtgtaactggccagtgagattggaattgctgaata

SEQ ID NO: 93556 - DNA, 259 bp, Glycine max
cacacttctgagtttcagttcctcatgctaaggattatggagccttcaaggaagacatttatatatatatgtgtgtgtgtgtgtgtgtggattttgctgaattaatgagtaaggaatatctctttgagaacaaaaacgaaaacgaaaccaagagaggaatcatctgtaaattggaattcattaattggtcgaagataaactcttcaaaatattttgtacttgtcatgatagtaagggatgttcttcttgtcccaatttc

SEQ ID NO: 93557 - DNA, 174 bp, Glycine max
  unsure (1)..(174): unsure at all n locations
catttctccatttcccaatctcgattctcagatccagcttcctcctccttctcatctccatggcctccattttcaccctcttcctcatcctcttcttccccgagaggctcacttcgccgtggntcagatctacaagcctggaaagccangcgnttccctctccaatgccactcc

SEQ ID NO: 93558 - DNA, 266 bp, Glycine max
cgggacagttcccaatcccatggcaaacaatctctttccctgaaaagaagggtaaggttgaagagtcacagacatgtctttgcctcagaaaaagctacacatgcctttggctttgacagatttaagattactcagggttacttttgtccattcacaccccttaacctcaacctcaagatatacgctaacttcaactacggcttccaccgagagaaaaatgcaaaaatgaaaatgaaaatgaaataggtaaagagcatagtgtgttg

SEQ ID NO: 93559 - DNA, 199 bp, Glycine max
ggattgtctgattgtgtagcatcttgtagaggaggtatattggagttgaaagtaagcagaaatgcaattcttgtgctggctttccttgcatcatctggacaaccgggttttgaaatttttgttggtcataagctctcttgtagaggagtaaactatcttatgttgattttgcaattactggtatcggagatggatcttg

SEQ ID NO: 93560 - DNA, 213 bp, Glycine max
ccaagccctatacaaccaaaccctaacacacacccatttgattcagtttccatggctagcctcaaggttgcatttttcgctgcagtgctctgcatggttgtggtgagtgcacccatggcacatgcagctatcacgtgcgggaggtgacgaataccctgtccaatgccatcggttacctccagaacggaggaccgccgccgtcgggatgctgca

SEQ ID NO: 93561 - DNA, 110 bp, Glycine max
tcaatcattaagattgaatataattctgaagatataaattaaactggtaggtttgctttagcatttagtgataattcatgtgggatgtaatgactaagattgtctttata

SEQ ID NO: 93562 - DNA, 218 bp, Glycine max
cctgtagcgttgatggcgcttctgaagcgacaagcagcaccgactcactcttctcgggccttacggacatggtcctcatcgtacgcggcaagtagaagttcgggagcaagatcgggagtgcgatccttcggtcgaaatctacgtgccgatgcatgttgataccttcgagatcgtcgccgtcatgattccgaattgtactccgtgggtcccaactgttt

SEQ ID NO: 93563 - DNA, 227 bp, Glycine max
ctagggagctccaaaccaggtattctttctttttatgcaaaggtgtactacgcttattatgtctttcatttactcatgattattatcttggatatcttataaggttcatcctaatcattattatcattatcaccattagttgcatactgtgcagtagatgcatgcatatatggcccaggcaatactatgtattcaggctttgaattagttaatgacgaagatattat

SEQ ID NO: 93564 - DNA, 173 bp, Glycine max
taacagttatattgagtgactaagactacgattgtgtgtacactgcagacgttagaataggtcaggtgtgaagggcggcaacggtgtaagatcggggtgaagctgcacgacaagtacggctactgcatatatattaaaagactcgaatcatggggtggattgatgggtaaggg

SEQ ID NO: 93565 - DNA, 150 bp, Glycine max
tcggctcgagcttagcttctgtcagcttttttattattttgtattgaatgtgatgctttttactatcactaatgaaatttttggtaatcattcttacaccaaatgtctgccaattagaaatatccatcctgttattgatcaagttttggt

SEQ ID NO: 93566 - DNA, 182 bp, Glycine max
aacacaatggcattgcaggcaccacctagccttgacaccgccaatgcgaatgctggtctgagacgacccttgatgaatccttcttctctctctctaaagtcatctctcttctctggctccctcaatttctatattgatcccacatcacctccatcttacttcagctccacccaggatttcca

SEQ ID NO: 93567 - DNA, 279 bp, Glycine max
tttcagctgagtagggacatggacttggaaaacacatcaaggtctagttcttccaatgctgcagtaactgaaaagttgggaaatgggttaggatcattagaggctaggggaccaaatgagggtatgaatatgatcaccacgattcaagagaagcagggtccttttgtaacacaaggtgaggatagcattgttctggaagcttgttcattaaactcaccatcttgtagggcacaaagaagacgaatcaaggccatatctagaatgggttgttacaggatg

SEQ ID NO: 93568 - DNA, 264 bp, Glycine max
gaatattcttcacatcctcaatctgcacctttatgtcttccttgctgaatcctggatgtgaagaatattcccatcctcaatctgcacctttatgtcttccttgctgatgggaatattcttcacatcaaaggtcacatttggagagaggagcctcaagcaaaggagaaggatactgtttggcatgtggctgagagaggcactgggaagggagggttctcaagggaaattgaattgccagagaatgcgtaggtggatcagattaag

SEQ ID NO: 93569 - DNA, 270 bp, Glycine max
atgtcattaatgcttatggaatgaaggccttcacctttagtattccggatcaagagagaatggatagagaaattcactgaattggttctgtagtcggagattctcacccccacataagcacatggaatagatagctaaagtacattctcatatatggaggcagtgacaaagagtggatccatcagttcacgaagcatgcaacttgctttgccgacgacgccgctctgaaggatgcaaagattcatattgagttgttctgtgttgaaaagg

SEQ ID NO: 93570 - DNA, 135 bp, Glycine max
agcatctccgttactgcagaggtacccaacttgaacactttcttgagcaagcaaacacgtgctcttgctgcatcaacattcattcattcattcatgatctcactctctcattcccaatcacaactcaccactcat

SEQ ID NO: 93571 - DNA, 261 bp, Glycine max
cgctactctctccttctcaaatgtctcaaagtactgatagatgagctctcccacaccccttgtttgagggatcgttatacttgtaggtcgtttaacatcgtaagggaggacatagtctagtttgttgccatttttgttacttctttttcccctttcaactgaggaagtatgtagtacatcgttaacatttttgggtttcctcaaaatatacttgagtttatcattggattgaatctatattaaagtctgatagcaatgttt

SEQ ID NO: 93572 - DNA, 274 bp, Glycine max
cgaaaaaaatggtggcagcaatagcatacgaggagagtcgccgcaagacagtggaggagaacaagaagaggattgaagccctcaatcttcccctcatctctcaagctcttcagaaatcatccccttctcccaaatcttcaccgctgaagcagacaaaacatcgcgccattcagaaagatgtggttgtcgtcataaggtcaagtcgtgtggcaaacttgccatctcctgtttacaaagaaatagttattgatcgcgtgacaatgcctagaagaag

SEQ ID NO: 93573 - DNA, 280 bp, Glycine max
tgttcaataggatgatagccaaacaaaagagacgaaaacgagagtcggctgggagttcccttacttgaccttacatgtgccaacatggctgtgtaaatatactaagctgattggttgtcaaggctagcacatcactgtgctgctgggaaagtaaacttgccctaataggaacccaggagaaaaatgttgcattgaggagtttagcaaacatggttggcaagtacattgatattggtgagtgagatgtggggttactcatgaaaggacctactttgaattg

SEQ ID NO: 93574 - DNA, 281 bp, Glycine max
gctgtgaccaattgcgtctgccatgtggttgtagaaacaaaattaccgtaatattgtgggatgcagaggcttgctcaatgctcacgatcttaattgtgcctaattttgtgtgttcttctttgtgtccagggatgcaaaagcattgcaggagaaaacggcaaagaaagcagctcaggctgcaggagggaataatgcaggtggtggacgcaacaaataggcaaaaatcattgacttgaggaatgtaaatggagtgtagacatgggaaaaattatattgcttat

SEQ ID NO: 93575 - DNA, 101 bp, Glycine max
cgtttagttgtctctgtgtcactctgtgtttcattatcagcgcaggacaagaaaagataagtggaaaaccctaagctctggaatagcgttggattggagcg

SEQ ID NO: 93576 - DNA, 277 bp, Glycine max
ctctctgtctcgtttacacatctctccaacctttcactttcgtttctcagttttattcgaatccctctctcaatctcctttccaaatggccagcgttgaggttgcacagcaaacaccaacaacagttccagaaaatgaaacaaccgaggtaagcaagacccaggaaacaaccccagtcactgaggctcctgcaacagaacaaccagcagctgaggttcctgcaacagaacaaccagccgctgaggctcctgccccagaatcaaccaccgaagcacca

SEQ ID NO: 93577 - DNA, 223 bp, Glycine max
  unsure (1)..(223): unsure at all n locations
gatagttctggtcagaaaacgtggagaataaaggagacaagtgtctggtaaaaaaagagagaagtaaaatgaaataaaaaataaggcgaatgaatctggtggtctggtggggagtggggactccgcgatcctcgacagtacaatttcaccgagttcccatcaggagtgngaaggggagtcccatggctgactccaagcgagtagttgtctgcggcggcggagt

SEQ ID NO: 93578 - DNA, 274 bp, Glycine max
gcaccctctcccatacatactccaccatttctctctgattaaagtatcaaaacatgggtggtgtgagtatgaatccagtgtttaggagtgaagtaccatttgggtattactgctacaacaacaacaacaactactctgagcagaacaacaccatggtggagaagagacagctattcctgagaagctaccagttctgtagaaagaagagtctgacagagagaatcaaagggtctttggttcgtgccaagaaaattgtgtggctaaggctaaggtc

SEQ ID NO: 93579 - DNA, 222 bp, Glycine max
tgcaatgttcgctctaagaagtgatcaattggagatgaattttactgttatcaatctccttcttagagcgaacattgcagactaattgacgatctggaggacgatataagcagtcgatgaatatacggtcgaagatgtcggaacacgaataaactagattaaggggcgtcgaatagccggtggaggaagtgatggggctgaggcttgccagggagcaagaaa

SEQ ID NO: 93580 - DNA, 297 bp, Glycine max
  unsure (1)..(297): unsure at all n locations
cgcgtcgctatgctcagaatccaattaatacagagagagccactgaaagataacaaggatataagtcaagaatagattatcagtgctgtgacacatataatgaggagtttcagaaacgctgggatcaacgtcttcagagcgatcaatactaacaaagaaaacataaaatcacaaaagaaactctcttcacactctcaggccccttttttgttattctaggtctacccctttctcttcccacactgaagctgaatccctgaaacggnatttatctaacgaagaaagcaaaagatgctt

SEQ ID NO: 93581 - DNA, 290 bp, Glycine max
caacggataggaagagaagagaggatagataggcctcagaagcagaacaacaatggccactgccactgtttcaatttcaacactatgcgctaccttcggaacccattgcgccatttcccacgaccctaaacctcttttttctcaacctttcagtctcaatcgctttccttctacctcttacaagctcactttatcgcctcgctcacctatttcaacccttcctaaggtctctgaatccgcggttgccgaaaccgaaaccggttcgtccgagcccgaaccggaccaaattg

SEQ ID NO: 93582 - DNA, 298 bp, Glycine max
atttttcaacactcgagggactatttactatggtttttaatacttgagagattatttgttcactttagggactatttaagaaagagattaatagtttaggaatgacattgatggtttattcaatatcccggatgctaacttttcattcaacgctaatataattggattgattatctgttagtttacatatgataataataatagttacataatgctcttctgttatgttattttgttgtgattactcattaggctaatggttgtcatccatatgttatttacttaaagatttctgtgt

SEQ ID NO: 93583 - DNA, 256 bp, Glycine max
  unsure (1)..(256): unsure at all n locations
ttntttttaattttctatcacatgatgtatcattgttttattgtgtttctgtctgtttttttacttgaacaattgtatgatctataatcccgatcaatctttctctgacatataataaaatatgattaattgttgttcttaaattaaagatcttaaataatatggcacataaggatatgttcaagatcatgaataagatgacgaagtttttatattgataatgcttgattaattgataatgacatatatgatatga

SEQ ID NO: 93584 - DNA, 158 bp, Glycine max
ctgattgattcagttcaagtttgtactttctttctgttgttgaatcttcaattaagctccatgcagttttgaaaggttgattaattgttgacctgctgagctttgcacctgctggctgggctttgcaacggcaaagagaaagagaaatgatttttttt

SEQ ID NO: 93585 - DNA, 138 bp, Glycine max
ttgccttccaactccacaaacagcccaacaaggacgaagaaacagttcccgattcttattagtgaagaagctgaaaatatggcctactatatacacgagatatttcaatcgaaaaaaaaaaaaaaaaaaaaagggggg

SEQ ID NO: 93586 - DNA, 261 bp, Glycine max
gcgacgatgacgttaatagaaattgctggtgctcacgccatcatctcctaagacatataattggaccggctacagttccgggtcttgacggtcctggtataggggatgagcccatagccttcttccgaggcgctgtgtatctcagatacttcggcatcaagagtccagttgatactgcttctcgtataattgtccatccaggtaggctcttgatctcttgacgcctgaacgttgccagtgcactgcttcagggaccaacgc

SEQ ID NO: 93587 - DNA, 272 bp, Glycine max
gtaaacccattcccgatcctcaggttacgggtttgatatatggaaacaagtccaaggacaaaccaaccaaaccagaggattgattcattcattagcattcatgtgagtttgttgccttacttctactcagtcctatacaaatacaccattccgaagatagctagatcatagatgtgagtgtgtttgtgggcatgacttccggttgattcattgctacatttatgatgttcttggcagggttcaaaatggagataattaataataaggcatat

SEQ ID NO: 93588 - DNA, 243 bp, Glycine max
gggttctgttctgtactccacccaaggtgcattctctcacacaatttctctccaccagataccaattataggattattcattgttggtggaagtccattaaacatgcattgttttgttccccatattccattacaaaaataaagccctctttcggttttcaaaaaaaaaaaaaaaaaaaaaaaaaaaaaaaaaaaaggggggccccccaaatatgaaaccccccccccggggatttttttcgg

SEQ ID NO: 93589 - DNA, 156 bp, Glycine max
gagagagagagaggtgccattatttgacttatttcattgggataggaagtaacagctaacaagtatcagcacccaccaatcagcgcgtgactctggtgaatatcacaaaagagagacagcacacagaaccagaaaacaaccttcaacaaagacaaa

SEQ ID NO: 93590 - DNA, 275 bp, Glycine max
cagcaatttcttatgtttcattgctattttaattgcctatgaatgtcattcttgtacacatacccagtcagataaaatgacgttcttaaatttggagtctgatgtctccgccattgctggttaccgaagatgaagggcagtgccatgcctcgatggtagcatctgcatcttcaccatccctgaactgtttctccctaaatgaggccggatttaaagaatgcaattacctgggattgtcagattgctcttcggtggacagttctactgtcccgaat

SEQ ID NO: 93591 - DNA, 228 bp, Glycine max
taaacggaatatccgcaggatctgtgctggtgacgccatcaactagcgctgagaatttatgcttgacgtgacggagaatagtgagaatatgataacatctcgcatcaaactgtggttttaaatccatctgcaattttaatgatctcaaagggtccacaatcgcacaatttctgaactgctcacgggataaaatggaatgcccttcaagttggatatccacacaacata

SEQ ID NO: 93592 - DNA, 270 bp, Glycine max
cgaaagtgttgcagagacgaaaggaagtggtgttgtgattctgattgcgattccgattccgatggagaggattcacgtcagcgttcgtgcaaagcctctctcccaggatgaggcaaaaaccagcccctggagaatctccggcaactccatttccattcctaacctctccaagttcgaattcgatcaaatattcagcgagaattgtgccaccgcgcaagtcttcgaagctcgcaccaaggatattgtggaagccgcagttcgcggattcaa

SEQ ID NO: 93593 - DNA, 141 bp, Glycine max
agcagttatcattgatagcacgtgtgatagcttaactttgaatggtgaacggcatcaagactatcagtctacctgcaaaagcaacaatgtggaagcggctctatcacctgcttcattggtaaatcattccacacaagatac

SEQ ID NO: 93594 - DNA, 283 bp, Glycine max
ctcatagtctcatacagtgcaaacaccagcatactgctaaaccagcaaaaaaagcagtggctatgctagcaactagacttgttgtaggggcattggaagaaagtggcgatccaaatggtgagaaagcagaaagaggtcctggagcaataatgtcatctgggtttggagggcttggattggaaggaatagtgggaatgtcagagccagcagcaggagttggcaacacaccaccaggagaaggcaacagtgcagcaatgtctggggacaactcttggaaggagag

SEQ ID NO: 93595 - DNA, 281 bp, Glycine max
gttgttattattaacagcaccacatgcaacataacaaccacatgcagttgtggtagtggcatcttcttcagattggacacgcctcaatgatggaagggagagcgttgatcttgatgatgttgtaacgcgcgaaaccggtttccttgaacagccacttccacaactgcatgtggtttttatgttgcatgtgttgttgttattattaacagctatatgatcttcgttttaattttgtggttttccttcctgcccttgttatgtctgtgcattaaaactagtaa

SEQ ID NO: 93596 - DNA, 283 bp, Glycine max
attgattaaagttgcatctgtgactttctgtgtgacttgtcagcatccctagcagcaaggaaaggatcaacaacaatggctgcatttcaaatctgcttacagatttggatggcaacctctttgcttgctgatggattggctgttgcgggacaagctattattgcaagtgcatttgcgagaacatgattacaaaagggttatcgcatctgcctcacgtgtgctgcagcttggcttgattcttgggctggtgctctctgtccttcttttaagtctataccacttg

SEQ ID NO: 93597 - DNA, 238 bp, Glycine max
ttggaacacgcacaattccacagtgcggtgcggtctaaggatatggtgcttagaagaagggatttggtgggtctccaatgttttgtaccagtttgacccatcgacttttgttttgttgggtatgacctatattagttaggagtttttcagtttttagtattacttaaattttctcctcaacagagactttgtgtaaagtgcaattttctagttaaatttcacttaattgggtttggga

SEQ ID NO: 93598 - DNA, 256 bp, Glycine max
gttcgtcgttgtcaacggtatgaaggtggaatgtttatgaaataatcaaaattgacagtttcaaattcaaatctctatttcttcaaatcctccaagtatgcgacactcatctgaattttgattacgccgagaagatcgggtagaaaaaagggcaagatccaacttctccaacaacactttcttccgaaaacaaaatgactggggctgaaggcccaagctacacagtagatgatgctcttgtggctttgggttttgg

SEQ ID NO: 93599 - DNA, 266 bp, Glycine max
gcaatagcagagttgagtttgcgacgagacaatttagcatgaagctgagtggactgaaatcggtcgagaacgcgcacgatgattccgtgtgggcggtcacatgcgtacccgcaaccgccaaccggccaccgctcctcctaaccggttccctcgacgagaccgtcaggctctggcgctccgacgacctcgttttggagctcaccaacaccggccactgcctcggcgtcgcctccgtcgccgggccacccctcggctccgtctcgcct

SEQ ID NO: 93600 - DNA, 143 bp, Glycine max
atttttcagagttttccctcagacttttgaacatttcttttttgcaatgttctcagaagtgcaggccacatgattatgaatgtaagaggatctttacattgatcaatgcttatttgagatgtttcgtaataaaaaaaaacaaa

SEQ ID NO: 93601 - DNA, 103 bp, Glycine max
cacaaccatcatgttgtgatgttatcccaaggacacttttcacacagcgatcagacgaatgcacatgcaaagcatgtcaaccaccatggcttcgttgtctcct

SEQ ID NO: 93602 - DNA, 158 bp, Glycine max
gaggaagcgacccttacagggggggaattgtcttcctgctgcacctaccgcagtctcaaatcaaagtcgagcatcatgaaatgatgcccgtgcagttaaactggtacttgttgacaatcaaaatattttaaaattgggaccttctaaaccatcaacga

SEQ ID NO: 93603 - DNA, 128 bp, Glycine max
tgggttcgggtcgtgtgtcaataactcataactcttttgcagcatgtcagccgctcatatactatacccttttctttgtaggggaaggtaatgttgtgtctctaggtgcgaaaactttcccggagaca

SEQ ID NO: 93604 - DNA, 156 bp, Glycine max
cagtggtgagatttaattttacatcaacaggtagaccaatatatgtggaattaaatctcaccactgctaaatactcatatattggtctccctgttgatgtaaaataaaacatttgccttggcactgaaaattaattcagatggaattatttatttc

SEQ ID NO: 93605 - DNA, 289 bp, Glycine max
cgccatattattatccagtgaggacaactgctctgccattccataatcacactcttcctttctatgggtatgcgcctacctacattgttactgacgtaaactacaattacaatcagaatcagaaactgtgctatggtagcggtggggcctacatgaatgggcagcatgtgtacccgaggcaggctattgtgggcggcaacacactgatgccaatgtatcctctctatcagtatcaccatccaacggagaccattggcgtgccagctcatcacaacttttatcaaacggc

SEQ ID NO: 93606 - DNA, 224 bp, Glycine max
attgcccttcttgtccaggaatttgagatctaacattaacaacaactatctaagcactagcaagctagttaccaaggcaataatgaagttcttgttaatgttagatctcagaagctgcacacattgcccgacttgtccacgaatttgagatctaacattagcagcaactatctaagcactagcaagctagttagcacgccagtaatgacgttctagttccagtg

SEQ ID NO: 93607 - DNA, 252 bp, Glycine max
cagtgtgaccatttgcgtctgccaatgtggtgtaagaatcacattaccggaatatttgtcggatgcagaggctgcttcatgctcacgatcttaattagtgctaatttttgtgtggtcctcctttgtgtgccaggatgcaaaagcatgcaggagaacacggcaagaaagagctcaggctgaggagggaataatgcagtggtgacgcacaaataggcaaaatcatgacttgagatgtaatggatgtagcatgga

SEQ ID NO: 93608 - DNA, 287 bp, Glycine max
tgaggcaacggcgacgctaccttatcgcgttacattttctttccgttctgtttcttattaacgtcttaggtttggactcatcacacatacatacacatatatatacatacatatatatatacatacatacatatatatatgtattatttttccttattatatttttgtgtgatgaattttagctatggatcgtataagatcacggtgatgactccataaaattcaagctcaacagaccggaatgcagagctttctctctttgtggagattgccatgcgtgtcgatta

SEQ ID NO: 93609 - DNA, 275 bp, Glycine max
cttagtattccttgtaaaggtatattagccacactttctctaacatactctttcttattcactctctactattgattaaaatttataagacagagtatgttagagaaagtgttgttagtattccttgtaaaggtatattaacaacactttctctaacatactctagcatactttttttaacacacttttcattattagttaaagtttcttggaaattgcaataatttatggatcatcactacttatttaatgatccgtattcgtgatcttgtagt

SEQ ID NO: 93610 - DNA, 182 bp, Glycine max
  unsure (1)..(182): unsure at all n locations
cccaactcaatttttctctcaaccggccccacttagcataaccccagcatggccacacgacatacaagatcagaaatnannattcatgggatngtgtttggggaaagactntatgccaagttgattgcgagatcttgtaaagtgtggggctggaagtgttgagatcgatcgatcacctatgc

SEQ ID NO: 93611 - DNA, 268 bp, Glycine max
gaactatggtaccaacttcagcctcttctgatctcaccttacaaacccaaatcaaaggacatgttaccacaaatgttgttatgtgttgtggcattgctgaagtcaagaggagcaagcttgttggagaaaatggtgttgtggaggcagccattgctattggtagtgaagttagacatttgcaacgtgaaacgtctcaaggggctgaaactttgatgtcaaatttaacagaattcgcccacatgacaatactcgcaggctcaccgaagct

SEQ ID NO: 93612 - DNA, 272 bp, Glycine max
cgagttttatgatgggctccattgtgggaactcaataattctaatcactttgaggcgcgatgagttaaaatgattttgaaaacaattgagtagttgtgtgtattgcataggtcaaactccagtgacacatatatgattttaaatgtctgttttaatgagatgattaatcatatgaacataacatattagtattattactgtgtgatatgtatatgatgcatgaggcatgataatgtgttgtcttgggattatgaaagtgtatgaactctgtg

SEQ ID NO: 93613 - DNA, 227 bp, Glycine max
ctgctaatgatgaagttgacataactagtgatgtgactggtgtatcagcagaaactggagcccatgatagtgtgagaatgttgcatcgtgaaagtgctttgagttcaagaaatgtaaatgggtctggcttcacatttgctgctgcttcttcgactgaagctcaatcatgtagcccaaaacgtcttcacaataagagaaatcatggtcacgattcttacaactacaca

SEQ ID NO: 93614 - DNA, 277 bp, Glycine max
cacagacacaactgagactgagtgagaccagaacaaggaacgtagcaacaatcggtccagcggcaaagacgaccacgatgcgttcgacctctcaggcatcgtcccgtgcgtccccgcagaaaccaaccccgtcatcgagtgcttggaccgcttaagacaccttgaaaccgaaccggaccaaaacctaatcgcgcaagcgtttaacaccctccacgagttgtgcgcaactccaaattctgattcaaattcaaatgtggctattgcaaccaaaaacggc

SEQ ID NO: 93615 - DNA, 257 bp, Glycine max
cggctcgaggaaagggtagactcaagtaaagtagaatatatcaccaccaagaaaattgaaacgctcatggaagtacaccatcaactcatgctgccgaagcatcgaagccaccccctggaccaagaatgccagatggaacacgtggcttcgcaataggacgacgtcggtttcctgtccctgcttcgaattagcaaacattggacgccacaaatgagggattgtatttagcagtattatgtgtccgacgcctagtgatg

SEQ ID NO: 93616 - DNA, 257 bp, Glycine max
atgggatctaatttgcaaaaaactagcaaaagaacaaaaagtcatacttgactcatctcattttaaaaatccaaattaaatatgaactttttttttggtccggcctatggtaacttgtaacatgtatcgagtcggataactcgttttgttacatgtaaaaatagtgtaaatctatacttaaactttaatttccactcaacaaaatcaccttcaacttaaacaagtctagactaacaactattttttatgtgatagta

SEQ ID NO: 93617 - DNA, 257 bp, Glycine max
cgaaaactgcaagtgaaagctggagcttttgcttcaatcacatttgactatttcactgattagaacaggcaaagatgtctcttttgggttaaaaaaaaaaaaaaacaaaaaaaaaaaggggggccccccgaaaaggaaccccctcaccccggaaataatttcgggccgggaacctgaaggggaacaagtttccccaaagggggcccgtataaaaccttggcgaaaccagggcaaaagctgttccctgggaaaatttt

SEQ ID NO: 93618 - DNA, 254 bp, Glycine max
cttcttcaaatttttttctggtgtttctacaacctgtcctaactctcaaccctcttcctcttaatgaatctattcctctttatcctcctctgaacctcaaacaccaaaacaaagcattacaattctcaatttcacataaacaccagaactgataaaaacacataacaaaaaaaaaaagttagtttttcctgtttcttttaaaatttcctcgttcatgttttatcatttccttcaaatttttgatttcaaaaata

SEQ ID NO: 93619 - DNA, 249 bp, Glycine max
gccatctacgtggcgactggctgtgaggtggatttgtatcccagtctcggtctatgctggtagctgaagtgcgggttcacagcttcagtgttttctatattcagtaggtgggccaagttgtgcctcctggtgtcgctgctttctacgcaggttactctcctgtgctgccgcttctccagggtttggttgtgaggcgcttggtggtgggtcgcccttctcaactggggtgctggcacctgcggctggtct

SEQ ID NO: 93620 - DNA, 242 bp, Glycine max
gtgacgcagcatatatccagataccatatgattaacaaggcagatgtaaggaagtttaatcttacattatgtatcacttttcgttgtatcagaatttttcttgagcagaattgaaggattactagtctattagtgattctgcccaaaaaaaaaaaagaaaaataacaaaaaaataggaagaaggaaaaacaaagggggggcccgccgttagaggcgtctgtccccgggggtttgttggccgg

SEQ ID NO: 93621 - DNA, 252 bp, Glycine max
gcttgctctctctctctctctctaatactcacacataaaggaatagacaaaaaaacttctttttcctttcaacgatcttcttcttcgaaatcagaaagagggcactttctcttgctttttttttcatcatttcagtttgaaagattctctaaggccagagaactcatcatcaggaatgaggccaccaccaactctcaacattttcccatctcaacctatgcacgcagtgcaccatccaattccaagttaaca

SEQ ID NO: 93622 - DNA, 100 bp, Glycine max
ctgtatagagtgcatggaatcaagctgaatgaaggtgctcgctggcatgagaacgagacagtcaaggactggacttataccatagatggtaaggttataa

SEQ ID NO: 93623 - DNA, 291 bp, Glycine max
catgactatatataggctaattctctctaacagaatgcatgaaattctatccaaatccataaggaatctaatagaaatctaataacgatattctgttatgcaggatctgtgctagcaagatttgaggctggtattcaaaagctttcttccaattctaccctcctgctacacgtaatcagccagcaacagtcctcatacccgctgccgtagcaaaaacatgaaaaggggatgttcccaaatcagttccactactactactcctcatcgccctgtcttctgcctggacagggg

SEQ ID NO: 93624 - DNA, 111 bp, Glycine max
gacccatagagaagcccccaaattaatcaatcaaccatggtttgcttcacattacaaatttcacttgttttgctacttttgctatatgcaatgacattccacacaacatac

SEQ ID NO: 93625 - DNA, 165 bp, Glycine max
cggcaacaaaagcatagagaaatggaccgtttaactattgaagtcggtgcgggccccactttctctctctctctcgctctcttaatcctcatgcttcatacaccggaccacacgcaacaaacactcaatagtagtgcttcttcacttcttccattctccggcacc

SEQ ID NO: 93626 - DNA, 283 bp, Glycine max
cagctgggtcttaaattagactaatttcaacctaatcgtattctcggttcggtctttgtttctttatactagtaagtagcaagtgaagttgaagttgcagttgcgggaaagacgcaggtggtgaaatcctgtcaccaaaatgagagctctgcttctgctcaaaggaactcagtgtaaaagtttccaggcgtaattgtctctcgtgtttctgttcaactctagttttgattagtgattgcgccatgcctatttttgtaccaaaggcatccgctgtgaatggaat

SEQ ID NO: 93627 - DNA, 286 bp, Glycine max
caagaactcaagggatgaagggattggtaaggttcctgaagatgttgtgatagagatattggtgagagggggaataagggagtgggagcagatatcatgcgtgaagaagcagtgggcatctcttgtccgctgcgattgcgaatgcttcccgcaagctgcactttccttctattatccacaccaactcccactacctccccctccaacatggcctgttcctttacccaacaactccaagaggagattcattgctttatatattagtcaacacatctttggctccgat

SEQ ID NO: 93628 - DNA, 286 bp, Glycine max
ctaatctttcaatccatttaattgggcaaaaaaacgtcttggacaatattcgattgctaggatctggaaacaagttggatgatataaggaatttagaaactggacttgaagatggtggaactgttcaatcagcaaagcctttctgagcattgaatacctgaattataaatttctatcatttgtggctatttattgtgcctgcagatttatctgtcataaagtaggtaaatatctgacatggtgaaatatttagagtttttagttctagtctcaaggatcttaaata

SEQ ID NO: 93629 - DNA, 278 bp, Glycine max
gaaatctcgcaacgttatcactaatgtgattgttgctgcgctacgtaagacacgagagaagagaagagaaaagctattgtgatttgtgagtgatatgagtatgtctattatgcatgcaatgtcaatcagaagcagcgctttcttttgctttcaaataaattgctccgattcaaagcaaggccgtggttttggagaaaacactagcagtaacaggattaagcaaagcaagggatcagcaaataaacagtctcgccctctatcttctcaggcaccccgtt

SEQ ID NO: 93630 - DNA, 275 bp, Glycine max
  unsure (1)..(275): unsure at all n locations
ctcaactgaaagtgagtgtgtgaaggtagggttttagaaactgatcctacggcatgttcatgtttttggttagcagagtaactaaggattcaatttcacgcaaccgncgtgttttatgnttctanagctttctctagtttactggttttgggaagtcctattgaattgctactttggtctaattgcatttatccaaactgattgggttggatcatttttcagaactcaagtcaatagcagctggggcattgtgttgattaacatttctttagtta

SEQ ID NO: 93631 - DNA, 190 bp, Glycine max
gaagaatcaatataaagcatcagtcgtggcggtgttaggtaggcggtactatggcggcgcctgaatcccctctctggtacgtcggtgtcggtaggcaatccgttagttttcgcgtgatgaagcaaatggggttggaagaaggagaaggtcttggaaaagataagcagggggtcgaaggatcacgttcggg

SEQ ID NO: 93632 - DNA, 224 bp, Glycine max
  unsure (1)..(224): unsure at all n locations
gttcggtgagcggggttggacatgtacaaacattaagtggttccggacagcttcataacaataatttcagatccttccacctagtgggatatcantaatgaacatcctgtggttgaatgtgcatggattcctcggagtattcaattgagtcatcacaaaattaaacaatgccatgatcacaaattccagtcatcatgtcctgtatcaatggtgttcaggatgac

SEQ ID NO: 93633 - DNA, 265 bp, Glycine max
cgctgaacaaacccacctcaattgcttttgcaattatttttccttttacctctctaatggcactgtccaaagaccaaagaattccacatgattcaagcttcagcagcaaggttcaaaactgtgttttcagtgagactagtgtggagattacctccatgactgttcatagggtcaatgagtaccacaaatctgtgttagaagaggaagatggctcacaaactactaatggtctcagcaatgattcagctgtaacacgttctcctcc

SEQ ID NO: 93634 - DNA, 283 bp, Glycine max
  unsure (1)..(283): unsure at all n locations
ctcacgtctgcccctgtttgcgttacaaattgcattctacaaatcaaaatacccaaacaacccacagcatagagncgttgatcagggagatggagtgtttgacaaggtagattaatcatatattacgtacgaactataaatcgttttacgatcaaaatcatagcttcattcgtaggctatcccgagaaacacgcgaacaatgtggtgagtgcatcatgcaagcctctgccattgtctctgtttctgtctctttcttccctttttcggaagtcagcgtcaccgc

SEQ ID NO: 93635 - DNA, 184 bp, Glycine max
gattacaccaacgttcactgagtgacattcctccgttttaaactttccaaccgcattcccaatcgatgcttacgctccggcgacggccaccaccgctcgaagcgccgccgcggaaccctcgcaatctcaacccccaaaaccatcccctcctctccctctccctccaccttccacacaacatacg

SEQ ID NO: 93636 - DNA, 169 bp, Glycine max
cacgaatttcattgcagagtgtgattttgagtatcaggatcaatggttgcaattgtattgggaaacgtgcttcgagatggcatcttggattacttggatgaagagaacaaaccccaaactgtctccattcactctctcacagcggcaagactagtcagcatctaggggg

SEQ ID NO: 93637 - DNA, 270 bp, Glycine max
gtctattgttttcagtttatgttatgtttagggttgtcttgtcttgtgcgtatttcaagagggggattcttttttcttctcgaaaatgtaaaatcactacctggaaaataaaaggtcgatattttacaggtagtgattttcgttcatttccactttttaaaaaaaaaaaaaaaaaaaaaaaaaaaaaggggggccccccaataaggaacctcgtcacccggggattaaattcgggccgggacctctcgggggtacaattttccccaaaag

SEQ ID NO: 93638 - DNA, 143 bp, Glycine max
atagccgtttgatttgtgaaaggagagcaaacatgtttgatcaggtataagaggctacattcatggacaaggttgctggccagatccatgtccgatctggtgtttctggtattaggagttatgaaggagcctactggcagcag

SEQ ID NO: 93639 - DNA, 167 bp, Glycine max
gttacatctaacgggtattacgaagtcaaccgatctaaaaaactaaaactcggatcccctttatgttgtttattttgatttggagtggttccatcgggagtttggatggccaccttgaatgttccccctcttcctccttcaccgagagacgatgccacacaacatac

SEQ ID NO: 93640 - DNA, 265 bp, Glycine max
aaaatattctctgtagtcatggtcctgtgttaacttattatgtgattgaatttaatttcagttataagagcaaggctgtcatatatcatataaaaatgattcaccatttttaggagagagactagcatgttttgttattgggtcatttttacagcttccctttgatgctctccacattgttatggcttcactttgatgctcttttgttgatggttttgcattgcattgctgctttactttgttctctaaggtatccttttgcttc

SEQ ID NO: 93641 - DNA, 270 bp, Glycine max
  unsure (1)..(270): unsure at all n locations
ataaggtattaacaatcaatgtgataagctgcataacacaagctttcaaactccttaagatatatgntaanaaggtttttcntaaactagttatttctctttgtgtgntactcataaaagtcgtcattaactgctttcgcaacttttatcccattttttattttggtgaatgcttaatccttgttttaatctgttggagttactcgggatatgaccaaaatagttatttaagtaacgggcacccctcacctcatcaacgtggggttgagt

SEQ ID NO: 93642 - DNA, 145 bp, Glycine max
ttttaaggcaagggcattgaagaaagattgtcaaaaacgatagccgatgaggcttggcaacattctctgtagactcaagtttacttagtctgtcactgtattaatcttctgaaaatttatgttatcaaattactcttgctaagat

SEQ ID NO: 93643 - DNA, 210 bp, Glycine max
gctcgagcagcagtgttgggaacaggaggaggaggctctggcgatgcagtcgcagcaccaccggttgttggtggtggtgctgctgcatcacgaggagcacatgaaggcggtgccaacggcggcggcggatcaaattcaggggatgatagagttgaggaaggtgacaagagctttggtgggaaacagtgcccaaaacagaaaactttggct

SEQ ID NO: 93644 - DNA, 280 bp, Glycine max
atgaccacactatttcttgtttgtttggtaattgcatttactatggcagaagagattacatcgagcgcaacatcagagttttgcttgataatggagtgggagaaacaaacattgcaagattgcttcggaaccgttgtagggcggttttcacctctgatattcttaaggtggtggaggaagtaaaggatctggggtttgatccttcaaaatcagcttttgttacagcattgcttgccctaaaaagtatgagtcaaacctcgtggaaggagaaagttggcgt

SEQ ID NO: 93645 - DNA, 267 bp, Glycine max
ggttgagatatataatgtggagtacattgctggaggtactgcactaaatttggagtattggatttcagataattgctttaatatttaatatcataaacaaacttaataaaaccagcagtggaagtgcatgtctcataatgacagcttctacatttttcttattgtgtgatggcaggtgccactcagaattcaatcaaggttgctcaatggatgctccaagttcctggtgcaacaagttacatgggtggcataggaaaggataagttt

SEQ ID NO: 93646 - DNA, 268 bp, Glycine max
cttgattctttccaaatctggaatcatgcgtgctttaggtgaaggtgttcgtgtgcagacaaaaaagaagaggaaaataagagaaaaatacattttgtgacaactataatcaactgatatttgaatactaattaacagtgttaattttaaactaacagaataccaacttgaataattttaaaaagataaagaacttttcaaaaataaagacataaagtgaaaaagaaaaaaaaaactaaatagttcatttggccattctaaaattatt

SEQ ID NO: 93647 - DNA, 263 bp, Glycine max
ctcatgctttattggtggggagtcggatgtagtcatgtatgtagttacaatattacattcgtacattgaattttagtcaaaaaagattatccacattttcagtgcttcaattcagaatcagagggtaaaagctgagttaattgctcagtaagcattttttcctgaactgttaaacatgtgtcttctctttgttgaaattggttttcgattttgtttttgtagtccactggtccgtttgatgtgattttctggattctagagat

SEQ ID NO: 93648 - DNA, 261 bp, Glycine max
ccccttcccaatctcaaacggcaaaggtgccacatacatttcctgcttctcacctgatatttttccaatttgtttaatcttcctttcttttctctacccattttcttcttcttcttctcccctccttttttccttcttctaccagcttctagaacaaggatgtgcccatttcctgcttacttgaatctcaaacacaaaactgaatctttgacaacaatttcaagattttcccaccaacccaccacagcaaagcacctggtc

SEQ ID NO: 93649 - DNA, 277 bp, Glycine max
tgaaatatagtgatggcgatagagcattttgtacatctagtgatctcttcattgatgagagattgagaatcgcattagatggcatcattgtcattagcatggaaatatttcgccctaagttttagatggttcggctgaaaacaccttgaaagggaagataaggattaccacgagatgcttatggcttgacaaggggaaactgatggatgcactctacaaagctgcccgtgcagctctttcaagctgccctgtaaagagtccacttgctcacatcgaa

SEQ ID NO: 93650 - DNA, 219 bp, Glycine max
gatgccaacagattgaagatacatatatttcatgatcataaaccattgcattggcaagacaaatggtttatgatcatgaaatatatgtatctaccgatgatgccacagattgaagatattctgttgattgttgaagctgattatgtgtagccccctccttagccgaaataataataataataacttatataacttttagctataaagcataatattccc

SEQ ID NO: 93651 - DNA, 259 bp, Glycine max
agaaggtgcttgacattggagggtagggaagagagtgcttggtggtggtgttttgaattgaaaaacgagaggatatcgcagatttttttcttatcgttttcttcatttgttaaaatcatcggtgaatttcgttttattttcgaaattgtttcggtttgaatgcatgcattttgatttatggatttggaatcttctggcgattcggtgaaatgctgcaagcactgtggatgcgggtctagtgattgccccatggcagctc

SEQ ID NO: 93652 - DNA, 249 bp, Glycine max
cttcttttccccactccatttttgaccagttgttactcacacgggtcttgctccttttgctcccacaacttcggtttctgtgcctgattctacttccacgggctggtggaagtgcaaagttttgttttttagctccaatcagaagtgggtttttgctgtggcttcttcaatctcaacatcaaagccaccatcataggttgttggtacccaaaactcttttttctttctttctttctttttccttcttct

SEQ ID NO: 93653 - DNA, 243 bp, Glycine max
cgttgacacgtcccgtttatcttccacactcagttcccacctttccacctttccttctcagtcacacacactcacaccgagttgtgtcgagttgtgtcaagtgtgaactcaaaacatctctctcaatctctctccctgtttaggttttgttttggagtggtgttgctatctctatagctccatgaactttttctgacacaacccaacccaagaggaggagggggatgaggaagaagatcgaag

SEQ ID NO: 93654 - DNA, 240 bp, Glycine max
gttcttaaaatccacatggcagaattcactgcagatttgcaaagtcttagatttcctttcttagatgttgacaacatggaaatgcagaacttgatgatgctcttctcctgtgaaagcttcttaggttctccagaagctgaatttgcaggaaacttggaagagaattttcctgatcacaatgaagttccagttttagttcctattattaattcagttgaaaatgacatccatgaaggtcaa

SEQ ID NO: 93655 - DNA, 248 bp, Glycine max
attttgctcttgattataagttgtctgatccctgacccattatctaggtctccttttctgcagtcatgaaaataatgggttttttgggctttgaaaatggagataaattattggataagtggttacagggatgttttgttcaaattcatttgctatatcttaatgaagggaatatagggtcataagtgctgttcaaatgctagtcttactgtttacaggagaagacactggctaacttccagaatgtg

SEQ ID NO: 93656 - DNA, 201 bp, Glycine max
  unsure (1)..(201): unsure at all n locations
tgggttggggtttggtgcggtttgcgagggttaacgccgaacggtgggtttggagtattgaggatggggattttgatttttggggagaacatgcaagatgagtgtttgtgtttggatatgcgagatggagatgataaaagtgaggagtgtggttgggatnatcaaggataaaggatggcagagtaatggggcgttgttatg

SEQ ID NO: 93657 - DNA, 247 bp, Glycine max
catttccctcctttctccaattaacacactctgcagcatcctttcctgtttctctctttcttctgatccgttatcgcaggaatgaacaatcataactcggatcccgactcgttcttcgagcccgagtcaccaactcatggcgcgggcactcacgcaccacctatcactaatcctaatcctcatcgtcgccgtcgccggcgacgccaatctcctccgaaaccgccaccacggctctcgccctgccatg

SEQ ID NO: 93658 - DNA, 277 bp, Glycine max
actcttcccaatagacatgggttgtttcatggcatgttctggtctatccaacaagagaaagcgtagaaagactatctacaaagtcctagctggacaccaggaatatggagattatgaagctcttgccataaccgagaaattcactatccctgattctgatttcagaggaagagatgaagttaaggagcagaatagtgttaagagcaagaagaagacagttaccttcaatttgaatgtacaggtatatgagccaaaccccacagcttatcaggtattg

SEQ ID NO: 93659 - DNA, 275 bp, Glycine max
aaggccctcaagaagatgaaaaacctcaaaacacttattattagaaatggaaaattttccaaaggtcccaaataacttgagttggatggcttatccaagaagtttgtgaatctaacagttttgaattttggccggtgcgaatctttaattacacaaatagctgatgtgtctggtctcccaaatttggaggaacttttatttgaattttgtaagaatttaactacagttcacggttccattgattacttggacaaacttaaaatattgagtgcttt

SEQ ID NO: 93660 - DNA, 268 bp, Glycine max
ctctgtcttttatttttccctttttttggttctcaactatgggccctctttattccctacatagtttaagtcaacatagcaaaaattgccacgtaatatcagctattcatcctcattccaaagtcttcaatatagccatccaaggttgttcaagtttgggttttgagagtgagctcaacaatcttattgtgattaaagtctcatactttgggagttttctaaatctgggtttttcaattcagggtttctcaaaatccgtttcaagagt

SEQ ID NO: 93661 - DNA, 260 bp, Glycine max
attttagtcaatttcagacttgtagtgtttttggtgtaattgtttttaaaatgtccttttgctttaatcattcgctaatagacaaggctgctgttgagctaacaaaattgcaccctttttgtgctggtttttcttcccttgtgtgactgttatatccttgattcactgtcatgcacctggtggaatgttcatttctcataattgcatgcatgattaatcaggcaatgtaattccctcatcacaattgtaacatgttcagt

SEQ ID NO: 93662 - DNA, 269 bp, Glycine max
gcataggggtggtgcatcggatggaagacgaggatctgtgggtgtcattctgttttacggagaggctatggctttgtaaggcatgggaaatggaatgggttaggccatttaaagtgggggacaaggtaaggatcagagacggactggtgaccccacgatggggatggggaatggagacacatgcaagcaagggacaggttgtaggggtagatgcaaatggaaaactgagaataaaattccggtggagggaagggaggccctggatagga

SEQ ID NO: 93663 - DNA, 269 bp, Glycine max
agcgacgctgtctctcctgctattctccgccggcggtaaatgcaacacttcctttactctttcatttccctgcaaatacaaagagacacaccatcgaattcgcatgtttttattattaattaattcaattaggtgcacataaattccattttcattcttttccgcttgcatttcaatatattaccacattctctgtgctccgcttcgcctgtgtgcgtgtctagagtttccttaacaattcataattcaattccgtaatgtatagttgt

SEQ ID NO: 93664 - DNA, 270 bp, Glycine max
ggctgcattcaatgtagatgaagtctccacttctcaaaaaactaatatactttgagtaataaaatagaaaaagatgtattttaggaatattgaggagagagagtgtaggtggataaaatccttcttttcactactttatctagagacttcatttgcaataatattgagtagagcaggctgcattcaatgtagatgaatttttccacttttcttgcttggttttccactacttgtctgattgtcttgtcctcaaaacaagaaagtgagtaa

SEQ ID NO: 93665 - DNA, 266 bp, Glycine max
gttgtaaagaaaaaaacctgtgatttaagagccttggttttctttctggctttctgtaagtgacaaccgaaccaaagttttttagtattttcattttgagcaaaattagttacatgatgaaccttttcctacatacccactccaaacagctattggtagaagcagccttcaagggcattacttcttttgagtggggatgaacagtgtatttttctattttttcactcattgggtgtcaatcgcttaagagttgaacttgagttagt

SEQ ID NO: 93666 - DNA, 271 bp, Glycine max
cttcaaaatccaaaaacatcttcagccaacttgattctcattttgaaccttattcagttggcatggggacttctgatacacacttgtttctttctcttatgcagattttcattctatgcttcatctgtttcatagccaaagttgaagcttcaaacaaaaagctttcaggcttttatgtgtttggagactccacggtagacccaggaaacaataactacataaagacaccttttaggagcaattttccaccgtacgggagggactttcccaa

SEQ ID NO: 93667 - DNA, 260 bp, Glycine max
caagccgcttccttttctttctctcttctctctctctctctctctactgtttcgattgcggcagcacaaaaccctaccaaagtacccatctttttttgcgtgcagtgttggcctcaagttttgttttttcggcgctgtggttgtgttttgtcttgtgggtcgcgttccttttggggttttgggtgcaatggtccctggttccaaaacggagggtggtggcactggtaccactcacttgctctctgcaagagtgcgcaaaa

SEQ ID NO: 93668 - DNA, 254 bp, Glycine max
ctcaagtttcttccacacgtatactcaggctctacattcatattgttttgggttcagtgggaccaaaaatcagtcaggtagtatcattcccaaaacttttccaggtcattctttcaccttttcaaagacatctgcctcctcacctcatgtatcaaagcctcgaacttggcatcgtacaggtaataatcctccggcttctctacctagaatcaagccttcattaggaacagttcctcccaaaaagccaattctag

SEQ ID NO: 93669 - DNA, 249 bp, Glycine max
taagttttctctatttcacattaattgtgtgtgagcatctttaaggtctctttttaatatgtggtggtgtcggcttgtcaaaaggtgtattttcccaatattgttgactcctggtaaggtgtatgtacttttcatgggttgcattctaagatccaatggtcaacatatcgtcactgtagccctctggtatgtggtaattgtatcttatggcaacaatcgcatgcctacaaggcatacctatgtagataa

SEQ ID NO: 93670 - DNA, 140 bp, Glycine max
gattcaatgcctacagtgtgttttagaggtcccagtagtgtcaaagattctggattaaatacagtgcttatgcgttcgcccattaaaggtcgaacctgaatctcaaatcccatgtttttctcagactccaaatattcgag

SEQ ID NO: 93671 - DNA, 242 bp, Glycine max
ctcaaaaggaagtcttggaagggaagattcaatcagctactgataggattaaatccttaatgaatcaactccaggaatcagagaaaattattgacagcttgagattggagatacagtcctataaagaatcaaatggaaaacttgagaatgaaatcaggaatcagcaagtgataatttcaaatcttgaagaacatcatacagaagaagaattaaaggaggcttgtaacaaggttttggcttta

SEQ ID NO: 93672 - DNA, 241 bp, Glycine max
caaaaaagtacaatgcaaaacagtggggttacccaaagggctgaatctcaacgcttcgctagtgtacatgatgacaatccttgtgtagctttcatcccttactttggtttcattgaagaaatttgggagcttaactatgtcaaattcactgtctgtgttatcaaatgtacgtgggtggacagtaataccggtgtgtggaccgatgatgttggatttacactggtggatcttaacaaactcg

SEQ ID NO: 93673 - DNA, 240 bp, Glycine max
cgacaacttggaccttacaatctcagccattatgaagattggaaacaattatctaattttatcacaaagagcgtcattgaacggcttgagcccattggaggtgaaattactgttgaatgtgaaaatgagatagttagaaatgctactaaaatgccaatggaggacgcactaggcaagcagctgaaggttggtaattctgcaacatctgttggcaagtctcagaggaaaggatgttattat

SEQ ID NO: 93674 - DNA, 214 bp, Glycine max
atcaccccacgctcctccatttatctccctcacttctctctctcttccctcgccgcaacgccatggcctccctcacgtgcccccccacctccctccagctccgattggccttcgccgcccccaaattcccgcaccccccgcacgtgcgaatgcgcaacttcaagctcaaccgacttcgccctctgcgcgccggcaagacggcgtcactccgaat

SEQ ID NO: 93675 - DNA, 241 bp, Glycine max
tctttgacagatgggtcattgtacatgctgagactgagaccgtcttctcagattcaattcaaaattcctcaacgtcactcacatccttttttctccaatcagattcgcaacgcgccatcttccagctagggtttccagctcaatttccagattttcactttccctcgatttcgaccgttgcaagagttaatttgaaatgcgcttcccctgtagatccgtggcgggattctgttgacttcga

SEQ ID NO: 93676 - DNA, 190 bp, Glycine max
agcgacgtcgatgttcggttcaagatctgaaagtggaccatttgatccacgtaataatgtacaccatacaacacagaggtgtgtaatgtgttaattgcttgtctgtcttctttttcttgcctttcctttcagcttcttttatttggtatagttttcgagaatttgtccatattcataattaattacctta

SEQ ID NO: 93677 - DNA, 206 bp, Glycine max
actacctgccaacctaagagactggacccaaggccttagctacaggttagttagatgatatgtttacatcatgttatccgtagcttgggcagaaaaaaacttgtcaatttctttgtagctatctgcatatatatacaagtagtgtgctcgagcaaaaactactttgttcattaaacgaagaacctccagcaccaccattatcattc

SEQ ID NO: 93678 - DNA, 270 bp, Glycine max
acaaaatccccaaaccccaatttctcgtccccgtacgataatttccccgcaattttcatcgctccgtatccgctcgcattgctgtttcatccacattgcaatcttccaggacattggatttgatctctgctttccgaaggtgagattcctctccctcacctttttcccacattgcttcctccagatagtgtaggtgttattgatcgagggggtgaggagtgttgaaaacgagcatgcagtgggagcaggaggggcgggggaaagggggaa

SEQ ID NO: 93679 - DNA, 274 bp, Glycine max
acggcgcacggccactacgaccaccaccactactggtccccgcgtgacgataaaccctccgccgcctctctccaaatatcctctctctcctccttcgttttctccgttttccgaagcgttaggtccggccacaggtacatgagaggctctttctcatgatctcgctcaatgtcgcgtactccaccgccgaattgctcactggactcttcaccggtcgcgtaggtttggtgtctgatgcggttcacttgacttttggttgtggtcttcttacatt

SEQ ID NO: 93680 - DNA, 276 bp, Glycine max
gtctaaggtctggtgctcctgaaacctattctagtccgggtgctgataatgcgactggaattgttagtgttgtggtcatttctggagctaaataagacgatttcagatgctaagtttttcaatgaagctggtcaagagaatttctgtcagctttaaagaatgaaaaccttgacctgaagaaaattccacaggtctccgcatacagaaatgagccttcctttgaagagcggagattcctggaaatgacctgtttgaaaaatcatctatttcaacatc

SEQ ID NO: 93681 - DNA, 267 bp, Glycine max
cagatttcagacaaatcgcatcaaagttcagagaaactgaaaaaatcagatagccagccagcccatcactcagatggatggaatcaacaaccaaaacacttggagagaggaaggtcagagggtcatcagacttatatgtggataaaggtcgatgattgaaaggctcagttttcttctgttctagaacatgatccacatgcagtcagtgtttttgttgtccatgttgggatttgcttatgtctttcaacaatattttgtgtggtttat

SEQ ID NO: 93682 - DNA, 268 bp, Glycine max
gcaattccataacccggttattaaaattattcgaattgctgatttttatattttttttctttttttctaagtgctgcaacgatcaatgcctgaagaattgaatgaagaaaaaaatgcttatgggtactgattgatcttcgttgtgtggtttgtgcagaaagttcagaaggctcttctgcaatccgatgtgcactcaaagtcagacaaaagtcctgtcacagtggctgatctatgtttattagcttgacatatgctatcaaaagagtca

SEQ ID NO: 93683 - DNA, 281 bp, Glycine max
cattgttccaaaatccccatcctttggtcgttgcagctattttttaaattggatgatgcaaaaacgcaaattgttgattaaaccaccttcttcttctcttcacacgaattccctctagcactcgtccaagcagaggaagagagagaggagaccaagacaagaaaagatagacacataggagaacaaagaaacagaacaaagtcccaagtagcagtgaagaggagggaagaaaaaggtggcaccataatcaatctcagatctcacaatcagaacctccccag

SEQ ID NO: 93684 - DNA, 166 bp, Glycine max
tgtcacgggttcatatatatgtagcaatcccttgtgttgtttattgaaaatcctagaagatcttcactttactatgtgaatttggtggctattagagttggccggagaattgtggatattccaccggaggctctagcgttcaaccctaacaccggcgcaggcaccg

SEQ ID NO: 93685 - DNA, 167 bp, Glycine max
ttccatcatcttctggtattggtcttagcaataacttaacatcatctggtccattggcagcccctgccagggatagtagatatggagtttcacgaactccacctttatcagttgacgaacagaagagaatacaacaatataatcagatgatatctagcagaaacatg

SEQ ID NO: 93686 - DNA, 161 bp, Glycine max
aaggccgttaaggatgacaaacaacaaattatttgtagcagagaccagactgaaattaaagatgtttctactgatgttaaactgcagagtagttctgagggttgttcacttgtctcatctcataatgaacttaatacatctaaaaataatatggacaagac

SEQ ID NO: 93687 - DNA, 167 bp, Glycine max
gtctcaaatcattctagtcctcatcttctgcattgtggtgaaccatgtaatgttgtaaatgctggttctttagatgccaatgataaaatcaaggataactcattattacatgcacataacttttgcaatgaatattctgataaattgatcagcaccagctcttatgg

SEQ ID NO: 93688 - DNA, 149 bp, Glycine max
gtgcggcgagtccttcactctgctctgcccctttagcctacacctcccttcatcatggctgaactaaccgaggaagcttttctgaagcatccataagtgtttctcagcacgatgaagactggatagggtaagacacctggagtaggtgg

SEQ ID NO: 93689 - DNA, 291 bp, Glycine max
cggctcgaggtcacagtctcttctctctctctctctctctcttctatgtttcaactctcaatgctccgagtcactcgctattcccactagtagcacccaaacaaaacccaataccacacgcaataacagacaaacatgcggtgttgcattccgacgttgttggccgtaatcaccgtactgttgtcggcggtgcacggcgttttccttcctctggagcggacattcctccgacgagccaccgcgtggaggtggcggcgctgagggcccgcgatagagcccgccatcccgcat

SEQ ID NO: 93690 - DNA, 170 bp, Glycine max
cattcttgctgctagaattaatattccttcatccaatattttgtactggatgaatgtgtttgtctgtggtggtgttgctgagctatttaatttgatttagatatgtggaggtgaaactctactgcttggttaaatatgccgactttagagctcaagcatattttaacaga

SEQ ID NO: 93691 - DNA, 281 bp, Glycine max
ctcacaatcacatcgccaccgattcacctctctctcggcgcatagttcgtgccttcctctacttcctcaactctggtattcctcttctcctcattcattcctcaatatgcaacactacccaattgaattgcctccgcaaaatttcatctttgtctcgtgtttatgctttgggagtcattttatgaactgggtcgatttgttttttcgtgattaattaggttcgagttgccaattgtcgttttaatctgctagtatgtgtcagggttgagaaagtgttgttt

SEQ ID NO: 93692 - DNA, 284 bp, Glycine max
ctgaaatggctgatacttgaactgaacaagaaaggagaagctggaggagtgaggttggaagaaatgctggaagagatagaaagaggcagagaagagaaggttgatcagaatgagaggggatggaagccttctttggagagcatcttggaggctcctgaattgcttgagatggacaccacatgattaatgatcattttcttaattactacttttcatcttaattattttcatcccctgttttgtagtctatagaccttttttggaatgatctacgttttaaatct

SEQ ID NO: 93693 - DNA, 277 bp, Glycine max
gggaaattgacagaggcagacttgagatttttatttgttacctaagcaggcttgttatctcgaccagaaatttctcgatgcttctggtcattcattttgcagaacaatattttctatataaataaaaaatattgttctgcaaaatgaatgaccagaagcatcttttttatttatatagaaaaattgcattagctgtaaattattggaccaccctagttgccacagcccaagaaacacagcactgtactgttgaaaagtggattttcagctcaggttt

SEQ ID NO: 93694 - DNA, 131 bp, Glycine max
ggtagttgtagagtagtgaaatcagattccaaaagtaacttcgggatttatggcaatgtaaatcgtttttattttcctcggtgacatgacagtggacccatcagccaatgttgtctatcttaatctgatac

SEQ ID NO: 93695 - DNA, 284 bp, Glycine max
cataaagtagatcatcactgtccaaggctgcacatttaaactttaaaagggaagacagacactaaagaagcatgtgaaacggaagtgcaagcaacacacagacacacaaaagcaggggaggatgcagaacgcctcctgcgtcgcactgaaaaacgggcatttgctgcatttaagagagctgcaagtttagcagattcttcacctgcatcagtaccactggcatttcgggttgagccaaagcccaaaagtgggatcaggcagcaagacttgctgaagaagttgtt

SEQ ID NO: 93696 - DNA, 284 bp, Glycine max
gtgatcttcaactttaccctgtttctgttaaaacccaaactggggagaagcttgagcttcagttgaatcctggagactctgtcatggatgttagacagttcctccttgatgctcctgagacatgttttattacatgctatgatttacttttgcatacgaaggatggatccactcatcacctggaagattataatgaaatttctgaagtagctgatattactactggtggctgctccttggaaatggttcctgcattttatgatgatcgatctataagggcccat

SEQ ID NO: 93697 - DNA, 267 bp, Glycine max
atcacttaccgttgtatgtaactgcccttcagttagctcaccgtgacatatctgtaacagttgtatgtgatatatgaaagtggtgattgtgtttggtggagattagtgactatcatatttttaagttttgagatttcaaactttttgggtgagtcttgaagaatatatacatgcatatcaaatgtaaggcacacaatatggattgcaagtcatggctcaaagttgtattgctgtttagaagtagaaaaaaaaaaaaaaagggcggcc

SEQ ID NO: 93698 - DNA, 272 bp, Glycine max
gctttctgaaggagattccagggctttatcagcttcccactgaggcttcagtggtgaaggctgctgctggttgggctcactgtgcttcagttaatgggagctaatggaatttcagacattaaacaggaagcccacaaagctcaaacacgagcagtggatcagattctcatcatgacaacaagaaagtgggagatgaagtattgaagcgaaggaagatcactttttctagacaggattctgacagccaagcatctggagatgaattctttact

SEQ ID NO: 93699 - DNA, 268 bp, Glycine max
  unsure (1)..(268): unsure at all n locations
caaagatagatagagagatgggatttgtaggagctttgatgatcattattgcctcaatgatagtgtgttgttcctcagctttggactgatcgggagtcatttacgtgggtggaaaactgcagtgccaggactgcaccaagggctggaacgaatgggtanatggtggcaaccctatgaaaggagttaaagtgtccctaacatgcatggacaagagaagtagggttgtgtattacacgagtgatacaacagatgagttggggcagtacga

SEQ ID NO: 93700 - DNA, 254 bp, Glycine max
tagattttctcattgtgggctctcagtcctttaaggttgggtggtctgaactttacaactgatgatgttggcaatgttcttgcaatatcaggtcttgctattctagtcttccagcttaccctgtaccgattggtgcaaaaagcttgtggacctgttgctctagttcgtatagcaggggtgttatccatacctctcttgcaatgttatcccctcatgacaatgttatcaggcttcacactggacatagtgatcaa

SEQ ID NO: 93701 - DNA, 243 bp, Glycine max
gattttcaggcggtgaattgtcgatcaagaggtttcgattgacattgctcgtaattttggtattgcaattaggagtgcggtgttgattgcaaaggtgcactgcatgttcgattgttgaggacagggggtcctctgttccgaggattcccgtcgttggttgttcagattcgtggctctgttgttcgaagtttaagagttgctctgaatttcaggtgttgaattttgttggggaaatgtttgctt

SEQ ID NO: 93702 - DNA, 249 bp, Glycine max
ctcaccccacttactattattattgtacaacacaaccaggtccctcaatgctttttagagagagaaagagtaataataataaagtggaagacaaagaattaggagagtgaaacaagaagaagaagaagaagaagaagaagaagaagaattgagaagatggtgtttgaggaaactgagctgaggctgggactgggactatgtctccctggaaatggaaccacggcaacaactgaagctgctgctgcggaa

SEQ ID NO: 93703 - DNA, 251 bp, Glycine max
tctcgagccgattcggctcgagggaaactgttttataatgcagttaccgttaaatgctgcagacctttccctaagaaactggacacaccaagaaaaagtgagattgtattcattgctccaactggagacgagatcagtaccaaaaaacaattggagcagtacctaaaggcacatcctggcaatcctgtcatttcagagtttgactggggaactggtgagacccctaggcgatcagcaaggatcagtgagaa

SEQ ID NO: 93704 - DNA, 253 bp, Glycine max
ctctgcaaaccgttcttggcagtgagaaagatgctcaaatgtgtatatatgatgcttcatggaacactcacttcggtttttgttgtgacattgatgaagaaatatcctcccagctggccagtttacctgaggtcttgttggttaggcctgacctggatttcaactctttgaaaaaagactatagtttatcaagtggcgaggcaggccacctatcaggattacgaactagaactaatatgttgttccctgctgg

SEQ ID NO: 93705 - DNA, 100 bp, Glycine max
ctttaatttcttaatcaataggtgttagttagcaagactcttaactatatattaaccacatcaaaacatatagattcatgcactatctgttggtctgcac

SEQ ID NO: 93706 - DNA, 244 bp, Glycine max
tgagaacgaacttgctttatgtgtcaaagatttgaactctccgagcttccatccttccttggtttctctctgggtcacggattcatttgagacaaaggatgcggaaagagatcttttggccaaactacttgtcaaccttgtgaaatctcagcatggaaccttgaatcaagttcagctcattaaagggtttgaatctgctctcagtacattggaggatgctgttaatgatgctcccagagcagca

SEQ ID NO: 93707 - DNA, 244 bp, Glycine max
ctcccttcactgctttttaggttcctgaaatcccctagtacttttcttgttcaaaacagctttttccttatccaaaaaacaaacagcaacacagatggctaaggagcaaatgaagcctattgccactcttcttttggggctgaacttctgcatgtatgccatagttttgggcattggtggatgggccatgaacagagcaatagatcatggttttattataggtccagaattaacactaccagca

SEQ ID NO: 93708 - DNA, 271 bp, Glycine max
caattttccacaaaagcccatattatgtctcatgtttaaatcattaagcaaattgaattttacacaaccaattgcatgtggatatcatatgaaaaacctcaactttagttaatgggtttcgtttaaatggttcatttttggggagtgctttgctggagcatgataattgtgctcttgcatattgaattgaattgaattatcttgtggctgatttatttatgaatttattgtctattttgtgttgctgtatgattcaactgtctgaggagaa

SEQ ID NO: 93709 - DNA, 139 bp, Glycine max
ggtatcttgaatgagatagttataataaaaatattgtatttaaatggaaacggtttaatgaacatgacatatgttgtagagggcatttgctctcattggtaaatgtttctgattaaaggttccagcacattgtgatgac

SEQ ID NO: 93710 - DNA, 247 bp, Glycine max
ctggtcctttcttttggcttgaacggactccatccatccatccatcggtttgcaacttcatcccatccatccagaaacagaagtactttggcccctttcagtctctctctactctaaacgctacacactacactttgtacctttctttttctttgcttgctattctacaccgtgtctttactcttgttcttgttgcagcttggtggttgcattgaatcggagaggattggatggaggaagcatgtga

SEQ ID NO: 93711 - DNA, 191 bp, Glycine max
gaaacccagtgggaaggtatcgtggaaaacgaatgagaatagactactttctagtttcagagaagctaacagacaggattgctgcatgtgaaatgcgtggacatgggatagagtcagaaggtttctatggaagtgatcattgtccagttaccttggagctctctcctagttctaactctcagaatgaggat

SEQ ID NO: 93712 - DNA, 256 bp, Glycine max
cacatacataccttgtcatttctcccttctcccttctctcttctctctctctctctctctatctttctctttgccctcttctctcaatctcaaatctctgctctgcaactactccaaattgattgaatgctccaaactccatccacacacaccttcaaaactcttattaattaccctcacctagcaaccagttcgtagctcctccctcccggcctccacaaaactcaccacacactctcttccaatcttcaaaatt

SEQ ID NO: 93713 - DNA, 261 bp, Glycine max
gaaaataaaagacaaacccgctaacggctttgcactgagcgattcacgaaacccttcgatcaaaggttggaatcgaaatgcagaagtcggcattgccactgagcgacgcgaatgcgaacaagaagagggaggaattgcgccgcaaggcaacgttggtgaagcttctgagatggcattttgggtaccccgatttcagggacatgcaattggacgctattcaagctgtgctctcagggaaagattgtctttgtcttatgccaa

SEQ ID NO: 93714 - DNA, 254 bp, Glycine max
cagacattcacgataattaaaagtagtgacttggatgaggttcaaactaccccattattccttggaacaacatggggcgatccaattttctcaacgaatcaagctcgcacttggaagtttgttcagtgtcgacgagttattacattattactctaccgtttgtgccaatttattattgacgcccatgtactcaatttgggaaaagcagtgggaaattataatggtacaatttgctccatatactggtgcaaatt

SEQ ID NO: 93715 - DNA, 251 bp, Glycine max
ttttagagggctgctcctcctccatgctttcctcccttttaacctcaagaatgttttttgaactttttagtcgtccatgctttaactctgaaatgctgattttgtaagaatgataattgggttcctcttcctcactgtcctctctacacccattattgtcactgttctcttccgccttcttgtctctgttgaccgagttttccccaccatccgaaagcctctttcctttcttgaattcaagaagtaattcc

SEQ ID NO: 93716 - DNA, 112 bp, Glycine max
tttagcatctgatctcactggttttcctattccattctgtgtcttttaagtgttttgagtccatgcactttagaaatagctagatcaaaagggcctggtccgaaatggtttt

SEQ ID NO: 93717 - DNA, 245 bp, Glycine max
gcagatgatgtcaatgggtgctggattttgtatgccgttcatgatgctacctaatgctgctcatcatatgatgaacacaccccatttacatcagttaatgggacttggtatggggttcaggccaggcacagccatgccttgtagcctccctcagttccctattacacctttgcatggtatcactgacaacagagttcacatgtttggtttccctaaccaagttccacccatgccaatttctcatg

SEQ ID NO: 93718 - DNA, 241 bp, Glycine max
ctcaagttcaatgtgatgaggcttctctgaccaagaagaggtagtggtgtgagccacagtgattcagacattgaaagctcaactcctacctaaaccccctccatgatgatgatgccaataggcctcccaaggagtagttccatgcttcttgatgttgatgcattatgctgagcttgtgatgaggaatgttgagtatgacttgttgggcatgacgttagtgtcatggagaagaggtactgtg

SEQ ID NO: 93719 - DNA, 262 bp, Glycine max
atgatggtggaaatggcaattggttagatggcagagtcacctagagctaactgatcccctttgctttagtctcagtagtggaagaactcggttgaccagtgaccactcccagcagcaacagcagcattggattactttggagttagacagagatatttttcttccactacgatggaaaaatggctaagtggttagggccacacaggaacaacactacttactctcattgaaggtgttcttgctgcaaacattttgattgggg

SEQ ID NO: 93720 - DNA, 264 bp, Glycine max
tacgagctgtccatgaagctaactggatgaatgggatggagacagtatctatgactcgtggtttgatcctgtagtatcctccttgcctggacttattcctgatggttttatctatcttagggcaagtcctgatacttgccataagagaatgatgttaagaacaggcagaagaaggtggagtcagccttgactatctccgtgaccttcatgaaagcacgaaagctggttatttccctcccaaagtggtaaccatggagtattatc

SEQ ID NO: 93721 - DNA, 257 bp, Glycine max
tgaaaaccaaagtgcttctctcctctgtctttttctctctcttgctatccttttggctagtgacgatgctgcaagtgcaatccaagaagcgcagtgccaagccaccatgtttcaacattcaacagaagcctttttccttccacttttctctttggaattggtctctgcttaccaggcagaggagcagcaagtgtagatgggagaggccaagcatatgggacacctacactagacagcatactgaaaagattgggatc

SEQ ID NO: 93722 - DNA, 266 bp, Glycine max
tttagcagtgttacttagacactcaaatgaacataatttatttgctcattagatcgtggagcccctttgcttgttcttagcaaggcatgttgttcgacatagacttgttcaagtactcagcttccttacattaccttgctctatgcataattggctattgacatttttggtcattgcattctcattggcatcgaacatctgattaaatttgattgtcttttctatttttgcactgtggattattttctggttttggcaagcagaca

SEQ ID NO: 93723 - DNA, 261 bp, Glycine max
  unsure (1)..(261): unsure at all n locations
tctaaatgcaggttgcagnacttaattcaaggttgatttatggccaaatccactcacttatttcaacaacgtaagttaaacttttcactttttgtatcttctctttcatgaatagctgttctactttcagattgcacgtatttatcccatttattttttccattgtgtttctaatgctaattgactctggaacaggagcttgatgaagagatgttgaagctgatgatgaggtaattgaagttccatttttcttacaaaaag

SEQ ID NO: 93724 - DNA, 269 bp, Glycine max
cttaatttctctctgtctcgtttacacatctctccaacctttcactttcgtttctcagttttattcgaatccctgctctcaatctcctttccaaatccgccagcgttgaggttgcacagcaaacaccaacaacagttccagaaaatgaaacaaccgaggtaagcaagatccagaacaaccccagtcactgagctctgcacagaacaaccagcagctgggttcctgcaacagaacaaccaccgctgaggctctgccccagaatcaaccac

SEQ ID NO: 93725 - DNA, 259 bp, Glycine max
gcagcctggaggggctttacaagatgttctccatttgcacgatgtactcgctagagtttctctagcgaagttatgttgtacaatatcaagggctagagtttagatgagagatcagatattagatctcagttcaattcagtgctctatcaacttctattggaccagtgaaagagtctgtttgaggcaattttgtgtgtataggaaatatgataacactgagaggactgaggagcgtgcagctgggtggtatcgtttgaca

SEQ ID NO: 93726 - DNA, 257 bp, Glycine max
cgctcgagcacgggcaaaagagcacgccccagtcccagggagacgcttcccaagtcacctccgattcattcactttgctccgttttgcggatgaaatgaagaatgcaaagagaataggcgcgttaaggagttcatggtgggcgaacagcgaaccactttttctccgccttcgacaaatcatgagcctaattcgatttctcggtgcttggaccccactggagagaattcccgacagctcagaaacaagaagcggcaaa

SEQ ID NO: 93727 - DNA, 248 bp, Glycine max
aaaatttagaattgattatggtgagaagagataagagtgtatgaacagggaagtaaagaaggaccagtacaaccacaactgccaggttcaggggttccttggagtagcattaaagacactgttccaatcttccctcacacatcaccacccaatgcaattcttgaaaaaccatgcaacaacaaaagaaaagaaagctaactacttctttttataagaggaaagctgcattgatgtcttgatgactttta

SEQ ID NO: 93728 - DNA, 270 bp, Glycine max
gctcgagtacatatagtccttcctacatatagtggttttaaatatgtcacataatgatttctcctagaaagttacaattatcaaagagttttaaaactgaattgttagtttctagtgacttatccaattttcagtgggataaatgtcatcgagaaagttttgggtacttatagtttatagtttagtgtcttgatcacagattccaaaacaatacatttcttttattcatggtaattaattggtagaagtgaagttctatttccaaaatga

SEQ ID NO: 93729 - DNA, 150 bp, Glycine max
atttcatgcaaaagacatacggtggagtcgatgactaccgacgccgcagcacattattagagcccatagcataatggtgcaatgaagaatcaatatgatattgtctctaataatgtgcttgcagcttcagtagtcatcaactcgaccgta

SEQ ID NO: 93730 - DNA, 241 bp, Glycine max
gtacactggggatccggtttgctaaacgtgccaacgatcccgctagccaaaaaccgatgcagcatcctaagcatcaacgattggcacaaaacatcaacgatttcttctccccagaggttgtgattgagttgttcaaggtaatggctaaactgcgtattgtggcggcaaatcgaatactggtggacacttatttcgatgctcgatgttagagcagtgcctttggtgaagaggtgttttgtgt

SEQ ID NO: 93731 - DNA, 205 bp, Glycine max
tgacttgtattgagctagtgctcataggatccgaaactcgtggatcggacactgattattccttccctcaatcataatggatatagtttcaaatcttctcagtaatctgtcatgggaataataacatattgggggtaacatgactacaaccgataaacacatctaggctcgtgcagtttgttagcgaagatgtcaggaatcatat

SEQ ID NO: 93732 - DNA, 199 bp, Glycine max
ctcttcttcatttcaataacacatatccattcacaacaaccaggaacacaaccaacaaagacaaaagaaataacttttccgattcaaatatcggaaaccctgagaatctccctcgcaaggctactgtacaatccatcattctgcaattaaaaggaatagtggcagttgtaggattgcggcttttcagcgtacgttgtag

SEQ ID NO: 93733 - DNA, 165 bp, Glycine max
gcaagctagctaggttgaaaatagtttggttttgtagtaagtgaggtgaggtgccaaaatggtgaagataactcttggtatttcgatgatctttgtgtgctccttaagctattgaagccagaccgattcggcgtggtgtacacgtaacgctaaagtcactgacac

SEQ ID NO: 93734 - DNA, 221 bp, Glycine max
ctttcattcaccgactccttttggttgctacagagacagggagacaagacagagtagtacagattactaccaatggctaccaaggtttacattgtgtaagacattcaaactttcctctttttttgtcctactttgatggtttagtcttaattactttactattgtatttgtatagttcagcgatttataaatcctcgtatcctgggtctgcttaattttcc

SEQ ID NO: 93735 - DNA, 239 bp, Glycine max
agtttatctaaaaatggataataaatatgattcaatgagtaacactgcataagaaatacttcaataactcaatgtaatcaaatttattatccatttctagtttatctaaaaaaaaaaaaaaaaaaaaaggaaaaaaaaaaagggggggccgcccgttgttgggccccgggactccgggtttattccggggcgggcacctgggggggtccaggtttcccccaagggggcgcgtttaaagg

SEQ ID NO: 93736 - DNA, 180 bp, Glycine max
ctacaatccaacgccgcttaggcaggatgctatcgatagttgtcaccaggatacgcacactgtaattatatgtactagaccttgaatatcaatcgcccaaaagttcagaactcacttcaggcaaacgtaacagggataccttgttcatggtgaggacacgctgctgcagaactggtccat

SEQ ID NO: 93737 - DNA, 120 bp, Glycine max
gctagtgactacctatccatctcctgctcgagacaatgatgctgcacccaaaagggtaccccacacaaacatgaccagcactggagtgaactcccatcttactgatcacccagttgttgg

SEQ ID NO: 93738 - DNA, 250 bp, Glycine max
attcatattagtgttagtaactagcatgatatcatgatccaagcaaccaactgcatccacagcatcaattcccaaaccttgtacttcttcactttttctgtatccagaaacacttgaccttgtcttatatacaacttcactgcttcaaagtaacactaatactaatagtcacacattcattctcaacaagtttgcttccacttttgtaactacaatggcttctaacagcatcattcaatgcatcccttct

SEQ ID NO: 93739 - DNA, 258 bp, Glycine max
tcttcctctccttttcgatggcaaagggttgctccaacaacacttatgaagaggctagaaaacaaagacttgaagaaaacaaaaagaggtttgaggatttgggaatttcgaggatttcaaaaaacttgactgaaatcgcaagttctgcaaagaagaagctgcgtcatgttcctaaacagaaaacaaagaagacaaatgttgaagtggaacctaggcgatcttctcgtgtgcgaaacccagttcgttcataccgtgaag

SEQ ID NO: 93740 - DNA, 251 bp, Glycine max
atgtttttgaataaaatagattcatttgtcttgatagaagacatcattgatggggaatcgagcacttttcagtctgttattgaaagagccacccttgctgctgctattcttccctgcaaagatgttcctgtggttttcacaatcaagagccatgatattccaagttcaatggaattagctcaatttactgaggcagtatccaaatatcttgaagcagtttctcattttacaaagagaatagttgcattcta

SEQ ID NO: 93741 - DNA, 252 bp, Glycine max
cacacacagctctttccctctttttttcagagagagaaaatgcagagttaaccaccttaaccttaattgcttctccaaaccttaatcctttttttttttaattttttatttttttgaggatacttggagctaccacgactagttttttttttttttaacccttgtttcttttttggaaaggttgttttgtggggataaaatttggccatttgggtatcgagtcggtgtagagttttttcaagaggtggtaag

SEQ ID NO: 93742 - DNA, 247 bp, Glycine max
  unsure (1)..(247): unsure at all n locations
cgttccaccagttgtagttcacataaactgtgcaatgggaatgtgaactctgatgagggaagatctcactacctacaaaatgaagtgaagtttagtaaagtcttgaagagcaaatggggaactgatccattgtttttaggctcatacagttatgttgcagtaggatcaagtggtgatgatttagatataatggcagagccattgccanaagataacaacagttgtcaagcttcttctgcagcttcat

SEQ ID NO: 93743 - DNA, 242 bp, Glycine max
ctcggagttctgctcgagctgctcgactttataaactgattagtaaccccatacacatacgcatctagattcttccgcgtggtgtgaatatgcgttccgcacacaccactctccccgtcttaattcgacgtttcctcactctttcactctcttgtgtcagctgcgatatgcaccctcaatttagccagattaacatctctgttacatggaggtgaaacaaatttgttgtcgagaggaatata

SEQ ID NO: 93744 - DNA, 259 bp, Glycine max
  unsure (1)..(259): unsure at all n locations
ctaaaatcacacccactctcttttctcccttcacacggaaccgcgacgctgtcgagcgacacancgaagacgagctcctccagatggcgctgaaggagcaagcgcacgctgatgtcaactacggcggcaaatcctgctccaattcccgaaagccggtggcaaactacgtccagccgctgaagaaacccgctcctccgccgaaacagtcgcagggcaaaggcagagtcaccgacgacgacgacgattccgaaatcgagat

SEQ ID NO: 93745 - DNA, 245 bp, Glycine max
atttatctttggcagttcacttttaacataattttttcttctaattacattattttattgatggtacattgttggtataaatgtcctgtggtatgtctccttcgctgttgtctatttatagcataaatctatctgggagcagggagcttcagtacccattgctggccttcgatgattacccttccttccttgatgtcatcttcatgttattttacctataacaattgaagcattttgcacatctc

SEQ ID NO: 93746 - DNA, 162 bp, Glycine max
catcataccgtcacgataaactcccgaattgactacacactcacccgtttcctgtttcgcttctctcctcctacatcgtgtcccgttcttcgctctactcaacttccgtctttggcttttctataattcttcgtttcccgttttcacgattttctgttgtgt

SEQ ID NO: 93747 - DNA, 196 bp, Glycine max
caagaaatatgtttatttccgacagatttttcccacagaaaaatttccataagaatttttcaaaaaaatgacggatcatacagacggtcaattatttcatcggaaagttcacatttctaacgaattataccgatggaatggggatcgttggaaaccaaaattccccaaaacataagacgataaccctagccatctg

SEQ ID NO: 93748 - DNA, 266 bp, Glycine max
aaaatcccgagagatttgactgaggcgtggttatcaggagcgggattatccatagtggcagctttggttatgatgtttttacttggaatggtcctcatactcttatatgttaaattctcctttcggattcgcatttctctttctccaccgcaacacacccaccttcaggattttggtggttgttttgacagtatttgagagagttggtgatacttttatatcatggaaaatggactttaggatattgtcatgatgcaatttaatga

SEQ ID NO: 93749 - DNA, 226 bp, Glycine max
ctccttattctttctgtgatttaagaaagcagaggagaagggggaacaaagagaagctagcaagcatggattgttgtgtgtgtacaactatgccattgatattgaggcctccgaggaatacaatatgtggggcttgttatgaggagttaggagcataatcaacatgatgagcaatgtcgaaagtgagaaagtaaaagcaatggctattccaaatccaaacagttct

SEQ ID NO: 93750 - DNA, 263 bp, Glycine max
atttgacaaaatgataggcagttaaaatatgcatatgcttcagaaaacgcaggcgagcattcatccaaacactcgaatcgtctctagtacctcaatcaagcgttgttcatgaactccctcaagttacagacactactttctggctttgttctcgtgcaatcccttgagaaaagtttctgttctgtgcttggtgacgcatgcgcactttttcatttgcatttaagaaggggttttgggaaatggggaacctttgttttatgaga

SEQ ID NO: 93751 - DNA, 276 bp, Glycine max
attttctggttatctcccttacactttgcaacctctgatttcatcgtacgcaattattcatggcagattggctctctgatttcagccaggtcaattcaattacagaatccactgacatgttgcacaatgggaatacatcaaatctgaacatgatgtccagctcagcaggaaagcctttgcaagcagatggccataccattgatgatggatttgccccgccacagacatacaaacagttgcctgatacaacaattaaggcgaatccaaagttatcac

SEQ ID NO: 93752 - DNA, 263 bp, Glycine max
ctcgagccggccttatgtaaattagtttcaatgcataatggttttcaagtcgagagattatccacggctttcaaatttacattttcatctaggatgcagaattcaattaacattttcactcagcattttaatatactataagaagctttacatattttgtcatggttcttgtctgtttgggcagaattttggaaggttctcatgcctcttttgtggagacagtaccattcaagaccatagctgcatttacagccttacagtta

SEQ ID NO: 93753 - DNA, 170 bp, Glycine max
caactacctctcccctagaccacagtttcttcactacaaaccgaaatctcgaatggaactctgcagggaaagggaattggatgacagcttcatatctggaagcttttcagatacagaagtcactgaggattcccagtctgaagtctcacagaaggaatcggaggatgttt

SEQ ID NO: 93754 - DNA, 162 bp, Glycine max
atcaggtttgcctgagattgtgcaaatggctcatgctaatgctttgacgggttgttcttcatcgatagtgtctaattttggaggagttcatgcgggttctaattcgagcagtgcaaatctttcactagggaaaagaggggaagcatgtggaagtactgtagt

SEQ ID NO: 93755 - DNA, 166 bp, Glycine max
caatacaaagaaacgagataaaaaaaagaaacaaaaaaaaaactccctaaaaaaccaactcattaaaatatccaattcaatatccgaaaacagaggaaacatgtctctgtttgcacccctgttgttgaaccagagggaccccttcgaccatttccgggccttactg

SEQ ID NO: 93756 - DNA, 165 bp, Glycine max
caccaactctctctctctcacactgtctcccggactgcaatggagttgcataagcagaagaagcgattcgtctcccgatgacctaagcacttctcttcgacgtaaacctgactaatgacgcgaagaaggaatcgacatacgacgcctccgtgcgtcgactcaaga

SEQ ID NO: 93757 - DNA, 159 bp, Glycine max
gagcagctcgagccgattcggctcgagctcgagccgtgtctatgtctttcttactctcggtctctcagggctttctctctcttctctatttctaaggtcgaagcaagaaatggactctaacagcgtcgtttcttggccgaggttgccggaaaacatcga

SEQ ID NO: 93758 - DNA, 164 bp, Glycine max
caatttcactccctcctacgccatcaatattcctcgccaggttaatgtttggaggtgatgccctcggggatttgaacctaaaaatggtagaggttgctagacaggttggagctgcatcaaaatttactcaaaaagaaggatttgtgatactacctattgaacct

SEQ ID NO: 93759 - DNA, 163 bp, Glycine max
catacggttggagatatccttgttgcagatgggaatttctgttgaccctgcacgtatggatccaatggctcgtagaaaatcggagctgggtgagattcgaacactatatgcgtgcgccattgtctgtccgctcaagatcgtgaatgacgactcctatgtgcta

SEQ ID NO: 93760 - DNA, 150 bp, Glycine max
tcatgatttaagccataatagacacacagagagagatacagacagcatgagaaaatgaatgaatgatctccatcatcattacacttcccctcgagatgtgccaatcctatctctatggatttcaataccccaatttctatcgcagacgaa

SEQ ID NO: 93761 - DNA, 156 bp, Glycine max
agaatatagtagttgtgtgattcttttctgtcattaaaaccaaattgatgctcataatattgtgaagagattgaggtgggacaagagtcaatatacttttttttgatttagggttctttagagctagacaaagactccactgagtttggaatggga

SEQ ID NO: 93762 - DNA, 161 bp, Glycine max
gcagcaatgaaaaccatgcgtccctccttcctctgtcttataattcttgtgacccttatgcgctggtaccattgaaagtgtcataccaaacgtaggagacaagatcattatagctgcagccttcaataggtgagatgttccttctggctgcctattgtgaa

SEQ ID NO: 93763 - DNA, 157 bp, Glycine max
gatcaaggaggatgaaagatccataaaggatcagaacaagaacacgttagagcacaaagttttgcttgctttgttaaatgaggcactttccattgttcttaggtcacatttgacgttgtctagattcagaaggaaactaagcaattcctccatgcag

SEQ ID NO: 93764 - DNA, 164 bp, Glycine max
gtcgacgccactgaatcactcaagttttatgctgcagacagcttgatctcctacgcgagtgtcggcagatcgtggcgattgtttccgaagtagcgaacagagttttaagaagaaagggatgcacgctcctgcgtggaggaagcgcgattacatgctcgcgaagt

SEQ ID NO: 93765 - DNA, 101 bp, Glycine max
ctatcttctgcgagactctggtactacgtatcagaaatgtttccagacgggtagtaggagggaaagagctcggagaccatcatggttaaaacctagaatga

SEQ ID NO: 93766 - DNA, 278 bp, Glycine max
  unsure (1)..(278): unsure at all n locations
ctccctcagaaaaattccttacacaactatatccattttcaggcagtgtaacttggattttctattttcttcaccatcagaatggctcatacaatgctcatctaaaactcatgatnatcatcatggctttcatgccctcacctcttctttcatcatattcacaagaacctattcccaaagttcccacactctcatcttcaccagcaacattaacggatcctcctccatctccctcttcactatctcctttccaagagctgtccccagacattgctcca

SEQ ID NO: 93767 - DNA, 281 bp, Glycine max
ggagttccagtggcaaagactttccctgttcttgagggtaggggctactaggatagtctttcgactagtagcatcaaatagtgagacttcctcgagcattcaacaaataaggccactgatacaattgatgttgcatatttggttttgaggccattaccatctaaagatggtgttgctatcagaagacttctcatgactgctgatggagcttcattaatcaaagcaatggtctcgaaggagggaaagtttttccgccaacaactctgcaagatcatagttga

SEQ ID NO: 93768 - DNA, 281 bp, Glycine max
ttacctttcccttgactattgttttcgcagttctaaaacgataatttgatcactactgacgtaatagctagctagctaatcatggaaatcttgcaagccacagcagacaagatggagattaatcccaagatatgtacaacattattctttgttaatcatcggctcataacgttacaaacaatggttttccgttgggaggcagagtccagaatactacatcggatgatgagattgagactcacttaagaacaagacacaatgataccgtgtcggtggtacgt

SEQ ID NO: 93769 - DNA, 288 bp, Glycine max
gcttctctaggctttttaagttaattcaattgacatttcaaagtaggttatgcgctaaacagtgctttattattgcaatatgtctctgtaaactgggtttgacttttgaggttctcagtttatttatacaggtttgctctcctttttagtttgcttacgcttttttcttattgggtctttgcataaattttattaaatttatagtcaagtcccaacctaccaccataaattcttatatctccatgtaaacaacatcttgcctcctggacaaaatgtattgtatgcata

SEQ ID NO: 93770 - DNA, 275 bp, Glycine max
ccgaatctccctatcctccctgcttttcgattcgcagggcccacacacattgcacaacaacacatacaaaccaccaccaacctccgcaaccaccctccctccctccaccgccaacccgtatataaataccaccttttgaacccaaaaaccaaacactcgctataatcgcaatggccatggctcttcctcttcgcagactctcctccaccctcaacaaacctctcgccagcgctacttccatttatcatcgcatgtcctcctcgctctccgctcag

SEQ ID NO: 93771 - DNA, 272 bp, Glycine max
  unsure (1)..(272): unsure at all n locations
atggcattgaaccagtagaaagtccaatactgtctggaggaaaacctgggtgtcagatctacccacatctgaacatctttttaccttgaaggcgctgccatcagatctcccattgtctgtcaagtttgttgtctctcctctttctccatgctctgaaattttcttggagaatccaatcatataaaacaacgttggtattattcaagggtatacaaaattcatttnacaggatcatttggtttctcatacttacggaaactgttgttgaattc

SEQ ID NO: 93772 - DNA, 259 bp, Glycine max
gttggccatctagtatgagttttaagttgtaaatcgcatgaaacaatatcaaatttataaaacctttcaggaaatgtaaacacaggttaaaccaggttgagtattttagttggtccaaaggtgtttgaccctcaattatgttttgagactgaattataattggacaagtgtccaattaatggttaagctggttggactgcctagtcagcaattactctatcacttgaacatggaatattaagttgttatacatgccatc

SEQ ID NO: 93773 - DNA, 139 bp, Glycine max
taaagagatgtcattatattcagatcatcactgtggaaaaactcagataccttactgtgacatcacagatattagagagcactcgatgatagtagtttggtatgtaacaattttcggatattggtgcttattaaggtac

SEQ ID NO: 93774 - DNA, 147 bp, Glycine max
aaaaggctctctcacgcagtcgcagtgagtgaaaaggaaaaccctaattgcggtattctcagtgccttcgagagaaagaaaaaatggcacatgatcttgttctccgtgggaccatgcgcggccacaccgacgttatgccggaggttg

SEQ ID NO: 93775 - DNA, 252 bp, Glycine max
gttctagatcgcgagccgcgcccctttcctttttttttccctcctttttcgggttcggttactcagcactagagttacaaatgcattaggtggtggaagtccacaattggcacaagtgtctgtttctgctgctatgactcttgcagcatccggggccattctggtgagcccaatcatatttgcttgcaggcaggttgaaggttatgcatttagcaatgagctggacgtggtggattatttcacagaaatggt

SEQ ID NO: 93776 - DNA, 244 bp, Glycine max
cctcgctcgctcgctcctatcttcacatatctcaccaattctctcttctattcgtggtggtgactcacttgttgtttgagcaaagctgcgtgtgatcaattttcgtgttccttcttcgttcccagcttcaggcaccgagtgaggatgaattatcaactatatattagaatctgagacgttattctgaccgctgctgtggacttactttcacgaacaatcgaagatgctcgctgttgttgaagta

SEQ ID NO: 93777 - DNA, 200 bp, Glycine max
gcgagagtgaagaaatggagccagacttggcattggatttggatcagcttcggcacgtccacagcatcgccaaaagacctcgaacactctctcttctctcctccgaaattcgtagactccaaaagttatcgtcagaggacgcttcttcgccgattccggcgccgatatcggcaggaactaaagtggggcctcacctgcga

SEQ ID NO: 93778 - DNA, 238 bp, Glycine max
cttctcttcaattttacttctttagccttacaatgacttcttcagtcagacgcggactccactcttctttctgtgtgtattgcaacaacaaataatcagctagtgttttgtgatggccatggatgcaaaaggcataacttgggttggaaacatattccagaagtttgaggacatttatgtagacgtggaagacacaatgttggaggtataactttgtcatcatttatccttaacctaa

SEQ ID NO: 93779 - DNA, 213 bp, Glycine max
ctcaaactcacacccgtcgccgccgccgccgccgtcgccgcttgaccttaatctttcatccattcgcaatatcagatctttcgagctatcgtcagacataacttttctcattctgaatctccctcgcctagttatgattgtctctgcgcacttcatctagtgtgctttgtgtatgtatctcttcaaatactttggcattaggcttgtcagatt

SEQ ID NO: 93780 - DNA, 246 bp, Glycine max
ccatatgtaagaatgtaagttatgttaccacgaaatatctcaaagaaaataattttggctaacgtgtttccaattccataatgtttttggaataaaatttagcttttatgtatagacagtggaaaggtttttttcatttttgttctgtctaagtaaattagaaataaagtttaattcattgatggtgaagaaactttttaattataattgcatgtactatttttttactctttggaacaagggcca

SEQ ID NO: 93781 - DNA, 160 bp, Glycine max
cttaacaacagcacaaagcgggttactgtctgttcaagctatcatctctctctctctctcttagtgcctccttgccagaagttaacatgagacgagaaactttcctattcagatgtaaacttgataacgaggggcaccccgactagctctctgatcagat

SEQ ID NO: 93782 - DNA, 211 bp, Glycine max
catactactaccattctccaccacctccagtccaccaccacccttgcccccatcttcgcccccacccacaccctcatcctccaccacctcctaagaagccatactactatcattctccaccacctccagtccagccccactcttggcccgatcctctttcccactcacagcctcagccccatgcctaggctcatccagcggctggtcctcc

SEQ ID NO: 93783 - DNA, 188 bp, Glycine max
cgcttactctcattcacacattcacagttatactctctctctctttgtcgcttggatcactgatctcatctcaattctcatatatgtcgacatctgatacgtcagaagttgtggaaaggggtagccaagatgcgtcacacgcagtagatgatcaggcgggcgttgcctggtggattcattgtgaatgt

SEQ ID NO: 93784 - DNA, 237 bp, Glycine max
caagtttctgagagtcttactcgttttgtgtttgttctctctaatctcttggttcgcgttgcagattaaatgattttgtatctttggttctcttttaggtttgtacagattggaaatctcgggcttcaactgctatggtactttctgcgaatacttctcagcgcatggtatttcatatcagtcgtgggtaatttgtttgaaagctatttcatctcttgtggagtattaaagaaatac

SEQ ID NO: 93785 - DNA, 242 bp, Glycine max
tctgagatccacggcttaaaaaggagcaacatggcgttatactcatcagatgtctgcattctgtacttgcacacatgagttgttatgtctcaatacgcagtaggagtacttctagcagcacgacccatggcgacatggtgacgccatcttgcatagagactagttactgtgggcaacagcgaacgaggcgaacatactctgatcatgatatatctctccaccatgtagcaaccttacctaac

SEQ ID NO: 93786 - DNA, 151 bp, Glycine max
cttcttctcaaatgagaaaatgtggcttacgaaccatgctcttcaacatagtgccagattctcgttagcaactcgtgatgtacagtatcatgcctaacatgatactgtatctgaggtaggattatcgcatgtctattgtgattgggtgtag

SEQ ID NO: 93787 - DNA, 229 bp, Glycine max
ccaattctcactcctccaacaccaccaccacccattcctaacacagactctcccacagcgagtcagagaggagtaggttcgttcatcaagttcgaattttgaaccaccccttttgttccgcaatgtcgcgttcgccggggcagccggtttccgaggtggtcggcatacacgcccgcttcgccgatcggctccgcgacgcgctgacctgcgacgatggtagcaacaacaa

SEQ ID NO: 93788 - DNA, 235 bp, Glycine max
ggaaccaatctcttcaaactttgcaaccttttcacaatccaagcataagaattaagaaccttggaagtttgctgtttttttatttttatttttttaccaatgtctcacaccttgcaattttcatttgtttcaagtgcattcaattattcaatgaagatggagaagatgaagagagttaggcctcgtgggtttcaatttctatgctcttctgagcattccagtttcaaagatgaag

SEQ ID NO: 93789 - DNA, 244 bp, Glycine max
caagagagagagagttgggtatgaaatcacaactgaactgaaggcccatccgcggtgcttttattgaggacggttgcgtaggataacataacaggacagagattataccatgcttttcattaaaacctcatcaatacgccacactcccttttccaccgctggatgccatccaacgcactggatggaagcaaaacgatgtcggagagagtaattgacagcacgataaccgaggcgggacaggcga

SEQ ID NO: 93790 - DNA, 214 bp, Glycine max
ctcgagccgctcgagccgattcggctcgagtttgttaattatgctatttagtactcgtagttagcctttagtctgtagtgttgtgagttgtgacttctaccattgcttgctaatcatacaaaatggttgttctgccgatggcaagtcaatgttcaaagccataacatttgtacacaaacaatccacaagagttttcaaagctctaaggcaatgc

SEQ ID NO: 93791 - DNA, 245 bp, Glycine max
cttctggaacagccttcatacccatcaaatcataagtactactagtataataacggacattgattgtctaactgccactgtggctgacatagcgccagttagatcaaatttttctatgtcaataaccgtggaaaacaccaagttatatggatttggagggtggtttgatgtacattttcggggcagaagtgaggatccagctgaacacgagattgagttcactacagctcccaatgtagattatg

SEQ ID NO: 93792 - DNA, 252 bp, Glycine max
ttagaattgtaaaaaggaaaggggaaggaagcaaggcaaggaaggagagtggatcgattcctcagcagcaccagacatttataaaagctctttcccttccctcaaatcgctcatactcttccaatctttttttttttttttttttttttttcacttttcccccccgctaattaattgaaaccacaaaaaagataaaagaaggtttttcccattggatttgaaagggtttttgagggacctcagggttctccc

SEQ ID NO: 93793 - DNA, 168 bp, Glycine max
cccactctctcccaccaccttcagcaccaccagcaaagaagccgtactcactacactcaccacgcgctccttcaccatctccacaagcccgttctctctctacaacaaggtgctatgtttctacttctcttacagtggtgaaatttacctatatctcttccagtctct

SEQ ID NO: 93794 - DNA, 250 bp, Glycine max
cggctcgagacaggttcggataaactgaaccgtgtcagtgtgtcatcatcgactgctccaaatggccgaggtaattttgaatctaatcgtggaatccatgatgcctgatgggtaggaatcattgcagccaaaagacatcataccagttcctggtttccttgattgtcttagaagaacaaacagccttgcatatcttttggtggtgagttaggtctttcttgaatgtacccatgaaatcaggctatcaaca

SEQ ID NO: 93795 - DNA, 249 bp, Glycine max
atagtacttaaccctctcttcgccttctccgcatccacccacttcctgttgtatccctggcttcctgacattcttccttttctcaacaaggtttggggtgtttgtatggtttccttctgattgtataatcagtagaaagaaagaaaaaaatttgtcgacttttctgtgtagtgttgtggtgagagaaagttcagttttttatgataatggcgggttgttcttcaaattttgctgtggctggttgtgcca

SEQ ID NO: 93796 - DNA, 154 bp, Glycine max
ttttggacgtgtagatttttttgctggattacatcttttattggttgtttcaaactagaatacagaaatttgctagaaaagacaaacttattggtcttctctttcttttgaaatgtgagtcatatattgttcaacattgaaagagggtattccg

SEQ ID NO: 93797 - DNA, 245 bp, Glycine max
atttgccagaaatattatcattgacaggcagtcagggaattgaaaacatagcatgggataattccggggagcgattggctgtgtcttttaaaggtggagatgccatgtataggggtctgatcgccatatatgatacaagaagaactcctcttatatctacatcattaattggatttataagagggcctggtgacaagccaaaaccaatctcattttcatttcacgggaagtttaagcagggacca

SEQ ID NO: 93798 - DNA, 106 bp, Glycine max
ctcttctccctgaagaccttaaccaagtcctctgttcgtgttcctcgtttcacatggcttcccaaacccaaaagagacgtgaggatctactaataggctcaggagg

SEQ ID NO: 93799 - DNA, 172 bp, Glycine max
caaaaaattgccgcacctttcgtttttttttcttgatgttattcggtagaagctggtgacggagaattagagagattatccaatccagtatccattgatcccgagatctagcttcactctgcgaaacgatcaccgtttcatctccatctatctatcgctttcaaatctgtaa

SEQ ID NO: 93800 - DNA, 237 bp, Glycine max
gttactccctttcatcctttgggaatggcttccaataactaattgtgaatgccattagatgtggaacttgtgtgagcagtacatagagcatttctctgagattgaacagctatgccagattcaacagaaaccttttgctcacaaaaggatatctcaattacaggtagatggccaatattttttcaattcttttttaaatttatggtttaaatttgcatgtggccaaaaaagggtccg

SEQ ID NO: 93801 - DNA, 248 bp, Glycine max
agtttgaaacaactctcgtacaagaacactctgtgtaatatgattcttggatattagaaggtatcaatgtaatgtataaggagtgtcaatataatatatttcaaacaaacaaggagagttaatatagggataagaaaatggagggatgacaaggagaaaattggtaaaaccttaaggggtgttaggtataatttactcttgattgtaaaaattgctttctctttaacttatctgaatttcctgtgtat

SEQ ID NO: 93802 - DNA, 254 bp, Glycine max
tctgttatttcctgcaaataacaggaagactaaaagagttctagacatctgtttagtggaagttatctagcccatgaatgaaaagacgaaaaaagagaagattaggccgtactcattctctattctctaatttgaaccagccatcaaggccgtacgagaaagatattcaaggtgggaagatcacattccttttttcctcttccttctaataaatctttgtttcgagttttcctatgcctagcaaaatccttttt

SEQ ID NO: 93803 - DNA, 177 bp, Glycine max
gtcgttggtctgtaaaaggcactggttgaaagtggaagatttatttgaacctgacaagaagatttaaagaacattttaaaatttgaagagcttaggtttatttgactttataatgatttatgaattccaatttattcgaatgagttcaatgcaaaaaaaccaataaaaggggcgccc

SEQ ID NO: 93804 - DNA, 218 bp, Glycine max
caccccttcgccggactcatatcttgaaccggcgaagcctttcagaggtggaaaccgagaactccggggacacggttgacgagacacggtggcaaacggtccagacccgatacccctcttttcaagtcgaagatccagacgatccactcgcagacgaccggtacgtttccgtcgcggggtcccgtcgcgagaacgtgccggatcgccaagaagcaagc

SEQ ID NO: 93805 - DNA, 231 bp, Glycine max
gtttttagtttagctgtggatctatgtaatttctttgttgattggctttcatggctgagactatatgtattttaattatttcttagagttacgaactaattgtgcattagaatttgacctggatgatagatcgaagcatatttaattatagtaatatactatgcattaattttctgtcgtgtcggtgatttgtaatgctataagtttcaaataaaaaataatcagttgttg

SEQ ID NO: 93806 - DNA, 127 bp, Glycine max
gctgtgtcataactcgtaagaaaacaaagctcatcgaatcgaagtcctgcattttcactctcttccttgtcacttctcggcatgtacagagttgtcagcatcatcattcaggaaggcatctcaaggg

SEQ ID NO: 93807 - DNA, 264 bp, Glycine max
attcaccattttctccatcttcattcacttgcaagactcctccatagatatgctggtggtgaccctcttgcagttcgagttagctgttgcatctttctgattttacctgccactgcttttcccgagggcttgtgattgtcaactacatattcaattgcatttaagtaaggagttttgtcttgaaaggaccttatcttcgccgcagcagccatgaaaggaaagaacaggagaagtggtggtgctatccatatggagtacctcatt

SEQ ID NO: 93808 - DNA, 247 bp, Glycine max
cgcatgcatgcatgtttttattttattgtatttttaatttctcacttcccagctatattctgtgatttattgttgattaagttgctcgcaaatggcgtgatcactatggttgaggcatttttcctttttaatgggttttgcgttggttttgttattagcatagcgtttttgtgttgctggcaatatgtgaagtggacggttgttttgatttttactgtttgtgtgtctggcagtttggtttgtctgt

SEQ ID NO: 93809 - DNA, 230 bp, Glycine max
gtgtgatcttccttgaactaaccatcaaccttctcctactaccaataaccatgattgttctcctcatagctcaaactgtttgagacagcttcaacccaagcatctatgagatcatttgcacctgatatgcctccctttcatggatgcaaaccctgagccatggatgagaaacccactgtgggtgagcttgttgatgtgaaccagcagtggttagcttcaaaggagtagaa

SEQ ID NO: 93810 - DNA, 272 bp, Glycine max
ctccggcgccgtggccgaccccgccaccgaccacttgttcgccagctccccggttccggcgcatttctcgcacccggccgcgaggcgaattcggatcacttcctgccgttcgtgccggcgctccacccccatcagcagcagcacagatggcggcggcggcgcagtaccaccggcaggtgaggcatttcgggtccccgccgaacgggcacttcgagaacccgttcatgtctaggccgcatcttcagagactgggaggtggtggtggtggaggt

SEQ ID NO: 93811 - DNA, 145 bp, Glycine max
gttgcttgacaagttatacgctggaggagtaattcatattagcagccaaaactggagcaggctggatgtattcttcttcctcctttggagaatggatctctctccctctttctcgtcactagctctgtgcattcttctctcctct

SEQ ID NO: 93812 - DNA, 261 bp, Glycine max
cagaaatcaaggtctttgttttgattccttcgtgcttgcttctggaatctcaacaacaccttttgctctctcttggctggatcagtcgccgttactcaagctttttttttttgctgaagaaacataacatccaaccaagtgatggacaaggttgtggaggaggctgaaaaagtgaagaaggaatgggatgaaacatacaagaaaacgcaagagcacattgaggcaattgcagagtatggaaaaccaggaagagcaaaagag

SEQ ID NO: 93813 - DNA, 277 bp, Glycine max
cagaggactctgtcttcttataagaggggaggaaatgtgacaacagataatgttgaagagggtgagatcatcttagaggatgatgaatctttaaatgtaagcacagtgataaacatgcaaacacctgagcaacaaagacatgtctgaggatgctagagaaatctttagcaaatgacatagatcttgagaagaatttcatcgactcaaggcaaattgaagaaaagctaaaacaaaagcatggtttctttagaacaagagctaattctcatggaggaag

SEQ ID NO: 93814 - DNA, 265 bp, Glycine max
gagaaaacactccttgagctccacacacacaaaaacactgttgtgaaaaccatcctagccttgctaatgaacactgatcacatggcctcccaatttgctagtgaggtaagatgcatgaaactaatgcattgtgcagctcttatggagaaagaggaaaccgttgctcactgtctcatcgccaaaactatggctaccatcgattccaacccgaagaatggaacttcagagaacatcataataataacaaaaccatgggatgtgaaaa

SEQ ID NO: 93815 - DNA, 123 bp, Glycine max
ggctcgagcaaaaatagacatatttctcgaaactaattttgtggagctctgtcggtgaagagagaagcgaacattctcctctttccattcgcacgttcatctgcacttctggtacgcttattt

SEQ ID NO: 93816 - DNA, 268 bp, Glycine max
gtttattctatctcactttcctattacagtatctttacctcaatggcaccaagttctgcagtgccagatgaacaggttgttgttggagaggagattgagcatgtaagagtggtcactttgaacaggccaaggcaattaatgccatctcaccagaactggtttctcagctagcaacatatttggaaaagtgggcgaaggatgcgaaagcagaactagttattataaagggagctggtcgggctttttgtgctggaggcgatttgagagt

SEQ ID NO: 93817 - DNA, 263 bp, Glycine max
cttatccggaaaacataaacttcaattattcaccttttttcttcatcgttcgttcatgatctttctcttcagcctcgttttgattatgccgtagtgtttctcctttctataatcttcacactttttctccctcttcttccctccccattcatgcttcccttttaatactgttcaatttcctactctatgctgtccaatttggttatgtgctagctagtttcctcactgaattaatcacgctgcaataaagttaccaatctaca

SEQ ID NO: 93818 - DNA, 134 bp, Glycine max
ctaccaggtatccgtcatctttggtgcagcctacagtaccacatggtatttctagtggtgttttgggaaatgcaattgctggaaccagcaacataactactacttataaccctgttcaacccaactcttcattt

SEQ ID NO: 93819 - DNA, 153 bp, Glycine max
cgacaaccttgtgatcaagttttgaaggttcaaggtaccatgccgtgacatttggaattatgctgattaagttaatgcaagccgaggtttggagtacctcttgaaattagccatttagatgaatgactcattttgctttcagaatttattgat

SEQ ID NO: 93820 - DNA, 144 bp, Glycine max
cgactagggaacacattcctacccccacctaaaggtgagaacattgagaagagtgctagtgagtttttggttgagcaagtctcggaataatccggtggaagtatctgtgctagcacttggaccactaccaaatgttgctttggc

SEQ ID NO: 93821 - DNA, 228 bp, Glycine max
ctcgagccgctcgagccggcatattgcagcttcagtcttagctactcttgctggttaatactgttttaacttgaagctactgaaatcgaatttccctgcaataacaacacaaaaattaaggccagatggaatcttggatgcctttatattaactttcatcatcactgttatctcgttccatggaatgaattatagtccccatgcggcagatctcgactagaattttgg

SEQ ID NO: 93822 - DNA, 276 bp, Glycine max
aaaccctcccccttctccatgggacattcatcgtccaccaccgccgcgcctccgccagacctcaaccgccaccaaattcctcagatacatccaaacaccgattccgatttcaccgattacaccctccgtctctccctcaacgcacagccggaattactagacttcgtcccttccctattcaaccgattcgactcggtgacgaaactcgctctacgatgcgaccgaaagtgcgcgagcataaacgacgacgctttggttctgatctcttgcggtgca

SEQ ID NO: 93823 - DNA, 276 bp, Glycine max
ataacttgcgaatgcaactttcattttcccatttgctagaaatcaaggtcctatattttcattttacttcttgtaaactagaaactgagggtccttacaacggtctttggcactatttgtcataatttggatcaccaaagagggatcatctgcacttcaaaatttggcaagtttgtttgctccctggcccaatatttttctttgtaatacttggtctccttacctggatactgaaggagatcatgacaatgcaaatctaagtaaaacatttgatcg

SEQ ID NO: 93824 - DNA, 272 bp, Glycine max
ttgtaaacaaacaatactagtgattcccctatactaatcttattttccaatacctcaaatgaaggagtttgctgtcctgcagcctcaccacccatcaccagctccactttgatttttcctctgtccaattaaatgcaactaaaccgtttttggtatctatctattaccattagggtacgtaataattaacaactcggtaaaccgactcttttactataattttcttaatcattatcctgagagacaatgactagcacacctaaaaaaggcac

SEQ ID NO: 93825 - DNA, 268 bp, Glycine max
attaccatcctttattatggaacggatattccaaaagtgtatagatatttcttaataggattttttatattttggaatagttattttgacatacctatacatttcatataaaatcttattccaaaataactcttctgtatagatatttcgaaataactattgtagaatatcgaaaatctgattctggaatagcatgtttagatattttaaatatcttaatgacatcaataatcaataatatattgaaaagaacttagagcgacaacat

SEQ ID NO: 93826 - DNA, 264 bp, Glycine max
cttgacagtttgatcactgatgatttgatgcaaactggtaattcctcacatgatgaagttgaggatgttgaggataaacttgtccctgtctctgaagaattggctgaccaactgaatggcatgggacatgagtccgaggtagataataataagaacaaagggagccttcttacttgtgatgtttctaatgaatctcaggttgatgcttcggctgcagttctagaagatatcaacaataatatttctgcaatggtcagcatgttc

SEQ ID NO: 93827 - DNA, 271 bp, Glycine max
gtaggattcaattaccattacaagccattggattcagtccaaattgaacggaagcgtcatgacaaggcaagaacactgaaagagcaccagaagttggtggataaggttctgaaacatgaccaaaaacgacgtaaaaggatagaggctgctggcattgattatgaatgccctgagattgtgggcaacatccaacctgcaccaaagaaaataaagtttgaagactgaggggtttgaccacattgagctcattgagataccttgaaattatatt

SEQ ID NO: 93828 - DNA, 205 bp, Glycine max
ctagcttgaagccacattaacggaggaagaacagctccgaaatagtaagatgcttgatttgctctatgtcagcagtgcgcataatttggctccacatatcttatcatattatcaatattcttgtcaattgactctgcatgaaaagactgctcgacaaattgatccacgagttagtgatggtatgaatggatatctctggttgtat

SEQ ID NO: 93829 - DNA, 245 bp, Glycine max
ttcaatagtaactgaagatcaagagccacctggtggttaaggttgtcggtttgtttttttatcccctcctaaaatttgtgtgtatatccttagccatttggtcagaaactagagagagagagaccacagtggactcttttatggatgatgttacattataagtactatgtacttaggtttcattattagtcaccacatgttaatggctcatttctcgtaaaaacaaaaaatcatttgcagacttc

SEQ ID NO: 93830 - DNA, 259 bp, Glycine max
cctctctcactcgccatttccagtaagagagagtgatttcactttcaatcccatttcaaaaccgctccttctcctaattataaatcttctctatttctctttctctctctcttcttcgtcttctgtttttctttttctttctaaaatgtaaagaaaacagttttcaatcagcaaaatctacagtttcaatctttcggatcttgttggtgttgtgtggatccttggatcgtgatcctctactcaacctcattctggtcgg

SEQ ID NO: 93831 - DNA, 229 bp, Glycine max
ctgaaattccgaaagcagatgcactatagcatttttagtacctgatccactctgtgtacatgcttccaatcctaaaaatcgttactttctctattaagtgtgagatgcatgctcctgacaaattcccagtcccttttgagcgagtgagacccatctaataatcaaactctcataaccaaaatggactgctccatcaattccaaaagctccaaacaaagaaaacacgaaa

SEQ ID NO: 93832 - DNA, 284 bp, Glycine max
tgccttgtagatttatcctattttgcttatcaaggcttcaagcctatttacttggtattttatttttatgttctgttttatatccctatctactcacttgtgatattttctttgacttccatacaccagatcaaattttcttggtacaaagttcattatatacgatacacagcctccatactcttctgcccatatatgccctcctgggactgggaagacgagcgcagattttattccaaaaaggtctcgcctaaggtcccatctgggagttacaacatagctca

SEQ ID NO: 93833 - DNA, 125 bp, Glycine max
tactcaaccacaactctcatctctgcaccaaacaactagagccaggccgcaaacaatttgcacaccctttacttatttacttaacaaagagcacaaccacactctctggactctccactggaata

SEQ ID NO: 93834 - DNA, 287 bp, Glycine max
catttgcatgcactgagaagagcaagaggatgtggaggtcggtttttgaattcaaagaaagatgagaatcaacaggatgaggttgcatcaactgacgaatcacagtccactatcaatctcaattctgataaaaatgagcttgcaccatcagatagaacatcctaaaactacagaaatggtgatgctgtagattgcagggatctgttgtgtatatctatattggagatgaatctccaaccaacagtatcctcagatatctccctattattcattctgtcgtacaacgc

SEQ ID NO: 93835 - DNA, 282 bp, Glycine max
ggcatgtcgtgagacattacgaagggataaactaaatgagaggcatgctattattttgcatattgtgtgattgagtttagtcttctaaatctcatgtcttcaatttggcatgattttaaggtttctggaattgagttccatcctggagcctagtaggcagcccaaatcagacaaagttgcaatattaagcgatgcggctcgagtggtaatccaattgagaatgaagccaagaggctgaaggaaatgaatgatgaactacaggcaaaagttaaagaattgaag

SEQ ID NO: 93836 - DNA, 280 bp, Glycine max
gtgctcatagtgtttttatggaggatggtggtttggctgtggagcaatcgccttcgccggagatggcggcgatgacttcgccggagacgggtttcgcggtgtccgccgctgaggcctcgccggggtttgagaagggtagtgtgcagagtgagaaggagggtgtgaagaagattaatgggatagggttgaagagtaattctgtgagggattggtggtggacatgagactgaggttggggttggggagagtcaaacagttaaggattatgtgatggagtgga

SEQ ID NO: 93837 - DNA, 281 bp, Glycine max
aacaaacattcatggcaaaatgaagtttgcaaaaaaaatcctcacccttcgttttgcgttcagtttgcattggatcatttggatttggtctcagaattcataaacaacaagttggaaaggaagccgatcatgttcttactgataaactaatatgagatcattacacgccgatataattctgcgaggatactctggttggaattcaaggcgtgctgtgcagttctggatgaaattttcccaaagaatgccactgagcaaccagaattgataattgtgtactt

SEQ ID NO: 93838 - DNA, 280 bp, Glycine max
gttcacctttgctcagtttcgtagtaaaatcaaagttccgcttccctccgcagagactggacgatctcgcgagccatgaatgctagacgagacaatcgtaacaatagagtttccctttttgatggtattgaggagggtggcatcagagcatcatctgtttactcctcttctcatgaaattgatgaacatgataatgagcaggcattggatggattgcaagtagagtcaatctgctgaaaagattcatcggtgatataaatgaggaggtggatagccataa

SEQ ID NO: 93839 - DNA, 274 bp, Glycine max
caaaaacgtgttacagattgttgaacgagtagaatggcagctacaaacaatctcagccagtggaatagttctggacacactcacaagagacaactacgacaactggagtgctcttctgaggcactatctaataggtcaaggtctttgggaagctgtcaattctgtttctgaaattagtgtgcaacccaaagaggtttctgattcttggaagaagacaatgccaaggctttgcatataattccgctagcatgtgggatggagattcttagtcaga

SEQ ID NO: 93840 - DNA, 261 bp, Glycine max
cgttgattaaccccgattaacacatcagggtcactagtcaaattccgatttaagtgcaccccgagatgtcctcacgtaaaagcagaaagacggttaacaatttagcatagatgggtcaaaacaagttaacctttccattttcgtagtgggattctgttcttgctttctccagtgtcatgtaagagagttcttcatcatcatttcagaacttgggactttcccaagtccaagggcacctattacagagtgtgaagcattggg

SEQ ID NO: 93841 - DNA, 273 bp, Glycine max
gtgttatttcttgggtcacacttataaggcgtgctttctaggtgttcatactttcccaattgtcactatatatgttggaaaaaactatctcatgatgatatgttacttttccacttggattgtggaagtggaacgaacgccttcatagtggaagtataactaatttcatttgttaatcccactagataaatatttggggtgatattttcgaagtatgatctctttctctcataacatggctctattcatttaattagcatctcagtttcttat

SEQ ID NO: 93842 - DNA, 244 bp, Glycine max
  unsure (1)..(244): unsure at all n locations
aatcggtcgacaaaagacaaacacacacataaactanatcctgtaaacctagccaccaataatttgggggacactcaacccaatcccagaaacgaaaatcggcctcgcaatttaacgaaaccgaggaagagaaatcgtgggcaaccttcaaaattcgagatttccccgacaaaatgtcccaactgaacgcactgtcgcatatacacagtgcccctcgaccccagggaagttcaagatggagaaa

SEQ ID NO: 93843 - DNA, 266 bp, Glycine max
aggtgatgctgtggaggatcataaatcagagaagaagaaaaaaaagaagaaacaaaaagctgctgctgctgaaggtgatgacatggctgtagatacaaatggtgatgctgtggaggatcataaatcagagaagaagaaaaagaaagaaaagaggaaattggaacaggagatggaggtcgacgatcaggctgaagatgatggtgctaatggggtcacaagtgaacaagaaggaacagtgaaaaagaagaagaatacaaaggatagta

SEQ ID NO: 93844 - DNA, 238 bp, Glycine max
aaattcttttgttgcatgagactcattgtagtgttgatgtagtatagtatttgtctgcttgtttagtctgtatctgttatgtttacgcttggttcagactcagatgtatactaacgtgcaacttatgctaatactcactttcatgtgtttaacgtggatgacagtcaatggagcatctgacaacatcagacagctatcattgcttaggcttgtaatgacatcatttctcgttcgcata

SEQ ID NO: 93845 - DNA, 261 bp, Glycine max
cttaacagaaccgaacacaacacaagacgagtagagatacaatacaagaagaaactccgacatctctcgctttctctatgttcccctaggtttattcggaagcaagcaaggcttaaatatatagatccctctttcccctgcttcactgtttctcagttacttggcttcgcctttgatgaatctcaatctgaatcagtcttccgcctcgtcgtatagggaataattaatcatcggatgaagaatcaggtatggaggtaggga

SEQ ID NO: 93846 - DNA, 250 bp, Glycine max
gttattcagtttttgtaagtgaaccttatctctcaagcttgtaacttttgttctctcaagagacttggtattagaagggaaacagcatgtgctctatctcttcaaaacagacccttcatttggttcttcctcgtccatggccatctaaaagacaccaccacaaccacaggcccccttcggttgggcatgctcaacagaaggagggcacacttgaaagaagcaagacaaaggaaaaggattgttgtggtga

SEQ ID NO: 93847 - DNA, 280 bp, Glycine max
gcaatgttacggggtcaactacaattagaatgagtcatccttcagtctcattccgattggcactattcctctcattttctcttacggcatcatcgtccttgcctcccttaccggttttttcgaagcgttacgctccatcatcttcacttatccccaaagccactccctctgacttattgtctctgttgggttccaaacctcagtcctcagccgtgaatcccgaggtagcgcgcgacctcaagtcatgcttcaaattcctcgtccctttctctcccgtgca

SEQ ID NO: 93848 - DNA, 280 bp, Glycine max
cattcttacactttggatcaccagcaggaagagaagttgtttttagatatctcttctggactcactcagcttactcaattacatgaattgctatataaaaagaattggtctgatcatataactaattgtttctctaattatgctggttgctatgatattgatactgtacaaaattacaacgagctctctacaaagattcagggcatgtgcaaatctatcagagtgacactagatcaacatattctcagggaggaacttgagtcatggccattgtttgata

SEQ ID NO: 93849 - DNA, 274 bp, Glycine max
gtgtttttttggctcctcaatttaagttagttgttcaaaaattggcccagcatgaatgcccaactgacaaggggttattcttcgtaccttccaaaaattttgtatttttttttttttacaaaaattcctttcatgactaatttctgttgtgtatttgatacatggatactaatttctatttcggtgaaaggtatttttcatacaaaaagattacaaaattatgagaactaactcatggtgtttttaaaagatgcgttgtcagtattttttaaag

SEQ ID NO: 93850 - DNA, 220 bp, Glycine max
cacgaatttcattgcagagtgatatcgtgagtatcaggatgaatggcgacaattgcagggggaaacgggattctagacggaattctgggttacttggatggagaaaacaaagaccagactgtatccaatcagtcaatcgccaccggaaagtcagtcatgatatgtggggctcgcggtggatggactcctacttgcagtatgaagtacgttcctgggatca

SEQ ID NO: 93851 - DNA, 262 bp, Glycine max
ctcattaacagctaaaggttcattccatgtcgctgagtatattaggaagagcagaaaccttttatggttgaaactttacatgaatgacattggtgatgagggaaccgaaaaaattgcagttgctttaaaggataatcggtcaatatcaacgttggatctggggggaaataacattcacgttgatggcgttaatgccattgcccaagttataaaagataacttagttattaccactaacttagttataatcccattggaccag

SEQ ID NO: 93852 - DNA, 237 bp, Glycine max
tttttacctttttttagactttaaacaaaatggacatactgtgactttactcaaaatggacatacagcgacaagttgattacactggatatacacttcctttggatacacattgcgactctcctcgtcagacctctttcacaggcttattgacaactacgaattctacgcactaatgtgaattgcagggagaaagcttaagaatagtcaaaaggatatatgcacgcacaaaaaatag

SEQ ID NO: 93853 - DNA, 179 bp, Glycine max
ttcctctgccttataattcttgtgacgcttttagttggtagcattgaaagggcaccaggaaacgtggagtcaagccacgatgtggtgcccttcaatatgagtgtttttccatctggtctgctattagggataggctctgcagcttaccagatagtaggagcagcagctctagatggcag

SEQ ID NO: 93854 - DNA, 275 bp, Glycine max
aaactggtcaccacattcgggattgttctcgtactaatggtcggcagcgtcgtagttctcatgcatcggtaaagccctcggtcaatcatatacttgtccctattgaatcctatcatctttttgacccctttggtaggcgtattaagcatgacacacgatttgaatatgaccggattccagctgttgttgagctatgcgttcaagccggtgtagatatcccagaatatccttcacgccgaaggaccaaccccatacggatattagggaggagagta

SEQ ID NO: 93855 - DNA, 257 bp, Glycine max
gtctcaattagcaattgcaattcaaaaagagtattatttacaagggcatggatgctcgggtgatctttaattatctatataagttctagattattgtaatggaagaataacttatgacattgttgtaatgcaagatttctcgttgatagccttgcaaaaaaaaaagaaaaaaaaaaggggcgcccgcgaacaagtaatctcttccaccgggaattaatttcgcggcggtaacctgggggggaacaattttccccaaa

SEQ ID NO: 93856 - DNA, 170 bp, Glycine max
tttaggattgccttgctatagttggagtggcatattaattttgacacaagacatatatcttggtctgtaattgtcacagtcagtagtttgatgaagtacaagtctataagtgcataagtgtaagtctgtgaaactgcacagtggtctattacatgatattataaattggg

SEQ ID NO: 93857 - DNA, 168 bp, Glycine max
cgccgtttttctttctgttagaagaaaatggttacagagcacggcatcaaattcggcgtccacctgatcaccaagcgcttcggcaagatcgttgctaaagtatgcgaaaagctatttagccatggacccctcactttggatcagttggttcgctacactgactttact

SEQ ID NO: 93858 - DNA, 163 bp, Glycine max
ttatgacgcaggtaaattggagaaagaaggcgtcacatcccaagatgaagggctggcagactatgaaagtactgattttcttgatgaatctgaatctcacaaaaatggtagcaaaaccagtcagactccactctgggatcaagatgaggaaatggatccaaat

SEQ ID NO: 93859 - DNA, 164 bp, Glycine max
gattcatactattagattaccgagacatagtactgtgtcagatgtaattaatgatcttaaatcaaaggtagatctatcacatcctgatgcagaacttagattgcttgaagttttctatcacaagatttataagattttccgtgtcaatgaaaagattgagaaca

SEQ ID NO: 93860 - DNA, 181 bp, Glycine max
attcggctggaacagaaaaggaaaggcggcgccgctgaggttggtatatatccgagacgccaccacagtggagtgtttcgtctcgggggaactgaatattcaacttcagcagactctactgtatctagggtttttccatggccagcgtgatccgcaatcctatccactttccctccagctc

SEQ ID NO: 93861 - DNA, 165 bp, Glycine max
cggctcgagctcaagtctcctgactcctgattttgtttgcatatctccgaaaacagtgaaaccttacacgatgcattgttgtttcttttaattgctcctatgggatggtgtctgtacaaaagatgccaagaagcagattcaacaatttgcctctcagacaattgc

SEQ ID NO: 93862 - DNA, 162 bp, Glycine max
gtaacagaaggaatatcaggagattgggaaatagataggaagttgctaaagttaggagaaaaaatagcatctggatcctctggagatttgtatcgtggagtttatctcggtgaagatgttgctgttaaggttctgagatcggagcaattgaatgatgcctta

SEQ ID NO: 93863 - DNA, 168 bp, Glycine max
tgttaactagaaacagtgtgatgaaaatgacagtcccagagaactccgatgctagcaatactcattcttctaaagtttcaaatccttcctaacaagccattactgcaaggccaatgaacctcaaaactttttccacttccttccatctattcaaaattaaatatccca

SEQ ID NO: 93864 - DNA, 157 bp, Glycine max
ttctaattaagaggtagtagctcgcaacagcaaatatttctgacataattatcatcacaaaagggtagctgctagtggttaaattgttctcacattaattgacaatgtctagcagaagatctcgttctagacaatccggtgcttccgctgagatcac

SEQ ID NO: 93865 - DNA, 151 bp, Glycine max
ctctcttacacaccgcaccagtgcccataataatacttactctctacctatggggtgccgtgttcgagacctagcacatcactcggaggcctcagcacagttggatcggagttgctgaaggttgctccttctgactttgaggggacagtga

SEQ ID NO: 93866 - DNA, 291 bp, Glycine max
tttctatcaacattattatagattaccgtgaaccgtgttagctcaaatctgacctatactagcttcaatattctcagttacttcaagacgtggagcccaagtcttcagaatcatcacattttgcattgctggaccagcagcagtcattgcaatagtgatggcatgctgtgtgtgctacaaggagagactaaccaacaggtctgcacttgcagctacaatctcgccggtgccacaaatcgcaaccacgggtctcgacgagtccacgatcgagtcctacgagaagatggtggt

SEQ ID NO: 93867 - DNA, 293 bp, Glycine max
ttgcatgcttgtcagcatggctgagaatgagttgatgatatcagctcagaaggcagtagattacaccttctccattagttggtgaaaacctgtacagaaaagtgggatgagaattgtaatattagcggggttccatttattttcttgttcttgtgcattggatgaaaataggttgccattccattcaggcactgcggggggataaaggggtaaacattgtcaaacaaaaaccaaaaaaaaaaaaaaagttaccccaggattttagaacccgatggatgtaatcggcaattgta

SEQ ID NO: 93868 - DNA, 259 bp, Glycine max
ctaatcttggtttcttcattttctaccctccattcatatgaatatccaaacttacaattaatcaacaataacagttggtgtagtagtattatgagcatgcaaagagagaaaatggcaaagaaatccatcggaagcttaatgcgaaagaagctttctgatatcaccaacaacactaatcctaattactctcaacaacttgacactactctttcctccgataacaattccattcaacaactcctctcggaaagacggcatt

SEQ ID NO: 93869 - DNA, 103 bp, Glycine max
tgtgccgagcctgactctcgaatctctgagactctctactcttctcttagtgctctaatctagttattattatcaacataagtgacaacaccaccattcttcg

SEQ ID NO: 93870 - DNA, 260 bp, Glycine max
cagggagctcgagtaaagtattcatgtatccaagtaatatatgaggtaatctcttttgttgatgttctctaactagttgttctgtctttctattctatgtaacattctttggaaatcctgtgctgtattccatgcgttatgtcagtggatgtactgcatcattgggtctccaaatgtgtatataacatacatgatgacgatccatttgttcattatccaaatgtgtgtaaataacatacacgatggttatctttgttgat

SEQ ID NO: 93871 - DNA, 259 bp, Glycine max
gattccacaacagtggcagggagatccaaaaagagagagtggaaaagatggcgcggttgatcacagtggtgtggtgcgcggtggcggtgctattatgcgccgcggccggtgcgtcgtgggtggaggaggcggaggtggttcgggtgatcgatagatgccggcgtgcgttgaagtttgctaggttcgtgagcaggttcgggaagagttaccaaagcgaggaagagatgaaggcagaggtacgagatattctgcagaatct

SEQ ID NO: 93872 - DNA, 260 bp, Glycine max
gtttctccgccatcgcatagcacccatagcttcgctagggggggcaaaaccaatcgtagtctctgaagtccaaagggaggtatcatcttttatagaaggggggcaaaaccaagaaaatttcagattggtgactgtgacagcacttggcttaattgttttggttgacagtttttcctcttgatgtggcaaaaactttaattcagacaaaccctgataaaaattgtccaagaaatcctttttgggtcttgagtcaggctgga

SEQ ID NO: 93873 - DNA, 253 bp, Glycine max
gtttggagctatgtattggctgttgcagtcttgggatggcagatttcttttggtttactgctttggaatacgcctggaattatgtaagtatgctgctagtatgcctattgcttcgcagaggaaattagtgtagatgaaaattaagtactgttctttgcatggccatgggaggctgtcctaaggaagagataggctatataacatggatgatttttctgttagcaagtcttgagtagaggaagtgtgatgcagg

SEQ ID NO: 93874 - DNA, 259 bp, Glycine max
gaaaaaaaaaaaaactatttctatctttggaaccaaatagatccttagatgttaagattgggatgcatggatgaaactaaggatctgctcttcttgtaaatgtcaactccacgggaggtgttgttgaggataatttagtaatttagcctaatattctcgttccgttctgttccaaatggcatcactctcccccaccgaacccggcgtcccacccttccctccgcccaccgcggcccgccgcgccgcttcagacgattca

SEQ ID NO: 93875 - DNA, 265 bp, Glycine max
ctcccaaagaatgatggtaagagcaacaccgtcaagtcatgatcgcaacctcgctcgacctcaaactcacacccgtcgccgccgccgccgccgccgcttgaccataacctttcatccattcgcaatgtcagaagtttcgccctatcctcacacacaacttctctcactctcaatctccctcgcctagttaagctcttctctgagcttctctttaagtttgatttgtgaatgaacttcttcaatttctttggacttagatggtcag

SEQ ID NO: 93876 - DNA, 235 bp, Glycine max
ctacagtgtagcagcagatctcttgtagggctcatgttagaccacaaagatgttaccctatcccactttagttttgctagcttctttctggtgttccacactgggtctttatgtccatattgatgttttgcttccttttggtgtttgacagaagtaaattttgatctaacttgtatttgaccataaaaaaagtgaagcatatacagaaaaagaaaaaggaaatgaagaatggtgc

SEQ ID NO: 93877 - DNA, 256 bp, Glycine max
ctaattactaactagcgaaacaggaactgagggaagacgatgtcgatgtcgatgtcaatgttgtatatgtgtctcttcacactcacactcgtcgtcggaatgttatctatgctatctgatgccgttgatgacaaatgtgccgcctgcaaagccgtcgcggtctctctctctccctctatatatatatgctattgccgattcaaactcctaaactaatagatccatttactcttattggcgattttatatattgtgg

SEQ ID NO: 93878 - DNA, 194 bp, Glycine max
caaaaacaaagtaagacttcactcaatctcactgtgttgtgagttgtgtgtgagaccaaccaacaatgcgtgtctctgactcgtatgttcttattactgtgatcgtgtgaacgaggcgacccaacggtgcgttaacggggtagaaaacttcaagatctatcgagcattggacatgagatgcaaaagtggcactt

SEQ ID NO: 93879 - DNA, 129 bp, Glycine max
cttcagttgtgaaggttgtcagatgggggcggtctgtatatgcaaatatcagaattatcagttcagttacagtaaatgtggcgtcagtgataatgtgtgtgatctgctgggttcataatgatgagtctg

SEQ ID NO: 93880 - DNA, 259 bp, Glycine max
tggaagttttgttgccttgtatcactatccatgcaaagtgaagatgttttgtgagaagtgattggcccggttgaattatgttgacatcagtatgttatttgggggcaccaagttgttaaggaacataaatagcaacattttctcacctttggatcttttagtaatatgcttccatgatcaactcccttttgccccagatccgttgacacatttgtttcatcatctgtgcctctggttgctgtctttcagtgaaatttat

SEQ ID NO: 93881 - DNA, 253 bp, Glycine max
aacaaataggcagagtgatctgatataataagctatttttcacgcaccatttaaccagtctctaaaacccccttctccgatttaagctctttccggtcccaattttgcagattcgaccgatctcgcaacagtaggtaagcaagttcacactccaaattccatttcgaaacttcaccagcttcaacgctcgacactttttttctctctctctctctctctctctctctcaatcatgcgctgttatgtgagattg

SEQ ID NO: 93882 - DNA, 159 bp, Glycine max
catacatccctcattaggaaaagctttttcataactgacttcccgttcaacatgtcttaccaaatgtgtcctaaagaacaagggaatgtggattactttccgggaattaagatccacactttgcaaattttacatttcttccttccttttttttttttt

SEQ ID NO: 93883 - DNA, 266 bp, Glycine max
cgacaattgatccgtctaaggatcctaggaagtctggtgcacagcttattcttccggatagtaaagataagatggcactggagtcagcaggggtgaaagatatgaagacgttgaatggggatttgattaagaatcataaaaaaaagattaagagaaaagctaagcaagcagcccatggatgtgttgaaaaggaagcttctgaaggagttgagggtaatgctgaaacctctggggctgtggagttgtctcccaatgcgagttctgca

SEQ ID NO: 93884 - DNA, 237 bp, Glycine max
cataaatatatatgtagatcgaatataaaatgtggaaatgaagggttgaaaagcaacagacaaaaaatcgttgctttttcctataattgactgggggcggggggtaggattttgaatgtcctcactgagagcaaaccaaaatcttccaaaggcggtgagctcttctgacaattttgcaaatcctgggggcaatgaaagatgggatcaacaacggaggatttgctatggatggagtgg

SEQ ID NO: 93885 - DNA, 266 bp, Glycine max
cgcgaagctggctattttaggccactggtacagtatttgaaagaagggtctgacatgaacaagatcctaatggcaaaagcactttctaggttggagctcactgatcacagcaaactttcccttggagaagctggggcaattgagccccttgccaatatgtttagtactgggtaactcgagtccaagttatcctctctaaatgcgctacaaaatctgtctagcatgacagaaaatttgcaacacttgatcagatctggaattgcagg

SEQ ID NO: 93886 - DNA, 115 bp, Glycine max
agaataacaggtttcttattttactggcctgagattttctcttttttagataaaccttgtcataccaaatatttacaatacatggtgaagaatgacgaaaatttcttattttatt

SEQ ID NO: 93887 - DNA, 255 bp, Glycine max
ttttagtatagccttcttccaaaaccaccggcgtcgtctacttcgccgttaatggagtttccaaacaagactggtatccgtcgagcaattggccgaaacatactcttccgtcattccttgcttcggtttccatcctttgtaattgtttttgtttttgtttcttggtttcctcaactgaaatgaccttattttctgacgttgttgcaggtttgttaaagaacggagccccaattggtttgaaacgttgagagagta

SEQ ID NO: 93888 - DNA, 235 bp, Glycine max
cgaaccaactccagttcaagcctcaacatttccttccatgtcatcaaatcgatttgccgattttcgtggttgtgcaaatttggcaaatgggcgcaccacctagcatgggtatctcaattcaatacaataatgtggtggacatgccaaattatgcacaaccaccaaaatctacatatccatttgttgtcagtaacgaatcaactcgagttcaagcctcaacatttccttccatgtc

SEQ ID NO: 93889 - DNA, 128 bp, Glycine max
ctaacttcaaacatcgtagttaaatgtgacaaaagaaaaatgtaataacgccctagcttgctagaggctggtgctactaataatgtttgtcacaaaaattatataataataggtgttttactccgtct

SEQ ID NO: 93890 - DNA, 263 bp, Glycine max
ctctaggaaaagactgcaaacctgtaattcctaaagtccttcaggaagtgagaactattcatgtatatcactgaccccagccccaccatcctttctaattatgggggggctgggctcagtgatatacatgaatagaaaggatggtggactactgtgtatgaaaaggttgtttttctcttttgggtttgatcacttctgatgtaatatgctgaaaaaaaaagaaaaaagaaaaaagaaaaaaaaaactaagggggggccccccg

SEQ ID NO: 93891 - DNA, 199 bp, Glycine max
  unsure (1)..(199): unsure at all n locations
ttctcttattacgattcattctagttctggattccgactcgcagacttgtctcggtccgggttagggacgactcngatcggtattctctactctcaagaatctcatatgaaggaaaaactaagggcacatcacgctgaaagcattgataactggttggggggtatggcacgaggctgaggccactgacactcagttttc

SEQ ID NO: 93892 - DNA, 271 bp, Glycine max
gaattgcaatcaccctccttgatccaccttgatctcgatttttgtctcaacatagactcatgagcttgggctgctgtccaaagatcttcctgcagctggtttcttttctgctcttctagttgggataattgtctttggattgtgtcttcctccaaattgactagttaatattcaatccggtctagctttgtataagtatcaccataatgttgctctattctatctcttcaagctatgcgttagtttcgtaaatttttctgtaaggatgtat

SEQ ID NO: 93893 - DNA, 114 bp, Glycine max
aggatcgagctttctctgtctatctgtatgtctctctgaagatggtttcacgcaggcttgtatcttatatgattagatggtgcgttggtagatgtgaatagaagtggtgaattt

SEQ ID NO: 93894 - DNA, 265 bp, Glycine max
ttgaccatctaccattctgtcttagaatcttgtgctaatattggattggattatctgtagttttccattaatactgtagacattactgaaagttgagacattgttcaagaagtagtaaagctccttctgtaatatttcctgacttggtgctcgccttttggatcttacaatgggtaacagtgacgaagagaaatctactaagactgtagagccttcttcagctgtaacaatggatcaggcgaatcagaccgtatcagagcagtat

SEQ ID NO: 93895 - DNA, 287 bp, Glycine max
  unsure (1)..(287): unsure at all n locations
agttancagaagtgacactgtgacagagtgacgaggagaagaaaggcaactacacacatacacacacctacttaattcgtttcagaggatagcgctcactatttcggaacttcagttgaatcattttcacgctcggaaccccaaaactaagagaagagagagactcctcattcaagataaatagatgaatttccgttgacaacgttgtgaagttatgaaaatgattgttctccagaccactttcttacctagaccttctcactttttgtgatgctagttgcatccat

SEQ ID NO: 93896 - DNA, 271 bp, Glycine max
gagaaaacaaggagcgaaaaagagtcacgagcgagacacgaaggaagagaagagagatatcgagagcgagcgtggtatggaggatcttcgatttagggttttcaatttcgtattcagcaaggcggcgagtgtgagattcttagagggagagaggtgagagcgctgagtgctcagctgagagcatccattgccccaagactccgaagaggaggagtatgtggatatgtatatatatattcatcatactgtgtatttatcctcagagtggtgg

SEQ ID NO: 93897 - DNA, 221 bp, Glycine max
aggatagagagaggagaagagaagagaaaaattaagatggaggggaaggagtaggatgtgtagctgggagagaacaagattgaggagagagagtagattgggatggaggagagatggaagaagatggtaaggactactaggagcaggagcaggagctagtggttgaaaagatggagtttatgtgatggtggttttacagagtagggatagaagagtttgtg

SEQ ID NO: 93898 - DNA, 267 bp, Glycine max
cggatacttgttccaaccacaacttgaaggagacaaccttgaacttcttagttaaaaacattgagcacatggtgtcctcacctaaatttgaagcttttgtccataggagcccacatcttactgtgcaactagttacaagggcgtttgtgaatggtgccaaataatcaaaattgtctccaccaatgttttttcctttttcaatttaataatgtatttatccaagcctataaacataataatataattcatgccttgttctcttcaaaa

SEQ ID NO: 93899 - DNA, 265 bp, Glycine max
ctcgagcggttagagatgacagtaaaactctacttcagactggaatttctcatgataaccacctggatgctttgggcttcgccttggagcctaattgttcacaaaaccgatcatctgcatgtgctacaacagattctctctgcgttcctggtgcagatatgcatcagcctttaatagggtatccttcaagtcgtgctgtaattcatcagaggattcagggctattctaacatgttagctgagcatcaagcaaccagtttaggtaa

SEQ ID NO: 93900 - DNA, 262 bp, Glycine max
aaaagcgtcacgagcgagacacgacggaagagaagagagatagggagagcgagcgtgagacgaagatcttcgatttagggttttcaatttcgtattcagcaaggcggcgagtgtgagatttttagagagagagaggtgagaacgctgagtgctctgctgagagattccattgccccaagagaaggaagaggaggagaaggtggatatatatatatatacttagctctctgtatatttatcctcagagtggtggatagggatt

SEQ ID NO: 93901 - DNA, 264 bp, Glycine max
  unsure (1)..(264): unsure at all n locations
gaccatcgccacaagcgatgtgtcctcttaggacagttatacaatttatattaaaatttcgcaaatccacacaacatacgacaaaaagtantgatgnaaaccactttaattaatttttcccgaatcccctagagagaaaaaaagaatcagacaatttctgagaagctaaagcttgtggaggactttctgattctgtcaacccaaggtgaaagcaagaagagagtgagagaagagctcgtcgtgaggtaaagatacaagctttgc

SEQ ID NO: 93902 - DNA, 309 bp, Glycine max
ctaggcgcaacggagaccccgttccggttcgcaaagtgttctgcgcagtggccaattctaccaaaggatccataactgcagttgaagtggcaaacagtatccatgccgattttcttgctgctgatgtgcggggaatcactaagatggatgcctcatctggatttaattcaagtttactgtcccaagcattacctccgataggcacacctcctttgaaaattgatgcccagcccgatttaagatcacagatgagcaggtcacataagacaagtctcccagcagtttctggtgggaaaaggaccctgggtc

SEQ ID NO: 93903 - DNA, 292 bp, Glycine max
cgctaacatgcgccacaatctccacattcaacaacagccgctgtgatttttcttttttccatattcattttctgtttcacactctaattttctctccgcgtttgaattttctcaggatattttcaattgtcaagaaaatggttggacctaacttcatggatgagatagactgcggcagcttctttgaccacatcgacgaccttctcgattttcccgtcgaggacgtcgacggcggcgctgccaccttgccttccgtctccgccggaaacagcaactcgctgcgagcatctgg

SEQ ID NO: 93904 - DNA, 294 bp, Glycine max
  unsure (1)..(294): unsure at all n locations
gacagcattaagtcnctccttcatctgccttataattcttgtgacccttttgagtggtagcattgaaagtggactagcaaaagtgaaggtaagccattatgctgtactcttcaataggagtgtttttgcttatggttatctcagttgaatatgctctgaagcttagcagatagaaggagaagaagctagagatggcagaggagcaagtatatgggacaccgtatataaacaggaactagggaagatttgggatcatagtgatggaagtctagcaagtgattttgataacggtac

SEQ ID NO: 93905 - DNA, 225 bp, Glycine max
caagaatttccattgcatgcaaagcaaatacgcattatattactagttttaatttgttttgtcgtttgcttctttctttgattaatgatgactagctttaaggttgcatgtgtggttgcgatgatgtgcatggttgtcccatgagtcgtaaccatggcaaggcgaatcacgtggggcagcgcgggagtgttcgtgctcagtatttgagcggggaacgtcgacgct

SEQ ID NO: 93906 - DNA, 273 bp, Glycine max
ggaggatccaaacaacatgctaacaggagaaggcaatgctacaggatcattggattcaaaatcagtagcgtgaaaaaaccaagtaccacaaggaaatgatttttgtgaatgatcaacaaggtttccaatgaaattttcaacttttttggggcgtgagatggtatgcggtgtgattattttggtttgcattttgtttgctaatcgtttgtacccaagggagattgagtacagaatctctctgtattgattcgtttttagcaatgtatatggttg

SEQ ID NO: 93907 - DNA, 188 bp, Glycine max
ttgtgatgctataagcattaaatgctatgacttttctactctgctgatgtggtgcaacatttttctttaagcttttgtggttttaaaatagtttcaataatttgattatataggtgtatgatagatagaagttgttgatgtgacaccctctagtgcgagatatacataaataaataaaatatattggt

SEQ ID NO: 93908 - DNA, 254 bp, Glycine max
cagaaccaacctcactctctcttactctgtgattctctggctaattcatcaattgcatcaaaatgcataggcttcaactgcaactagtggtattcctctcaatctcaacttttcacaatgcgtactccctcactgataggctcatgccaaatgcgaacttcgatcacgggccgaagccatcagaattgaaagggtccgtagtaacagggcacgatgacatagcgcattcgacgatttcggggttcgatgaatac

SEQ ID NO: 93909 - DNA, 121 bp, Glycine max
gacatcaaattttcatcatgcactgagtgcatagactcaggtgtcgtcgttgtacaggtctccgtagatagaagggcgctgaagatggttacagtaccaggcaggacaatacgcgtatgtg

SEQ ID NO: 93910 - DNA, 268 bp, Glycine max
ggtacagtgatttagaatatcttgtgaatagtttctcaacgcttgaagcgtagggccttggagaatatactctcgcataggcaaacttgatcagctctgctgccatgaattatctgctgcattctggcattcagtggggcaccagcacctgctgttaacggtagtgtcgggatgcagcagtagagttcctgcacacattggtagctgtccatgcagaggtttttgctggtgctaagcctctcttggataacacgcttggctttcttgt

SEQ ID NO: 93911 - DNA, 271 bp, Glycine max
ctaatccttgaacacatctctccttggaacacggacacttgctaggtggctgattaagaagacccctgtaatgtaaacgcatttagcctttggattagtagagatgtgggagttttggaaggtcatttcacagtcaatatccatatgattatgtgtgacgcatactgtcagtactttattgtagggcaatccttttcggatctgtactaaattggatgctttaagctagtgactgatgtgtgattcatctgaggcacattgtgtatctgtt

SEQ ID NO: 93912 - DNA, 239 bp, Glycine max
atgctacaggagcaataggtacagaatcagtagcgtgaatataccaggtatcataaggccgtgacatgtatgcatgatctacaaggcgtccttcgaaattgtcaacttttttggggcgtgagatggtatgcggtgtgattattttggtttgcattttgtttgctaatcgtttgtacccaagggagattgagtacagaatctctctgtattgattcgtttttagcaatgtatatggttgg

SEQ ID NO: 93913 - DNA, 215 bp, Glycine max
gttgaagtcactcgaatgttgatcatcgacagagcgagtcgcaaatattgagcttaatcacattctagttcactagttgagaatgccaataacgatcatgaggcgaccaagaaggggtatgtcatacgacgctgatggtatatatattccgaacacctcactccggtgcttgcgtaaaggtgcggtggttaaggaagacgagagagatgctccga

SEQ ID NO: 93914 - DNA, 266 bp, Glycine max
gttgtaaatgacatcagattatatatgtgatttttgcactgtacagcacgtgaacatttgcaactaacaatttacctatatcactatatgcgtaataagcaacctgatcagaacatgcttcaactcatactttcgatctgggtactaaccctaacccgcttcgaaccgtggcttcctcaggctcgcagaacctctctcgaagaaaaccttcttcttcttcgtcttcgtcttctcaacaaacacccgggtcgacccggatcgtttac

SEQ ID NO: 93915 - DNA, 269 bp, Glycine max
tataattcttgtgacccttttagctggtagtattgaaagaggactagcatacgtgaatgcacgacattatttggctagcttctataggagtgagtgtctttcagggtttctatgtggaataggatcagctgcttaatagatagaaggtgagcagctatagatggctgaggatctagtatataggacgcctatactatagagcgatcagggatgatttgggatcatagtgatggcagtctaggaattgatttttatcaccggtacaagag

SEQ ID NO: 93916 - DNA, 213 bp, Glycine max
cacggtagtagctcggaatcggtcgactcgaggaatcggctcgagggtgagagaatggaagcctcagagcagaacaattcaaggtagtgttgattgattctttgcagtcatgggagttccacgtcaaccaagcctataatcagaatactcctgttgttgttcacttcactgcttcatggtgcatgccatcggtggctatgactcctgtttttg

SEQ ID NO: 93917 - DNA, 186 bp, Glycine max
taccatttgattaaaagttggtgcttttgtttccttctctcttcacagtctcaaggacgaatcacgccctcactctcagctcctccgtccaatcgccgccgctgaccgccattgctgtctgccaccgtcgcgtgtggtcccaccactccttctttctcagaagaggagggaagatatgggtgccag

SEQ ID NO: 93918 - DNA, 184 bp, Glycine max
cggctttcaccagtgcatccctctgctatccgaactgcacctggtagaccaagaaggtcaagaagaaagcgcattatgagccacaagacaggtacaagttgcctaggcaaaaattatctgttgtttgcaaatttgtggaaaagttggacacaacaaacgaacttgtaaaggtaaaacaagggct

SEQ ID NO: 93919 - DNA, 184 bp, Glycine max
agtgtggatggtgaacagtggatcttcctacttcataactaccaaacctactttgggcggaagtccaatgcagactcgttccaaatctcactttctcacattcttcactatgaagaatagtagccttcattctcttcctccttctttattcaccacaattgttgttgccaatggagattgcact

SEQ ID NO: 93920 - DNA, 170 bp, Glycine max
agcaccttcctattgattcctgattccgggagtttgactttggccttcattagaagctatctgtgtttggtgttactaagtctccaacaagcaaagtacatggttgatttggaaatccaggtccccaccccattcgacccgtttgccgaggcgagagaatcggatgcccc

SEQ ID NO: 93921 - DNA, 182 bp, Glycine max
tgtttcagcaaaataattatgtatgtcataaagttgttccaactgaagatagaaggctttttctctctctctaaaagcagtggccatcatgttctcttcctaaaccctttcaatcatcatttagctctgaaaaaaataatagaaattagaacgacaaatgtcctggctcttcaagtccaacc

SEQ ID NO: 93922 - DNA, 183 bp, Glycine max
ctcggagtgctgggtgccatctccaaggtaaaattatcacttgagcgtggttcaaaagaagcataacctacaatttcacagcagaagatgatcacatcgaagatgtgtacgtagaccatgcaaaaatgtatgaatttgctgatttaacttggtatccatcaagacacacagttgtgtacagat

SEQ ID NO: 93923 - DNA, 170 bp, Glycine max
accacactaggcatctctgaatggcaatataatataagctttgtacacagtgcaattaagtttcttcgttgcgctttctagagctagctagagattattccatctctctgagctgctcgtcgatgatgctcggtggaaccagcggtacgatgtgcagctccagcttcatg

SEQ ID NO: 93924 - DNA, 276 bp, Glycine max
gcggtggtcgaggtggcggtcgcggcggcggccgtggcggcggtagagatggagactggcgttgtcctaaccaaagttgtgggaatttgaactttgcaaaaagggttgaatgcaacaaatgcggtgctccaagtcctaatcccaatagttctaatgaccgtggtggtggttataatagaggaggaggaggaggtgggggctatggtaacaatcgaggaggaagaggtaatgactataacagtggagggggtagatctgggagttagatggagggag

SEQ ID NO: 93925 - DNA, 245 bp, Glycine max
attctcttctctctctactctctcacttcctaaaacatttttttttctactcgccgccgatcagccacgtcactctccggcgacacccttctctttttcgatttgttccttcctccaaattgcaagatattttctttgttttattgtaaaaagaattgtgtggtggttatcgcgcggtttcgatttggataataagcgtcgtctgcgcttctctgccggaagaagcgggtggtatgtgctttctg

SEQ ID NO: 93926 - DNA, 270 bp, Glycine max
gaagattattccacctaaaaccgcacctcgccacactgctgcaccctcaccctccattattctttcttcttcactctcttttgtgttttggggaaaagagaagaagtgaggaaccgaagaaagaagaaaagaaaaagaaacaaaaatggctgaatcaaaattattggaccgtggaagttggaagaaacggtattctcaacactcaactttatttctttctctcacaatataaaaaaaagcgattatctgatcaagcttctctaatcggcg

SEQ ID NO: 93927 - DNA, 264 bp, Glycine max
cctaaaacaaaatttactaatttattagaaagtaaatacaaaattttttagtttacatttatcacgagcatatgaaggtggagctccatggtgcggatggttatggtggccctctgtttattggaacttgttgctttcatagaagagacgctttatgtgggaagaagttcaattctcaatacaaaaatgagtggaatgatgagaatgagaaagaggtggttaaagcaaacttgcatgaactagaagtggaatcgaagcactagc

SEQ ID NO: 93928 - DNA, 129 bp, Glycine max
ctcatagagctggactgaatcttcctgtttatacaaccattcgttctggaccatgtcatggtcctaacttctcatgtaccgttgagattgcaggaatgcattttactggagacccatctaggaccaaga

SEQ ID NO: 93929 - DNA, 213 bp, Glycine max
catgccttggagtaatacgacaatacatgtcatctggaaaaagttcagtgacaattttccagggaccaccctccattactcctgcaggtaactggtttagatttgcccgcacaactgagaagaggtgcaggttaattaatgctaatatagtgacaccaagcatgtcattgtcatatggtattgtaccccatgtgctattcaccaaagattttt

SEQ ID NO: 93930 - DNA, 263 bp, Glycine max
aacgttactattttcgaaattctttggagccaaacggcttttaaacttgtcacatgttcctctccccactctctctctctctctctctgggtgccatgcatgtcagtttctgactgagttactttcattcattatatgccaccttatcaacaacattcctcccctcttccccctcctcttcctcttcccaatagacatgggttgtttcatggcatgttttggtctatccaacaaaagaaagcgtagaaagactactacaaagt

SEQ ID NO: 93931 - DNA, 267 bp, Glycine max
ctcaaggaggccaaggctggggactctgccatgcaggttttggttggccaaatgtattactctggatatggtgttccaagggatcctcaaaaggggcatgtttggattagtaaagcatcaagaaatcgaaattcagtttggaaagtgtgcggtaaacggccaggatacagagcaagcgattctgattcatgaattggagaactaagatgaatcttttccttaatttgcaagtataactcgtgtttcttcaaagagttgaatttcaat

SEQ ID NO: 93932 - DNA, 249 bp, Glycine max
gctaaaggtgggttatcatcagagtccaaactgtttgaatccataccgtacaatggcaccaacaatgtcgtagtcatggagcatcttgttggtgggaatgaaaatgttggcaccttaacagccagggttagtttggaagagttggctaagaatagaggggatgccatgttgcgttacaaggagaagaagaaaactcgaaggtacgataagcacattcgctatgaatcaaggaaggccagggctgatact

SEQ ID NO: 93933 - DNA, 259 bp, Glycine max
gctgccacaggaatggctgcaggagcaatgctatccggagcatcaattccaattttgtcttaggcttttctggtgtggcaaattctcctctcatatttttttcttgggaggcgatataaagtcaaccaactagttggatgctctcttgtggcaattggtgtaattcttactgtagtaagtggatctggtgctgggcattcattgaaggaagctggtatattttggagtcttttaatgatagtttcattttattccaagc

SEQ ID NO: 93934 - DNA, 272 bp, Glycine max
ctaggatccacattagagcgcctcctccaatttcctacgttcactgcctccacattccaccacaacactggaatactctctctcaaatattcaccgaaagttctcaactttcgaagattccatgacgaggttaagtttctaaaccttattttcagggaactcaaactgtgtctgaacctgttatttgctttgttgcacataaaatacatgtggggtgttgattttagtgtttgttgaggaaaaaagagagagagtataagtgagtgtagcac

SEQ ID NO: 93935 - DNA, 187 bp, Glycine max
cagaaagcattctgttatttatgccacagtttagaaagatatggatacaggatctgcacaaatttgacgggatccctttgtatgtctagatattttccaattttagctcccaaacaaacaaacaaaagtgtttaaaagaagtactatgatgatttagtaataaaaaaaaaaaaaaaaggggcggccg

SEQ ID NO: 93936 - DNA, 258 bp, Glycine max
cgaagaaaaaaatagaggctgggatggttagttcagaaatggataattctgaattgcatcttactgatatgggtacagcagatatagaactggaaatcaagccacagaaaaagacattcactttgatcacaccaacagtgcatactggattttcattttctattatacatcttctttcagcagtccgcacggcaatgattagtccacatgcggaggacagtttagaaatggggaaacccatagaagagctgaacaaag

SEQ ID NO: 93937 - DNA, 129 bp, Glycine max
cttcattggagtttccaaactaaccttaaaatcactatgattcatttccttcctgactgtctcagtctccatcatgctccccgccatttctcttccaaacaacataagagaataaacgaacataacagc

SEQ ID NO: 93938 - DNA, 255 bp, Glycine max
gctggcattaagaggaaaacagctcagtcttaccaagagttggaagcaaggagaagtagactcaaccaactagagaaaatctacatggatatggcaatgcagaaggagttgcagaaaaaaggcaggaagcgcaaactaggtgaagacgagattgtctgtccaacctctaaaccggtatacaagtggtgtgctgaaagaaaacgatgaaagagttaataattctgaggttctttttttctttttcacaattttgca

SEQ ID NO: 93939 - DNA, 254 bp, Glycine max
gcggcgccttcgcattcctctcgccggattctttcgcatacgacgccgtctgccgacgtttctgccggcgaatccccgccgtcgtcgtctccgtcaactaccgcctcgcaccggagcaccggtacccttcccaatacgacgacggcgaggatatcctcagattcctcgacgagaaccgctggtatcgatggcgaggacggactggctgtggaaggcgtttctgccggaggggtcggatcgcgatcatggggcgg

SEQ ID NO: 93940 - DNA, 213 bp, Glycine max
cacacccctctaacttccgatcactgcaccatttgcaattacacaattgcagatcaacacttcactccacaaaacagatttcaaaagggcgttttggtactttcacaagctaaagtccaattggaccagtttgtgtatcaactgcaatctaaggataagcatagatctgcagaaaccgtgaacacactgatacaagaaacagaaaacactctc

SEQ ID NO: 93941 - DNA, 207 bp, Glycine max
cctctatgatctccaagataggcttggactcaaccaaccaagcaaggttgttgattggttgctcaatgcagcaaaacatgaaattgatgaattaccaccacttccaattcctccaggtaacttcacccttggttatccctctcttgacttcttgtaatgaagttagcacctctcgtgaaggttcaggccaaaacactttattatgga

SEQ ID NO: 93942 - DNA, 224 bp, Glycine max
atttgtggtctctaatccaaaatcaaaaaatataatatgttatttttcttcagataaattaatatatatcaaaggctcttctcggtagaataaattaacaatacatattatctttgaataagaatgaacagactgatcgtatagctgaacccacaatatgggataagaaaattaaggttttgtaagtaaaagcgaataatatataaagtgtgatatagtaattt

SEQ ID NO: 93943 - DNA, 172 bp, Glycine max
ggagaaggcactgagactaagatccagtgagctaaagctcgagaagcagttggaaaatgctaaagaagaaatttcttcatacagaaagaaaatgtctagcctagacaaagaccgccatgatttgcagtcaaccatcgaggctcttcaagaggaaaagaagatgttgctttct

SEQ ID NO: 93944 - DNA, 225 bp, Glycine max
aaatgttgtttcgttgaaagttaccttatgttgaaagagtaaattgtttagagaacatgcatgtcgggataaagagctatcaatgcctcccacttatgcagcaaatcatttgtattaatcctgttgagtattgttgcccccaaacaaaggacttgaccttagagagagttatcaatttctatctgtatttttcaagagggaacttttgggggttaagagactatt

SEQ ID NO: 93945 - DNA, 224 bp, Glycine max
ctttctggtgccataaaagatgctcttctaggaagcgaaaccagaccaagtatgtctggaagcagtccttctgataagtcatcaaggaagaaagagaaaaagaaactaagcacacgtgttcgatctgaaatgaagaaaaatgtagttgatgcagaaaatcctgaacttgaaaacccaaattcaagtagcaaaaatcatggtcatagtcatactaaagagagaag

SEQ ID NO: 93946 - DNA, 192 bp, Glycine max
tttttctatcctacaataagccacccctacaatcaaattccgatttcatcataagtatgccaccaacgaatttcgatatatttggagtaatttgaaacatgaaaatccaatttgtcttcccaaacttatatcacagaacataaaactccggaacgatagcatcagatggcacagaggaccaaaaattgtaga

SEQ ID NO: 93947 - DNA, 217 bp, Glycine max
cagacatgttaggtcagttttcagactgacgataaactctacgcctccttttcctcttaatttcattttctcttttcccctcccaaaaccttctcttttacatgcatacactcaaacctgtcttagtaaaacgacatgaccacatgaccactgactgggggttgaattccctagctctaacagggagggaatatgtgccgttagtaggtagctcaaa

SEQ ID NO: 93948 - DNA, 216 bp, Glycine max
gcggcgcttcgcattcctctcgccggattctttcgcatacgacgccgtctgccgacgtttctgccggcgaatccccgccgtcgtcgtctccgtcaactaccgcctcgcaccggagcaccggtacccttcccaatacgacgacggcgaggatatcctcagattcctcgacgagaaccgctggtatcgatggcgaggacggactggctgtggaaggcg

SEQ ID NO: 93949 - DNA, 195 bp, Glycine max
tacaactttagataaaaaaaaaagtgtaaagctatagtcgaagacctgagagactgagactaagaggtgcagaggcatggcggggagttcttcatcagctgctgggtctcttcttcctgtaattaggcatcatgtgttcctcaacttcagaggggaagacacccgtgacaacttcattagacacatttatgaaca

SEQ ID NO: 93950 - DNA, 241 bp, Glycine max
taggtaacttttttctttcatgtctctccgatctgcactctttcaaaatgagccaaaccgccattgccaacttcgaaaagccaataggctgttactctccatcggttcaagagcttattgttattgataatgtgctctctgcctggttggcgttgagggacattacatcttaatcaaaacagtttgtggcaagagcaatgatattactttcctggttgacccatcaatggatttggccctg

SEQ ID NO: 93951 - DNA, 243 bp, Glycine max
tctcgagccgaatcggctcgagaccaaatcccaaggggctttctattcaatattgttacctgtgcaaattatacaactgacgatctatcagtggttgggattcaacattgcaacacaaactgttgcaggctatattttcctgtggttgctacttttatcatgaccaattgggctttagccaagcacaggcgtttaaagaagttatttgatggaaaggaagggagacctaggtatcctcgtcga

SEQ ID NO: 93952 - DNA, 237 bp, Glycine max
cgtaactgtggaccagtgccaacgcatgattcataagagtctcctttctccgcaggtgaagttcctgagggaacatttggagaaagctgggtgtctcgtaggagataatttcataaaagctgttaagtgtgacaaattgcaatagctggtggttatactcagggtgaagggatagttgtgtgctgcaacgagatggaatctcaagatgatgttgaccagctgttaaatcatgagcta

SEQ ID NO: 93953 - DNA, 232 bp, Glycine max
gccgttcctctcttcttcattattagtgttttcgctcaatcattttgtttttgtctatatgctttcagcttaatatgccaaatgatgaatctttcgaaattgttgagaactcaaacttcgatttgagtgcaagaatatcatttcattgaataggaagatctgatgctgcttagtcacattctcaatttctcattaccacttttttttaattatcgatatttatatttttata

SEQ ID NO: 93954 - DNA, 238 bp, Glycine max
caaaactttaccaaatctataatcttccccttctctctcctctccccatctccctgatggggttctcatgaattcaagtagtgaaatcaagctatgatcaagccttttggggcttcgatttaccatctttttgtgctaattaaacacttgaaaattaccaccatgtccaccatgaagaacaatttcaaagaccaagaccatctctactcttcatggagcttctcaaagctcatggctt

SEQ ID NO: 93955 - DNA, 238 bp, Glycine max
gctggcttcacttggttctgaatttttagaacgactacaatttggccgaagctttttatttatttatttatttatcctcccctccccgatttatacaggcaatcttgttggtcagatgtatataggtttacatttttccatatataaaaaaaaaactaggtagctcgagttttttggtgcgtaatcccacttggtttctacaaggtcacccatttttcttgcttcatgatgtttgtag

SEQ ID NO: 93956 - DNA, 230 bp, Glycine max
atgagaaggagcaatgcttcattttttaatatatttatttaccactctcaaatttgtttttattttcacaactaagaaaataaactaaaaccaaacaagtttttattttggctccggcattgatcgttttcaaaacagtgctgctacatggtgtgaatggatggagtaccaaacatgaattaatctgccttattattactccacaataaaaaggtgacgtgttattgtta

SEQ ID NO: 93957 - DNA, 222 bp, Glycine max
gtgacatgaagctgggcaagctggatttgaacaataaccattttatgggtccgattccggattttaaagcggctactgtgtcgtatgatgttaataatttttgtgtgagcaaaccgggggttccttgccgtttgaggtgatggcgttgttagggtttcttggtgggttgaattatcctctgaatttggttgattcgtggactgggaatgatccttgtggggg

SEQ ID NO: 93958 - DNA, 229 bp, Glycine max
aggagctattgtgttaaaagaccaattatggcatttcctccatatcattctaatcacacccttcctctgcctcctgtatatcctatgtggggacaatctggcagtccaacggctggcatgcagatttggggctctccaggttatcccttttggcatactactgctgaaaattggcactggataccatttccagggatgcatgcagatgcatggggctgtccagtgttac

SEQ ID NO: 93959 - DNA, 148 bp, Glycine max
gcagagtgctatgatggtcaatgagttcctcgggcagagttggagtcatgttcttcccaattcaactgaatcactgggagttgaggttcttaagtcccgtgggttcttcacacatgcatccttctattggataggggctggcgcattg

SEQ ID NO: 93960 - DNA, 238 bp, Glycine max
cagaatgggtatgtgggatcatgtatatccacattcctcctgcgcaggttgattttagttggtaatctgtccctgattagtctccacacgaagaaagtgactttactagggaccttgaccttccacagctctgaaaaagtaccttcccaccaaacctgtacccattcccggctgtgtatacacccgatacatcttccttacaaatccacttatcttctcgatccaggtgaatgctggt

SEQ ID NO: 93961 - DNA, 248 bp, Glycine max
atttttgttagactacattctatcgggaatgtcagttattgaaccacaagttcaaccgacagaatcaaaggctgagttactgttgcagtctgaaattgacattccagacaaagaaaatggcatcgagaagaaagatcatactcatgaaattaccgcttcaaagaaaaggaaatcaaacaaatcaaaacatggttcacataagaaagttaagaatgtagcttacaacaaggtcgaatctatacaattac

SEQ ID NO: 93962 - DNA, 128 bp, Glycine max
  unsure (1)..(128): unsure at all n locations
gatatgtatgtaggatagttgacccggaaaccatgtagaaaactatttctgcctgtanaacatgtcaatttctagcttagcgtagatttactttaatgttgagttcactataaattctcgtacatgat

SEQ ID NO: 93963 - DNA, 262 bp, Glycine max
agattttcggttttcggatgagctcagctgatgggagagtaggggaagggggatagtaattgagtgttgggtgcttagcttcctctcatttctttaagaagtgatgttttcagcttaggtaaattgtgcgaatttggtattggattttcggtattggttgcttcaattgtctactttctagttttaggtttcaacagtaattaggaaagggagtgtgaattattggcatactaatataaccttattgtagtctatggaaaat

SEQ ID NO: 93964 - DNA, 270 bp, Glycine max
ctcgtatcgtatataaacctctgcttcactcttctccttctacttctcttttttacactaagtttttatttcaacagaggaaacgcgattgagaatttgcgaaacggtgttggaatttgtgatctgagatggtcgcaacaacagagttgctctttttgatggtattgaggagggtggcatcagagcatcgtctctttattcctcaagttcttcccatgaaattgatgaacatgataatgaacaagcattggatggattgcaagatagagt

SEQ ID NO: 93965 - DNA, 269 bp, Glycine max
aattgaagcctctctctcattttcacctcactgttctctatctctgcacgaacgacacaattgaacccttaaacgacaatggcgtggggacagtgccgttgctgcgtttggtgactgatgatgctgcgcgtcgtcgtcgtggacggaggtcgcatggggtggaatctggtgcggccgtgtgcattgtgatcaatcaatcataatgaggaaagaggattgtttgattttgtgcattgaaatcgaaagagaaagaaagagagaaatttgtt

SEQ ID NO: 93966 - DNA, 269 bp, Glycine max
tcctgctgtgctctcgttactaattaaatgattctgtattttgatctttgtcttttatgttggaatcttgagaagtatacctgcaatatagaaaactcttatattagaaaagctgacagatgcaagagttttgcattaacattttaactttactgatttgttgcaagtaggtcttttatcattttcctcaaagcttgattttctggatgatatgctttctatattggttcaaatatcatttatgcttaagattcaacccatagtttaca

SEQ ID NO: 93967 - DNA, 197 bp, Glycine max
cttgcccctcacaacattcagcaaaaaaaaatcttgccactcacaactcccacatttactcagcaaaataatctcttatgtcacccgttgttaacacaacaatgaatcacttcaaacccaatgacacaagcattgacattgaacccttaaagagacgagtgtcttttgcggaataccacccaaatgaacaagaacca

SEQ ID NO: 93968 - DNA, 245 bp, Glycine max
acaaattgtgctgttgaatcccagtttataattaatcatttagcccaaatgattgtatttttatgtttttagtagctaattgtataatttgagtgtgatagatttgtaggacaacatgttagttgttgggaaaaattacccaaattttctttgaatcagattttgtaaaaggctaaataaatgttgaataacaacaaacacagttgataagagagttcagccaattatacatatgttttatggtt

SEQ ID NO: 93969 - DNA, 264 bp, Glycine max
  unsure (1)..(264): unsure at all n locations
gaaaaggcactggatactattttgactcaaaagagaaggttccaaaatgaaatgaaaatctatttgngtatgcggaagaaattgaaggaaatttgtccagaagaaacacagaagaagattgaaattatgtttacaaaaatagcagcattcttcccggattctcacaaagctgaagagtgtctgcataagttaaaccaaattaaagataatagcgtgtttaaattacttgaaaaattgttggaggaacaagccttcaccacgatt

SEQ ID NO: 93970 - DNA, 259 bp, Glycine max
cccaagaggagggaatttgaagggcccctctctcactcaaccctgtcagaggtgtcaagcacatttttttgtttgtgtgtgtagcaaagggtggtggtgtggtgcttgttgtggttggtggtggagtgcgcaggataagcggcaaagtaaggtgaaggttaggggagagaaagaaagaatcaaatcaaccaaacagaagaaccccatttaagagaatatatagaaagtaaaaattgattaaaagattgttctttttatt

SEQ ID NO: 93971 - DNA, 254 bp, Glycine max
tctcgagccgaatcgctcgagaaaaaaatgactttggaattaaaaagttaggaatcgtgagtcacaatgagtaattaaacttattttttaaaacattaaaacataataaaaatagaagggggaaaaaggcttacctctaaaccaacccgtagcagtaagaagcctaaatggtggaaggattatatctcttcttagttataatttataattacttaggtaaaataattagttaatgagggaatgtaacgactgaa

SEQ ID NO: 93972 - DNA, 161 bp, Glycine max
cttgcaactctatatgagttgagtataattcattattttcttctcttataagcagcgcttaaggagaaatttatccaaagaaaaccttactttgtgacactgatttgcagttctattcggcttcatttttgggagatatgcgtgaggttgtttcccatgtc

SEQ ID NO: 93973 - DNA, 132 bp, Glycine max
atggttatgattttcgcgctcttggtttcgtttttggctgtcaagcaggttgtttacttggataatttagaagacagggtatggggactacattttggttgaacatgttatgattattagtggtggttgcat

SEQ ID NO: 93974 - DNA, 128 bp, Glycine max
cagctctcactcttacttcctcctacgcaggtaattgcatcatagaggttatttaagatgaggcagaggcgtgaaactgcttcagcttcatctaaaggatcaagcagtggcgaagcaagcgaagaaga

SEQ ID NO: 93975 - DNA, 212 bp, Glycine max
accgcccccccttccctctctctgccccgtggactcgcttgcatatcgccagcatcgcttcagtgaccctcttcgccgtccaatcatccgccacgaccgtcgcgtacattgcgcaccgtcttcaccgccttgtttaataggaccatccgtcagcgccgccacgtgtttgtccaccgcgttacaatggcgtcctttgccgagaccgtccgttt

SEQ ID NO: 93976 - DNA, 284 bp, Glycine max
  unsure (1)..(284): unsure at all n locations
cttctgttgagagtttcagacgggttatcaagcgtttcattgatcaggtggagctgaatattggctttgtgcaaaagaaaagagaagaggtgcctttctcaccgaaggatcagcaatctgttgaatcatttcttcaggttgaaaaacggaatggtaacactccgtttacacaatattataaaagcatcatgaacaaggcatcttctaggaaatcaatttcaaatagaaagtcttcaggcaaaggaaagaagaaaatgcaacatccanatggcaacattgacgtg

SEQ ID NO: 93977 - DNA, 278 bp, Glycine max
aaaactagggtttctgtttctctttccgaactgagtagcagctctgaccatggcggaggaccttactcatatcgctcagttgctcgaccaaaccctcagccccgacgctaccgccgtccgcactgccaccgccgcactcgatctcatctccctcactccgcacttccctttctacctcctttccatttccaccggtggaggaaatcaaggtcagaaaatcgctgctgctacctatctcaagaacctcactcgtcgcactgtcgatagtaccggcgtca

SEQ ID NO: 93978 - DNA, 276 bp, Glycine max
ctcgagccgattcggctcgagagtaactgctgtaactcctctgcggctgccgccgccgatgtgtctgtgtctgaaaagtagtctactacttctgatgactcggaagagagtatgttgtcacacaattcaccatcctctgtgcttgagttggatacctcggcttccaaatccgttgagaagggtaatggttcaactgaggaagctactggggctaataatttggtggctgaacttgcagggcttgagataccagatttgagtctgttgaacctgcca

SEQ ID NO: 93979 - DNA, 278 bp, Glycine max
gaaacatagaatagaatagaatgagaccgaaatgaaaatgaaagagaaatgagcattggcagtaggaagcaggcaaggcttcacagatttggccaaaccagttctacactcctccacaaacacccaagatgtgtgatttggcgatcatcaaaatgaaccaaatttccagaaattaaaaattcagaagagttttttgatgttgagaggctgcaacacattacttaaaattcgtcgttgaaatcaaaacagagagagagagagagagagagagagagaga

SEQ ID NO: 93980 - DNA, 271 bp, Glycine max
ggctctttgcgttcccactgccactgctactctgccattcaaatgtataattgattcccactcttcaaagccaaattctctattctcattctcaccaaaaaaattgaacaccaccccccacctcaacctcatattacaagtaccagtagctgattctggcaagtggaggaacatggtttcaatttttcccaggttttctaactaaaggtagcgatgttcagaagctcaaggtggagctctatgaagcaattgcaccccttgaccgaggtgc

SEQ ID NO: 93981 - DNA, 265 bp, Glycine max
gcaattgtatatgtcatggataaaacattataatctctgttaagtgatagatagcagtgtagtaattacaaaaacaccttatccccctgagtgatgaatagcaacgtagtaatttttgagatgattttaggatgctatactttccaaattgatgcagaccagaagttttaaatgaatttatcgatataactatatgttgtaatttggaggatctgattgtgtatagatttttattcccaaatttatttctttgtaagttgtaact

SEQ ID NO: 93982 - DNA, 267 bp, Glycine max
ctaactaacggcatattctctttctctctccatgccgcagcggatgtgttgatcgaccaagtcacctctctcgcattcttcgtagttccaagatccgaactccgagattccgactctgagaaaacgagtaatggtggtgaagatgatgaggtggcggccatggccgcctctcctctcgaagaagttccaagtgaggctgctcgtgcggaggctccagggctgcgatctgctgcggaacgctgcacgtgacggttccaaattggttct

SEQ ID NO: 93983 - DNA, 268 bp, Glycine max
gtcaaaatggagaaatcaaatcacaaactggaaaagatgagttcaatttagtaacagaaagtccagacaaaaagtcatattgcacatcaattgatgtttatacctcaaactcttaggtagttttctttgtcgaaggagaaataaagggcatttgccaccgtattcagcgcaggatccagaactcaagcaataaagcaaaaggtactacagaagacaatgatgcttgtgaactggcactccatgattttggttaaaagagaaaaaatta

SEQ ID NO: 93984 - DNA, 235 bp, Glycine max
ggcgccagtacaagaaggtttccgcttctaatttcttcgacgaagaggccgtggtggatagtgatgaggaagaggaagaagaggagggagaagacgacttcatcgttgaaggtggagcggatctgccagaagaagatgatgggagaaagatgcgtagtagccgtatgctgcactaccaccaagaggacgatgaagatcttgaagctatggccagaagcatccaggaacgatatgg

SEQ ID NO: 93985 - DNA, 156 bp, Glycine max
ctgactttcttcgtcttcaaattttaaaaacgatggcgagaatcgagatatgtgataccgaagaacttcagaggttaaattgctttttacacagttctgtcttctgagttctgactccaattattaaaatttaagttcaagaatccgtaatggaaa

SEQ ID NO: 93986 - DNA, 161 bp, Glycine max
gtttaactaaggatggttctttacgaggacagaaatctggcacagaatttgtcagcaagccccctttgaagattttaattatacctgccaaagaccttgttcaagttacagcacaggatgttgctattaccagggatggcttagctaatgaatctcatcat

SEQ ID NO: 93987 - DNA, 204 bp, Glycine max
catggcgccaattccctaactaacaacccgtttcctcggacaactcgaactaccaaaatgaagtctgcgcgagtcaaagaagcgattctgttagtgtttatgtttagtctcttaagcattgcttgttcggatctagcttcggacagagcggggttgtggttactccgaagcgcggtggggggacgcacgttgttatggaactcg

SEQ ID NO: 93988 - DNA, 103 bp, Glycine max
cactaaccgactcacactgtgtattaggttccgttttccgctaatcgcaaggtttttccatgactgcgcgaccattctccgtcactcttcccagaaaatcccc

SEQ ID NO: 93989 - DNA, 146 bp, Glycine max
attggtatgcttgctgcataattttgggcatcattcatgagattttcccttctcattattagttttaattttctaaaagaatttagagattcttgtacccaggttacttatctatggtcttttggcatgtgtttgaaagattaaga

SEQ ID NO: 93990 - DNA, 151 bp, Glycine max
aagttggaaaccctccactcctagctactacaccagcgcgtgccttcactctctcctcccttttcaaattcgctttcacaccttcaacttcaagctcaactcgaagccactccacagagagaaccaagaacagaaaagctgagaactttgg

SEQ ID NO: 93991 - DNA, 109 bp, Glycine max
acagattgcattttgccgtggttggaattgcataattcttgtccagtttgtcggtatgaattgcccacagatgatcctgattacgagcagagggctcgtcgtagtggcg

SEQ ID NO: 93992 - DNA, 188 bp, Glycine max
cttcaatgtaattgggctaacactacttaacagagcaaagagataaacgcttcattcacttattcactaacttaacatatactatctttctactgtggagttgtgattcttcaataccatatattctctctctttctcttgttctttcgtgatttgtgctgtgaaacagttagaagtggtgttgatgt

SEQ ID NO: 93993 - DNA, 269 bp, Glycine max
gtcgatgccctcggcacaccgatcagccacagcagcactgcccccactgccctctacgtcgtcactgctcccactgccctctccgccgtcactgccaccactgccctctccacaaccctcactttcacgctgttaacttcatcaaaccccaaactcaaccatatttccctcctcttcctcacttcgctccctcacccctcaaaacgcatcccaattttgagtctcttcatcataacgaacaacccttttcttctgatgctcggatttca

SEQ ID NO: 93994 - DNA, 262 bp, Glycine max
gcgaccatcttgacatacccagctatcaggtgtaaggtcatgattcaggctgctgaatctgaagatgataagagtacagaagctgagaggaaggcgcagaggacaatctctggagcactctatactatttggaaaagagaaggtatattgggatttttcaaaggattgcaggcacagatattgaaaactgttctcagctctgcgttacttctgatggtgaaggagaagattgcaaagtccacatggattctaatgcttgtga

SEQ ID NO: 93995 - DNA, 262 bp, Glycine max
tttgaggaaaaaaggtcacaagtttcggatagagagcagcttgttcagattctcaataagatacctttgcctgcagatcttgcaaccaagttgctggatgctgggagtggtaatgttaatgggaaaaaggatcatgtgcaattgcagacaccatcatcctcctatcaatgtcacgagtctcatgacctactgaacaccccccacccccggactgccctttactgtcttctcctttgttcttttcttgatcctcaatactcga

SEQ ID NO: 93996 - DNA, 251 bp, Glycine max
tgctgttcgtgtccgggacacggacacggacacggacacggaaacccttccctccatcaccactgccactgccactgccactgatgatcctgttactgtcactcttactcaaccatctaatgaatcagagaatcagaatcggaaacaccaacaatcatctactgaatcttcctcggcagagtttcggcaacttaagtccagcatacatgacaagcttaaccatgccactcaactggtcaaatctgcttctt

SEQ ID NO: 93997 - DNA, 247 bp, Glycine max
ggcgatgtgatgaaatgcagacttgctctggcagtcattggttatcatgtttggattgttgaaatgtcgttccttgcatgtatagcataaatgcgtgagctatatttttctgatgtccatcacaaggtgatgttctatattagagagacaaggttaaagtggagcttccctgtctcaaatcccattgttagtgtatgtggttgaggttattttctttctcaaattacgtggtagagattgagatagt

SEQ ID NO: 93998 - DNA, 226 bp, Glycine max
ggcttcaaaatatagaccatgatggtctacgtcttggaccattagaaaattgatctggatgcatttggatccttgattcaatataattccattgaagcaaaatttgaatttctcttaaaaacaaatgacatgaatatatttacagttttgcaaacttctttagtggttcagcagcatcttttgcatgatcttattggatggtagagttaccctagaagatgaaacc

SEQ ID NO: 93999 - DNA, 226 bp, Glycine max
aacgctggctcttaaaaggacatctactgaacatgaaataggtcttactgaagctcaacaacaagcgaacatgcaagtttcaaatttattacaaggacaagaccgaaagagagcgaaatttagctacatagttgttaggtttaagtcgcatcttgtgaaagtgaaattttcttggcatcaaagtagaacatgaaacaatattatccaaattttagttttctctgaa

SEQ ID NO: 94000 - DNA, 237 bp, Glycine max
ctctaaaaaaagtttggttgcaatctactgattatgttgaaagcatagttttccttattgtaactgagctcctccgcaatgattggcttatctgaatttatgtgactgtcaattggcaatctaggtacacgtgtatggatttgcaaaacattgcagtgatgttgaaacttcaaagaatgtcaagggaaattctacagaagtctaaagacacaggggttctatggaaaatagatttaa

SEQ ID NO: 94001 - DNA, 235 bp, Glycine max
ctctctcacaaatatacaactggtgttagatactgttgatttatcatatagtgatttgataggatgtgatttagaggaaactgtatctcctctaattatgtgtaattaatatgattagtctatataaaccagtaccataatgttatttagacatacggtttcagtctaatatgcttctggttattactgtttaatatggtatcagagcctgacagaagcacctcggaaactttac

SEQ ID NO: 94002 - DNA, 230 bp, Glycine max
attgagtctgttagatttgaatttaactcaaattgctgggacagggagtagtagatgaaaatgatatggttttgcaattaagacttatgagaggcactcttgtggcactgacaactttcaaggtatacttatatgggctgttgctcattgtataagctcaaactgcctgttgaaaaggaatgcttcatgtgtgataaatttatccaaatctgatgatttataaaacttgt

SEQ ID NO: 94003 - DNA, 223 bp, Glycine max
aatacaccttcggatctctgtgttagtggtaaatctcggtggatctgagattgtgctgtaaataaagatgaatcgtttatgagatactcggataaggataaaaaaaattttaaaaaaaaaattgaggtgtgtagttgagtgcttttgtaattagttaaggatcaagagattgggcttgtatcatggataatgttattggtggaaaattcaagcttgggaggaa

SEQ ID NO: 94004 - DNA, 233 bp, Glycine max
gttgtactgttttttaatgtatttcaatttcgactaccattttcaactcactaatcaaaataggaacttcaaatcgaagatactttgggcttctgttttctgtggttctcaataagcttttaaagcatacaggtaacagaagcccaaagtatcttcgatttgaagttcctattttgattgttgtactgttttttaatgtatttcaatttcgactaccattttcaactcactaa

SEQ ID NO: 94005 - DNA, 165 bp, Glycine max
gtaaagcagcattggtcttgttagttttctttgtttctagaaatgtacgagagtatttggtttttactcatttctacttctcaatgcaattattaagtaaagcagcattggtcttgttcgatttctttgtttctagacatgtacgagagtatttggttttttctc

SEQ ID NO: 94006 - DNA, 123 bp, Glycine max
ggaatctataccattgaatatgttggtcgtctaaattttactagaggtatgcatccaagcaaggcatgacaagatcctcttcagacataataactgacaagaattattgaagttggaacatgc

SEQ ID NO: 94007 - DNA, 114 bp, Glycine max
gatcccgccagtgccattgctgagagcctctaaccaaccactgcgaactccaccaccgcacttccattactatattgcacttaacagcaaaatctcacaaccaatcatgattcc

SEQ ID NO: 94008 - DNA, 200 bp, Glycine max
gtggtacccgaacccctactggtgttgtcattgtcttctctgatttgctttccctgactgtctatatgcctcgctaaccatctcgaggctccggttgccctcgtcttcgcgctctaactcttgacgcgcttggtcttatcatagttgtggaggcctgcgataagcaacgaggagctcccctggtggtagagaggtggggc

SEQ ID NO: 94009 - DNA, 281 bp, Glycine max
caagaacaagaattgcttcttcctctttaggattctccctctgcagtttaagtccatatatctcgctaccttgtgtgttttctgttttgtttctggcaatggctcaagtttttgtgatgctcatggtagttggtggcttcttgaatttctgagcttttgactattctccttcaggtaccaaactcttttttttctaccccacttgaatctttttgagattttctcctcaccctttcaaatttgtctgcactctttacctaatactcttagaaattttgtgt

SEQ ID NO: 94010 - DNA, 278 bp, Glycine max
atcatcactctcccagctaatggccagagtgtggagatagacatcaaccatgaacccgaggaaacagcatcatccagcgtaaccataaataaggccttctgggcaagcatcctggggtatttgctgctgttgattttatcaattgctatcatcacacgtttcttggacagaccagagagatctcagcaaacaagttcttcagttactactactccaagcattgcagcgcccacaactcctgacagaagcaccccatcatctgttgtaaatgactcctc

SEQ ID NO: 94011 - DNA, 279 bp, Glycine max
atgaatcaggcgtgagttctgttccgctagggttttgaaagagcagccagtgtaagacggcgatggcgaaggcccaacaagcgcttcctgaggagctgatagtggagattctgtcatgggttccggtgaagcctctgatgcgtttcaagtgcgtttccaaaacttggaactccctcatcttccaccccaccttcgtgagattgcaccttcaaaggtcatccacaaacacccacgtcttgttaacgcccgaagaagaagaagatccccccgacgatgatg

SEQ ID NO: 94012 - DNA, 278 bp, Glycine max
gaaactgtggattgcatgactagcaatgaccatgaagtgacatgcatctattctccatgtgtctgtccatttcaagactgtaactatgttgggccatttgaacagttggcattgcatttcagcagtaaacactgggattccggaagacaattcaaatataatcatccattggctatctctttacagatggatgaacaattccttgttctccaggcagaagaagatggggttctttttctcctcaacaagggcacagaaactaatgggaatacagtgat

SEQ ID NO: 94013 - DNA, 192 bp, Glycine max
aaaaaaaaaaaaaagcccgaaaaagagaatacatatttggtttagttagtttcggtggtggatccgcgttctaacaccaatgcggaattggttaggccgattccgtttttccggtttggatatgaattcggaggatttcgatccattctggaaaccccgggcttggacgtttgggccctcatgaacgcggca

SEQ ID NO: 94014 - DNA, 218 bp, Glycine max
cttatgcttagaagaactacataagaaggaagcacaatgggtaacgagacataacacagaagatagagcaaagtagctacctctagctaggttctctaccactatatatgatccttcatctttcactttgatcatatttctatcatacatatattaagcatctacaaaagaacaccaaccttggtgcctatttattatactagaagaaagaagggtag

SEQ ID NO: 94015 - DNA, 258 bp, Glycine max
ctttactctacgttcaaaaaatgggtaggagtctcagccctttggtgaggcaagagctggcaaatcttgagaaagatgaagatagccgcaaatccgccatgaaggcgttgaaatcctatgtgaaagatttggatataaggccattcctttctttcttgcaaaggtttctgagagcaaggaaaattgttcaggggagttcacaatttcaatctatgaagttcttgcacgggttcacggtgtcaaaattgttcccttgat

SEQ ID NO: 94016 - DNA, 131 bp, Glycine max
tccaaaattccctctctctctctatttcttaacacttcatcagcaaatgcattcacactgcagtgtatagcttgcatacgctattccagagagacatatatctccctctcagaccagttagctgagtaacg

SEQ ID NO: 94017 - DNA, 257 bp, Glycine max
actcactacacctcaccaaataatgaaccatggaataccaataccacccatcatcttatgacgtctcttcctcttctcactccaaccaccatcaacaatggtcaacaacaccgaaatccctctcttcacacgcagcctctactcagtcccctccctcaaccaccaccaccacctccacaccccgaattccatcgtctaccaccactgcctcacaaccctcaagggtcacacctcctcctacatctcctccttaaccc

SEQ ID NO: 94018 - DNA, 252 bp, Glycine max
caagagctaaatctcccaagcttggtcgcaagaagagttcaacgaattcagagccagaaggaaaccttagcaacaatgctcgacaaggtcgtttaagtctggatgagaaagtgtctcagactaaccccactaaaggaattagtcctgttcatcaaaagaagccacaacgaaagtctcttcctccgcaactgacttctgaaaagaccaggtcatccaattctgcgtctgtgaggacctcatctaaggcagtga

SEQ ID NO: 94019 - DNA, 191 bp, Glycine max
caacgatgacgatgacgatgacgacgataacgatttggatttggaatgggatgaggatgagaccgaggaggatggctcggagcatggcccaaagttgcaccaaaagaggaagttcaaaatcaagtggaggctcatgatggagtggattttgttcctcaacatattggcatgcttggtgtgttctttgacca

SEQ ID NO: 94020 - DNA, 161 bp, Glycine max
aattagaaacactgatttcttcagtctttctctaaatgcttcaaaggcatcctttatgacaggatcttcaccccatgatggatgcctttgaaagatttagagaaagactgaagaaattagaaacactgattgatgagaggaatgaaaacacaaagttgaag

SEQ ID NO: 94021 - DNA, 160 bp, Glycine max
cagacgtgtagtgacacacgcttaaagctcctgtctagtcttgggtgtgagagggggatgttaaggtgtcccatgttggctatgaatatggctataatactcttaataagacttgggctgtcctccccccttgagttagtatttggggttgaattaaaac

SEQ ID NO: 94022 - DNA, 105 bp, Glycine max
actcacttctagcgtttcctccgcggtatcaacaatcatggccgacgaaacaccaaatcagatgaaagaggaggttccagaaattgttccttttgatcctaccaa

SEQ ID NO: 94023 - DNA, 177 bp, Glycine max
aattgttagtattgtatatgaatgggaacatgtggaaaattcgagtttattgctgtcagaatcaaagcagggagaataagtttgttaaaaaaacaaaaatagtgctatttagtgaccacttatattttatgttgtgactagtgaccacttactagtgacttcagggttgattacatg

SEQ ID NO: 94024 - DNA, 167 bp, Glycine max
aatcaccatcctcgaaagacatgaaatttgatcggtgaactaaactgccttaacagaagaccagtgacgactagaataactagtacattggtcttcatcttcatcgtataaccagttagttgatctgttatgcatgtatcaaaatgacttgtaatataaatgattta

SEQ ID NO: 94025 - DNA, 150 bp, Glycine max
gagaactcaagaaatggagagaataacagagaatggatcagatagtagtgtgagtttgaggagaaatacatctaacaatgggcgtcgagggttgccaatgatccaaacggattccgaagactgccacgacgacagcacccctctcagcaa

SEQ ID NO: 94026 - DNA, 165 bp, Glycine max
ctcgagccgattatctcattctcatatatctctctcaattcctcatcccaccacgcatacacagtcaccaactcccttcttcttcttccaatggccgccacagacgtcacggagttcacgtgggccgagctcctgggccgcgacaactgggcgggcctactagac

SEQ ID NO: 94027 - DNA, 249 bp, Glycine max
aaaacaccactctctgttattcctctttcacacatgatgcaacacagcaaacaccaccaacgccaccagaacaagaccaagaaaaagtagttcctcccactaatcctctccctcctcatatccaccttcctcatcctcctctccgtcatcgtttcctccaactcaccctcccagcggtggcaccaccatcaccgagccccagtcccaaaggaagtggtgccccgtttcgtcgagtccaagctgaagata

SEQ ID NO: 94028 - DNA, 243 bp, Glycine max
gtaactgccacatctattgaaatcccacttccacagcatcttggtttcaacatgggaaactcctacatcaacaacaacaacaacatggataatcatttggtgcaagaggtcattgatgcatttccctatcagcagtccacttgggaccctactattgttcaggaattacaagacatggcctatgctaatcacacagaacaaacacaacagcaacaacaaaatgaacaacaatttcagcaattt

SEQ ID NO: 94029 - DNA, 242 bp, Glycine max
gagaactcaagaaatggagagaaacacagagaatggatcagatagtagtgtgagtttgaggagaaatacatctaacaatgggcgtcgagggttgccaatgagccaaacggattccgaagtgtgccacgacgacagcacccctctcagcaacaccaatccatcaggtttacgtgaatgatcaatttctgaattgggatccagaacacagaatcaaagtccgaatagtatctgcaagagcttat

SEQ ID NO: 94030 - DNA, 248 bp, Glycine max
agtgcgcaccctcctcgtgggtggtctctgacactgttggcagaatccagcaagtcacattctcgcaaacacacacagcacgtgtttacctaaatttcttatggcatttattatcaagtcacacttgttctgtcccacttgccaccatttttgagcttcactcgcatcacaacacaacacaacgcatctcaagacaagaccaatgacgagaaaggtctcgaatttctcggatctgatccaaagggtca

SEQ ID NO: 94031 - DNA, 239 bp, Glycine max
tgtcaacttgcacggactcttattgatggctggaaacaaatggtggatgagtgggtcaaggataccacagctattgcaggttcagaaggtactccagattcagtaaatccatctgttgttgatgatgaagaagggcttccatcacctcctatggatgaaggggctttatttgcagctccaactggttcgatggaactctcacagttctttgatggcatggatgatgatggaaatcctca

SEQ ID NO: 94032 - DNA, 241 bp, Glycine max
ctttcatctcgacccaagcagcaactctctcaacaatgaaaaaccaacacgaaccaacaacagagggagaaagcgaagaaaaaaacaatggaggcgtaagagaaaaaataacactgcaaccaacttcaaaaggaagaagacaccaggggcatttagcgaattaaaaacaattgctgggtgcacaagcaataatgctggtgcacctagcatcacccttgatgcatttggacctgacatggta

SEQ ID NO: 94033 - DNA, 238 bp, Glycine max
tggtaagacaagcacagttttggacacagacagaaatggcaccaatacttctgaaattcccaaggaagactattctgggaagtcatcaaataaatggaatgcaccctcaactgaagatataattgctgttggtgggaatagtttgcctgaggatacagtcagaaatggcaccagtacttctcaaaagttcatcgtggataattcaagggaacctaagtttgatgttaatattgtctca

SEQ ID NO: 94034 - DNA, 287 bp, Glycine max
gcttctgaaagaacatctggattccgcctcaggggacatattttatgatgctagtgaagatttttctggcactgtatctgttgatgatggtgatgataatatctgcagaattttgactgttgaagatagtttgggtaccaatgttggagtatatactgatgatacagaagaaacaacagacatgctacatgcacctcctccttctggaccgaataagagaagaaaattaatgaattcctttagtgctggagttgaagttgatagctactcgacagctgaaattgata

SEQ ID NO: 94035 - DNA, 149 bp, Glycine max
tgcaaatcaccatatcataacacaatcaattctagttcacaaaataatggtgatatcatgaaaaagtataaataactacttgattttttctgaccataaatccattgcaaacgcactatatgagaagaataactaaggctctgttctgt

SEQ ID NO: 94036 - DNA, 263 bp, Glycine max
tggagatagagggtggtgttgtgattgggattattcgcatcatgagtggtttttggtattgggtttcattattattagtggagtttggtggagaagaatctaatcttgagtttcattgcaaagctacttttctctgtttggggataaataaaatgggttgctgtttcatgtttcgattcgagttccaaggaggatcacaatctccgtcctcagcaccaacccaatcaagctctcccttctcagatttccagattgcctctgga

SEQ ID NO: 94037 - DNA, 278 bp, Glycine max
cgtcctcgtctctcttttttctttctcccatcaccaaacacgacacacagacaaacgcacccgaccaaacattatatatatatatatataacaaacaacaacattcttgtttctcatctgacatctatgcacccaccaccttgatcctcctccactctgttcgttcgattcctcattccaccgatggcgggtgcacactcccacagacaatcacaccacctccaacaacaaccctcttcgcgctcctcttactcctcaccgtcctccccttgactctc

SEQ ID NO: 94038 - DNA, 161 bp, Glycine max
aacagttactgctgaaatttcccaaagaagaagccccaaatttttcaaaagctcatcacatcacgccattcaccaccaagtaccaaattattcttctcagccagacttaaaatgcatccttcaacacttcttaattcttatacctcctttccacacaacat

SEQ ID NO: 94039 - DNA, 184 bp, Glycine max
catcacaatcaattcaacactcaccccagcaatgaaatttgggaaagagttcaagacccatttgggagacaccatccctgagtggagggacaagttcctttgctacaaaccattgaagaagcttctcaaacagaaccttccttcaatcactaccgccatcactgatatacccatcaatctccct

SEQ ID NO: 94040 - DNA, 259 bp, Glycine max
tctcgagccgaatcggctcgagcggctcgaggattcgattccacactgatatttctcttctctctctctgtctctgccgaatatggcgccgcctgcgccagcagttgaaggcggccaggcgccgcaagggcggcagcaacagccgcaaggagggtttcgcctctccggaatcatacgcatggcagttttctggtacttcgcctccaaattcttttccccccgagaacctaccgaaccttccgctctcatctccaatctc

SEQ ID NO: 94041 - DNA, 125 bp, Glycine max
ggtcagggagcgggttttcttcttccacccttctaattcagtcttctctgaagctatcagtacttgcttttcatgaatttgcaaccagaggctagagttgctcctattcagtatctcctgtgctt

SEQ ID NO: 94042 - DNA, 100 bp, Glycine max
gttttctttcattgttgctctagactactcagaaaacatgttgcagcaatgttatgaattcattcagcaggaagagaactttccaaaagagaacttcatc

SEQ ID NO: 94043 - DNA, 229 bp, Glycine max
caggattcgggcaacatttgagaaaaaacagcagcagagaagtcaatttgataaagaagatgtagcacattagcacacgtgatatggtggcatgaaaagctaacattaactggtaactgcacccaaagacagtggccacaacccaacatttctgttgtgtgcgccaatcatggagacgccaagtgcatgctgggacaactgggtcggagaggcgctcgagaccctttac

SEQ ID NO: 94044 - DNA, 213 bp, Glycine max
tgctctagactactcagaaaacatgttgcagcaatgttatgaattcattcagcaggaagacaactttccaaaagagaacttcatcttggttagaggcagacatatctaggctcccctttgtttccagttctgttagatgctgtacatgcaggcgcactctccactgttggccttcaccattagctgctgtagctgaaataagtcgtgttttac

SEQ ID NO: 94045 - DNA, 169 bp, Glycine max
gtaagatctttgctattcatgaagacaattcaggtatattaggaacgcattctgtgactagggtgatggaaaaactacttttaattacttcaatgaaacttagttcaaaattcaaaattatgtttttaacacacatccaaacattttggtcaatgcaaaaatcatgttt

SEQ ID NO: 94046 - DNA, 280 bp, Glycine max
aagagattaaggattctgaaggtaggacacctcaaatgttatttactgaggaacacaagggtttagccaaaggagagaagtggctgaagaacactgcttcatcatgcatgctagttgcaacacttttatccttctcccttttccctacacctcaacccttctcccttcctctctctcatctctccatcgcttctcatcctcttctcttctctctcgtctccctcagaccacccaatctgttacggattttttttttacataagggaatcatcattcggcg

SEQ ID NO: 94047 - DNA, 261 bp, Glycine max
ctttctcttttcttcttagaacggtgattaatcgttgtttccgttatgaaacgctctgaatttgagttccccgcaactgtttttcccagtgcggtctccgacgacgtcgttttattcggcaaactcataacgcgccgaaccggagaaccgggtccagcgccgtgtgagaagagcgaaaaccgggttctgttgagatccgagtcttcttcgggtgggaccaacgggtttgtggcgtggctacggtcgccgtccgggagggaa

SEQ ID NO: 94048 - DNA, 217 bp, Glycine max
gtccttggttgcctttgctgcatttcaattgtgtgcctcccatgttacctatgcaagaatgggtttgaattctcagagggagttgtatgatagatgtggaggaaattggaagcgagttttgaggttcttgcagtctgtggaacaatcctctcagatggtcgagacatcatcaggcaatatgcaataacaactggaaagtatcacaccttgttgatca

SEQ ID NO: 94049 - DNA, 254 bp, Glycine max
cagattcgcgccaaatgctccgtccccaacaagaagaaggtggtcacctctgtggtggaagaagagggagtggatttaagcgctcagatgtgagattaattaaggaatgtttgtttgttaataaattaatgaccatgtttcgtagtagactagtaatgtgatgtacgtcagttacataaaaggagttctcccgtgttactacctgcattcctgcaatccttaatttctatgtttagaatgttttttatgacatg

SEQ ID NO: 94050 - DNA, 245 bp, Glycine max
cctcatgagattgaggaagcgtaaacgatgttttccttcttgttcctctcttcgcaaagtagacgaggatgagatttattggagacacagaaaggaagatgaagagttggaatggacacctaattccactcacttgatatctcagttgactcaatgttttactaatgctatggttggatcacgatctggataggaggactctttaaccgcacaaccactaagcgaaatgacaaattcgttgatta

SEQ ID NO: 94051 - DNA, 161 bp, Glycine max
atagttttccaccagaactaaatcatgccgatggaagccatctcagtcctgtattaatatcaggcaataatgatattataaactttgatatggcagatggtatcttccaaggttcagattagttgaatgtgaaagatcgtctttccgatgaagatggtgca

SEQ ID NO: 94052 - DNA, 248 bp, Glycine max
ggagaacaaataagatagaagcccatatttaaactatacttcctaactagataagaagtcttttcagaagcagtagactgagaggctttggcagaattgatcgaacttcttgctctcagggtgcttcgcttgagctcaaccatccgggatgcttgttttctgaggatgattctttcgcgtaagtcagggaagtgttgagccagagtagagatgacctaggggagaccttctgatgctctaaactaatg

SEQ ID NO: 94053 - DNA, 257 bp, Glycine max
ctctctgctttctttctatttttttccccatattaactgacataacagcacactctcttaaagactacaaaaccctctccaccaacaccatattttccttcttgtaagaaactcacacaaactctcttttccttaaaattatttgtttaattttctcttcactctcataacaccccaaaagcaaaattactacggaacctgctgctgggaaatgcactgatgtataagctttgcaccagaagcagacagcacagcac

SEQ ID NO: 94054 - DNA, 227 bp, Glycine max
ctagggaatcactggtgccaaattttcttggtaaaactagccttcataaggtaaaagtaatctttttctcaaattctggtgagcgtgctgctccatttatacgacaagcagctaaagactattgggcttctgcttcatttgctttcattctctggcgagaagaggaatcttcctattggtggggagcatttggggtggaatctgcacctgctattgtatttcttaaa

SEQ ID NO: 94055 - DNA, 224 bp, Glycine max
cgagccgctcgagccggtcaagatgttgaagtgtccagaaaagtgtttgacgaaattcctcacagagaacattgtttcttggaactcaatgatttcggggtatactgtgaatggatatgtggatgatgctattttgcttttctatgatatgttaagagatgaaagtgtggggggtcctgatcatgccacgtttgtaactgttcttccggcgtttgctcaggcag

SEQ ID NO: 94056 - DNA, 255 bp, Glycine max
ggttgagtcatgccctttgaatcttgagtttgatgcagatgacttagtggcattcttggttgttggttcacaaggcatccacctttctggttattttgtgtttgatgatggggatgatcttagggatgactatgaatatgattcatggatggggggaggatattgaaggaactgagtcagaggagtcatctgaatatgatagtgaagatggatatgctaatgacttcattgttgatagtgatactgacatgtacc

SEQ ID NO: 94057 - DNA, 261 bp, Glycine max
aacggttctagaacccccgcgagtgttgcggtttcggacattccttctccttcaaactcaaccgagggtaatagttataaccgtggcaagagatttttctttggtgttgctgttgcctttgctggccctgctttcttctgcgtggtgcttgtgattttggggtatgtttctttcctcaagtggcgtggcgtgaggaaattacagaagagttttcgaacagtggggtgttgtcctaaggagtttggttacaaggaggttaag

SEQ ID NO: 94058 - DNA, 112 bp, Glycine max
catccagcggagacgacacgcgctgcaccctttgacgggtgaaaacattgtaaaaacctatctagtatatgatgtctctctccaatgtctcatgcgcgataaacacgtacta

SEQ ID NO: 94059 - DNA, 185 bp, Glycine max
cataaattgagttcccttggtttagattagtattttggaaatggggcatttggtttggctccttggcaacctaacttggacacatctttcttcaaagagatttagaagaatatgacaaaaagtgtgatgtgatgatgtatgtttttttttttttaaaaaaaatgtatagattttgattaagagtt

SEQ ID NO: 94060 - DNA, 245 bp, Glycine max
caggcgtgagcaaaatgggttttagctgttgaggagagatgcaaaattttagtacttggcaagactagaggaacaggaactacacatggtttaaaagtccacatcttttgtcccatgctgaaggaaaaaagagatgcagtgaggttgattgctgatagatggaagcttgcaatcactgctgccggctgggagccaaagcgatttattgtaatttctgttaccccaaaatcaaaggccccggctcg

SEQ ID NO: 94061 - DNA, 259 bp, Glycine max
tgaggaggagttcattctcaatagagaagaggctgacaatttaaaatctctttcagatattgatgatctgagtactaccttttggaagttgatcaaggttgtaagtgaaccaaaaggcgcaggatttattggtgaacagggatcgagagaaaattctgcggctgaatgggcacacaaggatgatgttcttaattggtatgaccagaatgcttatgataatgaaggttctttggatggcagaagaatgccatcacagcct

SEQ ID NO: 94062 - DNA, 249 bp, Glycine max
gaataatgcaggttcattctttcatttgtcatgtgccttcattctcatccatctatcataatgttgccttatgtttcgcttccttttgtaatggttctgtctgatggaattcgttccctttgttatctgcccttgctttacaattcaaagtaatcaaaggagaaaaatgtttggttgttttattaagcaatatatcatctttgatactgttcagttgcttcatgtgatcattgcttgtaattttttttt

SEQ ID NO: 94063 - DNA, 203 bp, Glycine max
gcttgaattagtcatgtgtggattttttgagtagatgttgagctatgtggatttttattgaactaagttgaaattatgagatttcaaattttgcctaaacctatttcagcaaaatcgtggtcccggattcgttaaccgttggatcatcttcaaattttgtttggagattcctaagacaatgcgacagagtcttaggaatctct

SEQ ID NO: 94064 - DNA, 100 bp, Glycine max
aggagagaaggacgtgcaaacggcaagtcccagaggacaaggcaaacgacaaagagatcgctgtgtcacatattcgcaattggacaatctgagctgaatc

SEQ ID NO: 94065 - DNA, 252 bp, Glycine max
taataagaagaaggttgttggaaatgggaatgggaatgggtttgggaaagtggtgagggctttgcagcaatcaatggtggtggagggtgagaagagaagagcttcttttgatgggttaggagggttgagtttggatttggggaaagctgagttgctgaagggtaatattaatgctaataatcataataagtcttcattggcttctgatctcactgcttctgatactgatagtgtttcctctgggagcacgtc

SEQ ID NO: 94066 - DNA, 255 bp, Glycine max
tgagatttggactacagtaataaatttccaattttttaaaaaggcaagatgtacacacttgaggagaaacaccttgacagttgacaccctccttcctcaccagtcacagtttgttgttgtcgtctccttccgcaaccgtgttgggtgcgccaaccaccgcatccaccaccatgccggtctccaaccaccagctctacgctcctctccgtccaaacccatcttcttcttcctcctccttctcttcccattctttta

SEQ ID NO: 94067 - DNA, 263 bp, Glycine max
gtgcctctctaaaggttgcatcatccttcacaagggtttgtctttgtgctccaatctattcctacaacgagattttaagagctgaggtgccacctagaagaagcaatagttatccaagatcaaagccattgcatgcttcacatgagagaactcctagtgctagacttagcactgagggaaggagggtatttaggggcaaatcattgactgatgatgttctaatgaggaggtttgtgattgaggaagaggcaatgatgcaaatt

SEQ ID NO: 94068 - DNA, 246 bp, Glycine max
tactactactagccatatattatgcaatcatctatcgcgtggatcaactcaggtggagttgtggcaatgtgggttcaagtttggatatgtagttgagatgaactagaattttgttattcatgataatattatccgactcgaacaagattaatttgaggggaaaatacatgtgatttaaaaagaaaaaaaaggtaaatattatgtcaggtattcctcttttggatcctcatttttttttatatggct

SEQ ID NO: 94069 - DNA, 268 bp, Glycine max
tatattgcaaccttcaagtgttagtcgaattatttgcttatgtattgatttgctttttccctattttaggttgttgcttattttggagagagattgatatcagagaaaaccctgagcagaaatgctgtaagacaattgtctaacaataagactgtcattgcttttacttataaacaaaatgggttgcttgttggttgcaagtacagaacaatggagaaaagattttggcagggaaaaggcgcggacaagatactgatggaatagatga

SEQ ID NO: 94070 - DNA, 261 bp, Glycine max
cagcttcgttgcttcagtcagatgcttattagcagttgtttctaagcgaatggagcccgaatcaaaactgtcattgttgcaaagccttcaaattagtcgtgtacttaggttagtgaccgaggatgtcgatgttgagctggtctctgatatagctgcattgctttctgggtatgctgtggaggccttggattgctttaaacgcataaattctgaggatgctaaaggaatctctatggagcttttgagtgaagtttaccctcc

SEQ ID NO: 94071 - DNA, 263 bp, Glycine max
gttagtcaatgcgtgtctcaaaagatgtgactttcaggttgggttggcaaagggtacattttgacaaggtgctttagacatccctaaaatagatgatgtttttcttccataatgaccaaacatgaccgcaaagaaaggtagtctctctcttcttattatttattttatttttctcttagatggtttttagcacataactttttatggtcagaagagacttctgcacattctccaaaagtggcacacattttttgctaatgtta

SEQ ID NO: 94072 - DNA, 244 bp, Glycine max
gttgatgatgagaaaaagactagcatgctgcacaagggaaaggaaatttagcatcgatcatgatgagcaagagaggattatgacatataatggccttgagagttgcatgctgaacaaccagtcttacgaagatgagagcagaacaagtagaggagatgaatgcataacagattcatttgatgatgacaactccagctcttcatccagcaaagatgcttttggatcattctcttcaaaatgcttg

SEQ ID NO: 94073 - DNA, 117 bp, Glycine max
caacggcaaccaacgaagggtgcatatgagctgttgtgttatcagttatcacgggaaggcagcctaaagagcagtggaaatctcaattcgcaagtgaatagcacacggacgcaccca

SEQ ID NO: 94074 - DNA, 173 bp, Glycine max
ctcgagccggttaaagggtctagtccttaagttgatacatattattgagggctgttagcctttgggatctgccatttcctcagctattttgttctctggattcagtcattataacagattgcaaatacaaaaaaaaaaaaaaaaaaaaaaaaaaaaaaaaaaaggggggcccc

SEQ ID NO: 94075 - DNA, 262 bp, Glycine max
tattgctcatccaaacccagaaagaaaaatcagaatcaagacaaaacaacctgcagagtgcagatatgggagttagaagttggcgccatgtgttgttctccttgtgtcttgtcttcaattcaggcctatgtaaagccacaacactaagagaagaagaacaccaagaaatctcatatgaatttggtaccaagttggatgcagttcctgtagtacaacctacaactccaggcacaacaaatccataccctacactaaacccaac

SEQ ID NO: 94076 - DNA, 268 bp, Glycine max
caaaaattggaatgaacaattgaactgcaagcttcttgctctaaatatgttagattctttatgtattattaaactcatttatacacaatggtcatcatcatcatcatcattatctttggaactctttgctcaaatggattacttggtattcacacacccacatacatattgggaagcagaatatataaaagctatttgaataaggggaaatttggataatttggatttaccaaaagtgaaccttttgtttttgtaatgatatttgaga

SEQ ID NO: 94077 - DNA, 257 bp, Glycine max
ctttgtttgttgtcatcagatgagagagacatcacacaaagagacaatcactgaatcactctcactcactctgcatgctgtgtgcgtgactctgtcattgtgtcttgtgttttatccactttgcagttgtttagtttctgaggagcgttttttttttttcttcctaatgagtttgtgtctgttcttagttgctgttatagtagttcaagtttcggttactactactactactaccacatgtccatgccccttcaatt

SEQ ID NO: 94078 - DNA, 243 bp, Glycine max
ggaggcgtatattattttaatgttatttatgatgaagaatacaatatattctgctgaaattttatagtttattgtcaagtttatttgaaactgtttcagtagtcttttaaatgtagcacatttgctgttgtcttggagctttcccattgcaattaacatatgtgtgcaggtgcgaggggaaagtgcaaagataaaatagaacacttccttttggttgcaccatatctttaactattaacctgg

SEQ ID NO: 94079 - DNA, 254 bp, Glycine max
ctggttttgtgtattctgtacttaactcacagtgttccaccctctctcaaactactaaattttgcaactttttctcatctttgatcgttgttggtgaaatggtgggccaaaattgtggtggttgccgatcttgggaagaggacatttactggtcccactttcagttcctccacttcgtccaatttctccgtgccgattatgatcaacaccttgcacttccgaaagcattttcagataatttaaagaagaagttg

SEQ ID NO: 94080 - DNA, 259 bp, Glycine max
agatgctgctatgttggctcctgaggaggtatttgatggcaagggtgatattaaggaagaaacagaacttacaaaggcagaaaggaaaagaaggagagctaataagaaaagagaatttaaagctgaggcagtaaaaaggacgaataagaaggcacaagaaggtgcaattcgtagacaagttaatgggtaaacaacaattcaatattttatatgattgttcacagaagctgcacaactaacaataagttcaaggggaagc

SEQ ID NO: 94081 - DNA, 213 bp, Glycine max
atgacttgaagcatccaaacgttctgaagggaagtttgaggatagataaccagaattttttgttgttgttggttgttaaattcattagtcaaaacgaggtgtaaatttttttcaaggttacaaagcttgtacatatttaaggtaaaggagcgatttccttccgctgcgtgacaagaatccttaaaggaagcaaaataaagcaatctgttcgtt

SEQ ID NO: 94082 - DNA, 248 bp, Glycine max
ggtgaatattcagatcacagtttggccaaggcttttctggattctaaagaattcattgagaagaagaggtgctctactagtgcttcagaagaagaagaatcttgtgctgatgcttgtgatgagatgaacccattggcaatagtgcctgtgcagaccaatgatgctgcttctaaaccgggttggcccctgcttcgtaagacaattgtatctgacaggaaatgttctcaaagatcgctcttgtgccagat

SEQ ID NO: 94083 - DNA, 105 bp, Glycine max
caatatcacaaaaaatggctaccatataagcttctcacactgtggttccagctcaaccaacaccggaaggtcgattgtggctatccaacagtgacaattccacac

SEQ ID NO: 94084 - DNA, 246 bp, Glycine max
gcgggggaagaaagagggcaacgcagatgaaacgaaggcagaaaaacaaaattgtgataaaagttcgataaaattagggttagggtttttctacgcatcgaacacagtcactcaaattcgactcaaattccccaaattggagaaaccacacatcacttccctgctagggatagaaagaaggggtggcatcaagagactcaaagcaatggaaatgatgggagaataaatagttgagtggaaatgagt

SEQ ID NO: 94085 - DNA, 163 bp, Glycine max
ctcagaagcctgcagaacctgattttactgctgatgaggaatagagggtgtgattgagaaagaaaaatgaacatagaatgatattttggtagaattgtataatatatggggtccataaattgcgaggcaacttgtatatattaatataaatatcttgttattg

SEQ ID NO: 94086 - DNA, 191 bp, Glycine max
ctgctctcaatttcaaaagcctagtcacagcaacactgaaatatccacagatgcacacacagaatagaaaaagaaaggaaaaagggagagaaaatgctatttctgatttctctctttacttttaactttttaagctctcattagagttgttccctgcatttgcaccacaatgttcatcttttccacacaac

SEQ ID NO: 94087 - DNA, 267 bp, Glycine max
cttcatcaccctatgatgggaggcaaagagtgagtccatttgcattttcaaggactgccacaaatttagcttggcaagatatgcacccccagacaaaagaatttctcccgaagcctgcaaaagccttcaataagataccgagtattgtctccatgctttctgatgattccagtggccttctaacatctagaggcatagcaacgaagagtactgttccagatgttgcaggtatggaagatcccattaggttgtctgatccaaacggta

SEQ ID NO: 94088 - DNA, 230 bp, Glycine max
cgtctgcactagcagcacctttggcgacaacgaccatgttgacaatctcgcctccatgtgcgtctcacacttgtccattgaaagctttgacgcagatggtgtgttatcctccgactctgaaaacgaattggggagtttttactctctgccctctactcccccacgaaggaggaaacaggttaaggactatgcaagtgacaatgggaatgaaacaaagaagagtgatccac

SEQ ID NO: 94089 - DNA, 259 bp, Glycine max
tgcagaagcagtaatacatgtttgtcaaagccaatattcaataacttgaacttccttaagagaaaagtaaagcaagatttaagttctgcctctagttgctctactccttgtacaagtaatttggacaaggagggggcaattctgatttgaagcatgatgtgaaacacaatgagaaacagtcgcctagcagttcaaatcatagcattgaagttaactcaattaatggtggtacagattcaagcaaatctggtttcagctt

SEQ ID NO: 94090 - DNA, 278 bp, Glycine max
ccaaaattaaacctctctctaatctcgttattcccttttatctttttcagccattaatccttagcaaattaaaccaccaaattaaacttcaacaacacccccgatctgaataaggagctagccccatcccatcttatatttcatatttgtcaatttggtcatggacaccaacactagtacattattcacaaagtgatcagcacttggaatcttgaaaagatggaaacaaatgaacaacaacaacaacatgatgaccatagtattattctccaagttca

SEQ ID NO: 94091 - DNA, 242 bp, Glycine max
cttaacttaaattttgagaaagaagtaatgagtttttaagtgccaacctcccactcgattaacgtggcgcttcatctctgaattcacaaagctctaacaacggctacactgaagacgatctctgcagcactgaacctggtcgattccaagaaagagaatctcaagaaagccttcgacgatctccaatccctttctctcccctccctctctcatggtccgacctcgattcccacttcaccacc

SEQ ID NO: 94092 - DNA, 263 bp, Glycine max
ttctcatccaatgaagggtgatgttgtcacaaacctagatttcatccggacgaggaagatttctaggtttgtgacaacatctcccttcattggatgagaaggttgctgaattggcatccttcccctcattctctccatcccgaggtttgatggaagccgatggtcaggcttccggtcctccacatcaagctcagctcttcttcggccccatcgacatcatactcgctgcaatcattgatcaccaaggatccattaccctcgag

SEQ ID NO: 94093 - DNA, 265 bp, Glycine max
  unsure (1)..(265): unsure at all n locations
gcagcaagtaaaatcccagacccaaaaacaacaccttgccgtatccttgttcttcaaaattacttcctctactctctctatccgattcttcaataatcacgcgtttcttatacggtagtattcttcttcgggatcattgatcattcatttgcttagaaagcgtttctgcatcaaccgatttgattcccactgataactccccaattattttccaattacttccactaattattgtgtcanctcttatttatattcttcatttttg

SEQ ID NO: 94094 - DNA, 110 bp, Glycine max
gaaaaattcaattcgtgcttgtgaattactccattgcaccacaaagcgcatgttgcagttgttgaatttcagttacgactaaaaaacaccttcttctgcagttccacaca

SEQ ID NO: 94095 - DNA, 198 bp, Glycine max
aaaagatgacaagtcatatttcatatacagaacttatttgcaaaagcaaaaagtagagaaaaatagcatatgatatcgtataacttttttattttaaatagaatacacaaggcatgatctaataagaaaaattagatcatactaacaattaacatttatcaataagaacagtatactaggcatgagctacaattttta

SEQ ID NO: 94096 - DNA, 140 bp, Glycine max
aatgactttggttggagaataccaaagaaagtggagatggcttctatagacagaactggggcattttgtctatcagatagcaaaaatggtgatggggttgaggtaagttttgtgtccaacaaaagagcaatggagacctt

SEQ ID NO: 94097 - DNA, 106 bp, Glycine max
atgtatcgttacatggatggttccagagtcacactagatcggtgcacagtggatctggctacctctgggaacggctggctgtcttacaccatctgtccccaggccg

SEQ ID NO: 94098 - DNA, 243 bp, Glycine max
caaaattttggaattcagaccacagttgtttgagctgaagcaccttaaagctctttccctattcaaatgctttgaatcacaacacaggcatcaagctaccatccccaatgcaaactgggaaaagcttgctggcagcttagaatcacttgagtttagatcaaacagaggtctcattggaaaaattccttcaagttttggtgccctcaagaaccttcagtcactagtactattagaaaatggttt

SEQ ID NO: 94099 - DNA, 250 bp, Glycine max
gcatgatgagaaccaagctagaaagaagttcgtaatccaagttcacccccccgtttgtaaattgagcataggttacgaaatcaaggttatggttgtcatggaggctctttttgtctttcaattcttacatattttttacttgccctaggctattgttggggttttgttaatcaagaggacaggaaggtttttttttttttttaaatgtgatggtgagttatataaatcagttcttggaggcccttgtatc

SEQ ID NO: 94100 - DNA, 219 bp, Glycine max
gaatgatgtcaaaagtgcctatgctattgcaaagttaagaaaaacgggatattcaaaaaatcagttctacaatgaggctgccaatatgtacaaggagataaacactctaatagctaaaggtgacaaaagaacattaaggaaagcagttactgagaatatgttttctgcacttaagaatgaaattaaacaaagagaaactggcatggagcagggtatatt

SEQ ID NO: 94101 - DNA, 267 bp, Glycine max
attcccatcgtcttcttcccattaaatccgatagaatgaagtagcatctcgttcatatatataagattatggccattggtcaatcatatcttatacatgattaataattagcacatagttttttggaagagttgtgaaaatgggacttgtggagctttttggagtggcatctatgcccgtgatcaaagtactaataatcactgcagttggcttgcttcttgcacttgataacgtaaatttgttgggaaaagatgcaggatacaagtg

SEQ ID NO: 94102 - DNA, 271 bp, Glycine max
tttttcttcccatctaattagggtttccatgctctccaaacactcccttctctagaagcgatttagattagattttacaacaatgaacaacaccaacaacattaacaacatcaacaccaacccaaccaagaatgccgcaacaccgtcgtttttcaccaaccccggagcaccctccatccccattcaaccacccacaaccccaccttctctcacagacgcagcctcaaccacaaggtgccacgtcacactttcacggcactttcagctttca

SEQ ID NO: 94103 - DNA, 246 bp, Glycine max
  unsure (1)..(246): unsure at all n locations
caaccagcacctgatgaatgggcagtagttagcgaggctgcatggtgttctgatgggtcnatggcatctgatgatgactcaatagcagtagactacttgatgaaatcccgtgagttgttgacaaatccatcagctggtcagtaagatgttatgtaaattgaaatgtggatttctatggtttttctacctattatttgcacttcttgttttgtatattacatacatcatgcatttaaagtgtgaaga

SEQ ID NO: 94104 - DNA, 268 bp, Glycine max
atagatgcaaagggataatgaaacgatgagtcaaccgatatagtgatcaatgtgaatcaacagcctgtctgttgattcacattgatcactatatcggttgactcaacagacaggctgtttgtggcctatatataactttttcgtcccccttgtgaagatgtatacatgtgcttgctgctcggctaagcatcctagtttgtgattctgtctagtatttcattctagttaaagcatacttatccctgcatctgtatattgttttggtcag

SEQ ID NO: 94105 - DNA, 180 bp, Glycine max
gtaaagttataggatgcgtgcaccgtcctgtttctagttgcaagagagacattggtttttatggtccattaagaagggctttgaggactgctcttaatagcataattcagaggaagatgagaaacagaaatggagttgatgtaattgtgagaacatactcgccttctcattttgaaggtg

SEQ ID NO: 94106 - DNA, 266 bp, Glycine max
gtttgggttgattcatagaatttctatttgaaatttaattggaaaaaaaactaaaaaagtgtaaatattaaatagaaaccccttttgtttaccaagtaacacaaatacttgagtctattgagcccatttcatatcatagctagccaagagctaccttaccaaactttccctttccgaggcttaggtcaccgactcaccggacagcaccgcaccgttgtcggatggattgcaagtacctaatctgatcgtcgcctattgaatttcga

SEQ ID NO: 94107 - DNA, 195 bp, Glycine max
ggttcctgatctaaggaatcttcaatacgtgagtgattttgtcacaaaagctggctatggatctgaaagtgtagctgatgaagaagcagcaacagttactttgtccagtgatatttgtagagttaatcgtgcttctacaaaaagtgctgtcaaactgcaagaggttggacccaggatgactcttcaactagttaa

SEQ ID NO: 94108 - DNA, 163 bp, Glycine max
caaaagaaaaaatatatatatgatataataagaagatgcaaatgcatacatgtagtggtttttttaatactaagaagtttagatgagttaaattctggtaattcactaaggacacacgtatttattagatatgagtttgatctttatcaattagatcaatctt

SEQ ID NO: 94109 - DNA, 135 bp, Glycine max
cttatggtggaggaatgcttgtcctctactcctttaaagttctcccaaaaacacttttgtgagtcagtgactgagagaaagaagagaaggagtttaagtcgttgttgtattgtagtagtgtgtaaagtcttggtg

SEQ ID NO: 94110 - DNA, 230 bp, Glycine max
tgacagcctttttagcatggatggagattatgcaccaatggttgagctagcagaccttcgcaagatgcatggctttttgttagtcattgatgatgtaaaacctctttttctttatgaagacaatttatgacaatttattatatgctattatttacatggttctgaacttctgatccttggactaaggttagtacttacgaagagctgacgataataatcatagtacatgt

SEQ ID NO: 94111 - DNA, 262 bp, Glycine max
gcagcaattggtgtggagactgttaaagtacatgtgtctaacatcgggaactcaacacttgagaagattcctgaagcaattgagaagccccaggtaaaggaatcatcatccaaagggtttagacgactgcttaagtttgggaaaaagagtcatagctcagctgctgaacgccacactgaatcagataatgtaagcattgacgatgaggcagatgaggttggaaccaacagttcttctaacgagttcatactttaaagaactt

SEQ ID NO: 94112 - DNA, 256 bp, Glycine max
atcaatcacttaccatcttttgcaatttccatttttcttgccttttgggtgtcattttgcgttccatttttatacattttcaagtgggcatggattagtgtcttgaggacatgaaaaggtggtaacttgaagttcccttcatactaatttgatactaacaccctgatggtatttctgcgttttcaattaacgtgattatgatccgttaatgttcatttctcaattccttttttgttgattttaattcaccataatt

SEQ ID NO: 94113 - DNA, 260 bp, Glycine max
cacatcctaagaaagttccctttttatgacctctgagaaagaattggattcgaagttgtgatttttgcgcaaatgggaatcgatcaacttcggtggcggtggtggaacgccgtcgttttgatcggaatggtcggcgttacagtagtaaccgttaccggttccgacagtcacgagaagcaggaacaagtggtgtctcgaattccgctcggatcatgctccaaccagagcgctcctcagcccatctgggatgcagtggttga

SEQ ID NO: 94114 - DNA, 173 bp, Glycine max
tgctgccccatcaacctctgcatccactaccaatgatgttaacctacccgatggaggagggaaatgtgagggccaaccacaacatatgttaaacaaggaacaacctccataacatagcttcctacgccaaacaaaactttgacctcctacagatctatacccttctctctctc

SEQ ID NO: 94115 - DNA, 257 bp, Glycine max
tgaacccagaaaagttgaacatggatgaagcgtatgggctaaccctacaacgggccgtgcctctttcagtgcaccctaggcccaggctcgcaccacatgtgtactcaatgtcttcctaatttttaagttctacattttggagtttttcttccttataattgttgtcttttcttttgattaacaaggatcctagtaacaataaaaacatacatggtgatatagtatgttagtgtgtgaagatccaaaaacatgaaaag

SEQ ID NO: 94116 - DNA, 254 bp, Glycine max
ggcatgttaaaccaaaatacacctagaacctttataatatcccttgtgaaataagaaggcaaacataatacaattagcagtgttatattttaaacagaattatttgttcacaataaggaaatgggtttggtataaaacttcaccatttctgtcattccattactggtttggtattcaatggatgtctgcaggttggagatgagtcctatgagtcattcaatgctgagaaggagaatattttggagtcccttgct

SEQ ID NO: 94117 - DNA, 255 bp, Glycine max
aatctcctttccaaatggccagcgttgaggttgcacagcaaacaccaacaacagttccagaaaatgaaacaaccgaggtaagcaagacccaggaaacaaccccagtcactgaggctcctgcaacagaacaaccagcagctgaggttcctgcaacagaacaaccagccgctgaggctcctgccccagaatcaaccaccgaagcaccaaaggaagaaaccaccgaggcaccaacagaaacagtagaaaaaacaacta

SEQ ID NO: 94118 - DNA, 252 bp, Glycine max
gtttgtcttatatcaaactactcttaattatatggtccgttatttatgtcctaagctgaattagatgattgatatactaatcctttaaactctcttagtctcatacaaagaaaagcatctaatgtcgatgttggtcaattcttttgctgcttgtattaacacctatgttgaaaaactgttaatagcttggaaattgttagtttttttcttaaaaaaaatttgaaagaaaaaccatgcatgtgaatacatagt

SEQ ID NO: 94119 - DNA, 273 bp, Glycine max
atcttagtaagtttgaattaatgtgatgaagactttctcctcaattcagccaccccaccattttcgttgcacaagatttttctcaaacactaccacaagggctcaacttccctttcctgcaaaggtcttcttttgccaggcaaaatctgaccttcatggtggtgttttttactcaggcatagatggatcgttgaatttaaaagtggtgtctcccactctattagtagcattaaaggaagaagccaaggctgtgttgacttgtttttgaagaaa

SEQ ID NO: 94120 - DNA, 227 bp, Glycine max
ctacatacaacataaacaactacatttttagccctcactcacaaatccattcctctcacgttatagcgacacttctgatgaagtcgtcacaaaaagcaactgacttggcttacttattagtattgttgctgttaattgtttacaaggatggagataatatcaccagtaccagcaacagcagcaacaacagccagaaacgcaaccgcgaaatcgccagaacccgacgt

SEQ ID NO: 94121 - DNA, 236 bp, Glycine max
ctcgagcccttcaatttctatacttagcttagttatcttccgttagtttgcgtccgtatcaaactggtccgacctgcttttttttcccagccatgcccgaccaccatacccgccatacgactaccactaagctcgaagaggccgtccttcgtctttcccagacccaagccgccctgaccgaaggccaaacttccttatctcaaactcaccaatccctcaattccaaaatcgatacc

SEQ ID NO: 94122 - DNA, 243 bp, Glycine max
ctcgagcgtttaaatcgaacaaagccatacctccttccattgtaatttcttcgacagggtatgaagatttctcttacatcaccccattttttgaaatgctgccatagctccctctccgtgatgtcgtccgcgaaccttgtaaagtagaatgatgaaatgtctttgtgatccctccagtttgttgcagcggcataatgctggactcttcctctgttctcggcatgatcccatcaggattccttt

SEQ ID NO: 94123 - DNA, 239 bp, Glycine max
cttcatttctgtctactgaagggtggtgtatatagcttttgcggatgagagatggatattctccttgccctgattttgatgagttcctcatgcaacctgaccaatcagctaattgtctcgggtctttctgtattctttttgtccctcagttgtaaattttttgtattctcttaacagtggagttacatccatcggaagcttgtcaatatgagatcaaaattttggtgtttatttctcaa

SEQ ID NO: 94124 - DNA, 240 bp, Glycine max
agctcgagcgctcgagccgcgaaacgaaacgaaacgaaacgatccataacgatgatgatagcacactgtacagtgcgcacgctcacttcgctaattaacactaatcgttacttaaatcagttacaacgagtcatcggaacaagtgccagtgcgccagatctcgatctcgatctcgatgcagtggcggttgctgcttttgttgcttttggagctaacggctcgcgcaatgccgtatccgat

SEQ ID NO: 94125 - DNA, 145 bp, Glycine max
ggctgacagcatacaatgaagaagagagcctgtggctggcaactttgtttttgttcttgagcttgtagttatccattttgtaatctggctctggaatgagaattttctcattttgatttcttaaattggaagataaattttggat

SEQ ID NO: 94126 - DNA, 230 bp, Glycine max
gggaacacctaatgccggatttaaacccttgcaagtctcaatttccttagctaagccaacttttcccatgcccttattgttgggttacaagtgcgaggtgaagtcccacatcgagcaaaagtggaaaagttgagcattatataagtgaggagaatacccataaactcgagtattaaggttttgagttaaagtgtggtgtcaagttcccttatgtggtggctcgtggtcca

SEQ ID NO: 94127 - DNA, 250 bp, Glycine max
cagaatttctgacgttcacgatactatgggtgaaggaagtgtcagtgatagtggtatgtccacggtaaagcgacacatttccaatgcaaagcagcagccaccagaagtagaagatagtgctttcctttacatttcaatgtatatagtcacacacgaatcgacgtgaaattttaaactgcgtccttatattttggtgaatttgctaaaatataagtgtatatatctaacgtgaggtaatgaaagtatatcg

SEQ ID NO: 94128 - DNA, 244 bp, Glycine max
  unsure (1)..(244): unsure at all n locations
tncgaccgattcggctcgagatagtttcttaaatggcttcactacaggggtatactccaagtactgttggaggctatggacttcgagcggatgatagattcagtcctgttgctggtggtcgaagtggatttgctccatttggatcaggttatggaatgagcatgaattttgaacctggtttgaaggctggatttggagggaatgcaaatttcaatagcaatcttagctatgatcggggaataaa

SEQ ID NO: 94129 - DNA, 247 bp, Glycine max
gcttcaacatgggtggagtcattggtggtttgattcctttcatctagaactaccatcgtagtgaggctgcttcagtcaacgatggaacctacataggcttcatgtgcttcatgtcactggggacccttttgtcattagccatcttgcctgcatgcaaggttgttcgtgatgattgtagcaggtgcaccaacatgttttacaccgatgtttccaccgagtgtgtggaggttctcaagttgttttccaa

SEQ ID NO: 94130 - DNA, 217 bp, Glycine max
cttctcatgtacagttctcccatgtcccaaatttttcacccacagaaacttagatgaccaaaaaacaacacaacccacaacaatttcaaaataacacataccggaaaagaaaaaaacagtctttattactctcttctgttattgcagtcatgcctttcttctttcacagttccaatattagatcttccatcccaagcttttgattattccacacaac

SEQ ID NO: 94131 - DNA, 241 bp, Glycine max
gttagtgcttctctcaccaaaattggcaaggccaacccttctattatgggctgtgttctttggtaatcctttttcgtattatggccttgttttgttgaccactgagttgaacggacatagtaaatgcatgccagataaattgcagacagagaagtcccaggatgttaaatacaagagtgtttttattgctagttttgcagagctacctgggctcctcttgtcagctgcggcagtagataaa

SEQ ID NO: 94132 - DNA, 239 bp, Glycine max
ggtactgcttttctgctctgcattctgccatatatcttgagattcagtgcaccactgcactgccttgagatccctatctatctctcaccgtttataacaaaaccataataatattcaatcactatactagtactagtagagtagtagttgacaccttttgatggtgatggtttagtctctttcacatcacaagcaaggcacctcttctcattttacttgtttttggacctcactccata

SEQ ID NO: 94133 - DNA, 243 bp, Glycine max
aggggctctggggtgctgagatactatttgacccagtgacttgtaaatgccttagtcaaattcatctcattcttagttttgaatttgacattatgctgcctgttgtggtgatcttatttcgtggggctgtatactgagtgtaacagtaacagtattcataaagaattcactaaatttgtatgcactatggacactgcaatgttggacgcatagtgcatatgattgatggagactactgttcat

SEQ ID NO: 94134 - DNA, 130 bp, Glycine max
atctttctgaactagtatagattgtaatatgaacatcctaagacagtcaacagtcatataattatccccacctagaaaagagatattttattattcagtagtagtattgaattgaattgggttcaacatg

SEQ ID NO: 94135 - DNA, 236 bp, Glycine max
caatggaaaacctaagtcgatgtttgacatttgttatctatttcttttcttttttttggcaatctaatggtatgataacccacagcatactggaatcatcgtatcttttaaaaacatgcaatctgatcattaatttcgtggagtaatagaaatttgatctgcttgctatgtttaaaatcttgttgatcaggttatatacgattctctgataaacaaacaagacttgtgatggctgt

SEQ ID NO: 94136 - DNA, 258 bp, Glycine max
atgagatgtatcaggtcaatttgattcttgataatttgcctgctattaggttcacacagaaagaagggtactttatgagatggactgggtaccctgttggtattaagattgaggatgcctattatgtgtttaaccatctcaagttcaatgttcttgtccacaagtacgaggagaccaatgtggctcgtgtgatggggactggtgaagtgcagaactgatcccggttgtcaagcaggggtcttctgagaagcccggata

SEQ ID NO: 94137 - DNA, 256 bp, Glycine max
cttgattgctgaaatttctggcttggacagctcaagctttgtttcccaccttgtttattgaagtattatattttggttttgttgagctactttcctaggctattttagggaacaaatgggacattatgttgtggttgtgttaaaatatcatgaagtttaccttgtttttaagattggtattttatttcttgcaaatgcataacaaaagaatgctactactactggtcatgattttaaattcaaaatatttctggca

SEQ ID NO: 94138 - DNA, 255 bp, Glycine max
ggactctgctctagtgatcaaggtgaaatatggagataccctcaggcgcttcagtgctcgtgttgatgagaataatcggctggaacttgacatggttgacttgagggcaaagatatgttctatcttcagttcagtgctgatgcaaatttaattctgagatatgttgatgaagatggtgacttggtgactctagttgatgatgatgaattgcgtgatgtgatgaggcagcaattgaagttcttgaaaattgatgta

SEQ ID NO: 94139 - DNA, 255 bp, Glycine max
caagaggaggtttgctcttggattgtggtgaaggaaccttgggacaacttaaaagaagatatggtgttactgagtgctgacgaatgctgtgagaactttaaggtgcatttggatttcacatattcatgctgatcaccatacaggcttggccaggatccttgctctgcgccgtgatttgctgaggggggtgcctcatgaaccactgcttgttgtaggaccaaggcagcttaagagatatttatatgcataccaaag

SEQ ID NO: 94140 - DNA, 216 bp, Glycine max
agattccggggctttgttggaggagaggaggggaaaaaaaaggggagaatgtaatgaactgatggattaatttgtgaaattgtcatggtgagaaatttgtaccgattgaggctggaattgggtttcaaagcttggtccgtgtgcgagtgcagttgaatttgtaatgtaatgttgttgtactcaaaaaaaaaaaaaaaaaaaaaaaaggggcgcccc

SEQ ID NO: 94141 - DNA, 245 bp, Glycine max
attcataaattacccccgcacggaccctatctagctcttaacagcggcaattcagttcagaactcagacatgcatggcttcctcactgtcttccgttgtcaaccaacctcacttagctcacgcctcaagcttcaccgtccatcttctcttaccactctcacaattttcttccacaaacacaaacaccaacaccaacacaatgcttcatttccacacccatatacgatctcgcctcgctcacgccc

SEQ ID NO: 94142 - DNA, 243 bp, Glycine max
agtgcaaagaagtttgaagccaccgtcactcgccttcattcatcaactcagggattgaaggaattcataaatgatgttaatacccttgcatctgtgcaacatccaaacctctgtaaatgctaggatttcatgcacgtgatggttctgaaccaaggatgttggtttatgagaggctatgccatggaagcttggaccggcagttgtttgggagatctgatagcccttcaattgattggaactcac

SEQ ID NO: 94143 - DNA, 245 bp, Glycine max
tgcgatttcaagcttgtctgtatgatttgtatgtggtgaatatagaaaaatctattcccctgttcgccgctactctgctttgatatccatctgtatttgtaaagaaagaggtagtagataatgcaaggtgctaatggaggcgatgccagagctgtgaacaacactttggagactatcaacgctgctgcaactgtcatcgcttccatcgagaatcgccttaatcaacctcatcctcacgtccagaa

SEQ ID NO: 94144 - DNA, 255 bp, Glycine max
gcacctatgacaataatatacatgctttatattaagggtttgtctacgggcattgattaagaaattaaaagaagagagcatttaagagaagaaaagcaaataacccactagggccagcctagtggaggtaggtttggataatatgcatgacatcataaattttatccttagtgggaacattgtacaccaaaaagagggagaagaaaaacaatgctaagaacataactacacttgttggtctgaatatatatctat

SEQ ID NO: 94145 - DNA, 278 bp, Glycine max
ctttttacttttacattactaatacaacaaaagcatttaatctttatagctaatatgagtgcctttgtgtggtttatgtagccaacctcacttagtgagaaaaaggcttttaatttttgttagtgtagtactaatgcaaatgcgaaaattggtgttttgatggcagacttggaggagagaatgaaagtgttggcaatgagcacaacagaagaagaagaaatgggagacacttttgctgaaagagcagaaacttactaccaaaagaggcctcagctact

SEQ ID NO: 94146 - DNA, 256 bp, Glycine max
  unsure (1)..(256): unsure at all n locations
ctcgagccgcaacttcaagccatgagatattgtcataaattcctgtttntagttgtggctagcatacttgtggtggctttcttttcaatatcaagttcacaaccacttctctcacaaatcagctttaggagaagagaatccagagaatttcgcacaatgagtcaggttctgggcatacctgatagtggggtattagcacaaagtgaaccaatttcaaggatagatcctaatgaaccgttggataagcttctcctga

SEQ ID NO: 94147 - DNA, 165 bp, Glycine max
tttcctccacagtgagacactaaaagggaagaacaagaagaagagagaaagaagaacataaaagacaaaggagccaaatgctggtgcccttttgaactctaaattggaggatcaggtcacgcaatcgaagatctcggacctccatatatacccttcatattcaat

SEQ ID NO: 94148 - DNA, 269 bp, Glycine max
gatggtttttgttaaaacattcttctaatgaaaataagaaccttccagaatccaaatggataatgtaatgggttttaactattgaaattgctcttccattttttttcttcttctggataatttcgtgttgagaaagtaaagcaattccatgaagaaatgaaatggagcagattattttgttggagggttatacatgctatagtttgcttacatttttgtagtttgtcggaaagaacgaactttaaatcaatggaactttaaaataaaat

SEQ ID NO: 94149 - DNA, 270 bp, Glycine max
atttaaaattaatattataacccttttggggggtaaaattttaatgtggttcacgttttttacgatacataatctgtatataaaaaaagtatatttattttatgacaaatgaagtaaaatttgaaggaaaaaaaataataagaaacattgtcagttggccgaagtatatacagttttattttttccttcatgaccttaaaggatattggtgaaatcttgacactgctacgagtcattatccaatttttaattattcatacgaaagcgtat

SEQ ID NO: 94150 - DNA, 248 bp, Glycine max
cctctatgatctccaagataggcttggactcaaccaaccaagcaaggttgttgattggttgctcaatgcagcaaaacatgaaattgatgcattgccaccacttccaattcctccaggtaacttcacccttggttatccctcacttgtttctcgtaatgaagttagcacctctcgtgaaggttcaagccagaacactttcttatggataccacagccaggagagataatggttagtgatcatgataagg

SEQ ID NO: 94151 - DNA, 254 bp, Glycine max
gcgttgcccaagcccacacagaacagaaatggtgacaataatgagagtcccagcacaaacccagacacagttacagttgaagaaacacatgatagagggtttcggttccaaatacatggaattaaaatgggtaaggcgaagaacaagcaaaagctctcagctcgagaagacgaagaagctatcatcaaaaccacctttcccaatttacatttccaccgacccacgccatatggacccgcaccgtctccgagacc

SEQ ID NO: 94152 - DNA, 257 bp, Glycine max
ggaataattaattcaaccccccttcttaattcattctgaggccacttgatccaacacaaagtcatctttggtaaattttatgctaaaagtgttggcagtggtggaacaacatgttttgtaaagccgtggcagctcctcgccatatattggcaagttcaagatggctgccacatcatgcaaggttgggccaaccatagcttctggaagaacaaggccattgatagtcattggccagaatcctaggatactgacaagca

SEQ ID NO: 94153 - DNA, 255 bp, Glycine max
gaaggacctccatcctcgcgtggaggaaacttccgtggtagatgcaaggcacaaggaagaggatgaggaagaagcacaagaagaaaataagcaagaagagcaacacaaactcgacgatgttagcggtgtgcaagatgaggtactaaagcatgagcaaaatgacaatgaagagaattctgagcataaacaggattcggtagaccaagaaactgaagaaaattctgaaaatgcattgacacaagtggaaggagaaca

SEQ ID NO: 94154 - DNA, 261 bp, Glycine max
taattgacagtctttctcttcgacggttctctctccatgcggccttctctctatacagcttgctctctcaacgcagttgtgtttttgtttgctctccctctctctctaatggtcgttgcttgtagcttgttgcctccaatcttcgtagatcaaaccttgtcgcctccagacagtgaagggagtgcaaaggagacgaagaggttgcatcaaagccaaaagcgaaggcttgctggtgggtctgcatgttgttagcacgggatt

SEQ ID NO: 94155 - DNA, 257 bp, Glycine max
caaagctgaaagctcaatagctcttctctctctctctccatggacttgcagttgaagcaatggactaaccggcatcagtcagaacaagaacattattccccaaacatgccaaaatttctccctcaacaccacccaccaccatctccctctgcactccctctctttgtacctgaacaacccaacaccaaagtctacaccctgtcagcattttctgattccacactaccttctgaacccagattttccaggatggagag

SEQ ID NO: 94156 - DNA, 161 bp, Glycine max
gttccaaacttcttcttggaatgtcccttcctaaataaccctcaaacaaaagccaccttaacatctattatctgaaaattctctttagagagatagagacatagagacagtcagaaagaaattaagaaaaaatggcagcctgcactgtctactccacacaa

SEQ ID NO: 94157 - DNA, 162 bp, Glycine max
gaaaaaaatgacggaggtggttgcttcggatcccttatccaatcatagcgcagttgttaatcggagtgagcagaggatccgttgttcctcttcctcttctcccgattacctctctcatccaccatctcctcgagaacgttaaccaagattgcggcaacgaca

SEQ ID NO: 94158 - DNA, 233 bp, Glycine max
gaaaattttatgctcctcactgccattgctagattgaaattactagatgatctagactaataagactttctgtttactgtaacttgtatttgcagacagaggaaaccaaggatgctgataggaatggtccaaaaggaattatcagcgctgtcgggatatccattgttgttggatggggttacatactaggcattaccttagcagtcactgacatcctttaccttttgagtgaa

SEQ ID NO: 94159 - DNA, 140 bp, Glycine max
atctttggagaattcctacaaaatcactgtctgcaatttgtaacttcaattcttattatttctttcttaccgtgtcataaatgtaagcaatgtataaatcctttgtactacctctttccctaaagagttgtatgtaggga

SEQ ID NO: 94160 - DNA, 105 bp, Glycine max
cggttgttcatatccccgaagaaccgggatgcgaggtggtgccttgtgaataaaggtatgggcattggaccacctcgcatcccgggcgttcatatccccgaagaa

SEQ ID NO: 94161 - DNA, 138 bp, Glycine max
cattctttgactatattcaataataatgaataagataactgcaaaagttacatccttaattatgtgaaattaaaatgaagggtgtaacttttgcagttatttgagccattctttgactgtattcaataataatgttat

SEQ ID NO: 94162 - DNA, 254 bp, Glycine max
accatacacactaactaacgcaatttgcaacttgcaacaaaccatgctactcacgtgtaacctcgcgccctctccacctcacaccgcacaccgctcaccgcttcaattccctcacagttcgagccgactcatttcgcctccgatccgaacatgccgccgccgattccaatttcgactcgctcctttcgctgctcgagttctcgtgtctgctctcttccgccatatcctccgctgccgccgctgtgctcgcgggt

SEQ ID NO: 94163 - DNA, 241 bp, Glycine max
tatgattttttttaccgaagcagaataatttgagttggatcatctcgcccaagcgaccaaactcgcctgggcgatgttgtattctacaaatacgtccagcagcgtaaaagagccatattattcctccttatcttcccctaaaatactccccccccagtttatcactctcctccaccacctcctaccaacaagccttacatctatgcgtcacctccccctccttaccactattagctagcat

SEQ ID NO: 94164 - DNA, 239 bp, Glycine max
ctactcgccgccgatcagccacatcactctctggcgacacccttctcctttttaatttgctctttccccaaaattgcagcatatgtttctttctttctgacttgtaaaaagaattgtgtggttgtgtggtgcggtcccgatttggataataagcgccgtctgcgcttctctggcggaagaagcgggtgaatgtgtctttctgttaatgcggccaagaattgaacttagttgacgcttct

SEQ ID NO: 94165 - DNA, 241 bp, Glycine max
gagagacagaggcaaagacagagtagcctcctccttcccagtgaaaaacaaacaagaggtgaaagcttgagagcatgtaaagcttgaggcctgatttctgcgtttctcggcgaatttgtcttcaaaaaagaagggcaaccagtggatttatgtcgtctgggtttattctggcagtgattggggctccgttgaagctcttcatccgatatgctttcgtttctttcttcttgactctctttgt

SEQ ID NO: 94166 - DNA, 234 bp, Glycine max
  unsure (1)..(234): unsure at all n locations
tgacaacacaaataagcgtagtncttttccaccgtgcttcgtttgctcttgtcctttggggtgtttgttgctgcttatgagaggcttggtgctgttgggtctctgtcacttctaggattaggctttgttttcagttccaagaacatggatttcagtttctcacttttctttccctctggtgcgtttttcacaagaggggtattgaagaggttgaaaaccgttgtggctgttggg

SEQ ID NO: 94167 - DNA, 267 bp, Glycine max
gcaaagaagtgggcggtgagcaaattccgcaaatgcgagctgctttgtttgttgttaattgttcaatgttgatgggcaacaccgtcacacattctcctgagttacgaaatgaacactcgcaaacactcaattccttcaccgcgcaacttcccttccgccaacacctctcccgtcaatttccgccgcagctccccgaagactcacctttccgccaggaagctcgcagcgcgtttatggcacttgcgctttttcaatcttgaatcttct

SEQ ID NO: 94168 - DNA, 185 bp, Glycine max
ctcgagcgaatcggctcgagcaaatcccgagcagtaccaagactagaagacatcatattaacttttgattcaacaacaattgaacgacccaaattcgaggatttgaatgagcattgatttggttatcatgccctttctgctgtaagataaaaaaaaaaaaagaaaagaaagaaaaaagggggggc

SEQ ID NO: 94169 - DNA, 247 bp, Glycine max
gtaaagtcgtcatatgggaagtgagatctaataagcaagttgtaagttgtaaatataacagggtgggtgatgatgaccaaatttaattgaaagcttggcttagggaagctagggaagggaagagcattaagcagagagggataggtgtgagatttggtgaagtagaaggggacagaatagacatccgcccggaaatacagggataccgtacagtcttaaatacctttttattcagtttgtgatattt

SEQ ID NO: 94170 - DNA, 143 bp, Glycine max
taaattaccctagtcactagtgtttgtgtttttagcttctaatttcctaaactatcatatatcatatataaatataaaaagggtttttttccgctgaaggtttaagtttaaccttcgttttcggtggttcttctcgtctctca

SEQ ID NO: 94171 - DNA, 245 bp, Glycine max
gtgtcattgatgggtaagtgattaggtgtgatgacgtgatactctgtcggtcacacctacatcacgtactagaatgagacgaaggagacgattcatcttccccaagcggcttagctggttgttgaaggagacagttcatctttcttgagtggacccgcttagctgattggggaaaatttgaagttaatgtgttgcacacaggcatcctgaaagaggaatcattttccatctggggtcccaaatga

SEQ ID NO: 94172 - DNA, 260 bp, Glycine max
aattcaagcagctttggaaaacccaaccagccaacagatgttggtttgattgtgtggacttaggagtgagaatagtttgatatatgcgcatggaaggaagagaaggcttcagttcgggggttacagtgataggggcagaagctccatcagcctatcatatggcaccaaggagtgaagctccaagtcaggttcctcctcctgttcctgaagcaacagctggagctattggtgtctcacctgtgagtgtgggattggatgga

SEQ ID NO: 94173 - DNA, 195 bp, Glycine max
gaaaaatgttgagttgtcttaagggcttaccccttgtgtacccatggcacctatcaataaaccttatcacgtgaactccttgatagtagacaaatatttagctttttttttatttgtatttatatgtaattattattcaaggcaacaaggaatggtacttttatatacaatagcattatggagttttgaatctat

SEQ ID NO: 94174 - DNA, 249 bp, Glycine max
  unsure (1)..(249): unsure at all n locations
gtgaggatatatggttgacagtatcagagattcctctttttacacaaccaactacatctacancaccttcaagacccccctctccacggccagtacatattcccaagtcaggaacaagttcaccagcttctgccaatgctagaaagaagatcaatgaattttcttcttttcctggctctacccgattcgctcagggtcctaagtctgctccagctgctgaaagggtacccccttcatctcagtttgatg

SEQ ID NO: 94175 - DNA, 250 bp, Glycine max
ctcgagcgaatcggctcgagtagatatttagaatgctgtggtgtcatcaattttttttgctctgattggggttttgcatgtatagtgcccttttattcatacttttactgaaacacccagctggtagggtggagtgtgaggtgggctggtggctggagagattgggctagaaagaagctttggatgggatgcttaagtattggtcctgtttgtggctgtatgtatttttttgttctcctttggttgatgt

SEQ ID NO: 94176 - DNA, 250 bp, Glycine max
aagcaactcttgataacactacgaagttttaagcccctaggtgattttcacatgtccagtgttggatttaactatctatagcattttgtctgcggttatgctatacttacagttttatttatttatttatttatttttggtagtaagctgtagtttagggtaaaagaaacattagagaggatggacaatggtaaagtagttggaccaaaaatttccctgttatgaactgagtcaactgactattctcaaa

SEQ ID NO: 94177 - DNA, 179 bp, Glycine max
ataccatcatagatggtcccgtctgtgttggttgacaatagtgactttgccatcatttacggacgcaactataggtcatacgcaacatcaatacaatttttgtattttatgattgtagaagtgtttatatatatatatatatggtgttccgactttcttcgggttgagtaatggtgagt

SEQ ID NO: 94178 - DNA, 250 bp, Glycine max
tttggttttaaaaaaatcaaagggcaataaataaatcaataagagggaaacaatacaggcacacgtactaattgaattctatatgatgaacaggattataaaattgtcacaatcatgctatgaaattgaacttttgtacttggtaacatacactgatacactattagtggctggaaatctcgtacaaatcttaattatgtctccctggaggatggcgctggtgagtaactgtgatcgtgatcacttgagt

SEQ ID NO: 94179 - DNA, 268 bp, Glycine max
ttctcgagccgaatcggctcgagcggctcgaggaaccagtgaagataaggctctacatcaaagggatcccaattcattctacatcttcctcttcttcactatcttttatggctcctaacaagctcaattcctcaggaaatacaagtatgccatgttcacagggtgagaatggttttgtcagttccttttctctcttccctgagaaggtggtgcaagagcttcttcaatctccagtccatgggtcggatgaccatcttattgagttctc

SEQ ID NO: 94180 - DNA, 262 bp, Glycine max
  unsure (1)..(262): unsure at all n locations
ccgtcccaagataccgtaagcggaaccaaccttctggaacactcacccgcaccagatcacagctctatcatcaccggaaccgctccggtcaactccgcttcgatcccgttcccgtacaggacgaaccctacgccgtactccttggctttcgccgaatcaattgcaagaaaccgaagcgccacgacgacgagcttcctggctctccgaccaacgancttcgcgctaggcgagtttattccccgccgcaatctacaaaccccgg

SEQ ID NO: 94181 - DNA, 248 bp, Glycine max
  unsure (1)..(248): unsure at all n locations
caacgaccaccacttccaatagttcaattcgctctcgttctcttctcccccaacactctctttttgccactcctatttcaacccctctctcactcttcacaccccctaacaccgcaccatgactctctacatttctggagtcgtcgtccctctcttagtcactctcatcatccgcaactantcccacctcaaacgacgtcgcggcgtcccggtcgaagtctcgggcgngcccggtctagcaatccgga

SEQ ID NO: 94182 - DNA, 256 bp, Glycine max
tgattcctttcaaaactcacatttgatgaaggttctccgcagtgcggctgaaggagaaaggtcacaaaggcccaatgacgatgaagtgttacttggtatgcagtcaatgaagccatcctcttctcagatatttcagcctcccaccagcactaagattcatgccaataaatgggaacgatctattctcatgaatgttggcccttccatgcagcatccactgcgctgggcgcaattggcaccttttgtgcaccaaatg

SEQ ID NO: 94183 - DNA, 257 bp, Glycine max
ctctcttagggttttctcctcccccattgacccaccgtccatcgcaaaggaagtcgcgcccaatttccatggtaagtcatcatggataaatcagagcagactcagcagcaacatcagcatgggatgggcgttgccacaggtgctagccaaatggcctattcttctcactacccgactgctcccatggtggcttctggcacgcctgctgtagctgttccttccccaactcaggctccagctgccttctctagttctgc

SEQ ID NO: 94184 - DNA, 255 bp, Glycine max
ggctctgttgcggggattcttaaaggttatggggggcttagtgctgcggtttttactgagatttacagcattgtgcttcataattcttcttccaagttcctgttgtttcttgctgttggtattcctgttgtttgcttcagcatgatgtttcttgttaggccttgtactcctgccacaggtgatgaccctgtagagccttaccattttctgtttgtccaaggttccagtgtggttttgggtgtgtaccttcttgca

SEQ ID NO: 94185 - DNA, 251 bp, Glycine max
aagaaataaatctggtttcaacttatgtttagtgattgaaatcttgatcttatttttctttttccgtaataaggttgctttacattaatatgttttatggtcattttgcttatttgggacactagataaattgccttaaaattgctttctataacacttaaacgattggtttgtttgaactttgatgggcatcaaaatctaggacctagttgttgcttagataagtctaatgaatttgggaagttgtcatt

SEQ ID NO: 94186 - DNA, 253 bp, Glycine max
gggacactcaattttcaatgtcccttgtctgtttgtgggtcttggtccaaaagggttgttggattctgattcagttaggagccccacttctccacttgatgctagagttctttcaaatctaggcaatcctgttaggaagccaagatcttcacctcatgaaaagaggtgggattgttgcaaagtaggtctaggcattgtggagtctttggaagactgttctaggttttctgggaaaattctccagtcaccagag

SEQ ID NO: 94187 - DNA, 241 bp, Glycine max
ttctaactcaagggtgtgattcatctggagttgtgctgcatatcgggtggttatactgtgcttataaacacttggaggcaaaaatctcttctgaagcaaactgttgctcattattcatcatgtcaaagtgtggatgcaatacatttggtgtggagtgaaagtgaacaaccatccgagaagctgaaaacatatctgaataagattgtggttttgaagtctcagaaagctcacaagccaaact

SEQ ID NO: 94188 - DNA, 238 bp, Glycine max
cttcaatctcaattgctcgatcgcgtgattttcgattcgtgtttttatgattagatttttccgatagtttgcttgatccgtgttttattctgtttttacaagtttccaattctatgctttggtcgtatgccctgattcactctctgtttttattgtccgtacgatcttgagcacttagccgcattgatcctacttagttcgtgtgatttaggattatagctaattaactgtttgattt

SEQ ID NO: 94189 - DNA, 270 bp, Glycine max
cgctacgcctcgatccatctccaatcctcctccctccccattcacattttcactatctctcacactcccaacctccgacattccaaaacgcacgcaacctcgacaaacatcgacgccgccgcataggctgtcgtttccaccgtttcccgccaataacattccgatcaagttgccgttttgatgcctcccacgcgcgaaacgaatcgtgggtttcggttcccatttcccaacgccaaatgcagctatcgaaacgaatcgcgtgccctggaa

SEQ ID NO: 94190 - DNA, 258 bp, Glycine max
gaacaggtttctgagcactgttagtgttagggactgcagatgatgggtatgagtattggtacttataattggtgtggttaagacaagtatatattaggagtgtatgaggatgtcataggaatggacttttcatttgttagtgacttggagctgggtaatgtatgtagaactaacttggagatgtctgctgtgtgtacacacttaatggatacagttgcaaattgcaatttagggtggggtagaatgttgatatcatag

SEQ ID NO: 94191 - DNA, 262 bp, Glycine max
atggcatccttcgctgcccccaacaacctcggtagcgccgtgctaccctctcgtccccctcccgtcaaatgcacccttttcccttcttgcaacaacaacaacaaccattcactttcaaacccttctccctctcaccctccgccgctcttcaaagccatcgccatctcctccgccgcctccatccttatgcactgtacccctctctcccccttcctcgctaaccccctcgttaaactcggcggaggcggcggaaacaccggcg

SEQ ID NO: 94192 - DNA, 257 bp, Glycine max
cactatccatgaacaaaaattgaatttttttaacccctgctatgaatctcagatgagcaagaacttgcagctgatctgataactccggcgaagaacgaagtcgtgaaaaaggttgtgcattacgacgctgatgcgagggctctgagattgtgcatttcgagtcacgaaaatataataatttagatccatttttagatctacacgttacaacaaaaacaaatctgaaagccatgcgaggacgttagatacgttataga

SEQ ID NO: 94193 - DNA, 251 bp, Glycine max
ggcgtcggtcacagggagagagctggagggactggttctggttgtagaagaaagagtccctggaactgaaggcaatgccaaaagtgaagccatcagatctctgaatcctggcatcagaacaaggatggtacacgttctccaattgcgtttgtcgcaaacagcacatacaccgtgacaagttttacactggtgctagagtttcagaggggtaggctgcataacttgtactggaagagagacggctgttcttc

SEQ ID NO: 94194 - DNA, 188 bp, Glycine max
catttacgtagatggtaagataattattggggccatttttgttctgggcagtggaagttgtggttgattcagaatggccggaaagaacaacccgcgatccaattcgcgaatgaccatctttctcttcctcctcgctttctctctcctcctattcctcttctctctctctcctctccgcaccccttctc

SEQ ID NO: 94195 - DNA, 259 bp, Glycine max
caaaatttgagccaccagtgtcactgagagaaagctaaacctttacgttttcacattgaataacatggaagaagtctctgatctgtcttgtaattttgctgctacacaggttgtgaatctctagtttagtattggaggattatcagatgttttgcctgtgtctgtcattgacaattgacttaatgtacatcctctgttcatatgtagtgcaacctactctaaccaacacgacattgccactgaatcaacgttattttag

SEQ ID NO: 94196 - DNA, 259 bp, Glycine max
agaaaatcgggtactaactgatggattattcttattcccattcctttttattgtttcagcattgttggaaacccccttgtttgtgccacgggaaaagagccaaactgccatgggatgacattgatgcctatgtccatgaacttaaacaacactgaagatgctttacaatctggcagaccaaaaactcataaaatggcaattgcctttggcttgagtttgggatgtctttgcctcatagttattggttttggacttgttc

SEQ ID NO: 94197 - DNA, 255 bp, Glycine max
atttccttgccggttggtacaaatgaaagcacgaagtggatgaaagaaaagatatggatgagaaccacgcgataggatgattttgttgtataatcatttttgtagaataacttagtgagaataggcatagattttggtggtgaatgaatttcgttaacttaaagattttgcattgattttcgttatctgaatggtgtgtactaaatatcaatttaaagaaatataccaattgattttttttttctggggaccttg

SEQ ID NO: 94198 - DNA, 249 bp, Glycine max
cacggatgatcattgttgaggcgaaagagaattatgataatcagttgaagatccagaagttgaaggacacaatatttgcagttcatgagtcacttgcgaaggcgaagaagaatggggcgttggcgagcttgatttcggccagatcgattcccaagagcttgcattgtttggcgatgaggctgatgggtgagaagatttcaaatcctgagaagtatagagacgaggagccgaagctggagtttgaagatc

SEQ ID NO: 94199 - DNA, 245 bp, Glycine max
gaagaagcaaatcggtaataggacaggaccgtacgagagtgcgatgcgatgcgaatgtgagtgactgagggagtaggattgtttttgcttcttccattttgagcctcagcgtttccactttcctctcacattgagtactatagagatcggttgtagaactcttgcttctccgtggtcttattctcaatggaacctattggtaaagaagaaaaattgcttgtgtgattggtgaccgatcaactagt

SEQ ID NO: 94200 - DNA, 141 bp, Glycine max
aaattagaatttcaccttctcacattttctgcttccctctataagaatgaaaccttggaaataaaaagttggccattcactgctttataatactctatcaaatgtgaaacttgtatggatataatgtaagacaatattcat

SEQ ID NO: 94201 - DNA, 242 bp, Glycine max
actcagcacccttccattagtgggaagaaaaaaaaaatccatcattgataatgcttaataatcatcacacgtaaataatacgcatacacactaacacagtttggtgtcttatgaaaaagtttcaaaagaaggcagaccaagtctaacgctggtttgacaaagaccctctctttctttccatgtttttcggttcccttatccctcataaagctttgttaacatccatacaacaaattagaaaa

SEQ ID NO: 94202 - DNA, 231 bp, Glycine max
cgaacgttatcagatatttccccaattcaatgctctcctggctacctggaaactaaattaaagaaaaaccgttaagccaaagcaaagtaactaactgcatttattttctttctcccggtcaattcaagatccgctgttaagtaactacattaccaatcttccgccattcaatacaaagaaaccctctgtctagggttttcacttccatggaccttccgctcctcaggaaga

SEQ ID NO: 94203 - DNA, 241 bp, Glycine max
acttctctacactaactaattttatagtatagatgttgataccatgaaaaaatacatgtgctgaagaccaaagagaagccacacacacttctatgtaaatttttcttcaccttttttggtttgatgtaaatttattgtgcaaccgtttaattactccatatcgatacatttccttgtgaatcgaagtgattttcttataacaagctggtgcaggttacatgaatagactatctgaatgtta

SEQ ID NO: 94204 - DNA, 238 bp, Glycine max
cgcgcgtcgcgttggctgtggccacgacaatgaaggacttttcacaggcgctgctggccttttgggcctgggccgtgggaggttatcgtttccggtccagaccggacgccgtttcaaccacaaattctcctactgcctcgtcgaccgttccgcttcggccaaaccctcctctgtcatcttcggagattccgctgtttcccgaaccgcgcacttcactcctctcatcaaaaaccctaag

SEQ ID NO: 94205 - DNA, 230 bp, Glycine max
aaaaagatagaatgtctttctgcttaattatcttacatttatagttgtttgtaattttttgtgcttgcattttaaattttttgtgaatatgacttattcaactatttaattcttattaatatttgtctttaggagtcaagttgaaaatcacgatggcagtctttggttagggaggaaaatgagtttctcaagattcaggtctagatcacacttgtttgtactcttatttt

SEQ ID NO: 94206 - DNA, 239 bp, Glycine max
aaaaaaggacaagaacgagttgccaccctaagttgggcgaggacaaataattataacagtacgcaaagaaaaacttcagccggttcatcacacctgcatgaatcgaattcttccaaagaagatcttcctttcagcaacaaagcctcactttctaaggacttcccaaagcctcagagttcaattaatattgaatgttcagaagcatgtaaattggccgagtcttttacctctcggaatcc

SEQ ID NO: 94207 - DNA, 123 bp, Glycine max
aagcgagtgtgtagattctcttctgacgcaacaacgcgagcagctctgttgttgctcatgcaatcccatcataatttccatggattctcaaaccccaaaaccactttctctccctccttcgcc

SEQ ID NO: 94208 - DNA, 110 bp, Glycine max
gacgagacagtagctgaattgcacacacgagtcatgaacaagcgggatttggccattctcatgctcaccgctttcgctatattcttcactcttcagcaagatggcggaat

SEQ ID NO: 94209 - DNA, 259 bp, Glycine max
acggcgagtttgcacttgtctaaaagagcgactgcatgagctatatcaagattgcttcagcgagtggcttctctgacatcaaccttatcatcataaaagcaacagccccagatgacttgcctctgcatgaaaaatacatacaacacctcttgaaactcttctccatctctccatctacgtgccactcctttgccatcagcttcactcgccgatttgggaccacgcgttgctggcgtgttgcactcaagtgtctcattct

SEQ ID NO: 94210 - DNA, 227 bp, Glycine max
agaggtatgagtttttgaaatggaattggatctagttccaacaaagatgcttgctctatttatggacagtgagccaccctactgttattttttttttttttaaggaaaatgtctggtgagcaccgattgacctatgatacatctaaggatatcgaagaaaaaaaagattctaaagaaatataactaatatcctttagaataatcaaaaagattattaaattcaaata

SEQ ID NO: 94211 - DNA, 233 bp, Glycine max
gaattttcttggcagcagacgagggttgttttcaaggattatctgttcttcttcccctgtcgtaatctcaacgaaggaacaatcttaaccggagagatcgggttttctcgtagatggcaggccaacttgcaagatcaagaagactagaaactcagcagcaggatcagtcaagggctaagtggacgacatcactcaccaacatacttgcagcactgatggttgaccaagtacat

SEQ ID NO: 94212 - DNA, 230 bp, Glycine max
  unsure (1)..(230): unsure at all n locations
ctcgangccgcgctgatttcctgtagagctcactcactttcaaacttgtccattacctcctttcatcccagcacatccttcacaatgacaccagctgtccgcagactccgcgtcgccgtctcaggccttggtcgcatgggcgctcgccatgcaaaccacttccttcaccgcacacccanagctgagctcgtagcagctttcacaccagctgagaatgagattgcgtgggc

SEQ ID NO: 94213 - DNA, 253 bp, Glycine max
cgcagtgaagtgtgatcaagagcataaaaccaagggctgttgtgatgctgagtatacatgctagaatataagatgaatcaatgtattagagagatgaggattaacaattatttaggaaaagatgatagtaatgcatctaagatggtttgaccatgttggaagaagacctatagaagctcaaatgagtagagttgattagataaaggatagcctaatagttaggggtagaagaagaccaaggaaagctttaagt

SEQ ID NO: 94214 - DNA, 259 bp, Glycine max
  unsure (1)..(259): unsure at all n locations
ttagttttgggtgggtataacaactgaagataatgccacccttcgttgttacaccctactcttctacttnctccgtgctcaccccgaaactgtgcaatcctcaagtgaaacgattcgttttgcagttcgcgtatccaaagcgttcgcgcacatttctagaaccttcttcttctgcttctttctctcctatgaggaaaactaaggaggaggtggtcgaagaacggctttacagagaagaatatgtccaccctcgaaacga

SEQ ID NO: 94215 - DNA, 162 bp, Glycine max
ggaataggtgtataatgtattcgtattgtttccttggcttaaaataattttagtttgaattgccgtagtttttcatatccttactgcataatttcactgacacattgcttctgttttgcatatgcactttaatattcaatttcagtaagatccttttagttc

SEQ ID NO: 94216 - DNA, 222 bp, Glycine max
gattcacttgcttgtatcgtctttcttgttgtgtggtaccttcctgagcttgatccactgcacattgtcccttctgaaccctgaggatggggttggcattctggtgcaagctgatgatgatgttagcatggcccaaagcatcaaagattctagagtattctcaggtggtgtcaaatgcactggatatgaagttgagggatgacttggagagacttaagaaaa

SEQ ID NO: 94217 - DNA, 255 bp, Glycine max
taccccctctaaacctcttctctacagcatcccacttcatttcatctcattctaatctgcatttccggatatccaactccactctcttacactgggtttttttagatttttattggctttagtttttatatatcctatcatgttcagtgggtcattggaaaatttttgaatggagatcacttgtcaaagattaaaaagttggaattatgctattgtgcgtttagagcaacttgggtgcattttattaaaccccct

SEQ ID NO: 94218 - DNA, 214 bp, Glycine max
tgcaaatatcattggaagtttggaacaattgagaatttatagaatatgcttgtataagcaactatcaataatgctactcaactattaaaaatatatgccacgaagttgtttatccgacctttttgtcaatgatgagtactttcggtttgtatacataaatcaggggtcataagcaaacaataaggcattgtaactgtacctaccacatagtaga

SEQ ID NO: 94219 - DNA, 248 bp, Glycine max
cttcttcctcttccttttacatttccttattctatttctcattgtacctgcaattggcctcttctacgttgcaagtatcaggttacatttggaggtgaggacatacatatacatatattatagatattgttactattattattaggttatatgtatatatggcaatgtggggtggacactcaatgttgttaaccaatggggaaggcacaggcactcccaattaacgtataaaagcaggccttacggtt

SEQ ID NO: 94220 - DNA, 264 bp, Glycine max
cgaatagatagataggtgaaaatggcgcagtgtgtgaccaacacattcgtgcaaggaaaaccctttcttccagttgcagcagctcccactaaaaatgtaaccagaatttattacaattgaaattcacaacgtttgattcgtggagttaataacgttgtttgattgcagcaggttcggagagcggttcagtgcggtgtgtggtgcaagaagaaggagatacacccgcaattctacgaggaatcgaaggtgtactgcaacggggag

SEQ ID NO: 94221 - DNA, 166 bp, Glycine max
tatgcacttgaattgtttgttataaaactgaatattttcacttgtctgatagtaaattaagaatagatgttgtcatatttgactattttagttattaggtaccactcctttgggtagaaataatggctgtgagaggcattttttttcaattgtgattcttgagcca

SEQ ID NO: 94222 - DNA, 169 bp, Glycine max
cagagcctggaactgtataccataaagtattgaacagttcagtagagaaattgttcaatactttatggtatacagagcctggaactgtttagggtgggggccagtgctgcatgcatgcccaacatactgttttggacgtcaattgtacgggcaatttgctattttgtgt

SEQ ID NO: 94223 - DNA, 239 bp, Glycine max
ggggaagggagtgtgaatagtaagaaggtgaagaacttgcagatgaagggagaggtggggggtttcgtggtgtggcagaagaggccagagttgtggtgcctagagcttgtggtttctggctacaagatcagtgccgggagtgatggtaaagtggcatggcggcaaaccccttggcatcattctcatgcttctagaggcccaccaagacctctcagacgtttcttacagggtcttgatcc

SEQ ID NO: 94224 - DNA, 160 bp, Glycine max
  unsure (1)..(160): unsure at all n locations
ccaccaacaaggcatcaataatcctttcctttcccttccacaccttcgagaattttactnanactgtccaccaagtcatcgctgtagtctctcctccaaaagggtgagaatgagcataatccattaaccatgtctgatgaacagattttggaacaaattt

SEQ ID NO: 94225 - DNA, 233 bp, Glycine max
gatacgttccatcttcaagaaaccacagcgtctaagactcccaccgggtcctccaatttcaatacccttgctgggacacgcgccatatctccgttcagtgctccagcaagcattctatgatctatctgtgggctgtttagacttttccatgttgataccccagttgactttgaactaaaggaaccggaggaagtagtgacgaaaagatccattgatggcgcactaggaatttt

SEQ ID NO: 94226 - DNA, 243 bp, Glycine max
agtttcacttgcatgaaactcgaagagataagaccactaaagggcagttgctggggactgccatcatagacttggcagattgtggtgtacttagagagaccttgagcattcgtacgccattgaactgccagaggaactacagaaacacagatcagccactttggttcattcaaattgagcctgttgaaaagagtcgccctaagtcctccttgaaggacagcttgacaaagggaaataatggca

SEQ ID NO: 94227 - DNA, 245 bp, Glycine max
aattcaggtggcccatgggatcgagcccagaaacaaaaattaatgtgaaagtgagagaggagtttgatgttttaagcaaggaatccaagtgaggatgttgaattgatcgtgttcgtggacgacataatggaaaccggaggcagaaaactgaaaagcagagaaacgatggcctttgaatcggtgacgcagtcagcacctcctccgagatcaagaggaagaatcaccttgctcgaaaaccccaaaac

SEQ ID NO: 94228 - DNA, 246 bp, Glycine max
agtcagtgttcatcaagagaaaagccggtgagcttgctaagtgtgtgctgaagatgagggaggatcatagagtgtacttgctgcacaggaaaattgaggatcttcaggctcagatacatgccttggagaagaggaacaaggagtactatgataagcttctgagaagagatggtcatgaagatggtaaaaaaggtgtggctttggaggtttgtgttcagatggacaagcaaaagaggttcaagtgga

SEQ ID NO: 94229 - DNA, 164 bp, Glycine max
gttttcaattgtcagatgggtaggggcaggacaagcactggtactgtcatagcttgccttgtgaaacttcgcatcgattatggtaggcccattaaaatactgggtgatgatgtgacccatgaagaatcagaccgtggttcttcaagtggagatgaagctggggg

SEQ ID NO: 94230 - DNA, 99 bp, Glycine max
gatcccgccagtgccattgctgagagcctctaaccaaccactgcgaactccaccaccgcacttccattactatattgcaagtaacagcaaaatctcaca

SEQ ID NO: 94231 - DNA, 259 bp, Glycine max
gttggaatgcccttttagtctcggaatccatcgattcagaaccctagttgaagttgtcttgtctgcgttctcaaacgttgttgcttgctgctgctgcatagttgatcgaaagcatgacaacatcattgtccagcatccttttcaagggaattgcagctcgttctttcaccgcccctgtaacactgaagcaatccctactctttcatcttctgcaactttgtttgtgttatctatatgtctcaattatataaagttgcat

SEQ ID NO: 94232 - DNA, 158 bp, Glycine max
taagtcatcagggctattacttaacaaagaatgataattaacccatcagattagatcatccacatttcacggcaactcctctacagtcacattgtagaggagttgccatcaaatgtggctgatctgctctgatgggttaattttcattctttgttaag

SEQ ID NO: 94233 - DNA, 266 bp, Glycine max
caaacacgacgcaagcagcagtttagcttgcacacactccctcactccacaccacactggatacattgttctccagaatcataaaatatgttcagcttcttcatcaggaaaggcgtcagaaagatcctcaagcgcaaagacagcgatgctggccaaataaggaagagctttggaagacttgagagcttctctctttaatcaattccgttcctctgaaggtgcaaagcgtcaacagcagcgcatatgtggtccagctattgcacttt

SEQ ID NO: 94234 - DNA, 132 bp, Glycine max
aaaatggatgagcatatattgtaggaaatcctacattatttttgtctgtctatgaaacatttaatgtttgtagtttatgctactgaaagttgtgccatatcttttccagtaaagttgggtcacttgcttgtt

SEQ ID NO: 94235 - DNA, 267 bp, Glycine max
gttacagaagggcagcaaactgtaatgacagggaagcaattgctctgcacaacttggcaaaacttcactcggagctagggcgccctgaagaggctgcattttactacaaaaaggacttagagaggatggaatctgaagaaagggaaggacctaaaatggttgaggctttactctatcttgcaaaatattacagagcacaaaaaaaatttgaagatgctgaagtttactgtacacgtcttctggattatactggcccggagagagaaa

SEQ ID NO: 94236 - DNA, 258 bp, Glycine max
ggggttgactatatcatagctcctttaaaggtattgcagtctctcaaagaatctgttgcttctcctgatgagaagtactcttttgttaggaggttatcccctcagtctgctgccaagtacacatttagtgatgaagagcttgttagatgggacgaagatagcctctcaaaggccatggggcctgcagctgtgcagcttctggctgctggactggatggccatgctgatcaagcaaagcgggtggaagagttatttggg

SEQ ID NO: 94237 - DNA, 247 bp, Glycine max
cttgttccagtttcaaccgttgccacattaattatcttccaaaattgcaattgcaattcatcaaagcaaacaagcattgaaggacccagaaggttcaccaacacaaagaagcaatcttttgggtttgtttgatcttggggggccttgtttcatcgcttttggcatcagggagagaagggcagtgtagtggaattggtttttggcaaaagggtgtttttttggtaggaatttaagacaagtatcagaa

SEQ ID NO: 94238 - DNA, 268 bp, Glycine max
tttaccttgatagtactccttctttcatatacagaggatgaaaagcatttcagatgtatacattaccattaaaagatgtcctcaatgaaaaattcgtctttcaagtcctaattagtgaatgtcaaccttgaagaagttatttctgctcctctgcacacataaatttgttgctgatgctgatttacaaatgttgtaatgcagaatatcccttatcagttttcgatggcacatcttcccaattgcaagatcaagattattcttcataatt

SEQ ID NO: 94239 - DNA, 254 bp, Glycine max
agaaacgggaaaacatattttttttttatataaaatcccttggaaccccattaaacggaaaaaccccggaggggataaaccagggtaaaaaaaaggctggcagaaccaatttatgcaaaccccccagcatttttatccttcccaaaaaaaaccctttttttttactagcaaagggaagggcttccttagcaaggggatttacatccggaaccggggggtggaccttagcaactttagcaatagcctgggttttt

SEQ ID NO: 94240 - DNA, 403 bp, Glycine max
acgtgattcattttcaacattttatttctccattgagagtgtgacaaaccaaaagttgaaggaataattttttagccctttttttcctgtgatcatactttattttctaactaaaattttcttttctctgatcatactttattttctaacatgaacatgctagccagaatagaaagaatttcagaagtgactaacatactaaccatctaaccaaagccagaatctcctgactattttttaactccctctaatttaaatctatacactttaaatggtagtagcacatgcctcgaccaaaacgagctggcatgataattaccaagcgtttatggatcgaactgccaggacgagcggaatttctaatcatcgcagccaatataatccaccctacttttcattttga

SEQ ID NO: 94241 - DNA, 238 bp, Glycine max
acccaaaagttttttttaaaactaatttaatttttttataccaatacattattattttaactttaaattaaaaaattgcaagggccctgaggggcccccgccatacaaatagctataacttttatgggaatcttttaatcccacagtttattggacaaattttgctttggggagtactataaattttaaaattttaaaaattcaatttcctttctttaattgactaaacccattgggc

SEQ ID NO: 94242 - DNA, 361 bp, Glycine max
gcaataaacaatcctgctattatttctttcattaaaattgaatttatgtacaaaagtattggctgagttattcatgaattaagcatctatatattaacaggctcaaaatgagcaaaaaataatatgcatctacactactttttcacattcaaaaagcttcccaaaattcccgttccctttaaacataatatgtaagggaaatttgaagtggaatgtgtgcacttgttttagcaaggcaagcaagagttgcaagacccatttccagactcctattaactgaaaatgaagttgcacaagttaatttgatgcaagtcaatcctgggatgtggcagaatattcaaaaagaaggcgtttggatgga

SEQ ID NO: 94243 - DNA, 475 bp, Glycine max
aatccaatactcagcattttagcttattgtactagaaccacaggaacaaacctcagagttgtaaattgtaatttaaagtgagctgtcacaaagagaataactctggcacagtgtcaagtcatttctgattgaaaacatcagaacttaaatactgctaaggaccaatttggtccatttgctacataaacaaaatgcacttctattttggaatttcatcaagcgcaattaaaaaagaaattgggtctttctaccagaacacttactcggcttcaaatacctagacatgctttaatttcaaatgatcatagtatataaactattagaaacaaaaaaagatgtttatgtaaaaaaataaggtggaaaaatgaaaatggagcctatacctgtatatctatgtcagtttgtcctccttgagctccaccaagcggttggtgaatcattatccttgaatttggcaagctatatctatttcctt

SEQ ID NO: 94244 - DNA, 229 bp, Glycine max
aaagcaaatgcgatgtttatccttacagggggtaatctccttgggacaagacaaccgattttttgcccttttcaccaagtccagtcccgaatttagctaggccttaggcaagttttggggcatttaaacaaagctggcctttttgtcgggtttaaggccgttctgtttgatggcttcgggggtttgcaaagtaccctgttggagcctcctttttttttgccttggttga

SEQ ID NO: 94245 - DNA, 475 bp, Glycine max
aatacaaaattcaacgatcttcccatacatagaaattgaagatttttttacagtaccaaaaaacttttacgctgtcaataaattctaattacattcaaaaacaaaaaggaaaagcactagccacagaaaaaaacaaaaggaaaatagtaaataatttattttaacaaataagtaaataattaaattaaagatgagtttctaataatgatactcaatttctcaaacaattctgtgctaccagatgaagacattcaacacattttaaagttgagaaggtagcacagggctgtgtaactgcctgcagtcttgagaaaataattgcaagagtgatccctatctgttccattcattgtctgctccatatctggggttggtactattcacttgactatatacctctggctttatggagtttccaaaggcattccaacctagaaggtatggcatgatacaattgaaaagtgaccttaaaact

SEQ ID NO: 94246 - DNA, 180 bp, Glycine max
caattgtgttgcctcaggcagcgcatcagttaaattttgattgagacaataattagacttgtgtatgcttattgactttttttttttttaaactcagcccaaaggaaatattgttggcattattttcttatgaaaaaaaatctatatcaattccatttcaataatgtaatacataattat

SEQ ID NO: 94247 - DNA, 512 bp, Glycine max
aggaaagataagatgtcgtctctgggcacttccaaagggattctagaaattgccaagttcggcgtctatgtcaccgttcccatcattctcatgtacactttcgccaacaatcccagcaacctccgcaagttcatgggacataggtcatacattgaatatcccccagaggcagaaaagccaccatcaccggaggaacttagggaaatggcacgggagaaagctcaaggaagcagtggacagtaagagctccacttagaagatgggccttctacattaggtcatgcttattgtattcataacagtcaccaagatattgcaaatcatcattccgggttccaaaaactagaaacccttgtatatagtgatatccattggtcatttgttgaggctaattccttgtttaactttcctcaaccaaggaattgaatggatgatgctcattttctatcaactaggattttcttgattagatggtattttggctgtttatgaaagaaatggttgggaattga

SEQ ID NO: 94248 - DNA, 387 bp, Glycine max
gcaggcggcatcagaatctagttgaatacatgtatgtcatcaataatctattctccgcagtcgtggagcctgatcccacatcaatccacaattaaaccccaaaggcatccctctttgaacccaatcgctcatttcagctttgtcaccgcttataccagcatcccacgctacccacaattcccagccgcactcttaccgctcaaacaaccaccgtccccccaatatcacacagtcccacttcttcgtcccattccagtccttcagcctcagcagccttcttccacctctccaccggctcagtcacaggctcatactgcgcactgaatgcccctcgaaacgtgccgtagtgcatagcgatactcttcttgctcttcacatccctatgaa

SEQ ID NO: 94249 - DNA, 440 bp, Glycine max
gtgaaaaccaaatttggggctttgcatcgcaagatttaccctttccaatcaaaattcttctgccttccccaaccaattgtctttctcactatcgatttgtaagtttctctctcagaatgcttatttcgttatcaattcatgtttttatttttctacgtttttattctgagacgagatctgtatctcttttgttaaaatatacttttcttcttgttttgttttctcgttccactaattgcaacgttcaatccctagatttatacgtcgattattcgattgattaattgttgattttcgtgcaattcgctgtttcgtattttagtataaccttgtcggtgacaatgatgcaaatgcgatatagcctatggtgattttttttaatttatttgtgacattgtagggtttggttggcattgtaattgattttgtttgtgaagatc

SEQ ID NO: 94250 - DNA, 175 bp, Glycine max
aaacattatctttttgtaattaattgatcaattaaacatataccgttgatatgtgaggggcaactacacaagaattctgggataaaatacaaaaagtttgtacgtaatgattcccattcccaggagcaatatttcgcatggtaaagtcaaagtattaactacggaaaacctagat

SEQ ID NO: 94251 - DNA, 452 bp, Glycine max
acccccaccatcttggtcgttggtgcgggcgatcatggatcatcatcgtcaccctcatcacaccacccctctctccgagcccaccacccccaccacccctcgccccaccctcttcctctccacctccggcaaggcccttcttctcttcaactccaacaaatccctcctcctctccaactccagcaaacgcctcgacaccccgaggaaaaaatatgtcaagcaagtcaccggccgccataacgacaccgagctccacctcgccgcgcagcgcggcgacgcggcctccgtccgccagatcctcgccgagatcgactccatcatgatggggagcttcgagttcgacgccgaggttgccagtgtcaggtccgccatctttaatgaggtgaatgagctgggagaaaccgccctcttcaccgcagctgaaaagggccacctcgacgtcgtaaaggagc

SEQ ID NO: 94252 - DNA, 504 bp, Glycine max
agatgcaactatttgtggctttgttttccaatttccactattctttttgaattttgcaattgagtaattgaaagtgctttgtcctttctcttgtcgagcgaatgaccttgaatttcccgcatatgtcacgggatagagcctgacgaaaactagcaaggagggaggttttcagtattttctggacaagctgcaggatgccttctgaaatcatggagaagaggggtgcttctgcctcatctcgctttttggatgacatttcctatgtttctgagaagaatactggattacgaaagccaaaatctatccatgaccattttctacaagggaagagtgaaatggcggcatcacctggcatcatttttaatacttcgtcaccccttgaaacaaattcaaaaacaggcttgtcaatttctcagactactctatctcgggaaattacagaagacctacattttggcagagaaacaggcaatacagatatgctgaaggattccaccacagaat

SEQ ID NO: 94253 - DNA, 508 bp, Glycine max
caccgccgctgcacccaaatgcgccttcgtcaatagcctttaccgctccagcttcagtttgttgattgaagacaacaacttccagcgaagcagcgtaagtgttagtaaaagattttatttttctctctctctcttccttctaaacgccgcttccgcatctctcttccttttctaactatagattttatttttccctctgattcttcctttttattttatgtttttttctccgatgtgactggcgtttgttttgtgtgtttttcgtgtgcgccaaagcctttgcgttcgttaattttgttttgtgtattcggatcgagttgtttcacgttcggttacggggatcttcggtttaggtttgtttagggattttttgtttctttgtttatgttgtggatgagtttttcgttggatttgttgtgttctgtgagattgatggattttttctaatttatattccttcaatgttttttcttttttggcaaaatgaatattttatttatggacagaa

SEQ ID NO: 94254 - DNA, 210 bp, Glycine max
caacatcgctatcgagggaattaactatgaagcctaccctactataatccctttcgttgctgcctgtatatgcttacctggctctgtcagaagacgctgaccaagatgaggacattggtgaccaccccattctgccagaagggacatattacattatgccatcaacttggggcgctgccggtgatggattgaaactaggcctgacgggaa

SEQ ID NO: 94255 - DNA, 316 bp, Glycine max
agttgatataagcgaagaaacatcaagcttggttattgcttcaaattctgcggcttttggtggcagcccgcttgttagtattaatttttttttcccttttgaatttccaattttgtctgtattctttccttggatattgcttaagaaaaatccttattagttattacccatcttttatttttctacacatggggagggacaccgtctattgatatgagaatcaatctagtgactatttgttctggttggccttgcatacatatgttcgcgtgtcttaggataataatcattaatgataaatggtagttgtcacgtg

SEQ ID NO: 94256 - DNA, 260 bp, Glycine max
aaaaaaaaaaccaaaaattggggccaaaaaaatcttccggaaaaattttcccaaagggccccgggaaaaccccattggccagttcccccccgaaaaaaacccccccttcttttccctggggggggcaaccccgccctgaaaagggggggttttccaaaacaatggggccccttaacccccctaaaaccttaagcccaaaagggcccccccccctggaaaagggaaatgcctcttcaaaaaaagaattttcccaggggggg

SEQ ID NO: 94257 - DNA, 331 bp, Glycine max
ttttttttttttttttttttttttttttttttttttttttttttttttttttttttttttttttttttttttttttaggacaaaaggaaaaggccccaaatttaatttaaggggcccctttaacccaaaaattttagggaagacctcccaattttaaaaatattataaaaacatttaaaacttgggatattctttttgcccctaaaacattggaaattttaaaaagggtcccccccggtcccataaaaaattttagcccttggatcaacccaacctttaggaaccaaaatttttacttcccaaatttgctttgcccccaattcaagattgg

SEQ ID NO: 94258 - DNA, 317 bp, Glycine max
ggctcgagctcctctctttgttctcttctttccacactctgtccctgtcgctgtgttatttcattttcccacactcccattcatcatcttcgttcttcttcttcgccctccatttcttatttttctttcttttcttttttcttaatttattatttattcatcttccgtttcttcgcattgtgctttcttcgattttttcgctgcgtccctcttagatccctctctggatcacagtgagaacagtgttgttgagtttgaataaattaatgaaggggtgttgatggatggtggatgtatggtgaagctggtgaggtacc

SEQ ID NO: 94259 - DNA, 112 bp, Glycine max
acattcaaataaatatattgggtataaaatatgaaatttcactagatctacacttcaaggaaggctatacataggcacatgctatgactataagcgtcttcatgaagaatgc

SEQ ID NO: 94260 - DNA, 188 bp, Glycine max
aaaatggggcaaataactgggtcaattttattaaaaagtcttccccccaatcgttaatccatacccaattttgtagcggtttaacaaacccccttcaatttgaaatttttagttcttttcattttacaaacttgggcatccctttttggcaaatctaattatttccacagtttaggtcctggggaaac

SEQ ID NO: 94261 - DNA, 483 bp, Glycine max
aagaaaacaaaataataatctggaaaaaatataaaaatcgaaaatttggggaatttcaatttcaatttcagggattctattagggtttcgaatcgccaagagattctcaaaccctaatccctcaattcgccctcgtgatcttcgatatctgtgggacgaatcgattgttcggtggcatgtcggttgagatccaagaaaatgtccaatatgtatgatggcgtgtgacaattgggggaattttggtgtgggcgtttgttctgttgattttctatggaaggcagaacagaaaactccaatgacactacatgtcccaagaaatcaagatcactggatcttaaaagtctatataaatcaaaatggacagaaaacacggcaaagacgaacttaaagaggatcggcaatagtagtgggggtggtgatgagaagaggaagaaaaaaaaggctagaaaggaagtctctttaagtagcttagaaaatggtgat

SEQ ID NO: 94262 - DNA, 524 bp, Glycine max
atttatgcatgcttccaccattatttcttcttaatcttaattatattaacaattacaattaacatcatgcacctgtgactgtgattcaatattaatggtttgtcaagggtattaagaaatttgttccgttaaaaaaatatcatgtattagaaattgaggctaagaataatttataaaaacttttttaaaatcatctaaattattttaaggacaaaattgtgcatgaaagtaaaataaataaaaggcacaataccttaaatgtgtaagcctaataatatgaaggacgcgagtttagaacattgacactaggaaggctaagccatacatgtgagctgcaataccgcaagagcttctagcctctttacctttattgggaggtgttattctagtatactaaaagtgtctcacgtcttaccagaattgaagttaaaaaatttaaacacccttctttctttaaagacaaaaccattagaccttcatgagagttaatgtggacaacactacactcgagtgagattatatat

SEQ ID NO: 94263 - DNA, 452 bp, Glycine max
gagtataataatttgctccatttgataaatatgaacaattacactaataagcgatacataagtatgctacttacacttgaaagacagttagaattaaaaagaaaaaaaggcactggatatatccggagtggagggtgggagaaagaatctgaagaaatacaaaaagcctaggcttgaagaaatataaaaggtgggataattcactgggtagtttttctcccaaaatcttgaaactcataggtaaatacacaggcttgtggagaattaacaatgcggtagaaatataaaaaatttcagctcccttatctttcccttatctttcttcacatacatggttatccagctgcgaaaggcttggcgatgtaaagttccattccactcacaggagtgaaaatgatctatttagtgagaaaatttgtgttcaatttccaccatgtacaaaattttcttag

SEQ ID NO: 94264 - DNA, 467 bp, Glycine max
tttttatattaaatattttaatttatattcttaattaacgaaggcattatgacaactaattttgtgtgtgtgaatttatagatacgttacccaagcatatgctatcaggttcaagtcatatgttaatatttaaaattaagatattaagacggttaagaaagaaagcaattactactaggaattaaaataactcaaaatcaagacaagtaaaacttgtggactgcatgcaggttttttttcgtatatatagattgcatattatttatgtacttgtacaccaaaagcataattatctagactttatattattaaaaaaagtaatagtatgcaaggaagaatttaattttaaatgaattgaagagatattttcctgacaagattaaaaagattaaattaaaaatatttttttggcaaaaatttctaatcattttaaatttttttctttctttcttactctcaagtttata

SEQ ID NO: 94265 - DNA, 123 bp, Glycine max
agcagcccttgcaatctcaatcttctcttctttgttcaggatacccatttcgctaatcttctcaactggccctttcttgttccaaagtttcaagctcttctctctcacccgttgcgggtggtg

SEQ ID NO: 94266 - DNA, 383 bp, Glycine max
aaatgaaaattcgtatagaaatatgcgggaagctttaaaattagcttttggattaaacatgggaatccaggggaacatttttagccttcaaagggtcatagccctcatacccttccaagggatttgacaaagcaaacttggcaacaaactcggggggggaggacctgcaaacaaaatacctcacagttgggataaccagcctcagcaagaacaaatgggaccgccgcaagaaaccccccatcccaaacactggtttggccaccgaccccaaaccgaacacctttcattcggttacccccccctttgagaacaaaaactgggttaaaaaaaacaagaagttgggctttaaaacaatttttacgggcagacccatttttcccttt

SEQ ID NO: 94267 - DNA, 377 bp, Glycine max
ttgacattccagatgtaccaatggaggaggattaatttattgtggttttacattgtggagtgttttctgttagaggcagtagcagtaacaattggctacacggggactaaataaaacttctttgtccctgaacgaaagttgtccatccaattttttagggataatttcataatgtctcccttttttgttcgatatgtatgaaaccctgttgggcatgctaaatgccctgttctctttgggctctctgttgcaaaccatctgacacagacttgggtgtatttctggccaactcacaggctataacctttgacactctggcacactgttgtatggtctgtattatgttcacgtcaaagagatcttttatattactgact

SEQ ID NO: 94268 - DNA, 459 bp, Glycine max
  unsure (1)..(459): unsure at all n locations
gtgtctcatggattcggagtgagtaaaagaaagcaagcattgcgccatagtacctcatagtgattaataaaccttcactcgtcccatttggatttggattttggatttggatttggatttgaatccgtaatggcacccaacaacaacagaacaaagggatcccattttccgcttctggccttcctcttcctctgcctcctcgcgcccctcctcttctttttcttcgcatcgccccttcacgatcaaggtgatgactcagctgtttcgagcgaaaaggttgccagatcgaaagaatggcaggcattgcaggatcttaaattgcttttttcaaaagaggttcttgatgttattgtgtccaacacaaatgatgtggggcctttgagccttgagaatnttagaaaaaataatctgtctgcttcatggagagttgctggattaaggacttcaaatgctatgaat

SEQ ID NO: 94269 - DNA, 508 bp, Glycine max
ggctcgagctttttttttctttccctctcacaacaccacttcacaccaaaactcaacttaaagcttcggtttatttccatctctaaaaacgtatctttccatttttttgacatgttcatactttccctggtcctcgaccaccaccctctttagccgttcaaaaataatcgtagaagaagaagaagaagcataagaaagagaagatctttgatgacccactttgctaaaaaagagaagatgatgatgatgctggccacaactggcacaccttgctgctcctaggaactttgtaacacaccacaccacactacactacactgcactgcacttatcccgtgtccgaatcctcatgtgaatcacgaacacccgggattttcgggtacctcaaactccttcactcaattttctcatcaccatgccctcgagtcattacaccaccaccaacaacaacctcaacaacaagactaggaaacgaggttgttcctcatcttcctcttcctctttggtc

SEQ ID NO: 94270 - DNA, 130 bp, Glycine max
atggaattagaccatgacccagaacagtgaagcttggatcagacctctaattttatgtgttagtgccccttttttatggctaaaaaaaaaaaaaaaaaaaaaaaaaaaaaaaaataaaaaataccttcat

SEQ ID NO: 94271 - DNA, 203 bp, Glycine max
aaagttgccaaagcttttatttattgcaaagcagagcaacccttattaagaccaaaaactggttcgtttcttacaattttaaataacagttcactttaagaattcatctatctctggttttgcaacaaggtttactaaaaacaatgttcaccctcaaaatgaaaatagaaaaagaggggaaaagaaaacataggttaacttaa

SEQ ID NO: 94272 - DNA, 220 bp, Glycine max
agtaattgcacattttataaagtatattattgctgtatctgtccatatatacaaccctcactccaacaattatgtcttagtggtacgcaccatcaccatttgacatctaaattggttcctatcacatatttactgatcttcgaaaaaatatgtaacccacaaataagcatgttaatcagaagcaaacgcttcttaggccgaatcatacatatgccagacc

SEQ ID NO: 94273 - DNA, 448 bp, Glycine max
taatgcatcaggttggcaacttgattcaagaatgatgacactacttaattcttattgttccatttatcttaatacttagttgttacatcctcacagaattattttattagggtttcattagtacataccctatagaaatcgtgttaagaaatcaatagtagaatctactaaagaaaaatataagcatttcttgtttgtgaattgagttataaccattagaggcttaattattctttgatttttgttgttatggacctgtgtgtttagaaggctatgacttttgatcttcatttatgaatgtcattgatttgggggtttttttagcatttatatatgtgtagtataaattgtttaacacatgtcttaaatcttcagcattgtggttttggcccttttgggccactatccataattgatatctatgctatttatctcaaattcgtgatcc

SEQ ID NO: 94274 - DNA, 315 bp, Glycine max
aacgataatgatttttatgagctgaccagttaaacaactaccatgtcaagaaacataagtaaattgaaactaatggaatacaaaaacattgggcccctattgggacccctttggaaaaacttggcccctagtttaccggaaaataaaatccgtagctttatgggttgacttttcccttaaacaatttcaaaaaatcaaaaataaaattttacagcttgggaaaaatacctgaaactggaattttcactttataacatactttaatacaaaagggttttactctaaaagggatgatgaaaatttggaaatttaaag

SEQ ID NO: 94275 - DNA, 218 bp, Glycine max
aaattatttggcatttgcttagcttaggcataaagttttgaattcttattttgcttacagatcagatcttcttgtattcttttattcttcttttttttatgaagagtttgtacagtatttttaattcatgtctcgtgtgttggaattaaagtagatgtgaaatgaagcttgagaatccaatgttttggtttaaatgaatgcatctgatctgaggtccc

SEQ ID NO: 94276 - DNA, 193 bp, Glycine max
cacgtagacgtagaatggaactgaacacagacgtagctgcaagcactgacgaagaatgagagagtcctgaaattcacacacaaacacaacagtcttctcctttctcttcacacattccatatgcgagcatgattctatttaatacccatactacgtgaaacactagacacacatgattgggtcttggaggaat

SEQ ID NO: 94277 - DNA, 471 bp, Glycine max
aaacagtaagtcttagttgtaatcataattaaccttaaaaaataaacaataatcataaaaaatataatattttaatttattggtagaatttaaaactacaacatatataattaaattagaagtacactttaaaataaatgatatgatttttaattttttaatccatattcttaaaataataaagaagatgaaggtgaatagatcttaaacaataggtgatggcgacgctgggtggtgctgaacacacgcggtgatggtggtggtgaatgcatgacatggttgaggaggcagagaaagagttgggcggacatgaagaagaagcataagcggaagtgaaacgtagaaagaaaatcgtatctctcttcttaagtttttagttgacaaatatcatacacttgggttggaatcactcaaacctaacttcccaaaaaaaaaaaaacattataatttcataattgaaaatcagacgaa

SEQ ID NO: 94278 - DNA, 297 bp, Glycine max
cttagaaagccggcccggaacgggcggcgggggaaccccttgaagggtttggcatttggttgaattggccccgggcaaaaatgggggcccccctggggggacccactaccggacagttttgagcaagggcccggggatccctgggggggaaaatcgaacaaacgggaggggaaagaacccctatggggtaaaaggccaacaggaacaactccgggaaaggcccattggccccactccaaaaatacgggggaaaaatcggggatggcccccccaatttaaaaccccgggcccaaaagg

SEQ ID NO: 94279 - DNA, 428 bp, Glycine max
gaagaataaggggaagtccatttcacttgcaatccaagcaaaagtgaatgttcaaagaagggaaggtttgagtttgactgggggcagaagtttgacaggccagaaagagcatcctgatgttaaatccaaccaaccaatgaaggcaagtgttcagaaaaatttacacaagaaatcttctggtgctcttagacagaataatctgaaacagaattattcaattgacaaagacaaattaccatcaaagccattggttaccaattcaaacagtaggaaagttctgactggggattcctcttatggacgccatagaagctctagtaataaatccaatgcaaaacctaaagttggatccagaaagtcagccatggaggtgacagatagtgaaaaggaggtcttgtataccagcacaaacagttttcctagaaaga

SEQ ID NO: 94280 - DNA, 381 bp, Glycine max
ttttttttttttttttttttttttttttttttttttttttttttttttttttttttttttttttttttttttttttttttttgggaaaggcccaaattccaagggtttgaaaaaaccttaaataaacccggaatggccaaaaaaaaccctaaaaatccaaaagggtccaaaacccccccaaaaaaaaaacccccaagggttaagggcccaaggggttttcaaaaaccccaatctcccccccctcgaaaaatcctgaaaatgggggcccaacaaaaccggtgccccctgggagggaaccctgacccaaccgaaaaaccctggccctttcgctaacgggggaaccctttccaaacccgggaaaaacctcaaatcccggttccc

SEQ ID NO: 94281 - DNA, 203 bp, Glycine max
aaacaagctcgggcgagaattctttcactggtttctcatttatactagcttaggtcaatgaccaccaccgctttagatacaatcaaaatgctaaaagccgggatccctccaaaagctcgagatttctcaattaagctaagcttctcataaagaacatagtgattgttttgttggacttactcaccaaattacctaaaaaacat

SEQ ID NO: 94282 - DNA, 337 bp, Glycine max
ggcacaagaacatatcagtgttcattctataggggttaggcaaaattaaatgtttatgtacacagcaactgggataattggaaaatcctacaaggttccccaaaagaccttgcaaagtgagaagtgaggagactaccaattaaccttgaccaacctatctaaaccaagttcaaatatctacaccagataaagtaataagttcacaggaaacaagagcagaggcaagttttccctaaaactccatattccagatcttattgaaatagtaaaaaacaaacactcttctcaatagcagtcataaaagtttcctgccgcagagggaacagaaaaatcagtc

SEQ ID NO: 94283 - DNA, 286 bp, Glycine max
cgtgcctgcccctatacctcttcccacttactattattattgtacaacacaaccgggtccctgaatgctttttagagagagaaagagtaataataataaagtggaagaaaatgaatttggtgagtgaatcacgacgaagaagaagactaataagacgaagaagaattgcgaatatggtgtttgaggaaacttgactgaggctgggactgggactatgtctccctggaaatggaaccacggcaacaactgaagctgctgctgcggaattaggagagaggaagagagg

SEQ ID NO: 94284 - DNA, 303 bp, Glycine max
agaaattgtattaggaatgattgattggtgtacagtatcttcagttgtcgtgtgacaacacgagaaaacaaatgttgcacccccatgactgtcgtattccatccatctatgggttccgttgacgtttatttttggaccgtggtgcttgttcaattatgaatgttagtagtagttatacataaaaaaaaaaaaaaaaataaaaaataaaaaaaaaaaaaaaaaaaaaaaaaaaaaaataaaaaaaaaaaaaaaaaaaaaaaaaaaaatacatataaaataaaaaaaaaaaaaagggggggcccc

SEQ ID NO: 94285 - DNA, 314 bp, Glycine max
aaaaaaaaaaaccccccattttcttttttttttttccgggttccaaaacccccaaaaggaaaaatggggggaaaaaatttcccgccccccttttttggtcccaaaagggaattttttttgtccctggcctttgcggggggccgccaattttttaaatggtgaaaatgccccctttttttcccctttaatgactttaaaagcccccccaaagttccccaaggggaaatttgcttgaaattcttgaaaagacaaaaagtccaggggtttttcctccctttttttggccccaaaaaatctttttgggtttttttttt

SEQ ID NO: 94286 - DNA, 471 bp, Glycine max
caaaaaactatattgatgttttattgaaatatccatcatacaagcactacccaagcagaaatcaacagtatgcgtagacgccacagcatacctttaaacatttcccatcatgacaccttaaaatcacaagagaacattagaaatttcgaatcatgaaggttgaactatgaattcttaacatattatctagctaaaattaaacaggttttcacatattatagaccgaaggaacaatttgttggtccaaggaagaaagcacatgcaagaggggtctggagacaaatgatatagtgatagaaccatccagcattcatcgccgaaaagcattgctttcaccaccagatcttccttgagaataatatgtccgacgacggacactctcggctattgatgcactccccccttcagctgcaccatatacacttttctgagcagtatccaagaaattcttgccaccggcattatcattct

SEQ ID NO: 94287 - DNA, 507 bp, Glycine max
gcagcacatgcaaagtcattcacttgaggaaagtaatctataagtttctaaaatcattggaaaattatgggttaatagtgtgaagcattggatcccagagaaagatctccaaaatgcgcgaggcagcatatatggacttgatggattagtatcaggtagggtgacctcctgtgaagctccatcaaggatgcctcggtcacgctctgtccaaaattgaggttggctgtttgttcatttgtgttttgttcttgtcagagcatcatgatacttttatgtgtgtgttttttgggttttagtttcttgctttaacagtattttgtggtggttccagaggccatttgtgtgtgctgtcgatgattgtcaggcaagttacagaagaaaggaccacctgactcggcaccttctacagcatgaagggaagaattttaagtgccctgttgagaattgcaacagtgagttctcttttgcaagcaatatgaaaagacatactgaggagattcatgatga

SEQ ID NO: 94288 - DNA, 288 bp, Glycine max
atggcaacagcaacaggggcctcaacacggacacggccttttgttgcttcgaaggtctctttttcggtggtggttgttttcattctctctcttttggtcgcttagctttctgggttcctctctcccaatgacgtctcaacaacatccttatcttccttccctttcacacagacacaaaaagatcaatagcattgttatctagtgacaaaaaagagtaccattgtgattgttaaattatactatagtacatgtaaattgtaaagtggtagtagtacaagcgtttcaatc

SEQ ID NO: 94289 - DNA, 474 bp, Glycine max
caacccttgaacctccatggctgatgccaccaagtatgttcccatcggtggtggcaatgtggccacggacctcaagagcctctctttcattctcaaaaccaaaaaaacagtggctgctgcatacgctttcatactcgccttcgtcgctttcactgttttcttagccttttctccttccccaaacgcttcctccccctggttcaccaacatattctcccccgcatccaccaccgatggttcctacaagcctcaaattcccaacattttctctctccttttcccaaactcctctgatcccctgcacaataacactaactcttctagatctccttatccaaacacaaccactgaatctcaaacactcaaagaaacctctttggaaaacagaacacaaacaaccttagtgaattcaacccaagatgcagttcctgttccaaccacataccagaccacggattctcacgcgccaagttt

SEQ ID NO: 94290 - DNA, 170 bp, Glycine max
ggcatctcctatattattggcaaagtgctctgactctctatgcagcttggatttatatgtactcggtgtctatatacatctgtttttatgtacttggtctatatatacatttggtgatgattgcccattcaatctgtgtgtgttctctttgcctcatagactgatacttt

SEQ ID NO: 94291 - DNA, 476 bp, Glycine max
cgcccttttttttttttttttttttttttttttttttacggatcactacccaaatgaaggaaactggagcataccctaaaatagttcaaacaacttgattgcttctaacggttccctatcacctttaaaatgtgaggatgtgaccaactagttggagttggaacacaagctggtacaatttgattaaccgaccataaggatgtgaatcaatgaaggacggcaacgccgtactcaaaactcaaggcatattacaagattgttcctggcttgctgcttgaaatatcatgcgtcaaacaatggcaactttgcttaaatgaaaaatgtcaataagactctctaatacattcttttaaacacactctattattgattaaaatttattgaaaattacaattttttttctcacttctttcttgtcactatttgatgaagtcatctcactctttgtaatttcccatatattttaaccaataatc

SEQ ID NO: 94292 - DNA, 73 bp, Glycine max
aagcgcaagaaatgcttcaatataatgtaatgatggaagtcttccatgatgaaattcaaacattagaagcatg

SEQ ID NO: 94293 - DNA, 104 bp, Glycine max
gcttaaatgttttattgaagttatgcacatttactaaatccaaaacgtgactggtttatcaagctagttaatacataagggcaattgatctcaaaccccgaatg

SEQ ID NO: 94294 - DNA, 440 bp, Glycine max
atgagatgattttcctgccgtccatcgtttttagagaatccttatatgttgttcagctcctccgttcaatcgtccattcgtcagatcgctttgtttgtcatatcatcgagacgtcctttgggcgaacgtcaggcacgagctttgggagtcgtgctaaaagtcgacgtgctgtcgagaggcgtctatgcgccaaggctggggaaagcgctagagtcgctgaggttaggggcgttgccgccacgaccaccgttaggagcgccagcagcagcaggagcaccacgggcttcgccgcgaccacgtccaccacgaccctcaccgtgagcgcggtcaccaccacggccacggccctcaccgccacggaaagatccacggccctcgccacggccacggtcgtcacggtcaccgcggccaccgtgcgatccaccctcacggggaggggg

SEQ ID NO: 94295 - DNA, 154 bp, Glycine max
gcttaaaggaaatcatatgcatttctcattaatactaatgaaactaaactgataatagcgatatgaaaaggtttgcatctctattgttgaaatgttattacattataaacttttcaatatgagctaataattattgctacatatttccacctta

SEQ ID NO: 94296 - DNA, 252 bp, Glycine max
ctccacattcctgccgttgtacaaatcgtcaatctcctcgttcgtatcgtgagtatcctcgaagtcagactcgaagtctcggatgtcgttgtcatcggtgtcctcatgcttcctcggcaactaaagcttcagaatcgcatccatgatcaacgggagcacctactcatcgccttgaagtagttctcgatctgcgctttcaggtatgccaagggaaattgaacggcaatggtgtaaaacaacgtcgttagaatg

SEQ ID NO: 94297 - DNA, 109 bp, Glycine max
cttttgcagaattcaaagcagtggagaacaaacgaatggtgacgaatgaagaacagaggcacagtcccagagaccagaagatcctcccattagcagattacaatggcca

SEQ ID NO: 94298 - DNA, 137 bp, Glycine max
cggagactcattgggctttgccgcttgctttgatcttcactggagctgccggcggtggagcccaaggcccatccacctgtcccgcgccttccacaccccagtgttcaccacctgccatccagtcttctccgccacct

SEQ ID NO: 94299 - DNA, 518 bp, Glycine max
gagcacttcaaggtgaggaacaattttttgcttttaaaagttatcttctgtttattatgaatatcttctctggatatgttgattttaagacatgcaggaagttcctcataatttggaatttggaggcagtcattgattgactgggtgagacttgtaaatatggtatacaattttttctgtatactatttggagggtgcagacgacgacttgaattatacaatgcaactttaactgccttaggctcaaaagtggcctttatgtcctcaaaaagatattttaggttgattattttggactgaaattctaaattgggctagtcttgtatgttgtacatacattatattgcacaaactttttaagatgtcactctaaacagaactaaccactacttaagatcttacgactaaatttaaaaaatagttagaaactgtatcattctgccaaggccatctagttaagtgtctcggctcagtatatcatgtgaatatattaattgagaaagttgcattttggtatt

SEQ ID NO: 94300 - DNA, 376 bp, Glycine max
gtgattgtgtaaaattttattcgattaatggcttaataatttatcagtcacagtgacattataatgcgctgtgatttagaagaacttccaaaacaatatctaaaacactgattaacaagaaaaaaacatacaaaagcaacctaaaacacatcaaatctaaactatacccgttaaccactgattattcatgagtcagataaagctgcccaatcaatctccacggaagggtacttctccaagtccaacccaagattgtccattgtttcacaagaatccgagaaatccaagagggtaatatcggattcaggtgaagaagaagaagaagaagaagaatattcatcggagaaggccgaggacgatgatgtttggtaattct

SEQ ID NO: 94301 - DNA, 446 bp, Glycine max
gaaaacataagggaacttcgtttgactggcctttacataaaagaattgccattttcatttcaaaatcttactggactccgtctgttagccttgagtggctgtggaattgttcagttaccatgtagcttagccatgatgcccgaactgtcttcattctacactgattattgcaacaggtggcaatggatagaattggaagaaggtgaagaaaaattgggctcaataatatcttcaaaggcacaattgttttgtgccacgaattgcaatctatgtgatgattttttcttagcaggtttcaagaggtttgctcatgtaggatatttaaatctatcggggaataatttcacaatccttcctgaattcttcaaagaactgcaatttttaagaactcttgacgtgagtgattgcgagcatcttcaggaaattagagggctttcaccaatctt

SEQ ID NO: 94302 - DNA, 224 bp, Glycine max
gtcattcaaaagtctcaacttcactctagcactaaataatttacaagattaattcaatttggtctctgcactaaataagaaataaattaaatcgaattaaactgaatacaattgacagaccaatatcattttgcatactcagatattattaggacgtctacaaatatggtgcattattcgcaaaattgattatttaccactctatagtctatactatactgaat

SEQ ID NO: 94303 - DNA, 413 bp, Glycine max
tttttttttttttttttttttttttttttttttttttttttttttttttttttttttttttttttttttttttttttttttttttttttttaaaattaaggggggattccaacccccccttttagggggggaaaaaatttccatccccccaaaaaaaaacctgtaaccttgaaaggggggggttttccaaaaggtgggtccccccaggttttaaaatttttttgaaaaaaagggtttttaaaaagggaaaatttttttacccaaaaggccccttcccttgaaaaaaacccccaaaaaaccccaaaaatttgggccaaccaaatttccaaaattccggggaattttttaaagggggcccaaaaaaaggcaaaaaacccctttggggccaagggaacccccctaaaacaacccct

SEQ ID NO: 94304 - DNA, 426 bp, Glycine max
ccaggctgaaatctgcaggagcatggaaatactggttcaatagtgttattgtgataaaatttagctaatttgatctaatttttttaatgttgtgtggtgttcaattgggttggatcttaaatgttttgctgttcactctactaaatttttctagcaatgggaattatattttacaagcatggtttgggggatcttaaatgttttgctgttcactctacttaagaatgttccttttagcagataagtttattttgtcttgtttatttgattgatcatgctaaatgtattgaactttttatcatgttattctgcagcttagtattttaaattgtgttgtgcaacacaataattggatgagacattgagttgcctggaattatttatgagtttcttttttttaagattagttttttcttcttgcttctt

SEQ ID NO: 94305 - DNA, 385 bp, Glycine max
cagagggtccagaatctctcgtgtcatcaatcaaaccttttgcagttactacggctaatcaagaaacctactcaagttcatctagtttgcggatagtttcaaaaacaaatccaccttcagcagaagaatagttagaccaacaggattgattcttgctcatattttcagaagcttcctgcattcttatcgaatgaggtgctcgatagtctgaagaacggttggatcacattcacttgatagactaattttttattgggaccatgttttggagggcatgaaacttctcattaattgggaccaagtcatggcaaccacagagcaacccggtcatgttacaatgcttctatgaaaaggagctatgatgcccatcaccgacacgcacata

SEQ ID NO: 94306 - DNA, 104 bp, Glycine max
gaagttggttttttagtttctgtaaaatattttctatttgattcacacttttcataatgacaagtgtgaatcaaatagaaaataaaatattcataatttttaat

SEQ ID NO: 94307 - DNA, 455 bp, Glycine max
ggtcattccaagcatttttctccccgaagactggtccttcactttttacgaaggcattaatagacatccagactccattttcaaggagaggactgttgccgagttaggttgcggaaatggatggatttccattgccatggccgagaagtggttaccatacaaggtctatggccttgatatcaatcctagagcggtcaaggtttcctggataaacttatacttgaatgctttagatgaaaatggccagctaatctatgacgaggagaataaaactttgctggatagggtagagttccatgaatctgatcttctatcctattgcagggaaaaagacattcaacttgaaagaattgttggatgcatacctcagattcttaatccaaatccagatgcaatgtctaagatgataacagaaaatgcaagcgaggaattcctgcattcattgagtaattatt

SEQ ID NO: 94308 - DNA, 506 bp, Glycine max
cttcttgttctgcaagtttaatggcgtgagagagtgtgtagagtacacctacggttcggttcggttcggttcccagaaaccgtatgagaatgttgaatctttgcatgcttcaccaactcctctcaaattaaaacccaataacccagatagatagatagatgtatgtgatcttgttgttttttctttttcaaatgctaatgcgattgtgagtcccttcatttgattgttcaacaaagtcctccactaccctacccacacgacgtcgtctcgttcttaatgggttaattttctttttccgttctgattcttctggggctccactgagtgagtgtgttagttttgtttttgttttgaaaaaatggcgagagagacgatagacaaagtgagagaccatggggaactggaggaggagctagaattgttgctggatgagatccctcacgccacatcacacaatcttcttcgccaccatcatcatcatcatcatcatcatcatggtgatgacg

SEQ ID NO: 94309 - DNA, 454 bp, Glycine max
atttcgcttcttcccccgcaaccctacccctcaatccccaaccctccgaatccgcaccagatccactcccccaatccgcaacaccaccctcatccacgcccatcgccacaaaccctaatcccaatccaacgcttcttcctccgccgcccgctctcctctttccggcgggcactccgccgcaggtccccggcgtactccctccctcattccgcccgctcgctccgcaattctcccccgtcccctcgcccaacccggccttccaaagccctgccgttcctccgcccggcgtgaccggcgccgccgtggcagttccgccgacgcagatgcagcagatgctttcgtaccagattcaacccggtaatccggccctgcggaccttcgctccgatccccaacggttacgctgcagctccgaccataactcccgcgggtgggtcattcattcattcattcaa

SEQ ID NO: 94310 - DNA, 375 bp, Glycine max
gcggccgccctttttttttttttttgtaaaatgcggtcagcctaattataaaggcaaagaaagtttaagagcacattgctcccccgaagatacaatgaagaaaccacttgcacagttgcactgtttgataataaattaatactaataactactatatgtttatcttatacgtaaaatttaacctgcaaattaaagtgcatacattcctctatgcactgagaatctataagccgtatcgaagatcctatttgaagaagaaccattatcctttaatcctgtggcagagattgctcctccattttacttgttctcaccatctttttctttttcttctgtgtcatcaactacattaaaagctgggtgtttgagaacgtt

SEQ ID NO: 94311 - DNA, 410 bp, Glycine max
ggcataaatgatgaaaacttccctcagcacagtcatttttaaagatcatattttgtttttcgtttgacagtcacagacaatcaaaggtactggaatgtgtgtgcggtacattacaacatgggaactgcttcaagagtagaaggaagtaaaagaacaccctatgacacccctgctatgcggaagttattgttagatgattcccaacttcagcagagaaaaagaatggcacataaaaagcaggcaatagatcgtggcaggccaaaaagatagaccgaaaacaggattacattattggtccaagtatgcagggagaatatcaaacgaagaaatgagaaatcctcgcctctcagcagctttaccctttgcaatctttgcacagggggttgacaactgatcataactattttcag

SEQ ID NO: 94312 - DNA, 311 bp, Glycine max
agggtcgacgagctcactacgcccttttttttttttttttggcataaatgatgaaaacttccctacagcacattgattctgcggaccagtaactataacttcattaattgagaatagtacataagtttacatgctcggtagcagacagccaaaatggctgattactattatttacaaaggaaacagatcatgagccactacacttgtcttgactcccttttaaccctttcatttttatgttcaagtgggaaaaagcagggcacacgaattggatttttcatacaaatgaccaatttatgaaagagaaagcc

SEQ ID NO: 94313 - DNA, 288 bp, Glycine max
gaggaaataatctttagctcctcacttgtccaactccgatagaaaaaatatattacgaaaaagctcatctattcagagtttagacgttgcgagtttgatgagatcctttcgaagaattttgccagatggatctttgggtatggagtcggacaagagaggagataatctttagctccttttttgctgtaattatctggcttgcttacttttgctgcttttatattatctgttctttgttcaacagtctattgtaatttgtagagaacaaagtgctgtgagtacacctta

SEQ ID NO: 94314 - DNA, 314 bp, Glycine max
gcggccgcccttttttttttttttttggcataaatgatgaaaacttccctcagcacagtcatttttaaagatcatattttgtttttcgtttgacagtcacagacaatcaaaggcactgtaatgagcatacagcccatatggctgattactattatttacaaagaaacagatcaagagtcattacaagttttgaaaccctcacaactgtaaccaggataattgtgtaatactttgctttcgacctttcttcacaaattcaatcataatagtcaacgaaaacaagtattttaagagagtagttatacatgaaaatt

SEQ ID NO: 94315 - DNA, 234 bp, Glycine max
gggttgaaaaacagcctttttttttcaagacccgtttttttaaacccggaaacataatcattaccaaccaaaaacccaaattcatttgaacaacccaacacaaaacttactggggcgtccatggttttctagcccaggaaccatggcccccttaaaccaagtttttagcaaggtttgtagttgaacaacccatgggggcaaaaagacccttaattggaaataaagggccttacc

SEQ ID NO: 94316 - DNA, 200 bp, Glycine max
gctagttttggaggcaattgcttttggatcattcctatgggacaaagaaaactatgttgaatccaagtacccttttcttaatgagtagactagatgacagtacacagattctttcctttcactgcatggaacttggtaacttagtaatatgttaggcggcgtttgggtggtcttgctatatttactaggttgagattctg

SEQ ID NO: 94317 - DNA, 158 bp, Glycine max
gaagttcaccacaaaacaaccagtgtgagtttgtgtcagtattccattaatatatgcaattgacaataaatttccaatttgtttcgggcaacatttgatgcccacacctatcctttgaaatgttcccaaacaattctgtacacataatgcccaggagc

SEQ ID NO: 94318 - DNA, 421 bp, Glycine max
gtggatggcaaataagacagaccttgattctggggaccagattcattcaatttggtctctgcactaaataagaaataaattaaatcgaattaaatgcaaacctgatcctgatgtgttatacaaaaatttacgacttctttttccccccaaacttgtcttgtctcccttttaaccctttcatttatatgccaatgtgtgaaatatactatactgaatatttcgtacacgttattataaactatatgttcatattagcatgaatctgcttgaaaaaatctccagtcttgagcagtatcatggcaactggcgccatcccagcaagggtggtaatctatgtaggaatctctaatatgtagaaaccgaagttatcaagttccacgaagggagcggacacgatcttgaatcaagttcctttcccaat

SEQ ID NO: 94319 - DNA, 473 bp, Glycine max
gttcattctctttgcgcagttccctacctctcctttcaagatgcagatcttcgtcaagaccctcaccggaaagaccatcacccttgaggtggaaagctctgacaccatcgacaacgtcaaggccaagatccaggacaaggaaagaattcccccggatcagcaacgtctcatcttcgccggaaagcagctcgaggacggccgtaccctcgccgactacaacatccagaaggagtcaacccttcaccttgtccttcgtctccgtggtggcatgcagatcttcgtcaagactctcactggcaaaaccataaccctagaggtcgaaagctctgacaccattgacaacgtcaaggccaagatccaggacaaggagggaatccccccagaccagcaacgtctcatcttcgccggaaagcaacttgaggacgggcgcaccctcgccgactacaacatccagaaggaatcaacccttcacc

SEQ ID NO: 94320 - DNA, 161 bp, Glycine max
atagaagggtgcaatgtaattcattatagacttatagtaaaggtccattcatattaaaatgtagcaccgaacatgacagacatgtcaccaaggatgcatgggttgactttcagtatttatatatattaacacttctatcaaatctgggagtaatcataaat

SEQ ID NO: 94321 - DNA, 159 bp, Glycine max
tcttgttgacactacttctgcatcattcaatttcaaatcatggttaagaatgtatatgaataatgttatgcccagtctttttttcacatcagttttgacaataagaagagagatagagaggagagaaaaatatgatataagaagggtaatgcaatagag

SEQ ID NO: 94322 - DNA, 522 bp, Glycine max
ttgggcacctttgcaaacacatctccacttatttttgaagcagtggtttggtatgtgttctcttttggaggtcctatgagcactgcccatatctgcatgcatgcatcatacaagaatgactcaccttgtaggtgcatcttgatctcgaacatctaatgccagacaaaattagggtacattgggttgcttcggttctctggttcttaccccataaatcaagggtcttgtttgctcctagcctctttaaaaagatgcctattaaacctacaagagttttatatgcatgaagttccatgggctaacaaataacaggctagatttggtatttgttgctggtgtcagatttgcttgattgatgtcaaatctcaaaatgatttatattctataaattaaatccttctacataaggagatgagttttaagtatatagattgtaatttcagtttgattcaatgttctattattatggcaatgaccacattggcagcagtggccacgtcaaccaccttcaatttcattcta

SEQ ID NO: 94323 - DNA, 384 bp, Glycine max
aaacgaccactccatatacatggcggcagattaaagaatgttactagaagaaaagaaaaagacttcagagtcgtctttcacaccggagaggcatatcctaattggacagcacctagacagtctgcgcaacgggattctcgcccgcgacatgcgacgtgcccgcggcgatatgggccttttcgccctgttgctgcgcgttcttgatctcgacggggagcttgccgcccttggtgagacccatgtcggccgcatacgtcgagtgcgggacccagccgggcgacttgcgcggcgagccgacctcctccatcatgcggtcgacttgttcgagggtgaggcccttggtctcccacacaaagaggtaggcgtagatgaagcacaggacgc

SEQ ID NO: 94324 - DNA, 453 bp, Glycine max
atgcaaaatatcaatcgtatgttcaaaatcaaaacatgtacaacaacacaggatatactttgtttttttgcaggtttggcacctagcagggtaattatttgagggagcggggtcaggcttaattctccgggtctttaacttttaataacttttgttggagaagaattaagacatctaaatggcttcaaattccgataaggattccccaacaccaccttcacctgattcatcttcatcccaatccccgccatcatctcctccaccatcccaagatagttcatcgcccccaccatcatctcaggataattcgtcgccgccaccatcgtcccccccgccatcatccccaccaccatcatcttcgcctcctccgtccccgccaccgccgtcatcaaatgatcagaaatccccgcctccgccatctgactcatcctcctcccccccatctccaccacc

SEQ ID NO: 94325 - DNA, 458 bp, Glycine max
acaacttgaaatgattttctcaaacaattttatgtaattaccattttttggcttgtaatgcattcaaatttcccatttcccatttgcatacaggcacgtactatagacatgaattacccatttgcatgatcataggaataattcagcatccattccctaagcaaaacgggttcagttatttaacgagctggggccccgacccgccacaaactccgctccacctctctgcggttcaaccgaacccgtcatcggtgtaaccgggtgaaccggaaccgaaccggtattcggcacgggatgatacccatgctgcttcaaaccatcatgaaccaccgcggcggaggggctgtaaggttgcagtggggtcacgtgcctcacgcccgccccatataattgacccgaacccggaaccaaatgatggtacccgattggaacctgaggtggcatcacagcatgatatg

SEQ ID NO: 94326 - DNA, 133 bp, Glycine max
tccaattgctcctcttcctatttcaatgctgcctttggcaagagaactgaaagattctggtctatgcagctgccagtgcttattgctgagatagtctttgctgatttcttagttagcattgtgtctataactg

SEQ ID NO: 94327 - DNA, 128 bp, Glycine max
ctcaattgagaatgcgaaacgcatagaatcggacgaggggaaatgatattgagaagctaaggttacggattttgagagatggcgtgcactaagaagatcaccctgaagagttcggacggtgaggcctt

SEQ ID NO: 94328 - DNA, 213 bp, Glycine max
ggatcacaaatcatatatcttcaattttttacttcaaataataatgtacaaaataaatccagcagaagggtatataatgacagtaatacatctgaccatgcaatcaagagatatatgggttccacagatccttggcttctcatcaataaatgcagaatcacaatacagtctcccatattctgtacagcaacatcacctgccaaaaaatagtct

SEQ ID NO: 94329 - DNA, 224 bp, Glycine max
actggtaatttaaaaatattatgagtctaggataatatacaatcatacataacccaagtagcggggttacagaccaaccataccacagactaatagcactcgagttagcatccagatacacgcacaatttgtgacttttgattttctcactcataaatagatcacacgatagggaaaaaggaggaagagagcgagagagagagagtgggagagagagagagaga

SEQ ID NO: 94330 - DNA, 293 bp, Glycine max
tttgttttttttttttttttttttttttttttttttttttttttttttttgaacactgcaaatacaaagttgacatttaataaaccaaagcaacacaacgccacaaagtcctgaaactcggggtgctaaacaaaagtgataacaggggctccgaccaacgcaccacattgaaacacagttaaataaaagcgattttgaccccgcgggctaaaaacccagctttgggaacaacggtctcgagaagatgggggagacttcaaactttgaccgaaaaacaagcctcctcaaaaaga

SEQ ID NO: 94331 - DNA, 266 bp, Glycine max
ctcgagcttcctccaaattcagttgctagattaccatctttatacgaagtagcacttttagtcaatattagcagggagccactagtaagccatgatgggaaatatcagcgtaatatctagatattttagcattataacattacataactgaccatttcccactactcctgaggaagaagggatgccggcagatacaaggatcctaacattttcttttattttattaggtacctttatgatctattgactaaaggaagtgttgtgag

SEQ ID NO: 94332 - DNA, 172 bp, Glycine max
ggcaaatgcattctttattaaaagaaactaatgctgaatgatgttctatttggctttacatacaatcccatcacatgaatcgaagtcatagtttcacattattgtgactgataggcctaagatacattcctaaaataaaatagcagcagcgattatgcgaattacttttttt

SEQ ID NO: 94333 - DNA, 288 bp, Glycine max
ctggagccgaatcggttcgagcattagagttgatgctagagagacactatgcgttgagacacgtgtacggtcggcatgcggtagtgcatgatcattattgcacacaacaaaactcattaacaccataaagcaaacatgaataaatatattgaaaaataatcatggtaagtattctgtaggcatataattgagtagtatgtatagggattgaggaaggtgcattgagtcaacaagatttggcgtgacaaccaaaacagcacatgggagttatagaagctatgtgctgag

SEQ ID NO: 94334 - DNA, 265 bp, Glycine max
agcaattggatatcatgctttgatcttaaacatagtaaatattccgtacaaaagtaacattttaaccaactggaaatgaaacaaaaaaaataaaccaaaggttgatctatgcaatctatgggagcttcctaaatcatcagccatccctgccgtcatgggacatagaagatccaaaatttggatgacggttcattttacagttccgttacaggatttgtagcatggttgaagtcccttaaacgcaaaacacccaaatcttcataat

SEQ ID NO: 94335 - DNA, 182 bp, Glycine max
aagaatttggacagaggaattttattattagctattaaggtgagatgatgtcatatgatagatagagtacaggtcattgagaagacgagcaacgacagggtacttagcttggaatttgttctcccagtcgttgagaacgccgatctccttgtaggataggccgtcgagggagggggagatgt

SEQ ID NO: 94336 - DNA, 423 bp, Glycine max
tcgctgcgtaatcagatcatatggtatggagcatggcagaggcggtcgagtaaggaaaaagaggagctgacctcaacccttgtaagttggacaatgacttgactattggcgtgatctctttgctttctaggatcattaatacaggaaaattaaagtatccttttgctaataaagctcatttgaaaacagtggcatttgctccaaccaaattcactacaaaagggaaaaatacatgcagtatcattttaaggactggtcggctagaattcggctcacactgatacatgacgcttttcgagtgagggagaactccatagaaattagaaggagagagagaaatagaaactaaattttgaattcttttttttcctactcttgtatcagtcattacaatagtatatatagccatgccacacctaagaa

SEQ ID NO: 94337 - DNA, 267 bp, Glycine max
gcagaatgagtctcatggtattgttaatcaacttcctgagcaagggatccctgtcatgattacatggaactatggtggtaacaatgtggctgtggagggatcttgggataactggacatctaggtgagatttaacgactgcttttttggtaacagtagtactgaattgtatttgacatgaaaagttatcataactgcaaatgatctacaatgagattagtaccagtgaattctattacttgcaggaaggcattacagcgatctggca

SEQ ID NO: 94338 - DNA, 401 bp, Glycine max
ctccaaacccattggattcccctttggcaaacccaggttccacccatttgttcacagtagccaacaacaactccatcagcaccaatcctcagcatcttgaaagatatcaagctcaagactagtgctatatattttgagttgaggcttggaaattgatttgatttttgtatatagggaagttaattaattctgagaggcttatagttttttttttggtgggggtggagacggttatatagaatttggataattggttttttttccttgtttgaatctctctctgtattttccttcttttactggttttatccatggtgaaatcagaaagaaggcagaagaaaattttagacagtgaagatgatagatatcaaagagaaagggaaatgatactggttttttgt

SEQ ID NO: 94339 - DNA, 173 bp, Glycine max
aagggaaggatgggccgtacatatctggtatgaaaggcccaaaaacagatgggacccctatctgtacatgtgccatatctggcaaactaagggaagattttatgatctacccagggacaagttagccttgaaagggttttgggggcaaaaagattttaaaatacaataccccc

SEQ ID NO: 94340 - DNA, 471 bp, Glycine max
ttcgtttttttttttgacttaattacacatttgattatattgaaggatttgtgatccaaatagaactgacatccttagcagcatttggagatcatcctttgatcttagacagggagatttcacttgagaaaaatcccgtactaaagtaacattctaaccaactgaaaacaaaaatattgatcaatacaattttgggagctacctagattatcagtcatcactgtcatcatcggacatagaaatccaaaattttgatgacggttcgttttctagtttcgtaacaggatttgtggcatcatggttgtagtccctaaagcacaaaacacccgaatcttcagaatagctagttgtagtaattctacacccatctacaaccatggcatcacagccagatccagcaccatcagttaaagagcaaagcaaggaatttgttagtacaccagtgtcaacttcccatacattcacataagc

SEQ ID NO: 94341 - DNA, 150 bp, Glycine max
gcaattgaaattcaaccttctatgcaaatattatcacaaccttcaaaagaggatcaaacgagtcaaaattaagaagttgaattcaacaagcattgtgtaaagcacctatcacaaatcagccagttcaaagtcaaatttgaagccagatgc

SEQ ID NO: 94342 - DNA, 237 bp, Glycine max
tggtcgtgcggatactgcttcagccggcttagcttaagcttactgatcagcttgacacgatgcacatctataaccagatgcttactcgagcaatggcgtacacaagttataccgatgacaaatagctgccagagacagactacagatcgctggaagggatagatcggcttgtagaggcacgcgtgcacgacctgagttgtctgattcattaggaagcactgacttggaagctttaga

SEQ ID NO: 94343 - DNA, 108 bp, Glycine max
gtcacactggtgaaaacttttgctgtgataagaggatattggaacttactcaatcaattctgtggatgatccacaaaccttgaacagaattgtctacattagaccacc

SEQ ID NO: 94344 - DNA, 278 bp, Glycine max
gtacctagcaacagtagcagcggatataccgagacggagatagaaaaaatattacgcaggaatcgaattcttaattttatcagatgatgcgacttcacaaactgtatcatcgcttcactcttgtccccctttcgctcccttctaatccctctcttcttcctctcgctcctccgttgcgcctcacgctccgtcaccgaacctgtgtgaacttcgcttccatggcttcctcgcggctgcgcaatttatcacctctcgctgctgcgcccactgaagacgcc

SEQ ID NO: 94345 - DNA, 365 bp, Glycine max
ccaaacccttcttctctcttcccctgaaacatccctcctcttccaacaaaatcagtgaggatctgagaagaagcattggccagaggtggtcagctttttccttctacgcatgactgcaaggggcagcgaccccataaggggtcgtctttggccacaaatggccttggcattggccattgctttcatttcttccactgtggtttccgtcaatgctgatggatatccttactattctcctccaccaccttatgaatacaagtcaccaccttctcctccttacgtgtacaagtgtccaccacctccaccatatgagcacaaggatccaccatactattacaactcaccaccaccttcctattactata

SEQ ID NO: 94346 - DNA, 208 bp, Glycine max
ggaaggtttcccgtcatcactgtatgacgtcctccttctttgggggggggggggggacaaaggtgtaagtaccaaaggcggtatagagaacctaaagaaatgatattaggggttctaggcacaccaccagaccaaacagacatgaaaaaccaaggcggggggagaaagaataggacaaacgcaaggaaagggcacgagaggcaataga

SEQ ID NO: 94347 - DNA, 346 bp, Glycine max
atttcaatattattaaacaacaggtggagtcgtctatattgatgaatgcaaacttcaattcttgtttcaatctatgccatttaggaattcgtaaacctatatgccttaatggatagagaatcactactgagaatagctttgtctgatttagaatcaaaccttcctaggtttttcttattcttaagaatatagtgttcccatgcaaatacatgaaaatatgatatatttgtttctttgtccttcctcaattcatatgctgtcttgtgcaaaatgctcttgattgaaacccaattcaattcatatgtagtatataacaactatttatggcttcagctcaaaaatattt

SEQ ID NO: 94348 - DNA, 237 bp, Glycine max
atcactgtatgacgtcctccttctttgggggggggggggggcgagcagaataagtgttggaaggcaataccccacccaacaaacaggaacagaaacacaaatgcggaaaagagcgtttgaaagcgcagcatcaatggagtaacgaagatcggctaaagaggagcgggctcgaaagatgaattacgaattaccttatagagagaagaacagcgatttgaaataacagagtaggtaggg

SEQ ID NO: 94349 - DNA, 429 bp, Glycine max
aggtttcccgtcatcactgtatgacgtcctccttctttgggggggggggggggcgactaaagttcaatactggggtgaaagataacgccaaagatggaaaaggcgaaagaccaaaacgggagatcatgaataaccatgtggcattaacaaggagcggtagtgcggcaccaaagtaccttgtgggttcagagcgagttgtgattaaacggttaccggcgatcaacgtgctgacatttgtgataacgttaaaggtaccggttaagttacctatgtgtgggctgggtgtaatgcagctgtgcattcaaggttgcctggatcgatgtacgtagcgtcatcgtagactgtggtgagacgcgtattgaaaggtaaggtatgccttcgtcggggataatcgtcgcatgcccaaaatttccatcggatttaatggaa

SEQ ID NO: 94350 - DNA, 159 bp, Glycine max
ggtttcccgtcatcactgtatgacgtccaccttctttggggtcgttgggggggggcgtaaatagagacctattggggaggtataaatgcaggaactagaaaaggtagtagtctagagttaataggcagatagtattacaaagacagctgaagagagagc

SEQ ID NO: 94351 - DNA, 281 bp, Glycine max
aaggtttcccgtcatcactgtatgacgtcctccttctttggggggggggggggggcagataagaagccaaagagaggagcggtggcgatgggctaccaactgctaaagagaggaaagcagcacaagctctctggctgggctttggtaagcatgagaaaacgattttaaaacgactataacgcgacagggctggcaaaggtggcaaagcataaaaacggtaccctgtgtgtagtttgagaggaccattaaaacaagtgggggcgcaggggggtgggaataag

SEQ ID NO: 94352 - DNA, 294 bp, Glycine max
  unsure (1)..(294): unsure at all n locations
gaaggtttccgtcatcactgtatgacgtcctccttctttggggggggggtggggggagacgctagagatgaaaccaaccagtgcaggcaataaggcgttaagaagaccaataaaaataaagcaaaacaagggatgcgtagtaaggtacgtaatggagggaataatatagggggagtagagaaaatcaccatattcgaggggtgggtattacgttattggctaataggtacaagtagggttgcgcgataaggcaaccattanttgtagtagatgtagttggggtaagttatagtg

SEQ ID NO: 94353 - DNA, 366 bp, Glycine max
gaaggtttcccgtcatcactgtatgacgtcctccttctttgggggggggggggggggggctgttagtagaagtagtatgggtgatacgagaaaaaactatagttattagaaagacctatctgtacggtttagtagtcgaaataggggtagcatcaaacgtgaaaagactatgttattaacagcgagccgatgcaggtaagcattaggaaaaaaaaatgcggaaagagtcgagacatgtgcaacgttagagaatgcaagggggaggcgcgttataacgggttggggcctaccagagggcagcgagaatgcaacgatttgtcacacggagtaacaaacaatacgttgcatgtggggggtaataggaaa

SEQ ID NO: 94354 - DNA, 410 bp, Glycine max
aaatcaaacttagcttactgcaacaattcctattaaaaaattttacaattgtgatttttacgagtctttaaacaaagaaaacatatctaacttaacctacccaacgtagcaaaattatacaggttacagggggtaaacactacatcaaaactgcagaaacatggctgcaacactgaacgcttcaaataataccaaaaatacaagtaaatctcacaaagaactaaacagagaggcaacatctaacttaacatatacatgataagcaacaaacacttgatcaagcagctggtacctggtcccttccccggccacggcctcggcctcttccccttccacggccacggccacgtggtggaggtggagcatcatattcaccatagtcatagtaaccaactggctgcacaccatag

SEQ ID NO: 94355 - DNA, 474 bp, Glycine max
cggctcgagagatgatgagatgcatccgcagtgcttcttaacatatattatttgaattttgattatgttttcttgagtttaaatcttgtctatcaataattgaaatcatcttaagtattaattttcaaatgattattacaaaataaaaattcttattaacaatcaccatataattcttccattacgcactctaagtctctaattaaattctattaaagagttatacagtcacgaaacttgtgctgttttttttgacaaacaacttatttgttagttgctgcccaaaatcttcagtagcagtagtactgggtgaattctactttataaccctgaaaaaatgaaggagctaagtacatcatcatgatgttaaagttagttgatggtgttgtgtaattggagaaataacgaggcagtgtcccatttaatttcaggaaaaaattccagtagaggaagtgtttgagtcgctgaaatgtt

SEQ ID NO: 94356 - DNA, 339 bp, Glycine max
gaaggtttcccgtcatcactgtatgacgtcctccttctttggggggggggggggggggaacaaagggccgagggcgaacttgggaggatagagcgtagtgagatagggtaatagaatcgagtaacaggggtgccaggtggatagagaaaccctggggcataggcgggggaaaagagcggcgtcgttgtgattagccagtaccaaaatgcagtggcggcaaggctggcttacgaacattagcccagcattgaagccaaaaggggtggggtgtaaggtgcacgtggtagccggctgggagtaaaattaagccggccaaaggcggggctagatgttgtaata

SEQ ID NO: 94357 - DNA, 211 bp, Glycine max
tagctatctcgatcgaactgtccaaggtcctgtcactactaatagaaaaaaaaaaaagacaaacaaaaagcagctgtccacaatattagtctcccaagttcatccgttgtcgcttattcgccattctttatcatgagttcatcctgcacagcgatgttctcggtggaataaatcatcgtaacgtgccgcacgatgtgttcgattagtggta

SEQ ID NO: 94358 - DNA, 305 bp, Glycine max
  unsure (1)..(305): unsure at all n locations
aggtttcccgtcatcactgtatgacgtcctccttctttgggggggggggggggggctcggcaccaagctgcgggaaaattagcagcagcagaagaagaagacgaacgtgaatgagataaaaaaccacaggtggcgtggtggcgtggtggtgtggtacttagcttagagggataaccatgcctggtgtatggaatacgtgttcacatttatttaacagttccacgtcaacttcacgtcgtncacgaaggtgttgcggcagtggtgtaaatagtggactttggaggttttgtttgccatgttatttg

SEQ ID NO: 94359 - DNA, 336 bp, Glycine max
gtcatcgtctagctatctcgatcgaactgtccaaggtcctgtcactttatgacctgggccgaaccagcacaacgttggcaaccagggcaactgtaccaacgcaacaagccaaccggcctgagcggcctaagtggccctggatgggcggtaacatgtggcgtatacccgcggccgtttagattaaaattgttgcagtaggcctgcatttcacctataataatagtggcattacgtgtaacggttatgcaagcgaggagagcggaggggatagaggtgggatcgcgttaaaatgtaatgattgggtgattgggtgagagtagcgcccataggggcggt

SEQ ID NO: 94360 - DNA, 434 bp, Glycine max
  unsure (1)..(434): unsure at all n locations
gaaggtttcccgtcatcactgtatgacgtcctcgcttctttggggggggagggggcgggaagctgaatcacataaacgaccagaagtataaccaaacagggtcaagggggtgaccggcggggatagggtagggtggatacctcttatattaaccgaataaaagcgcttatagcgagagaccaaaccagacaaaccgacggcacggggcctaatcgaaacaagagcgaaaagaatagagaagataggtacgccaatggcacatgccgtaatagcggcagcgctatccccgtagttaaagcagtgaccaccggggccgagccgttaatattgcgcataacagtggcaataaacgaatttaacagcgttaatagacttaattggttaggtggtatggttgcgcntggtaaagttggtaaccatggtgtagttggatt

SEQ ID NO: 94361 - DNA, 137 bp, Glycine max
ataaggaaagtgttaagaaaggtagctatatatacaggtagagagatagatagaagtaaggatgtagtaaggggtgtagcattaggcgctaccacgcagacagagatcaacatatgctagaccgctgtgatataggg

SEQ ID NO: 94362 - DNA, 73 bp, Glycine max
gttcaatgaagttctcggtgtgatcgtttgtagatcgattatattaatgtaatagatggtaccagttattcct

SEQ ID NO: 94363 - DNA, 73 bp, Glycine max
aggaataactggtaccatctattacattaatataatcgatctacaaacgatcacaccgagaacttcattgaac

SEQ ID NO: 94364 - DNA, 129 bp, Glycine max
acaagaacttgcattacttgccttggggctcctaaagtaggtcccatctaccatcaggttgttgaagctacctacgtgtccattattggactaggaatcttaggagttgaagctatgttggtcatgcag

SEQ ID NO: 94365 - DNA, 219 bp, Glycine max
ggaataaaaagaattgcatatgaagcttttttttccaaaatttctacaaaacatagtaacgggttacccccataaatgggaaagcccgggattctagttggaaaaggggggctgcctggaaatgtttttagggtcaagcccccaatgggtttcaccaaagatgatgccgggatttaaaaaaattctggccgggctctttttaaccaagttggggggccc

SEQ ID NO: 94366 - DNA, 301 bp, Glycine max
gaaggtttcccgtcatcactgtatgacgtcctccttctttgggggggggggggggcagggcgggcacagaggaaattgagtttagaagggcaatacggctaaaaggatagtattatagtaacaccgattgaaaacatagaattaaagaaaaaaggaggtgtagggggtatataggtaaggaaatagggaatgctaacaaaaggcacaaggcgagtaaagacaatggaggggagtagttaaagcagcaaagatatacaagtgcatacgagtgggtgcttggcagggggtacaggggaaaata

SEQ ID NO: 94367 - DNA, 124 bp, Glycine max
ggaacctaaatttactttcgttgcagtttattataattactacattattacataatcccctctgccaataataacactccatgttctaacagcgccatgctgacgtggcaacaatggccctatc

SEQ ID NO: 94368 - DNA, 269 bp, Glycine max
tgagcatcgtctagctatctcgatcgaactgtccaaggtcctgtcactaagaatagactagacacgcacaacgcacaacacaaaaagcctaagtgttagatttacgacataatggggtagacagccacacgccaaacgtttgtggtgtaataagtccgggttcagtagtaattttgtgatgcaacatagtagaccctagaggttacttctgatgaaccaacagcggcattggctcgcccacgtggtgaaaacacttggggtttagaata

SEQ ID NO: 94369 - DNA, 335 bp, Glycine max
gaaggtttcccgtcatcactgtatgacgtcctccttctttggggggggggggggggtataaagaaccagaaaagtaatgtactttcgtaggaataaccgttagccaataagggtacgcggagatagagctataggaggggtgtcaaggaacagtagtagtataaaggaacggtttttataatggaggtagcttacaggggacaatactaaggtagagtatactgggcaacgtcatggagattacttttatccggtagtacagagcgatggccgtatggctggtatatggaaagacggtgtcaggttttaggtgttgacggtatcattaaaattat

SEQ ID NO: 94370 - DNA, 309 bp, Glycine max
gattgaattacaaatccaaattaaggcacattgccattttttttggtacatagctcaaacaggtttacatcccatagcttttgcagcagcaataaatgaggatttaaattttcagcaatccaagccataaacccaaattgaattttgtatcaacacttagggggggccttcatgaaatcaaggaaatgggaactttatgggaggggaaataaaaataggatttggaagcttattttaaaatatatttttggggacaaaaaaattccccatgagcaaaattagtggaaaattgccccccccaattttttg

SEQ ID NO: 94371 - DNA, 189 bp, Glycine max
gagcatcgtctagctatctcgatcgaactgtccaaggtcctgtcacaagcccggtggtgggcgccatgggcgcgtgaaggggccatggtatgacgttgtggtgctaggtgcgcttgggttatcaccattacgccagcggttaggtcctacaaatgagtcggtttatggcccgtggggcagtatagtaaa

SEQ ID NO: 94372 - DNA, 290 bp, Glycine max
ttccgttccaaggaaggtttcccgtcatcactgtatgacgtcctccttctttgggggggggggggggaaacgacaaggatataatagagagaaggggaggagacacctgtgctgtgcgaggtaaattgtatgtagtaaggatagtactgtaaataagataagcagaagaaagaagccgaccaagaaacgagagccgaaagcagcaagtaagaagataagaacaaatggagccgactaattagaaatagacgatgatagcgcaagggaaagcgtatccgggtggtgatagg

SEQ ID NO: 94373 - DNA, 486 bp, Glycine max
gagaatgctaatagcaaattttatagaaagataagtaggtatattatacacaataactttggttaaaaattacagatcgttgagaaaacagccaaaaaactgttatttagtgtacaagaagcctagccgagccaaagaatggggaaaggaaatgtgatggacagattcatgacatcaagccagagcaactcttgtatgaatacatagtgatgaacttctagtacatagtacatggtgataaagaattaaaaaccgtcgttgagtgccgtgtgagctatcaactcacattatataatattataattcaaggtgctggaagtgctcaaaattgatcaaacaccacagtatgtaaacgtacgagtacctgaagattccaggcatcaggttcgaattcattgtgctgaaactgctttctgaaagaatggatgaatacttgctcaaacatagccctatcaaattaaaaaacagagctttggacgagtttac

SEQ ID NO: 94374 - DNA, 410 bp, Glycine max
aacaattaacgatgttgatataagatatataacatgaacagcagcaaatgttgcaccaccaaaacaatgttcaagtagttaatgtatgatctaacatattttcttgctaaacattgactttgacagcacccacctaatttgttcagtttcttggtccttttattcttaaaattgattaaaaagttattgtaacaataattcccaattttgctaacagaaagccagtcttagccccatgctttatatctatttacttttgtatttcttaatttcttgctataccatgggcaaaaaatttcttcataaatacaaacacttatgagactattacaacagaacatagactatgacaaaataattattacggttttggaagtttggactgtgtgtcacttggggaaggaattacc

SEQ ID NO: 94375 - DNA, 279 bp, Glycine max
aattcggctcgagcacatattacatcaccaacaatcaaagccatcactttagtaatgctattgattctttcttttcacgtgtaaacacacaaaacaaataattttcctttccatcggggtggtaatatttagacttttatcatttacaaacatgttattaatattctattgcattatgttatctattgctgtcctgtcatataatcaatcttattaatcatgtattttcatctgtcagtatttctcttatggcgtttatgggatctcgaagaatcattt

SEQ ID NO: 94376 - DNA, 440 bp, Glycine max
gaaggtttcccgtcatcactgtatgacgtcctccttctttgggggggggggggggggggaaggtggagaatgcagaaggaaactccccatctagtaagataagataagataagagcgaatgagcaatgagtaagagagcagtcggagggagcgtgcgcagatatataaggtacgttagcagaggtggatcgcagggatactaatggtgaatggagggaagatagtagattaatttaatgacgagtaaggggtaggagataagcatatggagtgggaaatgtgcacgtagcgataccacgcgacgtattaccgattagaggtggacgtaagggaggttataatcgcagaacatgtataacgcgtaatattatatagcggtggttttaaggttaggggcaacgacgttaggtgtattttaatgggtgttttacgaagggggg

SEQ ID NO: 94377 - DNA, 406 bp, Glycine max
caaagaaataaaaatttgtcattaatcagaagttgacagacaatggagcaatgtgtttactgtttacattttcctttctaagtatcatctacacgcacaccacaataaaacccttctgttcataaacaggagtgattataaaccccatttctcatttgcatcgcgtcagaatcttccagctacagcatgcaaaatactcagcgttcctcaagcaacagctctgcacctcaaaatcatgtacacttattcgcaatgcttgccccccacccccaaataacggtttccataatcaagtgccatctttcctgtgacctggtgttgctctgaatattccatgtcaagctgtttctgctaataaatgattcaaacccacaatattggtttacataaaaatggcattgacaaa

SEQ ID NO: 94378 - DNA, 269 bp, Glycine max
aacgtagggttttattaataatgaaccccgtaaaaacttgccttattaaccactcaaagcatttcacaattctacataatctggatacgcaataactaccttttatttggaaaaggggatccaaaacaggcccctttagtcatccatgatacccttttataaaccataaatgccaatgaaagggctcaaccctggtgcaatccaaagcttcccatttttttcttgcactttactggtgaacttcaagggcttcccattacaatttttca

SEQ ID NO: 94379 - DNA, 353 bp, Glycine max
ctggtggattcatatccagagctcagtggatgagggaaggctaattgctccaaccccacctgcttctcctctgactcagtttagtgaagagagttggacttctctttcaacccagaagttctccatggaaattgcttcaccaacagtagaagatcacatccttgactttgctcttctatacagaagaaaccaaaatgatggacaacttatcctgcttagtgaggatgtcacattgaaaatcaaatgcatggcagaggggttgctatgtgaaccagtgcaagagtttcgtgagagtctagtgaatccattctctgagaggttcttgtgggacaaaagcattcctcgaggacaga

SEQ ID NO: 94380 - DNA, 328 bp, Glycine max
acactagataaattcatgaaattttattttgatgtagtatagcactattcacaatccctgttgtgaggagggtttttaagacgttgctaccagctggctaaaatctaattgattaatatttataggtaatgtttgcaataaaaaaaagtttaaggcattgcaaccagcaaatgagaatactgtggtcaatcaaaactgttcagctggctcaactgaactgtttttgccactggctcagagtccatattgagagttgtgaagtagaattagcttcaaaccgcttgcaactccctttgatggcttccttaaacgacaaaatttctccctt

SEQ ID NO: 94381 - DNA, 325 bp, Glycine max
tgagcatcgtctagctatctcgatcgaactgtccaaggtcctgtcactattttgctgagcgagcgacttagttacctgcggtgggtatgggagctaacgcgcgtcgataatgccgaggcacggccaggtgccacagccgcagtacttatatgcggtttgagtgagcacccggagctttgtttataggttagttggtcgtggcagtgcctgccgtcgcattgtatacagggtggcaggaaaagtggcatgcacatcgccggaggttggtattattgtacttcagtcccaaaggcgaacccagcgcaaacaaacgtgggtggatagg

SEQ ID NO: 94382 - DNA, 288 bp, Glycine max
ccaaggaaggtttcccgtcatcactgtatgacgtcctccttctttggggggggggggggggggggggggggccgacggtaatccagcaaccaggagaaggagctagaataacccgataactcgacgggcagaagttactgaatgtagatgtacaacgaattacgtaaaaatggagtaagcgagagcaaaacaatgccattagggaaaaaaaaaaaaaaaattaatgtgttgtatgggtggtaaagaaagcagtatgttaataccacaagaatagcaaaaccagaataa

SEQ ID NO: 94383 - DNA, 88 bp, Glycine max
gaaatatgtaataatctcaaattatagagagtatacaattttactatgtgaattgcagtactttcacggaattcatttgtagtctagg

SEQ ID NO: 94384 - DNA, 93 bp, Glycine max
cctaaactacaaatgaattccgggaaagtactgcaattcacatagtaaaatgggctactctctataatttgagattattacatatttcctagc

SEQ ID NO: 94385 - DNA, 299 bp, Glycine max
aaaaaaagggtttccacccaggggttaccgggggccccccggcaaaccgggttaaaaaacccgggggtcacttggacaaaaaaacggccccggtatattaaaagggggcccccccggggcagggtctggggggtaaaaccttccggggaaacgctttatagcccataaaaaaaaaagggacccccatttaagggtttaccaggggggttaaacccaattgggggcggggaaatggccccccctttttgcgggccgggtacaaacttttaaagaatcagaacttaaaacccggggggccc

SEQ ID NO: 94386 - DNA, 348 bp, Glycine max
cagctgcactagtcggcggccgcccttttttttttttttttttttttttttttttttttttttttttttttttttttttttttttttttttttaaacaattaaatcggccctttacgacaagggaaaaaaaaaaggcccatacaaatttcccgaaaatgccgaacattttcagaggcaaaatcaaggactaaaaggccttcctgggggttaaatagcccaataatttttgggggaaaaacaaaaggttgtaagcagtaccagaactaaaccctaagcaattcgcctgggatctcaaagggcaaaaaatttcgcaccaattttcaatttaccattttccaccaaaaagg

SEQ ID NO: 94387 - DNA, 382 bp, Glycine max
  unsure (1)..(382): unsure at all n locations
gaaggtttcccgtcatcactgtatgacgtcctccttctttggggggggggggggggggacatacccaatgacgggtgcaggtgaagaaatagataggagcaccaaatagggggatgagcgtaacaagggaacaaaagaaaatctactaccaaaacccacncgtaaccggtgaagaataaagagaataaacgcagaaatgcagaagatagaaatattgaaatagaggcgcacgtttggggtgatacgcaaatagttgaaacggattgtatttaaaaaaacacaacgaaaagaggtaaaattttatatcataccaaacagatagtttttgtaagacctttgcgtcaataccaaaaaggagtgaaatgggttaccgaaaaaaaga

SEQ ID NO: 94388 - DNA, 240 bp, Glycine max
gggccgcttaaatttgcccttgcaatataattaatattttctgcaaaaatagtccccctatttggggactggaatataatttaccccatttaacatactaacactggttccagagggcctaaattccacagacccatgcaaaagttacaagggactttaccaaagaaaaatgggcctagagcaaaattcccaaaatccaccatggtctctctggatctgggactttgcaatttttaaagg

SEQ ID NO: 94389 - DNA, 436 bp, Glycine max
cttttgacagaaattaattattaaaataactaataaatattttatactaaaaaactatacgatagaagaatggcataatctatcaatcaataacaaagtttataatctatcttacagttttcaaatatacattaatattgatagattataactcagcaacacgacgccgttttccgcgaagaagacatggacgacgacgacgacgagtctcaggaggacggagactacgaagaagaagacgacgacgttttggccgacgacgaagaaaacgagccctctccctccacggctcttgccgtcaccgtcgccgtccccggttcctccgtctccaacggcggtgccgctccaatttcgacgcccaccgtcaccaccatcgtcgtcgcagactcctccgatccgaagcggcggcgcctcgagccagtcgaggagaaaaagc

SEQ ID NO: 94390 - DNA, 176 bp, Glycine max
ggacaacaaaaagctttcttcttgcgaatggactacaaaacttttgatggtacagaggcgttattccggtccagttccttaaatgtggtgtgcacatgcatgagaccttggttatccagtggcacttaccctcgggtctactgaactataaacaaccgtatgtaaagggacaagcg

SEQ ID NO: 94391 - DNA, 480 bp, Glycine max
cgggcacattaaaaaaggaatggataagttcctaaaaataaagaaaactataacacattataaggaggggtcaaatattaattaagataaaagatatagaatatctatctgtatatatatatatatagatatatattcttgaacctaaagagcgctgtatgcttcttaaatttgtcaccagttgttctcgtgccccattacttgggttcaaatacttgcagccaccttttaccatccacaaggtatgttcttgatcttttatgattgatgggcattcaaaatcatttatactaactcctctatgttcccattttgctttgttcttaaatgattaaagcttggtttgtattttttgttactcaagcagagtacattaaggacaacaatagagttaggaagcaaagcgtcttgaactcttctgatcagttatctaaaataacttgtttccctagatgggatttatgcacgaatcagtttttc

SEQ ID NO: 94392 - DNA, 337 bp, Glycine max
tgagcatcgtctagctatctcgatcgaactgtccaaggtcctgtcactgtgaggtggtggtggttgtagatgggatcggttgtaggggggtttaactgtgttcgcaccgtgtggtgatttgaaagttcaatttcaaggtccgggtaagtgtacacacacacacacacacccacacacacaaatatgcattgagtgtctacaagtcataattatggtgtatgtggtaagtctaatgcacgtgggcagcccgttcacgaggtattattacatttaatatgtttgaaattagcctccccgtgcgccagcctaacatcccagagtgggatggggccaagtt

SEQ ID NO: 94393 - DNA, 348 bp, Glycine max
gcagagccccaataaaccaatgttcgtgttagagaaacagtcactggggattaaaaagaataaataaaagtttataagaggtgggatggatgaccggtagtgagcgttagggttacctggtgataaacttttgtaaaagagatagggcttagcaaggttatgattagagttgaatgcgtgtcgcggtaaagaataagttttggttataggagcgaacaacattaaaataattggccatagagggagagcgaaagccgtgtaccagacgttaaaagttgaaggcatagggatcccagtagtggcattaagtaggttggtggttgctccaagtagtttggttgttatggt

SEQ ID NO: 94394 - DNA, 355 bp, Glycine max
tgagcatcgtctagctatctcgatcgaagctgtccaaggtcgctgtcagctttgtaggcaggggacgggacctaacgcatgaaagaggggcggggtgaaggggccgggatgggggaatagcgccgcgaccccatggtggtaccgcgagccgccaaagtgaccagccacgtgggaggcaacaccgttgaggataacgtgttgatgccaccgtttgatggactaaataataaccggtggtacaagagaaccacccaaagccaatggattaaagacgggccgaagtggccaatgccatacccatggcaaagccggctgcttgggcaaaaacgtggttcgtaacaaaaggttaggaaaa

SEQ ID NO: 94395 - DNA, 84 bp, Glycine max
acgacctttttttttttttttttttttttttttttttttttttttttttttttttttttttttttttttttatttttataatat

SEQ ID NO: 94396 - DNA, 286 bp, Glycine max
accagtggaggaagattaatttggcgtacatgggaaagccaggcatttgttcatcaccctctcatcaacttgttctttaattttaatttctataatagtaataatatttatttgtgttgcaagttgcaattgatgatgatcacttatattttcactctcgttatatttttgtcggttcagtaagtcttagagatagttacagctagaagacatttgtaaacggttttaggacatcatggtcgtcaaattaaaaacagtgaaataaaatttgtggctggttttccaa

SEQ ID NO: 94397 - DNA, 295 bp, Glycine max
atcgaactgtccaagttcctgtcacccacacacaaacacacccacgaacgcccgaaaccaatcaaaatgaacagataaattgaatatagtatacagttggcaacatcatcatcctaaagccgttcgggtcactgtgtatacgtcgggtattgggcacgcttctgttcagtttcagggtgtgttttttttcttcgttggtcataattgttctcttcaaatggttctgttgttgtacgagttcgcatcctcgggtatcctagtgttgtttgtagttgttctggtttgtttaatggtt

SEQ ID NO: 94398 - DNA, 399 bp, Glycine max
accatacagaataacagaattcttaggagtgctgatttatgaacacttaaacaatccaaatatataattgacccgcttcatttctccctatttttctcttcattacatcacatcactaatcatatcaacacctgtctctcttctctagtttcttgatgtctgtatagatattcctattcacgggcagtacaaaaaatgctgttgatgcaagtctcgagagagaggtatccatagaccgcctcccacttgtaagagcatctcagtctcttttgaacatgccgtaagttgttagcaacttcacgaacaacaggaacacatttgcctagcatacagcatttcattctgccaaaccagtccatggcttataaagcataatttagcatttcataaaaaataaat

SEQ ID NO: 94399 - DNA, 314 bp, Glycine max
gaaggtttcccgtcatcactgtatgacgtcctccttctttgggggggggggggggggggggacacctacgtaaaaacgggtcgacaaaagaaacgagatccgggatttggtaggggtgatcaaccctgtaataggagtaaaaaagacaaaaaggcggtccaacgatgtcgtgaagtcaaatggtcaagattagagctaagttatgtaagtagaaagacaaaaggggcgccatacatgttttaagttaagacaccatggtcgaacgaggaaaaccagaagaaagggaacaatgtccgataaacacaatgtttaaa

SEQ ID NO: 94400 - DNA, 338 bp, Glycine max
cctgctcagtggtcggcggccgccctttttttttttttttttttcaaatggtcaaatgaatctcttgaattcagcaagagtgtcacgagaaatataaataatcctgcatgaatgagaacaaaagagagcagagtaaaacaaacaagctatctatctgccccctcccccttttctctttcagctgttccctttgcctccaaagcaatgaactatgaagaaaaaaatataatacacatataaagaacccacacccagaacccacacaaataattggtagttatgaatttcaatatacatcatttacatggaaattagaaggtcagaagaatcattggact

SEQ ID NO: 94401 - DNA, 488 bp, Glycine max
ctctttgggggatgccttaagtgaagcctcaacggtggtgtttagtctcacattgtctagagatatagcttaaatagaacttataaagcttggacattcctcttcttataagtcagttttgtggggttgaagtaggtcctaagcccaacttctaacacttattataattctatacgtaaataccttgtaacgatcacaagacaacggaattgtgtgaccaactaattttttatcttgccacaactgattcattctgttgtttggtagttgttatcacaggcaaaccagccataattgattaatttcacattatttgaaattttccagtgttatttatttgtatttcaggttgtgtttttgtccatagaaaacatcatgaattttgcagcatcattgtgcagaagattgaatatcaaggaactcgcgacaaatgttcctgtgtataaaagcaccagtgatgtttctggagaaggtttgagtttcacgtt

SEQ ID NO: 94402 - DNA, 376 bp, Glycine max
tgagcatcgtctagctatctcgatcgaactgtccaaggtcctgtcactgaggttgtattataaggggaggttggttgtggtgtggtggtctgtatgagagaaggtaggtagtgtgtgtggggtgtggggtactgatgggacttcctgaggtaccaagtaccatgacccggggcctgtacgtgaggaagcgtttcgcgtgaggcctgcactagacctagccgtactaaaaccaagtaccaaaaggaaaaacagtcattaaaagcagcacacatgggatcaataaagccaggaacaagcgtaccgggtgtaccctggtcgatgggtaagttggcccagatgagcggcacaattgccaagacaggggtaggtgaaccga

SEQ ID NO: 94403 - DNA, 223 bp, Glycine max
gaaggtttcccgtcatcactgtatgacgtcctccttctttgggggggggggggggaagtgcttgcattgttggcgtaacggtgtggatggtggtaccgaatgcgctagcggcaacttccatgtcggaattactggtagtaagtaaagtgagactgggcgtccctaaaaagtcagtatgcgagagatgccgatcatagtgcgctactactgataacacttgtag

SEQ ID NO: 94404 - DNA, 273 bp, Glycine max
tgagcatcgtctagctatctcgatcgaactgtccaaggtcctgtcaccgggagggcataaagccggtctggtccggttcctggttatgtaattaaattccggtgatcgttatgttgtgattgtttatctcttagcactaatcgttctaaccattgtagttatccaggtttgtacaaaattagtggtcatgtctgtaatcacaataattgtgttggtccgagtgatgattacaatagttttgttatatgtggtggtaacacttgctgtaaagga

SEQ ID NO: 94405 - DNA, 420 bp, Glycine max
ccaaggaaggtttcccgtcatcactgtatgacgtcctccttctttggggggggggggggggtagaaaacgataatatacgatatcgaagatagggcaggggcgagtaccaacgtaaagagggaccaaagataagaaagagggagacaacgggtatgggggcaacaagaagggattacaaagaaaaggaggggagggtgccgaaaaggtggggtaagggaacaataagtagttatgaaaaggcggtagcggcaatcaaaggaagtaaggagtgcatgaaggcggtggtaatggaaaagatggggatgaacaatatggcgagggggggttgaaataggagacgcaagagcgtgatagagagattagagggatccccgagacgcgcaaacaagtacgaacaggtgataacgggcgccggagtg

SEQ ID NO: 94406 - DNA, 302 bp, Glycine max
  unsure (1)..(302): unsure at all n locations
tgagcatcgtctagctatctcgatcgaactgtccaaggtcctgtcacccccatgggtaaaacaacaacgacaacaagataaaaacgttgggtgctttgggttggagggggtgtgtgtgtcgaagcctcacggtggtaacaataaaagtgacgccattancgtgctcggtggtggtgtgtgtataggtgaatactggtgcggtcgaggtaatagtaaatctattggggtatgtattggtcgtacgtggtggtaatgtctatcgcatggtttctgttatggttttcatatcgcgccaattgagg

SEQ ID NO: 94407 - DNA, 284 bp, Glycine max
gaaggtttcccgtcatcactgtatgacgtcctccttctttggggggggggggggggcgttaaaaaaagcgtgttggttagactaaagcggagcgataagaattaaggtgttacgttacacgttacttgtggaaagtgatcttaataaaagtggttaaaggtggcctcattaagtcacacaagttcgtattcctctccacaactcaacgggttcctcaggtaaaattgcgaacacacacaccccgaaataaagaagaataaggtagacagtgtaggtggtggtgg

SEQ ID NO: 94408 - DNA, 444 bp, Glycine max
tagctatctcgatcgaactgtccaaggtcctgtcaccgctatgcaagagaagcacatgaggaacgataagccgagttttgaagtaagggtagggagggagggagcgggggggcgaggcgtggtgcggtgtgtggggagtggatgaggcaaccggttgccgcgtaagccgtagtaaaccagggcagagccgagtaaacgggcgtaatatgtgcaccatgggaaaatagcgagcgcgatttgaagggaaagagcggggtgcgcaaacagaaacaatatgttgtagataggatggggtgtaagggcgaggaacaagagattgtgcgagacgggatgatgagaagggacaaggttgatgcggagcaagcggggaacgcgaccacggagccatatggaaagagggagccggaaggggcgtagtcagggtaaagtaagaccgacaaggag

SEQ ID NO: 94409 - DNA, 402 bp, Glycine max
gaaggtttcccgtcatcactgtatgacgtcctccttctttggggggggggggggggggccaaaccaaccaacaaaagaggcaaaggaaacgggtataggagaaaccgcatctaacggttacagacccaaaggaaacggggtataagaagtggtaacgccggaataatagggcagaccataagcgaaataggtgaggaaagacagggatagccattgggtacagcttaaagtaacaagtggatccaacaaggcagcaccagataatccgccgcgtgtgatgacgcttgcagcaagtacaatacgccaaccgcgtaggttacctatacgagggattgtgagaagtaaaattgtgttatgcgtaatagggataaacgtagtaacgtcgcaaaagttggttaaggc

SEQ ID NO: 94410 - DNA, 539 bp, Glycine max
  unsure (1)..(539): unsure at all n locations
gcaaacagctgttagacttgaaagaggatcaccaaaacataaaggaagaaagttgcaaaacctttgaagagaaaaattccttgatgaaaagattttgggacctgggtgaagagaaaagtaaattggaagaagaaatctgcattatgattcacgataccatagcacaatccaatctttctctgctttaccagaacattgtccttgaaaaactccaggcacttaaagagctaagcaaagatcttgatagactttgttcagtaaatactgaccttgaggagaaactaaaaataatgatgggcaaattggaagatgtacaaatggaaaactcagatcttaaagagtccttgatagtgtcaagcaatgaactaaaattagttcaatccgttaatgatcaattaaattgtcagattaggaatggaaaggaattgttgtctcaaaaggaaaatgagattttggaagcagcanagatgtttagcactttacatgatgagaaaacagaattgcaaagattggtggaagatctgaagagcaagtatgat

SEQ ID NO: 94411 - DNA, 161 bp, Glycine max
agctatctcgatcgaactgtccaaggtcctgtcaccaccaatggtcaacctactagtacctacaatggctgtcgtacaaaaagcaacaaatgctaacatcatggctgccgccgccaaagcacataccacataattcggttgtggcaccatagtgctacaat

SEQ ID NO: 94412 - DNA, 309 bp, Glycine max
ggaaaaaagaaggcccggggggggcagaaaaagggaccccaaaattaggggggaaaaaaaaccccccaaaaaacttttcgggggccacaggggtaaaaaaaaaaaaaccccaaatggaacccccaaaaacaagaaccaatttacatggaaggggtaaaaaaccccggcaaaaaaaaaaattcggggggaaccccttttttttttcaccccaaaaaacgggggggaaatttccccagggaacaagtttacaaaactgggcccaaatttcttaaaacttttgggggcaaaggggttaaacccttttttttt

SEQ ID NO: 94413 - DNA, 455 bp, Glycine max
aaaattaaaaaataaattatgaataatatgaaagttaaaacaattacagtacttgtccaatttgatagttgtttatttttgctttctacaagacatatcaaagataattttgaacattattgacattggccaccgagctacggcatccaccttgtcctgctggacttcttgcacaaacaatagtgtagttgcttccacacattagcatttccagggattatgaattggctaaagaatgttgcaggatatatagatatctttttttggccagcttccaggatgcatttgatgtatgaaaaatatcaagcagattgccacattatacttcaagatggtacaaggtctctttactaccaggattactattagtttctggagtcttaactgcttcactctccaaatattgaataaagtccattaccaaaggatcagtccaaggagctcccagtggagct

SEQ ID NO: 94414 - DNA, 353 bp, Glycine max
aaaaaaaaagggggccaaactctgcttccatagcaaaatttatgtacaaaatgcaattttggggagggccattggcaaagatctatgcgaatttcaccattggggtccagacgacgaaatcaaaacttgccggagaggactcgccactggctcccagccgcttcgccggaatccaactttggggggagataagggccccagggggggtctggaatttaaaccagtaaaatcaaaaacaacctgtatgctgggaatcgaaaaaaacattttgttttctttaaaaatcataaatcctgggcctttgacatgaccgaaagaccactgggcctgggcttgaaccccggtttcctcct

SEQ ID NO: 94415 - DNA, 442 bp, Glycine max
aaaaagggtaaaaagattccaagttcaatatactcaggaatttaattacatcaaactgcagacgccagctttacaaaagcaaattttccaaataaactgtgtcttgactctatatctgaggcacccatttatttctatccaattcaatatatacattctatgcttgcacatgcaaaaccatgacacagccacattgcaccctatcgcattgtgactccatcatgtggccaagggaacaaacaaaaccttttgtaccttcatgctttttggaccctgcaatgccaaaaaattaaggattgcttcaactgcgcacaattgcctagccagaagaagacgccgttctgggagaaacaagaactggttcattgcttgcagctttcatggctgcaatctcttctaagcgcttccatgtagcctctcgcttcaacttcaaagctttctc

SEQ ID NO: 94416 - DNA, 476 bp, Glycine max
caagagagcatgatcatcatatatataagtcagtaaaatatatgaaacctagcacaaacttttttttatggtaaacctagcacaaactattaaggcctagtatttaaaaggaaataatacataaacaaataccctttttttaattcctaattatgtgagccgcaatatcaatacatgtcatgttgcaacgttttcacatataaggaaaaagcaaaagcaaaaaaatgttaatcaaccaaaccacctagtgtatcttaacatttctcaaggatttgtttatgttcttcttaccccccctccccctttccctcttttcttggtttttgattccacctttctcccgttcctaatctgtatcccctcgcaaccaacaaagctatgatgaaatgcagcccatgatcattctttcattcacccataagcttctccacctaagaaaaccattgtactgatgaaaccattttaagttccttccc

SEQ ID NO: 94417 - DNA, 413 bp, Glycine max
gaaaggaaacttctggattatccatatcctcttcaagttggttacaacttttataacgtgaggacccacgcttaacagtaaatggttagctgctgttgctaagctctaactatatgaacaacacgtaactaccttccctgcctacgatctacccacagcttttaccccattccccaagcccttctatcctaattggtagatatcacaatgcttgggtagctgcttcgtcctagctgaatgcctctggtgcatagcttcatcttcaacgtgcgtctcagatgcaatatccaccatctagaaactgcttaatagtttagatactacacaaggatggattgaatcaaatgaaattgatctcaaaatctacgaattgacctgcaaccctacctatcccttattattttatttttttt

SEQ ID NO: 94418 - DNA, 313 bp, Glycine max
tttttttttttttttttttttttttttttttttttttttttttttttttttttttttttttttttttttttttttttttttttggggaaaaaagccaattttattcccaaggaaggttaaaccttttaccaactttttccccaaaaattggggggggattttaaaagggggaaaccccccattttaaacccccggcttgaaacttggggaaaggtgaccccccccataccttgggctaaaacccccattagttttttccccctaacccttacccaaaaaaaaacccccccccttatcccaatttattcccttt

SEQ ID NO: 94419 - DNA, 137 bp, Glycine max
gtacaaacagcaacgtacatcggtgacgagagcaaatgaaaggcatctagcatcacagctttcatgtagcacgagaatattgtccacctaaattacaacagaatacacttcatcctattcttcgggggggggggggg

SEQ ID NO: 94420 - DNA, 377 bp, Glycine max
cacatacaccaaaaccaccaaaggttgagcctactcattcaccaaaaccaccgaagaaaccaccatgcccaccaaaggttaagcctccacatgcaccaaaaccaccaaaggttgagcctcctcatccaccaaaaccaccgaagaaaccaccaagcccaccaaaggttgtgcctcctcttgcaccaaaaccaccaaaggttaagcctccttattcaccacatacaccaaagaaaccaccaagcccaccaaagggtaagcctccaccaaaaccaccagttaagccaccatgcccaccaaaggttgagcctactcattcaccaaaaccaccaatccctaagatgccaccacttgctccagttgcaatctacaagaagcca

SEQ ID NO: 94421 - DNA, 489 bp, Glycine max
atttctcagtcatggattctctgtctcttcttctctccccttatccactctccaccaaaacccacaaattcagcaccttgaaacccttctctcatttctcaaaccctaaaataccaccttctcaaccccattcaccctctctttctgcactccaaacaccttctcttaactccctccaaaacccattaacaaaacctttcttatcatttaccatgctcaacctcttcactccacttccctgcctcgctgacgtagcctccgacgacgccggaaaaataaacctggaatcggtgctggtttccatcgacaacttcttcaatcggtacccgtttttcgtcgccggttgcacctttatttggctggtggtgattcctctggcggaagagtacttgaagaagtgcaagttcgtgtcggcgattgacgcgttcaggaagctccgcgatgacccgaatgcgcagctgctggacataagggacgagaagaacgtga

SEQ ID NO: 94422 - DNA, 420 bp, Glycine max
aagagtatatatactaaatatctagattgattctgtttgtacagtgtttatggattgcatgctttacactctataaaactcaacaaaaaggttgaaaaagaataattgtaagtttagaaataaacgatttcacagtcaccaaattgtatttctgtctttacagaaatcatttctgccaaacagatgtcagccgagcatggtataacaaacagaactattgtggctttgacggagttggagatgatggtggcttcaaatccgggtaattgggataaggagaggaggatgctacagaaccagttttcacttctgaaataaactctacagagcttttcacatgaccatcgtctgttgtttggttttcaacagaagatctatcttgggttaaggaactattattgttactatcattttgctgga

SEQ ID NO: 94423 - DNA, 167 bp, Glycine max
agcattatcaacatacaccaacaaaataaaatgcacttgcacagcaaaagcatattaggtcattctcccagctaattactttgtgcaacacaaaataatagcgagtttacagaaaaactttgtctttttgcatttatttgttggcaggagtcgggaggagacgaact

SEQ ID NO: 94424 - DNA, 402 bp, Glycine max
gaaaaatgagggtgctgttgctttcttgatttgtttgtgtgcagttggtaatttttggattggtttatcttgtggatcaccttagctttttgcttccacagatgaggattggactcaggatacttgaagactaaccctgttcttcttaggacagtgtatgggttggaataaatgaagccgcagctcaaaattgctcttgctttagttgttagcttgctttggattcagcaatcattttgtgatgaaacttctgatacatctagcttaaacaagtggaggtgtagatgttctttccaagggaaccaaagctattctcttgctaattgttcaaaatcatgtgattgcttctcagattctgaagagagtgcatctgtatggacatgcgtatgtgattccaatgga

SEQ ID NO: 94425 - DNA, 289 bp, Glycine max
cgaactgatctggatgacaaagacttagagtctagtcgcgacagggagtatagagatatagagagaagccgggataaggattacaaagacagaggaagggtgagggaatcaagggaacgggatagacaagacaggtttcaacttaatgcaattaggtccctcactctctcgtactgccatcaatccaagttggtgatgctgtttcaatataagattgtgattaatttatagaaggcacaaaatcttgtgttaatagcaattgggtgagattcattccctttaattacca

SEQ ID NO: 94426 - DNA, 366 bp, Glycine max
actgaattcgagaaatttcaccttttgaatatccttgtttctttttggtctccacatgtttttagcggttacgcttgtgttttttctcgtgttcaagggagttcaagggctaatccaggaatcagaatctaacaagaggaaagagaaaaacgtgttcaagtattttcttccccaagtggaggctgcatcttttatgagcataattcttgcatttatttggcaaggggcgattaggaaatggccaacttttatgcttcatttcatactttggtttacttttgtggtgtctctggctgctgggattctcctaatttgcttccaaaagcccgccactgatggtgttggagcgtgtttcattgcttttgc

SEQ ID NO: 94427 - DNA, 258 bp, Glycine max
gacaaaagggacgggctccattatgcccgagttcagttcagggggcaaaaagtcccgttaaaaaaccagggaaaacaaagggcctaaaagggtatgttaaaaaaattttgttaccagggtcattcatgggccccccttgcaaaaaatggctactaggcaaattttaaggaaatcaaaacctagtaaaagtatatggcctaaaaggctggctgtttgagttgtttctctaaaaaagccccccaaattttcttccatttt

SEQ ID NO: 94428 - DNA, 284 bp, Glycine max
agcataaggaaggaacatgtccattttaagggttttcatccctaaaacattcaattttaaaactaccatactaaaaacatgtaatgaccaaataaatctgcaaatgtaaaacaaaaacccaaactgaacccaataactttttggcaaataaaagccaattttaaactttttaaagggctcaacaatgtttcagggctcccaaaacccgaattaatctgaaagccctcagtaatgggtaatacccaatttttgacagggcattcttttatgccaggttccaataa

SEQ ID NO: 94429 - DNA, 312 bp, Glycine max
ggtgtacgcagatcttgtgcactttacgctcttcgcacctgctttctgctgttgttcttgcggattggctttgtggggtgtgacaaattgtggtttttctgttgagggtctgaaaggtggtttttttgtgtgtgtgtgtctggaaatgaggtgcttttgctgaagggtgttggtggtggtttttggttttgaagattgtggctgtggaaagggaaggtgcatgtgggatcccaattgggttctatgtttggtgaagaagggtttgggagaagggagaaaaagctgggattgttgtgggtttgtgataatgag

SEQ ID NO: 94430 - DNA, 205 bp, Glycine max
cacaaaaatcgggttaattttttgaaaaaacccggcctaccgaccttttttacaggaaccaattaaatttcttccgaaagaaaaaccctctcaaagaagggaaagaaaaattttttaaaaaaaaaaaatgggaaaaaccagcttccttatttacatggaaagggggttcgaaattttaatttggaaacggggaatttgccaattg

SEQ ID NO: 94431 - DNA, 332 bp, Glycine max
agggagatagctccagttccatcagcattcgaaaaataccttatttatgacaaagctttacctaaaaaaaaaaaaaagaagagcttgtggcagtaggagttggaaacacgctcttattacggcctagaaaacagcacatgcaaccacactcaaaagacgacgatgataacataagaatgctgatcgagagtaattgataaggcagaattgggataggactggtaactttgggcttgccatatggccaagacaaattcccaaataacccacgacgggcaccaatgggctgcagtatgacctgaaacttcttcttttctccggcttttttaaaa

SEQ ID NO: 94432 - DNA, 522 bp, Glycine max
  unsure (1)..(522): unsure at all n locations
atctgagtggaaatatatcaggatcagacccattaaaggacaaccgcttacttttgaaagcagaagctttagatgattctcatgaagcaaggaacactgctgctgttgttaacgagctgtccaaaggaaataacanaaattttggtttctcatcctgtgaatgctaaacgtgctgcagaagggaagaacatagcaaatgtagaccttttaagaggctgtggcattcgaattgaggttacaccatttataaatagacatggtttgcggccatgcatggtagctccaacgaaaataattgctggcctgggcttatcacttggtattgatattctagatgctcctggagcaactggggactatcgaactttactaacatcaaaagcatcagcaatagctaaggcactctcagctcctttacagtcctgtcccagagtttttgttcctggagaggatgagcttaaagcaggccggtcagatggctatgactttggatttcttcatattaaggcaatagatgatgct

SEQ ID NO: 94433 - DNA, 317 bp, Glycine max
ttcagaagctagtattttgaagctcaagaattacctgaagaaaggtatggggctgacttgtgaaattccagctaaaggacctgaagtgaaacctagggataatagtggggcacagggtcatggtttcaagcagaatattaggggtcccaaaataggtaaatcaagtttcaagcgacagtctcaacgcattttagcttcacagacacctgtatcagaacacaaagagcatgctatacatattggaacagaatcccaattatcaaaagacacagcagattgtgagaaccaaagttgtactgatgagaaaaacaatcagc

SEQ ID NO: 94434 - DNA, 404 bp, Glycine max
gaatgaacggcaatcttctcaagagatttcgtattttcttatgtcaacatattcacaaaatattgaaataacaaaggttaattgtcccaaacctgactcttacaaacaactacgcttcaaggttttcagagacactagtgactgaatagaaacaactattcaacaaaatgtgttagttttaaatactggttaaaatcctaggctacgaactaacatctgatttacattttacagagagcaagatcatgaaatgtacagactttatcccctcccagattcacagtcattcaatgctgcatgatgatcccgtgataaagttaaccccatacacccgtggagaccttgttcctcttggctctcagcctgagcctctgctaactgcgcttgaccagaattttgaacac

SEQ ID NO: 94435 - DNA, 321 bp, Glycine max
aagaaaaaacagaaacgaattattttttttcagcagttcccataagcgttttggtcgttcctttgtcagcaaattgaaaaaacaagaaagccctgttcaataaccaacccaaattaaataactggctttgggggaacaacctggggttctaggggggaaaacccccccccttccttaggggtttttacggggctttccacgaccttttcctttttctttataaaaccctggttaaatctatcataatgggggaggtcagtagccttgaacgggcggtcgcccaaaacttgaaacaaggcggcctggggaagtacttttttt

SEQ ID NO: 94436 - DNA, 337 bp, Glycine max
ctctgattatttctttgattgtgcgagatctttaaccataatctgcccgggggcaacactccttgaggtgtgcatcaaagcccacataaagagagattcaaaaataaaaaatatatttaaaattaacagaaagaaaaggcactatatgacagaatcgtgatgcaattcggagaaagacctacattccttgcaaatgaagagccatgtgtaatattatattttcaatcgacttcctagtttacagggtcatttagatacactcaaccttttttgctagtacattatatgaacgcatgaccagtatacagctgcattcatcttcaaagagtatccccac

SEQ ID NO: 94437 - DNA, 216 bp, Glycine max
cccacccaaatcctgggatatttaaacaaggaaattttcaacaaaccgggcaaaaaagggcaatcagaaaagggcaaactaaacatttgcaaattgtctcccacatttaaaagggccaaatttgtttttggggggttaattaaaactaaaagccgagcttgggctcccccaatttcaagccgaaaaaaaagcccaggtaacccctttttgcccaag

SEQ ID NO: 94438 - DNA, 465 bp, Glycine max
gtgatgcatttgctaggttgaatcagtttatacttaatttaaatatgcagttgcttcacaatcttgaaatcagattcagttttgggattatgttagtcaaatctgcattttccatgagtcgcatctctagagttaatggaaagacatagttttggaaactagagagagagagagactaaacttatgctagatggctaccaattctgaactgtggttatctagaggttgtgaggaaagactgattaatttaaaattgattgttcaaacctcatggcaaagagatgaatgataatagagagccaactgaaatcctatcagtcattaacctggatgaacagctacttaccttttctgatgaaaaccactttaaaatattctgacaaagaaaatcagtactttaagcaacaaccaaatttcatttttttcggaaaggccaaaaatttcaacttatcaacatgtttatca

SEQ ID NO: 94439 - DNA, 432 bp, Glycine max
  unsure (1)..(432): unsure at all n locations
caaacccgcaatttcacttcccctcttccaagagccaccggatcctgcaattcctctctctattagggtggtgcagcagtgatgggcaaattccagcttcgtctatattggagggtttttaggcagagggagtagattattggaataagggagacacatggtgctttgatagcttttgcgaatttgttttatctttgactgcgttctgaaaatggaaaatcctgacgttgaaaagtctgaagaaaccaatagacaaattgacagtaacacaaaatctaattctaaacagcagagcgtagagaaagctaatgaacaccctgattggttacctgatggctggaacgtggaagtcagaacccgtaaaagtggtgtacacatggngatctggatatnaagtgttacattgagccattgaaaggatacaaattcttc

SEQ ID NO: 94440 - DNA, 322 bp, Glycine max
attaaactcaggaacgtgtgctcagcgtgaaaaataagttacattaggcctatgaaatagtaaatagtaagtagtaataaaatacatattgggtcttagagttctctagtaaaaatctaaagtctaaaacctatttcataaaggaaaccctcatgctttatccattcctctttttctttcttctagtcatctaatcccttctttcatctgcattagtccttgaagtgtaaaacctttgattataagagagctaaatctccattgttaggagtttgttagaccaattcttataatgtaactatgtctattatctatttaacgt

SEQ ID NO: 94441 - DNA, 173 bp, Glycine max
acactcaacaataatcattaattcacaaaacaattaacactctgaaaaaatacatacatattatgaaattatcaaaattttaaccattaatttcctaatcatcaattatcatcccacagtttatcacctttgaaagtctaattaaaatgataattcatttgttacaactctcg

SEQ ID NO: 94442 - DNA, 402 bp, Glycine max
aagaaagaagaaaataacatttatcaacgcacaagtaacttaatctttctctttacatgttcaacctagaaacatcctatttattaggaagccaaaaaaaaaagctagaaaaattcctacaatcaaagataatattttttaagtttgatgcccaactagactatagaaataccaattcttcagaatataatgatgctggttatataatttttttttaaaaaaattggtcataacctattggtataatacaaaatcacaacttatcaaaacagttggagccatctggtatattacatatggaaaactttattttagctttaccaatcctcccctcacctccaaaaagaaaataacaaaaagatggtcaagacacaagaatgtaggataaagaagatggaaaca

SEQ ID NO: 94443 - DNA, 429 bp, Glycine max
atcaaaaaaaaaaaactgcactgataggaaataaaacagaccttttacaaaggtgtataaccagaacaaataggaaagggacaatcaatgagggtaactgacaaatctagtcaacaaaagaaatgctgctgctatcagcaactaacatgaaaaacaaaaaatcacatagcaacactgcaaagaacaggcaatcgacatgagaactactattatagatatggaggaatgcaaacttggcaagaatgtggttgctggcttgctgcttttttactaacatcatccaaaactgctgctactggagacattatcaccgttagaccatcttttgaaggcacccggtactaaatttctaccagccaaaaacccaaacctctgatcttaacattgtcaatcggttgttattattacttgaagaagcttcagcatcag

SEQ ID NO: 94444 - DNA, 196 bp, Glycine max
gaaaaccaaaaggaaaaaatattattaatgtaatcctaaagcaagttgtaatacacgagtatatactgtcacgaaatttttggcaaactaagctgtttaggcctttcaaggggaagcttctccatctctacagaaacagaggtaacttcatcattcaactctgccattttgagttcatttagagtcctttttgcgt

SEQ ID NO: 94445 - DNA, 211 bp, Glycine max
gggaaccccctatgcaaaaaacttcccaagtttttcttagcaaaaaaaaaaaccttgggggcaaaaactcccccacccttttatgggaaattttcatgggataatttatgaaacaggcttgtacttaaacccccgatcttaaaacacaaattttcgtcccaacaacaaaattttttataacttgggaagcccgcgggcaaaaagctaaaaa

SEQ ID NO: 94446 - DNA, 272 bp, Glycine max
tatgaagaaaagctagtcaaagggtggtatatatagtttgccttttttttgttctcaaatgctattaggctgatgtattttccttctcttttttacttgtgtgtagttttccctgcctaaagtacgtacttaagtctttttcaatgaaagaaataagcaaaaaaaaaaaaagaaataacaaaaataggggatgaaaaatagaatgaaaaaaaatgtttattatttttatggataaaaatagaaaaaaaaaacataaatgaatttagtccttg

SEQ ID NO: 94447 - DNA, 272 bp, Glycine max
caaggactaaattcatttatgttttttttttctatttttatccataaaaataataaacattttttttcattctatttttcatcccctatttttgttatttcttttttttttttggcttatttctttcactggaaaaagactaagtacgtactttaggcagggaaaactacacacaagtaaaaaagagaaggaaaatacatcagcctaatagcatttgagaacaaaaaaaaggcaaactatatataccaccctttgactagcttttcttcata

SEQ ID NO: 94448 - DNA, 234 bp, Glycine max
gaatcctttgcctctgaaattgaacaaattcacatcccactttgttctttagctttatttttctaatttttttggctagagcgcatatttaaaaacgaaaaaaaaaattggttatttggttccagttcgttctttacatttgagtatctaaatatgtgaattgcttcagtacttttttaaaaggaatacatttcaaaaaattaaaaaggttaatttctgcattttatgtcctag

SEQ ID NO: 94449 - DNA, 368 bp, Glycine max
catttttggtagaaggtttgcaatttagcatctgataactcaagaagtgatgagggaaattagctcgaaaatgtatgtaattgattcatttagaactttgtggaggaggaatttgcatgtcgagaggacttgttggcttagttgtaagacccggcatctatcataatgactacatcatcaaggatccaatggttagattgaaagagactggttcatgggcatagaacaccctatataataacctgattctttctgccaggagattcttcgagcatatggctccacggagaattgcatgactctatctaacccgttctagttgccctggagtattgtatgcctatgctcaagtcatatatacaatatat

SEQ ID NO: 94450 - DNA, 167 bp, Glycine max
tagtgatataggagcaacatttgagctaagtgcaaaccacgccacaatttcattatttacattaacacccgattctgcttaaattggcacaccaccaattcttcgcgggaacccgaaccaataaaacaaactgagagtcccatgttgggaaaatcattaccattcat

SEQ ID NO: 94451 - DNA, 444 bp, Glycine max
attttttagaagaggagagagaaagagatagagaacccgttcttctttttttccattaacattttcaatctctttcacctaagacacgttcctctttccattcctttcttcctccgtcccattctcgaattggcgtgtgcctcttgctatccctcaaaggttgtgctaaggaggttgaatccgagaatttcattgcgttttgctttgcgttgacttttgtggatgcagaagataactgataaatctgatgataggatcactggggttgtgaatcaatgcatgttgggaagtgggaatgctctacttgcttaaatatgtagtcattaatttgtatttgatatttagtgtagtcttttttgtttgactcaatgacaaagggtgggggagttggatccaaggttcaagtcttgacaagcttagagttattttctgattctgaactgc

SEQ ID NO: 94452 - DNA, 280 bp, Glycine max
cactgaggacaagagaagtccattcactcagcaatccaatattaggaatgatgagtactatggaaagaaagtggcaggttccaacaaggacccttttgtggaatctgaggtagctgttagtgatgatgtgatggaaccaagcttgcacaagtatgtgacagtgaaaagaggtggtggtgtagtagtagaagacatggaggaccaagagtcttcaggaagcaacagcttcactgtgagtagtatcagtggccaacattactgggggaacaacattttttgt

SEQ ID NO: 94453 - DNA, 429 bp, Glycine max
aggaagaatgacaaattgttcataaacagcacaagtaacatgacatagatgagagagatcaacttgaattggccttgctgaaacaagaaacagttgcaagtactcaactccaaacagaagaactgtcaacacctcattgaacatctaacatacatcagcaaaaggtgaaaattcatggtatcatgatatcatcatcatcatcacacacacacccctttattggaaccaagcctgccacgtacaatgccaccgctatgttcatgatcacactctctccttctgctgttcaaacccttgttcttcttcttggcttcagatgacaaactacatcccaatcctaagggtgttttctgagcctactcctctctggagctcaatcttgaagaagtccagcaatcggtggagtcagcagaatttggctcccatgat

SEQ ID NO: 94454 - DNA, 164 bp, Glycine max
attaaagaattcattcattaacagattacatacgggctccaaatcttacaccaaggaatctgatgaatattttgccctgaatatagagtcttacagggccggtggcatcaaatgctggactaatatcgcttaccacactgcatagtaacactgcttgaaatcga

SEQ ID NO: 94455 - DNA, 493 bp, Glycine max
aatagcagtttgaaaagtcaaatataaaaaaatggggcaatgacaaaattttccaatatagagaaggcaaaattttcattccaaataaatatcggaaataatatgattatcctccgcaggaaaagggggtcgagacaataacctatttgctttcctatttctcaactttacacatgtttgaacttttgaacagataaaggccacctacaattgcctacctatctgatagatgtcaccgttgaaactatatataaagtccttttcagttcacttcacaacaaggcctcatattttcaccagctgctcaactgtttctggattttagaattgtgagatgatctaccacctttgtctttgtaggaatttctggctgcaacagtctttcgtgccttatgagctttcgctatggcatgtcgacgttgcttactcaagttcttaacgagttcagcttcattttgcaatgtatcttcattgctttgcccattgacacttg

SEQ ID NO: 94456 - DNA, 323 bp, Glycine max
gggaaaatgccttaaacctttttccattacttttttttggattggttcaaaaacccaatttaacaaaaggggggtttagaaaagccttttacccctggtgaaacattttggttcctaaaagaggccaaatagcttgatccccccattatttgccctaattttgcatacaaaaattttccttaaccccaaccaatgaaaataaattttttcagcccaaggcaagtaaacctaagggcttattaagccagggatacctgcttaagaacgggggtggaaacaccttttggatccccggttaagcagcaaaaccccgttaaaaaggg

SEQ ID NO: 94457 - DNA, 440 bp, Glycine max
atctctatatcttcaaattcaatgtctaccactgtgctataagaatctgaatatattgcttggcaaatttttagcataaaaagtcctgtaaattgtcattaattagttttagaaagcattagttggaattcagattttgagatcacgatgagagtgcatttatccatgcatttcatttattttgtgcacattagcatgtggtttattaaaagttgtgttttaaaacataacttattcataactccgtaataaattcaaaaattactcatgttgataaatttttcaaaaaaactaccactgttatgtaaaaaaagcctaaattggaatacggttataggtctaataaactgtatattctaaagcatatagttaaataatgaaaatatacgtcactataaattcaaaagtttggagcatccttaaaaaaaaacttaattatt

SEQ ID NO: 94458 - DNA, 132 bp, Glycine max
attcaaagactaatttccattcagtaaaatgcaaaaaatacacagaaaaagatgaaatttagacttgagtaacttcttatttttgggggtacaaaacttttacctgagggaactagctacattttaaaagaa

SEQ ID NO: 94459 - DNA, 332 bp, Glycine max
ataagaaaaaagcaacttgaaaattagccattggtcattcgagaatacaattctagagaagcagccaacctagcacaaacgtataaatgaatgcactcaggatatgctctaggcggtacaacatatacagggttgcacaggcgggaaaacgagagctatgacagcatgagctgggcacgattatcgtaggggtaaagctgggttcatggtgcagtgagatttgagtgaaaatggcccttcacatgataatattgggctgatgaaaatccaagccatgaatgaccaaacatgcccaagctactttaacctggaacatctgggtcagattggct

SEQ ID NO: 94460 - DNA, 187 bp, Glycine max
aagagaagaaataaaaaggtaaccggaaactgcgaggaatattaattccaatagttcataaaataaattcctctaggattccaacctaaaatggctacaattgccattttggagccatgagttcgaaccctatgatcagacgccactagcatataatcgggtccattccttcgcagtttcgacagcc

SEQ ID NO: 94461 - DNA, 453 bp, Glycine max
ctaaaactaaggtatgtattcaggaggatatatcattcataaataaaagagtacacatgaatgtttatacattagctagccttgaatgtatacatggttcttattttatttatagtaagaacaagatttgacatatgtatgtatacacagaatcagacaatagaatcaaatttatctacacttgaaatcgctctacctaaattaaccagacagcatgcttggaatggtacaactacgaaaaaaatctgcatccaagacactgctaaaggtcatacccaccaaactttctagccactctctacatcagagaaatcattggtctcaatattaacatggagaaagataatgctgatatcacgattctctggacttccactccaaaattgctgagagcagtgtgtaattaggaattaaatgcttatgaggtaaagccatgttcgtcattggtgattt

SEQ ID NO: 94462 - DNA, 161 bp, Glycine max
atactctaattccaaaactttgaatttatgagtgcccaaccaacatgaattgtaaagcaacaggaaccaggacaagagaggaaggtgtttgatgtaacaacagagagagagacattacaaccacgtcccacattacgtattaataatcccttaggagcaag

SEQ ID NO: 94463 - DNA, 318 bp, Glycine max
agctgcaatatatatagttatacaaatcaaatcaggatgcaggagtcctatcacaacaggattaaaaacgaaaaccacactaagattgttttctacttgctaattgctaatacaatgaagcacatgcgattaagatgcactttctataaataatttcatactataacaatgggaaacgcaaacctacaacattcgacaacagttgactaggttgttaaaaaagcacactgtaatcaacccactatttttttgtttttttaatagaaaatcaatcctatcgattcatctgtcattcccaatgaggcttctctgaattat

SEQ ID NO: 94464 - DNA, 584 bp, Glycine max
gtttcattagatgaaaagtgaaaaatgtgacaccatctatcccaacatacatataaataagaaaaatatataaaaatatgaaatttaattaaatcaattttattcaaatcacataaacaaatccacgtggataacatggtcacattcacttcactgttatcaaataaaacttattaaaacatctttggctcaaaataaggtcgtccaagtttacaaaaggaaacaaattaagcagcgaaataaaataaagtaaaatagcatgttcagaacattatgcaattaaaacaaaatctcatgccccaatgtcacatcctatcagagcattatgtcacaacgtcctctagcacgaggttctttaaagtcgtccacctagtcatctgctcccatgaaaacaaggttcgagatcatcacaaaatctaaacacaaacaacacgtagggagtgagttatcatatttttaaataaaatatagataaacaaatacataagcaaaatacattataaaaatatttatcacatagttcaacttaatacaattcacgtcacttcatcactttatcatttaaaactcatttttcaatcatc

SEQ ID NO: 94465 - DNA, 233 bp, Glycine max
actagaacaaaaaagcaattaatttagaagaaagcaacgaataaagagggggtgttgtttttcactgacatggtaccacattgcatatacgcttgagtcttagtatagctgattcataacgcctatgaattttttattatgaaattggtgttggtacgtcttgaatcgagtgtgggattcatgtgtaatgtaattgatgattgaaaaatgagttttaaatgataaagtgatga

SEQ ID NO: 94466 - DNA, 201 bp, Glycine max
gaaaattataattaatataaccttcagaagacaaaatccccacactgcgtaaaaatatattgttacatttcacctctaaacgcacatcaatgcatgcaggtcatcgctgtttgattccaaaaaagagagaatattctaaaactataatttttatcttcagcagccatttaattttacaaattagtacataaatccaacctt

SEQ ID NO: 94467 - DNA, 338 bp, Glycine max
ggaaaacatcaagctccacacactaattttggagacgaagaaaactgctttacatcaagttttaaaccaagagactttcaatggctagagcagtctcctttatgggataatcaaacccccatgataactaacggggtgaaacaaaacaacaccaattcccgcaaagcctttttattccacaaagggggttacaggttgaagcaagtcctgggtaaaaacaagtttgaaaaaaactcctccattttatcaagttttaaaaatactgatgaatgccgcttttcacaaacacctaaggaggtttagttgggctccttgacctgttcctgattttttgggaa

SEQ ID NO: 94468 - DNA, 313 bp, Glycine max
ggaaacaaacatatttgtttcctttttattggtatggggcaaaagctacaacaaagtcaggggggggggtatttttcctctttattggtacataaaaaaaggccaaaaatgagaattaggtggggggaggggccacaccacttgctcataactaatttttggaggctccattttttccattatcatccaacgatgcatataccttaattattggctcggaaattttaatccctttcaaggattcatttttgtgcaaaaactcattgtggtcatgtaaaaaaacaggagtgtttgccataggggaaaatccaat

SEQ ID NO: 94469 - DNA, 441 bp, Glycine max
cttaaagatatgttacttttttttttcttaaaattttggacatttttcttgcaactcttagatcagatagttgtattttgcaagggctaaacgtagttataaatgtgtatgacagaagatgtcccttttaaaatagcttacttataacaaggttgatatggcatctgcatctattgtgtaaggaggcaagtttattgataactggatttatggctataaaatagttatacaaggctccagagtgatttggaaatagtcagttgcttagtttttttaaacagctttaaattttggggtttaagagaaaagagttagcaattacaatctgatggcagtggaatcaacggctaagtgctattctctggttgtctggtattgtacttttgcctgtgcttaaatgctttgattgaaatgtgaacccccccccaccccccaaacaca

SEQ ID NO: 94470 - DNA, 332 bp, Glycine max
gatactgaaaaatacaatatatgcccttctgaaatacctcttggtgcaatacaacatcctaaaaagctgttaatggaatgcgaccaacttaactttatacaatggctgagataacaggaaactctgtcggtgagatgattcagggaaaaaagagtaagtaaaaggaacaaaaaaataaaaggatcattagaagccagatttatccattatccatattcaccattcggtgggagctaaaggacaacacacatgagagaaacaataagacacaaacgtcctcaaaaagctgctgccgggggtaattaggcatctgtggcaggtgaatcaaatga

SEQ ID NO: 94471 - DNA, 277 bp, Glycine max
gaaataatatacattaattctcataatatacaattaaataatttaaatcctcataataataatagtcaaatagtaattaattaaaattcacgatttattaaaaaataattcaccaagacagtaacattttagaggggaggaggaattaatctccattattctcctctacaccaaaactttcattttactaaaaataaaaatcacacaatactgcacttacaattccatcatcgacgatcattcacgggcggttaaaccaacacgtaaaagaaatgat

SEQ ID NO: 94472 - DNA, 245 bp, Glycine max
gggacattgataaaaaaagataatgaacttcctgccttataaggaaagaaagtttacccacccctcccaattttttaataaaaaaaagtttttagtttattccccagccccttaacaggatgctgaaaaccccttccatttgaggtttaaaacaggaaaggggtctgattaaaaattattcctttttaacccttccaatttttaaaccccccttgcccttttgcattggccccaataagggtaag

SEQ ID NO: 94473 - DNA, 227 bp, Glycine max
cccccacaaaaggggtttaatatttgggccataaaaagaatcccggccttccaggatgccaaaagcttttagggaacaagacccttttttttaaggggggttttaacagggggccctccaaactaaaataaagctcccgaaatgttaacttaggaacccttttgggcccaatttttatacttggcaccctttaaacccagtaccctgggggaactttgctgaaacgg

SEQ ID NO: 94474 - DNA, 344 bp, Glycine max
ttttttttttttttttttttttttttttttttttttttttttttttttttttttttttttttttttttttttttttttttttttttttttttttcccccaagcccttttggggggggggaaaccccccggtaaaaaaaaatttttaccaacggaccggggggggtcccttatgaaagggacggaacaaacttttttcaaagggaaaacaaaacccaattttggcctttccccctaagaaaacaggtccaacgggaaaaaaatgaaaacgggaaccaagggaaaaggggggggggtcggctaacttacccccaaaaaaaaaacttttttttttatgggggggggg

SEQ ID NO: 94475 - DNA, 309 bp, Glycine max
aacccaagcaattcaaatttcctttgacttcattcacaggcaaccttcgactcaggttcttgttcctgtttttcttcttgatgttgttgttcttcttcttgatgttgttgttcatcctcactactattactatacgacgtggttgcaccaccaagcaacaatggcttcaacctctcctcccacacacccctcaccgcggcgtcgcctcccctcttccttacctccaccaccgcgagctccgccgtgagccggtaaacctccaccccaatcccaaacctcccattaaatccttccaactccaccccacac

SEQ ID NO: 94476 - DNA, 96 bp, Glycine max
aaccaataaatttgagacatctacttctatagtgaaaatacggactacaaatcagtttcaaatgacaaccatcaaatttggaacatacatttaaac

SEQ ID NO: 94477 - DNA, 495 bp, Glycine max
atgaatactcgaagtgtaaagttgaagaggcaatgtctaatgatagtattcacaaagcaaagttgcgagagagtattggttctgaaagagtagcacaaatcctcagaagatcaccaaggtcaagtcaaaaaagtatggacaatggtcaagcaaacactagtcaatatacagtcagaaaggatgacataaacattggccacagggatgacagtccaccagagggaaacactgctgcatttcagactattaagaggaaggtcaagacacctcagaaacatgagaaaaataattatgaaggagaggcattgaaagcccgaaagtcacctagagatttaagcaagaaaaatgctcaaggagatgcaggtgaatggacagcaggcaagaagactgataaccattcaagcaacagcaaaaatgtgaaggtcagcaatattcctcagtcagtgggagcatcatgttatggctttaagaaagaaaaatctgaagagatgtttc

SEQ ID NO: 94478 - DNA, 379 bp, Glycine max
cccgcctccccaccggccccaggcagcgaggaaattgaattgggtgcccccgtgcccgctcctgctaatgaagtggccgttgaggagcctgttccagctgagaccaccactagcatcgcctctacccttagagtgcctgctatcattgttgtcatcgctagcttcttcgccttctaagctgctaccttttacgagcttttcttatatgtgttgtgttacaccaccttgagtgttgtgtttgtgaaatgactgtgtgttattgaatgaatgaattaacttaaaaaaaaaaaaaaaaaagaataaaaataaaaaaaaaaaaaaaataaaataagataagaaaaaaaataaagagtaaagaaaaaaaaaaaggggcggccgc

SEQ ID NO: 94479 - DNA, 354 bp, Glycine max
cgacactcaaactttcaaatactttatttgatatacttaccaacgagttaacagataaaatgccacaagaccttgaagtatcaaaaaaattgcccacctacgaacaatagatctcaatttcatttggaaaggatccataggatttgccccttaggacattcattcccagttctatattgatattagaaattttgcttcaacgccatgaaattattggaaaaaagagtctccctttcctttctcacctttttggtatgcataatcccctataatgacaaaaaaatttaacttattctatgagaacatagtatgcctaatcagttgtccaaggatcgctctctgcaatgacttcag

SEQ ID NO: 94480 - DNA, 470 bp, Glycine max
gacgccgtcgaaaccctaaacgaatccaccgagaattccaatcccaataccaattcccccgacctcgccgtcgttctcttccacccgcaccatgcggagattcaccttatcgcacagggagtcgccacgcgctgcaccaagatcgaaccctcttcaaactccagaaactccgtgtatttccgacaggtgttcgcggcgttcgtgaagcgcgtggattttaaggttgtgaagcgcgtggtgataacgagcgaggagtttcgtaggtttgtgatgtcggaagcgaggaagtcgaggatgcggtcgatcgaggagaaccagtcgcgaataatggtcgttgcgggcggtgatagtttggagaaagtgatgggtgaccgggcggtgatggagttggtgaaggacaagaaggtggcggcgtttagagagttgtgggagatggtgtgcgacgattcggaccgcgcgtgttatggacc

SEQ ID NO: 94481 - DNA, 263 bp, Glycine max
ggggtacaacccaaggggccctttgcatatataccatatatgctccgaataccaagggcaagtacctggaacaatatgggagagcagtgcttatacaatggtacagataggaaagtaaattaatacagtcaaatagaaaccggaccaattacaatttagggttgacaaaagtatgcccggaggcagaagcaaaaaacccttcgggacaggccattattttacagattggttttacaagggatgttaaaagaaaaattgtttta

SEQ ID NO: 94482 - DNA, 377 bp, Glycine max
cccatcgtattccgtagttctttgcttctcaagagttactttacacgctgcagtgtcctaaattatgcaaaagaatctcaagttatgatttagacttgtgggggttggaaatactttcttccttatccaataaccattattttggcactagaatatacatgaattatatagtctcacttttgaaggcaaccaagggagcttcttgctacaacctcactatttccttcataagagcaacaaaaaagattgactacagaattagtgcccatttgttgttttcacagccaaattgttatctgtcctattttgatgggctgtctgcctgtgattaatatctttcctgagacattgccatagtgcatcataatgaagaagac

SEQ ID NO: 94483 - DNA, 289 bp, Glycine max
ataaaaatagcagatatattgcaaatacaaaaatgcgtatgaacaaatttactatacatttcttgtcattcacttaacatggcattaaccaatctacagaaatttcactgccgaagttgatgctaacaaacagcttctatcacccttcaaattgtctcaatctagcatgagaaatccaataactaagctttctcataaacagtttggtgtaactcccattcattcaaccagagactaccaactcaaccatttcttgtatcctggagtcaaagattcctattgatggatg

SEQ ID NO: 94484 - DNA, 320 bp, Glycine max
cattcactaagactagtctctgagagactttattttgtcattttgttgcctactttcagtccttttaggaactagtattgattaataaaaataaataaggaatgaacaaaattcaatttactttttaaatacatgacttttcccaccaccatttggggatactgtataaatattatagccatacagctgcagctttcagggaaagaaaatctgaaattttgttggtataaaagcccggctgtatggagttgttagggctttgaagcatggccagtgtggtgacccctgaaagcacaagaagagttttgcaaccaccattt

SEQ ID NO: 94485 - DNA, 234 bp, Glycine max
ggcaatcgcattgaacaagagaggatgatagatcatgatcttccttgcgtttgtgtcacttgaagaaattcaagagcagatcgagactaactcaccggtttccgacgtttcagggtttcagcacttacattgtttgattttccagatttgagttggaagaagatcaacgaggctcctagttgcttggattgttcctctgggtggtggagactttgcgtatagttaagatattga

SEQ ID NO: 94486 - DNA, 106 bp, Glycine max
ataaaagctgcttatttgtcgcctattccaaactgcgggcgaacaaattcactatacatctcttgctattgacctagcacggtacaaaccaatttacataaatttt

SEQ ID NO: 94487 - DNA, 249 bp, Glycine max
aacccgggaaaaggaaaaaaaaaccccttggttctctttttttttttggggcccccgggcctgtttttttgctttttgaaaccaaaaaaaaaacgtcccccgaaacaatgaaggggctatcaattgtttcccccgctttgaaaaataaatttgggggccccccttttttaacaaactaaatttccgttcaaaaagccctgggtccctgtcaaatcacaggaacttgaattttttggggaacccccaaac

SEQ ID NO: 94488 - DNA, 512 bp, Glycine max
aatgttcttgaccaatcatatgttgtccttagcttatacagaaacagaggtagtcattgcacaaacaatgagatttgctacatcacaagcccaaaaatatccttcatgaatcatcacaaattcacaataatgcgcaagctttattgcaccacaaacaatgcgcactttaatacaaaggcatagtagacccagaaatagcttttgacttatcctcttctggtcgaacatagcccacgccctacatacactataatcatttgccctcttccccaaaaccaaacaaaaaaaatgttaatttcaattgatccatgtggtatggtatggggacacaataatttacccctagtcttaagttattgatgtgcattttatttcacgtgtttatatgaaagacatgaaataattgaagaggcgtaccccatgggataaactgaaataactcagttgtagtatatatagtatgatgtatttgaacagtggagaatgtaaattatatataggggtatgatatg

SEQ ID NO: 94489 - DNA, 131 bp, Glycine max
agctgcgtttgttccttcttcagttttgtttgattttgagtgagtgacgatgggcgcgagcgtggaccttgcccaagacggttccgacgagcaccagaagcgtccggagatctacacctacgaggccccct

SEQ ID NO: 94490 - DNA, 225 bp, Glycine max
aacagatatgtctttttaacttaagatatcagtcttacataaagctaccatcagatataatccacactttaaatttgaaagcttgactactctactaagctcttgcggtgattggcaaacatgggaaaccgttttgaacaccactagactctactctatccaaagggaaaaaagatgaataagaaccaaactgctctttcattgcagcacttggggggggggggc

SEQ ID NO: 94491 - DNA, 462 bp, Glycine max
catccttcaacttcattctcattcactgcttgagatataaataagtcatccttaaaatctttctacatttttattacattaacgttcgaaaaaattcatctacctattttctacccaccaaatcctttaatattgaagcaatcaaacaattgtaggctaatacaatggaggggcttcgattttaaagaaaaagaaggctgtcaaaaaatgagcccaaacattgaagaccagaatctctgaatccctaaaatgtgattgcagagaacaaatagtgaattgacgagactaaagaaaaacaggctaaagaagcaaaaagaaagacatgaataaaaagggacaattttatatcgataatacaatttgcagacgcacgacattcaatgttgagcagtccaggtaggtttggtcacaacttttctacaagatcgtccccagtagccatatatgcaagacaaacaaata

SEQ ID NO: 94492 - DNA, 336 bp, Glycine max
ccaacaaacttttatttaaaacccgggcccggttcccatttttttttttccccccttccatttgtccaatggcaagcaaccccccgggtggggagaaatattttcccccccccttttttttttgggccccaaacttttttttttttaatcccccccttttgggttcccttttttttcaatggccccgggtcccccccctttgcaataaagggaccccccttttttttgaagcccctaaccccataaaaatggatttttctttaaccaccccaaagcatttgttaaatttaaaaaactgggggcccccagccccaaacccattttttccccccccaa

SEQ ID NO: 94493 - DNA, 376 bp, Glycine max
gggaaagttgttagaaatcaaccaaaaataaagcaataaacaaaagagtatgggttcttagtcaaattagtagtcatttgataagtatgggagacataaaaatttatagaaatcacttaaataaaagatgattaactctccccccccccccccaaaaaaaaaaaaacagacatgcacttggacatgttgaaattttaagggtgttttataacactggctgaaattccatactgagcttttttttgttgaaaaatttgagaactgaatttctagtaagaattgaatttggagctttggaaatgatcctcatttgacatcttgaaagtgtattgaaggaaatccggaaagtattgtcatttaaaaaatgaatgatgat

SEQ ID NO: 94494 - DNA, 126 bp, Glycine max
ttaagctcacaccgtaacacatttttaccatactaaattctgaaacccttttctcaagggtgaggcttaggcatatacctacctcttcttcctcctccgaccagggcccaacacaaacgcaccatt

SEQ ID NO: 94495 - DNA, 315 bp, Glycine max
aacaatcacgccatgtcacatctacatttatggggaggcttgcttgactttaaaacaataaattatgtattacaaactgcaagttttccttgctcacagattcttcatattaaaaagaaaatttatccattaacaaatatttaatgcgtgtttgggtattcgacgaaccaacattggtgaaaactgaagttcgcaaaagcatctccatcattccttttgcggtaatatacggttgaccatagaatttaaaattgcaatttttgctaacaagattaacggaaagtcaaacatgctttttatctcattaaaacttaa

SEQ ID NO: 94496 - DNA, 260 bp, Glycine max
cttggggaaggggggcctttttaccaaaaaaagggttgggccaacggccttccctttttttttttaaaacccaattttggggggaccccccccaattttaactaacccatagctaaaacctttaaaaggccccccgccccaagttgaaaaaagttgttgcccattcaatttaaaaatacccccggaaaaaaaaagttgctgaaataccccaagggcccaccaaaaagccccccattttggtttttaaaaacccccccagg

SEQ ID NO: 94497 - DNA, 350 bp, Glycine max
gcgatggagaaggaatcttgtagctttgacgacccttcttcgttcacgcttggggtgttggggccttccggcctttcaccttcacaggtttctgtggcattcagcgacgcctacgaccggatcccccactctgacgtcatcttggtgaacacgatttccgagatatggaagcagaggagtcagaagaacaattcgctcttcaatgggaagaagttcaggtatggagggtgtgttttgcatgccaaagatggatccgaccatgaatgtgaaccgcatttatgcctccatctaggtttgacagattacaggacttttgtggggacaaatttaagtcctttgtgggaaaggtt

SEQ ID NO: 94498 - DNA, 346 bp, Glycine max
agggcaagggactgtattttgtccactaattcaaagagccccaaaaaaaagcccccattagaaataacataatcctatttggacaaaaaatacacccttgatagatcacatatctcaccagagaaaggaattttagaaggatatcctatgatcagctgaatggaattttagaagtaaatggtgcccctgcttgcaacctgcaggtcttgaacaacttcatcaaccgaaatttgaagtatatccccatctatatcaacacccgcctcaaatgcttaaatgtcaaagtgagtccatttccccaaggagtgggtcatttcccattctattattttatgaggcaccatcc

SEQ ID NO: 94499 - DNA, 66 bp, Glycine max
tttacaaatacatgaatttgtaccctaaaagacatgcaatatcaaattggttcccccacttcccct

SEQ ID NO: 94500 - DNA, 454 bp, Glycine max
caagggtactccacagacaagagaaagaaagaaaaccccatttaaagcttttttctttttgtactgtgcacatcacaagaagaacaaagatgggtttttgaaccatcacatgataaaagagagagaaacaaaaaaagaaatagggatattggagaaaaacaagaagtagctgcgcaagtggaagaagaagaagatgaaggaggagaatgaatgaggtgaggcgtgttgttattcttgttgttgttgctgaaatgggtctgttgaacacaagtgcatgtatttgaccactagtgtgttaaagctcagatctttgtcttttgttctcccacctggtattttgagtccttccttaactgaaacccattttgttggtgtttttttttggggtattgctgaatttttcttgtaccaacttgttggggttgatttagatgaaggccgtgcccctacccta

SEQ ID NO: 94501 - DNA, 314 bp, Glycine max
atcccaaaaaacagatgggaactttttatttaaagaaacaaaccttgttccctcctcggggagaaaacaaaattctctttttatccctccaattggagccctaccaccagtttaaaccaaattacctgctccaccaaaagggcttccccaccccatgactactacaacatgccttggttagcttttaggatcaacaaccctttttttcccctacatgaaactaaaactgggggggttaaaaaaaacctcccccctttttttttgcctggctccaacaattccctcaagggttaattacaacaaaaccctttttc

SEQ ID NO: 94502 - DNA, 361 bp, Glycine max
ggtatggaagtgaatcgttttctttctcttctcaacataaaaagcataaaattaattacaaatcaaaaggctttcgggaaaaaaaaaagagaagaaaagaaaagccaattgcacaaacaatgatgataagatatcgcgtcgtgaaataaagccaaataatatccaactgttaaatagggtcatatatctctcaagccctaaaaaaaaaacctctcttctctcttcttccatcatccaccacccaccccttcccaacatattaaccacaccaaattaagaaataaaaaaaaatttctcttttcatcaaaataaacaaaactcagttccgtagggaaaataataatcaaaccttacgtcatga

SEQ ID NO: 94503 - DNA, 488 bp, Glycine max
gcgttttagctctaagctctctcatctcactaacccacacaacaccgccgcgccgtcactcctgcgaggttgccgcggcgtcgtttgacggtggcacctgggtcctaaccatctcctctctaaagcagagttgaatttctctgggggactcgccgtccctgtctcaatctcgcatcattgtcgtcgccgtcaccgtcacggaggatgctggaacagcgtctaatggcgtccctttctcaatctcacaatatggcactccctttctaaacgcacgcgtttgctgctcttcgtccggcaaggtaagtgatgatggcgagactggctcctcctttcagtatctttagacaatcccattactggcgcccacttctctcttctcacaacgccaaacgcaccctaacagctgctactaacttctccatcacctcattagctcgaacgcccaaatcacgagacgaaggaacaaccaccatcgttaagctttcgag

SEQ ID NO: 94504 - DNA, 325 bp, Glycine max
aaaactgaaggggccaaaattggtgaatgaatcctggccatacatccatgtctggaacccaagggcccaaataatcatcactaaccccaaatttattttcaggaaaagttttttagcccaagctgcccaacaaggctattctattttgggtccataggggggttccagaggcaaactaaagggtaggtaaagctaaattggacccagtttcgaccctgggaacaatcagctcctaaaaaaacttaatgccccttgacaaaagttcttgagcaaaatccatgggacaaattagcttccccaataagaaactcccccaagccatttg

SEQ ID NO: 94505 - DNA, 242 bp, Glycine max
aaaattacaagtcatcgaaattatacattgatttcatacctgggaaacctgagctttaattactaaacgactttgcagatgtagagtacaataggcactttttttagttaactaaacatttatttgtacattgtcaattagaagaggcctttctcatacttgactatgtcatgaccagctattaaagggggagcaactaaaccgaatcataggtattgccatacccttccatagggcttaac

SEQ ID NO: 94506 - DNA, 324 bp, Glycine max
tggttgtatccagtggaggcttcaacctacgaacttgtccttataatcactcgctctcctacgcttcttctttctctctccactcccattccacaccccacactcttctcctctatttaacaacgcccgaaaaaaaattagggttttcaatttggggaaataaaaatagggggaaatattctggagagagtgtgtagaaaatatggttgtcgatgatatgacgctgtgcatcatcgtcggctatggaggttcctcttcttctcgtttctccgatgcttatcccaaaaggggtttgatggaggggagatatagtggggattgata

SEQ ID NO: 94507 - DNA, 419 bp, Glycine max
gatgaaagccattttccatatattgctgaaacagcaaaaaatgaagagatatgacaatacagctcgagtcctttgtaaaaggggtgtgacacatggaagtgataatacatacaacttcctaagggtgggaaactggttcaaagcagtgtactgttggacttggaacatagctttcaaacaactaatgatgtgtttggaaaaccgttgtaatcccgttgaacaaacatttcccactttccaatgtacaaaagtagaaacaagagtggtgttggattggggttgcattggacgtaactgcaatgcaaacacgagctaactagtcgaactcgctgcttataataactagttgtcattttcatctggagcctttggagatccatttccaccctgtaatgcatccatttcctttgcctctcgag

SEQ ID NO: 94508 - DNA, 124 bp, Glycine max
gaggacaacactaacatgcattgatttaaacaacttctcagctagcccaatttgatggatcagtattaccaccgtcatatctgccaatgtctgaatcacttgctgaccctccggcaacattttg

SEQ ID NO: 94509 - DNA, 198 bp, Glycine max
aacaaacaaggaacgaaagttgcttttcaattcatatatgaaaggggatatgggcaacaggggccccttgggggtaccccttttgaatatgaagctgggagggccaacattttttggtttttaaactaaaaataagtctcggccccccctggtggggcgaccaccacccccttaacggaaatagggggttttttgggg

SEQ ID NO: 94510 - DNA, 300 bp, Glycine max
gggaaaaaacatattaaaaccctgacatatggcccagaaaaccttttttaccaaaatttacccttggaaaaaaaactggccatttaatttggccatttacatttaaactaccggttttaaaagccctggaagaaaacaaaaaatgggtttccaggaattttatgggcatgagcgccttttatttttttaacccaaatataaatggattttttagggtacctataaacacggcctaccccaaattggctttaaaaaaatggcatggattccccaatattttgggggcaaaaattttaaagg

SEQ ID NO: 94511 - DNA, 196 bp, Glycine max
gggaaaaatcattttaaaaacttggcatatggacctgaaaaccttttttaccaaaaatttcccttggaaaaaaaactggacatttaaattggccatttacatttaaaccaccggttttaaaaaccctggaaaaaaacaaaaaatgggtttccaggatttttttggccctgagcccattttatttttttaaccaaaa

SEQ ID NO: 94512 - DNA, 397 bp, Glycine max
aatgatattcaatgatgaatccaaccaattgcaaaactattacagcacatgtatcagtctcttgggatatctaaaagtaagttaatcattaaaaaaaatgttcatgataaccacttattcaccatacttctacccaacatcaatgataggggtttcaagctccatactccaaaggattactcggtcacttttgcagatcgaaattgttccttagtcctaccataatacacaggctccttgcctgaaaaagtgatgaaattccagccaaaagcagatcctccaactacatatgtcccttgtgtctgagtttcttcaaccagctgcttctggaagccaggagctggtggagtgagcttaatttcagatggccgtgcaaatgatttctctacttgactct

SEQ ID NO: 94513 - DNA, 169 bp, Glycine max
aaaaataaaaccccaacaattttattaaggaaaatcctttacaatttcagcacatataccccggcatgaatataattttgcccgctttaagaatttttcgccacaaacaagggggtagggctcaacaaagcccaaaccaacaattataacagttttagggggattaatt

SEQ ID NO: 94514 - DNA, 505 bp, Glycine max
catttttctttccttttctttttactaacatcattattctactttgttgtatctgagctgctgaacttcagagtgtggcagcagatcctgctcttcttcttcaccatcagacttgtgctggaaatgggattggtgacagtacctccttgattccagaatcctccagaagaccaagcctctcctctctgcaaataccagcgttgtcagtggaaaatgcattatcttcttttaacaagacagatggtcctatattgatatcaagtccaggttccagtagaggactgcccccaaggccaaattcagccagagtcatcaagtccactatgaaaactttactctctgaaaggagctttagggctaagaattcttcaatggatagtgaaaggacagttctcattattcctgatggctcaccatcagatggtcctgtggataataagccttcgacttcgcggtccctttctcttaacaagattttgttctcttcctcaacaaaagcagcaca

SEQ ID NO: 94515 - DNA, 473 bp, Glycine max
atgtccgattcaagaaatagtcaattatcttcaaattattatagtacaaatcttgatgcaagaatctaatgataaaaaatacatgacaaccatatatattgtaagcatataaacgccctcaaccccctttcaaaaaatattcaacaaaaacattcctatcctgtattcgcagtttacatattgctgctcatgatggattcattcattcctcatatattttggttcacaccaaattggaaaggccaaatctttgtagtttctaaactataaacaaataagagaccaaaaaatgcttcatgtttgcaaaatactggtgttcaactattgctggaggagctactgtcactgttgttgcagcctttgcagttggtgacactgtcattgatgtttttgctactgcagtgcatgatcacggcgctgctgccgtgccgtagaagattgaatctgtcttcttggtttccatctaacatact

SEQ ID NO: 94516 - DNA, 417 bp, Glycine max
ttggggggggggggggggggggggggggggggggggggaagggagcgaaagccggaggatggaggggcccatagtgtactacctacacagttctctttaaactttttaaggaacaatcgtgggagggccccagaaagaagttatagagtaaacgaggtaataagaatataaagaccaagtatcaaaggacacaaccaaaagaaaaagaaaaaagaaaaaaaaacgacggcagcagcggcaaggaaggaaccctaaaatataatttgagaagtccagtttagctaacgcaatagctgccggctagtcgttagacccgaatgcgacctagtaccctattgtgttggcaacaatggccaagaagtgcgcccattccatttactactggtccgctgataatacgatgcacgtcgaggcaaa

SEQ ID NO: 94517 - DNA, 499 bp, Glycine max
tggggggggggggggggggggggggggagagggaacggaataatcgccgaagaaaataaacgaagtagaagaagataacacataaggtatataggagaaccaaggaaacgcgaagggaggttaaagcaaaacatgtatagggcgctgtatcgaccacataggtaatgaggtaaacttaaccacaaggagcaagaccgcggataatacagggaatggcgaacgatggcgcaacccttgcgaagtttaaagtgtggttaaagttctgtagtggagatttgttaaaaccaatagtatgtttgatccgaaaagactacggcagttaaataagcttgctatcaagccattggcatagacgcgggctacgagttaaaggtggccggataaggttgctgctgaccttagatggccgaggcggactatggggaaggctggttgttagccgtggaaatggtagtactctgacgatacccttaaagagggtagtttcgctgaggactag

SEQ ID NO: 94518 - DNA, 407 bp, Glycine max
cggccccccaaaatcttcccatagatctggattgacttcaacaaatactagtaacaagggcagacattcctctcctcttccgtctccaccagatcattttgctgcttcatcctctccaatgggagctgtaaatatgtctaagagctttgaggatgctgtgccagcacaaatgacaggcaaacaagatactaatgctgtttctgagaaagaaatccctaccaggacaaacaatgctatgaggaacacaccaggaggcaagggaaaaaatgggtctaaaccagtagatttgcagggcatgctaatttctcttttaaaggataaacctaatggaatgactttgaaggccttggagaaagctgctggagacccacttccaaattccatgaagaaaattgagccaattataa

SEQ ID NO: 94519 - DNA, 505 bp, Glycine max
ttgggggggggggggggacgcggcgttaaaggatgcccaaaattacaagggataaacctgcaacagcctgggttgcaagtgcaacggctgggtaagcaacctgggatgggacgaagagtgcaaggttgagttgtacaacgcgggctgggcggggttaatacgggaaagcaattgggggcggtaaaggctgggctaatagcacgggtagtgccacgccatgtatccaaggtatttaatgttaacgttcaaactgtgtgggcaacccacagattgtctttaggacggataccccaggtagtaaaattaaggtcaggcggcgttggaccgcagcggtttaacgcgcatgcgcgatgggcgtccttggttgggaagggattaattagggtattggcgggggccgaagaacaagttagccagacgcatgcgggatggctaggatgattagtttgccaaggttgccccatggggggtgtaagcctagcaagagtggtaggtaaccaagtgt

SEQ ID NO: 94520 - DNA, 397 bp, Glycine max
ggggggggggggggggggggggggggggggggggggggggctaagaagtaaatgcggtaaacacctgagagtggaggtgcgaaataaaattctgggctaatgcgtgacagatggatgattaatagtacccggtaataaaaggaggtttaagaactaattagcaggtgaaatacgtataacccaaacggtaaacaacttgtcctgataggaagtagtataatggaggcggccgttaaaagatattgggctgtgtccgatgggcagtgcctgttatagaaagatatgtggggcttgggtgttataggcttggcataaagccacgtgtagtaaattcagaagatgtgtttaaaagcccggggaggcttgggcgacttgttaggctagcagaagcgcctag

SEQ ID NO: 94521 - DNA, 309 bp, Glycine max
ttggggggggggggggggggggggggggaaaacggaaaataagctagcaggctagggagcaggtacccggttaggagatgaatataatgtgtgggaggaagcataaagataaagataggtacttatgttaaagatagcatggagctagatataatgcagaaaccaagtgccggttggtaagggtatagggagggaaaattaccaatactatggaactaattagacccgttggacagacacagatgctgcccaatgttgtgcaaacgtaagtttgatgcatgacaaccagacactaaactcgaacctagg

SEQ ID NO: 94522 - DNA, 348 bp, Glycine max
ttggggggggggggggggggggggggggggggggggggggggggggggggggggggatagcagaagagaaggagagggagagggagggagagaaaagaaaagataaccctaatacttgtagagaacacctgtttagagcacgccctacgacaaatcaaaaaaatagccccagaagtatttaaaggaacccaactgatttaagaaccctaggccggtatgtgtataggagaatttttaaagggagggaggacccaagaatttatgtaatacccaacagaaagaatacaataggaaaatttcaaccatggagagtgtttgtatggtagtggcccgtgtagttgtatgtta

SEQ ID NO: 94523 - DNA, 412 bp, Glycine max
ggtgtgggtgtggtaagggtatttggaggactagactagaggtagggtttgggtggcaagtcggtggaatgctcacaccccagagtacacaacggcaggccttgtttaggaagaatacagtgcaagcagtgcagccacgtgaaaccgcccaacaacaacgtcgtgacgacgaacgttgggggcgatcaactgttgtgtcaggatagtaggcaacatcggtcattatatccgccaagtaacaacggtacagtgctgctggatgttaatgctagttctaacttagttgcacaggtttgaccgtcgcgcaccatcgactttttggacgttgctagtgctgagagggggtgacgtgtggtgtggtgttgggggtggcagggtggttggctttggggcagtgtgtgattgatatact

SEQ ID NO: 94524 - DNA, 317 bp, Glycine max
ttggggggggggggggggggggggggggggggggggggggggggggggggggggggatcccagaagcgaaggagagggagagggagggagggaaaagaaaagataaccctaatacctgtagggaacacctgtttagagcacggcctacggcaaatcaaaaaaatagcgccaggagtatataaaggaacccaactgatataagaaccgtaggccggtatggggataggagaatttttaaagggagggaggacccaagaatttatggaataccaaacaggaagaatacaataggaaaattacaacgatggagagtgttt

SEQ ID NO: 94525 - DNA, 454 bp, Glycine max
acaaacaaacaattgaataatcttagatcgggttgaatttagtcgctcaccgtttgtcattgttctataattttaatgttaacccctgcgcttgcgtcttcgtcgtggttatctgtagcgtccaatttcatagttatctcttcgtcggttgctgttactctttcttctgttgctacgtccttgtcttatgtggtaactactcagtcgccgtcttccatcttggttctcagcacctcgcctgttcctctaaccccaatgctaacaattcttctactaacactcgtattcagcaccatcgccatcactgtaaacttgctagtcacggccctggtccaggtcaggttgtttttcacaatcactgtcagtaatcttgtgttcagatgggctttctgtgtccttgtgatgatcttcgtaataactctgataataatgtttgtcgtattaaaattatctt

SEQ ID NO: 94526 - DNA, 397 bp, Glycine max
ttgggggggggggggggggggggggggggggggggaaaggcgatcgaacgtgactagagagtagagagcgcatacagaagatgagaagacaatacagtgattggcctggacgtagtataggccataacgatacgataaaataacctctgcttcatacttttctagcgaagcgaagagactgaaggaatgaatgacgggccggttcgtataaggcccgccggaatgacccgttctgtgtccgggccgttccggtcagccccaagtcagcgtagggagaagaagattaagtatataggctggtgaggggagcctggatcgggcataatttgctggtggtagggctggtttaagcatatagtgcaatgggcatctattccataactaatgattgcacttt

SEQ ID NO: 94527 - DNA, 491 bp, Glycine max
caaccaagtcattagccgctccttcctccaccaccacctctcctcccgccgcgccaatgttaatcgccattgccgccgttttaagggttatatctttactcgtgagggtgagaccgttaagcctctttttaatgggggtcatcctaaccggagcaaccacctatgcattaaccgctgccgctttggtgatttaagcctgccctcctgttgctcacagcatcatccgtctcgtcacaggcatgctcatccgtacccccgctggggtcgccaccttcatatgcctcttcgtagtcatcagggtcctcagggtctgtttatttggcactgttcgtactggagttttcttcgccaggaggtataaccaagactagttgagttttgcggccgcggataccgaatatagggtaaagcgccaccccgggtttgcccacggccgagctaatagtagcgactacagccacttgtgccgtgctatggtagtaagatagccg

SEQ ID NO: 94528 - DNA, 414 bp, Glycine max
ttgggggggggggggggaagagtaaagtaatgccgcagaaacggtcgggatcgggatacaggagaaaaagggataatatggaagcgacgttagagaaaatgcaaaccacgtttaggaatacggctagattcgggcgtaaaactagtcatacagaataaaccgatcaccccaaacaaaattttattgacaaataggcgcctcggttagagcctggcaacctaagcaggtggtaaagcgtagataacaaagttggaaatactggtagagccgtacctgcaacactgagccttatacagacctgtttagtaggccggcactggccaaggagcaaacagacttttgtcgagctaaggttattaccgtttagcaagaggccttggttttaattaaacgtactagtagccaggccaactt

SEQ ID NO: 94529 - DNA, 437 bp, Glycine max
acaaggccacggtggaaccaaaacataacgactggcccaacaagttggttcccattgtgaggatagctggtcaaacaatagggcaccttgggtggagcggactatgctttacgggcgccgcagcggtatgccgccccatactgtgcccaaagttaaagcggtcgcttagctggagagtgtgtacgtaatttacccaggaacagtaggcggaacacactagcagtgtgccggtgtgagcttgtgggcttaggtaaaacgccaataacgggtaatgcaccagtgacggcacggcatacacagacacaactaaaatggatcatacatgtcctcaggaaccgtaggtgtgcagcggcagaagactttacaagtgggctgcctggggacgcctaataataagcgatagctgggagagcatgggggatgaaaggataccgggt

SEQ ID NO: 94530 - DNA, 384 bp, Glycine max
ttttgggggtgggtgttagatttggggctgggtgggagttaagacgaacaatggtttatcacgcctgggaatgccgtgccgtgccgtgccgtccatatataaaaagaggacgagccacaaacacacggggcgcaacaagccacactggacaggcttgttccgcgggtcgggttatttcatgcagcaccactgccagggctacgatggcaactctaaccgtggtgttgctttgtgcttacttgtgagtaggttgcaccggcagcgggctaacgtgcagttggcccagggcttaccgcagggccactaacacacagatggtgggactattaaacaccttaaagagtttaatccaaagtctgtgaatacacttataaaggtcccgga

SEQ ID NO: 94531 - DNA, 202 bp, Glycine max
aaaaaaccggaaaggcaaccaaaagccccacgttaggatatatgctgatgagtacgattaggtgtgctacctgatttgggaatgaagcttccgtgtaggcccacccagctggttgggtaataacgccggcagcagcagggtacccaaacccaaacacaaggaaaaagaaaaaaatgaccacagaagtaatgggggaaccaac

SEQ ID NO: 94532 - DNA, 348 bp, Glycine max
atttgggattgtgctatcaaaccttgaagtaataaacatagttgctccagcaccaaaaaggtccttggcagccaaattgttagtcaaccatgctgttcgggcttggaaatataagcatggtttcaaggctgatgattgctcatccatatgcttgatctcgaagattagcctgctataaccctatcctgatccaaagttagtgggaacaatagacatcccttgtagcacctgcatttttcataatcttgacatgtaaatactgatattgtagatatggccatagtatggtggaatcacaaagaagaatgggatgctcttggatggttctacagagcctactttgaatca

SEQ ID NO: 94533 - DNA, 405 bp, Glycine max
tgggggggggggggggggggggggggggggggggggggggggggggggggaaggaaactaaaagcaggaaagggtgcagatgtaaagttctagttaaaaaagcgtaataagatatttttttaaaagatagaggaggcctggtctgcgaatttcatgtacaaaaactttaaggggatgtaaaacaggtagtagtagtcgtaccaacccctgcatgactactgctaacaactgtactggtcgcggcggctgccctactgaaagtaagggcaatggtgcccccacttaagcttccacaggttataaacgctaacggaccagtattgctaacgggttgccttaaagacaccaaacctggtgtcaaaggccacagctgtggtctgcaaagtttagaagatgctaaaggtg

SEQ ID NO: 94534 - DNA, 551 bp, Glycine max
ttggggggggggggggggggggaagagagaaagtaggggaagggtaggggagagtagggagagagggtgaggggatgaagggagaaggaaagggtagaaaggaaggataaaaaaaaaaaggcgaaaggaaggggaagagttagaggtgaaaaaaaacaaagcgggcaaaggcgtaagtgttgggcctaagaataataaaaatagtactaagccattagaggtggcctactcatggggcacaacccggcagaagactgtcagtggccggacttacctcagacttcagaataagtgtcgggtggcgatcattttgaagtaggagagtagacaaatatatggtggttggcgtaaagaaagataatgtgctgctgggtcgatatagtgtcggttttgttgtgctaaagaaggttgtaacaatatccggaagggctggcgtggtgcttattaggctgacgcttagctgaattactgtaggacagaatatagaagtatgcaggtggcatatacatatgacagggtgacgttgacaagtgaaaagggtatgaaggaga

SEQ ID NO: 94535 - DNA, 495 bp, Glycine max
tgggggggggggggggactaaagatagtccagctaggaggttaaacagtattcataaaggacctatggcgagagcgggcggaggatacaagagcaagttagaggcggatagcaatggcaaagcctaatggtgactgatgaagattattgaaagtgaccgaagtgtcttaactaaagccgttgacatggcttaaaaatgaacactgacgactggataacacagaaacacaataagcacggcaactagtagtgtagtggcaaattgcttgcctggtgagcgatgcaacgtgtaaccgaatgctgtctggcgccctggtaaccttggtaatggtacttagccggctgatagagcctttaacttggtggacattggttgtgcacacacatgctatacggagcgatggtaccaaccacgttaagcatatattattagataggtggctagaattcgaacgaccaaccatagccgggcgtttatggctagaagtattaatat

SEQ ID NO: 94536 - DNA, 306 bp, Glycine max
gcttgggggcggggggggaggggtaggggttttgggggacgacgtacgccgcccaactgccgtcacccgcgcctgcagaaacataattgtcgaaataaccttactcaggttattattcagcacacctttcctttacgacagttacgccggccgttaccgttactgtatcatactacctttaaagcgtatactccccggtagccttctgttacacaaccttttatttaataaaagcggactcttcataagcaaattaagcctcagcccactaagaaggtttaaaggatttggtggccccgtaagcct

SEQ ID NO: 94537 - DNA, 319 bp, Glycine max
ttggggggggggggggggggggggggggggggggggggggggggcaatccggaaaaaggccactagggggcaggccccctaatagggtatgcggtgaaaggaatagggctacgataaataataccacaaatcggggctgttaggaagtggtaatgccaccccttggaggaaaaatcataaagaggtagataaccctgcagaccttgaaatatgcccacgacaaacctgtggttggatataggttataccgtatggaatttagcctagagggtgcccgttactggtgcctacggcatgtcgatggcgggtgcgtgcgtgg

SEQ ID NO: 94538 - DNA, 402 bp, Glycine max
tgggggggggggggggggggggggggggggggggggggggggggggggggggggggggcggggggggggggggggggggggggggggggggaaatataaagggaataactttggtagaaatattagggcccacacccattttaagctttttaaaaatttttcccaaaactcccggggaaaacttcaaaaaaaaaaacccaggggacctttaataacccctgaaaccgcaaattaagttttttggagaaccccccctaaacccaagttttgttgggaaaaaaaaaaatttttcccccccccaaattccccaaaaaatgcccttttcctttttagggttaatttagcccccccttctttaatgcccccccccccctttgaaaaaaaaaaacttaccccccccaa

SEQ ID NO: 94539 - DNA, 202 bp, Glycine max
ttgggggggggggggggggggggggggggggattaaaataataagcgtggcaggtacagacgcactaatggcgatattagtagagggaaagagctcggggatatgggggcggggtaacaccatgaagataggacaccaaaatagacaaacaaaccaacgtgggaggggtgtgtgagataagggcgatttttatcgcagcaat

SEQ ID NO: 94540 - DNA, 512 bp, Glycine max
taaaattgggcttggtcttttagtggtgttcttcggagtccgaagtcttcttcttaactgtcttccaagtgtgtttatcaggcagattctgtgtgtgttgcatgtattgtttgtaggcagtggtgttcagccctgaaacggctatccattagagctgtggtgatcggagagtccctcacggcttacttggttgaagggtgagccctaaaagttagggcaagtgacttacaggcagcaagcctgccatgagctgttgagttgtgtaggccctttgctggggcacaagctagctaaagagagacagcacgattgccacaactcgatggggggccggccggaggtaggcgtaaggctacattgactaagtgccctaccgtggctaccggtgccaaacacagcccaaacgtgaagcaacgtaaacaaagagttaaagtggctatcagccggtaaggtaagacgccaacaatagccgatgcttggaaagcaacgtatagtacgagagctgcctaaaa

SEQ ID NO: 94541 - DNA, 460 bp, Glycine max
ttggggggggggggggggggggggggggggggggaataaacccaacatggggttaaggctgacgaaaaaagttacagagaagccgggctagagaaatagacgataagcgcagccgaaatagaaaacgacggttataaatggcggagttttaggattaatggggtgcacgcgcaagcgcccggagctgttatatacgggtaacagaaaaacaggatggtaaatggcgtgcggcttgattagtacccaggctagagagtataaggccggcgcacccctcaagcaacccgaaagtatattgcaaagagtttgggtgtgttacggctaagatagtgttatctgcaacagggtctagcggccacgtgttagagctgaaacgtgttgggggccgatagcccggaactatagtaagcaaagttgttgtggtaactgggggtgggcgaaggacagaagtaaatgttat

SEQ ID NO: 94542 - DNA, 471 bp, Glycine max
ggttaggcaggcactcaaactgggcggggggtgctcagtaggggttaggcccgccaacaaacgtgtaattgggacgtcaaacactaaccagtgcacgcacgcactcagtagcgcgccgccgctcaggagtgttcatggtaggttactcccgtttcttcctcccctctactctcgcattcttcatagttgcgccttcaagggcaccaactccggtgtcaacgtctgctgccatcagcagggtcacctacccggtacacaaggtcaccagcatgtccaaagtcaccagcgtcagcagcaccatcagcaacaccaccaccacggcaacaacaacaactttgggcccggtgtgtctgttaataataacctgctggtgaacttgtgtgtgtcgccactaataatgcgcaaagtgcgccaagtaaacccctaactgcacaacgcgcttaacacaaacaacaacaattacgagtctcc

SEQ ID NO: 94543 - DNA, 451 bp, Glycine max
ttgggggggggggggggggcaaaaagcctgccgtgtaaagtagaagtaaaggcttagaataagcaaaataattaacggaaaaatgcgaacgtaacatgcgagtttacattagagagaatagaaggcagaagttggagccatagtaaatacaaaagttttgcaaaatcaccgtgtggcacgggtatataaaccagatttgagaaaaattgagagagacgttgagatgctaggactgataacagaaagaaatgttatagagctgggaactaccggccggggtggctgcgccaggttagtattaatagtatcagtataaggtggcgactgggagggatagaaaaacccagagcaaccgcggtacaacatgttgcttagccaacctaccgtcgtcaactgttaaaccggtagacccgggttactactagttgcacagctagtggtatgcactaaa

SEQ ID NO: 94544 - DNA, 437 bp, Glycine max
tccaacatctcctcctcatcaccgtcttcctctggagctgtcgtccaaaatgtagtcatccggattgtgttcacagactggttcatctcaagtgtaccttccacaacggtgataagggtcttagtgtctggtttcatcaccttacatgtggtcatcatccgtgtgattctcttcgtcagcgcgagtgtaacctatagttcgcccgggtccaacaccacacacacaaaagggctccaggcggacatgcgtacaactgcatctgccacctcgctatctatctcctctaaaatcacacctggttctgctctctccgccggtaccgctgcggtggtcactactggtactgatcatatcttagtcttccaatctgcagcctcctccaactacttctccacttgcgctcctacgtcctcctctgccaatcccaactccaacct

SEQ ID NO: 94545 - DNA, 453 bp, Glycine max
ttgggggggggggggggggacgaagggaagggtaactgtagtgtagaggggtagagattcaagaaggtcacaaacgaaacggaggagatgaggaagtaaggcaaaggaaaaggagccaaaaggaaacaaaaaaaaaagcaataaggataacgcccatttcgagcaaagggatgttaataagcaggtgtatcgcaccccaccaacgggactagccgcatgagatagcagccccagctgctgctgctgctccagctgctgctgccgcagcctcgttgggctcccgagtaatacttcggcatgtcgctcaagtataaattgcacgtggaaatggctaattcaagggttcctttagtcatctttggtaattattcctcctcttcttcgtccatggcgtaaatggcctcagcatgtgtggtagacaccaatatgtctcggttacggcagctatgtctc

SEQ ID NO: 94546 - DNA, 333 bp, Glycine max
gtacacgaaagcaaagccacaacaggcgcaacacacgcagcgacgcacgacgcacgcgaaataaccgggccgtgggctgctgcatcggtagtatgctaaccgggttctagggcccgggtgtgttcaggcaaaaaacgaccagcctgggatatgaaagggcgtgctgggtatggtgtattaagtgcagctaggtggccaggggggggggtgaggggaacgggctggtgttgaagcgcgagcacgccgggtccacggtatgcgagaccaagcgcgaagcccgggggagcaaacaaagtggggtgggggggcccgaaagaagtacacatttggggt

SEQ ID NO: 94547 - DNA, 430 bp, Glycine max
gcaacaagtgtttaaaacagcggccacaccatcaatgctcccaaggtggggttcccaaaccaccaagaagtattcagcgtaactggagctcgattaaacagccggacacgtcttaagggctcgggagtccagagtcgatgcaacagcaactgtaccaacttaggtcagagggtaagaaaaagggttggtccatagtgacaaggagggcgcaccgcctgtcaaactagccccagctaaagtggttgtcgttcgccacgtcataggtcaacaaccaacatcagaaacgcatgcttttccagggccacaaattggtgacactgaacccataaccacaaaaggtcaaaccgccgcggccgcagcagcggcagcatttatactggtaccaggggtggtaccgtagctacttgtcccggaacgtgaaaagcgccct

SEQ ID NO: 94548 - DNA, 418 bp, Glycine max
cccaacaagccgacctctgcattgtccacatcgtactctccctcggattcttcgaacccgcgttcctcgtaacgctattgtttcttctcaatgcttcgatcaaaacgaagacaccgaaaaataatgacaagtgggccatcacgttcgtgctcctcacgtgcctcccctttgcgacgctccaggcattgctcatattctttgcccctttcgagaaccgagtgccggctgaaacctcggtggttctcaacgacggctacggcttcgagaccgtgctctgcgcgtacccttttctgagtagcgctctttttgctgtgtttggcgttacgtactcgacgtggttcttgttctcgtgttggagggttttgtcgcttgtcatcaacaaaggcttgaggatgaagatttacgtgctggcttggat

SEQ ID NO: 94549 - DNA, 466 bp, Glycine max
ttggggggggggggggggttagggtggggggtattttgtgcaaccgcgagtagacgtagagaagtagctcccaggcagagcggcgcccgtgtgttgaaacccgcgcgtggcgggttgctaatttggttgaggtcccttgcttattggttagcggcagccgcgtggcgtatattgtgagatatacagcttttgtggcaaaagttctgctgtggttggtggaaaggcctcataaaggtggcttgccgtagcgctggtagtgtggtaacggttggtgtagaacgctggaaacccaaagggagctgtcacttcaaggttcactggatcgatctcgctagctcatcgtagactgtggtgagacgcgtattgaaaggtaaggtatgccttcgtcagggataatcgtcgcatgcccaaaatttgcctcggatttaatggaagtcttggctactatagtttttgggtcttactg

SEQ ID NO: 94550 - DNA, 427 bp, Glycine max
ctggaatgttactagagaagtcagtagtccatccagtagaagtgaccaatctcgcaatgaagataaatgacgataacgtatattccttaaccaatgataatgtgacaatgtcaagtgtggaggagcctaagccaaaggaatgtgatagtaaaatgttaacttcaccgtctgctagtcctttcactaaatttaccaatggtaaagaacatattaaggattgtaagactgcaaaatgttctgaaaatcagcctcatgtagcattggctccaaatttggtgcaaaagacctcctggttgagttgctgtggattgtttgaagttctgtcaagttcaaatagataatttcagaaatacaagatacaagcgtcaagcgtgagtatctcaaatgatgggtcaaacttgtgaagatttagaagaattttgtgata

SEQ ID NO: 94551 - DNA, 458 bp, Glycine max
ttggggggggggggggggggggcaaagatgcaagatgcggcggactgataagagatggtaaataaatcgacgcagaaataaatcggcgagcgaggagatacgggccttgccggcttgctgagagaggggcaaaactggaaaccacagaagtgaaagtaaaagagtataaaaggtggtgaaagtggtataacgggcatttagtagggcacagatgtatctggcatctggcgagtggcgagggtgcaaaggagtgagggcaatggcatacaatggtaaataagttatactaatgtaattaccaccgtggggctattaaagggccacttaagctgatagcacctgcaggggtacaataggggctacgtggataagttggaagagcggtgggattaggccgaaagggacgcaaaccatgactacatccgcaacggaataggggatgagtataggttgggcct

SEQ ID NO: 94552 - DNA, 424 bp, Glycine max
ttgggggggggggggggggaaatacggcacaaggtacggaaaagttaactgcctagaagcttaaaacctcgggggaggatagcagaatcagaagacagactcgaaggcggagggaagctgccgttatagtgcgactacataatagaccggaaaagcccgcgagttaaacggaacggatggcgagaccaacctaatgtacctagctactggtggaattacgcggggctagcttactagtaaggtttggtaggcgtaaaagaacccgagttgttacattaccactagaagtatggcgaccctgcacgggtataactgtactgctgcctggcgtgcaggttagcgacgtgggccataaagcgccttgtaatggtatagccgacgtaccagtatcaaggtctggtaagcgcgaactggctaccatagg

SEQ ID NO: 94553 - DNA, 454 bp, Glycine max
gtttgctacgatgttggcgaagatgtaggggcaggtgagttgtgcgtggcggttagtggtaacagcaaacaataaagttattaccgttgaaattttgtttaaggaggccgaattggtatagctgccccaaatgtttatagtcggtttggtaactttggcttaaaaaggagccatttagaagcggtagaaacggcccataacgtttaattcggcgacgggttgttttgcaaatgctacactgaggttgtaaaatttagcatatgagtgggctgactaccttaaaaatgtgactggtacaagatagcgtggagccaacgaacccttgactcggtgtgcacgagccatttgaggcctcgaatcgcaaaaacggcgctattatataatggtgcacgctagtaaaccgtcacagcggtctgttaggcaacaaccaacacggaccacgagggcgcaacgt

SEQ ID NO: 94554 - DNA, 420 bp, Glycine max
tggggggggggggggggggggggggggggggggggggggggggggggggaaaaacgtaaaattgggcagggcaaaagtgcacgacaagtaagagagaaagataggaggcaggggataagcatgtacatagaaatagtgacagttagttgaaggttgctaagaacaactgtattaagttgaactacctaagggaaaaacagaaacaatgaaaagcaagggggtgaaacagaaagcaattagggcagtgggaggggagggggggtgatgtaagtcaaaccatttggagggaactgggcagaaagacctcagaacggccgagactgactaaccctggctggtggccgacgcaaaccttaaagagtgtatgtagagtgaacgtagtaccacatatattaaagccaactgtttaaggcaactaag

SEQ ID NO: 94555 - DNA, 492 bp, Glycine max
tcactcattggtggtcgggtgtctaaacgggaacgtagtagcccgaaccaaaacatgtatagtaataggcgtcgtaggccatagcgtcatgtgccaacgtaatgattatgccgtagggcagtgataactggccaccgaggcataactcgcgcaggcacaccggtcacaaccacctgctgcacagcaataacaccgtaggtaacgagcttgcccgctggcataactgtaacctgcactctcaaacaccaaggattaggcagaggctgggcgccaacgggcaaattattaacgatgatgctatacgtagtcagctttttccatagtcgcatgggagtaacaatagcaggatgccgattgtttacctgcaggcgctgcgttggagtaggcatgttattatgccgccggggcaactgccgagggtgaaccagccatacatgtcgcactagctgtggtggctgggtatttggccgcgcaactacagcagtgctgctg

SEQ ID NO: 94556 - DNA, 357 bp, Glycine max
aacaatgtccggactactagtaggggatgtgtgcatccctaccagatagagatacgtaagactaccttgaagcgtgcaatacaggattgcgtatggcggttaaatgttaggtagtcgaagaatccgatccctagctacagattacgctagctagggccggggcctgtgcattagcagctgatggtaagctaggtaagagtgcacagagtgccaccgatcggggtgggtaggcaactgcaccagcgtaggtaccagctagggctatacgcgaggcccccatgtggcacgcgccgccactaacaaggataacgataacggaacgcgctgtatttgcaaggctaatggacggtacgaaaa

SEQ ID NO: 94557 - DNA, 447 bp, Glycine max
gtgggccggaagcagagcgcagagcatggcgaggttagaaaagcggccgccggaataataataggtagatcttgggggacttaaacgatcgcaagattgaagggcaccggccaatttgcaacgcaacaccaaagaggggtgcagccttgtggttataaaaaaacgcaaaatgagggccaggctagtaaaagccgccccgtggctaggtagaataaaaaaatggggcaggcgggcgcgcgctggctcgagctagcgcgtagcgcgcgaaaccaggacacggacattggccgcgacccaacccgagctgggacgccaaggtcagttacccggaaataagtttgccaaacaaggccacgtctggcactgaaacgcagcgtgctgaaacacgcgcggacaggcgagggatagcgtggtttagggctaggggtagactttggctgggtgacg

SEQ ID NO: 94558 - DNA, 402 bp, Glycine max
ttgggggggggggggggggggggggggggggggggggggggggaaggtaaaaggtggagaaacggtaggaaaatagcaataccaatacccgtgacgataacggtacgatagcgacacaacgaggactaggggtgatcaccacctgaacaaacacaacagcatataaaagttaaaataaactgttagggaacttagcttgttatgtcggctgcgttgcaggagtgccaacacactgaagttaacaaaccacaatatagaacgtaagccaatgacaaactaaccctgagcaaaagctaaagcccaacatagcgaaaggtaagggaatatatgttggagtacatagtattggactgtaactcatattaaggttgggtacccaggcgggaatttgccagtcaaggt

SEQ ID NO: 94559 - DNA, 466 bp, Glycine max
ttgggggggggggggggggcaatagcacaataccggtaaggggtagagcgctaagctaatagaaaacctaagctgcaagctaaggctacgtaagaagcatgagcaggtgggaacatggctgtggcggttacgctagtgcgagcggggctgcggtaaggttgataagtgaaatacaatacgggagtgggcttaagcttaagacgagtaaacgaataaaaaataacaaacaaaataaccccgtaacgagtagcagtgtagacagtcagtttgtatagtaggtaaacgagccgggaggagaaactaagaagaactgtgatatacactactaggggccacgtagacagatagaggtagtatggttatggtggcaagttattagctggcttcaatggcttagctgggttagctggcttcaatggcttagctgggttagctggcaatggattcgctttcgctgctggcaagg

SEQ ID NO: 94560 - DNA, 445 bp, Glycine max
ttgggggggggggggggaccgaagacttaaggcacgagagggggtggtggtttagaactgagaggtaaagatagtaggactgcaaatgctacgacgccagtgagggggggcacaagcaggtaatgccgctgtcgagggagtgaaaaagcgcggctggtggaagctgtgaggggcagagcgtagagggccaaaactggtaaataaagcttatgcttaggcggtgggaaaaggccccctgagggtgcaaatacttggaccgccacaaattgtacagccaacttgcacaagaggtgcaactaaacagctagagttagtaaggctggtgcaacttagaacaggtgggctgcgctggtgtttgaggcacctaagcggctaacttaacccgcagaggggtttggggcacagtatggtgaagaaaagggcgtgtacaatgtgaagaggagtt

SEQ ID NO: 94561 - DNA, 297 bp, Glycine max
agtggaaccaataaaatgtagccatatggtgtggccgcgtgatagtaacaaacacatccaaagaaaccacagagaacgcacgcagagcaatcccccaccgcagggagagaaagccgcagcaagagcagacaacaaacacacacaaaaaggcacacgcgtaaggactgcggggcatgcgggaacgcggtagaaagtactaggttaacaaaaaacagtgggccatattgtgatgccacgtgatattaacaaacacagcacacagagcagaccgaagcgcagcgaaggcaacacacagac

SEQ ID NO: 94562 - DNA, 465 bp, Glycine max
tgggggggggggggggggggggggggggggattaaattatagagaggtgagaaggtagttggggcaccaactggcgagaaaattaaacagacgcgagctacggttgagatgttgcctgcaaaacacagaatggagaacctaaaaatgaaaaagaaagaaagaaagaagaattagactaagccagataaaaggaacttataacttatagcaacgaccggcgttaaaaacgcatgctaatgcaccttaaaatagagccttagactagcagaatacaataggtattggtattactgttaaataatgctctcagccgcttgagacttaggctaccgccaacgctagaggcaaccacaactatagatgcagataacccagtgccggctattaagtttaaggcccggctgttgggaagaatgacaagatttaaaaggcctaccaaaagagagtcaatgatgagaaggttga

SEQ ID NO: 94563 - DNA, 427 bp, Glycine max
gtaggcacaaactgagtaggcccggtgcgaaagtaagataggagcggaagcttggtgcttggagagcgagttagccagtaagagtggtaaccgggcgggaggtgtctgaagcatttgcggctgcaacgatccaacggccgggcgctactagggcggtactgaaggcaacgttctttagtgggtggccacttatagggatccaagcgcagacaagatagcggataacgtaataaccagatacagcagcaacgactttggcaacttgcgcaaggggccgtgctggaggcgcagctgtaatgcttattgcaaaatggaacacaaggtggcttttcgtggaggttacgaggcagcataaatagcctggagctacagcagcagcaagtactgaggcaactgcaccaacagccggtgtaattgcagtcacagt

SEQ ID NO: 94564 - DNA, 475 bp, Glycine max
gggggggggggggggggaaggtgggagggagcaggaggatcggggggtgaggggtaggaaataacaccaaagaaagtgagccacctgagctagaaagagaagagtatggaggtagtattggcgtgatatatagccagtggaaggaaaagctaaaggggcaggagacgacaagaagtaaaggtgaactacaacaccgaaacggaaacggcctatacggcctcgctgttaacaacacccactccaacttaacttggcaccgacttaacgtaaaggcgactagcggcggtgttaatgcagcgctgttaaggcgcaggcaacgaaggccggcacaagaatttattataaagttaatggcccttcgatggcccgtgcagttactagttataaaatttaactaaaggatagtaggacgagatattaggcaaggtctattaagcagctgttatattatggtaggtgctactatgacagggag

SEQ ID NO: 94565 - DNA, 467 bp, Glycine max
ataacagctgggcagcgccccagactacaatactagctgcggatagggctgctaccgtgcctggcgcaaccgtggaaattgggtgcgctaagggatgtagtaggtagctagaccctggagcattaccgccgctagcagcgccagggctacaactgcttgcgaacagggctaagccataccctgccaggacggccactacagccgtttatataggcgccggtgggacagcgtatagggagcctagcttgcttgaatagccgccgcagcctgttggtgcagcaacttcaatggggttatagccggcttatgctactacttaggaagcagtcattgacggcgggttcagagttaaccccaaagcctaggccgcggtaatgattaatgccaaagaaaccaatgttgtggcacaggcccaaaccgaccagaggcaggcaaacccaaacacgcctgtgtggccctgagccagt

SEQ ID NO: 94566 - DNA, 263 bp, Glycine max
ttgggggggggggggggggggggggggggggggggggggggggggggggggccggggggggggggggggggggggcccatggatagaaaaccgtaaaaggggttttgggagaattacccccgggattagggcatcattccccgtagagatgcaaaaagggttttccgggttaggatgggcctaaaggggaggatatccccccaaatagccgggcttggccatagcccccaaacccaaaaaggcaattttggaagggggggaaa

SEQ ID NO: 94567 - DNA, 456 bp, Glycine max
ggtgtgtgtgtgtgtgtgtgtgtgtgcaacagcctggtatctacctgtcgagtggtgtgcaggtcagttgtttggtcgacagtgtaagtcaactttgtaagggttctagtcatagtcacctgtatcgtagttaattcgcttgtattctatccagatggctgcaattctcgtcttcacgatcttattcttctcctgctgctgattatgttgtttgtgttgttgttgttccccaacaaccactgtcctcctcctcccaacagtattcagcaaggtattcccaaccctctcagtccctaccgtgcttaccgtaggccgcttcgtcgtcagcgtacaggtcatcacccgggcttgttcagtagcattctctgccaccggtgccagtatgtcgtcacctggcgcggccaacgcctctactagggcccgcaaactcggcgttcaattaggctgagccagctt

SEQ ID NO: 94568 - DNA, 479 bp, Glycine max
ttggggggggggggggggggggggggatctgccttagccattaccgccaatacggctacacgggggaataggaagctagttaatcggtgtaattacaaacgaaaaaagcgatagttgtggctttggggttttggaggaaagaatataatggaaaaatacccccctacgggccttatacataggcattcgacggtagtgtatacgtcctaataggaaaagccaaccaaccaagaattgcagataggggtagatttaaaaaagccaaaaggggcggcgggcctaggcttaacacggttgaaaggaggaaagggactaaggataaaaaaaaaacccaggaaaagcacaataccctgcgcgcgcaggaacatctgctacaggttggactaaggggtgtccttgggctaagcattgttgtaagattcttaattagcgaaaatcatgctgtgccaaccgtagtcgaggggttagttaatatattt

SEQ ID NO: 94569 - DNA, 341 bp, Glycine max
ggggggggggggggggatgcaagggagggtaggtagcgaagcgcaactagcgagggccattgtaaggaagttgggctaaaacaggtaaacccggattcggtacgacgtgaagtaacatactgagagttcaagggatcaaaatagaggtacaacagcgagttgcaaaggcagtcgggataactgaaaaataaaaacaaataaatacctgattaattatgtatgggtgcttgcctgttaaaggtagtggggcaacaggtaatactacagtagtgcaaggtaccgaaattggcgggcttctcgggcagagccgagcgctaagtgtgtcgctactggggagtggt

SEQ ID NO: 94570 - DNA, 448 bp, Glycine max
ttggggggggggggggggggaaaaggtaaaagctaaagtgagaggctaaatgaggccacgagcaacacaagaaaaaacaagcataatagtataaaagggaccggtataaagtaggatgggaaaaaaacaaacaaccctaaaatattgagaacttcacaacaaaaagaaagttaagagaaaggatacaagaacaaacaaaaccacaagaacaaaatagcaggggtttttggaaaaagtcagtaatgggctagcgattggcgtgcgcggctgccactatgaaaacaaaaaagcaatacctattaaaagtggctagggcagggcacagcagcagtaaacaagatgaggggcgggggtgggaatacacgcataggcggaagggattgtaggatttgtttggtaaatcaataattatattactgccggtccgggtggtaacggcttatctttc

SEQ ID NO: 94571 - DNA, 214 bp, Glycine max
agggagtattaaattattatggatagtaaactgaagaatttattaattgtgatagattaggaggtgtattagacatatgttgaatagattaaaaaatatagagcggcgacatattagacacattatattaatagtgacgggcttttagcacttaatgacagcgaaagaagctaggggctagcacgtgtggacagaacaccgcggtagctattaa

SEQ ID NO: 94572 - DNA, 428 bp, Glycine max
gtacgggtattttgtggggtgtagtgtgaatagtagacgttgtacacctgacgtggttgaggagtataaataagcgtgcatacgtaacaagtgcataacaataggcacagagccaacagtaccaaaggcagtaacctgtgccaactgctgtcaccgaagccgattactagcagggtgtgcagaagcttgttatctcagtaaagggtttcccgtatgaacagcggcccacagcaagggccaatgctggtaaatagtaaaacgacccgcaattcatacgtgcgcggcccacttaggatggtgctgtactacaccggcaaatgagagaataaccgtttgttaaagccgggccggtgggatatgccaattagtcgtatgcaacagcctaaccaaaacaaccgcataaggcaggggcacttgggtaaattgag

SEQ ID NO: 94573 - DNA, 494 bp, Glycine max
ttgggggggggggggggggggggaaaatatggtcaagtagcattgttgcacactgagggtggcaacaagtactctataagtgcctacacggcttagagctagatagccatgaagactaaaaagctaaaagcgagcaactagaccaaacccaaaaacgcaagcagatatagtggagccagtaaaaattaaaccctaaacgtgaacgtggacaattagaagtaagaagagttaaagtagggggcaaccttttaagtggttaaaataaacgaacccggtgctacgaataccaatggaagtacaagttgtagatatggtgttagtagtacagaatgtagtaaagcagtgcagcgtaactgccgaatcaacaaggttattaagcttattaaatttgtgctacaaggcccactttgtggcacagggcggccgtataaaggttacccactagttaaaggggggcgatgtaggcctaaattatgtcactaaccctagtggtg

SEQ ID NO: 94574 - DNA, 421 bp, Glycine max
tcgcttttattataatcccagttcatcatttcaggagtaatttcccgtaccagttcaagtgccctaactgccttgtgcccacacgctggcgggggcgcctccacaaacagggctgcaaccctacaccgggcgatgagaaccacggctggcacaacacgcatgccgtgccacggcgccagcgctggcacatgaaccatcacccgtatcgtgggtagagcggccagttcaatgcgcaaaagctgaacctgggctggaattacaggcgggtagggagtaaataccaggcaatcggcggagcgcgcgctgtgtgcgtggggggagcgcggggaaggagttgggggacggcgtaagcgaaggcgcgagctaggtgagtggcgagtcgagcagtcgagtaagtaacggaaacaaaacggcacgaggg

SEQ ID NO: 94575 - DNA, 443 bp, Glycine max
tgggggggggggggggggaaagatgtaatggggtgggaatggcaggcagatcagtagatcagataacagacaagctagatataaggataggcataatgaaaaaccagaaggaaaatatagaaaaaacatacacactatatatagaataatcggtaagttgcgggcagaaagcaaataagtgccggaactaaacttggactaggggtatacggtccagttaatagagcaaacatcgcatttgtcgttggacgtgtaactatagttataatgttacattacgtatgtggtgtaactaatgttggagacgataaattgtgctttggtactaaagttggtgttcttataaaaataactatgtgtttacaccttactggctttacaggtccagttgcatttcccggcagaagtcccgtcgtccagtttcggcgccgcccctatcgaaa

SEQ ID NO: 94576 - DNA, 471 bp, Glycine max
ttgggggggggggggggcccacgcaactagactggtgttaggacagctaaatggtagataggtggaaggcaggcacggagttcacaaaggcgaccaatagcgacaacagttagcgcacattataggtggaccaacgccgccgcaatgagcgctgcggaaattgtttggtaagataggacccgtgctttggcaccgtgtaaccccgtgaagggttgggactaggctaataatagttggtaggcggccttgtgtagtactgggaggctggatatagacaaagcatatgctgacacgggcgactagggtagctagccgcccagtactttgtttgtgaactgggcgcgtaacaagcgtacaacccgtgttgggctgacataacgccggttgaatttatgcaattaacgcgctatttttgccgacacggcccgtgaagcccgcttggttgcgcacaatttgtacgacaattagctt

SEQ ID NO: 94577 - DNA, 443 bp, Glycine max
ctgcttgggggggggggggggggggaacggtaagattggagtgataaacgagaggagaaaatgaattgttaagtaaattttaataatagcggtaaaggaatagggggcgatataaaggcgggtgaagggcgtagacaaatggccagaggggcggggaatacgggtggcagttggcaagccgccaagtgggtgggcaggtttgattaaagacggtggctggttaactgaataggtgaggtggtaggggtaagtataaaggaaggaaacacaaagaaaaaaacaaaatatgagaaggctgagcgatgaaattttgactgatgaggttggagtgaagcagtaaaggccgccgaggtgggccgcgctgtactggtgcaagaggggatgggaaggggttgagggtagggaagtggggcagagggcgccaggagttggcaaaggcaaca

SEQ ID NO: 94578 - DNA, 541 bp, Glycine max
gcttggggggggggggggggggggaaattttaaaaagaaaggctgtagaggttcggagtgacctaaacctaatagcagtataccgaagccgagaaattaattgctaagaggcggattagcaatgacgtaccagtaagtggtacaagacgttgagagacgggaaaatattgctagataggcttccgggacccgggaaggggttagatgtagaatactcgataggcacgttagtgattactcgagggcacaggacaatattggccataacaccctacaccaattgacaaaaggttttagttgctggttagtggtggacctgctggtcatagtggctagcgggcttgcccataacacccgacaccagtttacaaaaggttttagtttctggttagtagtgcacctgacggtcatagtgcctagcgtagatgttcgagatgtggtgcaaagagttttcaatcagcccagttaaggcggggtgttaagtagctgtgtgagtaaggtacaagaagcaaggtggggagaggtagtgaagctaagtgtc

SEQ ID NO: 94579 - DNA, 513 bp, Glycine max
ttgggggggggggggggggcctctcgctgtgagcctgagcaagagctgtgaaactggtgggaggccgtgtgaagtctattagggggaaacgcgaaatgaggtagttgaagttaaggacaggcactgaattagatttgttgtgcagcagcaggtggtccaccttatacgactaagagtaacggtaatacagggtggcggaataaacggataagcggggtgcagggtgttgggcggtttacgcactatattaagcggatttagtggaagtaggcaacttgtaaacctagtaaacaacataggggccgtatgctgcaattgaggcataagcccaagccgagtcctattcccgcgtcacaatactgtggcagtatgtgcaactaactttggtggcattgcaacaggccacaacgacatttgcgtaaggggagtaccacgcatacccgtaaaaggtataaccggcggcccgttattaggtccctagagggcctctaaggcggctaacgaacggcgcgt

SEQ ID NO: 94580 - DNA, 503 bp, Glycine max
agaacgagcaccggaaggtacagcacgaggagccacaccagtttaaccggccaaactctgtattactagccgcgcagtcgaggtgggtagagcctaaccccaaacacaggaggcacggataaaaccctacactgtaaatgtgttcagtatacattgcgcattcttatagagagccggcaacggcacagaggtgtgttgaccaactgatacacactttgaatgggtatgcagctacacaggcaaaagcaataacgtagaataaagggaacgaaggccaagggactgctggaatgccatacccagatagtagcacgtcgaaaccacaggaatggctacaaggggagccactagtacacaggctgctgctaatggagaatatgtataggcttatgatgacaaggacaggtaggtagggggggggtgggtgctacggcgggcgaagggcaggggcttggggattaagaacagggacactgacggcgggcaggcctgagagttgcgcg

SEQ ID NO: 94581 - DNA, 453 bp, Glycine max
acccccacaacagcctgatagtagggacaaacaaatggctgaatactacagtacctaacgcgccaaggctaaggcacttagtggagttttggaacaagccgttaaagttattgaagttgccattagtatttttggtattgcgcaacttattaaagcgtgcgcataatgatgatactgcgctgcagacgctgatggcggctgcgaggggtcacggtccaaagctggctgggcacgccccggctgcgttgtggcacccgctgattgctgcacagcattatgatacggctgctttgaatcatgagtttagtgctaatatggagctgccaatggcgtgtaacactaacaataatttaggtccacgcaacctaggcacctcgatgttcctgaaattttaggccattgggccctcgaacaataaccgtactacgctggaactacagaaaccaaagcgca

SEQ ID NO: 94582 - DNA, 401 bp, Glycine max
acagcaagtcccaaaacggcagcaacagccttccggtccggacaatgcccccaaacccgattagcacaacaaacaacaacctgcgttataacataataattatacagcataaaacctggtacactatttgcaacacaagaccccgcaagcttagtttcctgaggcaccaccgtaagagtgggaaccagcatcgacggagttacgggtgaaagtttaaacggtaactagttaggctgctgaagatggcccggcgtacgccggtgttataaataaacaacggctaacagagatgtttgactaggagttattaaggaccattacagaatggacaaaattgcaacaactgacttcactaaggttacaactacctgttgcaaacacttcgtccggtaattatactg

SEQ ID NO: 94583 - DNA, 471 bp, Glycine max
ttgggggggggggggggggggggggggggggggacagcaaacaaactagagggaagacacgagggcaatgcgggacacgagagcaccccacaattcaatattgcaaagatggggaaaaaaaaccaaaagtaacccaaaaaaaagaaaaatataccacagagagcctcagcctatacgaataagaatatggaacaactacttggccgtgttgtactactgcgtgtaaaagttgccttgccaataactgttcccatagtcgtagtagtaggtgttgtggcactgcgccggcaattcctcctgttggtaccacttgctggtgccaaggctgtcctgactggtggtaccggggtgaacggagtgccgttgaaggccgccagaagctgacccacgagagtggctaatggtgggcgggcgccacaattatgcataatttaacgaggactactaagccagctggcaatgggcccaggg

SEQ ID NO: 94584 - DNA, 388 bp, Glycine max
ttggggggggggggggggggggggggggggggggggggggggggggggggggggggggggggagacctaaatgaaataggatagggtattacggataagcagataagcccggaagagtaggatgaggtatgaacccgattaggagccatgaaggcccaaaaaatggataggggttcggcttaatataacaaaaaacaaagaaacaactaactgaccagtggcctaggatgaaaaggccacttaccccgagaggataaagagggtataagggtacaaaaggtacgaaccccaaactgatatgataggctacccctagagacctaaggtaaatactaatgccgcacccacggcaaccacccatttcaggggtactaccaagggtaataaa

SEQ ID NO: 94585 - DNA, 478 bp, Glycine max
ttgggggggggggggggcgtgttgcgttttaggtgttgtttgggtttgctgttgagtgggggtgctagtttggtgagattgtgtatcctgttgggtatcggttgggttttggggcgcggtttatgtaagtgtgggattttgctgacgggttgtggcgggtggggtgtgcgctaacgtgtgagttatagtgtgagtttgatgttgagtgtgagtttgccttgtgtcaggcgcagagtgccgatgcgaggtttggtgagtagtgattatatgcttagcattagctgtttggttatcgatttgtatgtgggttgtagtagccctagacgtacactcttggtgtggccaagcactagaggtagtgagcagatgatcacactcacattgcgtgtgacgagcattaaggcagtggcagtcatggtgagagtgattagcacaaccacaatggctgcataggtgagaggggtttttggtatgggta

SEQ ID NO: 94586 - DNA, 495 bp, Glycine max
gtggtgctgagtaaagctttgattagagtggagtagggccggcctattaaaaacaggtaataccaatggctaaacttgccgcggtggcacaccgggcgacaaaatagacattataggcttaaaggctcgctagctgggctaccaggcgccacgggccaacatgtccagaggctgaaaaaactaaggcaaaagttacacggagggcgcagcaacttgtaaacacaaccaccaccaaataagagggagccgcagcacggcacccaaatttgttggaaaggataccaactaccggtgcaacaacagctactagatagttggagctacaccagagggttacttatggtgttactaaggggccgctcgcagccgaaggcccagaacccgtagcgtagggtacaactgccacgagggccgatggagggaaccaagaaccagaaccggagtaggaagaatcaaacgcctgagagccgctcgataaaaagagtagtagtggag

SEQ ID NO: 94587 - DNA, 449 bp, Glycine max
ttggggggggggggggggggtggggcagagaggggcggcgggggaggagggggaggatgggagcaggcggtttgggtatgaagcgatgactgacacggttacgcaagcctatcggacacaaagtagctatagatgtagcagcttccaaaagtcgaagcagtaacgtacacagagcgaatagcggacttatagaagcctatagagtatggggaggtgttgttgtgattagagtgtcctaagcaacggactaggaaggcgagaggacgccctgccagtagtagcggtaccaattgcagtagcaatacaaaagcggcagttgtgatttatacccacagaccattatctagggctgctacgattaatgccaggcctacgaggaatgcagttttaaagatagcgtgcttgttgaccttggtgggcgtgggtatcttcgcttagtgactggttgc

SEQ ID NO: 94588 - DNA, 431 bp, Glycine max
cttaacaactaacttcaacgtctgcgcgtcctcaccacatgtcttcttccctgcggatccggctagtgattccacatccatatcccgcagccttccaaccgcggccaatagaactagccaaggccgtatttaccctgttacgggtggccgtagttgaagcctagcatttagccggtgcagtgcaacaacaaggtagtgtaaacgttttcggttagagggccgataaccaagccatatggtgcgcacttgcaaacgggttactggtttaataagcaaagccacccgctaataaaagcccagttgggagcggtaaaaatagtacacccactctactagagtgatacttatagcaaatagtggcattaaaacctaacgctgcgagtgcggcgagtgctgtgaacactgcaatgacactacctatcaatatcaag

SEQ ID NO: 94589 - DNA, 545 bp, Glycine max
ttgggggggggggggggcaaacaccaaatccgtttagaagaacgaggaacggagagggggggcgtttccaattataaagtagttggcttattgttgaaaagataagtgataataaagttgaactcatagatataagcagacaaaagtaaaagtgccacgacagaagctgagtagtgagaggagcgcatcagtggggggttagtatagggcgttgtgcaagacaaggcagataacgataatagagctgatagctggtgtagaaggggtgtaacattggatttacgcaacgacccttgcgaagtatacagcataaactcactaagggtttaacagagtttaccggggcaccgagggactataacacaagcacaacaggagtgctggggaaactggaagagcaagcagaagcaacaatgcaaagaaaaatgacaagcacctacaaaagcgctagtgaggtagcattttgtagtatgtgaactacagggggttagaaactactagagggcgatttgtataagtgaaaagcaatgctggggtagtaagta

SEQ ID NO: 94590 - DNA, 354 bp, Glycine max
ctgcacaggccaaacaagaactacctctagcgcgtccgggctctccagggcaactgccttggctaccccaggaagagcaggggccacaaaaaaacacgccccccgccgaactggcagtggccacctgccacccaacacaggaagcgctacaaatataacgggttaggcccggataaaataggttaccatcttagggttttctactagctgaggcaccggtggcagcacggcataaagccccagctgaggcggacgatgccccggccctactagtaaagcgccctgctatacggggataacgataacacattcaactacgccggcattgtccccccgtggccacttagcccgggg

SEQ ID NO: 94591 - DNA, 312 bp, Glycine max
ttttgtgtggggggctcggtaggtgcggggttgcggcaacgtgggtttgacttaagccttattcagtcgggcatttcccggtatacgtgttcgcacacctggcagcaaatttgtatgcataatagcaaagcaaaggggcctttggtgcgtaaccagtcaacttaaccctaaccctagttgctaatattattaccgtaggctgcacgggcaccaaagtttgcaccacaatacatacaactgtatgcagccgcttgggccacaacgtggcacagtgatataacaacttagacggggcttattagcccggctgtg

SEQ ID NO: 94592 - DNA, 372 bp, Glycine max
ttggggggggggggggggggggggggggggggggggggggggggcaaccaatgcagggtgagaagagcaactgaactgagagaacttgataaacaaggaaactgagatttacgaatcctgatgagtgagcatataaaaacctacatgagaaaggaatctgagatacttgtaaagactttaaaaaaagaccgagataggcagaggtcatgcgttaatggcatgcttaaagcaaccgggccagctcgctattagcttaggattagcgaacgccagcgaactaatagtagagggtgccagcataccacttacgagctaaggttagaatgagacctataagaaactgccaatatattaggcatgcgtcaaataaca

SEQ ID NO: 94593 - DNA, 477 bp, Glycine max
ttggggggggggggggggggggggggaatgaaacacaaaggagtagagaagagtatagaaaggtaacaaagacagtaataagagaagaaagaaaagaaatggtgaatggcgagaaggaagtaaagagtggaggaatgaccaaaaggggcagcgaagtgggtaggaggtttttgctagggcgagaatgagtggtagtgggcgaaactatagttagtagctctctaaccggcataatatctagaacaaagggtaggccgatggcacgaccaggaacataactgctaggaagcgttggttaactatgtgtaattaatgggacgacggtggtaagccgagtggcttggcaccgaggagcggctggtagagactaagtaacctggcaaattatagcgttgtgggtggccgtagatgtatgggtaataagcgtagttagcacttgacaaagaaggcaacttctgctaataagggggcccgtat

SEQ ID NO: 94594 - DNA, 486 bp, Glycine max
ttgggggggggggggggggtatagagcgaaaaggcgaggatgtgtgagaagggcacaggaggatagagggtgactagaaagtggcacacaatagggggggggcgggtagtagagaaaagagagagcggtgcaaacaatatagataacgatataaaaaaaacccccaaaggtagaaaaaaagatacaaaaaaaaaaatacaaggcacgaacacccaaccaaatagacacaaaaggggactaagtacagaagaacaacttacgacgacgctaaaacgtttggcttaacacgcggccaattttggggacggaactaccgattggtgtttttggcacgcctggtattatggtttagcgcaacgtacccgtagtgtgcttaaacgcgttagagctactacgtggtaacaattgcttagggttattttgtggcacagtaaccggcagccacagtagcttagcttgcaacgtaaaatgtgttggtataagctg

SEQ ID NO: 94595 - DNA, 419 bp, Glycine max
ttggggggggggggggggctagcatagcatgaacgggagtgactaacgattaaattagatactaggaggagtacggaaggaaggtaaataactagaccaaccggcagccgagccaccggggtgctactgcagcaagttgctttagaaataacagtgtcagattggaaagagtaaaataaaactctaaggagaatatttgggtatggtactgctcatgggagagtgccggcaaggtcgggggccataacagtacaatggcggcagaaaagtcgagagcgaagtagtcagggttgagctgctggtggcaggaggcaacgcacttatgttgggtgctataagtatggcggtgaaagggcctatagtggctggcaatttgctcgtcgccagagatgttggtaacggtactcacggcgagatta

SEQ ID NO: 94596 - DNA, 469 bp, Glycine max
cgctggataacgagcgggtccactgagcctctaacaactacgtgcagcggagcacaggtggctactcccgcaccgctgcccacgattcttactaattggtgaggcgttcgggcataaacgtgatgtctttacataacctgtcttctggcccgggtaacctgaactacccggagcgcagggattcgcggtcgcgatcaaccccgccttccaacacattacggttaaaaccgaggcgggagccgaactttattaattaaccgcggatgtaatgcaaagggtactctactaacaccgtgcggcttcaccactcactgccaaccaacggcccgccttgtacccggtgtaaggtagatgcccgcaagcaccatgtcatggataaagaggggcaccgtaggtgccgccagcggctttatactctgcggacaaagcagttaacaagtaatgcctgtgctaatttacgttagaaata

SEQ ID NO: 94597 - DNA, 334 bp, Glycine max
tggggggggggggggggggggggggggggggggggggggggggggggggggggacgaaaaaaatgtataggaggaagtgtactgcggtggacgatgaacataacagggccccccaaaaacttgcaggtacctcggtaaaatgcatcaggggttgaaacgtgatagggaagctttgttaaagatggccaaaagcaactaattgattagaatgctaataaaagtaatcccgcttattaacccaaaaacccggccggtggggttatcggctttgctcccagccattagggggcccccaaaaagcgttgggcctttcggaattttgcggatggggttt

SEQ ID NO: 94598 - DNA, 432 bp, Glycine max
gtaaaccccgtaacacagtaggtaaagaagctaagccgcccttactgacgggttccgcgaaggcacctgctagggcagctaccagagggctggacgcggacacggccgcaggtgaagatgatgggcagcccctgaagtggtaacttgccatcagatcggttgagggtattgcagaagcagcggctgttcacgcggttaagcagttaaacaaagcaacgggctggttttgtaacactgctgtaccggtaaatgttgtgtttaaaccaaaccaagcaatacttgcgcaagcggtagacacggcaaatgtggctaagcaagcctgtattagtgcgattgtaacgattgccaccactgcgtacggtgacgaatggacggcttgtgattacaaatactcgcttggtgcgcatcccttacattatgtagtaatgattg

SEQ ID NO: 94599 - DNA, 449 bp, Glycine max
ctcgctgttggggttagggtgtagggttggtaacgatggtacggtgtactatattatagtattgggctactacttgttagaagaggttaaggtagtatttgtggggtaagaggtttggaggagtctgggcaggtcggcagggggggaaggtgggattgtaaggggaagaacaagtacgggggcgacggggcagggcggcgacgaacaggaaggaatgaggtacaggtacggaggcttactgggcagggtgggggggggggggaaggaccgggctaacgaaaatttaaatttaaattttgacattggcccaagacgggcacacggcgcggcaaaaacaagtccagtggcgtgtcggggagggtacagaacaaacgtggacaggtacaggtacggcggcatctgggcaggtcggggtggtgaaggacagggctcacgagaccgcaactttg

SEQ ID NO: 94600 - DNA, 465 bp, Glycine max
tggggggggggggggggataaaggatcttggtaaaagaaggacaaaggtaagaacgatattacctgttaaaagcagggcccagcgattagacaaaagcataacatgaaaatgaagatatgattacaagaccaggggtgaggtatagaaaaacatgaactgggcggcggaccacggggggggggaagggttgctaacgatgcgtaaccaattaaattgagcgatatggtagctaaaagagaaaatgcagcagattaaatattacaagctgagtaaaatgtaagcttatgagggagtgcaatccacaaccaaccctctttaatccgccacacaccaatagtaatgtggacaatgacatttcacggttttatagggttaggttatgggcagtggttaagacagatgcaactaaacctacaaccagagcgtagcaaactatagctataaaggacaggaacgggtgtggg

SEQ ID NO: 94601 - DNA, 495 bp, Glycine max
ttgggggggggggggggatagggatgagcaaaagagtagatatgaattaatacgaaaggagccggtaacattggagatagtaaaacaaaatgatagcatgttggcgttggcagtacgtgggcgcattactcgaagataattgaaaaatggggccaacagaaatacctaataaaaagttaaataaaggcaactattacaaccttagcggactgatactaacgatgtgtttaataaacagttgttgagtacatttatgcgctgtggtaggaattggcggcagtgtatgttgaacttaagttataagccgcaaaagttgttggcacggcgaaaacatacctataaaactgtgtaggccacggcacaatagcttacacaagcttattttggttagcaacatggcctgacataacacaaaaatagccccgctactgctgggcagtttggttggcgtatttgtaaagaggtttgttaacagagaactgaggcccctagaaa

SEQ ID NO: 94602 - DNA, 474 bp, Glycine max
aatacatgataagttatatttcatttcaatagcacaacactaattaaactagtctttttcaaattatcaaaacatggtataagtatctcaattgacagtgaaaaaatctaaagcaatcataacttccaactaattgccttttccaagcattaacaagcttagacattggagttttccgatccaagagggctagtgtcttcaaggtactagttaagcttcagccatgcacctttgatattttattagcaaatattgctaccttgacataaatattgtctgatagattgttcaagaacttgaaataggcatgtctccaagaaagcttgaataagattgagccaaacaccacccaaaagcttataacaaatccaaatgccatactcatgtaaaattcacgactgaaaagtgaaaattcgtcctcttgaacttcaacatttggtttttgtgtaggtctcccatcaatacaaaatttct

SEQ ID NO: 94603 - DNA, 275 bp, Glycine max
gaaataaaaaaattcccaagcaaaaaattttttttggggctggcataaacttggccaacaattcacaatcttggtaaggcccgccatgattaagtgggaatatatttccccatttctctggattacagcttatggcatggccctctttgggggttttggggggccccttccccaaggggaagccagcctctgggggttccacaaaaaatttcccaaagggttctaaagtagtaaagttcatggcatgccctcggcttttatgcctttgggaaagg

SEQ ID NO: 94604 - DNA, 102 bp, Glycine max
tttttttttttttttttttttttttttttttttttttttttttttttttttttttttttttttttttttttttttttttttttttattttttttttattttt

SEQ ID NO: 94605 - DNA, 164 bp, Glycine max
acacatagtgtaccatttatatcatttattgtacaagtaattaatgtttgagtaaccacatttattctatttcatccattcgtggaagtttgtataacactacagactgggttagctggtcctacccctggctgaaaagagatacttatgaggcaaaatttaca

SEQ ID NO: 94606 - DNA, 433 bp, Glycine max
aacatgaccttaagcagcagttattattacctcaaataaaacaaagacataacaccatccgtttcaaatacatgaaaaagttccaaaactaacttcaataactaatgtgtaaccaaagacctctaacaaatagcaacataaaagccagcccttcgtttggtaatgcattattcacccttattatttgctatctgcagcaactgcccgaactagaggcttcattctttgccatctgcagcccgaagggaaccaagttgaactggggcttgagtctgaaccactttggatgatccatagcctgataaatcaacaccttctgccttctctttctcaagctgctctttgatccaaaagtatgtaattctcagcccatccttcaacttcatagttggagcccagccaagtttctctttgattaatgtattgtctgaat

SEQ ID NO: 94607 - DNA, 216 bp, Glycine max
gaaaaggcaactcccaagccaataaaaaaattcccccttttaaaccgttcttgggtttgggggttgcccaataaacctttggcaaaaaaaccgattttgatttgcaaaaacaaaggggtttctaaagggcaaaacaaaactgaaaaataaatttttggaaaagccccggggattttaaacaacccaaaatgccttttcagccggatcaagccccaa

SEQ ID NO: 94608 - DNA, 422 bp, Glycine max
aatccacatttatatatagtcccgagctacaccaaacctcaatctaaacaaaacatacatcaatgtgaagaagggcgttacatactccctggccctcgtctcttctctgaactatttaatccaagtccataaaatggagcaaatcaatactagctttcaatttagaatcaaacattgaaactaaattgacattgaaaaataacctactcgtttctttcaatataagatatggcacaaccatgaataaacactaggcatgtacgtaaccgctaagaaatgtggagcagcttatgtatgggaggcacattcaaccttgtgagattcaaggacatgccttgtggcttccatggctacctgtccactgacatagtgctggcgacacacaggcatgtagacatcaacaccaccaatcagctcaatct

SEQ ID NO: 94609 - DNA, 363 bp, Glycine max
gaaaaagcctgttaagatgtccgtgcctcaatttggagggcgggaacacaagcccgcgggagtgcctactgactactctatggtgttcaaccaatctcgtgaaaaaaagacgactcagatgaatgatttgactgaagtcaaacgtctaagtcttgggaatgaaagggatgccctaaaacccaatcatcgtcgtgggcatggtcaaggacatgggcatgggcatgggcatgggcatggacatggacatggacatgggcatgggcttgatcatgaagatccttccgttatgaaaaagcctgttaagatgtccgtgcctcaatttggagggtgggaacacatgcccgcgggagtgcctactgacta

SEQ ID NO: 94610 - DNA, 270 bp, Glycine max
aaaaaccggaaggacccaccgggggctatagggccctattggggaaaaggacccggaaccgggtccgggccaaaacaaacaaggccccaagcccccgcttgaattatgggccctgaaggggttccggggaaaaaaaagaaaattggggaaaaaagaatgggaaaccaaaggccgggcaattagaccattggaccccaaccccccaaatcggggccctatttccaaggtttttcccgggtaaacccccgggttttgaacccgggaaaaagg

SEQ ID NO: 94611 - DNA, 511 bp, Glycine max
  unsure (1)..(511): unsure at all n locations
aaaaaaaattaacattaaatatattttacagaccaaaatgacaacctttgtttatttgaaccaggaaagtagtttaaaaactttgaaatataaaattacctagaatagtggagacaatcgatatcttatcccatttgtggtcttattatgctaaatttgccttgaaggagccttgacaaatggactgcaaataaaaaagttttattgtctttctatccgttattccattgtttagtctttataacgtcacatgctactttttagatgaaagtacaaaaaaaaaagtaaaaaagcttcactagtggaatcactgatgtgaaaactttcgctaagaatgtctattttttttattggcttttcatctaggattatcaaatttcctatctagattggcttatggctctgtgtgctctaatttcatatgctcatctgatcttcacanaaatacgctcactgacattgttcacgatgatttaatagaggcgcatatattgatatcttttattttctg

SEQ ID NO: 94612 - DNA, 254 bp, Glycine max
attcaaaaaccaggaggaaatagtaacagtttaacccaaaaccccataaaaattcagggaaccgggccccgaaataattaaaaaggcaaaaaccgatgaattcaaataaataacccgaagaaggcccgggcttttttttaaccaaagaaggggaaagaaatgaataaacaaaaaaatggggtttccatggcaaccaggggggggggggggatagcccctgggatctggccccgttaaaggggggagccccgaaa

SEQ ID NO: 94613 - DNA, 232 bp, Glycine max
aggaaccaaaattaaaaaatcttatcccttggaaggaatgggccccactttcagtattggcccggcctttaaaaagcttgatttgcaaatgaaaggggcccggcaaaatgctaatggggccaaaacaatgggcttgggcctaaccgaaaatgggatgccacctttatcactcccaatgaaaagggccccataccccgggaaactggtcttaacccccaatgaacccagggga

SEQ ID NO: 94614 - DNA, 237 bp, Glycine max
agggaccaaaattaaagaatcttatccccaggaagaaaggggcccccctttcagaatgggcccggcctttaaaaagccagattagccaaagaaaggggcccggcaacatgccaatggggcccaaacaaggggcctgggcctaaccgaaaaggggttgccacctttatcactcccaaagaaaagggccccatacccggggaaaccggtcataaccccccaggaaccccggggaaaccg

SEQ ID NO: 94615 - DNA, 388 bp, Glycine max
gcgaagaaagagtgagttgcagttagagtctccaatccaatccatgtcgttgctgctactccctcaacctccgacacccctctcaacggtcaccttctccgccgccgcacgcgcacccttcgccgccgtcacgcctccgcgcccgagaacgctaactccgaaacccgcactctccctctctgccccaataacaacaacagcacccaataatgcaatccctccgaagaaggtcctggttcccatcggattgggcaccgaagaaatggaagccgttatcatgattcacgtcctgcgccgcgccggcgccgacgtcaccgttgcctccgtggagccgcagctccaagtagaagccgtcggaggcaccaaactggtcgccgataccgacatt

SEQ ID NO: 94616 - DNA, 368 bp, Glycine max
caacaaaaattcgacatgatttttttttttggaaagcattctgtgatacaagatgatatttggctaattataattacattatgacatattgcgttttggacattttcttacatcctatcaggggaagtttggtttttatattagaaagttcaatctattgttaactagagtctacagtgtgttaactatgagaggatccattctctaaatgatgaaaatcatcaagttcctgtctcagtcaatagcaatggcattcccaggtcgacatcccctccagaaatcaaactcagaagattgattgttaccatccaagtgtgtgaaacgaatgccaaaaggggatatgaatcgatacagagctaatcacatga

SEQ ID NO: 94617 - DNA, 513 bp, Glycine max
aaaaatacattaataagacatcttagaacatgactagcatatgattcggaaaggaatgacaacaggcaaactaacatagactccagaaatcataccttccaggaaatatacaagaaccatgacctgtaaaaattataatacaataaatatcagttatattaaaatgctaagtaattataaatagaaaattacttagcattttaatataactgatatttattgtattataatgctaagtaattttaaatagaaaattcattatgcaagacctattttaatgtataacaaatctgagccaatagaaaatggacaagaaagaaaaaagctgcaaaatttgaagagattttttcatactgactaattaattatgtcaaaaggatgctaaggaaatgaaattcaaaaagtgttcatgtaacatttcaaaatacattaatataatcatccataattttaacaaatatacttctgaaacaaactgataagccagatttgaataccactaatctcatactt

SEQ ID NO: 94618 - DNA, 447 bp, Glycine max
caaaaaaagattatgaaattttctctccaatgaaagtcacgatcctctcgtccatattcattctctatctctctcttcacctcctgtgtttttttctctctccttccttctcccttttttcaatctttcaatcaccaattctaatcactcgtagatcctctctgtttctcattctggattaatttgcattggcaaatctctacattatggatgaaatggcggattcagaaatggatcaacagatagaagattatcaacattctgaacccgatatcctttcgagaggaaccactagcatctcgcagcctaataataaccatgcaatggtgggagaatctgagaacacaactaatgctgattctcactttctgccagatgcttatgacaatgctagggtgtatggggttccacaatataatggtattcagcctccacataatcttgata

SEQ ID NO: 94619 - DNA, 290 bp, Glycine max
ataggaaacgcaatctgtcaaagatttacctaattgtgttgacactaataacatgattacagaaagaagtggccagttgcaaaatattgtagattattgggtcacactactatgatttaaccaaaaacatacaaacacttataattctgttatgtcataagtcggacaattactaggtaacaatactattgtatttaacactattttggaatgaggcatgtaacttatttacaatcacagaggtttgagctgaattgattgctattattcccaagagttggtctaacttt

SEQ ID NO: 94620 - DNA, 256 bp, Glycine max
gcgcccaccggggaccttttttcattccaaaataattttatttcataccccgggggcaagactgaacaacacctaggttttaagcgaaaaattgaaaatatgggcccttgtgaccattccccaaagctgaaaaaaggggattccaatttagcttccatccctttgagcaagctttgccctcaaaatttttaaaaggttgggggggggacaatcggaatattccaaggggggaaggacccctctccgggccaaattt

SEQ ID NO: 94621 - DNA, 296 bp, Glycine max
ggggaaaaaaaaccttatttattggagtctggtggggggggccctcaaaggggtcttgaacattttttgtaattaccggaccctcaaatctcaatggtaaaaggggggataaataattgaataaaccggccaataattttatctggaatggcaaaccctggccgaatcacccctggactgggaacagttacttttccttggcctacaggggcttcccaaactggaacaatttaaccacccgtttttttttttttgggacaattaaccccatgccgcttttttaccggcccaatttt

SEQ ID NO: 94622 - DNA, 351 bp, Glycine max
agcctctgatgctcgtttccctcattattttcctttccacaacagaatacaatacacataaacataaaaataaacaaattgttaatcagagaccagaaaaagaaagaaatagaaaaaaagaaccacgcaaaatgaaaaataatgttgtaactcctcagctctcaccagtctcttcgtctcttttgagtcttttatctccatctacatgcacacatgcacatgcagtacttaactaatagtagtaatttctctctatgagtatcaccacaaccaattcacctcaacacacaacagaaacacaatggttggatttgggttacgttgtctttgaatattctaaccccaccactg

SEQ ID NO: 94623 - DNA, 423 bp, Glycine max
gaaaaagaaccaaccatctaagtagcattcaatgaacaaagcaacaaacttcaacgatagttcagtaatagttcgttcaatgattttacaatccgaatcaatcaatcacttcatagattgaatgacccctgtagttagtatacatagtgataaagtaatatattatataaaaatagcataccaattcttcttccttgctggctgaataaaatccaggttttccaactggctctgacaaaatagagacagggaaaacctgatgactgttgaggctgctcaaatcatggctaattgctaatactatatttgttatatacactaataggctaattgctactggtaccaccacctttgtagatgtccttcagagctccatcttcaactgatttgaatgcagagatactgaatttgccgatgagtcat

SEQ ID NO: 94624 - DNA, 223 bp, Glycine max
gggggggcaatgcttccattaggggcaatgaattatgctgatcaaaaatgtccaagttcatttttaagtttcaagatcccccataatctaaaaaggggtttttgggtttttcttttcttttttatggaaaaatttttgtttaaaaatagagatgaatttttgaccatttgctatggggggggtctaatttccacagggtcaggtttgacaaatgaaaattccc

SEQ ID NO: 94625 - DNA, 411 bp, Glycine max
aacaaagccttattccccttcttaacattatcacaactctgttgctagaaaaaagagagcaattcgtttgtggactaatgggtatcccacaagcctcacaataatacagatatagtgaattcccacacatagatgtaaattccctttctaaagggaaaaaaaatagggggaatcaccaacttctatgtgatctactatctattattatttttatatactatgatttggctcaattcttctggatcctactcctcaaaaaagttgagctctaccctccaaagatgctacactatttacagaagcagatttggcatctcctttgcagttcatagaaccaagaactcgcttattatcacgataatgaccaaagttgtttttgaccagagagacgatttacaagtctgtctagag

SEQ ID NO: 94626 - DNA, 254 bp, Glycine max
tccttcttcctcctttcaaatttagattttagtcccactaatttgtcacagtctgcattttttaaaccactctcatctaaattgaggaggttcagttactttctctaccatgatcttccttcacttcttttctcattaccactactctttatatccataaccaggagctttttcatcaagtttaataactcgtaccttttattttttctccctttggcttgcaaaacctgcttctactctaaagcttatatctt

SEQ ID NO: 94627 - DNA, 459 bp, Glycine max
catgctgacattttttaattccttattcaatgtaataatatacgagtaacctcagctctatcaacaatcaatgacatttttgtctttatttgttttcaatcaatggaaacaattttcatattttcattttacttctccaaaataacaagtacctaggaaagcaagacatgaaatcattcatattcatatttctgataaatcactcaattatttgctactgcacaccagttacaagaaacaattatctctcggtatcattctgcagatcagcaacaccattcaacttccgtcgggtaaattttgtcctgttgaaaaaatccaccaatcaaattgcagctataagtttggttgcttgaatatctaaactccataatttactaagacagtaaccaagcaccccagttttgattactcaaactcttcaagtggtttggcaaatagtaacagtctgaacaatgc

SEQ ID NO: 94628 - DNA, 255 bp, Glycine max
ccatccgaatccattttatttatatataaaaattatatccaaaggaaataaaaggattttaaaagatcctatttttaaaaatttgaaggggaaattataaagtttttaaaggattaaccaatttttttctccccggcccgggagaaaaaagagtcccatctgttcttgaaaagcttccttaaaaaggacttttgtttccccagggaatgttttggtaaaaaaaataatttttttgaatggggggttattcgggtt

SEQ ID NO: 94629 - DNA, 217 bp, Glycine max
aaaatccaaaagatttgtttaaacaaacataattgttgaaaatattagtccaatacaaccatctaaatgtatttagcactttatttaaatcattacatcattagaagggggtcactatcatccatattattcatctgaagtccatcaacgttggttacagtgggcttctgcactcgtcttgggctataagagaacgcgatcttgtttgtcccagggc

SEQ ID NO: 94630 - DNA, 375 bp, Glycine max
  unsure (1)..(375): unsure at all n locations
gattatatccaccgaacccttttgtgattgctttctggtttgtgatcagagaatcttggatccgattttgcgttgtttgcttgcctctcgtcaattgaatttctcccatttgtgatcaatatgtatcgctctgtttatattattatttttttaataagaatttgtaagttgaagatttatgttttctatttgacccgtcaataatttgaatatgattgtcatatttgatcatttgatattataattctcttgttatttgctttttacgtacactcactgatttcatctttgaattggtgcattatgtctgtttgtgttgctttgttgggtgttctgttctaactagactnttaggattgatgatttggtgagatc

SEQ ID NO: 94631 - DNA, 215 bp, Glycine max
aaagggaggggccccccccaaaaaaaaaaaaataattccttccataaggggtccccctttaaccctcagcaaaaatggggtaaccccccctttcccctcccatgatccctatttcccgggggggaaaatcctttggcccaataaaagctaaaccttttttccctcaataaaaaaaaaccggtttaatcccccggaaattttggaaataaaattgg

SEQ ID NO: 94632 - DNA, 203 bp, Glycine max
tttcctttttttttttttttttttttttttttttccaatttaatttttttatattggtgggatttttttttgttcaactttctgttttttgataaggtaataaaacctttacaatttgccaaaactgcaagaattgccccacagacaaccctatattctcacgcaatatggtaagaaaaaacaattgaggaatagaacgagaa

SEQ ID NO: 94633 - DNA, 344 bp, Glycine max
aaatatgactttcaaaataattattataagaaaataataatttttaattatacaacaattcatgattgaataatagcataaacaacttttaaactaatagtatattccaatcaatgttttggctgaaagttaaccctaagattcatatgccaagaagaggacaaataatgaggtatgcttcgacattaaaatataaaatctattttacatcaacaatatgttattcagcaaaaagaagaaattaaaaggaagaagaagaagcttgctagtggcaaaacatgactaggtttgcgccttccactggcatgttgaacttgactgaccaaggtcagcagattctaatg

SEQ ID NO: 94634 - DNA, 273 bp, Glycine max
gacaaaggtaagtatgattcacaccctaacgagttaaaaatagacagatatccatgcaaattaggcggccaaaagaattgaccatttttgcaacggagttcattttagttttacaacagctaatctccaggaccaaatgtgatcaaatctaagctaaccattaacaagtacatgtgctaaaaaatttagccatgtcccaatgtacatcatcgaggaagaaggaggggatgaacttatccccgatttaccttgcccattcttatgctttacact

SEQ ID NO: 94635 - DNA, 407 bp, Glycine max
acaaaaattccaatacattttgaaataacgaatcgctcaatattggttatacatggtaaagatatttgaacaagagggggggcacagaaagagagatggtgagggtggaaatagaaaaaaaaaaaaaaaaggaataacgtgtcagaaggccacactaatgaccaatgttgctatatacctggaatacaacaagggtcatacttatgatcattgggtctaactagtgtgatacaatacaatcccatctccatgaagctacatttacaagtttacactgatctttccgctgctagtagaatcaatttgtcaagtgatgttttgctctcaacatggttgatatttgaagtttctaccagtatggtatccattctgaatatttggtgacgtattctcatgagttggaataa

SEQ ID NO: 94636 - DNA, 308 bp, Glycine max
aaagcaaacttacttgctttccttctataccaagccatatgctaccaccaccacaacaaccattttttttctttttttttacatcacattagtacccccacaactactactagttaataaactactactagttaatacctgtgaaacaggcttttaatgagttcagaaacataaataaaaaaaccctctaaaaatttaacccaaaaaaagggagaaaaagtaacatctcccgccagatattaattaataaagaagggcctagaaactatttaataatagccattctcaaatggtgctgcttttgcgga

SEQ ID NO: 94637 - DNA, 362 bp, Glycine max
ggaaaggaagccccccctttaattaaaacaatgggctcaaaacatggaaaattttacacccgggaaaaaaaacatttttttttcccccccccccccccccaaaaaaggggtttgattgggggggggaggggaaaaatttaagaaaaatttgggcctttttaggggaaaggcacattttttacattctactttaaaaaaaaaaatccccttaaatttccaaattccctattttaacccttaaaaccaaaaaccccctaaaggctgggaatctgggttggaaattttcgggacattataagagcatttttttatataaccttttaacgggcccccaccccaatttaaaccctaagggggggggg

SEQ ID NO: 94638 - DNA, 278 bp, Glycine max
aggaaaacaaaacatgatttgctgctttaaaaaggaatgatttaaaatacaaatcattatgggctgctctccccttttaaaaagaccttatccaaataaaaaattaaatttataaaaaaatcctcccttgttttctggaaagaacaatataccggggaaaaaaaaacaaggggtttttttccctccaggggcccccttttttatgtgtaggaaaaaaatgtccccaacctactggatcattaatactttggcaaaaaaaattttcaatggtcaatttt

SEQ ID NO: 94639 - DNA, 300 bp, Glycine max
ggaaaaaaaatcgatccggggggaaactaaaattaattaactcaggcctgctcaaagcccgggaagctttccctcacgttgttttatacataagctaacatgcccttccccgggcttgggttccccctagcagaaaaccgcttccccctttttttttcccaaggaaaaccaagcgggcctaaggcaaccttaatttccttttattaggaaccccaattttccccaattggtcctaatttaatagccgaaaaatgccccccccccccgggttgattttactttttacaaaacaaatggggg

SEQ ID NO: 94640 - DNA, 224 bp, Glycine max
cccagaaaaagttttaaatattataggcggagattcataattcagattagccgaactttatacagaggcgcccatttcccaacctttaaaaaaaaaaaaaaggaggccccctggggcttaacacccccatcaaaggtccaaaacacttgaacttggtgaaggggaaaacatgaccccttttttttagggggggtggttaaacaaaaaacaccggggggcccgaa

SEQ ID NO: 94641 - DNA, 362 bp, Glycine max
gcacacaatgtaaaatctatggctgagcttaatttggacacacatctcgatcatattcaacaaatcaagaccaattctgccaaaatctaaaacaaacggacactttacgaaaaataattaccgaaaaataatgtcatgtcagtgtgaagaccaagtctttataaggatttcttgggcagatggagacatcatgatgcatgcaagcatcactatgcgagagagaatccaacaaacctgacacctagctttttctatatctttcattatcctcggggaatcatctctaaatccatcatcctttaacttgtgcagattcacatcattgcagtaaaccggcttccttgagagcagctttatattct

SEQ ID NO: 94642 - DNA, 344 bp, Glycine max
aaagaaaatctcaaactaatcgtcaattggttctattgattggcaaccttctcatatttcttacagatagtaaaatttaaattgtaatcttacatggatgaatgccaaagaatatatagtgatatttaaaaacaatctcataaataatatttgaatgagggattcaaaatttaataggccagtactatacaaagctggatatatgcctcctttatttgttttgggccttactgcagtccatgttttccatgcgctctctcttgagagcagtgaacttggcagctatgtcatcatagtctggcaacttaggatgaacatgactaggatgtggagaaggacaaaaa

SEQ ID NO: 94643 - DNA, 225 bp, Glycine max
aattttcttccagtttttctaaaataatttttctttagttccctattaaaaaaaaagtacgctctgtttcggaacttgcttgcatagattctatctgtctcaatctctctctttttttttttttctttttctttttctcgcttcatttccaactgtctcgatcagctagggtttgatctaataatctcgatctcgcatgcgcaaccgcaactgtattctttatgc

SEQ ID NO: 94644 - DNA, 476 bp, Glycine max
ggaaaattaaaccatcaacaacaacagaataaaaaaaaaggagccaaccgaaatggcaaacaaatacactgcgttgttgttggtggtgtgccttatagtcgttgcaagtgttgatgccatatccgatgccaaaagaggatgcatagatgattgccacgctaattcttgcacgctccaatcgatgttgtgcaaaaactattgttgttttgtttgcttaaccgtcaaccgtagagaaacatcagaggttcatactcttggtaatggagcatcaaggaaaatgaaagcgcaaatgattaaagatcctaccgagccaaagcactaaacacttggaacataattagttaattgagatgcagaacatgggaatcgaacgattatccgaagcacggttggcataatgcactgaagattaatatatataaggctctctcaagaacaaggacaaaatattgtattacttaattactatttataca

SEQ ID NO: 94645 - DNA, 301 bp, Glycine max
gacgcgcggaggatcatggagggattgttgatcggaccacggcttaagatggtggtgttgcatgacggatgacaaaggtacagttttttccttgaattatgagttcaggttcataggtctacaactttggggattttgaggggtcgagtttgtggttaaggtggacagaggtcttcgatattgaatatgtgtctacctctgatttgagtatgggttctagcagcttttcttctaggagttcgacctccttgtgcgaggacaatccgacataacttgctattgaggagaatttggtggattt

SEQ ID NO: 94646 - DNA, 358 bp, Glycine max
aacataaaagattaaggaatttcattaagaacaaggaaagggatacaattgaatagttacatcataacccatagactagggtgactagtcgctcatgatcagagcacaactcataatcctatatgaaatagacatagacataccaataaggaagaaacaatgatcatgatttgtccttacggggttgtctacacttcacaacttttaaaaccctcaaaagttctcaaattcaaaactaggtaaaaggtactaaagatacaagatacgacccatatttataatttctcaaaaagatgtcaatcagaaaaggcacactatgtccgtgatgaaatccattacgacatgggcaaaaagtcat

SEQ ID NO: 94647 - DNA, 155 bp, Glycine max
cttcttggggacggttaaaatgaaatcaaggggttattctaaaatctaagatttttgatagtacatcttttggaggaaaccaatgaaacttactgagtgacattcttgaagtaggaatttgaattccaagggcctggacccttttcctttcttag

SEQ ID NO: 94648 - DNA, 389 bp, Glycine max
caaaattttccctggaagctcagttttgtagatgcaagacttgggttgcttttgcaaactccgtttgccaacttaagtttgcatacttttatccaaacatgcactaagtctatatttgcatttctgtttgggactttgggttactccaaactcagtttggagagtaaactcagtttgacatgtttggttatcctcaaaagtatgtttgcacattaaaattttgcctggaaactcagttctgtagaagcaaaacttgggttgcttttacaaactaagtttgcaaacgttaatccaaacatgcactaacttgtttcttggttgtccaatattgtgatgttacgctgcacttagaagacctttgctcacaatcttaataacatctctgatca

SEQ ID NO: 94649 - DNA, 499 bp, Glycine max
gattccattgacctatatttttcaagctcaatcttcagcttaccaatctcctcttctgataccctcaacttctcattcacaatccttagctcttgttcatatgcattaatcttgacacgaaaatcttcggcgttgttctcaattttcaattcatcattcttcacacgttcctcctcatgcttttctttcccctcatgtggtatctcaatatccaattccatcacccttctgtggatactattatgatcatttccattcccaaagaagcctgaaaaactgttcatggatgaagcatcatcataatcctcatcagtctctgtcaatgtagaagaaccatctccatccttttgacatgcatcaaaagtattcacattcccaccagaaccaagaaaaacatcaaaccccgcggcgcgatttgttgatatacgacaccccatcttcctaggagaaggagaaggcacgtaagagtttggctcagaaccataatctgaaacacctg

SEQ ID NO: 94650 - DNA, 411 bp, Glycine max
agcaaatcaaactgtggaagacaacctacgccaacaacaacatcatcatcggcaaccatgtttgccaagaggttgttgcacaaggctgtgcagcaccattccaaccacaagttgcagcatggtggtttgcaagggagtgagttggatcccagaattgtgattcactatggcattccatccactgcttcagttctcgcttttgaccccattcagcgacttttggctattgggactttgttaaaacacgaaaatgggattcaagatttcagaaaaatttaatctggggttattctaattagccgtgggatggaagacttaaggtgattgggggtgataatatagaaggactattggtttctcctaagcaattgccttacaaatacttggagttccttcaaaaccaagggcatt

SEQ ID NO: 94651 - DNA, 183 bp, Glycine max
aaattaagggtattggtattcaagaatgaaaatgacatgggacgtagggcctacagttgaagttggggatttgataaacaagccttttaatgaaaatgccagataaaaagagacctgagattttgaactagaatagctcatcctcctggggggtctgaataacaacatttggggggggataag

SEQ ID NO: 94652 - DNA, 484 bp, Glycine max
ggtgcttctcgaacacgcaagtccagcaatgggctacatgttactggtgttgcagtaggtccgaagtagcacagctctgcaaaaaattcagctaggaattcaccttctgaaaaagtttctccaactcgagtcccccatgaaaaatcagctgaccagccccttactgatcaagggaataatcagcgattgattctccggttgccaaacactggtcacagtccttcaaggggagctagcggtggctcttatgaagaaccaggtatcacgtgcagcaaagcttcttctcctgctgacaggaatgagaatcaggacagaagaatgaaaactagacctgagtgtttgctgacccatgtgtcaaatatgatgaatgaggcatgtgatgctagtgaagctttgcttggtgttgacgaaggtaagggccctcaaacggttgatgagcgatgcagggctaatgaagatggtgataaggtagcagaatcatcaa

SEQ ID NO: 94653 - DNA, 483 bp, Glycine max
gtaatccaggaaatttttgtaagtgagcttattctcttgggttatttagcagtaatatataaggattagatacttcaattaggaaacattgtttatgtcctcaggtggtgaagaaaaatcagattcaaatcagatgaagagtgaatattttagaattaaaactagcattatattcctgtactgaaataatacgataaagtcatgattacatctagctacttctctgtatccatattaatgtcatttttttgaaattttcatcatttattacattctatatcattttctctcattttaaagataaatggttcatgtcagtaagtctctatgactttatgaatgccacatgatagataaaatgattgtttttgaaagatgggaaatttgagcatattatttagaattttattttatttgttataatctcattaaatgaagtggtggcacatcattcgatgacaatgtaaaaaaccattttatatt

SEQ ID NO: 94654 - DNA, 366 bp, Glycine max
ggaaccctaagcctatggttggctataaattaaatcgggataaaacaaatttttctaaaaatcagatacccagatttttcccgggttgggccggtttttccaagggttctgggaaaaattatgggagtttaaaagggttttaaagggcagggggtaaagggttaattccaaatccggggaataaccattggcccaaaaattagtaatacccccccatacgggcaacacaacaataaaaaatttgaaagcacaggttgggtatccaacttattttgggaatcaggtttaaagcccgcccatttaaaatttttgaaaggcgcgttattttcccaaaaatccacgtccctaaaaaaaataaaaactttt

SEQ ID NO: 94655 - DNA, 390 bp, Glycine max
atacaacgtggagtaatttaatcttacatgtttcaagagacaatgtccaacttctgaaacagacatattgacggtataataacaaaactgaaagttggtaacggggaaaaggtataagaaatctcaacaaggggattgaaatttattcatgcaaatttatggttcattctacctccataggccaatttgctctcatcagatcttcgacctgctttggttgccacgcttattctgcttgagttatggcaacagtcggaacttttggaaaacttgcgatcatgagagctaaacttcatcccaggatagactttagcatcatcctcatcagataagctttcatcatgcatagagccagagcccctaccctcaaattacgttgatcttgattta

SEQ ID NO: 94656 - DNA, 217 bp, Glycine max
gcggcattatattcaaattaatatgggattaatacacaatcttagtccatataaaataagaagatcacatatttcagtatgaaaattcgtcggtagaagtgtttgaatagaataggattgcttggtacagtatgaaaaattgtgttataaaaaatatatgggaacaaattctcatacttcttcttcagagagatgggtattaaaatactctttgtaa

SEQ ID NO: 94657 - DNA, 122 bp, Glycine max
atatcattgcttgagattatcactaatgaacatctagtgtaggattaagagagaatcactaaattagaagtgagatctacaagattactaatcagcgactttccatcaattaaatttctaaa

SEQ ID NO: 94658 - DNA, 358 bp, Glycine max
acagaatcggcgaacgactcgcacagctaaagcacgccacaccacacaccaacaccatttctctctctctctctctctccgtcgcttccgccaccgttggttgtcgtgaatgccaccgtatacgggcaccgctctcgctctacagctgttgaaatgaatggagtgcagaacagaagggttcacaatgatgagaaaccttttccaggatgcctgggaagaatggtgaatctctttgatttgactggggatgtaaatggaaacaagctactcacggacaggcctcatcgtgatgcatcttcactctgaagaagtcaatcagaggttgcaaggatcatgagtcctaccttgggtgatcaga

SEQ ID NO: 94659 - DNA, 458 bp, Glycine max
aatccagaacgataaaaagtcactctttcataggaattctacaatatttcgtttaattataggtgcaaatagcaaactactcgaaaagtggcagaatgtttgagaacagaataacaaagcagttagttgtaccaccatgctttgccagcttcagtaaaatgacaaacatcagatctattctctatactaatctgctcaagacaaggaaaaaaaacacttctcaactggatccatcatccaataccagatccaaatctacataatttgatttagaaaatcctatgttagccacatttgcttctgcacaacagtgcatcgaaatgacctgagccaggggagcttacctgttcgatacatgaaatgaccacaagtcaccgtatttcaactatccacgttaactaaaaatattgctcgatatccaaaatcccaggaatcatcaaaatagcatatgttagcat

SEQ ID NO: 94660 - DNA, 380 bp, Glycine max
gcggcttcgcccattctcatttctctctctccagaaaaaaatatacatttatattatattttttatcaataaaaaatcaaacgaataaaattttcattttcttttgtttttctcgctcttgtttctcgggaaaattgatttcaccgtagtaggagccaagaaaaattccgaacccgtgaactctttttcctactacaaatgcaatttctctctctgtgtctcccacactctctctgctaaagtcgcaaacacaaccacgaacactgtttctgaagtgaagcaatgaagtttcagcctcagatctcgtgctgaatcatcgatccgagagagagagatagagaggagttggattattgattcatggaaccgcggagatgaag

SEQ ID NO: 94661 - DNA, 138 bp, Glycine max
tggtcactggccattaaatctatttatacgcttagaagaccttataacctttataataaatttttcttcattatgatgtttcttaattgcatttgaagtttatgctttggttcagggaaaagtaaaatttgatccctg

SEQ ID NO: 94662 - DNA, 138 bp, Glycine max
cagggatcaaatttgacttttccctgaaccaaagcttaaacttaaaatgcaattaaaaaacatcataatgaaaaaaaatttattataaaggttataagggcttctaagcgtataaatagatttaatggccagtgacca

SEQ ID NO: 94663 - DNA, 316 bp, Glycine max
aaaccccaaccaaaaggggttgccaaaatgaaaaaatcaacccaaatccaagggcctaaaaaggaattttccccccttaaattaccaaaatttgaaagaaaatccccacaatcctacccccccaaattcgaaataaatcccaaccctaaaaaaaaaattcccgagggggaaactaagctttgagcgggaaacgggaaaaaaatgggaaaacgggggtgaccatgttcattgggggggggaaaagtcccaaaagggttttgtttttggcccggggggggcaaaaaagttggcccgggaggggcaaaagggttttggc

SEQ ID NO: 94664 - DNA, 357 bp, Glycine max
gcaaaaacacaagatacatcacaattttgcatgtccaacatagtcatagatccatccgcagccaaaaattcaggttattgcaatgaggtcagtaactttaacagtttatttccactggcggcatctttgcagcatacaacacaagtggaacctaaactacaatccaatttgcaagagttagcatcatccaaacaagataatgtagcttgctttaaaaccggagcagcgctgtgatattttgatggccatatgtttgggaggattctcaaacattcagtacaataactaacggctgaaaaaactgtctcaaagtcaccctgtcattaccatgctttcttgcccctctgatttcagtgt

SEQ ID NO: 94665 - DNA, 291 bp, Glycine max
ggcatgattaaacaaagttttactagatccaataataaaaaaccagttcatgcaaaaaaaattggcatttttaggctaaaagccacaataaataaaatataaaactaaattttacattaaaaatgcatcgggtccaatgaagcttactctcttgaaatctatcatttcaagggtttaaaggtaaaggccaaattatatcgcaggggggcttttataaacaaacgctggtccatatatagaaaaggtaatgccatcaagaaatttagggaactctaaactttatccattatc

SEQ ID NO: 94666 - DNA, 381 bp, Glycine max
aatctctccaaatttcacttcaaatgcgagtagtgttggtcttctctgttttcattgctgattaagtagttgtgaatcttttgccctttaccatatgaaggtgttaactcgatctctatgctggattgtatggaactggagggataggtaaaacaacgaccgctgtataagtaattgttatagctagtcgttgttttacctattccacccattccatgtatccctttcctgagggcgcggataatttcttacttttcactgccgattccgatgaagctttgtgttttaatcagacgaatgaaagtatattaagcttttgctctggatttatgtgccagtagaatgatcttaagattctaactttattatttgtttatggga

SEQ ID NO: 94667 - DNA, 127 bp, Glycine max
atgtatgggtttccttaataaaaacgggagcttttatttgggggattagagtttattgctggaaaagttgcagctggtatccgagttaaactaatggatgtttgtagatcacaaaactgaaataaaa

SEQ ID NO: 94668 - DNA, 166 bp, Glycine max
gtatttacaaagatcatcgggcgttatgatcttaactgcactctgccgagcatctgtgttcatcttcactagcccaagattgacgctcttaggcctagatgagaacatactacaggcggcaggaaccatctgtgttgggcgaattcctatcttatttgcttatatt

SEQ ID NO: 94669 - DNA, 407 bp, Glycine max
tgagaacaaagctagtgacatgtagtggaaacattgcaaatgtgatcagtaccagttcaggccaacaaaataacggaggatgggtcccaggcagcccaaggcttggtagttcggtgaggacgattgagtgaagcaattatctgagtatctagattctatccaggtggaatttttttatcttaaacagaggataagagtgtaattcgctttgttgcaatttatttttccatttattttaggtggctggtgactctaatttgtactaaactttggcagagccattttgattgaagtttttccatttttaattgagaccatcctcatttctcgaaatatactgtaaatggaaattcgattccactatttaacggggaagttcagttcgccggtagattgcgttgttgact

SEQ ID NO: 94670 - DNA, 422 bp, Glycine max
aataacttgtatctatgccactgtccttctccttgttaaaagctgtgccacacgtctgggaccaaactccctaagcagaagaagcacatgttcagagggagttttgtttcatcagtctctagctagcatatatttctagcttctattccacacgttgcaaaaaacagactttgccttaaccaaaagaaaatctgtctttaccttaactcagacaactcgtttggtgaaccatgaacaacagtattcctggatgggattttgagagtgatacatgtctcaccaaccaaagaaagctcatagggccggaccaagaacttgttgagctcctatggaaaaatgggcaagttgttatgcacaaccaaacacataggaagacacttgggaattcatctaacttgagacaggtgcagaaaagtgatcaa

SEQ ID NO: 94671 - DNA, 456 bp, Glycine max
gcatcttcaaactcccttttggcttttctaagtgctgtgattctttctttcatgtgtgtcttcagatttgattcataaagcaattggcaatgttgtagtaccttaaaatgttgctattaggtaaataggttggtgacatggatgaaggtaggtagttaaaatgattgaaactacatctaccactgtgagttgtacgatgaggtggtatgaagagtcaggtcctaaagcatacttgtgatttcctccattatttcctttgagatttggacagtagttggtcatacacccaattctaaattagagttgggatgtctggaggagtagtttgatacagtgatgcatctccacagatacttgagtaaagctatatgctgtggtgtagatttttactatggagttaaatgcaagttatgacgtcgagcattcacattctacacaaagaatacagcatgagct

SEQ ID NO: 94672 - DNA, 122 bp, Glycine max
gcacaacgaaccactctgaatctgctcacgttatccacaacactctaaaccctggttgaaccctaactaatccaaccatgggttcttgttccaccttgactggaatgtgcgcctgcaagctc

SEQ ID NO: 94673 - DNA, 422 bp, Glycine max
gatagaaaattttcactctgttgataacttaaaagcattatcctctaattctatatattaacacgctctaagtcaacaaatgcattgcctcctcatacattactatctttcgcaggtgcaaatagaacccaaagaattaatacttcctaatggatattgataagccagagaaaatgtgtaagctttacaatttaaagctgagaaaagaaacctaggccaaattgattactattatttcatatataagaaagctcagaaaacctccaaaccatacaagacaccagcgtactgaacaagtccgtcagccttgtcaaagtaattctctctgatattctgaaacgcgtgcagagtgagcaaactatcagaaccagcctgatgactttttccaataacacgttccaccttcagcgactgacaaacac

SEQ ID NO: 94674 - DNA, 325 bp, Glycine max
attatgttgcttgaacttagagagagctcaatttagtccgagttatggaatgcctttgttgtactttattcattttagttagctaaaatcaataatccccgagcttttcccctcttccctttttttgcatggatgtaaatatcaacttcaccaactcaaattagcatgtgtttgattttccattaagacgtaactagttagtacttttccgtttgggaatttgtggttgagaaaaaacattatgttatcaagaagataaggaagaagaatcaaaggctcctggagttcagaaagctctaatgtcattggttttcaagtcagtatc

SEQ ID NO: 94675 - DNA, 501 bp, Glycine max
attgttcggtttcttctcgtcggagttcgtcagggcaaaataaaagcaggcgaaacgtagtgtcgctttccgtagcggcacgctgtgttcataacccctcattttcattgcgcaaagaagtaaaaccccaactatcctctcgtctctgccctcacctgcagaacagaacgcagtgtctcatttgtctccgcatcggcgtggcaacaacaccgccgagaagataacctcttcaatcggaaaatgaacgctgataacgggtccagagacaccaaactcgacaaccaacacgtttgtctctttccacttttttctctgttctctctcttaggaaacgaaatatactgtaaattgaaattcgattccactatttaacggggaagttcagttcgccgctagattgcgttgttgacttcacgcgactaggtcatactaggctcgtaggatagtgaaattgttcttctataaaggattaaccctaactatgttatttaatatgatgag

SEQ ID NO: 94676 - DNA, 463 bp, Glycine max
aaacgatcgtccaactgcagctcagctatttggtcatccatttctaagaagaacattgctatctcccttaagttttgcttctccacacaggaatatctatcggctataacttgacaagtttaatgggtttgcagatatctgctggagttggaccttatttcaatgacttcatcttgtcctgccatcccaccacgttgatcccatgcggaaggttggttcattgaaaggggagaatgcattatcaagtgtttcacaaagataaactttcacctttatgctaaatgagagagcagtgccttttttggatcccagtgtggatctaagtatgactggattgagggaatggaaaattaggaaggagatggaccttttcatttccaactggttgctctttaaggcagaagcatccaccaggagattgccatggtgaacagttgtcagtcatctggcacaaagttgtcgg

SEQ ID NO: 94677 - DNA, 183 bp, Glycine max
agaaagaatattcaatcagatcaaagaacgaatcccatcaacagactaacatcatcataaacaagcgttttcgcaataattaacatctcctcatccgtgataattaacagcattgtttatcttaattaattttctcgtcatttagagagcgagcatcacgagggaagcgatggcggaagcagc

SEQ ID NO: 94678 - DNA, 373 bp, Glycine max
caacctcacaattcgaagttcaaaccccaaatcttcaaaaacctcacaccaaacccaaaataaaaaaacaacgtaaaaaccttaataatagcaaaaccaaaaccacacttgcagtcaaatgttcttcctctcttcccccttctcttcatgcttcagagcttcacaacgtaccaaccacgatcccacaaacctcaccacctacatctaccacaccgaatacggcaccgtttcactgacatggtcgcgctccctgctaggccgctccctccacgtgaacctccacaaccgttcctccttccaccttctcctcaagccatggaagaaaaacgggtccaagaagctttctcacaatacggtcttcctctggaacctc

SEQ ID NO: 94679 - DNA, 447 bp, Glycine max
gttaataaggagtttcaattgacttctcttaacagatgtgttattccatgtacatcgtgatcttttgacttctctcgacaaacaggcttccatacatgcaaatattcaagcattacaagaacttgaattcaattggttttgggtaaattaaactatcttttgccctaattaaagactaaactcttagagtattaagaacatatacttttctatacacatggaaatctaaattcattctttctccccctaaacttttactctaaaggaaaacaaataaacaaaaaatttaaccacccaaattatgtgttcaccttctccaagcataaaccaccaaagaaaacccaagaggaaccaccaactcattctcctccacactggaccattccataaccgaagaacttcccccaaagatccaccagaagtagaagacaccgacaaagacgaaga

SEQ ID NO: 94680 - DNA, 393 bp, Glycine max
ttcttcgattgttgctgaaaatgagttctatatctctcccgttattgtagttgtatttttgtatttgatgcttacaattcacttatcttggttgcatgttaacagatttttcagaattatgaggatattctagtgaggaaccagcactatttataggacaaaggaaaactaaaggatgctcttgctgggctggttcgctgcttgtcactcctggcatggaataaagaagaaactgatttgcacaataaggtattttattttcatttggctgtgaaaattagtaaagactcttttacatgaatcatcaatacaattgtaaatgctctgtcagtctttttaatctaagctctgctatatctatgcatgacatatacctctttgcattttcatttt

SEQ ID NO: 94681 - DNA, 395 bp, Glycine max
gatcaacataagttggtaattgggacaattgcttcaatcatacgtattaacttggaggaggcaaaaccatcatggaagaagttatctataggtcaaagggattcatggtttaatatatttgaagaaatcaaattacaatgtttgattaaaaatattcaattttttatattatttttaaaaatgtgtgtaatgtaataatttttttcccattttggtcaaaaccaacgtagtcaaagtttacatggccacctcagtataaggacatggtgcggcacaactttgagaaaaggggttcagctaaaatgactcaattaatgcaagatgttcgaaaaaatttaaatgaaaaaccaacttggatggaagatgatgtgtgggcacaattgaaggcacattgg

SEQ ID NO: 94682 - DNA, 288 bp, Glycine max
aaaaaaaaaaataatagataagcatatatttctactagtaattgatagtgcaaaagaagacgagcctaaattaatttgacaagggcgacaacccaagattgctaattttgatggtatatacagtagtgatgcagggcgaaagaataaaagaaagaaaaggaagtggaaggttacgttgtggaggtaggtatgtaagtatgtatgtatgtaaataaattcagcggaatcctcttcctcttgattgatagagttcgagcctgctcttggcctctggtaagagtggttgga

SEQ ID NO: 94683 - DNA, 403 bp, Glycine max
ctttgatcttccacttcaaaataattgtcttatctcgtaatctccatttgaacattcctcttcttattctctcgtgcactcacacacccctttccaatttcgtgaaattagggctttctcactccctttcttccttcactgattctcgacgtgagagaatccggtttccttaatgatttcgccctgtcggttggactcgctatcggaccggcaaatgattcttgggatttgagtataccccaacatctctgctgcctctcgctgttcgtgatgaggttctttgtgtgggatgcccaaataccaaagatgaaaggtgtcagagactgggtcttctctcaaatactatccaaatcgctggtctcgccttcaccattatctggcagcaatagtctctatgctggag

SEQ ID NO: 94684 - DNA, 381 bp, Glycine max
agcagttctgttcattggagcgcccctgcgtcgcgaacgaatgaacgaagaacacagaacgacgcatatccaagactgaaagtttctagattcgtcacctgcgagtaagtttcttcaatccatacttcttagttcttattctcaaatttcttcctcaatcaaactccttaccgtttgaaaatcccctgttttattttcttttaaaaatagggtttaacagtgtctcataactttcattccttaatttgaacctgtttgagctcaaatacctctgattttgctaacgccagattcaatatgccccacaaattcatggcattcttgtatatcgtattttaatccatttcagataatttgcgtgcctctgggttctttcgggac

SEQ ID NO: 94685 - DNA, 240 bp, Glycine max
aaccactgaatatttttagtatacactataaatcacacacattcagtttcgtaattaaatttggagggaattctaagattcatgaaattgcccacaattttttcagctataggggcaaattccaacgaattagcacaagaaaagactagagtgtacaacaagggttgaaacaggcaaagtccagtccaactagattggtgaaaaagacaagttcacatacttttcataacacttacaaat

SEQ ID NO: 94686 - DNA, 181 bp, Glycine max
gctaaaaacaatttctgaattaaaaagtttataaaattaaaaggtacattcatgtttcaatgtttttaaaggatacccgtattgtaattggaaatcctgctatagaaaacagcctgacaaagaatttggcactatagctcatgctaggcaatccttcaagcttttctcaccttaagtggaa

SEQ ID NO: 94687 - DNA, 379 bp, Glycine max
gcaaattatatatgaaatttcaacactttctacactgtctaaatttcacaattaaaaaaataaactgatcaaataaatccaggaaaacaaaataatagaaaataagaaaatagtaaacaaaacagtcctggttgaaaaattacctctggtctaaacatccaagaaaacagcatcagccatctaatgatggccgactactagataatgatattggcatcagaggaggagaagcaatattctcagatatagatgatctatgagaggattctagtgttcttggcatatgtaatgctgccactcttgcgccactagaaggtatggagaaactacgagccatggcctgaggtggcattggcagtggagatgctgcacttgatgc

SEQ ID NO: 94688 - DNA, 242 bp, Glycine max
ggggcgtaaaaaaggggttcaccccccacattaaaaaataatgggggacctttttaaacccaaaggccccctttcccccccttattaaaaggggaaaaaaccaaggggttaaaaaccaaacggggggtttggtttgggggaaaaataaggggggccaaaacctaaccttggggtccttttgcaacccccggaaccccaaaaccttttttatatggcgaaaaccgaaatccccaaccccctgg

SEQ ID NO: 94689 - DNA, 482 bp, Glycine max
acccaatataagacgggcaatgagacaatatttcctatatatgcagctttctttttaaaattgtcaatgagacacctgcactaagtgacgagttaaatataaaattaaggttaaatatgttttttcttcttcctgaaaacaggttaatatttatttttatatcttaaaagttaaattatttattttttatcttttatttatgaaaatgtgttacatctgattcttatttctatacgtgcatgaggaattaaaaatagatttttttatgaggcaaagatcagatatgatatattttcataaataaaagttaaaaaagaaataatttatttttgttttacctttttgcctagactaaaacacatatttaaccttttaaggattaaatgtttttacttgaaaaaattactaaatcttaagggtgatgggtgtacttgagaaaatgtaaaacatatttattgatggaaaacctaataattataatg

SEQ ID NO: 94690 - DNA, 399 bp, Glycine max
agctaataaagcatatgcttaatggctaaagttcattgaatgcaaacaatcgtatcattttaacactgaaaaatgggaacatctggaattttatatttgtcaataaaaattaaaaagcttttgatgtttacagtggcatatataagatttcttcatcctatttagcaattagtatgaattttccgagtccaatgatcatatcatctgtgaattatcaacatactgaagaagttctgagccaagttcagagacccaattcactgcagtgccaaagaagagctcccagaaccacagatccaatgctaagactgatgaaaagatgagcaatgccaaggtctgatagcggttcaatggccagcctgaggccttagcaattgtcttcagaaatggaaatgaatc

SEQ ID NO: 94691 - DNA, 521 bp, Glycine max
tcgttttcatactttattcctttaaaaaatgtttaaaaggagcaaacatgagtgaaaatccttttcgactagactgttattaacgtgtaagccaccggcagattttaaaattctctttaataaaattaaagtatctctatttatatgaaaacgattataaaaaaattaacataatggacaaaatagtttaagcagaaattaattcatatctactcacaatgatcctatcaaatttaagaaggattaattttagtgaaagatacttatatataccaaaaacaaaagttcgttcataaaatagaagtaaaatattttaaaattaagtgatgataagtactatcacattataaagaataggttctaccaaaaaaatgaagtataggtccgttcttgcgtcaagtcaactatcctcaatttcatgaaaaaaatatatactaattgagtgtctctaaaatagatatgtgagttatacttattttttaatgtaatttaatgtacatcttgattacagatttttattt

SEQ ID NO: 94692 - DNA, 369 bp, Glycine max
atgcataaactgtcattatgcaatttctaatacagaattgttttctaataaatttgctattatagaactatttatattttataacatatactcctaaatagctgccagtaatccattaatggaactaacttagattttagttcccatcatacgaagttgtctagtcttcaataatattgtcttcaatgactctgattgggtggagctatggacaaaattatgcttattttcttcattgataactatactttcaccggctaagattgaattcaggaattcatcttcctttgtagtttcaaatggattccgcataacattgtcttcatttctaaaataggcattgttaaatgcatagtttggaaaggatgc

SEQ ID NO: 94693 - DNA, 251 bp, Glycine max
actataattctcagctttaattgtatcaatcatcatgatgtaacaatttcatgttacaagatctagaagtaccagagcttggtaccatcctacaagttacaactactgatcaggcggtgattgggaattaacaataattagaatggccaaataattacaaccaaagataatacacctttccagtatcagaaattctgaaagtcaatatttagtcttcatagatgcatcatttacagttttatacttgagcc

SEQ ID NO: 94694 - DNA, 509 bp, Glycine max
  unsure (1)..(509): unsure at all n locations
acaataaaaaatatattattaagaataaagaagttcaattcgagtttgaataaagttgagctagtgtaaaaactgtattaaacaattctgctatgtcaaaggagcattacaattgactagcatatcatgtctgtcattttatgcatccttccatagatctagctatggctgagtatttggtctacgaaggaatggaataaaccccctgttcagttttaaattatctaagccaataacacattctgcttcaggagaatttacgatcattctcgaaggtgcttggtcacggtcacaacagcttgccttcttgggtgtccttttccttataatagaaggaacattctcataggtcattgctaagtttcttagcaaagtttctgggttgatgtcgcctgtgtcattcttgagtatagacgttggnggagtacaaccgttattgtatgcacatgccaatgcatgtgtgtttttggacttagacattcactgaattcatctacactatgtggcat

SEQ ID NO: 94695 - DNA, 396 bp, Glycine max
gttaaaaaagtatcttgctgacatttcttttcttctcgtagattaagaaggaacaagcagcagtagcctagctagccaagagtgaaattaaaccggtgagaattgaaattgagatcaaattcccaaggaatcggtaatttagctagaataagtctgctgcaattactagccagcatggggaaactaacaagtgcgtgaagaaaaggaaaactgaattaacaaatgagtaccactgcatcatcacttttcctttccttaaacactgccagacatatatataacatgtcaaaaaggctctgagatgatgacggagcgagcatgcagggatatatggctacatagtctattagttaaggacttataaaaaaagaccatgaaatgaaatcagatgaatta

SEQ ID NO: 94696 - DNA, 115 bp, Glycine max
gaagggagtgttggatttctcttcagccttagattcattttcagggctttcgcataaccgacaaccaatgtggaccatagacaaagaggactattgctatgtgggcagcatcact

SEQ ID NO: 94697 - DNA, 466 bp, Glycine max
gaaaaaaacctcccattagcgtaccatctattaacatgatcttattcagcggaaagcagccgccattttttcattttttacagtggcagtgccaatggcaataataatgcatgaacaaacagaaggcagaagctgcacaatttgctaaatctagtggttgacgtgtagagaacctcacaagtatacataaagaactagctagggagaagattcatctgtgcaagagaagaccataaataaagattacttctgtcccatttccatggcttccaaggttgggctatggtaagagtaaggggtaaaggtatcaccatttctccttggttcttgattcgtaacccgttcctccatggcctgcccaacaggtgattcccgattaatgattggattggttcgtgattcctccattgcccggaaatatgcatatggaccccatccttcatcatatagggcggagggaagaact

SEQ ID NO: 94698 - DNA, 354 bp, Glycine max
atgcaattatcttgttttcatctttgcttacatgtaagtgtttaatcgtccatcaccaccaaatccattgtcttatgcagaatactccctagctagtttgcgttttcaatccctatgacgacttaatattgaaaatcttgacggtaatttttgaccattcaagaagactattacaagttattcaatggaacaaagacagcactttgtgttggtatgagtcgagttcctatgtagctagctaggagctcccaacatatgtcatttcatgtttctccatctcatgaacttggtgttccctgtgcttgtatctatgcgccgaatatacgaagatgccgaagttgatgatgctcaaag

SEQ ID NO: 94699 - DNA, 393 bp, Glycine max
cttcaagaaaactcttgattcttgagagtgttaaatttcctatttatgtcttcttcctcaaacccttctcctttttagtactgtccccagaacaagtccatcatataccatatggaaaccaattctagtttcttcatacactcacaagaataacaaattaatatcctaatatcatattcttgagaaagcgttctctctatctatatggcagccttattcatctcaaagtccaagcttcaatccacaggacttgttcttgtcctaaacctatctttctttttcctcttctgtctccttctaaaggtttattatctccaacctcctaataactcgaattctcaatctaatggccccctcaaaatcttcaaccatgcaagattggtcagagatgtt

SEQ ID NO: 94700 - DNA, 218 bp, Glycine max
accccttcttctatttctatgcctaactcttcctttggttgtgatgaccttgttcaaataccgtataaccttcaagaattcaccactttcaccaggacctagaggacttgccataagagggaatctttatcaactagatagcccttctgttcatgagcagctatggtatctgtcagagaaatagtgggcctttattgtcccttcaatttggattaagg

SEQ ID NO: 94701 - DNA, 422 bp, Glycine max
tttgtttttttttttttttttttttttttttttttggaaacgaactatccttttcttcttttggtatggagaacaacagtattgccatgacaatccaaaaatcatgacatgcttcccagacaatatcctttttggggaaccaaagaattggcggacttcgaaacaatgaaaaaagggacctttccatttaattggattttgacaaatggtttgtgtattttggccttacttttacaaaatttggggccgggagagttttgaaaaaaaccatggtagatggcaggggtcaaaattgccgaatgagatggccccagatttatggggctagaatccgatccatacttagggggcatgtgaactttttgggggacgcttgcaattactaaaaaccctgtttttctaattgagggattcaatttgct

SEQ ID NO: 94702 - DNA, 197 bp, Glycine max
ggaaagggaaagaccaccactttataatataacacccccacacctatcaatacaaagcagcttgttattatgaacgggccctaaaaatatacgccggaatgatcctcgcagcataaaaaaaaaaaacgaacttttaaacagaatccttcccttcagatgggaaatcttttttttcccaaatattccaaacccattga

SEQ ID NO: 94703 - DNA, 221 bp, Glycine max
cttctaatcttttcacgtcattattctaaacttgcagatgttcacatgccaagcaagatgaaggggacgttaatgtttctggcgctgctcctttgagccacctttcatgtctccttctccattgactgacggcttagaggcgacggcagctacgagctgggtccgaagccctacaccctgaaaggaactgtggtgatcggcggcagccactacatcccaga

SEQ ID NO: 94704 - DNA, 352 bp, Glycine max
ccaaatcaaataaggacgtttgactattggcagtttttccatgtaatcttcaggacagcatgatttacaataggtaaaatccagagctaccccaatgttcatggtattcactcttcatagccatcttgacaagttgctcattaccttattaccacttagtacactaagcagacagatctttgagagcatgtttatgatacataagctggtagttgttggaaatagtagtctcctgagaaagaaacatcactacacacagtaatccatgggggagcatacaatatacgagcattcttaatggaaaaaccattaaaaattggcaggggaattcctctcaataactgcgagttta

SEQ ID NO: 94705 - DNA, 456 bp, Glycine max
acgatcaaaatcacagatttaataatctttttgttttgatacacttttttttgggtgttaaaaagaaaagattagacctaacaaggtaattacatcaacgattttaaataaattcttctggttcgtttgtacaaaaattcaatgggcaactcccgttacaattgccaatatacattttgaccaacctcgccacccttcaaatcctctaaatgaggaacacaaaattgggtatgcagcaatctcttaaatggtagttgaagagtgagtcaccattaataagattctaatgctgagcatgttatgtgcctagttttacaagacaactacactcaatattaaagtaagaatcacagagcttgtaaaaaatccaccattgtaatattgtgtcaagcaccctgaatttgtggaattggtagatggagccaatgctgtgccatttacgctggtaacattttt

SEQ ID NO: 94706 - DNA, 74 bp, Glycine max
gaagcacaatcattactttttaattaatttatattgcttgattttgcaactcattacttttattgccaattaag

SEQ ID NO: 94707 - DNA, 74 bp, Glycine max
gaagcacaatcattactttttaattaattaatattgcttgattttgcaactcattacttttattgccaattaag

SEQ ID NO: 94708 - DNA, 470 bp, Glycine max
atacaaacttttactataattacttcaactgttttatcattttcaactgttgcaaggtattttgtaatacatatcgaatctgaggtgcctacatttatctgcctacatttatctggaacttgcagaaactgcacattttatcactcctcatcagcacccccctaaaagaaaaagaaaaaaaaacggaaaagaaagatttctggcaaccgcagactaacaggagcatttttcattccttactagtccggagtagcgtgaaaactatataattttggaacctttgaatcctacataatttaaaagacaaagttgatatattggttggagtaaaggaaagaaaattgtatcatatttctggatttgatttctctaaagcgaatctttactttacagagaaaagtaagtttcaaccattgatgaaaaatcaacggttcatggatttgttaaaggttaacaaacaactctttaat

SEQ ID NO: 94709 - DNA, 190 bp, Glycine max
agacttaatatgctgtgcacttttttatttaaaaagacgactatcacatgttttaaacaaaggttttttgttcatcgtaatcataaggccgagtttttcacaagaaatatttgttttttctgttctggttaatataacgccttcatgacgagggaacttatgtacacctgcaaatgggggcatatgacct

SEQ ID NO: 94710 - DNA, 121 bp, Glycine max
ttttttttttttttttttttttttttttttttttttttttttttttttttttttttttaggatttttttttattttttttttttattttttatttatttatttttatttatatatttaatt

SEQ ID NO: 94711 - DNA, 102 bp, Glycine max
gccacgcataataattccacagtccttactgttacaaaatgacagggaacaatgcgagcattaaatcgaacctatgaaacccgcgtgtaatatttgaaggaa

SEQ ID NO: 94712 - DNA, 490 bp, Glycine max
tggatttgcaacaggtttctgaaattattttagaaagcaaaggaaaattaaacgaaaaatctgtatctactgcattgcgtggcctttctgaaagttctgtacaagaagctagagatggtgacagaagcaagcagctccaggaagttggtcggggagtgaatggtggtgaaattgttgatgttaaggtcagttctgttgcagaagttgaggctgaagcaactgaaaaattgtcacatatagctgtggaagtggatgtacagagtgataattgtactgctgaaggatcgagtggtggtggacggacagctgctgatcttgttccgtctgatttggcaagaggaaaagatgagaatgtactccattcttctgcttatagtgttgataaggttcctgaagacttgactgaacgggagtctgaaaaagctgatgatgttgatgctgagaatcttcctagtcagtctaaaaaggaaagaaatgagtgtgaaagtga

SEQ ID NO: 94713 - DNA, 146 bp, Glycine max
ctcaatgaaaatgggacagaagactgcccacagagaaattgcaatagcatttattcctttatcatttaaatatatttgtgaacgaaaaaagtaaccccctccactgaatcacattaggataacacaggatatattttctgatcctc

SEQ ID NO: 94714 - DNA, 240 bp, Glycine max
atcttaggttagttcatttcaaactatgatacatcatacaagcgagaactaaattgtgcaactgttggacattccactgtgaaaatggagcacgcatatcatttaactaccattgtaaatgcacaaataacaatacaaattgatagtgttacagctgaggaaaggcacctgctcaaagtgccatctcagcctgcaaagctgccaattcatcttcttcaggagttcgctttgcaggaactg

SEQ ID NO: 94715 - DNA, 321 bp, Glycine max
gcggacggaggttagagtaatttgtctccgaattctgcgaacgcgctgcccccactttcgtccttagaattcttgttggggacatcatagaggaatttgtgctgattagggttgttttctgcttttgatcagaacagaaggaagaatcacttagtatagatggttgcagatcactattctcctcctctgtttagtgtggctccaatgatggactggacagatcatcactataggactttggcacgcctcatatcgaaacatgcttggctctacacagagatgcttgcagctgaaacaattgtatatcaaaagggaaacctg

SEQ ID NO: 94716 - DNA, 402 bp, Glycine max
gacaaaaagtaactgagaccagatcatgatttcacgatgttaattgttcgtgtaaaactaacttgaaatttgtttgctttgatgacaataaacttcccatgttccctaaagcgcaaagcaataggaaagacacgatatcttttggaaaatcaaatgctacttatttccttttaagcaacattttgatagtctactgaaaccaatcacaggccctaaaacctaaacaaacaaatttcttgacactactcttgactgctgaaaacaatgaccaactaaaatcgaaatgtagatatttcaaaactaccattgagggcctaattaacctaaatcagagttagtccttgacaccggactctacatcgaatgattgggagaaggctgcatattactggggccattgac

SEQ ID NO: 94717 - DNA, 264 bp, Glycine max
atcgacaatttagatgatagaacttttatattagaacctatagagaagtttattcaaacttagcctataaccggaagttaaatagttatcaaaaagctgccttaacaataagattttttttttcacatttgccaaaagcagaaaataacaagatagattctctttctccattggaccaaaacacagagcctttggcaagttatgctactgggggcctgagaacatggtcctgtgaggtatcaacagccgtaggtgataaaaact

SEQ ID NO: 94718 - DNA, 350 bp, Glycine max
gacatccagtcaatgactggagaaaccactaacatggatattcatcgtgtcttggaactgcgcgctcccatcattgttcaggtgcttcaaagcatgtgttttatgaacaataagattttcagaagacatctaagagacttctaccccttgctaacaaaactttgtttgctgtgaccagatggatgttcggggagctcttggtgatttattccacgcacaactaaaacctcttttaccataaccgtcgtataatgccgctgataatactgtgtgatcagatggacgttcggggagctcttggcgattcatgccaagcacaactgaaagctcttttaccataactgtcttat

SEQ ID NO: 94719 - DNA, 411 bp, Glycine max
atcaaaaaaagaattaccttccgctttcgctttcactaatcattcaaaagtttatgaacatggtacatttgaatttgatgactgccttaacgtctacacttgtacagggagaacttgcacattcaaaactttaaccaacccaaaaattttggataaaataaatggggaaacattcaagaggattgcttctaaaatgaattgcactatcaactgcaactacacattcctttatacacaaaaaaataggccattcaagataataacatggcccaagttactaggttagtggatggatccggtttaaactcctggttcccgttggcctgcgtttgctatttgcatttactattccagtgcgtgttccgaaagcagacagtatataaagtattttgcgatgaaaaatattttcat

SEQ ID NO: 94720 - DNA, 386 bp, Glycine max
cataacaacaccacactattattattatcaacctcgaatctcattccatccaagtttgatgccccgccatcatggaagctattttcttcgaggtccatgtcccataagaacccatatccattatcatcacatttgggactaatttgagtaacggtgctagagttgttggtgtttgtttccctagagaactgaaggagactcatcaaggagttgttgttttggctttggtttggaatatgatgatgatgatgatgatgggttgccattgaggaagagaatggggcaagtaattggttatacccaattgatggtgtggtgttttggttggttggagatgacgaagccaaagttagggatggaactgtgctctcgtacatgatgagttt

SEQ ID NO: 94721 - DNA, 428 bp, Glycine max
agcaggtcaagcacaatcacacccaactctgccttttctctcttctctcacaacccctttgtctctacacagacaaacttattattctctctctttcttaaccaaccaatacataaacacacagaaacatgctactgtgcaaatcattgggtttctctgcacagaaccaccccgccccaattcatttcacttgttaaattctcctcctttttcactctccacactcaatatgaatttgaggtaagttttttttctaggaagtgctagtctttctggatttttgctgcgttttaccatcgggggttgccgggaattgccgcacgatcatgccgccggcgctgtccgatccgctgtcggtgactccggcgagctccgacgctgttttgcagcgatcggcgccggacaatcggcgattcggtgatcttaga

SEQ ID NO: 94722 - DNA, 457 bp, Glycine max
aagaaatatctgatgatttgtgtatttgatgagctttgatattaatttgttagggaacattctataaccatttttttcttcatgtaatcattgtatagaagagccccataggagtagagcaaactaaatgaagatataaaataagaaagactagaaactgaaaatgaactttggctttgttattaaatcaaagaaatctactcaagatacctttggctagccttcttagcataattagagtaccagcccaaccctggtaacaggattaagttgtttcttgaattcttgcatatttctctctactaacggaacccaattggaataatctttcatatttttccattttcttcctcttttgtttctccccattgtggcttcaatcccattctctaacattaacatatcgttccatgtcaactgtacttgaacatgctaatttgaagctaaaactgcacgt

SEQ ID NO: 94723 - DNA, 280 bp, Glycine max
agtaatacaaataatttaaaaaggggattttacaaggggggaaagtaactttgtagctagctcagggacagccctttaatttatgaactacacacgcatcctgattttcatggatctattcattctattgttacatgtattgagtactgggggagccatgtattttacatatagcaaatggggtgatgtgctgcttcctccattgtaacacagcattgcaaaccgatacccttctgtccccaaagatgggagcattcctcttacagcgcctttggataat

SEQ ID NO: 94724 - DNA, 338 bp, Glycine max
aactcaaaaacactttttacaaaatgtattttttatcagagattacatacaaccttactccaatttaaaaagacccaacaatttcctcaaatgcattacatttgttggggacctctcatttgaggacacgcttcgtaaccctttaaggaccacttgatggcctgaaaacagtataaccattgacaccacatgctttatttgagtaatcgggggaggatccataactataattctgtggggttgtcatacctaaaggcaacagatcagaacccgccacctgccattggtttggaatcaacccatcgacctggccattgacgccaggcacaccactaacc

SEQ ID NO: 94725 - DNA, 130 bp, Glycine max
cattggaggagccttccctcgtttcgacccaatcaccaaatgtagcacccaagaccgctacaaccataccatagcctgggaccgcaatggcaccctccttgtcgcccggagcgcctatcgctactacttc

SEQ ID NO: 94726 - DNA, 436 bp, Glycine max
atacaaagtttacagttaatatttttgtgtaaaagctaacttgggatgtattgttttacctagtccacagtcaagtgtaacaatattccgtaatccagtataagcctttattattttttgttctatgggaaagtagcacattactggggctccacagcctgcacatttgtgtaagaataagagtagctttcagtgttggggttgccctctctgaacttcgtacaggaaaccctccacgttttaagcaaactttgcctctcaggttcaacactcctcttagcaggcatgattgttaagaagacaggaaccattgctgcaaccagatgcttaagtgtgtgaccactgacaatatgtcgcgtccattcggagatcacatcatcagtagcctctagcaccttagctagaagataagaccctgctgcccagagccaatatg

SEQ ID NO: 94727 - DNA, 432 bp, Glycine max
cctaacactatcaaatagtagtatgatttattattcagtaattcaacctgtacatacagaaagtaaatcatacattggaagaataacgcaacagttcaaaatgaaattatatgggacgtcttcttgttgaccctaaatgccacctgtgttcaattcaccactttgcatgaccgcataataactaatccaacctatgggatctaacaatcataatgaactgcatctcctagacctagaaatcagacgcaatgagcactctaaaattgccttttgtacagtctatttaatttttttttataaaaacagggaaagtcacggtggtaccatatcaatctataaatgagatgaactgctataatctgccaaataaattataaaatgctctggcatagcaacaaaaccagccatgccaagatcactgacatactattt

SEQ ID NO: 94728 - DNA, 109 bp, Glycine max
ggttaaactttcaccttgaatattaaatcaagactgaacacacgcattccttgatagaaactgatgagttatctcatcccataattgggagagggattctccctcaaaa

SEQ ID NO: 94729 - DNA, 160 bp, Glycine max
accatttcttgcaaaattccagttccagtgtgaggttcatttcgtagatggataaggggggcaagttgcggagcaaggctcgaggtcacatggcaagcccacatcttttgtcttgcctaagaaaaaatatgaaagatgttaatgtcacgaagagctcttc

SEQ ID NO: 94730 - DNA, 254 bp, Glycine max
atattaaatttgtttttattaataagaggaaccagaggcttaactaagaccctactgtagagccaagacagaagtagtatcaattgaccctaccctaaatacattctcattcctcagaatgacacagaagaactcacttattctgcggcttctctttgcttcaatggagaagaaggcacatgtcattattcgaaggagcggaaaaacatatataatgcttcactttctggacattccaatacggcaatatcaca

SEQ ID NO: 94731 - DNA, 118 bp, Glycine max
cttcagttcacttgtataatatctatctaaactgagggttgtcatcactgcttagagtacttggagaatgatttggtgttaagtccccattattcatgtaggactattcctttttaac

SEQ ID NO: 94732 - DNA, 474 bp, Glycine max
gtgggattgctggtgcggacgttgagcagcttgtaatattgataattacggtacttataggtggtcaccgccggacaccaccaaagagtgtggctgaatacgggcaaaccatggacaggtggccacaagccctatcgcagcaaattgcatggattagggaaactgctgcgcctaagtgtgcattagctgctatggctacggttgatttactaagtgcgaacgctgacgatgaagagcggggagctgtagcagtgtgtaaaactgcaacatgggctaagagtagttaaaaggcagcttaggctagtggtgccaataggtatgcagaatgtgcggcgcaaaatagtagttattggctaactgccgggcaaaaaagtgtgccgtacttcattggtgacctattggccattgttgttgccgggtacgtagcggttgttgaaataaccggtatttatgcgggtgcaggtaggacgccca

SEQ ID NO: 94733 - DNA, 462 bp, Glycine max
tgggggggggggggggaagacaaaaaacagttaaaggggagggaacaaaagcttaaagtaagtgactagactagcaaaataggtaggctaaacgtaggagaaggtaatactgaatagcgcgcaaagtgaaagtgtaagccttagagttaagccgaggagggattacagttgctacgcattgcaaaattatcagtactgcttgttaaagtgcgtcaggtgttcctcatctaatgtagttaaaccaactttagtacaatcccaacgttgtgcaaaacaacatattttatgtatattttgaggccgtttatatagtgtatatatgtgtacccacttaggcggcggcgtagaccgatatcgtgcctagtgttatctttgcggatggttaatccggttttggttccgcagttcgttttcttctcctaacaatggaaaaccttatggcatactagtaataagtttgca

SEQ ID NO: 94734 - DNA, 461 bp, Glycine max
caccactacaaccacggtctaattctggtttggtggttgggggactcctcgtgtgcggcgctaatagccaccataacagacacatgctacataaaaaccgctgccggcagaggcgaaaaggactataaaaaacacctggaaacccgaagtgcccacctgccaaacaaggtggcaatacgtagcagaaaaacgggcccctaccgggcacgcagttagtaaacacagtttagcaccgaggcctgctagggtgaaacataggggtaaaccaccaacagggaaacggggggcagaatagtagctcatagtaggtaaagtaagagagcggccactcatgcaaacagaaagtgtagcaggttttgcactacacctgacgttaactaatgtgctactagttaggagagttaggccaggaggtagggttagtaaggcagcaacccgccagacggcgaaatggtaaaaat

SEQ ID NO: 94735 - DNA, 428 bp, Glycine max
ttgggggggggggggggccacaaagagcttaattaggagattagactaggaaaaagggaaaattacgcgaagcgagataccgattttatgaaaaaacgataaacagacacaggagacgtagtagggtgtaactagtaatctgaaaaccccataaaaaaaaaaaaaaaccctccgtctttgggggggggccgggggcaaataaaatccataaaagagtgtagatacctgccgtactataatccacggaggaataatctatgggtgaagcggctttaatgaacacatctagcaagacaaaacggaagtataaaaaaccacccaaggcgattgaacaaaaggaagagtctggcagagaaggaaggtttcatgtcacaaaggacccgcaaaaaaagcaaacaaacactacagcgaccgactgaaacccacac

SEQ ID NO: 94736 - DNA, 414 bp, Glycine max
ttggggggggggggggggggggggggggcgaaaaactaacgaataggaacggccaggcccagatataacagaaggtataggagtgcaacgataggctaagaatagagatggtattaaatataaagtgaaaaatgtgtaaaacgttataacgtagttggggtgggtagctgtatggcttccccatcaacggccgcctcgacctttacctaggcggcggcatgcccgttctaaccgcagtactaaccggtgttaagccatttggattccgcataagccttgcaataaacaatttaaatagacacaatagccttaagtgtttcggtggcacggttggtattggaactgtactaaaacttgtgcccgtagtactaacctttaagcccgtaaactgcttattacccgacaggcccgtac

SEQ ID NO: 94737 - DNA, 467 bp, Glycine max
tgcaaccagcgccgcgcaaagggcttagccggtggctgcagagcgggccagcgcagcggaagtttttgaggatgaccgaaagggggaggcggctaggtaacaaggagaaggtgatgcaagttgcagtcagaagctgaaagaaaagagagacggccaagcccctggagggagatatgtcgtatatggcctagaaggaaagggatgcttgctaggggggggttagtgcagtacgcggcggaagccgccagcctccggtagcctacaaactaaaaaagttcttagaggaaaagagcctccagccgcgactccaaaagcctccagcgtagccgccataaaaaaaagagagaaggagagagatagagaaagaggaataaaataagacagaaaaaagaaagagaaagaaaaaaggaaaaaaaaataagccaggctaggtaaagaaaggaaaaaacgggtagcacggtatagaa

SEQ ID NO: 94738 - DNA, 506 bp, Glycine max
ttgggggggggggggggggggggcatgctaataataataagaatacaaataagctgggacgtggtaggcagaatgtacaaaactgggcaaagaaaaataaagggacctggcgtaagataggaacgttgctgggaggtgtcggcctgataggttctaaaaccgcgtgacgtatgtaacagcaacgggagagtgggcagaggaggttggaatcaaccacaaataaatatgcaaattaaaagaagcaagctttttttacgtattactgctaacctattaggctggtaagcgcggcagtgattattgagctaaaaaagcaaatgacgaggatatcgtgggtttggcgggcctaagaaaagggaacatgttgttatgtttaaagaggcccacgcacaactgcttaccaccctgctattaagcttacacttagtaggactagctgtaagcataagccgtgtactacttgtagtgtttactaaggttggtacgctatgtgttaactaggtgtg

SEQ ID NO: 94739 - DNA, 268 bp, Glycine max
tcactgttttggctcttcttctactaagcggcatcaatgttctagttcctccgcatctgttggtgtctccggggcagatcttcatctgccattggcaagtcctcctctgctgttatctcagtgttcactagcctcccgatctcgatcgcactagcctcctgtgcctcctaaatcctcataggtctctcctccacctcctcgctcacagcctcgcccactactgctatgtccccttcgcctatgtccgctgcttccgcgcctctcatct

SEQ ID NO: 94740 - DNA, 451 bp, Glycine max
ttgggggggggggggggggaaagaaaggatgaaatagaaaggaatgtactgcgcccgactataacaaaggtgctggtggaggataacagtgattactaaacggccaaaggagaacaagaataagccagtttatggaggttagtccataggtaatagttagattagatcccagtatgcagagcgccatacatgttatagcctagattagaatgaagaaaaaaatagcctagactagaaagaattaaatttaaagaagaaagcagataacaggtagttagcaataacataacaggtggactgagggataaagctataagctgggtgcagtgtggtggagcgtttgcgtgggataggaaggtggcttaggggtgttagccaacggctaaatgtactaaacaaaggcgtaatgcatttggtaactaaggtaagcagggcacttgggcgcatgcac

SEQ ID NO: 94741 - DNA, 375 bp, Glycine max
ttaaaaatattggtgttggtggagaagttgctgaagcggtttatgttgtttaaactattggtattgagggatatgttattaaagcggttgatgttgttaaaaatattagtgttgctggagacgttggtaaagctgttggttttgtagaattaattgtttgagctattgatattgttaaaaatattggtgctggtggagaagttgttgaagcgttttatgttgtttaaaatattggtattgagggatatgttattaaagcggttgatgttgctaaaaatattagtgttgctggagacgttgttaaagctgttggttttgtagaattaattgtttgagcgggtaatattattaagcatattggtgttaaggaagacg

SEQ ID NO: 94742 - DNA, 294 bp, Glycine max
ctaatcaataggggtacttaaagcagcaccgaccagaactataattcaagttccaaaaaaaagtttgatttttctaaccaagagtggtgcttagagcagcaccgaccagaatggttagggaatacactccaaaccgggacggggttatagacgacgcaccgtttagtctggctggcgtcgtttcgttcgacgacgacggcgtttgagatgatcccgacgacgacgacggcgagggggttgttgccgccgcaaacggtaatggcggcgatgttgccggggtgagggaggaaaagg

SEQ ID NO: 94743 - DNA, 285 bp, Glycine max
tgtagttggaaagagggcttaagggtgaagggagaagggagaagggaggagaggttgtgggttcggattccccattgacatttctaatcaaactaacaaactaatatttgctgataaagaaaaaagaatcgtaatgattttgattgatagtctcttattttgtgtgagtgataattgtgatgcttatgtagctaagtcaacatggctcaccttgaagattcaagtgcatggaattcgagtatacctcaccctaagctcaatgaaagaattctgtcttctctgtca

SEQ ID NO: 94744 - DNA, 378 bp, Glycine max
gggggggggggggccagacaaagagtaattggtagggtacaaaaaacactagagttgaagcgcgaagggggaaaaatcgcgagagagaagtatcaggggaaattatacaagagcaaaagagaaggctaggatagcggattactggccgcgccgaagattagaagagaaacttaaagccatagaagcggggaacgcgacggccactaattcggttattggatgagagccactaaaggggtccacctagcataggggttaccaaatgcatggctatcttgtacttggtggtgctgtgggtctaccgggtgtggtggtgtctgggggactactagcggattgggctgcatcgaggacactgaaatcggtgaaagttggtgg

SEQ ID NO: 94745 - DNA, 454 bp, Glycine max
cgggtttaggttgccgggttgtatttgtcgcgtcagtcggtgacccggacccggaccgtttgaggtaaggtctggtaagggtgctaacacatctgttgtttcacacatcttagcccaccgcatacgcttcggcaccaagttcaaccccgtaatcgtaatagtaatcggtctgctgttaatccggttaacggggttcggtacaggcttcgtcaggttattcgtacggttggtaaacagcttcttctggctactgctcatagtttgcttcactaataatcttgtagagataacccgtctagtggcaaacagcagtaaatttgttcaactgatccgggccacctacagtatatgcgttagggccggtcgcctgtgctgtggcttaagttaatgccgcccatgaagatgacgactattcagattaagattaagattaagagtttaatacagaagctga

SEQ ID NO: 94746 - DNA, 257 bp, Glycine max
tcctgtcactgtggtgtgtggtgtgtgtgacccggcttggttggtgtgtgttgggttgttgttggtttcggtcttccttccaagttgaggggttccttagagggttcctgcttgctaaggttttggtattggttcaatgtaagtaagtggggtaaggtcaactgcggctgagtggggctactcagaggccactacacacacccaacagcctaacgtaaactccgcttgtgacaaccacgagggtcgtcgtcatcacc

SEQ ID NO: 94747 - DNA, 426 bp, Glycine max
tggggggggggggggggagaggaaataggttaggggactaaaattaggcgaaattagtagtcgggagaggcgggccactaggatgtttaaacacccgcgtatgggaagagttggggtgctgttgctgattaccatgactgataggttgacacttcacgcaggtaccgcacgtagctaacgggtgtacattaccacaccaattgttgtcagcgataccacagctaatgtcatcgccacggttgatatggctggtatgtttgtgagagcttgtactggttacatggggcctggtggtttgtacaatgctgaattcaagggtaggtgtgtgtacgtcagtggcaacgctagggagactaccatggaaataagaggtaagtaatggctataaccaacttgcagaacggcaacgcgccgcgagcaaacgta

SEQ ID NO: 94748 - DNA, 455 bp, Glycine max
ttggggggggggggggggggggggggggggggggaaaactagtataagggaagtatgggataaacaatcgaagatgataactacgtcaattgtaataaaagtgcgtgataacactataatgctagttagccgcttaagaatcctaaaaagcctacgacgcaaagatacttacccataataaaacgtaagccaggggggggggttaaagaacagagaatatattgcgttaccagagggagtaaagaggtgaataaaaataagagagaaataaaaatgaaaacaaaaaataaaagggaaaatataggaatttagcacaacacgtgtaagcctggtcaacaaaacgctacatagggtaccctggccacgtggcaggctatagggcatcttacccgggttacgtaatcgccgaacggtaaggaacaagccgagtttgtgacccacgggactgcacaacg

SEQ ID NO: 94749 - DNA, 308 bp, Glycine max
attaaagacagacctagacgcgcttgcctgtggagccctagtgtagtcaggaagtttagatagctagcaaaagcaatcagcttgtaacaatgagatatggatgcttgtctccgataaggaagggtgcgggacgcaagagtatgggactgggccgataccaacctggagaacgagaggttgaatttaaatgtggggccaggtcgggtaattagttagccgcattgcggtaggagaaacgcaaaccggtttgcctgactatcaggcacaacaagcgtgtggctggtaaggccaaggttggcacgtgcaaa

SEQ ID NO: 94750 - DNA, 455 bp, Glycine max
tgggggggggggggggggggggggaagttattgagttaataaccaggatggagggagaacggccacgaaattttcatgaccgaaaacccacaaacgaaattcgagcgagagtatgccggagagaaatatcagaatatgaatatacagctaaattatgacatatggcgatggaactagctggtataaacgtaggagtagagtttaggagttaatgagacatcactctggtagattgattaagtggtttaatgacgtgcaactgggcaccgacgaaaaaaacccctgactagtagcgagtattactactgacaacatccgaataaaggtggatacctctagcctctagcctctattaggagcatagggttatgacacaacgcaataaattagacggagattattaaggttacaacagatagataactgttaacagcatgccaggggagggagtattt

SEQ ID NO: 94751 - DNA, 375 bp, Glycine max
gggcaagtgcacgagcgccaggccgcaaaagcacacgtaaggtaactagcgcccacaccagcggcaagtgcaatagctggtatgtacggtgaggcggcataagcagcagcgaaagctgcaacatagtaggattccacgggtgccctaataccaaaagcatgtagcgatagtggggcaactagtagggagccagctgcagacagtgggctagcgtatgattgtaatgcaggtgatgaggccgtaacagcaacaaagcagcaagaataggaacctgcaaaagcgccacggaaagctgcagaggctagcgagcacgaagcctggctttgtaactatgatgcccgccagcttggggtaccagacgtaaaggagcggact

SEQ ID NO: 94752 - DNA, 451 bp, Glycine max
ctgagaactgacgggagtcgcaccacaagagcaacggcgggcggggtgggcggctgctacgacggggccgactagccttagcttagcctctacctgattaaaccggtttgtgttcaagcaaaatgcctgagccgcactcggtggtccaccgaaaagctctaacggggacctggctgcgccaactatataatagttcacttgggaaaattaggttgcaacacgctcggcaattaataaaccatgataggaagcctcaataagggacagtacatgtgaaaatacggaattaataactgggtggggagctgacgcaatctcaacgttagtataatcatagagggagaggtcctagacagaatattcgatgtgtgaagagtttagatgagcaaaaatagccagagccccgccaccaagggaagcaaattggagagcagcaagcccggaataaccc

SEQ ID NO: 94753 - DNA, 427 bp, Glycine max
gcctgaagggctgtataagcggggggcggagccaaagcagaagacgcacgccgtgtacgggtccactaacgccttgcaatagcaaggatgatggcggcacggcgttggggcggcaattgcggcggaacaatatgcgtaatacactgtgctaccagcagtttatttgactgctaccgtggcggacaagctatggttagcatgcgggtagacacccagcgcagccggtacggtgcaggcatgttatgaaccataatatactacaaaaccaggtattactaaagggcactggcacacctgagcaacgtagtcagcatagtaaccaacactggcaaaagtaagctttcccacgccgggtagctctgcagaggcggcttagccttctgacacagctacggggtgggctacccccgttgcgagagcatagatt

SEQ ID NO: 94754 - DNA, 485 bp, Glycine max
tgggccagtaatttgttaagggcgggataagagccaatacatttgtgttgggcaagggcactagcaagggcggtaaaatatcctaacacgcaaagtgcggcagagctagttaatgcacttagccaggtgatgcccgggcgaggtaccaatgagggtgagggccaatgagtacataaacatgcaacacaacgtgggaaaaagtactcaagtgttacgcacagtactaaacggtaggctgtcccaaaatgccaggcggctactgatccagcataaaaataggtatcgtgataaggagcataaaagccaaaacagacgacaagggctccaatagaaacaggagagtaccacgggactgcggtagttgcgttgcttagagcgaagagtactggtacagcagtaccggtgaaaaggcgccaaggccaacaaaccggccgtggcagagcacaatgggcaaccctatgtataggagcgcagctaacgcctag

SEQ ID NO: 94755 - DNA, 455 bp, Glycine max
ttgggggggggggggggatggatattcataataaataataagaagaagaataagtgtaggagggttagcctataggaatagtaccgtttggcaattgagggaaagaaagaaagacgggaaagaacaacaagagtagaagttaaatatacagcagtggagagagactgcaagggccatagaatatcaacagcacaccaccaacaccataccacaaagtaagaatgtgagaagaagtgagcctagtagaatagcaagaagccgataacacaataacacaacacctggcacggaacttagcaagccaaagcaagcatatgcggtaaagaaaaagtttaagcggccgggccgccacctaggacgacgcgtttatacttggcttatattcaagactaggctggccaaggcccgatgtagtgtgttagcaagggctaccccaagatatgtgaacagaaaag

SEQ ID NO: 94756 - DNA, 360 bp, Glycine max
tggggggggggggggggggggggggaggggggggggggggggggggggggggggggggggggggggggggggctggaatgcaaaaggtaggtagcccggatgagggtgttaaggttaaataaaccagaaccatggtaagatgacaaagcaatgtaggaggcccccctacgataattctggttaaactaaaacggggaaatatgcggcccgtaagaattcacctactatggcgctagtataaaatactatccaaagtataagcgggagccccgggtaggtataggggatagagggaccgccacaagtatgcaaaggcctgaggtacgggtgaaacaacggacccttggaactgtgtaatgg

SEQ ID NO: 94757 - DNA, 379 bp, Glycine max
ctgtcacccgcaaccaagtgtgccaaggggtgggccttgaagaaagagatcgggtggcggggttaaccttgcgcaagtccaaggcccagggaaagggaagtaggagcgtgcgggtggtaagtccaagtatcaataatagccaacgcacaaggccctaaacccgggtgtctccaagctgtttgagttgtctgtgttatattggtactcacgaggattctgttcattataaattgttccgtattcttctttgtagtcttcctaatatttgtagtgatggtccttttgttggttgtcatttttgtaggttttttagtcaataacgtgccggtaatttgtattgtagttgtaacaataaccatggcaaatctggtggctgcgt

SEQ ID NO: 94758 - DNA, 423 bp, Glycine max
ttggggggggggggggggggggaaggaaaagtggggggatgagggaatgacacccggaaaaaaagaagatgcaaacacaaaataaatgttaatgtaaaacaggttagttgctaatcaggcagatgtagctgaatggcaagatgatgctggtaattgtagtcgtttgggccaggtggacgtgtacacaaaatagtagttccgagtaatataaaacaggttagttgcttagactgattagtgttagtatggcgtcgctgtaagttacgcggtgtatgataagtgcacccatccgatattcactggatggatctggctagctgatcgtagactgtggtgagactcgtattgaaaggtaaggtatgccttcgccagggataatcgtcgcatgcccaaaatttgcctcggatttaatggaagtcttgg

SEQ ID NO: 94759 - DNA, 366 bp, Glycine max
cctgtcacacaaactcagccaaactctggtctcagctatcaaacacaacaaagccaactaaacgggttctcggggcgtgggtagaaaaaaaagcggaaaggaggaggggtgagcagaccaggccgggtggcgtggggggtgtggcgggaacaagggtccgcgaggggaatacggcgaaactatgtgctctgtgtgtgctagcagtagcgataatgataactagctgtgtgcgacggggtaattgctgctctggctaccccggcgaaaatgaagtaagagaaggaaagaaaggataggtgcgtgtgtgtaaaaaaaaaagaaaaaaaaataataaaaaaaaaaaaaaaagaaaaaaaaaaaccctcc

SEQ ID NO: 94760 - DNA, 449 bp, Glycine max
taaaaaatgatacatgcagtctaggggtgggcttaataagatagagtggttaactcacatattactgttatggggcaacgatacacaacaacaaggcaacaagcgaacaccccagccaatgccacactctaaccaagcccagaccagtgagcaggagcagcgtgataagcatggccctaatttccagactccgcagaaagagctatcttttcggtggccgccggtacttggattggatttgtctacaccaacaattccaacaccaaaaatgacaaaacagtttaatacgcacaacttcactcaggggcgggattggttaacacagcaactagggccgtatggcaacgtagtacaggggtgtctggggccaagtaaagtgcgagtttaacagcgtggcttgcgtggcatgcagctaggtcagccaaagaggggcacttggcacgggcaga

SEQ ID NO: 94761 - DNA, 311 bp, Glycine max
ggggggggggggggggggatttgggaatggagctaagggacaatgcaggcagatgtcataaggcgtaaagaacggttacgtcatagaagaaatggggtagaaaactcgtaagttacacaagggataaggaactgcatggcggtataggccgtaaggggaccaacgatgaggtacagccggattacgtatccaggagggtacaatataactttgaagcgcggtgtgttatgcgaacgtagcgagacaaagttagtggtagctggcggggttgtagaaaggctacatagcaggcttctacggccgcctaaaag

SEQ ID NO: 94762 - DNA, 345 bp, Glycine max
tgggggggggggggggggggggggggggggggggggggggggggggggggggggggggggggggggggggggaggaacaaagaaagggtggacaccattaacccgtttaaacccaaagaaaactgggggggataatgggcaagtttcctaggttttttaaaaccaaaactgggtgggtttgaattaaggggggtacggtttggtttggttttaataagggtggcccaaggggggggagtaatttaaagggcagcattacccccagcgggtttttaaaagtgtaacccctgtggtaccaaagaaggtgggcccaataggttagcgggtaatagcccgtttttccaa

SEQ ID NO: 94763 - DNA, 434 bp, Glycine max
gggggggggggggggggggggggggggggaagaaaacaggggaaaaaaaaaataataatagagacgctatttaagctaactttccttagtttttaggagaaaagcccagccaacatgatacaaaccttgaaaagactatgaatggaacaggaaggcttcggcaccttattgtggtacgtgtgaagagcagagtcgttagcgtctgcaaccaggcactaatgggttgaaggatgatacgaaagtcgtgatgtgcagggggctgggcaggggtggctatggcagctgtcacaatggcgatattgttttataaagggtacaagtgtcgtaaggacaagcattccaacgctaataattaaaattaaaacttatgtcggcaactgtacccctataagattaaagatggcgctgaacaagcctatcgataacagtaaaaa

SEQ ID NO: 94764 - DNA, 485 bp, Glycine max
ttgggggggggggggggggggggggggccttacaaactgcatataaaggggttagagacaaatgaaagatatgatgaagttaccaaatcctattgaatgacttaataggttaaaagggtcaaaaggtaaaatagaaatagacgaaaacatgcggttttaagtaggcgggtgaaaaatataaacctaaagtaagaaggaacggacagggaagtaatggtggttagtggctgatttgtactagtcctagtactagtcctcgttgtcacaccacctagcgtactagtgctggtattactagtggtagtaagctgtacgttaactggtactagttgcgcaagttgcggattcaaacgcggcccagtagtaacctgcaatttacaacggacaacactacgtgtaaacacgaccacaatcacagttggtatacagggcgtaggtggcgtactagtactgtctggttgtacggtgtcacttcaaggttcact

SEQ ID NO: 94765 - DNA, 471 bp, Glycine max
gatttgcggctgggccgcagactggaaaatgtaataacgaaagcaggacatgaaagcgtgatgcggtctgaaggttaacgctaacataacttacattgcctactactgagcctgttggcagtagttagaagtataaactggtaaaaggggtgtagtccagggttagtaacctgaaccttagaaaacagcacagccatccacaaataactccagtggtaccatcgactgcccagttgcccggccaaaggcaccgtttggggcactacaccttccgcaagcacgatgtagtgtgaaaccagccaagtggcgaggtcgccccgcaatgaccgttcccagtcggtggttggtcttggccaacgtgtgcctgcctacgagggatacggtggccccccttaaggctactgctaactgggaagttggtaaaacgaaccaataaggggaaaaagcgctagaaggaggcaaatagtgaag

SEQ ID NO: 94766 - DNA, 129 bp, Glycine max
cacactattagacactcaagttaatccggtaccgcttgttcgccttagtttatcatgagttaatccttcacagcggtgttctcgggggaataaatcatcgtaagctgccgcacgatgtgatcgatgagt

SEQ ID NO: 94767 - DNA, 452 bp, Glycine max
ggggggggggggggggggggcccgctaaaataaaacagacaagggaagaggaaaacaaagcgggcaaataagcatagacgggtatatcactcaagcgtaagacaatagagaagggaacgaagcatgaaaatctgacggcgccataaaaaaaggtagtacgttatggatgtaaagggccccctaaaaggggaaggttacagggccaagggtacaggggaacggggccaattgtcctacggaatagcataatgagagagccagcgagtataacgttccccggtttttaattccgggggaacaaaggattagaatgggagaacaaaggattataatgagagggcttggtcaaggtagggcattagttattaggttagcttatcctgatatgcgggcgggtgggggtgggggacaccagagtaggggagctactagccagagggtaaaagtggggg

SEQ ID NO: 94768 - DNA, 289 bp, Glycine max
ttgggggggggggggggggggggggggggggccaaggccggccaaaaaaaaaaggagtagctgtaggctcctaggaattcaccataaatacggtcctagtatgcgaatgtaaaggaggcagcattaacggatacatagcagtacagctacgcggcctaaagccgccttagccaccaaacctcgcctcaagggggcaaaaaagcttattcaagactccgcctcgcatcccggctaaagccacctcgtagcctccgtagccgcctagcctccaaaagactcccggagaccc

SEQ ID NO: 94769 - DNA, 444 bp, Glycine max
ttgggggggggggggggagctaccccaaggagatgcgtatgcccgacgaaaagcattacgtatagacagaggactaagctgatggacaatatctgtacggtgttaaaacaaacaagcaaacagcagagaataggaccagctagttcaatgggtatttgtatgttattaaaactgaatgcaaaaatgccgacgtaaacactctatagacgcttattaggggcctcccagagagaatagggtcttggttgtgaaaagatacgtgataaaggttaacgtggctattggtccaaatggcggggtagtgagcgtagtgaaagtaattgcctgccaaggcgccactagccgattacacgccccccaaacggttgtacataaacagcaacacgaaacttgaagcgagggtgggttaataattgcactgacgagcggagcagcgccagtagc

SEQ ID NO: 94770 - DNA, 424 bp, Glycine max
cccccagttatgacggtgacactccttcttattctccgccactgttactggggcggtttgggacgcacccggaaggctctctggcctcgaagtagccgtagactgcgggttgcgcgcaaaggcggagttctgtataaggttatataatagatcacttccaactagaaacgcgaaacttgccccgcttgaagcacgcactgaatgtataggaaggctcggctctgtatgctttctgggttacgtcccaaattgcgtcgcttactgctaggaagcaagtccttaatctctccccacacctccgggctcgaggccctctgtggttctggttgtctgtatgcatgtctgctctgtccgtcggtcctgctcctcactccgagtactgtatgtaaacctccgaagatccggagttatacaagtaccccag

SEQ ID NO: 94771 - DNA, 425 bp, Glycine max
tcactggcagtgccagggaggcccggcaggggggttgcggatacgcaacagcgaaataaccgaccaacaaggtaacgaaggctgggttacgtagtgcagcccaactagaagtatagcgtaacattgcgattgtgagtgttgcgaaagacaactttgcggaggcagaggcaggtagtattaacggttgtacacaagcgagtaataacattgccggatggtaaactacacaagctgcactaccatatgcctcaggtaacaacgcggcggcgtacgaaccagcccccgcacagtacatggccccaagggtggtctgaagctgcagcttaatgagtgacccacacagaaaacgccaccaaatgattagtttaataaggtgcatattaatagacggcagcggcagcttagccagagcgtacaaacgagct

SEQ ID NO: 94772 - DNA, 103 bp, Glycine max
catccttaatcaatctgtttctagagatcactttgaacacaatggttaatagtcactctttggcaccacatgattgactaatgggggcaccctcacacccgaa

SEQ ID NO: 94773 - DNA, 506 bp, Glycine max
cccactagactgtagtggcactacggctgaaagggatgccagcggagtaggcagacgctgccaactaacgtgacggtagcgtagaaagtgtacagagtgatgcacctacgacgcccgttataaagggtgctaagccaccgacagcgcaagaggcaggtacggatagtggtgctgtggcatctagtgttgtagcgttagcaagttgttaaatttatattgtttacgaagaaccaagctttcctgtactaacgaggcgcgcagtgcttctacctgcaatggtactgttgtgctgtatgctggctgtaacaaccgggcgttcagaagctagagccgtggcggctccaccgaagcaaaaaatgccgccgtaggctgttaaggtatgcgtactgggggcgtatgtagtgcctacaactacggtcaaatggcatggtagtgctaagccagcacggatctatgcggacgcaactaagcaaactgtggagtacgataatagtggtgcagcctct

SEQ ID NO: 94774 - DNA, 469 bp, Glycine max
tttgccaacataaacacaatgcccggggataggtgtaggtttacgcacctaaatagtcaggctagtgcccatgtgaagaaacgccatgaaaccgggtaagaggcaacagctccggccgcaacagcgccgcccacaatgaattaacgttagccaaaaaaggccttgccagagctctcggctgctgtgacggaagcagattaggccaataggactgccacctacaggtgataagtaccagcgtaggctgctgcgcaggtggccgatgcccataaagctactagagcgacaatcactatagctgaggttaaaagcctagccctggagattaaaagtaccacagagccggagaaatagccacgccccgaagggttcagtagcatagtggttgtgaatacaagagcagtgactgtgccagctgtacactggaaatttgccacaatacagggggcacaaaggcagggtgcctagc

SEQ ID NO: 94775 - DNA, 390 bp, Glycine max
tgggggggggggggggaaactataaaaagtaaggtagggcaaagagggaacagtgctgctcgtgaaaatgacgggtaagggaacgagcgatagcaacaaaacgccattaggacaacaaataagtatacgttaagcgagagaattgatattagggtactgtgcattatgagaagggccatacagggtgcaggggagggaagaggtaataacctatggcaatattatgcagggtagacgcattaattcgccaaagtcatacaacacaatggcttaataggcgttctgatgcattacacggttttaagacttcggtaatgctcctagcaataggattgcaacgcctaagaaccctgtgaagcggtgtggcgcaagtaaacaagtttagtgtgg

SEQ ID NO: 94776 - DNA, 414 bp, Glycine max
  unsure (1)..(414): unsure at all n locations
cggtgtttgttaaaacaaggaaccgataacaaataggttaggggatgtttagtgggtgggttgactaggaatgataacaatagtgatgggcctagtggtacagatagcgcaaagggcctaccgaagccagagcggcggcagaggagcgcggtgtggccggctaggcttaaattgcctgcgacgacacacgtctaccctgttgcggtgccatgatgggcacgaggcgctgagcactgctacactggatacgcttgtaggccaacaagggccaccccggccgcagccaataatgggcaatataaaactggggtacctacttagacagtagtgcacgtacgagctagtaacgccgccggtgcaatgngagcggtttttaccaaaagccggaatgcctacgggtaagtgtattactta

SEQ ID NO: 94777 - DNA, 517 bp, Glycine max
  unsure (1)..(517): unsure at all n locations
ccaaagagtagcaagttaaggagggtgctgctggtgcggaggctgctgcccggccttcgaccctggctggtgaggccattgccccggccgtaacctatgctgctaccctaactgcgacaacccaggctatcataattccacctacacccaaaaagatcaccgatgggaggctggacgggcctggggagccaactgggaataagggagccatgccggcgactaggactatggggagggctgaagttggggcgggaagttgaaaaaaagacaaagatagagttggggggttcgccatggctgggattccgtggctgggggtcaaggtgagggagaggaagagggtatgttgagaaggtgggagttcggtccataacaatataccccaaccatgaaggcaaaccgcaacaaggtatagatgcaggtctttgtgggtggtgtggggggacgttaagcatttttttggggggggaacagaaggnggtgtacgcggaaaatggcacacaggggctaagccaga

SEQ ID NO: 94778 - DNA, 286 bp, Glycine max
ggggggggggggggggggggtgaggggtaggtcaaggtaggggagggagagaggaagaggagaggtaaagcaaagaaaaacagaggaaaacagatgaaggagaacaagggcaaacgcaaaggagaaacggaggaaagcaggaagtaagggggggtgattgcggttgcgacgaaaaacacggttagtgcggtggcaagactggttggtaaaaccatggtgctggttttacgcaagcgtggccgacaacagagcagtgtgggcaaggcaccgggaggtcgcgggaacg
